United States Patent Application Publication US 2004/0034888 A1 - sequence listing, part 8

SEQ ID NO: 17425 - DNA, 1365 bp, Zea mays
  Clone ID: LIB3069-025-G3_FLI
atgcgcgcctctctccctcccaacaaccaggccacaagcgcccgagcggcttaaaccctagctcgccgtcgtgctcggctcgccaccccgcgccagctcctttcaggccctaaccgttcgccgccgcgcattcgagcactcgcggaagcgcacctagtgccatggcgaagaagcggaagcgcaccgacgcccccgcagaggcgaccggcgcagagaagcctgacgactctgcgccggcgcgcccggagcgcacgctcttcggcttcaaggacccggtccccgacgccgagcccgcctccgcgggcgccgaggccgcggtggcgccgttccggaacagggagaaggtactcatcacctgctcccgccgaatcacgtataggtgagtgctccctgttttttccgcttgcagtcttgtgagatgggtgattccgttcacgcgtgcgtgctcggcgtaggtatcggcacctgatgcaggacgtgctgtcgctgctcccgcatgcgaagaaggacagcaaggtcgagtcgaagcagagcaaggggaacgcgctgaacgagctccttgagctcaggagctgctccagctgtcttttcttcgagtgcagaaaacagaaggatctttacctttggatggtgaagtctcctggaggaccatcagtaaaatttctagttaatgctgttcacaccatggaggagttgaagcttaccggtaaccatctgaaagggtcacgcccacttcttacattttctacaaattttgatgagcaacctcattggaagcttgtgaaggaaatgataactcagatatttgctagtcctaaagatcaccgtaaagcaaaacctttccatgaccatgtgtttgtcttctccattgtggatggccatgtttggtttcgaaactaccagatttcggttccccacaatgagattgataaagttgataaaggtggtctggataaaatgacacttattgaggttggccccaggttctgtttgaatccaatcaagatatttggtggtagttttggtggtcctacatggtatgagaacccatactacatttcccccaatcagatccgtgcactagagaagaggcagaaggcaggcaaatatgccaagaaggtgaaggccaaggtgaggcggaagatgcacgagatggagaacacgctggagcctgatgagtttgctgagctctggaaaggggagtaactggtctttgatcgaccctgtcaaagtcgtgaagcaccagcaactccttccaccaagcgcggattttgtttaccagtgtggcagtgcccactgtcgaggttgtggaagttttgtatcacaaagcatacttttatttatataaaatcggattttagtgat

SEQ ID NO: 17426 - DNA, 1514 bp, Zea mays
  Clone ID: LIB3069-025-G6_FLI
gtcgacccacgcttccgctctcggaggtcattctggatttctggtaacctacagaaggattaaacagctattttattggaaagggatgaagaaagatatccatgcctatgtccagacatgcaatatctgccaacaggccaaaccggacaggaccagctatcccgggctgctcgcgcctctacctgttcccccgcatgcatggcattctatatcaatggacttcattgaagggttaccgaagtccggaacaatggattgcattctggtggtggtagatcgattctcaaaatatggtcatttcttggcgctggcccaccctttttctgcagcaaaggtagcaaaacttttcttggataatatctataagcttcatggtatgccggacaatatagtatctgatcgggatagagtgttcacaagtctgttctggcagcaattattcactctcagtggcacccaattatgcatgagttcggcttatcacccacaatccgatggccagacggagcgcgtaaactagtgcattgaaacttatttgcgatgctttgtgcacgcctgtcccagcaaatggtaccaatggttagctgttgcagagttctggtataataccaactttcattcagctctgaattgttctccatttgaggtgttatatggacagccccctcggcacttcggcttgcaaccagggagtgcagtgactgtttcagatctgtctacttggcttcacgatcgtgaggtggtatccaagttggttcagcaacatctgttacgtgcccaggaccgcatgaaacgtcaggcggataaacgacgttctgaacggatttttagcgtcggcgatcaggtgtacctgaagttacaaccgtacgtacaatcatcagtcacaactcgggccaatcaaaagcttgcttttcggttcttcggcccctacaaaattttacagcgcatcggcccagttgcttacaagcttcagttgcccgcttcctctcagattcaccccatttttcatgtatctcaactcaagtcggctgtcaaccgtccacagcacatcgttccattactacctgagactaatgattcacttcaggtgcccatacaggttcttcaacgtcgattaatccggcgtggtggttctatggtgactcaagtcaaagttgcatggtctggaatggacaccgcaatggctacgtgggaagatgttgatgcactgaaggcgcgttttccttatgcaccggcttgggggcaagccgcgtttcaagaccgggggaatgtcagctctgctgtaccggaagacacaagaaccatggccaagaaggatctgacggcgaagacagaaggaggcgatgtctcagctcggcctcgacgtatcaagcgcggcagcgtccgagtaactgggccggaatgggccaattgatggctggctgggccggtctgtaatatgggatataggcatatgctggaaccgtgaacagacatcgaaaatctgagaacaaacagagaaacatttcgtcgct

SEQ ID NO: 17427 - DNA, 1501 bp, Zea mays
  Clone ID: LIB3069-026-C7_FLI
cgacgagctccggcggtaccggagggtgcaggcgctgctcaagaggctcaacaagccggcgctgcggagcatccaggcacagccccgacggcgacctcatcgactgcgtgccggcgcacctgcagccggccttcgaccacccgaggctgcgaggccagaggccactggcgggcccgccgccggcgaggcccaaggggaaccgcctccgcgacccgataaggaatgacaccgcggaggccgccggcgtccagcagctgtgggcggcgtccggggagtcgtgcccggaagggtccgtgcccatcaggcgtgtcacggagtcggacgtgctccgcgccagctccgtcaggcggttcgggagggcgcccgcgggcagggtgcggcgcgactccgtctccggcggccacgagcacgcggtggggtacgtggccggcgacgagtactacggcgcgaaggcgagcatcaacgtgtgggcgccgcaggtgagcacggcgtcggagttcagcctgtcgcagatctgggtcatcgccggctccttcggcaacgacctcaacaccatcgaggccggctggcaggtcagcccggagctgtacggggacaacgcgccgaggttcttcacctactggacgacggacgcttaccagaccaccggatgctacaacctcctctgctccggcttcatccagaccaacagccgcatcgccatgggcgccgccatctcgcccacctccgcctacaacgccggccagttcgacatcagcctgctcgtctggaaggacccgaaccacggcaactggtggctggagttcggctccggcgagctggtggggtactggccgtcgctgctgttcagccacctggcgtcgcacgcgagcatggtgcagttcggcggcgaggtggtgaacacgcgcgcgtcggggtcgcacacggccacgcagatgggcagcggccacttcgccggggaaggcttcggccgggcctcctacttccggaacctggaggtggtggactgggacaacagcctggtgccgctcgccgccggcttccacgtcaccgccgaccaccccagctgctacgacatccagggcggcgtcaacgccgtctgggggaactacttctactacggcgggccgggcaggaacgtcaggtgcacctagctctagctagcagctatagctcttcgtcatatagtctcggcccgttacctgatgtgatgatgccgctaggattttcttttctttatcaatgcccacaaaaaaggtttattaatttctcaaaagcgagagtcatggatcatgtagttttcttttcttttttgatttcctattttcttggtggtctgaacgaaacaaaagggtgaagggttaagctcagttcaaacgtagtccagttcatcaggtagcgacgatgatggtcgtcgtcgagttgtaacgtacgtacgtaaaagccccctgaacaatgtagccacaagctagcagagtatatacacgcattgtttactctt

SEQ ID NO: 17428 - DNA, 1421 bp, Zea mays
  Clone ID: LIB3069-026-D6_FLI
cccgagaccatcgacgagcatcttcctgcatctgcaatggctgccgctaccgtgtccgtcccccgcatcaagctgggctcccaggggctagaggtctccgcgcagggcctcggctgcatgggcatgtccgccttctacggtccgcccaagcccgagcctgacatgatcaagctcatccaccacgccgtcgccgccggggtcaccctccttgacacctccgacatgtacggcccgcacaccaacgagatcctgctaggcaaggcgcttcaaggcggtgtaagggagaaggtcgagctggccaccaagtttgccgtctccttcgccgacggcaagcgcgagatccgcggtgacccggcgtatgtacgggcagcctgcgaggccagcctcaagcggctcggcatcgactgcatcgacctctactaccagcaccgcatcgacaagaaggtgcccatcgaggtcacgattggtgaactcaagaagctagtggaagaaggaaaggttaagtacattgggttatccgaagcatctgcatcaacaatccgaagagctcacgcagtccatcctatcactgcagtacagcttgaatggtcattatggtctagagatgtggaagaagatataattcccacttgcagagaacttggaattggaattgtagcttacagtccactaggcagagggtttttttgtagtggagcaaaactagttgactcactgtcagagcaggacttccgcaagcatatgcctagacttcaaccagagaatattgtcaagaatgctaagatattcgagcatgtgaatgcaatggcagctaaaaaaggatgcacaccatcacagctagcattggcatgggttcaccatcagggaaacgatgtttgccccatacctggaacaacaaaaatcgagaacttcaaccagaacgtgggggcgctttctgtgaagttgacaccagatgagatggccgaactcgagtcctgtgctgctgcaggtgaaatcttgggtgaccgttatcctcaaatggccaacacctggaaggactctgagaccccgccattgtcttcttggaaatctgagtagccaatctggtgtctcttcaattctgccaccgtcacattggtgtatctccaaattgtcggactgcagaagatactcaggtgcactttgcaaaagcgtccatatgatgtgcttgccttttgcaagctatgatgtttggtacttggtgtgtattgcatgcctcaatttgtatcaagagtatttacccatgagtatagcttgaaggttaaaaccactggttcgacgaataaccatgtgcatttgtatcgagagtatttaccatgagtagcaaactgaattttgtaataatagtcaaaagtgtgattgtaaaatgtacttagggaatgtggtacgctatattagcgtgc

SEQ ID NO: 17429 - DNA, 1312 bp, Zea mays
  Clone ID: LIB3069-026-F10_FLI
aaggaattggccttaaaccttgaagttggtcctattagcatgaccaagtggcagttgtttttacagattgagcagtccttccaggttcatcgtagttatggaagtatgcttgaaggcgaggctgatgaactcaagagggttttccttgaaggaaatccttatcttcttggattgaccatgattgtttctctattacactctctgtttgatttcctggccttcaaaaatgatattcagttctggaacaagaacaagtccatggaaggtctatcggcaaaatctgtggttctgaattttgtgtgtcaactaattgttttcctgtaccttcttgacaatgacacttcatggatgatccttgctagctctggaattggtgtttgcattgagttttggaagatcggaaaggcgatgcatattgaagtcgatagaagtggaaaaattcccatgttgaggttccgagatcgtgaatcatatgcacagaataagaccaaagagtacgatgctattgcaatgaagtacctcacctatgtcctcttcctccttgtgatcggtttctctatctattcactaaagtatgaaaagcacaagagctggtactcatggatactttcttctatgacaagttgtgtgtacatgtttggtttcatcatgatgtgcccccaattatttatcaactacaagctgaagtctgttgctcatatgccatggagacaaatgacctacaagttcctcaacactataattgatgacctttttgcattcgtcattaaaatgccaatgcttcatcgtctctcggttttcagagatgatgttatcttcttgatatacgtctaccagaggtggaaatatccggtcgacaagaagcgtgtcaacgagtttggcttcggaggcgaggaggaacccgcagcccaggagactttggaaggaagtgatccagcagctgcagcagcagcagccgagccaacggaggacaagaaaaccaagtgatctccaatcgttcgatcatccaaatgtagcacgccactcagcagcacctgccctcccacagcggttgtgaaatttttcgctgaactggatgctggactcttgcggtcttgccttactgagacactgacgataagataagttgtgtgtgtaacagcctaacaggggatacaatagtgctgcctagggcagcgggcgaacaggcacactatcgctattacgtttctagcagccattactaggcgatatgcttgtttatattgttttttttgtacaattttgtgcatcatttttcaaaatacataacggcgattcttagcttcctaat

SEQ ID NO: 17430 - DNA, 625 bp, Zea mays
  Clone ID: LIB3069-026-G11_FLI
ctctgtgttggtgtcaagatctatagagcaggcatttctatgggcagtgcatcaggactcgaaggaagcatagcatcatcggtttttgtgtttcattaattctcatttcaagatggcatctgctggcctaaagccaggggtgcctgttattctacgggagctggagccatcctcagagatgttcaagcaaggagcgtcccttcgagtcacaggaagtctccagtcattcgatgtggagtccgcgactgccaccattcaagacggcagcgtaagtctgaaggttgacacccagcatctgagggatgtcagtttccgcacgaactcggtgtaccaattcattggtgaacttcagatccgtgaagttgatgatgcgattctactcgcgcgcatcggaaggaacgtcgatggcctcgacatgaacctttaccagcaggctctactcatccgacggcagcacgaagcaaagctgctgagctccaggagagcatgatctgcttgctatcttggagcaggaggcgcatggtggttgtagttattaggtttctttgtttctcaacagtgcaattgcatatgtaaacgtgaagagaactggaccaagaactggttaattgagagggtctgctgc

SEQ ID NO: 17431 - DNA, 480 bp, Zea mays
  Clone ID: LIB3069-026-G12_FLI
cttcctggaaggcggcgagggcttcgacaccgacatcaccggcacccgcgcgctgcgcatgatgcccttcggcgccggccgccgcatctgccccgccgccacgctcggcgtgctccacatccagctcatgctcgccaacatggtgcgcgagttccgctggctgccgcccgccggtgagggcccgccggaccccaccgagaccttcgcattcaccgtcgtcatgaagaacccgctccgggcagccttcgtcgagcgggccacgacggagacggcgacaaccgcgtgacgagtgacgacggaaagtaaaaaaaaagggagagagagagaagttactagtacaagttactctttcactgggctctggctgggtgggtaagttgctgcaacgtgcgtgtcgtgcggggttaattcggtcccgcactctgcggtataaattacagttattaattaattagtccacggggaaggtgcgtgatcatc

SEQ ID NO: 17432 - DNA, 640 bp, Zea mays
  Clone ID: LIB3069-027-A11_FLI
gaccagaggaggagacgtcacgcctgcgcggctgcgcccaccatggacgaggatgagtttcggcgcatgctcgacctcttcccggtcgtccgctcccgagactactgctgctccgatcctggaacatccaacagaggaaccagacagctatcacgagttcaggaggcaactaagggcgataataaggactcgtccggtgcacaagatatgtttatgcagaaattgaagatggctgcggagaataagattggagcgacaaaggcagagttcttctgcaagacattcgaagaagttcatgagaaacttgttcacagagagctgaatttggatgctgctaagaagttcctgagcgcatatgagagctgatgatgaacaataggtagatgctgcttaagggtcggtagttgccaatgatctggaaatttgttgatgctgttgagattttgatcacaggcaaacttttaacaacaggtagatgctgttgagcgcatactgataccgcctgattggttcaccgatctcccgtagccagctcgtatgcagccaggctgtccggttatttgggccgtacaagtggatgcacccaaataacttatgttacgtttactcgtgcagccccacgtcgtgcatgcaattaaac

SEQ ID NO: 17433 - DNA, 261 bp, Zea mays
  Clone ID: LIB3069-027-D9_FLI
ccaagtggttgaaacagttcaacgccgcgaagaagcccagcaagaagattcttacgccagcttagaaatcgggggcctcatgatgtgggtgcagcccataaaaaactggtgtgtggtttggaaccgaaaattttctgtttttttccgccacgagaggttctggaggcatactctccagcaccgtggctaataacgcattgttccaattcagtctggccttgtcatgcatgcaataaataaagtgatgggtttccctgtttc

SEQ ID NO: 17434 - DNA, 970 bp, Zea mays
  Clone ID: LIB3069-027-E10_FLI
gattttagccgccgccgctgctcatctcacatccctcgagaagacgcctgctcctcgccgatcgatacgatggccgtcttctccgacctccacaccgccgacggcctcaagtccctcgaggctcacctcgccggcaaaacctatgtgtctggtgactccattactaaggatgacattaaggtcttcgccgcggtgccgtcgaagcctggcgctgagtttcctaatgccgcccgctggtacgagaccgtctctgcggctgtagcctcaagattccctggtaaggctgttggtgtaaatctgcctgcgggatcagctcctgcggcagctgctcctgcggatgaggctgaggatgatgatgaccttgatctttttggtgatgaaactgaggaggacaagaaggcagctgatgagcgtgccgccgctgccaaggcctcttctaaaaagaaagaaagtggtaaatcctccgtccttatggatgtcaaaccatgggacgatgagactgatatgaagaagctggaggaggctgtccgcagtgtccagatggagggtctgacttggggagcatcaaagcttgtgcctgttggatacggcatcaagaagatgactatcatgttgacaattgtcgacgatcttgtgtccatcgacactctaattgaggaccaccttacgcaagagcccatcaatgagtacgtccagagttgcgacattgtggctttcaacaagatctagagttcagtttctgagattgggcaacggcagcggctcagctcgtcaagtttgtgctgggatgccagtttatcccttctagtctattacagaaatgttgttcggagctgagtctattataaacatcttggtctgagtttattgttgagtggtgccagtttttttcaatatacatttatcttaaaaacagcggtactgatgtttttttgtctaaagttaatgagtttgcaatggttctgagtct

SEQ ID NO: 17435 - DNA, 900 bp, Zea mays
  Clone ID: LIB3069-027-E12_FLI
tctactaatccagcccatttcgaactctctctagacgcttcctcggtctctctgttcaccgctgccccgtaccgtactcctcttcgcgccgtagaaatggcgctgccgaatcagcagggcgtggattaccccagcttcaagctcgtcatcgttggcgacggtggaactggtaaaaccacatttgtgaaaaggcatcttactggcgagtttgagaagaaatatgagcccaccattggtgttgaagttcaccctctggattttagcactaactgtggcaaaattcgcttttattgctgggacactgctgggcaagaaaagttcggtggccttagggatggctactacattcatggtcagtgtgccatcattatgtttgatgtcacttctaggctgacatacaagaatgttccgacatggcacagggacctgtgcagggtctgtgagaacatccccattgttctttgtggtaacaaggttgatgtcaagaacaggcaagtcaaggccaagcaagttacattccaccggaagaagaacttgcagtactatgagatttctgccaagagcaattacaactttgagaagcccttcctttacctcgctaggaagctggcaggggatcagaaccttcactttgttgaagctgttgctctgaagccaccagaagtgcagattgatatggccctgcagcagcagcatgaagctgagcttgcagctgccgctgcgcagcccctccccgatgacgatgatgacctgatcgaatagatatgttatacatggcccttgttgatgactcttgttaaaaatctgtggtggttcaatccttgttagagttaggcagtacctgaatgttctcttgatgtattcgaagagttgagaaggaagttaatgacatcattatcc

SEQ ID NO: 17436 - DNA, 1902 bp, Zea mays
  Clone ID: LIB3069-028-A10_FLI
gacgatagagaaggagctcaaccggcgggcggcggagacggcgagcaagcagcagctggagggcatcaggaaggtggccaagctccaagctgagtgcaggaggctgcaggccgcggcacaacggagggcgtcctccgtgaacgtcgagctccggcgttctccgagctcggcctgcgtcgagtcgctcacggattgccagtcggactgctccgactcatgggcctcggccctcgtcacggagctcgaccagttcaagaaggacaagagcggcgcgagcaccaggacagcgagcctcgtggccgcggacatcgacgtgatggacgacttcctcgagatggagaagctcgcctccgcgaacggctcgtcgaaaggcgacgccgtcgaggacgcgagcgggcaggtggagaaggcgctgcacgaggctcagcgcgagctgaggacttgccgccgccgggtaatggtggcagaggagagatcagctgagctacagcggcagctgaaccatgccaatggcgacaaacacgccatggaggcggaggcggaagctgctgaggcgaagggaagggagcttgagggcaagctcgagctcgcccgtgccgatatcgcgggcttgctggacaaggggcgcatcctggaggaacggctcgagtctgagaaggcgctgacacttgagctcgcagccaagtaccaggacatggagacgctggaggcagagaagagggagctgaacgctcagctggagacgtcacggtccgaagccaagaagctcagcgacaagatcgccctgatggagaggaagctggaggtggagaaggccctgtcgatccgactggcgacgaaatgccatggcgttgatgctctggaagcaaagaagaagggcgtcgagctcgagctggagtcggcacgcgaggaaatcgcttccctgcgaaacaaggctagtagcttggaactgcaagtcatggaagagaaagcgtcgtccgctggactcgcaatgcggtgccaagaactggaggagcttagatcccagcttgtgtcttcaaactcacggatcgttgagctgaacgagaaggttaaaacgctcgaggatgtgatcgagaaacagaggccagtgacggcggaattggagtctcagctccagtcgagacacgacgaaatcagcagcttgaaggaggacataagcctgttgcagaagaagctggagtcccagaagaacctgtcgtcagcttacatatctgcgctgggcgcttctgaaaccgagaagaaagaactggctacccggtttgaactcggagagaaagaggccgaggaattgcgcgggaagacgagtttgctggaggaacagatccacgaagagagggcacggtcatctgagtttgcggtaaaatgtcggaagatggaggaacagttctcccgcagatctcttcttggccaccaaccagtgaaatcttcggcgatcaaagatattcagataagaaaggagacagagctggccaaggctgccgggaaactggccgactgccagaagacgatagcttcactgagcagccagctgaaatcgttggccgatttcgacgagttcctccctgaaaccgagactagtggcgccgactcagccgacgcctgggacggcgacctgaagctgctccaccctgcaagctatcccacgcagattggctgtttggcagtcacatgagtcacgatcctcgttggcaggtgggcggagaaactgtttttgttcgggttccaccgcatgattgctgtggtgagattgccatgatcttccaccacatgccatatagagttaagtttataatagtctataggtgagaaaatgttcatatgaaagctgtttatagagttggttggtgaagcttcaaaggaactcataaactttgatctccc

SEQ ID NO: 17437 - DNA, 859 bp, Zea mays
  Clone ID: LIB3069-028-B2_FLI
gagcttcttcttcttggccttctctgcttcgctgttcttgttcttgagatcgcgctttctgaccggggagtgccgtgccggagatcctgaaaagagacacacaccacacaccacggttgcgcgcgagaagtccgagacatggacagggagcagatgaggatggccatcctgaaccaagaacggatcttcagacaacaggtacacgagctgcaccggctgtaccacgcccagaagcagctgatgacgcagcaggcgcagacggttcctgctccggcggtcgtcgacgccgagccgagaccgagaccgacgcagctggatatctggtgcggcgagagggcgacagcaagtcctcagcagcacatcatcagcttccacgaggccgcagcacctgcggctgcgctggccaaggaatgcaaccttgagctgacactggcgaccggccggccaagcagcagcagctgctgcgacgcggaaaggcgacagggaataataaagcggctcaaggcgccgtccaactcggactccggcgcgaccgcggtgtcgtccacgtcgaccgactccgagctggcgccgttccgggaggtggtggaggacgtggcgacgccggtgaggtttcgcggcgaggttagcgggaggaggaggatggacgaggtggggcagggtccgtggttgtaccagcagtgcctcagcctgaggacggcgtgatgatgctgtacagatctacgtcgtaggatctggggttagagttgagagggagacaacactgtttgtgtttttacatgcacaactgtacatcacataggtgtttcacaaggcaaagaagagattaaaaaagtgttaatttctggcaccaactggt

SEQ ID NO: 17438 - DNA, 1164 bp, Zea mays
  Clone ID: LIB3069-028-C6_FLI
caaaggtcattggtgaagttcaggcactgatagcttttccacttttgccgtgcctgatcctttctatcttgtatatgttctggttttctgctacactccatctcttcagctctggtcaagttgtccgaaatgattgcaatactgattgttgttcatatgatctgaagctgggaaaagtaaattgtgacaactgctgtgggtacagcatccattacacccctcatatcagcattgccattctatttcacttatttggttgctactgggcgactcaattcattctcgcatgctcttcaactgtggttgcgggatcagttgcttcatactactgggcgcgtggtgaaatatcacatgatataccatttctcactgtagtctcttcactgaagcgactgatgcgctacagccttggatctgttgctctgggttcacttgttgtatctgttgttgaatgggtgcggtttatactagaatgccttcgtcgcaagttgaagctagttgattctgcccgagagagctgctttggaaaagcgacgtcctcctcttctgaatgctgcctgggttgcatagactggaccctcaagtcagtaaatcgaaatgcctacattatgattgccatcaccgggaaaggtttcttcaaagcttcagtgctcgcaactggattaataatgaagaacattctgcgcatcggaaaagtcaacgtcattggagatgtcatcctcttcctgggaaaactctgtgtgagcctattctgtgcgcttttcgcctttctgatgttagacacccacaagtacaagtccgcacacaacaagatatcctctccagttatccctgtcctggtaacatgggccctcggctacgtagtcgcgaagcttttctttgcggtggttgagatgtcgatcgacaccataatcctctcgttctgccaggacgccgaggagcaccaggggaacgcgcagtatgcgcccccagctctgatggaaactctggacgaacagggcgaactgcagagactaactcaagggccttgactgtcttttcctcttggtagtagcatggaaacttagcggcagcctaatgttttgttaccccgttccgttctcttggcttgtgaagaggtttgccatttttgcttgctattccatgtacaagtctgaatctgac

SEQ ID NO: 17439 - DNA, 1771 bp, Zea mays
  Clone ID: LIB3069-028-D6_FLI
gaaaactgctggtaaccctaacataggcaaggatgctcctgcaccatcagcaggatcaggtggtagcaatgacagtctatcggggggaggcagcagcggaagcattggtaacaatgggggttcctctccgtcttctgctggagtcattgtaggctcagtggttggtacagtcgttggactaggccttgttgctgcattgggattttattgttacaagaggaaacagaagcctttcggaagggtgcagagtccacatgccatggttatccatccgcgacactcaggttcagatgacatggttaaaatcacagttgcagggggaaatgctaacgatggtgctcgcgcaagcgagacatatagccaagcgagcaatggtccacgggacatccatgttgttgaaagtggaaatatggtcatttcaatccaagttctccgcaatgtgaccaacaacttcagtgaggagaacatccttggtcgaggagggtttggcactgtttacaagggtgagcttcatgacggcacgaaaattgctgtaaagcggatggaggctggtgttatgggtaacaaggggctaaatgagtttaaatcagagattgctgttttgaccaaggtccgacaccgcaatcttgtttcactgctgggctactgccttgatggcaatgagaggattctagtgtatgagtacatgccacagggggcactgagccaacacctgtttgagtggtctgagaaaaatttgcgaccattggaatggaaaaaacggcttagcattgcacttgatgttgcaagaggcgtcgagtaccttcacagccttgcccagcagacctttatccacagagacttgaagccatcaaacatacttcttggtgatgacatgaaggccaaggtggcggactttggattggtccggcttgcaccagctgatgggaagtgtgtctccgtagagacaagacttgctggcacttttgggtaccttgcaccagagtatgcagtcactggacgagtgaccacaaaagctgatgtcttcagctttggtgtcatcttgatggaactgattacaggacgcaaggcacttgatgagactcagcccgaggatagcatgcatttagttacatggttccggaggatgcagctcaacaaggaaacattccgcaaagcaatcgaccctgtcattgacctcgacgaggaaacctacgctagtgttagtaccgtctcagagcttgctggccactgctgcgctagggaagcacaccagaggcctgacatgggccatgctgtcaatgtgctctctaccctttcggaagtttggaagccagccgatccggactcggatgacagctacggtatcgaccttaacatgtccctgcctcaggctctgaagagatggcaggcattcgaggacagcagccactttgacggtgcgacctcttcgtttgttgcgagcctggataacacgcagaccagcatccctacgaggcctcctggattcgcggactccttcacctctgccgacggaagataaagacatttagctgctgctagtaagggtgtgctaaaaaccttatgcttccgttgaaatagaagctcgggcgatccttgttcattcttttagtctcttcacccccccaccaatctttccatgtctctttattcgtctctgtactgccgtgtagcggctctttggtcgtgtatgctgtgatcttgtcccgaaaattgcctggaagttcgaaaactttgctaactggtttatgtcatttgctaagattaaagt

SEQ ID NO: 17440 - DNA, 1775 bp, Zea mays
  Clone ID: LIB3069-028-D8_FLI
gcgagcccgcagtctgccatcccctttcggtggcaaccaaatccggcttgcctgcagcggatctccatctggtcggagtggatcgggtctccggtggtgtttctcgcctccgtggcggttagtggcgccggacggaccacgtccccgcagcagcggtcagcggcggctggcctagctgcggtggcttgaggcggctctcggacgggtgcctcgagctggcaccagcgggtgggtgccgcaactctcaccgctagctggtgtagaggcggcgagtcccggcgccatggagggtaggccgcaagtgtccgcttagagaggggtcaacaaagggacttgtcaagctacgacactgcggtcttcggttgccctgctcagcttgtgttgccgtacatgatccttcatgatttgtgagagatctatattccccgaatcttcaccggctctgccagatcactggcgatcttcttgccagccgcctccgctaacctgcgcggcacagtagagctcaggaaaagcggtgggactgagggagaaaagaggagatgactagcctgtcgatcacagtgatgacgctgaacttgcatgaaggcgagcagccgagcgagagtcccaacagctgggagaagcgccgggacatctgcgtcagcgtcatcaccagctactctcctaccatcctttgcacccaacaaggcttaagatggcaactggactacctacaacagtgcttgccaggttatgaacagtttggaatctcaagaaaaggctcacaggacaacactgatgaatactgcacaatattctatgaaaaggaaaaggtggagcttactgaaggtggcactttttggttgtcggaatcaccatctgttccaggaagcatttcatggggagcaaatgcaccctgcattgcaacatgggcaacgtttcaactcaaaagattagaaccacctggattcagttttcagatcgtaaatacaaatcttgatgaagttagccctcgtgctcgacgaagaagtgctttgcttacatggcaacatatagcatcgctggcccccaatttgcctgttatctattgtggaggcttcaatacacagaaggaatctatgactgggcggtttttgcttggcagatccagagaacatggtgttgttggtgatatgagagatgcttggccaaatgctcgagtgcgaaaaaatgtgtcaataatacacacatatcatggatttaaaggggagaaaaaaggtgccctagaatttcttaaattaatatttagagctctttgcctctgctgggatcgacagacacaggacttgcatgttgactggatcctatttagaggacgcccactggttcctgcactttgtgaggtcataaatgacaatatagatggcgtttatccgtcgtcgcacttccctatctttgctgagtttttgcttccacgctcagttcgcctagccgagacaccttcatagccatcgtgtcattttttttatattttttcccaatctcattctgattacggctgattgttcctttcgacgacttcaccatgaaattggggtaccacccttcaccacaattgctggtcacttcattccgcaaaacaagacaatatacacgtgcatcctttttatatatgtttccagtcagtagtcactattatgtgttgcctcagccttgctatctttttaaagttcaccttttccatatggcgttgattttcatgtatatatactgtacctttacatgctatttatcacaactgtgagagttcaagt

SEQ ID NO: 17441 - DNA, 2322 bp, Zea mays
  Clone ID: LIB3069-028-E5_FLI
gcaatatggggacgtacagacattcgacacatcctgcaagagccatggaattgttacagtgtcttactatgacattagagctgcacaggacgcagtgagagcagtccataacaaacctctggggctgatgaaacttgatgttcaattttcccttcctaaggaaaatgttccaaacaaagatcccaacaatggaacactggtggtatctcttattgactcttccatctccagccatgatcttctccaaaaatttagtgtttatggcgatgtcaaggagatttacaagtctcctacaagctgcaataagaaatttgtagaattctatgatatcagagcagcacaagaagcactgaatgacctcaacaagggtgaaatatcatgctcacaaatcaaagttgagcatagcttttctggaggagcaggatcttgcttcgcagagcaatattcaggagaacagaagcaaaatgccgtagctcaccaacttaagaactctccacctgggaccattgggaagttagatactaagagttgggacagcagcactgttcataatttatattctccagttagaccgcaacacgataaatcacaacatggcttctctgtgaatcctcctcagaagttgtcatcgcctatcagaattgaatctacacagcagcatagtaatcaaactgcttttggtgaacatagtggatctcttggtcatggcaactttggaggtgggctgcaagccttccacccgcactcactgccagagtgtcacaatggtatttgcaatggctataactccatgacattaaatgcaaggaattctaacttcagatttactgaaggaatagactacaataatcacaaagttgaccacagtgaccttcatggtcattcctctgatcaaaatgaagcaattagagttgctggaattggaagttgcccccttcatggacatcactatacctggagtaactcaaatggttttcctcaaagcccctctgctccaatgatgtggcctaactttcagcaaccagtgcatatgcattgctaccctgctatgcctcctcacatccggcgcagtgctgcccatcctatggaccaacatcacttgggttcagctccaaacagtgttggtggttttgcaaatgcacactcttttcatccaggatcccttgaaagcgtagggtttcctggcagccctcagctgtatccatcagatctctctgtatttgcatctgccagaggaaattacagggagaccatgttctctgccataagtgccgggtttccatcaattcagcaaattcttcatgcgaccaacggaaggaatcctatgatgcacgtctccacctcatatgacgccactaatgatcgcataaggagccgcaggcatgatggaaatgctgcccagtctgaaaacaagaagcagtttgagctggaccttgaccgcatagctaagggtgaagactcgcgcaccacactgatgataaaaaacattcctaacaagtacaccagtaagctgcttttggctgtcattgatgagaatcaccgaggaacttatgatttcatctaccttccaattgattttaagaataaatgtaacgtgggatatgcattcatcaatatgacggatccacagcagatagttccattttacaagacattcaacggcaagaaatgggagaagttcaatagtgagaaagtggcatcacttgcgtacgccagaatccagggaaggaacgctttgattgctcatttccagaattctagcctgatgaatgaagagaaatggtgccgtcctatgcttttccacaaagatggcccgaacgcaggagaccaggaaccattccctgtgggtaacaatgttcgttctcggtccgggaggaacagaccacttagcagtggttcggagactaccaaagaggcaagtccatcaacctctcctaactgaagagaagccggctcccgatattccaactcaggacaggcaggcggtatttgctcactaactggaggctgaagggcatgtaataaatcatccccagttttgctgcttctttttcttttggtcctcgtcagcaaggtgacctgacttgctgagtgtgactagctaacgagaattctgcactgcatgagcctgctgaagattcaccttaaagtaactatgccttggttttgccataccattgacgtcaacggctacaggtaatggagaagacctggagtggtagagggagaggtgtgtttcaggcgggtgaaaattcaagttgtacagttgaactcaccaggattggaaaatggtcatcaattcaaatttgagttgtttttctt

SEQ ID NO: 17442 - DNA, 1487 bp, Zea mays
  Clone ID: LIB3069-028-E9_FLI
cagaactccaagaaacagttgcacacttgaggcaagaaatcagtaatttatcgaaggctgcaaaaagcgaggatagttttgctagcgtgcagtctagtgaaccatcaacagcaagcactgatactagggatcaaacaaatgaaatctcaaaccgtgcaaatatgtcctctagaacaacggacttaaatgagtcaggatttatatctcaagtgctcaagcaggcttcagaaattgaaagtttgaaacaagaaaatctgaggttggtggaagagaaggatggactggaaattcatagtcaaaagttggcggaggaatcatcctatgctaaagaattggcttctgctgctgcaattgaacttaagaatttggcagaagaagtcactaggctttcttatgaaaacgcaaagctgaatgcagacttagctgcggcaagagagctaaatgcatcgatgtcaagaagtaacatccaccctgacccaaagcgtcgtgatcatgagagcggaattttagttgaggagttgcagaaagagttggttgctagttgtcaaagggaggccgtattagaggacacactatctcaaaaggaccgaagagagagtgagcttctaaagattattgatgatgcaaaatgccgtgagcatgagttgaaaaatgaactggcaagcatgggggcccttctttcgaagataaagaaagaaaactctcaacaggatgtatttgaatttaaagcaaagcaaaacggctttcactcatccaagactgatagtggtagactggtaagtgaaatgcaagcatcggataatgggtgctgggatggcctcagtacttttgaagaagcaagagctgcatacaattttgaaagaatgcgctgcaaggaattggaaagcatcgtgtccaaactaaagggtgaggacctcaggggcctagatgttaaagttcttgaagaactacaaaacttccatgtagaagcactgtcaaggatctgccaagaaaagatggcaagtcaggcgctatagcaaaaacctttcctgagacgagtagccgctttcatgcaggccagagcttatttctcagatgtcccttcaactttatgcccatctctctgaagttccactcacaatttcacatagttgctgctactgcaaccgggacaaccttgattagtccgcctttggacactgattcctgcgtttaaccgacagaaaacgaagcaaaatgcggttaaatagcgggcgctaatggtcactgagtagttagcatgcagatactaccctcctgtacagctttttattaaatatagtagcagtggtattgtaggagtacccggattgtatttatactggtaatatatgagccggtaaaacccgaaggtggtgtttctgttgtacctggaccgtgctctgcccttcaaaaactgtagtaaacccgaacggacgctgatgtagctttggcaaacttgctgttgatgtgatgcatgactgccgtgc

SEQ ID NO: 17443 - DNA, 792 bp, Zea mays
  Clone ID: LIB3069-028-F3_FLI
gatctggcggcttagttcttccagttccagcacggtggaagtggcgacaaagctgcggacgcagtgggagcagttcgtgcaggcccggcagttctggagcggcctggacctgggagtcctcgacgtcgaggtcaacaggatggcgagcatcctagaagcagcaggaacccgaatcggttcgtcggcgacggcctacatgctgtcgtggctgtcgagctaccagatgcagcggccgacggccatgggctcgccgagcatcgtggccgccgcgttcgtcaccgtgaagatgcagttcacgctgcagcaggcgaccatcgtcaacactcgtccaccaccatgcatcggcggctgcccggcgtgcgagtgcgggtgcgaggaccgctgcgtgcagccactgccgccgccggtgctcctgccgtccggacgcggcgacgacacctaccgcgtcaaccccgcgtacccgcagggcgtactgttcaacgccatcaaccaagcaatggagcagatgtacctggcgttggtccgggcgagcaatctgacgcgttgcgacgacgctgcccgcgtcgagttgttcctgccggcatgatccggcgagcgacgacgactcatcacggggtacgggcaactcaccgccgatcgatccatcgaggatctagctagctataccgtctaccgtataccgtcctagctagtaggctagtagtatacggtggtgtgcttaactatacaagctaagtactgtacgaccaagcttagcttgtcataaataagcaatcgatcatacgcactccc

SEQ ID NO: 17444 - DNA, 1085 bp, Zea mays
  Clone ID: LIB3069-028-G1_FLI
ggcaggaggtggccgtaatagccctcgccgagctccagcccaccgaacgggggcgagtccagacgaaggaacggcgagaacgaacctgacgatgagcacgaggaagtggtcgttgtcgacgaggacgaggccgagtcggacaagaacggggcgcccgaccgccaccacgccgggccccgcgaccgcttgctgcgcttcgccttcaccggtatcatcgcctccgttgacagcgcacagatggtcggcgtccgcagcgggccgggcggcggcgccacggcccggtacgcaccgtcgtgcgcgaacggccgccgctgctgcgcaagcgggggccgcccagccaacgacgcaaccacagcggggggaggctgcgcctgcggcggcagctcagagagcgagtcgtccatgatacgggacacccactccaactcctcgacgtcatgcgacggcaggtcaaccatctccggcggcggcgacgggaggtcgtacgtcacgaccgacaacggctgcgagtcgtctttcgacctctcctcggccgcggcgggtaccggcggggcgtcgtcgtcctcatgctcggcgccgtccttgtcaggctcgccaaactcctcgaggtccaacaagtcctcgaccgagaacccgtctttctcgacgagcgccccggcggcgtcggcgtcctccgcggtctcctccggcggggcgcagttgttgttacacttcagcgcgtccatcctggtatcatccttcaccggccggaaaaatacccatacaggtcgtatgtcaaaatcacaaattcccaacaccagaggggaagcagggcggttcaagaaaaaaagttttttcgtctctgggtttttttttttgtttatctctcggtataaataaaggaaacaaagaaaaacatccaaagaatctctttctgtccccctcaatcgtctacggacaacacggccggcaccgttccttaccagagggctgctatggtggtgcgcgtatgacggcatggcggaggagcctcgcaggacgggtggggtgcaggaacaacacggggccggggctgtggtggcggcgttggaggcgaggaggaagag

SEQ ID NO: 17445 - DNA, 1151 bp, Zea mays
  Clone ID: LIB3069-028-G10_FLI
cacgaccacgctagcacgcactctccgtctctccccttccggttccagtagctgcatccgctgcgccaagtcccaataatcccgcagcccggcggcatggcggtgagcaacaacatcacggcatgcatcaacttcctggtgcttctctgcaccatccccatcgccgcgacggggctgtggctggcctcgaggcacggcagcgaggactgcgccaggctggcccgctggcccgtcgccgtgctgggcgcgctcctcctgctggtcgcgctggcgggtttcgcgggcgcctactggaaccgcaggggcctgctcgcctgctacctcttcgcgatggccgccctcatcacgttcctcctcgccttcctcgtcttcgccttcgccgtcgcgcacgactccggcgcctacccggctcccggcagggcctaccaggactaccgcctccagggctactcctcgtggctgcgggggtacgtcgccgacgacccccgcaggtgggagggggtccgggcctgcgtcgccgcctccggcacctgcaggaagctcgccatggatagatcattcatcgtgccggagcagttctacatgtcgcacctctcgcccatcgagtccgggtgctgcaagccaccgacggtgtgcgggtacgcgtacgcgagcccgacggcgtggacgggcccggcggcggacgcggactgcgcggcgtggagcaacgaccccggccagctctgctacgcctgcgcctcctgcaaggccggcgtgctgggcggcctgcgcgagcagtggcgcagggccaccgtcccgctgctcgtcgccaccgtcgcgctcatcttcgtctacgtcgtcggctgcagcgcgttccgcaacgcgcagaccgaagacctcttccgccgctacaaatggggaaattattaacgatctctcccactgatctactgcgtacatacgtacacgccgatttggatcgggtgagttgcgctttctgtttccggccgtcttttttttaatattttgcgaaatcgatctgtttctggtgctcttggcacagtggttagtgctgtagaatgtggacaacagctagaatgctagatgttaattctataggagcttacttatgtatctattctatctctatctgcgatatctgaagcttcggt

SEQ ID NO: 17446 - DNA, 1768 bp, Zea mays
  Clone ID: LIB3069-029-A7_FLI
agaacatgaactggtagtacaagatccttctggtagtgctcccaaagatttaatagttaaagattatgtggacgaacctcatgtatcaacaactaccatgagatcgagcggtgaagtacctcaagatcatagtgccaccgaggaaaacccaaaaacaattgacagcattgttgaaaggagaccatctctaagcagtcagattagcattaccctaagatcaagtggtgaagtacttcaagatcatagtgccaccgaggaaaacccaaaaacaagtgaaagtattgttgaaaggagaccatctctaagcagtcagattagcattaccctaagatcgagtggtgaagtacttcaagatcatagtgccaccgaggaaaactcaaaaacaagtgaaagtattgttgaaaggagaccatctctaagcagtcagattagcatgaatgaagcctatagacttgccattggcaacaagggtagcttgacatcccctacattgacggatgtaatccttggaaaggactctacttctagcataaacgaagaactgaggctactgttatcacagatctcagcttccagggggcttgaggcaccatgggccgatccaggccctagcccacgtgcatatggacgtggtgatgagttggtggtgcagaacattaccaatagattatcacttgagaggaatgcttccggtttggagtctctagacggaagcattgttagtgagatggaaggtgaaagcaccattgaccggttgagacggcagattgatcttgatcggaaatcaatacacctactctgcagggaactggaagaagagaggaatgcctcagccattgctgcaagtcaagctctggctatgatcaccaagttgcaggatgagaaggccgcaatgcagatggaagcttcgcattaccaaaggatgatggaagagcaagctgaatatgacagtgaagcggtagcgaaagctaacgagttactcactgaaagagaacagctaattgaagaactggaagttgagctcgaaaactataggagacagtatggaggtggatcaacacagagacgaggcaatcgagtggcttttaaacaagaaaatagggatacaactatgcttgacggtggtggtcttgaagatcctctgattaacacacaacagggcataaattccttggtgggtttggaagaggagagggcatatatagcgactggtttgagaaaattggaacagaagctccaattctactccaacaacagtgtttccgttgagttacccagtccagatgttaaggatgacctctccgacaaagtatatgtcacagaagacttctcgttacactgccaggaaagctcgatggagagcaaggaagctggctcatcgacaactagtggggaggttgatctagttgcagtgcaggaagaaattgcaaagttgaacagaagactgaagacactagaaggagatcgcagttttcttgagcatagcatcaactccctcaggaatggcgacgaaggtttgatgtttatacaggaaattgcttgcaatctgagagaactgcgagcaattgctattggcaaaaaataaaatgcaccaaaatgtgtataatagtcattttctcgaaacttatttgtgcaatagacgccgaatcaacatatgaatcgtgcatcatgtttgtcatataaatgaaaagaaattcttgtaattagacaccagatgttgctgtaattatctttaaattcgtagggttgagatgtaaattggttctat

SEQ ID NO: 17447 - DNA, 443 bp, Zea mays
  Clone ID: LIB3069-029-B9_FLI
gcttctggggggcacatcatcttcttccaaagcctgagtcttcttggctattgcctatttccattggatgttggtgctctagtttgcatgctgaaggacaatgtcatacttaagattgtcgtggtgacaatcacattggcttggagctcctgggctgcgtatccattcatgagcgctgctgttaacccaaggagaaaagctctggccctatatcctgtcttcctcatgtatatctcagttggtttcctcataattgccattgattaacggggttgagctttgtagtaacatctgaagagttgagagtttccttggatggttgaaccaccagaatacatacaagtttgagtagacaatgcttctatccttgtaccctcgtggagtctttgtgaattgcctcgtaggaattttggtttttacatgatcttgaggcataaggttgt

SEQ ID NO: 17448 - DNA, 1028 bp, Zea mays
  Clone ID: LIB3069-029-C5_FLI
gctccctcagccgcgtcgcgtcgcatcctacgatccaaagctctctctgctcgcaggtcgcagccatggcgaagaactacccgaccgtgagcgccgagtacagcgaggctgtggacaaggccaggcgcaagctccgagccctcatcgccgagaagagctgcgccccgctcatgctccgcctcgcgtggcactccgcggggacgttcgacgtgtcgtcgaggaccggcggtccattcggcacgatgaagcatcagtcggaattggctcacggcgctaacgcggggctggacatcgcggtgcggctgctcgagcccatcaaggaggagttcccaatcctctcttacgccgatttctaccagctcgcgggagttgtggccgtggaggtcaccggtgggcctgagattcccttccaccccggtagggaggacaagcctcagcccccacctgagggccgccttcctgatgccactaagggttctgaccacctgaggcaagtttttggcaagcagatgggcttgagcgatcaggacattgttgccctctctggtggccacaccttgggaaggtgccacaaagagcggtctggtttcgagggggcctggactacaaaccctttggtctttgacaactcttacttcaaggaacttctgagtggtgataaggagggccttcttcagctcccaagtgacaaagccctgctgagtgaccctgttttccgccctcttgtcgagaaatatgctgcggatgagaaggctttctttgatgactacaaagaggcccacctcaagctctccgaactggggtttgctgatgcttaaatagaccctatcctggagtgatacattctgctgcatgtggtcttttgcatctggagtcaatgtgaacaagcagattgtcgtattgtctttctcgtaataaatttgtcaatgttgagcccttaggcttgaattgtgggaccctttgttcgttttcctagactctgatgctgtatgcaactgaaacgagtaaatctatgatcttaaggctgc

SEQ ID NO: 17449 - DNA, 998 bp, Zea mays
  Clone ID: LIB3069-029-D11_FLI
gctgctaccgagttaagtatattctgagctcgtctgcagccaaaagcttccatttgcattgcgatgggggctctacctcgtggcctgctagctggcatctgcgccgtcttgttagcagcagtggttgcccttgcccatggtgcggaacaggaaacagcgtcaatggtggtcggcttggccaagtgcgccgactgcaccaggaagaacatgaaagctgatgcggcattcaacggccttcaagtggctgtcaagtgcaagaacgccgacggcgtcttcgagaccaaggccctcggtgaggttgacaagtccggcagcttcagcgttcccctcccggctgacctcctccgcgaggacggcgagctgaagcaagactgcttcgcgcagctccacagcgcggccaacaagccatgccccggacaggagccgtcttggatcgtccggccaaccaccgacaacgacgacgacgataagatgaagaataccttcgtcgcagtcgccggcaaggtgcactacccatcaaaggagtgcgcctctgctttcctcttctaccatttgttcaagaagcacctgttgcacaagaagcccatgttgatcatccctcacatccacaagaagcccatggtgccgatgtaccgccactcgcccgtgccggagtacaagccacctcacccgacgcccaccccgatctaccatgctgcagctgagcacaagacacagaaccccgagacggaccctgagaagttcaagaagctgctccccttcataaaaaagaaccccttctttcccaagttccccaagtttcctcccggcaaggaggagaacaaggcgtaaaaatatgagggcgagagaccaagtgtacccctttcctctgcatccactcttacgtagtgtctgttgcatcttgcatggaccgtcattacctcctgtttcttgacagtgtttgtcacctctcaccggccagggctcccactaatagaaataaaacttttgttctaagc

SEQ ID NO: 17450 - DNA, 983 bp, Zea mays
  Clone ID: LIB3069-029-D4_FLI
ccagccgccaccaggtgcagagtctttcgtcatctcttctccggcgaagaacccccagtcgcccaccagatcacttgttaaactttgttgaggggtgatggcggtttctttcgcaaacctcaacaccgaggcagggcttaaaaagcttgatgagtaccttctcactcgcagctacatcactggctaccaagcttccaaggatgacttggctgtctacacttcgttttcgtctgctccctcgtccaagtatatcaacgtagcaaggtggtttaatcacattgatgcgctcgtgaggctgagcggaattactgcagagggccaaggtgtgaaggttgaatcctcagcagttccttcagccccaactccagatgttgctgaagcacaggccccagctgctgaggaggaggacgatgatgatgttgacctttttggtgaggagaccgaagatgagaagaaggctgctgaagagcgtgctgcagctgccaaggcttctggcaagaagaaagaatctgggaagtcatcagttttacttgatgtgaagccatgggacgatgagactgacatggccaagcttgaggaagctgttaggagtgtccagatggaagggctgctctggggcgcatccaagcttgtcccagtcggatatggtatcaagaagctgcaaatcatgatgaccatagtcgacgatcttgtctctgtcgacactctcattgaggactatctgtgcgctgagccagttaacgagtacgtccagagctgcgacatcgttgccttcaacaagatctaggcgtgactttcgatcagtccttcccctggggtgctggcgatggtggtggctgggcaatgcaccagcctaatttttccatagctatatgtctgctttgtgtggccagtgatattgccgtgagtatttttggatcctattcgagtcgaatgtaccagtaccagagttaatttgctttaattcgaaacaccgttccggt

SEQ ID NO: 17451 - DNA, 948 bp, Zea mays
  Clone ID: LIB3069-029-E1_FLI
agctctacaccgcctccgagtactgcgagaagtcctacctccacagcgagcagaagcagaaggtgctggacaacctgaaagactatgccttacgagccgtcgtcaacgcggttgatcatctgggtactgttgcgtacaaactgaccgatcttttcgagcagcaagcttccgaggtgtcgacatatgaactgaaagtcgcacgcctgaaccagcaaatcttcacatgccaagtctacacagacaaagaaggcctcaggcagcagcagatgatgggagcaaacatcaagcaccacaagcactacatcttaccccccactggttataaaagatccctggcaaatggacacctgcaagcggacactgatcaggaatccaagcctagaccttacccctccgcaaaaaccctttcctggcatctgtcttcggagaacagcaccaaagcaaacgcacataagcctacatttgccctagtggacacggcaccatcaaaaccttcatcaggtaaggagcggtctgcttctcctatgcgcaggccgctgcagttcaacaggagcaccagttctgatactacgcagaaggttggcgctaagaacatatctggtgtaaaggaactttcaacattccattccttcgacaaccccaaaggtcgtgcgatccaaaaggcccctgttggcactaaaagcatgctggcggctctcttcatcagacacaaatcgtccaaggcgaaaaggatcgcagttcgctgacgagcgggggccgggtggggggcggcgacagcactgtaaatttcattctgtggaggaccggaagcctgttaattgtacatctggcctatcgttatgtgttggggcagagtctgtagccgtatttcatttcagaatatgacatcttgcaggtgaccgaaatgtaatgatttcgcataatctcatcttggcattcagcataaat

SEQ ID NO: 17452 - DNA, 696 bp, Zea mays
  Clone ID: LIB3069-029-E10_FLI
tccacttcccttccacaacggaataacaaagtggatacactactatgttcatgcaagtccagatgccatacatggtatttacaggacttgaagactataaagcacgaggcacacaagcaagtccttactacacagtcactcattacacagagtttgctgagaccaaggacactgtgcttattcgaggagatgttgtttttaccagcaaactaaccgattcagaggcaaagactcttctagagactgctcactcgttctacctgaatgatgtgagatacagactcgtggagcgcttcaacaaagagactcatgattttgagttcggggacgtccttaaagtgcttgacatgccaaccatgtgacccagtttaattcccaaccaatagcaaatattcctagagcacattgattttctgtcacctcaaatcctcaatttagcacgggagattgctttcttgcatcatcagaggcagtaagatggagccactggatatcatcctgccttcgctcattgagcattccgtgtggattttgttgcactgattacaccatagacaattttgctgttttttaagcagttgatgattttcagggatttgagacataagttatattttttgctatatcattgtacccattaggtccataatgacattttgtaccatcttgatgtatttcccctgaatatttttgtgg

SEQ ID NO: 17453 - DNA, 953 bp, Zea mays
  Clone ID: LIB3069-029-E9_FLI
gcattttgcactctaccagtcgctgaagaaggccctttataagcctgcggcatttaacaagggaattttgctaccactctgtcgggaaaggaattgcaccctacgcgaagcagtgattattgggagtattatccagaaagtttccattccatttctccatgcaagtgtagctctagtaaaactagcagagatggagtactgtggcactacaagttacttcatcaagctatttctagacaagaaatatgctttgccataccgtgcacttgatgcagtgcttgcccatttcatgcgttttgttgatgatgagaggatcatgcctgttatatggcatcaatcactgcttgcatttgtggaaagatacaagaacgagttagagaaaaaggataaggagaaacttgcacgtttgttggatcaccagaaacactatttagttactccagaaattcgaagggagcttcgagggagctgcaacaggggtgaaaaagatacaaatttgcatactttgtcacctatctccgtcattaccaagcctatcgaggaagacaaatgggacgtaccacaagtgccaatggagcaagattagccagattctccaacatcgatttttacacttcatttgtttttgaagcaaatttctaaagatattgctgtattttattgggcgtgaacttttagtgccaatattgcggtaaaataggttcccagtagattgggcccccaatgttctgagggcattttgcagtcggaatgtgattcacacacggaaaagtttgttttgatcatttggagcattccaagggggcattcagcatggacatgtagcatactgtctttcgcagaagtgggtaagaaatggttgatcatgttactttgtagctgcgacaactaaaggtgtaccatacttgaaccagaaatgaaaatgaataacccggagttcgtttggttttttt

SEQ ID NO: 17454 - DNA, 1498 bp, Zea mays
  Clone ID: LIB3069-029-F6_FLI
cgatccacatagccattggcagttcagttctccgatcctctaccgcagcagcgtaggcaaagtaggaggcaaggatcaatggcgccgccgcggatctccttcctggagctctgcctctccttcctctgcttcgtggtcttctactacttgcacatcagatccaagcggaagaaccctttcgtgccgctggactggccgctggtgggcatgctcccggccctcctcggcaacctccaccacctccacgactggatcacctccctcctggtcgccagccagctcagcttcctcttcacaggcccgccgcgctccggcatgcagttcttcgtcaccgccgaccccgccaacgtccgccacgtcttcacctccaacttcgccaactaccccaagggccccgagttcgaggagatcttcgacgtcctcggcggcggcatcttcaacgccgacggcgactcgtggcgccggcagcgcgccaaggcgcagctgctcatgtccagcgccccgttccgggccctggtgtcccggtacagccgcgccaaggtggacaccgccctgctcccgctgctctcgcacatggccgccaccggggaggcgttcgacctccaggacgtgttcctccggctgacgttcgacaccacgacgacgctggtgttcggcgtcgaccccgggtgcctgtccgtcggcctccccgaggtgccgttcgcgcgcgccatggacgacgccatgggcgtgctcctcctccgccacgtcgtcccgatgacgtggtggaagctggcgcggaggctccggatcgggcacgagcgcaagatggcggaggcgtggcgcaccatcgaccagttcgtcgccgacacgatcgccaagcggcgggccgagaaggcgaggcacggcaacgagcaggtctcggcggacctgctctcgtcctacatcaacgacgacgaggacgaggaaggcggcgtggacgcgttcctgcgcgacacgaccatcaacctcatgctggccggccgcgacacgacgggctcggcgctgtcctggttcttctacctcctgacgcggaacccgcgcgtggtgggcaagatacggcaggagctggagtgcgtcaagagcaagagcagcggcagcggcggcggcatggcgagcttcgacccggacgagctgagccggctaacgtacctgcacgcggcgctgtgcgagtcgctgaggctgtacccgcccgtgccgcaggagctaaaggaggcggcggcggcggacgtgctgccgtgcgggcacgaggtgcgggccggggacaagatcctggtgtcgctgtacgcgatgggaaggatggaggaggtgtggggcagcgactgccgggagttcaggccggagcggtggatcccagagttggaggacggacgcagggtggtgcaggtgcggtacgtgccgtcgtacaagttcatgtcgttcaactcggggccccggacctgcctcggcaaggacatggcgttcgtgcagctgaaggcgg

SEQ ID NO: 17455 - DNA, 594 bp, Zea mays
  Clone ID: LIB3069-030-A8_FLI
tggcgaaagccttcgtggagcactactaccggacgttcgacaccaaccgcgcggcgctggtggggctgtatcaggagacctccatgctcaccttcgagggccagaagttccagggcccatccgccattgccggcaagctcggatctcttcccttccaggcctgcgagcaccagatcgtcaccgtcgactgccagccgtcggggccccagggaggcatgctcgtcttcgtctccggttccatccgcaccggccccgaggagcaccccatcaagttctctcaggcattccatttgctgccggcagctgggtccttcttcgtgcagaatgacatgttccgcctgaactatggctaaaagacagccgaaaactcttgtgatgaacgaatttgttaagggcttcatgttgagacgatgaataccgactgtcgccgctactctcatctcctttgtatctcctctgttggctgattaactgttattacaagaaattgctggacttgttttttccagttgttttgaatcatgtattatggttgcatgggcaccatttcttcgtgggatgtgaattgaaacagtccaaatcaattggtgtggc

SEQ ID NO: 17456 - DNA, 466 bp, Zea mays
  Clone ID: LIB3069-030-B5_FLI
agccaaacgtaaagcatcagtgctgtcgtatcaaggcctgaggtcgagcaaatctggtgttgtgaagaaggtgaaagtgacccagcaacccagcaaccaagggaagcagaggaaaactgatgaaactggagcaactgctggcaaagctaagcgacccgctgtggctgcaagaaaagcaaagcagctggccaagaaacgcaaggtggatgcatcaacccctgagaatacacacaggagcaagaaaccaaggaagtaagttgtccattgcgctggtcatttgcccttgcttcgcattgtaacaggagtttcactaaatcaaattctggacgatcttgtcagatgattgtgttactaggtagaggcaatgtgcgacctcaagtcaggttagggcaaatacaagagcgctctcgctactgtaaaccttgtaaccttatctggcacttgttttgttttactatttccctcc

SEQ ID NO: 17457 - DNA, 835 bp, Zea mays
  Clone ID: LIB3069-030-C2_FLI
cctcagtcctcaccaccacagccgtcgcgcgcaggagggtagggaggatgccacgtaagatcaccttggtcaaggagggggagccgcagccggtggacgctgctcaaggggagcccgctccggcaccggcggcaccgacggccgcgttgacggaggcggaggtggacgagctgcccagggccatcgtgcgccgccttgtcaaggacaagctttcccacgtcgccggtggggaaggagccgaggtcatcgtcaacaaggacgccatggccgcgttcgccgagagcgcccgcatcttcatccactatctctccgccactgccaatgatatgtgcaaggaatcaaagaggcagaccatcaacgctgatgatgtcctcaatgctcttgatgacatggagttttcggagtttgtagagccccttaggacttcactgcaagagtttagaaacaaaaatgcagacaaaaggtcagaagcaaagaaacaacagaaggaaaagagaaggaaattaaatgaagagacacttccgcagaaagaaaatgatccagctgatgatgccaaggagaatggagtagcttaatcgcaagaaaaatgaagaatgaatacaattaacttctctgctggaggggcagtaacacgcagaatcaaaaccatggcagtatttgttggtagttgtatttgcttttgctccatgtagcctctactccaaaacactttcttgacttgatatgatgctgtataattctagtgtcctatcagttttcagcttgcttatggtgcaattaaaattctatgtgcctgatgaaattgttcttatgaatgaagaatgataccagcact

SEQ ID NO: 17458 - DNA, 1614 bp, Zea mays
  Clone ID: LIB3069-030-G11_FLI
cccgaagccgagccagcgaaccaccccgcccgcagccgcaagcaagcagccaagcagtgtgaactgaccgtccgttccgtccagcccaccatggaggcgccgccggtaccggagctcatggatctggacgcgccccctcccgccgcagccgacgccgcagccgcggcgccggttccccctgccgtcagcgacaagaagaaggaaggggaagggggagacactgttacgggccacatcatctccaccaccatcggtgggaagaacggcgagccgaagcggaccatcagttacatggcagaacgtgtcgtgggtacgggctcatttgggatcgtcttccaggctaagtgtttggagactggagagaccttcgccattaagaaggtgctgcaggatcggcgttacaagaaccgggagctgcaacttatgcgtgccatggagcaccccaacgtcatctgcctgaagcactgcttcttctcaacaacgagcagggacgagttgtttctaaaccttgtcatggaatttgtccccgagaccctgtaccgtgtcctgaagcactacagcaacgcgaaccagaggatgcctcttatctacgtcaagctctacatgtatcagcttttcagaggcctagcctatattcataatgtaccaggagtctgccatagggatgtaaagccacaaaacgttttggttgatcctctcacccaccaggtcaagctctgtgactttggtagcgcaaaagtcctggttcctggtgaaccgaacatatcttacatatgctctcgttattatcgtgctccagagctcatatttggagcgacagagtatacaacttcaatagacatatggtcagctggttgtgttctagctgagttgcttcttggtcagccactgtttccgggagagagtgctgttgatcagttggtagagattatcaaggttcttggtactccaacccgtgaggagatacgatgcatgaatcccaactatactgagttcaggtttcctcagataaaggctcatccgtggcacaagattttccacaagagaatgcctccggaagccattgaccttgcttcccgtctccttcagtattcgccaagtcttcgctgctctgctcttgatgcatgcgctcatcccttctttgatgagctgcgggcgccgaatgcacgtctaccaaacggccgtccattccctccgctctttaacttcaaacatgagctagcaaatgcctccccggacctcatcaacaggcttgtaccggagcacattagacggcagaacggtgtcaactttgggcatatcgggagctaggagggcaggcggctgccatggtctagtttttggtcttggtaccccatgtgcagggccggttgcaggtgaaggtgatattgctgcaccatctgggagaggaggggctcagcagtacctgagagagctgaaactatgtaaattatctgaccgcgaaggagtacggccagtgttaagccagtaaactggcgcatgttggtccagagtagttaaggtaagaatgtagcaggtggagactggtaaatgcctagggtcgtttttagttgttaccagtattttgtaatgtaatgttcgtcggtacttccc

SEQ ID NO: 17459 - DNA, 1063 bp, Zea mays
  Clone ID: LIB3069-030-G8_FLI
cttttcttgcggagtaagaagagtggcggcggcgggccggcggcgtgtataggcgtgttcccgagcagaggcccccccaaacgcgcagcgcacacaaacacacaccagcccagctccgagagatcatccggcggccggcgagatgagccgcggcacgggcgcgggttatgaccgccacatcaccattttctcccctgagggacgcctgtaccaagtcgagtacgcgttcaaggcggtgaagtcggcgggtgtcacgtcgatcggcgtccgcggcgcggactccgtctgcgtcgtcacccagaagaaagtcccggacaagttgctggatcagacgagcgtgacacacttgttcccgatcaccaagtacgtcggattgcttgccactggcctcacagctgatgcaaggtcattggtttcccaagcaaggaacgaagcagctgagtttcgtttcaaatggggctatgagatgccagttgatgtgttagcaaaatggattgctgacaaagctcaagtttacacgcaacatgcatacatgagaccccttggagtagttgctatggtcttgggctacgacgaagagaaaaatgcacaactattcaaatgcgaccctgcgggtcacttctttggacataaggcaactagtgccgggctcaaggagcaggaagcaataaattttttggagaagaaaatgaaggatgacccgaaattcacctatgatgaaactgttcagattgcaatatctgcattgcaatcagttctccaggaagatttcaaggccactgagatcgaagttggtgttgtgagaaaagaagaacgtcttttcagagttctcacaacagaggagattgaccagcacctgacggcaattagtgaacgggactgagctgccatatgttggacatttgatccctccacactgcgccgtgccattgtgcttcagcactgccatttagtttgacatcaaatgaactgagtgtaccatttcatgtctaacactgaaaacaagctcgttgattgaatttggcacagtttggttttgcattgctaactatatttgcagggc

SEQ ID NO: 17460 - DNA, 1408 bp, Zea mays
  Clone ID: LIB3069-031-B5_FLI
gcggcgcacatgctcgctggggggctcatcggcttcgtctggatccagtccggctggatgggccacgactcgggccaccaccgcatcacgggccatccgctcctggaccgcgtcgtgcaggtgctctccggaaactgcctcactggcctcagcatcgcctggtggaaatgcaaccacaacacgcaccacatcgcctgcaacagcctggaccatgacccggacctccagcacatgccgctcttcgctgtctcccccaagctgttcggcaacatatggtcctacttctaccagcggaccctggccttcgacgccgcctcgaaattcctcatcagctaccagcactggaccttctacccggtaatgtgcatcgccaggataaatcttctggcgcagtccgctgtcttcgtcctgaccgagaagagggtgccgcagcggctgcttgagatcgccggtgtcgccgcgttctgggcttggtacccgttgctggtggcgtgcctgccgaattggtgggagagggtggcgttcgtgcttctcagctttaccatctgcgggatccagcacgtccaattctgcctgaaccacttctcgtccgatgtgtacgtcgggccacccaagggcaacgactggttcgagaagcagacggcaggcacgctcgacatcctgtgccctccttggatggattggttccatggcggcctgcagttccagattgagcaccatctgttcccccgcctgcctcggtgccaccttcggaaggttgcgccggcggtgcgtgacctttgcaagaagcatgggctgacctattccgcagcctccttctgggacgcaaatgtgcttacatggaagacactcagggctgccgcattgcaggccaggagcgccacaggcggcggcggcggcgctccgaagaatttggtctgggaggcattgaacacccatggatgataaacgggacgaggatatggctgaggggaaggcaacttctggtgtttcagctttgtgccgacgcgattgtctggttgcttctaatctcagttgtttagattgtattggtcattgaacccgtccgagtcgggctggaatttttgtgttgacaagtgaccgtctatccagttgaagagttcatgcttcaattgtctgggttgttcgtcggctgttctattctgttcctcctatatcatggtaacgatatcgtgatccttgctctaagtcatggacctctgttttattaaggttatgtccattcgatttctcgctggcattgccaggattgtggatgcttttttatgttcatgatgttgtaagcttaatgaacggctggtaatgttatatgtagtaccaccaccccctgtaatctcagttgctgtggcagctttgactctctttggaatactagtatgtactccgt

SEQ ID NO: 17461 - DNA, 1092 bp, Zea mays
  Clone ID: LIB3069-031-C2_FLI
atggtcgtgagtgtccgcacgaacccatcacacgctccgcccactcccccaggcgcacggccgcacctctccacctccggcgactaccaccaccatggcggccacctccctcgcgcgcctctcccgacgcaccaccatttccgctaccgccgcggcgccctccctccggcgcctcctctcagtcacctccacagcctctgtcgcggcaaccgccccgccgccgccgccgcccagcgcgactggcgccgcggccgtgggcgcggatcgggtgcggtgggactatcgtgggcagaggaagcttgttccgctgggacaatggatgcccaaggtggccgtggacgcttacgtcgcccccgaggccgtgctcgccggccaggtcaccgtccacgacggcgcctccgtctggagcggcgcagtcctgcggggggacctcaacaagatcacgctcggcttctgcgccaacgtacaggagcgatgcgtcctccatgccgcatggacggctcccacagggcttccagctgagacactcgtggaccggtacgtgacagtgggcgcctactgtctgttgcgctcttgcaccatcgagcctgagtgcatcattggccagcactctgtccttatggaaggttcgctggtggagaccaactcgatcctcgaagctggctctgtattgcccccaggaaggcggattccgaccggcgagctctgggcaggaagcccggccaggttcgttcggaagctgaccaatgaggagatcatggagattccgaagctggcaactgccatcaacgatctgatgcagagccatttctcggagttcctgccttactctaacgcttatctggaggtagagaagctgaagaagtcgttctccatccccctgtaagagcctgttgccctcactcgtccagttgaatggacgaggaaataaataaaggtgcccaaatactagatgttttgcgttgaaatctaacttgtgctgggttggatctgttacgtcccaattttttttgttcattgttgtgagcatggggacacgtgcaggaatgtcttcgtgtctttttacccaacccaatggacactatgttctgc

SEQ ID NO: 17462 - DNA, 2904 bp, Zea mays
  Clone ID: LIB3069-031-D2_FLI
gcagttctgaggctgtggagggctcactagatgcagttccagagaaagtagtcattctcagcagttctgagactgtggatagctcatatgctgtgtcctgtattttggatgacacagttcatgatgcttctgatatctcacaggctgacggtgtacaacatgaggagcactctagtatctctgatgggagtacagaaaagctaatttctgaggaaagttcattagtatgctatggtgttcccagcaacaaaaaagacttggttaatatagctgttcaagaaagtaaagcctttatcttaaaaaatcctgcctcccaaatcttggaagagagtggtccaggtttggatgtatctacagacagtgtttccctttcacatgcagactcagctcctgatttagcttgtcagcatgtttctcctaatgttgaagatacaacaagttatgagcctggcattggtcctgaagatgtaacaaaaaactcagttgtggaaaatggagcatgcagcggggaacttgttgtttctgttattcagacctcagcgggagatggactgacaaaatgcattgctcatccagctgttttttctaataaaatagaagtagaaggctcaccaacttctgctggattttccagtttgatcagtgttgaagtgcaaaacacaaaactagaagatgacacaaacaaatctagttctgtgattggagatgaagctggttttgtgcctgaggctacagctgagcttgatgaagaagcagaaccagttatatcattatctgaatatacagaagaaattcagtttcaatttagtgatgctgaaaattttgcagatagaaaggccacggatgacatggtggctaacaaaacaacaggtgaagtagaacatgatgaatctgattgtgacacagagaaacaggaagaaggtgatgtaggtcttgtaaatgacttggagaactgttctgcgtcattaaagcctgtgagtagccctgtttctattcctgcaattgacttccagtcaggaaatagtaacagagaggctaaatctctaccaaatctccgttctcatatacatgatcttgaaaggtcttatagttttcagctaagccgctcactgcaatcaactgctgaaaataatggaattgatctagtcaagagcatgaattatgcttttcttgagcagaaatcagaagctattggtgatttttcagaagaaaataacagccctcctgaggttaccaacactgtagcacttgatggcaaccatgctgatgatctgaaagttgatgcgttcattccttttgcagaattatcactatgcagacacctgttatctgaaggcatgggggaggatgctgcttgcagtgcatttgattctgagaaggtaaccttagaggagttccgtaacatgaagcaatcactgatgcgaaacaacaaactagttgttaggattgctggccgctactttccctgggatgctgctgcacctatagtactcggtatgatttctttcagtgaggaacaagtttttgaacccaaaggaatgataaatgtggagcgagttgagcaaagtgcagctccaggtggcagctggagcatctggccatttagtttcagacgaacaaggactattactgctatccagccagtttgtgaaagtattgttgagacttctgtatccactcctaaagaattgacacattttaaagaactagatagagaaaggaataaatccagggtaaagaggattgagaggaaggtgcgatcactcactccaacatctgacgagcttgcatctcttgatctcagagagggcaggaacgtggtaacatttacgttctcaactgcaattgttgggaaacagcaggttgattgccacatatatttatggagatggaatacacgcattgtaatatctgatgtggatggaactatcaccaagtctgatgttcttgggcagttcatgccactagttggagttgattggtcccaaaacggagttgctcatttattttctgcaataaaggaaaatggataccagcttctatttctgagtgcacgcgctatttcacaagcccacatcacaagacagtttcttttcaacctaaagcaggacggcaaagcacttcctgatggccctgttgttatatctccagatggtctcttcccgtcactttacagagaagtcatcagaagagctccgcatgaattcaagatttcgtgtctagaggccatcaaagatttatttccacacgactcaaatccgttttatgctggatttggaaatagagacacagacgagcttagctacctcaaggttggtattcctatgggcaagatcttcataataaaccccaagggtgaagtcgcagtgaaccgacgggtcgatacaaagtcgtacacatccttgcatgctcttgtccacgggatgttccctccaatattgtcgtcatctgagcaggaggactacaatgcttggaattactggaagatgccattgcctgatgttgatttgtgaggtacaagtcgagtctgcacaacagcactgcactaattttatgatgtgccgtagtgatcatgagaaggccattacttggttggctacatgtggatgctcctgctcctgatataagttcctgcaagatggaattttgtatatataggatcataatagatgtagtagctatttcttgtgtctcctgttgttgttgttgttgtcgtcgtaggactggaaatcatacctccgtgtgtcctgtaactgaaggtacaaaatttactggatggagggatctgatagtatgttgcagccccccctttttcgtttcatccttgatgtaattgtggtaccgatgtattttgtacaagaacaaatcaataataatgcaatcgaaagcgagctgttcatacgc

SEQ ID NO: 17463 - DNA, 354 bp, Zea mays
  Clone ID: LIB3069-031-F1_FLI
tgcgcgtcgaaccccaatgtctcgtctgtgatcactggagccaccaaagaaagccagattgtggagaacatgaaggccctagatgtcatcccactgctgacgccggaggtcgtcgacaggatcgaggcggtggtccaaagcaagcccaaacgcaacgtcgagtcatacaggtgaaaattcggtgttcatccgacggagttcaggcctcctccacgaaacttcatccatgatccgtgtgtattctgggcgtggtgctgtgttcacaaacaccagtctgtcagtcctgtgttgtgtattctgctttccgatacagattttggaccaatcaaatcctgcattgtgttgcttgcgagc

SEQ ID NO: 17464 - DNA, 914 bp, Zea mays
  Clone ID: LIB3069-031-H11_FLI
gggtacgggctctacggccgcctcgaggagaagtacccggcggactacttccgccgtggcgtgcaccgcaacaccgagaagctgacgacgacgaccggcggcgagcgcgtccggacgacgttccccgaagacagcggcaggggtcggccgcccaccgacgtgccgggcgccaccgaggaagaggggggaggcgccggaggagacctcgagggcgtccggccgtacccggaaaacggcagcggcaggggccgcccgccgtggtactacacggccttccaccgcggcaggcagcaggagcaggagcagcgggacttcgggatgagcgacacgaggctgtaccagaacggccgctactactacgacgtggacgccggcaggtacggctacggccgcgagtcgaaccccatgcggacgcgccccgacgagggagagttcggctccgggtacggccgaccccgcggccccgccggtggcaggcgcggcagtagctacggcgacgcggcgggttaccagcagcggtacggcaacgacgaggagttcggggacggagccatggatcagaacacgaacggcgccttccaggaggaagcaggccaaaacggacgacgatacactccatgagcttgcatcgtgtgtcatgcgtcagagatacactcagtcgtcgtcgtgtgttgctagcgtggttactatcgtgtgctccatctccgagtaatctcccatgggtcgatgcgattgagtacttgtaacttaatcgtgggcagaaccagctgcctgcctggtttcgcggacgtctacgcgcaccactggtgacacaagcaatgagtgaataaggtgtgtgtgtgactgtgtgtgtacaatgtaaactgtattgcagataaaaatgtcactatatatccacctactattcatctgtc

SEQ ID NO: 17465 - DNA, 713 bp, Zea mays
  Clone ID: LIB3069-032-B12_FLI
cagacggcggtgcaggtcgtcaagggcccagggccggcgcacccggcgatgcccggctaccacttcggcgacaccacggtgatcgacgacgcgctgacggacgggcccagcgcgtcgtcgtcgcggctcgtcgggcgcgcccagggcacctacatgctggcgtcgctcacggagcccgtgctggcggtgtccatgaccgtggcgctcacggccggggcctacaacggcagcgccgtcgtcgtcgtgggcgcgacgacgtctcggcgggcgtcagggagctcgcggtggtcggcggcaccggcgcgttccggagagctacgggccacgtgctgtggcggacggccaggatggagtcccgggaccacatggtgctggagctcgacgtctacgccaccgtgccggccgctagtccggctccgcctccgcgcgccggattggcgcgtcaggtggcctgagtgcctgacctcaaccgtacctcgacgtgatgtcaccggacttggttttgattttaccatgcacgctgctcgcctgctgtgtgtatggtcaatcgtataaaattgcttcagctccgcgcctccgcacatacgttggaaaattgaacaataaatgattactatactgctgctggtgctaccgctaccgtcagtcataataataagtttgaattctttacgttcaaatcaatgaacctatgatggatgtgagtttgtcct

SEQ ID NO: 17466 - DNA, 632 bp, Zea mays
  Clone ID: LIB3069-032-B4_FLI
ggacagatatcgacagggatgcatataacaaagctgaggagttattattattgtccctaaatgaatgggccgcgactttagttgcatcatcttcacttcattctatttgggttgaagttttaggcgacccactcctaagaaggttacttctcaggttcatcttctgccgagcaactcattccctgttcaaaccaacaaaccataagacagagttcctgccgacctgcatgcctcctttgcctgagtctgttgatgcagagagcatgctctcccaaagctgtgtgctgcgagtcgcatcattctttggcgctgccagtcagttctcatttgctgaggttaccacatggcctgatgttgaccctgaggaggctgttgtcaccagttcttctggcagtgccaacaaaggtgtgcctgagacagccagagattcagacatttcaaactcatcatcatctttttgatgcgaccatggcgctaccttcgtccgcttgtgttatttactcatctgcatatgcggatccatttgtaattactggtgctcctttatgcttgatttacacatcaagcagaactgccttgcctttttgtttcctggttacttactgaattaatagtcactagaacattttttt

SEQ ID NO: 17467 - DNA, 501 bp, Zea mays
  Clone ID: LIB3069-032-B5_FLI
gtgggcgacgacccttggcaggaattcgtgagcacggtgtcctgcataaagatcctctccccgcaggaggtgcagcagatggggaagcagggcctggagctcctgagctcggcccccgcgcggaggctcggtagcagctgtgacgactacgtcagcaggcaggagtcgagaagcctgagcaccgggatcgcgtccgtcggttcggtcgagttgggatgagcagcaagatagcgcgcacgcagcagcagcagcagcaggttacgcatcctcagcctcagggtaggtaggggactgaagggttggtctgcgacttgatgacccacgagctcctcgttgcgcgcttcgttcgcctccatgcgatggatagaagttcagcgcagaccaagccttagctctgcgagctatgtaccatctaataattctgtccgtgtcgtaccatgtcaactcctaagtagaagaattgaagaaactaccagcagccgctgtctggtatacacgctg

SEQ ID NO: 17468 - DNA, 848 bp, Zea mays
  Clone ID: LIB3069-032-C2_FLI
tttggacatttgttattcaatttttatcgttctgacttgcacgtttacatctgtaggctatgcttttgtctactttgaggatgaacgtgatggcaatgatgccatacgggctcttgatggttatccatttggccctggcagacgcaggctttcagtagagtggtcacggggtgatcaagctggtagacgtgatggcaacaaaccagaagcaaatactaagccaacaaggacactgtttgtcattaactttgatccaatgaacacaagagtcagtgacatcgaaaggcacttcacaccatttgggaacatatcaagtgttcggataaggaagaactttgcttttgttcagtttgaaactatggaagaagccagaaaggctcttgaagctactcatgctaccacccttttggacagggtgatttctgttgagtacgccttcagggatgatagtgaagtgagtgataggtacggcagcccaagaagaggtggtggctatggtaggcggggtgatagcccagtgtaccggtcacgtcctagtccagactatggtcgcccagcaagtcctgtatatggttcatatgacggtcctggtcctgttcgtgatcgctatcggagatctcctgcttatcgatcaaggtccccacctgtgaaacgaagaacatatgactaatcgagaaccctctctgttatgccatatatggcctaggaacaccctgtagcaagaacttactgtacctgtaccggagcgtcaccttaatgtccttaaattcccgtgtttaatggtctgtacatggttatgctatgcgactgtcaggtttcactgcatgcaatattgtcatttggctgct

SEQ ID NO: 17469 - DNA, 806 bp, Zea mays
  Clone ID: LIB3069-032-G12_FLI
caagctcagctgcacgcactgcacctcccgggccagccgccagccgccggccagcatggaggcggtggtagagtgcgccaagtgcgagtgctgcggcctggtggaggactgcacccgggactacatcctgggcgtgcgcgcggccttcggcgggcggtggctctgcggcctctgctccgaggcggtgcgggacgaggcggccaggggcacgacggcgagaggccccgccgccgccgccgcggggctggaggacgcgctccgggaccacatggccttctgcggcaagtgcaggcggagccccgcgttccgggtcgccgacggcatgcgccagatgctgcgcaggtgctccaagtgactgctggcgccggccgcgtcggcgtcggcgtcggcgttgcacggcgaaaaatcggcagtgcgacccacccgcgtcgtctagcgagcctttgggcatggacaagcaagacaagacaaaggcgaccacgccggccattgctgtgtcgtctccgcgcaatgagctgcttggcaacatcatgtatgtgcaaggaaatggctcggcacggcagtcggcagtattattagggtgtttagtttggtgatctctgagaacccagagactcgtaggtgctgtaaaggtgaagctagaactagaacgccgctacatcagtcagtgccattaggcttggtacattcttcaggctacagctgtttcgtcaataaggaaactacgtgtataatctgcggacggcaggcgaaaatagcacgtagtacaattccattcctacatatccggtctgtccatgctctgc

SEQ ID NO: 17470 - DNA, 750 bp, Zea mays
  Clone ID: LIB3069-032-H12_FLI
acggtctcgccgctgccccacatgttcgtcgtcaaggacctggtggtggacatgaccaacttctacagccagtacaagagcgtcgagccatggctcaagcgcaaggaccagcccccgcagcagggcaaggagatcccgcagaccaaggccgaccgggccaagctcgacggcatgtacgagtgcatcctctgcgcctgctgctccacctcctgcccgtcctactggtggaacccggaggagtacctcggcccggccgcgctgctccacgccaacaggtggatacaggacagccgtgaccagttcaccaaggagcgcctggacgccatcaacgacgagttcaagctgtaccgctgccacaccatcaagaactgcacgcacgcctgccccaaaggcctgaacccggcaaagcagatcgacacgatcaagaagctccagttgggtgccccaagtgcctgaaaccgagcgtgtcttcccttgaaaacggtcgtggaacagacctgtggaaaaaattgggatgaacttgccacttatttcgttgttgttgttcttctttggtcttcgcgcggtggtttctacctgccaaagacgaataattcccggctggggcccctccagtccactccacccatgcttttgtgtcaggcggagcggaggtagagcatagggagtgaataaccgctaccttatttcatttctatgatgtatctatctaatttggtcctcccctgataatgcacgacccgtagtgtt

SEQ ID NO: 17471 - DNA, 790 bp, Zea mays
  Clone ID: LIB3069-033-A5_FLI
gggaggactatgtgtacccagctacaagatcccagaatttaatagttgtatcatgtgaaccagtaacaactattaaattctgggatcttgtagctgggaggactatgtgtacccttactcaccataaaaagtctgtccgagctatggcgcttcatccaaaggagaaagcatttgcatcagcatcagcagacaacgtaaagaagtttaaccttcccaaaggcgaatttctgcacaacatgctgtcgcagcagaaaacaataatcaattcaatggctgtaaatgaggatggtgttttggcaactggaggggataatggaagcctgtggttttgggactggaagagtggtcataactttcaacaagatcagactatagtccagcctggatcactggagagtgaggcatgcatatatgccctctcatatgacgtgagcggatcaaggcttgtgagctgtgaggcggataagactataaagatgtggaaagaggacttgacagcgacgccagagactcatcccatcaatttcaagcccccaaaggacatccgaagatattgatgctcaaatcccacaagtagcaagctagtggatggttggagcctccacaattgtgtgacccaaactcgcttcttccctgagcccaattgaaattttgctagggtttgctctattgtataatctgatgcctgtactccaccagtctgatgccttggtccaacgctttgaaacccttcttagactgtttctttgtgatctttgcgtttgatttgattatatcctaccttagtacc

SEQ ID NO: 17472 - DNA, 1093 bp, Zea mays
  Clone ID: LIB3069-033-B10_FLI
gatcgtcttcctcccctcacatcctctggcctctggtcctccaccgtcctgctagccagagctgctcttgtacgcgcagctggcctctgtgcatatcaccagcacaccgcgcaggggaaggaaattaacaagagaaaaggcaaggagagcaggcaggcaaggaagctgcagaagccaaggaaggagaaggaggatcatcaatgagcatctcggtgaacgggcagtcgtgcgtgccgccggggttccgcttccaccccacggaggaggagctgctcaactactacctccgcaagaaggtggcctcccaggagatcgacctcgacgtcatccgcgacgtcgacctcaacaagctcgagccatgggacatccaagagaaatgcaagatcgggtcgggtccccagaacgactggtacttcttcagccacaaggacaagaagtacccgacggggacgcgcaccaaccgcgccacggccgccgggttctggaaggccaccggccgcgacaaggccatctacaacgccgtcaagcgcatcggcatgcgcaagacgctcgtcttctacaagggccgcgcgccgcacggccagaagtccgactggatcatgcacgagtaccgcctcgacgaccccgctgctgctgctgctgctggatccggtgatgccgtggccaacgacgacgcagccgccacggctgctgctgctgccgccgcgtcgtcggacggcgggcaggaggacggctgggtggtgtgcagggtgttcaagaagaagcaccaccacaaggagtcaggtgggggcgggggcaacaagcacggcagcagtaacagcgagcatgggcacggcggcgccggcaaggcatcggctgcggctgcggctgcggcgcaccagcaccagcaccatggaggcctgcagtactcctccagcgacgaggcgctggaccagatcctgcagtacatgggcaggtcgtgcaagcaggagcacgagctggtgtcgccggcgccggcgccgccgggacgggcggcggcgtccaggtacctccggcccatcgagaccgttctgggcgggcacgcgttcatgaagcttcccgcgctcgagagccc

SEQ ID NO: 17473 - DNA, 249 bp, Zea mays
  Clone ID: LIB3069-033-C11_FLI
gagcggccgagatcaggctgttccagcggatggcgttcggcagccaagatttcacgacggatttcagccagtccagctggaacaacagccagagcagaggtcttgatgcctctggttcaaggccattgtaatcctcctcctcgttgtcgtcgtaaatttcgtagatctaactagctagggtgtttcgtgatgatttttttacctcgtgtaattctttctgagtggatcaatagtgattgttctttcgcc

SEQ ID NO: 17474 - DNA, 1210 bp, Zea mays
  Clone ID: LIB3069-033-F11_FLI
gaatctttcagctcacacctccctatccctccttcccttctcctcctactgctactgctcgccaggtcccctcgctcgctcgctcgtcgtcttcaacctcacacaattatttgtgctcccgctccttccgtccgtccttcctccccccttcccctctccctcttccaaccgccgctcctgctgccttgcctctcagcccagggacgccaaggtctctgccaggatggtgtaggccgtgcctctcgcgcattatgaggtgtggtggtgagggatgggcgatggcctttgcagatgaaggagcgacagcgctggcggcctgaggaagacgccgtcctgcgcgcctacgtccggcagtacggcccccgcgagtggcacctggtgtcgcagcgcatgaacgtggccctcgaccgcgacgccaagtcgtgcctggagcgctggaagaactacctccgccccgggatcaagaagggctcgctcaccgaggaggagcagcgcctggtgatccgcctgcaggccaagcacggcaacaagtggaagaagatcgccgccgaggtgcccgggcgcacggccaagcgcctcggcaagtggtgggaggtgttcaaggagaagcagcagcgggagctgagggacagccgccgcccgccgccggagcctagccccgacgagcggggcaggtacgagtggctgctcgagaacttcgcggagaagctcgtcggagagaggccacagcaggctgccgctgcgccgtcgccgctgctcatggccgcgcccgtgctgccgccctggctgtcgtccaacgccgggccggccgtcgccgccgccgccgtcgcgcacccgccgcccagaccgccgtcgccgtccgtgacgctcagcctcgcgtccgccgcggtggcgccgggcccgcccgcgcccgcgccatggatgccggagcgcgccgcggccgacgcggcgccgtacgggttcccgagcccgcctcagcacggcggcgccgcgcccccgggcatgacggtcgtggacgggcaggcgctggcggagctcgccgagtgctgccgcgagctggaggaggggcggcgcgcgtgggcgacgcaccggcgggaggcggcgtggcggctgaagcgcgtggagcagcagctggagatggagcgcgagatgcggcggcgcgaggtgtgggaggagttcgaggccaagatgcgcaccatgcggctggagc

SEQ ID NO: 17475 - DNA, 1883 bp, Zea mays
  Clone ID: LIB3069-033-H8_FLI
cccacccaagtctcttcatttgcagcgacaaaaataggaacggagcaaaggtccggcgagccagagcaatagttaacaaccatctccacaaacaggctaccacgtagctacgtatatgccggaactgaactgagctgagaaagctcaggcgtgaactgaactagatggtgtttcctgccatcctccccaaggtggccgtgcgattgctcttcacgttctaccgcgccgccaggaagctcaggcgccacgccttccagctctacaaccgtaggaccgccgccaagccgccttcgttctccgtctcccagcagcaggccggtgccgccaccttcaagaccgacgccgccatccctgacgccgccggccggaccgtcgtctgtgacgtgcacggagccctgctgcgctcctccgcgctcttcccctacttcatggtcgtggcctacgagggcggcagccttctgcgcgccatgctgctgctctgcgccttccctctcgtctgggcactcggggagcgcagcggcggcgctggcgccgtccgggtgatggcgttcgtcaccttcgcggggctcaggcccagggacatggacctcgtgggccgcgccgtcctgcccaagcactacatggagcagctcaacgcgctggtgtacggcagcctgtggctcccggccaggaggaaggtggcggtgaccggcgcgccgcgggtgatgtccgagtggttcctcaaggagtacctggccgccgacgcagtggtcggcctcgagctgcagctcgtcacggtcggccgctgccggtacttcacgggattgctgtcaggccccgcgacggggccggagctgaggcacaaggcgctcatggaggctctaggcgccgaggacgacaccgtggccgacgtgggcatcatcagcaactccaacccgctcgaccacgtcccatactgcaaggaagtttatgtcgtgaacacagagaacacagagaatgacaagctaccgcgggtcaaatacccgaagccgctcatcttccacgacgggcgccttgccttcctgcccacccccgccgccatgcttgccttcttcctcttccttccgctcggcgtcatcctctccgtcatccgcattaacatcggcatcgttctcccttacaaggtcaacttcgtggccggcgcgatcttcggcgtccgcttccgcgcctctgggctccgcgccccgccggccgacggcgagcagcgcaggggcgtcctctacgtgtgcacgcaccggacgctggtcgaccctatcatgctcaccacggccctgcagaagcccgtgcccgccttgacgtacagcctcagccggctgtccgagctgatcgcgcccatcaagacggtgcggctgacgcgcgaccgcgcgcgggacgccgacaccatgtccaggctgctgaagcaaggcgacctcgcggtctgccccgagggcaccacctgccgcgagccgtacctgctgcgcttcagcccgctgttcgcggagctcgcggacgacatggagcccgtggccctggacgctcaggtgacgatgctctacggcacgacggcgagtggccacaagtggctggatcccgtcgcgttcttcgccaacccggtgccatcgtaccgggtggagttcctggggaccgtgccgcgggagtggacgcgcgccgggggcaggaccggcgtggaggtggccaactgggtgcagcggcgactgggcgaggcactggagttcgagtgcaccgagctcactcgccgtgacaagtacatgatgctggcgggcaacgacggcgtggtcgccaagtagagagcgcctgccgtgcatgcgctgcaacagttgggtgtggtttttattatgcatatacatgctgggtatattattgtc

SEQ ID NO: 17476 - DNA, 1207 bp, Zea mays
  Clone ID: LIB3069-034-A11_FLI
cccggcctgtgccgccgtcgccaccgctcgctcgcccgcctgcctgcctgggcccgcagcaccgactctgacagcgcccgtcctgcttcctgtaccggcaggcgagggagtggactcagggagtgtgatggcggcaatgccggcgccgcttctgcctctgcttctgctggtggtggccgcggcgatgacgctctcccccgccaccgcccgcattcccggcgtgtatgtcggcggcggcggcggcggctggcagagcgcgcacgccacgttctacggcggcagcgacgcttcgggcaccatgggcggcgcctgcgggtacggcaacctgtacagccaggggtacggcgtgaacaacgcggcgctgagcacggcgctgttcgacgaggggctccgctgcggcgcgtgcttcgagatcaggtgcgaggagcagcccgggtggcggtggtgccggccagggaggccctccatcctggtcacggccaccaacttctgccctcccaactacgcgctcccttccgacgacggcggctggtgcaacccgccccgcccgcacttcgacctcgccatgcccatgttcctccacatcgccgagtaccgcgccggcatcgtccccgtctcctaccgccgggtgccgtgccgcaagtccggcggggtgcggttcaccatcaacggcttccggtacttcaacctggtgctgatcacgaacgtggccggcgcgggggacgtggtgcgcgcgagcgtcaaggcggccagcaccgggtggctgcccatgtccaggaactggggccagaactggcagtccaacgccatcctcgtcggccaggcgctctccttccgcgtcaccgccagcgaccgccgcacctccacctcctggaacgccgccccgagcacctggcagttcggccagaccttcgagggcaagaacttcagggtctgatgcatgggatgggatgcgacttgggagaagaagccaaaactcttttctttctttctttctttctttcttctgatacgtaattattactactcactcctgctagcgtactactgctactggagtactaagcgcgtgttagggtggtgggtgttatcaatgcctgttttaaggtcacgccttcccgccttaatcccaggtccaggtccaggtcctctctgaaaaaattggagccttttcttctgaacaagaggtgtggatgggattctctag

SEQ ID NO: 17477 - DNA, 1321 bp, Zea mays
  Clone ID: LIB3069-034-A3_FLI
ccatttcttgcgagcactttggtcagttggtcttctctctcggatcgcggttggggggttgcggaatgggagcaaaggcggaggagtgtgaggtgccgccgctggctgcgaacgcggaggaggcagcttccaccaatcagtgcaccctcatcttcaaaggctgttccaacagcatggaaaaagtctacgccatcagcagtcctagtaagaaaagaaaatcacagtatgagctgagtgatccaaagttgctaccacttaaatgcaagtttcgcaaacggttatattgccaggatgatgagtctgcaaccacagaaagtttaggatatgatggtattttcatgaacaagacctctgggacggacatggtcagcatacctgaagaattggactcttgtgagaacactataagcctgttttgtggatgcattgaagttgactcaaaaaatggaattcaggaacaatctttgagaaaaatgtttgagatccggacatctgcatccagtagctcgagcaacaatttttcatcagaggcttttagttcttcccatagcagcggcacgagagacactgacagctgggctatggacgatatagagcgtcatcatccatatgtgatgctgaaaccgcataatgacgaccttgaaaggatattcaacgtgcttgaacagtatgatgacctaatggaggacgaactaatggctggcgatgtttttggttctgctgctcaggtcatggatgaaaagctttactcgaatagcgttgacgattttcagattttgccaacaggtcagactggctatcacggtgagaagaagctaaccatcgatcaagaatttgagcagtattttgcgaacctcatgctgtaggatcgagtggataattttgtgacagaaatggcgttgcgacatccaaacatggtttgcttgctgagcaaagtggcgaaccttggctaccattggagctatcgttctatggtgctgtttggtaacataaatggtaatgataataattcacacctgagtaccaacgacccgagtaccaacggtaacaagtttaaataggtcgatattagttcttagtgtggtatctgattacgattggatttaaacaaacataatttaatgtttatcggttacttattacattacaaatatgtgaaccaaacggcacatatttgtacaccgagtcctatcacttaatgtatatacgtgtgaaatgtgtatcttttccagcttgtccatcaaatgttggcatcatgatgtatgttaacgtgtgcagataagaacatgtctatgcaatatagtaatagtgcattccttct

SEQ ID NO: 17478 - DNA, 1004 bp, Zea mays
  Clone ID: LIB3069-034-A6_FLI
aataggtaacctaatacacatcttggaagagttgagctctaagtattctacatacgcttttacactgcccatagttttatttcatgacactttcacttttattttcagatactctttagtttttagttctccatgtttatcatgccatgcacaataatctgtggtgagaggtgtcttactgagtcaccaggttgtgggttcgaagtggtctctttgcgtttgggagggggcttctcctagatctcactcgtggtagccttccggcattgggtgtgcctcatttcatgtgatccttgatgtaatgtcctattaattgtgataaatagaagtaccatcaccaactgtatctttggttcgaagagcctttgttttatacaattgaatcttttgaaagcattgatgttcgtcttatagactgctgcaagctggcgcaaaatgtcttaacccccaacaaaaggatctatgttcttttatctaagtcgcgttgaattctgttctatgcctgcagaaacgcaccacgaagtgggtccatgcgcaacttacaatgatggcagcactaacaccaagcagcattcttggataggtcctctgttccaccatttgttctgttcctatcctattaattttgtggctaaaatcgtagcacagtgagatgacccaacaatacctagatctgggtaagagtaggctcggatctgatgagaccattgtgggagtgaagctgagcctgtggtctaaccttgtggcgcgccctcttgtttattttagtccaggcagtgcacctgatgcttgtataggccagggatcaccgcatggccaatctgtaatgtatagcctgagtgctcagttacatagacacccgttgcccaggttgtgaatactgtttcctcgcacatgcttctttgcgctgctctatttgccctgtgtttgggttggaatgtttaacatggcttctagcctgtctgagttctgttgattataaatagtgacacatgttcatctgc

SEQ ID NO: 17479 - DNA, 372 bp, Zea mays
  Clone ID: LIB3069-034-D11_FLI
cggggctcgccgtccgcggcgagggccgcgtggtggggtgccgcagcgcctgcgccgcctacggcgcgccgcagtattgctgcacggggcagttcgggagcccccagcagtgcaagcccacggcctactcgcgcctcttcaagtcggcgtgccccaaggcttactcctacgcctacgacgacccgacgtccatcctcacctgctccgccggcgcctcctacgtcgtcaccttctgcccgcaccgccgctgaacttttatttttttaaggtcttcggccgcgtgttgttagttatcctctgcctgcgtttgcgttttgatgttctggcgtgcgttcgtttcacttgcctccgtcacgcgtcttcggaatctcc

SEQ ID NO: 17480 - DNA, 1396 bp, Zea mays
  Clone ID: LIB3069-034-F6_FLI
gcagcagagagattactacgatccaacagttctagagcaagagagaggaagacacaccgcagagttagcaggctaataacttgcaggagcagcaggaatggcggcgacgcgtcgcctctcttgctttctcctcgccgtgcttctggcaggagtggccgctgccaccgccttcgacgaagcggctgctgccggcttcgggcttggccacggcgcgcgtttcgcgcgcaagcatggacgtgctgccgctgagatgccccagccggagccacaacctaaaactaagccggagccccatatgcagccactgccccagccagaacctaaaccgaaacctatgccacatccagagccaaagcctgaacctcaaccaaagcccaaccctgaacctcaaccaatgcccaagcctcaaccaaaatccaaaccagagccattgcctacaccgaagcctgaacctaagcccgaacctaagccagagcctaagcccgaacctaaaataaaaccaaagccaaaacctgaaccaaaaccagagcctaagccagagcataaacctgagccaaagccagagcctaaacccaaaccgaaaccagagccaaagccagagccaaccaaaaccagagcctaagccagagcctaaacccgaaccgaaaccggagccaaagccagagccccaacctaagccagagcctaagcctgagccgaaaccagaaccaaagccagagccacaaccaaagcctgagcctaaaccagaaccaaaaccagagccaaagccagagcctaagcccgaaccaaaaccagagccaaagcctgagcctaaacccgaaccaaggccagaacctaagccagagccaaagcctgagccgaaaccgaaaccagatccaaagccagagccacaaccaaagccagagcctaagccagaaccaaaaccagagccaaagccagagcctaagcccgaaccaaaaccagagccaaagcctgagcctaaacccgaaccaagaccagaaccagaaccaaagccagagcctaaacctgaaccaaaaccgaaaccagaaccggagccacaaccaaagccagagcctaagcctgatccaaaaccagagcctaaacccgaaccaaaaccagagccccaaccaaaaccagaacctaagcccgaaccaaaaccacagccagaacctaagcccgagcccaaaccaaagcctgaccctccacacatcccaccagcagctatcaactgaggaagtggctattaacaattattgtagtgtttaaataaaatgccatgttgcagcgtgcttttgtaggtgctgctacttgttgtatctatcctatcttttctttgtcattttttgtatgttatgctattatatgatcttagtgcagtttagcttgttccgtgtat

SEQ ID NO: 17481 - DNA, 942 bp, Zea mays
  Clone ID: LIB3069-034-G10_FLI
ccaacgaaaagtgcacgcacacgcgcatcccggcagtcagtagcgcagctgcctctcctctctttggcccccggagccggagcaagagcgccgccaacagcccgctaccggcgccgtgtcatggcggggccaggagacaaggtggactacgtcttcaaggtggtgctgatcggcgactcggcggttggcaagtcgcagatcctcgcgcgcttcgcccgcaacgagttcagcctcgactccaaggccaccatcggcgtcgagttccagacccgcaccctcgtcatcgaccacaggagcgtcaaggcccagatctgggacaccgccggccaggagaggtacagagctgtgacaagtgcttattacagaggtgcactgggagctttgctggtctatgacattaccagacgccagagcttcgatcatataccccgctggctagatgaactccgagcccatgccgacaagaacattgtgataatgctggttggcaacaagagtgatctcgaggagcagcgagcggtgagcactgaagatgccaaggagtttgccgagaaggagaacctcttcttcctggagacctctgcgctccaggcaacaaacgtagagagtgcttttcaaactgtcttgacagagatattcaagatccacagcaagaagaacatggtgtcggagccgaagagcaatggagctgcccaagcaatgccggggacaaaggtccttgtcccaggtccggcgcaggaaatcccaaagagcaagtgctgcagttccatgtgatgcttctacgtttggtactgggtgggttgaaaatatattcacgcaacattgtgttggttttaaatccctgctgaaatgcttgggttttggcgggattgtgttggaacaccggtgtattttagatatctgtcacaattgtgacatgagggaaggatgtgctgatgtatt

SEQ ID NO: 17482 - DNA, 423 bp, Zea mays
  Clone ID: LIB3069-034-G9_FLI
ctggatctgttgcgacttatgcgagacatggttccacggcaagtgtgtcaagatcaccccaaataaagcggagcacatcaagcagtataagtgcccctcgtgcacaggaagcaagagggccaaggcttgattctatctatctacgatatagatatgaattgcggacaatgctccaagaaccgaggagcctttgacgagagttgtaagatgaatcttccgggtagggcagctaatagatttgaatacttcgtgtggatactgtcggcattggtgcttgagatgcctcaaaatatagtgtcagtactgatcaactgttaactgttgtagtttgtggggccctcaggcatctatgttctgtagtctactgtgtggtggtttagataccgtctatgccatttgtgatgaagcagtcgttttaaagtt

SEQ ID NO: 17483 - DNA, 710 bp, Zea mays
  Clone ID: LIB3069-034-H10_FLI
gggaaagggaacgggagcgggaggggaatccaattgcgatggcctccgactcgggcgatttcggtggggagaacaagtcgttggaaacggcgaggcggctgctggaggagaccttcacgagtgaggcagaggcggaggcgctaccgagcttgccctcggggttctacgacgccttcgtcctgaggggaatccgcgtcgtccaggccctccagcccggcacactcctctgccacttcaacgtgccctccagactactcaactcgggcggcttcctgcacggcggcgcaaccgcctccctcgtggatctggttgcctccgccgccttcgccactgccgggctacgcaccaggggctcaccccttgagatgaacatctcctaccttgatgctgcttttgctgatgaagagattgatatcgaggcgaaggttcttcgcgctggcaaggcagtaggggttgccgttgtggaactgaagaagaaatctggcaaaatcatcgcccaagctcgctactccaaatatcttggtgttagtaaactctgaatcatgatgctgcctcccatatatacggggatatggtagcagcaagcaagcagggtgtggtttggttcgacagcaagtgttgttactactctacattatatcttggtgttagtaaactctgaatcatgatgctgtattactgttactcaaccatcatctcagctacttatt

SEQ ID NO: 17484 - DNA, 474 bp, Zea mays
  Clone ID: LIB3069-034-H12_FLI
ctgagcaatgagcttaatgatgtagatgagcctagcagatgcgagtatgtggctgtattgtcgacccctgcagtttgcgtagaggagaagctgaaggagctgcaaaacaaactggacgccatgtctttgaagcagcccgggcatgacgaactttaaaaactttagaatattccagcgtgaacataaagaagatgtcaccaggaggcatagctctgacagttacatccataacatgataggcatggaagtcaatgaggtatatggacagaaacgggccaagcgcgagaaatgagaatgtagagtttaggtcgcctaccaggctatattagctcgcatagaacattttttttagctgaaatttgatgttgcaattttccagactcatctgatggaatatatagtaagaaacagtacaccttgaatcagcatatactttacccagggtttttacatgaaactatgttcagaacggtc

SEQ ID NO: 17485 - DNA, 689 bp, Zea mays
  Clone ID: LIB3069-034-H8_FLI
cagcatctgccaaaagttcccctatttggtcaaaaagaaattaaaggaaggggaggaggttagacgagttgctcaacttgaatggaagataattgagagtgatattcagaaaccattcacaacttcagggctagagtttgttcccttgccggtgatccatggtgaagactacatttgtttgggtttccttttcggaaggaaatcaaaagttgcttacatatcagatgtttcacggtttcccccaagcacagaatatgcaatttcaaaatctggaggagggcaacttgatttgctcatcttggattgcctatacaggacgggttctcacaatgtgcacttgtgttgggaccagacactagatgctgttaggaggatttgccccaaaagagcactgcttattgggatgacccacgagatggatcatcacaaggacaaccaaacattggaagaatggtccaggagggaggggattgacgtgcagttagctcgtgatggcttgcgtgtctacattgatctgtagccgtgaaaggaaaatatgccatactcagcgaaccgcgccaggctttctggctgatgtaacatccattcccacttgtgaagaaagtgcaaactgactaaaaaggcgagcctatttggtgcatcattttacgtttcgctagtttatacgtgaatctctgaataaaaaagag

SEQ ID NO: 17486 - DNA, 882 bp, Zea mays
  Clone ID: LIB3069-035-A3_FLI
ttctccagaaaatgttaaatatgctgccatgcttggtctgtcagcagcagcaatgaagtctaagctctttgccgatcaagaagaacgcgaagtgcaaagactaactgctactgtaataaatcatcagttgaagagattggagttgaagctgaagcagtttgcggaagttgagaccttgctcttgaaggaatgtgagcaagtagaaagggttagacacaggatttcagctgaacgcgtcaggatgaggtcagccctattaggtcccaccggaagcggtctaccagggggcagttgtagcactatgccatcaaatccagcaggcatgagccccagaccagtcggtgtgccaggctacatgccacagaccagcatgccagccacatatgccaacaacctgcaggggcatgggaatcctcagatgccgttcttacatcagcggcctcagatgctttcgttcggccctcgcctaccactctcagccatccagactcaaccatcaccacaatcatcaaacatgttcaactctggcatgcccaattcgattgctcctaaccaccatcagttgctgagatcatcctccggaaacaattctagtgcaggataggggaattgtccataagatttttttttctcagcttaggtttgtcaggtgtagcattatgtcatttataaacacatcactgtaattcatttatgtgatgtatgtgtttgtcatataagtttttttattaggtcctataaattgtccccatattgctgcgcccttgtgtacctttgttaccaggtcacctcttcccagtgcagggagattcaaatgaacagaatatgttttcatatgtatcccttgagaactcttattgaatatatgtatgtagttaattc

SEQ ID NO: 17487 - DNA, 570 bp, Zea mays
  Clone ID: LIB3069-035-B8_FLI
ctcctgggtcctgatggggaggaattgcgtgtgttggttgtgaaagaggcagttcgtgtaacagaagccatcactattggaacactgatcgattcatacaatgcatctccagcgtttttgaagccattaatttccagtggcaatccagccggacccttcaagtttagtgaggctgaacaagaacagatgttggagctccgagaccaggttttcagagtatggggtcttttgagatcctcaaataactttgatccgagccttttgcaaccaatcgttcaggtgctacaagaaccagaggcccgcgtcttgggttctcgtgtcgcaggtggtgtaacacagcgccttgcggcacgtctgctgcaacagcttctcaggatcccttctcctggatcttcgtaacagattatatagagatgggctcgtatgaagcatgtaaattgacacgatacttttgacaggaaactgaggtgccatttgattcaagaaatgtaaatatagatatgggctcgtatgaagcatgtaaattgacacgatacttttcacaggaaacaggatgtcatttgattcatg

SEQ ID NO: 17488 - DNA, 770 bp, Zea mays
  Clone ID: LIB3069-035-C4_FLI
aagtgcaccaaatatattctcttcaaatatacccgcagcacgcggcatgcagcatcgctttcaggcaccgaacgtcgccccaccagtgcacacatgacatgagttgacagacatccgaagctgccgcgctgtgctgcctgcccactacgcaccgcccatgcccaggcaggccccagtctgaaacctatgtgccaaagcaaaccactaaacaaagccgtcggctcgcaaaccattagcggcgcgcggacgctgctctgctgcttaagcttataaaagcaggcggggggtgctgctgccaaccccgcccaccaaaccgcgccacccattgttgtcgcttctcacttctcactcaccaaccaacccaaccgagcaacttggctcgtaccgtacgtagtacctgctgcgacacgccgaggagctagacctgtcggagctaggacagtcagacacgagacgacagagaccatgtcgacgacgacgatgaaggcgagcgacccggggtccgcgtggttcggcagcggcgcacgcacccggtcggcggcggggataagccacaacgcgcggctcgtcaccaccgaggtcgccgcgttcgtgtccgtgctcggcctcgccctcttcctccacctctacgtctgccacgtgcgccgccgcaaccgccgccgcgcggcggcagtgctgccgacgaccacggccgccgcggcggcggcggcggccccgaagcgcgggctggatcccgcggccgtcgcggcgctgccgaccgtcctctacag

SEQ ID NO: 17489 - DNA, 595 bp, Zea mays
  Clone ID: LIB3069-035-E2_FLI
cggagaagaagccggtggccaagaagcccgcggaggaggagcccgcgacagagaaggtggagaaggctccggcggggaagaagcccaaggccgagaagcgcctcccggcgggcaagtccaaggagggcggcgagggcaagaaggggaaaaagaaggcgaagaagtccgtggagacctacaagatctacatcttcaaggtgctgaagcaggtgcaccccgacatcggcatctcgtccaaggccatgtccatcatgaactccttcatcaacgacatcttcgagaagctcgcggccgagtccgccaagctggcgcgctacaacaagaagcccaccatcacctcccgcgagatccagacctcggtgcgcctcgtcctccccggcgagctcgccaagcacgccgtctccgagggcactaaggccgttacgaagttcacctcgtcttaggatccttgtaatggtcatgtgggcgtcggcggtaggcgtggctcagtttatgtgatactgctagcgatggatgatgatgatctgcgtgtaattgaattaaagaattgtgctgatctttctacaacactgttccacatcactcgttgcccgcc

SEQ ID NO: 17490 - DNA, 1409 bp, Zea mays
  Clone ID: LIB3069-035-E4_FLI
ccgccgccgccaccaccagcactgccactccgccaccaccgtcccgaagccccctcccagcgccatcgacttcatctcggattgaagcaatgtcgtcggacgatgaggtcagggaggagaaggagctcgacctctcctccaacgacgttgtcaccaagtacaaggctgccgccgaaatcctcaacaacgctctgaagattgttgtgtctcagtgcaagccaaaagtcaagattgttgacctttgcgagaagggcgactctttcataagagagcaaactgggaatgtttacaagaacgcaaagaggaagattgaaaggggtattgctttcccaacctgtgtatccgtcaatgacacagtttgccacttctcaccgcttgcaaccgatgatgccgttctggaagaaaatgacatggttaaaattgatatgggctgtcatattgatggctttattgctgtggtggcacatacacatgtaattacaaatgggcctgtcacaggaagggctggtgatgtgcttgctgctgccaacacagcagcagaagtcgcaatgcggcttgtgagacctgggaagaaaaataaggatgttactgaagcaattcagaaagttgctgctgcttatgattgcaaaattgtggaaggtgttcttagccatcaactgaaacaatttgtgattgatggtaacaaagttgtgctcagtgtctccaatgctgatacaaaggttgatgatgctgaatttgaagaaaatgaagtatatgcaatcgatattgtcaccagcactggggaggggaagcccaagttattggatgagaaacagaccaccatctacaaaagggccgtagacaagaattatcacttgaagatgaaagcgtcaaggtttattttcagtgagatcagccagaagttcccaatcatgccttttactgctagggcattagaagagaagcgtgcgcgtttaggcttggtggaatgcatgaaccatgaactattgcagccgtaccctgtacttcatgagaagccaggcgatcttgttgcacacataaagttcactgtgctgctgatgcccaatggatcagataagataacatcacatcctctacaggagttaaagcccaccaaatccattgaagacaatgcagagataaaggcatggcttgctttggggacgaaatcaaagaagaagggtggtgggaagaagaagaaaggcaagaaaggagatgcagcagaagcagatcccatggaggaggcgacaaacggtgctacaagccaagaataattctgatttttggaattactgccaccagcttttttcttgtttcttcgctgcatctgatggtgttatattacattcagttgtggaaaaattgagtactatttctagcttctaagaaatgaagcatcctattatcgc

SEQ ID NO: 17491 - DNA, 757 bp, Zea mays
  Clone ID: LIB3069-035-F4_FLI
taagaagaccgacgactcactcacaaccaattagctcaagatcgagctatagagagaaaagctaagatcgaaacatataccaatgggcaacagccttaggtgctgcctggcctgcgtcctcccctgcggcgcgctggacctgatcaggatcgtccacctcaacggccgcatcgaggagtacggccggccggtggccgccggcgagatcctggccgccaacccgaaccacgtcctcagcaagccgtgctcccagggcgtcgccgtgcggaggatcctcatcgtgtcgccggactccgagctagagcgcggcgagatatacttcctcatcccggcctcgtcggtgccgccggagaagaagccgcagccgcagcgacagcagaagagcgtcgtcctggccggctcgcacggcaaccaggtggtggtcaacaagaagatatcgtcgtcgcaccggagacgacgcaccgccggctgcagaaccaccgtatggaagccacacctcgagtgcattgttgagggggacacttaggcagaggtggacgatgatccattcttttgctctctctttttttttttggtttttgtggatcaagcggggggctaatggctaatgcaatgtaacaccactagcagcatggtgttttgcccactttgtgtggttagtcagcatttttaatcttttttcttgggtaattgtatatccatgtaatgttttcccccttcctacatatgatgggaatgcagaggaagggttgttgcc

SEQ ID NO: 17492 - DNA, 1019 bp, Zea mays
  Clone ID: LIB3069-035-G11_FLI
cggtgctgtggacggagagcaaggacgtgggcaagggcttccgctgcatccgcatggtcaacaacacccgcctcaacttcgacgccttccacggcgacaaggaccacggcggcgtgcacgacggcaccggcgtcgtgctctgggagtggtgcaagggcgagaaccagagctggaagatcctgccgtggggtcccgaggccaactccgccgcggcccacgcgggaggcccgcacgccgtgcgcgtcttctgcaaggccggcggcgaggactacagcctcacggtgcgcaacggcacggcgtgcctggcgcccaccaacccgcgggacgagtaccagcactgggtcaaggacatgcgccacagcacccgggtgcgggacgaggagggctacccggccttcgcgctcgtcaacaaggtcaccggcgaggcgctcaagcactccacggggcagggccaccccgtcaagctcgtgccctacaacccggactaccaggacgagtccgtgctctggaccgagagccgcgacgtcggcaacggcttccgctgcgtccgcatggtcaacaacatctacctcaacttcgacgccttccacggcgacaaggctcacggcggcgtccatgacggtaccgagatcgtgctctggaagtggtgcgagggcgacaaccagcgctggaagatcctcccttggtgaacgaacgaaagaaactactagctggtaccctaataataattctgctggctgcggcgatccccaaataaaagaggcagggtgcgatgcatcgcggtcttctcgactctcgagtggtgtttgcgttagacagccagccactgtgtggctagtgttccaacatttgtcagcctgcttgcgcgaggaagtgggggtgactgactcaagagaagggcctggtcataggctgctgcattatgaatttctgatcatgtcttatgtctgtactctgaatcaactatgtatgagatctcatctcctttctcctactgaatgaatgaatcattattggct

SEQ ID NO: 17493 - DNA, 1237 bp, Zea mays
  Clone ID: LIB3069-035-H2_FLI
gggtgacggtgcatgccatgcccatgacacccctcgggtgcgagtgcgacatggcccctgcagcttctcgccagtcgtggcctctccctcgctgcggcctgctggtcttggcccttgcactggcgacgaccgccgcggtgggcagcgcgcagctgtcgtcggagagctactacgacgcgtcctgccccgccgcccttctcaccatcaggaccgccgtctcgacggccgtgctgctggagccccgcatgggggcctcccttctccgcctccacttccacgactgtttcgtgcagggttgcgacgcgtcggtgctgctagacgacacggcgagcttcaccggcgagaagggggcggggccgaacgcggggtcgctccggggcttcgacgtgatcgacaacatcaagatgctgctggagctgctgtgcccgcagaccgtctcctgcgccgacatcctcgccgtcgccgcccgcgactcggttgcacaactgggaggaccatcgtgggcggttccgctgggcaggagggacgcgaccacggcgagcgcgtccctggccaacagtgacctccctgggcctaccagcagcctcaacggcctgctcaacgctttctccaacaagggtttgagcagcaccgacatggttgccctctcaggtgcccacaccgtcggccgggcgcagtgcaagaactgccgggcccggatctacaacgacaccgacatcgacgcctccttcgcggcgtcgctgcgggccagctgccccgcgcaggccggcgccggcgacggcgcgctcgagccgctcgacggctccacgccggacgctttcgacaacgcctacttcggcgacctgctctcccagcgcggcctgctccactccgaccaggcgctcttcggcggcggcggcggcggcggcggcggcgcgacggacggcctggtcagcgcctacgcgtccaacgccggccagtggggggccgacttcgcggcggccatggtcaagatgggcagcatcagcccgctcaccggcacggacggcgagatcagggtcaactgccggagagtgaattaattatttattacagccacgttgattgcatttgctcttggggtagtggaatagcgtgcatattttgcaaagaggcagagaagaattgaaatggagcctaagctcatatgtatacaaatgttgtttattattccatattatttcgtgcatatataatatatatatagcatacatgtact

SEQ ID NO: 17494 - DNA, 763 bp, Zea mays
  Clone ID: LIB3069-036-B11_FLI
gcttgccactggggatgtgctattcgatccacatagtggcgataattttgacagagatgaggatcacctcgcactgatgatggagctgctaggaatgatgcctcgaaagattgcgttgggtggtcggtattcacgtgatttcttcaatcggtatggggatttgcggcacatccgacgcttgcggttctggcctctcaacaaggtgctgatggagaagtacgagttcactgaaataaatgctaatgggatggcagattttcttgttccaatacttgattttgttcctgagaagcgccctacagctgctcaattgcttcagcatccatggcttgatgttggtcccctccgacagcaacctaaaacacggccagagtcagcacggagtccaggtgatggtgtttcagagaagcaaaagaaagagaaagaagaaagagaggcaatggccgtagagttggggaacattgccatagatggtgcttcttcttccaggatggcaaatgacccccaatcaagcacaaataaaacaaccgctacctcttctaagaagtgagctgcatttgatttcttgagttaagctgtaaaacttgttttcattcgagaattgttccatgagtgggaaacagatgttttttttaggtttgagatatgttaggatagctaccgagggaaaagaacagtaggctaaatatttgttgtatgggattgggtggacaaggttagatttgtcggggttgcagtaaccctagcccttttctttgagaac

SEQ ID NO: 17495 - DNA, 943 bp, Zea mays
  Clone ID: LIB3069-036-D1_FLI
ccgtgctccctccgctagttctcccatttccttccccacctcggtcgtcgcctcccccagagagcaggagccgcctcgtccctgccggtcccgaccccgacccccatcccgtccgcgtccaacgccatgaatcccgagtacgactacctcttcaagctgctcctcatcggggactccggtgttgggaagtcttgcctgctgctcaggtttgcggatgattcatatctggagagctatatcagtactattggagttgattttaaaatccgcaccgttgagcaagatgggaagacaataaagctacagatttgggatactgctggccaagaacgctttaggaccatcacaagcagctactaccgtggagctcatggcattattgttgtgtatgatgtaactgaccaggagagctttaacaatgtcaagcagtggctgaatgaaatcgataggtatgccagtgaaaatgtgaacaagcttttggtggggaacaagtgtgacctggctgagaacagagtagtttcttacgaggctggcaaggcccttgctgatgacatcggaataccattccttgagactagtgccaaggatgcaacaaatgtggagaaggcattcatgaccatggcaggggagataaagaacaggatggcaagtcaaccagctgcaagtggtgctagtaggcctgcaactgtgcaaatgcggggtcagcctgtttctcagcaaagcagctgctgctcttgatcgtctgtctagatcacagtagtgtgattgtgcagcaagcaaaacttaaattggttgctccctgtacattaagcctattactgtcccaaagaactcgatgttatctatcggatactggaagtctgtctatcgactgcaacgattaagcagatatggcctgttttatctgtctgttcttattccagtgctaatgtgatgttggatc

SEQ ID NO: 17496 - DNA, 1089 bp, Zea mays
  Clone ID: LIB3069-036-D11_FLI
ctctccacaagtccagatctcccattcacacacactcgcgcgcgcacagagacctccacgcgcagccaaagcatccacccatggcgcctctcctcctgctcttcctcctcggcggcctctgcgccctcttgtcgctcgccacttcctcacgcgccagcgccaagaagtgcgatgacgtcaagagcaacggcaattgcggggactccggcgaggaggcaagatgcagggacgactgcgcgccagaggagacgcagcagcaggggaagatgcaggcgcggcccgacccggagaaggacctgggcatcgtattctccacgttcgaccacgacggcgacgggttcatcacggcggtcgagctcgaggagtcgctgcgccgcctcggcatcgcagtgtccgccgacgaggccgcggccatggtcacgcgcgtcgacgctaacagcgacgggctcatcgacatccacgagttccgcgagctctacgactccatacccaagaagaggaagcaccagcaccccgccgccggcggtttcagcggggcagcaagggaggtgccggtggagggcgacgacgaagaggccgaggaggagagggacctgcgggaggcgttcgacgtgttcgacggcaacaaggacgggctcatctccgccgaggagctcggcaccgtgctgggctcgctcggcctgcgccgccagggcaacggccggaccgccgtcgccgattgccgcgacatgatacgcctcgtcgacagcgacggcgacggcatggtcagcttcgaggagttcaagcgcatgatggccgtcgtcaaggcctaggctgctcttcttcctcctcgcagatcaaatcaagtaccaaacttgagtagcgttatttcgttcttggatcggaaaagattaacacaccaggagctcgtatttgtttatgggggggtttgaaagctgaagtagctttttgatctgtgtttctcccctgttcttcaatcttgataacttgctctgcttttacactctgattctctcctactttttttagtccttggtactgttttcactgacatatattgatcagacatgtatgtaaatattacttctt

SEQ ID NO: 17497 - DNA, 1345 bp, Zea mays
  Clone ID: LIB3069-036-D6_FLI
atacacaagcacaagcgcactctagcaatggcttctgaggttgtccgccctagcgacgccgagctactaaaggcacaagccgacatatggcggctcagcctctcctacctcacgcccctgtcactgaggtgcgccgtggagcttggcatccccacggcgatctaccgccatggcggggctgcctcagccgctgagctggtcacggcgctgtctctcccctccactaagctgccgttcctccgccgcctgctgcggctcctcgccgcgtcgggcgtgttcaccgtcgacaagcagagcacggaggaggagcggtaccgcatcagccccgtgtcctacctcctggtggacggcatccctcacgaggaccacatgaaccacaccgctctggtgctcacctgcacctcgacgcgctacatcgaggcggggatagggctggcggagtggttcaagagggacgtggtcacgtcaccgttcgaggagctgcacggggcgactctgttccacgagagcatggggagcctcgacgcagatttccacgacatggcgagcgaggccttggacgcccacgacaacttcggcatcgagatagctatgcgggagttcagggacttgttcgaggggatccagtccatgacctactgctgcggtaacttcggtgatgacaagggtgccagggccattgtcaaagccttcccacacataaaatgcactgtgctggcccctcccaagatcattgccaccaaaccggccgatggagcgaagataaactatgtcgaaggtgacatgttcagtttcattccacctgctcaaactgtcgtgctaaagcttgtgctgcaccacctgaccgatgaggagtgcgtcaagctcctggctcaatgccggaaggcgattcctccacggaaggacggcgggaaagttataatcggtgatattatgattgaccactctgggcttatgctggaaactcacctcctgatggacatcggcatgatgaccatgacaaaaggacggcagagagatgaaaaagaatggagcgagctcttcaccaaagcagggttcagcgaatacaagatcctgaaggaatttggagctcgtgttgccttcgaagtctatccgtgagatatatatatatatttacatacatatatgtatgtgtgtgggtgccttgcgtggcttggcgtgatgatgtcataaataaagagggtgggtgtgcttgcggtattcatggatggccatggatctgagcacatgacgttggatgctttcttaaggctctcgtggatcttctatatttggaagaagctgtaaaataatatatcgccatctagtgttggcgttggcttgt

SEQ ID NO: 17498 - DNA, 750 bp, Zea mays
  Clone ID: LIB3069-036-E2_FLI
caagaacaactccaactcccatctctcactacggcaacactttgcgagctgagccatcaaagctcggggcggatggcggggcggcggcagatcaagaaggagtgggtgcaggcggcggcggacgcggcgtcgtggtgcgtggcgctgtcgctggtggcgatgctggtggtgctgtgcacgctgggcgccggggaaggcggcggcggcgcgccggtggtggtggtgcgcggcgcggcgctgtcggcgcggccgtgcgaggagatctacgtggtggcggagggcgagacgctgcacagcatcagcgacaagtgcggcgaccctctcatcctggagcggaacccgcacgtgcacgacccggacgacgtcttccccggcctcgtcatccggatcacaccgtccaagcccaggtagatcgatggcgatccatcggtcgtcgtgaaccgaacagaatgccgttgctgacttgctgtggtgtcgtcaagcccccctcagctgcatgccgcgtacgtactacggtgtgcagactgcactgcagagggatcggagagcgtagcgatgcaagaggacgccatgtactgttaagtatgcgtgaacagcgtgtagcaagaagctctggacgaggcctccagcctcctgtgtgtaaattgtaagggacgccgcgctagtgcttcatcaaccacgtgattggtttcgtgagtgtggagcgtctgcctcgagtcagcctggcttgctaaataaaggttatgcggt

SEQ ID NO: 17499 - DNA, 382 bp, Zea mays
  Clone ID: LIB3069-036-F1_FLI
ttgacgaagcctcagcaggagatggttcgatgctgaagaatctcatttctcaagatgactctggtgcgtcttcttcaaaagcttctcggtccttctccctactgtcaccgttccgcagcaagcacaaggtgattgttctgtgagcacaaggtaatcaatttgggaggagaggaatataatggcgcagcacagtacatacttttggtttttcccttctagtatatatttacacacacgtatacataaatacatacatactatatgatggacttgtcattagacagcctatgtgaaggctgtgtgtggcgatggatggttgtttgcccttgtggttttgtaccctaactatttgtgttgatatatatggtgatactttttgttc

SEQ ID NO: 17500 - DNA, 901 bp, Zea mays
  Clone ID: LIB3069-036-F4_FLI
agagatgggatgtgctgcttccaggttagaagatgaggaggctgtcaagatgtgccgggacagaagggacttgatcaagcaggcactggagcagcgcaaccgatttgcatcttcccacattgcttacattgagtccctgaagcgtgtttcggtggctctccaacggtttgttgccggagatgatcaccatgagctaatcttcgatacattcatctcccctatcaagcaacagaagccagagatgcttggtctgccttatggttcatatgagaagagaactattcatgtttcaagatacctgaggtcagggcctaacccatcagtgtccattgaggagcacccacgtccggtggaaacagtccgtgtcgagtcaaattaccctatggacaacgacagtggcatggtggatagattcctaccaacaccctcttcaccagtgagatcgtcttcatactacccgccaccttataacaggccaagctacccacctccattggaccaggaaacagttagaaattcttcctattgcatgccttatgacaggccaagctatgcacctccatcaacccaggagacaatgaggacttcttattatgcatcttatgacaggccaagctacccaccaccatcaccccaggagccactgagaaattcatatcacgtgccatatgacacaagctacccacctccgtcaccccaggagcaggaagcatcaccgtgggacttcttctggaacccattctcatcactggacagctttacatatccccgccctcggagtagctatgacaatgtggtcactgatgatgaactcgcgaggttacaacgggtacgagaggaggaaggaatcccagaacttgaagaggaagatgatgagtgtcaagagcatgtacagatggac

SEQ ID NO: 17501 - DNA, 327 bp, Zea mays
  Clone ID: LIB3069-036-G5_FLI
gagaaaaatttgaaaagatcgattacgaacactctgaacagattatacggacacgtgcaggtgtgggccgcatcaggtctcgtctcagcctctcatcaggcgcgctctctcagctcgcatccctcttcgatccagcacgcgctgacgccccgtacggcacgtgctcgtggtagggccgtgcgaattccagcgcgcggcacggaaaaagacatgcagtctctcagtatcccagccggcagccggtcagtgtgcctgtggtaggtcaccacgcgcgctgcagagcgcagatcccgcccatgcgcgcggcgaggaccacgacgacaccgc

SEQ ID NO: 17502 - DNA, 952 bp, Zea mays
  Clone ID: LIB3069-037-A10_FLI
atccacttctgcccatacttcctccatttatatccatcgaagtgcggtgcttgtgtcacaattgaacctgtgtgttgtgcattcttcctaagagaagggggtaactattttaagcccaagtaaatgacacacaagtaaacatatatatataaacttcttttgctacacaccttctcttatttccaatttctttagcttcctcccccagcatgtggctctccacgccgctattcttaccacgttttcttctatatttgataagattggcctgcttcttactgttatcaccaggttcgagaaaggagaggaccttacctgaggaactggatatatcttgaaagatttgctgaacaagcttctcctgcctactacagggatcaagtgttggtacgataaggtcatataggcccttcatgagagccctttggtgttcaatctcgttgagcaccacttggcagccactacgagtggaagattcaaggatgttcatttgatgttctctaaaatgtatctcgctataaactatatataatagctggactttggagctggaggtgctaggtttatgcagctttaggcatctatttatacaagcaagctagtagcagcagcacacacagtatgatatgagcatggtggagggaatggatcgtttttcaaattttctcactggagaagactagggaggagcaatgtccctgtccaacggtggtatgtggtacaactaaaggatgggtggcagtgtctacatcactcgcatgacgttcatggaaggaaacatgcatatagctaggggcaataattcttgaggctgttatagggaggagcaggcaacgttgctgtacatacacaggccctaggacagggacatgcttcattgacctctaatggtaaatgataccgagtcgtttcgaaattcctgcaaaataaactagtcaatctcatcttacac

SEQ ID NO: 17503 - DNA, 1251 bp, Zea mays
  Clone ID: LIB3069-037-A12_FLI
tgagtttccggcaagggatctaccaggaggcgatcatcttctcctccaccaagaacgcccagctccccgacggccaagttcccgtgccggcgcagctcgtaccgtcgaatccggtgctgaattccgaggtctcaccggcgacagtgagccaaggtcctccagaccatcctcccggcgctcgtccgtcgccgcacagcggcgtggccaacggcaagcaaacgccacggaatcccgtcgctacctcgccgagccaggatgaccggtccggggcagggaaagagaaccagtcgtgcagcaacacgccgagcacgagcagccgccagtcgccgtcgcagcagaagacgcccaagtccagggcgacgccgccgcctgacaggcgcagggttactcctgctcagacaagccctgctattgcgcctgaccgtaaacggcctgccgacgctgctgctggcactggcagcaactctgacaaagtgacgacgtcccacgacgacgcgagctcgagcgtgccgaacaaagtatcggaggagctgctccggtgcctgctggccatcttctcgcagatggggggctcggctgctggcggcggccgaggactaggagacgaggaccagcagcaggcgctgtccccgtcggtgtccggctccagcgagagctcggcgtcgtcggaggcggacgcgtacccgcaggacccctacggcatcctggagctgggcgccagggacatcggcgcctacaagcggttccacgtggtcgacgccgcgtccttcgacggcaacggcgacacgcctctcgttcgtcggagactcaaggccttgctgcggaggctgtcgtcggttgacctggcggggctctcccatcagcagaagctggccttctggatcaacgtctacaattcctgcatgatgaacgcgttcctggagcatgggatacctaccaccccgcaaatgctggtggctatgatgcccaaggccaccgtgagcgttggtgggcgcacgcacagcgccatgtccatcgagcatttcatcctgaggctgccctacagcgccaagcaggtgaaggtgagccgggaaggagccaagtgcgacgacggcgacgtgacggcggcgcgcggcgcgttcgggctggagtggcccgagcccctcgtcaccttcgcgctctcctgcggcagctggtcgtcccccgcggtgagggtgtacacggcggcgcgcgtggaggaggagctggaggcggcgaagcgggagtacctac

SEQ ID NO: 17504 - DNA, 961 bp, Zea mays
  Clone ID: LIB3069-037-B1_FLI
gttgcaggctgggctccccgagggtgttctgaacgtggtgtccggcttcggcccgacggccggcgcagcgctctccagccacatgggtgtcgacaagcttgcgttcacgggatcgacgggcacggggcagatcgtgctcgagctggcggcgaggagcaaccttaagccggtgacgctggagctcggtggcaagtcccctttcatcgtcatggacgacgccgacgtcgaccaggccgtcgagctcgcgcaccaggcggtcttcttcaaccagggccaatgctgctgcgccgggtcgcggacgttcgtgcacgagcgcgtgtacgacgagttcgtggagaagtccaaggcgcgcgccctgaagcgcgtcgtcggcgaccccttcagggacggggtcgaacaggggcctcagatcgacggcgagcaattcaacaagatcttgcggtacgttcagtccggcgtcgacagcggtgccaccctcgtcgccggcggcgacagggtaggcgacaggggcttctacatacagccgacggtgtttgccgacgccaaggacgaaatgaagatcgctcgggaggagatattcgggccggtgcaaaccattctcaagttcagcggcgtggaggaggtgatccggcgcgcgaacgcgacgccctacgggctggcggcgggggtgttcacgcggagcctggacgcggccaacaccctgtcgcgggcgctgcgggcgggcaccgtgtgggtgaactgctacgacgtgttcgacgccaccatcccgttcggcggctacaagatgagcggcgtcgggcgggagaagggcatctacgccctccgcaactacctccagacaaaggccgtcgtcacacccatcaagaaccccgcatggctgtaaatcacatcctccgtccttgcccgcacggcgctgcgccggttctcggagaacgtgacgaataaaacaaacggtttggtt

SEQ ID NO: 17505 - DNA, 2726 bp, Zea mays
  Clone ID: LIB3069-037-D1_FLI
ggtggcaaatgcagtttcagccagtttttccgttcatagcagcacagtgagaggattgagatggcttggcaactcacgtcttgtttcattcacatataatcaggttaatgataaaactggtggatacaataataaacttgttattacatgcttaagaagtgggctaaatcgctcattccgtgtgctccaaaagcctgaacgtgcaccgattagagcattgagggcttcttcatctggacggtaccttctaattctgtttcgcgatgctcctgttgaagtgtgggctatgacaaagaaccccatgatggtccttggcgcttccttttacagtattagaatggacactgccagctgcacctcggccaggtcaaaatgcatcatctaaacagtcttcaacctccaaggagcgatcagcagaggcttctggtgcagaaagttctgatgaaacatgtgaaagttttgcttttgcattagtcaatggcgctcttggtgtgtttgaagtgcatgggcggcgaatacgagattttaggccaaagtggccctcgtcatcatttgcatcttcagatggtttggttactgctatggcttaccgccttccccatgttgtaatgggggatcgatcaggcaacattagatggtgggatgttacaagtggcctttcttcttcttttagcactcacagggaaggcatcaggaggataaagttttctcctgttgttcatggtgatcgaagcagagggcgcattgctgtgcttttctatgataatacattttcgatatttgacttggatagtccagaccccttggcaaatgcccttcttcagccgcagtctcctggtacccttgtcttggagcttgattggttgtcaacccgaacaaggaaggatgaaccacttatgttatgcattgccggagctgatagtagcttccgactgattgaggttaacattgatgctaagggcagttctatttcgaagccagtagctacgaaagagaggtttaggccaatgccattttgtttgccagtattatttccaacggcccatgctttggtaaggctttgcgaatgattcttcaacttggggtgaagccttcttggtttgaatgcaataatagtgataaattaactggggacagctttaaggtagcaccaacatttggagatcttcgtagttacatgattgagacaacactccctcctattggtgacgccgttgtggctgaattgctccttaaagtgttggaaccatacagaaaggagggttgcattcttgatgatggaagagccagcctatattcagctatagtgaacaagggagcttgtgcaagatttgcatttgctgctgcgatttttggtgatttccaagaagcacttttctggctacagctgcctcaagctcttcgccacttcctgggtaaatcaacaagtagatcaagagagaagatctcacaatcaagtttacatcctgattctgaacaaagctccagatttaatcggatagcttcaagagagagatctgcttctgaaaagttcacgaaaaatgctgcgaattatggccaattaagctcaatggcatttaatcaagagcaactatggttcaatgcaagtgaaaggataccttggcatgacaagctcgatggtgaagatgctttgcaaaagcatgttcatgagcttgtctctctcgggaacttagaggctgcggtttcattgttactttcaacgccccctgaaggatcaaatttttacccaaatgcattaagagcagttgtgctgtcatctgcagtctcacaatccttgcatgaacttgcagtgaaggttgttgcagccaatatggttagaacggacaaatcggctatctggcacacatcttctctgtgctgttggaagatatcaggaagcatgttcacagcttcaagatgctgggtgttggaatgatgcagctactttggccgcaagccatttgcatggatctgactacgcaagggtgctgcagaggtgggccgattatgttcttcgtggtgagcacaatatgtggagagctcttatcctatacgttgctgctggagcactgccagaggctttggatacactccgcaagagccagcgcccagataccgcagccatgttcttgctagcctgccacgagacctactcacaagccttatcagaatcagagcccgaggacgacacttccgtgttagcactgacgccgacgccgacgccggagcagacggagaacctccggttcccttccaagaatgtggccgacgaggacctgatcgcagtcagtgaggtcttcgggcagtaccagcagaagctggttcatctctgcatggacgccgaaccgacgtctgactgaatcgcacgccttgtcgcatggcagactgatgcgaagctttttgttctgtctgttggtaggtaccagacgtccagacatggcatcgggactgctgatgtggcagaatctgatggcaggaggcaggaacagacatgcagtgctgtatcgtaggtgccaatggttggcactgtttatacatacgtaagcatttgtatttggtacaagctatgtttttttttctttggtgcgcaaagagcgagtgcgcagcgaacttctcttgtggccgagatgagatgagaacagatgccatcgaggcagcagcagacgatatacttacacctgtacacccatgacagtttttgtctgaagattggttattatatgctt

SEQ ID NO: 17506 - DNA, 1105 bp, Zea mays
  Clone ID: LIB3069-037-E10_FLI
agaaggacggccggccagtttagcctagccacgctcgctctacgtcctcaatcctgattagcttcaaaccgccatggccatggggctccccggcctccgctgccaccgcctcctcgctcgcgggtcactccctccactcggtcccgccctctatcgcaggcccctggagcgaacctcggctctccgctactcctccctccaagctcaagctggggacagtattggggaggaggccctgcgcatgttccttgaggagaggcaactgcacggcgatttcgtcaccaaggtctctgacatggtctggaggaggaatggcgccaatgttggtgcggctgaggcgaccacaggccaagggagtgcagtagatgttgctcagcctgaagacgtgcgggaagatgctgtggacgagggaatgttgagactagcggcgattagtgattgggtgtccggtgacagcagccctcctttaagcaagaggctttctgctgaggaaaggcagaacgagagcaacaaaaggaaggagctgaatcttttgaaatatgaagcactcaaggatgaattgctgctcttgaccacaggaactggagcagcatgtagtttatattgtctcctggttttctctctggagactgctgtcagttatgctttgggggttggttttagttgcttgtatcttcaacttctgtatcaacatgctgataacctatcaaaggaagatattccagaagtttttctaaagaagaaagtgaagaaaattggcattacaagtgaagatttgaagaatacaatagagaagacattgggtggtgcaggactagctctttcatctccaaggcttatgattcctgccgtgatttatggattgtcagctttatcacaccacttccaaaatagctttttcagttttgaggttcttccagggatgatgggtttcctcgcgtacaaggctgcagctttggtccaagtctatagagataacgaggacctccgcttgatacttcctgatgaagaggccgatgacagtgacagcacttgatgtatacaaattagacattatgttaacctagtggttgttgacaaatacaaaacagatcggttcaccacc

SEQ ID NO: 17507 - DNA, 716 bp, Zea mays
  Clone ID: LIB3069-037-E6_FLI
cagatcctttggtcgatggaactaggtataaactgcaagaaatacatggcatagggaactccatggaaggtgatgctaatgcaaatgatccatagaaagaatgtgttatttgcctctcggaaccaagggggatattattgtcctcccatgtaggtatatgtatgtgcagtgagtgcgccaaggtcctaaggtaccaaaccacttagtgcccctgcagccccatctacaggcagcctgttgagagtcgcctcgagatcaaagtgaacaacaaatctgaagattagtagctgacgccctaatcaccaccgctcccagagctgcggtgtagtcgtgatcaaattcaggtctgatgtattatatggctctaatttgcgagacttcaggccttccctcaaggtttgttctctcatttgagcaacggggaatgtaactgatactttttcctttagcatatgtaagcttctagcatcgcatggctttgccaacctctgttgtatatgcatatctggaggtcagagaccaagatgccaaggagagtgtgtatcatatacacatcattcatgcatgtgccatggctacctgaagaagcgtggtgaggaggattcctcatgccaggttgacttcctcttgggaaaaagggggagacaaggtggtctcttaaatttgtaaaaaataactatttcaccttgattccataccttcgctattacagcctg

SEQ ID NO: 17508 - DNA, 1062 bp, Zea mays
  Clone ID: LIB3069-037-G6_FLI
ccgcacgaaccgacgcactagaccgacccgcgaatcccccgcgcgcgcgccgtgcggtcaccgtccgaggccacggcaccgccggcccccgcccccgccccggccgccaagagcaaaggcaaggccgacgcttcctcctcgtcgtcctcctcctccactccaccgaggttgcgccgcgcgcttgccgtcgtgatggccgcgtcgctgctcgtgctcgccgtggcgttcttggttggctctggctccggggggatcgatgggggcgcagcggctcccgtcgaggtggagggcaccgaggtggcctacggtagtgtgatcaagctgatgcacgagaagacgaagcaccgtctgcactcgcacgatgtgccctacggctcaggcagcggtcagcagtctgtcaccgggtttcctgaaggcgatgactcaaatagctactggatcataaggcccactccagattcatcgtctaagcaaggtgatgccatcgaaactggtggcatcatcaggttgcaacacatgaggacacggaggtggttgcacagtcacctgcacgcttcaccgttgtctggtaaccttgaggttagctgtttcggcggggatgaattgtcagatagtggtgaccattggaggctagaaattgaaggaagtggaaaagtatggaaaagagatcaaaaggtgcgacttagacatgttgacaccggaggttatctgcatagtcacaacaagaagtacaatcgccttggcggtgggcagcaagaggtctgcggtgtccgagagaagcgagctgagaacatttggttgacagcagagggtgtttatctcccagttaacgggagcaagtgaaaaagcactttctagcatttactatttttaatgttaatcagtataggatcagatattttgccagctttcattcgtccttgtcttaagaaaaacgaacatgggacctgaccccctagtgatatgtttaagttggaatgttggatatcgatgatgtcgacaagaccaggacagcgcatgcttgtaattgatatttataatccatatatgaccgtgtagata

SEQ ID NO: 17509 - DNA, 707 bp, Zea mays
  Clone ID: LIB3069-037-H1_FLI
tatatgctgaagttcgaggctacggaatgtctggtgatgcacaccacataactcagccacaaagtggtggtagaggtgctattttagccatgaagcgtgctttggaccagtcaggtcttcatgtaaatgaaattggttatgtgaatgcgcatgccacgtcgactcctcttggtgatgctgtggaggcgaacgcgatcaaatctgtatttggcgaccacgcagcatccggtgatcttgcaatatcctcaacaaagggagcaattggtcatctgctaggggcagctggatcagtggaagcaatcttcactgtgctagcaattcaccacggactcgctccgcctactcttaacctggagcggccggacccgctgttcgaaggggcattcacgccactagctgcgcccaagaagatgtcgatacgagcagccatctccaactctttcgggtttggtggaactaacacgtcgctgctgttctcgtgcccgccctagtcctagtgtaacggcgctctgttttctggtcctcgctggaagtgaagaggcttcctgtaatattcagatatgttccgcaaggcaccacccgcctttagctgaagtttcttcaagttgttttttttcaagtcttagttaaactctgtttcgttatttttttttaaaaaaaggaaaaagatggaaatttgataggtgagtgagacgttccctttggac

SEQ ID NO: 17510 - DNA, 986 bp, Zea mays
  Clone ID: LIB3069-037-H2_FLI
gttagatattgatctggctatcactgatccctgtcccatcgctccggtcgacccggtgcaggaagagaacgagagcgatgatgatttcaacgctcgtgtgcgcaatcatgcaccaataaagatgaagtatgacctttacaaggtaaaatgggatcaatcgaaccgcaagtgtctgatggtgattaagagctctattatggatacaatcaggggagcattcccagcatgtaccaccgctacagagtatcttagtaaggtggagagtcactttactatctcttcaaaggcttatgcatgcacaataattgaaaggctacttaccgataaatacactggcggtggagtaagagagcatatattgaagatggccagcatggcttccaagcttaaacctatggaaatggcgctcccagatgagtttctggtctatttgatttttgcctctctgcctaaagaatttgaagcttttgagattaattataactcacaaccagacaattggggcattgagaaactgattgccatgtgtgtgcaagaagaggaaagaattaaggcttcacgtggtgattctatcaactatgttgggatgtataaggcacatggcaaggctccacagaatgatcaccatctgaaaaacaaagaggtggacatgaatgcttgctactggtgcgaaaagtcagggcatcatcagaaggattgtccatccttcctgaagcacttgatcaataaagagattccatacgaggaggacccttcaaagaggagaaagatgcattaaagtcgtcaatggtgttgataatgaagttgaagtgatagaacttccattattattgaataatagcttcattcttcacttgaataatgttctctatgtatcatctttcctgtcatgcgaatttaagctctctaatttattagaaatagaaacatagatcctttcatgtaatgatatcgtgatattccatgttactccttttgggtcgatg

SEQ ID NO: 17511 - DNA, 412 bp, Zea mays
  Clone ID: LIB3069-038-C2_FLI
gaacagatcacaaaaaaaaaacttgatattcatgaggcatatgactagatcagtgctgtatatggttttaaacatgttttatatcacccatccagttgacaccattcatgttttgttctttatgaacaactggcactagatgatgctcatcatgattgcatattatttggcagaatgctactaaagtctcaagcgcctttgctggcaccagagagaaatgtgttggatgcagcaagacagtctatccaactgagagggtaagattctgtgttcaaccatctcaatcattcttccggtagtttgagccttcttcacttgacaaccggttaagcatccaggtcactgttaacaacactatgtaccacaagagctgcttcaagtgctgccatggagggtgcaccatcagcccttc

SEQ ID NO: 17512 - DNA, 1749 bp, Zea mays
  Clone ID: LIB3069-038-C6_FLI
aggccgccccgacgacgaccccgcctggttctgcctacgagtcggttgcgaccagagccatgagcaggtcgaccctgaggccctggacaggagcttctttatgcgggtcatggcggcgagaagccccaacgtgaggctacagaaggctatcagcaagaagaaccagagctcgatgctgaaatgcccgcactctgcgccgccgaagcaaccgagagctcggttcgcgaggctgagcgcagagactgagactgcggggaaggcaccggcggagcccaagccaagggtcgagcggatctgcgccatgcaagcgtccccaattcgcaccaagacagccagggtcgaatgtcccagcgagaggaagaaggcactgaccacgccgcggagcaaggccgtccggccgaggcaggagctgtttcacagtgtgaagcaccagaaggagccgttggccgctgcagccaggaaagggacggtcgtcaagtctctgttcatgagcacgacgccaaaaaaggagccggtccagacgccggcggcggacaagagcaagggggcggtatccaaggtctgttcgaagctgaggaagctgaacttggcgtgccgggaggtgccgagcaggtacatgtctcagcctcagccgaagattatgaagacggccaagaaggctgaagagaccacggtggccaagagcgagaagcgggggctggaatccaggaccaatgctaagaagaaaattttaggacgctcagtgaagcgtgctaatgctgaacctgacggagagaaccgaaatggttgcagctctgctgcagacgagaactcgcttgcagaaactgctggctcccatcaggaaaggaaggtggtgctgcaggaattgagaatcgaggtggatgcatcgcgatgtgacaattcagatgacaacaaggagaatgtgtccagtgctccgagtgaagaagcattggacaattcacattatggaagtgaaaacagactgttggagaacaatgagaatgttcctgtgaaggagaatgttgctctgaaggtggccaaattgcagaagaaagtgcatcaagagcaggcagtaaagctcaagaaaaccaccaatcctaggccattcaggctaaggactgatgaaagaggagtgcttaaagaagcaaaaccagagaaaaggcagccgttcgctgagaataactccatggcagtactcaaggacgcaaacagagaggtggcgcaaatggacaaacacacccattgcaagggacgagacaagccgccgacctgcggcaagaaacagaagaaacaaagcgcccagattgctgtaacggctcagcagctcggtgagcccaccaggccggccttcaacaacggcatccagcgcaaagctgtggaaccggagagagtttgtagtgctgcatcgtcaacacgaacaaccaaaccagcaagaggccttccggcaccaccaccttcccggactgggaaggagatgaaggctgccgtgaagctgtcgaggttccaaacagcagccgcttgagctcgtgcagaaccagggaggaaactgttgttttgtcgtctgtctgctccaacgacgagttctgtatttacggcgtcgaattcgttttctggatttcgttgacttgtgtacactgattctttctgcgaatcgtgtggtggaattcctctcctctgttaccggtaccaacacctaccaacaggattctttctgtaatatgttttggaatttaatcctttatgtaactt

SEQ ID NO: 17513 - DNA, 462 bp, Zea mays
  Clone ID: LIB3069-038-E7_FLI
cgctgggcgcagcagggccacatggtctactactactgcaacgacttccgcagggaccactcgctcacgcccgagtgctagcgagcgcgcctgtctgctgtgctgtgtcgtcgtccttgttgctttgtgctttgtttcgttgttgatgaaaaggtcgctaggcgtggctgccctactacgcccgcgcccgccgccgctctctctgcttgcggtgactgaggcgcccgcgcgagccggtggttgaggcgttggtcgttggcttatcgccagcaaactcgtgtcgtcgctcgtctacgtacgtgcccattgcatttcttccggttgttgctttccatttggtctcgcatcgcatgcatcacacgaggcgccccaaagggggcaagcgcttccatgattcatacggatacactatgtataccatatatacacatattatatatatatttaatacatgtttcctgt

SEQ ID NO: 17514 - DNA, 1562 bp, Zea mays
  Clone ID: LIB3069-038-F5_FLI
gcaccagacccctgtcgcactcgtgtgccggccggcgacggcgatgatggcgactggccgatcgctcgccggggtatactccgccagagccacccgccccatgcctctacgcgccggcgcacgggcgccctgcgccggtgccgccgcggccgagcctgcggccgagcacgtgcggaggctcgtggcggagttcgacccggcggtcccgctggactccgcggtcacgccgccgagcgggtggtacaccgacccggattttctccagctcgagatcgacagcgtcttcttccgcgggtggcaggctgtcggtcacatatggcaagtgaagaacccaaatgatttcttcacaggaaggtgcttacgtcttgtttcgatgcctcagtagttccagttagtagtaattttgctacgcctttcgtacatatataaataattttgctacctcaaaatgcttctaaatatggtgatttatgctggagactgctaaccttcactcatctaataagatgaagcaacaggctgggaaatgtggaatttgtcgtatgtcgggatgcaaatgggaaacttcatgctttccacaatgtgtgccgacatcatgcttcactccttgcatgtggaagtggtcataagacttgcttccagtgcccttaccatggatggacatatggattggatggcacccttctgaaggctacaagaatatcaggaattaaaaacttcaataagaatgattttggtctcataccaatcaaggtggctacttggggaccttttgtgttgatcagatttgatgatgagtccactgaagataatgtttatgacacagttggaaatgaatggttgggtagtgcttcagatctgttgggtacaaatggcattgacacttcactgccgcatatttgcaggcgagaatatattatcaactgtaactggaaggtcttctgtgacaattacctagacggtggatatcatgttccatacgcacatggggatcttgcatcgggtctgcagcttcaatcctatgaaacacttacatatgaaagagttagtgttcaaagatgtgaaagtgcaccagcagaaccagatgacttcgatcgcttagggacaaaagctctatatgcctttgtttatccaaactttatgatcaacagatatggtccatggatggacactaatctagctgtcccattagattcaaccagatgcaaggtggtatttgattattttcttgacaagtctctgctggatgaccagtgctttatcaagaaaagcctcgaagacagtgagcaagtacagatagaagacattgcactgtgtgagggggttcagcgtggcctggaatcgccggcctacagtgttggaagatacgctccgtctgtggagatggccatgcaccacttccaccgcctcatgcatgctaaccttagtgagtactgagtaattattctcatggacgcatcttgcaaagttgtacagaaccaaacgctttttttttggcaggacactgcatgaacactgttctctattgcaatcttgtgaattcagccacatttcagttacac

SEQ ID NO: 17515 - DNA, 1296 bp, Zea mays
  Clone ID: LIB3069-039-B10_FLI
aggagctcacgagcatgaaacgaatgagggttgaattggaaaaactacgcctgttgtgtgagaggataattaagagagagaaggtgaagagagagacggttttgtgtgatcatgaaatacttgccaaaactaaggacacagttattttctcctaccttgcatgcggagcaagctcagaatctgcaactacttcagttaataacaggtcgtacagtggagcagcacaaagatctgatgatgtcacagtagatagtactatttctgggaagaaaaccataaggttttctctgaataacagaggtgctgatagaaacacagctgacagctcgaggacattgctatcattcaaacgcaagttgagtgagaggggaccacgagctggtaagcaacttccgcagaggccaactattgctgcagagaaattagaagatgaagacaagaagacaactgataagaagataactatgcaacagagagaaatgtttcaaaaggagctcattatgacatctgatcaagcttctacacagaacctacgccttcctaaaggatatgcttatgttcctcgggactctttatctaaagagaagctatggaaacaaaatacacagccccataatccacaggagcctggtggataggatcagttgaaatcaagccggttcatttctatcgaggaaggccataaaaaacttgtgcaagcttgttctttgcaactgaaaactacaagcggcaagcagggcaggccagcgctattgccacaagggtaacagcgaatccgtgatcttttttggaccgaagttgcataatggtgcagactgtgctatttgtgtgaacgtatggtgtggcaccataacaagaaggctgcctcccacccacccacacaccaggtaccttgaatatgaccagcaatatgggtgaattgacctacctgtgctataccaaagagagcgtgccaactgtatatatgagtttaatttgtgcgcagattttgtaaatttgccctgtacattcttttcctttgcatatgctagtttagttgtgcaggaaaaagggaattatgaatccttttaggttggataagaaaaggaattagcttggttctttatcatggttcagaagaaaatgcggtggtgcttgcggacaacattgggcaggagtgttggtttgatacatgtactctgtagggatggtgaaggtgccaaaaataaggtcatgccactgctttaacgcaactatttgttgttggttactgggaagtggtatcgtacaggctgagaaacaatgttttactgtttt

SEQ ID NO: 17516 - DNA, 1156 bp, Zea mays
  Clone ID: LIB3069-039-B8_FLI
gcggaagacaggtcgcttgttctacttctacctggcctcgcaggcttcgcaaggcggccacacgccgatacctcctccttcacccgctccgtcgtcccccccagccggccacgccaccatgctgccaccggccgcgcgccttgcggcccgccgcctcctcggcctcgcctccgcatctgcgtcggaagccgccggccgccgggtagcttcctctccgatcgcttccgcaggctactccgccgccgcgtccaggggctccgtctccagcaccaggcccttctccacggctcttaactaccaccttgattccccggagaacaagccggacatgaaatgggagttctcacaggcgaatatgaagaaggtcaatgagattctgtctcactatccaagcaactacaagcaatctggtattattccgctgcttgatcttgcacagcagcagcatggtggatgggtgccagttgcagcaatggatgctattgctaaaatcgtcgaagttgcaccaatcagggtttatgaagttgcaaccttttataccatgtttaacaggactaaggttggtaaataccaccttctggtgtgtggaactacaccttgtatgattcgtggttcacgtgaaatcgaagagacgttgttggagcaccttggagttaaacgaaatgaggtgaccagtgatggtttattttctgttggagaaatggagtgcatgggttgctgtgtgaatgctcctatgattgctgtggctgactactcgaaaggctcagagggttacacatataactactatgaggacctcactccaaaacgagttgttgagattgttgagatgcttagaagaggtgaaacaccccctcgaggtacacagcacccagagcgaaaaaactgtggccctgccggggggaacaccaccttgcacggagagccgaaacctcctccatgcagggatctggatgcctgctaggtttgcttcggagcattacgagcacgcgcataacttggctcgtactgtaaggtgtgcaaactgcacacagcggaggctgtgttatttgtattctgaagctttcttgtgtttcgtcaagaaagcttctctaacttttatcctgcactatcagataaacggtaaattgatagagaataagatgttttcgagctc

SEQ ID NO: 17517 - DNA, 1565 bp, Zea mays
  Clone ID: LIB3069-039-C1_FLI
gcaacgaatccaagtccctcaactgcttctacctcaccgtgctctacgcggccgggatctccagctccgccggccccgagtcccccgtcactgcgaggtgtgccctcggcctcgctctctccacgcctcctccaacctcgtcgccaacctctagctccgccacccacaccaccaacatcgcagtagccgccaccgtcccgatcgcctcgctcctgctcgtctccctcgtcgctctcctcgtctggaggtataggcacgagctctccaaagacaggaggagcatccaaatctcggaggagcggcgctcgcgcccgcggccaaacaccggctccgtcatgttcgacatctgcgagctggcgaaggcgaccggcggtttcgccgagcgcaacctcatcggccgcggcggctttggagtcgtgtaccgcggcgtgctggtggacggcaccgtcgtcgccgtcaagaagatgctcgagcccgacgtggagggcggcgacgaggaattcaccaacgaggtggagatcatcagccacctccggcaccggaacctggtgccgctgcgcgggtgctgcattgtcgacgccgacgccgaccccgaccccgacgagggcaagcagatgttcctcgtgtacgactacatgcccaagggctcgctggaccagtacatcttcgacgacgcccaaggcaggcggcggccggcgttgtcgtgggcgcagcgcaggaccgtccttctggacgtggccagggggctcgagtacctgcactacggcgtcaagccggggatctaccaccgggacatcaaggcgacgaacatcctcctggacgcggacatgcgcgcgcgcgtggcggacttcggcctcgcccggcggagccgcgagggccaatcgcacctcacgacgcgcgtcgccggcacacacggctacctctcgccagagtacgcgctctacgggcagctcaccgagaagagcgacgtgtacagcttcggcgtgctggtgctcgaggtgatgagcggtcgccgcgcgctcgacctgtccgacccgtccggggtcgtgctgatcaccgactgggcgtgggcgcacgccaaggctggccggccgggggatgtcctcgcccaggcgctgcggaaggagccgagcaccagcgtggcggccatggagaggtacgtgcttgtcgggatcctgtgtgcccacgtcacggtggcgttccgcccgaccatgccggaggcactgaggatgctggagggggatatggacgtgcccgacctgccggacaggccgcagccgttcggccagaggatcgcgttcgacgaaggcgaaaccaatttcagcgcctcatcgattctgagcggcggcggcccattcgtggactttggagacatgctcaggtgatgcacgatggcagcggcgacgatggctgcgtgcaagatgagtatatccacagttgcacatgctgtgccacactatcgcaagtgtatgtgtatggttaactggatttcagagtgatgtatagcgtttcagctaatgtaaatggattgtatgcaacatatagtgaaaagctaaatgcgtgtc

SEQ ID NO: 17518 - DNA, 865 bp, Zea mays
  Clone ID: LIB3069-039-E1_FLI
ctctgaagaattgtctgctgagctctctgtttccctgcaaagatgcttgttgggtggtaaaagtggtgctggtgctgcaattgatctgtcatccctaattgttgttgatggaaaggtctgctgggatctgtacattgatgggcttgtggtcagttctgatggtaatttgctagatgcgctagctgttgcgataaaggttgctttgagtgatacaggtataccaaaagttaatgtttctgttagtgctgcatctgatgaggaacctgaagttgatgtaagtgatgaggaatttctgcagtttgacacatccggtgtgcctattattattacattaaccaaggtgggtcggcactacatcgttgatgccacctcagaggaagaatcccagatgagttctgcagtgtcggtgtcagtcaacaggcatggccagatatgcgggcttaccaagaggggaggggcagggctggatccaagcgtcatcttcgacatgatatctgtcgccaagcatgtgagccagcagttcatctccctcttggattcagagattgccgccgccgaagctgaagaagaggctcagtgattgatgaaaaggaaaaaggactggttgcgtaaatgctcgtgtgttccaacttcaaccaaatgctgtagaaatcttcaggaatttggttccatttttatgttattattagtagtagtaaacaccgaggatttggatcctgggaacgaacgacgtcgtgttggctttggctgggctcagaggaacgaatactgaatcttgggtctgatgatctgatcctcttgtgcccccaatccgatgataaatttggcccctctcacaccaaaccaaacactatggatttcctcc

SEQ ID NO: 17519 - DNA, 799 bp, Zea mays
  Clone ID: LIB3069-039-F10_FLI
attgctttgatatggaatgtatatcgtctgataaggatgttgaaggcaaacaaaaggtgaatcatgtgactgtttttgagcgccctggtttgcatgagttcttgcggaaaactagtgaatttgcagatcttatcctttttacagcaggtttagaaggttatgctagacctttagttgaccgaatagatcttcacaatagattcagacttcgtctctatcgcccatcaactgttaccacggaatatagagaacatgtgaaagatcttactcgcgtgtcaaaagattttggcaggattgtcattgtcgacaacaatccgttcagtttcattcttcagcctttgaatggaataccttgtgttccattttcagctggacaacattctgatgatcagctcatgacggttatatttccactcctgaagcatctttccctccagaaagacgtcagacccgtattgcgtgaaagatttcatatgccagaatggttccaaaaccatgggatcccccaagttagtcaggctgtgtaagttttgctgccgcacaatggaattgttttgatgaaggctggagtgcctactatgctataagcccttaaggccatgttcgttcaatccctatggattagcacaaaacgaacagggcctaagggagagcacttgtacattattatcaatattcacttagggttcttgataaaaccgagtcgctgttcatatggagttgtcacacccgaagataagaagattgtaatctagcatgacctcaaatttaaatctgtgtagtggagcattttatatcc

SEQ ID NO: 17520 - DNA, 1093 bp, Zea mays
  Clone ID: LIB3069-039-F8_FLI
gatggtcgtgagtgtccgcacgaacccatcacacgctccgcccactcccccaggcgcacggccgcacctctccacctccggcgactaccaccaccatggcggccacctccctcgcgcgcctctcccgacgcaccaccatttccgctaccgccgcggcgccctccctccggcgcctcctctcagtcacctccacagcctctgtcgcggcaaccgccccgccgccgccgccgcccagcgcgactggcgccgcggccgtgggcgcggatcgggtgcggtgggactatcgtgggcagaggaagcttgttccgctgggacaatggatgcccaaggtggccgtggacgcttacgtcgcccccgaggccgtgctcgccggccaggtcaccgtccacgacggcgcctccgtctggagcggcgcagtcctgcggggggacctcaacaagatcacgctcggcttctgcgccaacgtacaggagcgatgcgtcctccatgccgcatggacggctcccacagggcttccagctgagacactcgtggaccggtacgtgacagtgggcgcctactgtctgttgcgctcttgcaccatcgagcctgagtgcatcattggccagcactctgtccttatggaaggttcgctggtggagaccaactcgatcctcgaagctggctctgtattgcccccaggaaggcggattccgaccggcgagctctgggcaggaagcccggccaggttcgttcggaagctgaccaatgaggagatcatggagattccgaagctggcaactgccatcaacgatctgatgcagagccatttctcggagttcctgccttactctaacgcttatctggaggtagagaagctgaagaagtcgttctccatccccctgtaagagcctgttgccctcactcgtccagttgaatggacgaggaaataaataaaggtgcccaaatactagatgttttgcgttgaaatctaacttgtgctgggttggatctgttacgtcccaattttttttgttcattgttgtgagcatggggacacgtgcaggaatgtcttcgtgtctttttacccaacccaatggacactatgttctgc

SEQ ID NO: 17521 - DNA, 2005 bp, Zea mays
  Clone ID: LIB3069-039-G4_FLI
atccgttgctcgcaaaacgcccccacacgccgccggcgaatcggcgactccccttgcgaggggaggaagcagccacgccgccgtctcggcgactccctgacgactgcctctccggtctcgaacgcgatctggcccatggtggctctggcgccgttggttcgtgagatctagggttgtcgagcgccgcggagtgggagcggatggggcgccggaagatgtccgcagcggcgccgccgtcccggagctggtccaacgttggcgggagcgtaatccccgaactacttgcaaaacacaaaatggacttggaaaatttgacgctgacaaaacatccaatcagaacattacattttttcctgttagccatgttacaatacttgaaaagattagcaacatatatcctgagaaagagtggtttgttctttctcttaattgttttggtggtagcttccggaatcttactctctatttcagatggcctgcataagaagcatgtgcaggagttccttaattatgctaaattcgtgttgtggtggatttcattaggtgtggcttcatcaattggactaggttctgggttgcatacatttgtgctgtatctaggtcctcatattgctctgttcactattaaagctgttcaatgtggccgaattgatttgaaaacggctccatatgataccatacagctaaaggttgggccatcatggctcgacaagaaatgttctgaatttggtccgcctgtgtatccagcatcagctcattctgttaggatccccgtctttgatttactacctcagatacagctggaagcagttctttggggcattgggactgcacttggcgagcttcccccttattttatatcacgagcagctcgcttatcaggaagcaagtcaaaagctgttaaggagcttgatgccgctacttccaaagaagatgggacagtagcatccactcttgatcgctccaagcgttggcttctttctcactctcaacatctcaacttcttctctatcttgatacttgcttcggttccgaacccactctttgatctcgctggaattatgtgtggccaatttggtgtacctttctgggagttcttttttgcaactttgattgggaaggccatcatcaagactcatattcagacgctgtttatcgtgtccttatgcaacaaccagctcctgtatcttatggaaaaggagctaatctggatattcggtcacattcctgggttttctgctaccctaccatctgtgattgccaaactccatgctgccaaggacaagtatctatcaccaccgacaccagtctcggcgtcctcacagatggaggagaaaagttggaatctctcttttacattggtttggaactctatagtgtggcttgtgcttctgaacttctccgttaagataatcacgtcgacggcacaggattatctcaaaaagcagcaggatatggagatggaacgcgtttctgattctccgcccccggaacaaaactaactagcggcgcaagtttatttcagctgctagctgcacagattctcctctgcatttttagcaactggttaagcgtctgcagacgattccaagttccaacgattatcaattagtattagtagctattcatctacacagtcaacgaaaacatgggcctggcaactggccgggtgatggctgtgacctcctatcatatcattgagcctgtagtgggcagttcctggaggagaattctactgttcttttttgtttttccggacatctacacggatagacagtagggattgtttgtgtgaagcacggttggcttatgccgagatttagcactggtagatgtttctatttgttttggaaatgctatagaaacatgtgagcattcaacaatgatacgctctgttaagtttgttgtgtattttggtttgcaactggtgcccgaaagagcaaacagtggctccatcaatttcctttggcaagtaaaaccccctatagaagacattgcttgtcct

SEQ ID NO: 17522 - DNA, 1020 bp, Zea mays
  Clone ID: LIB3069-040-E7_FLI
catttattgatctacttacagatcttgtgaaatggctcagttgcatgtgttggcccatgcttcctcttttacatacatattattatgcgaagaatacaaaattgctctggccaatcctttaaactttgtattttatatatatgcaggcggaagcgcttgttaaagcccaagatgatcttagagaaactacaggtcacttgggaatgacattgattaagctggcaaaatttgaaagagagcaggcaacatgtaattccctaagaagacgtgctggtgaaatccataattttgcaaattctgttttaaagatgagcaggtcacagataaaattaaactctgaaatggtgaaacacctgggcagtatccatgaatacttggagatgatgatatcagttcatcatgcattcacagatcgctctaatgctttatattacgtgcaaagtctgtcagcagatttgttttccttgcacaccagggcagggggacttgaatcttcatcagcaagagatatggggcatgagtggtcaacatatcagaaggtagaggggttgaaagaagcaataagatctgcggaagcagccaaaagtgatgccgttagagaatatgaaagcattaaggaaaacaacatgattgaaataaaaagatttgacaaggaaagacgtcatgatttcattgagatgctgaaaggttttgtggtaactcaggtgtcttattcagaccattttgctaatatgtggacaaatgtaacagaggaaacagaagtatatgccaacaggagcaactgatgtacgtataaagagtgtagagttgttggttttgatcgatttaaattgctgcaacatcgagcgacaacacccattcttatccttctccagtttttccacttttgggttggttgtaatgcatgagttatgtgcagttgtgaaattgggtcccggcagatgagcaaattggctccacgagaactggcatatgtgagaaccatacgcaagatttttctcggtgataactactactaac

SEQ ID NO: 17523 - DNA, 1892 bp, Zea mays
  Clone ID: LIB3069-040-F10_FLI
gaagcaaactataagtttgttgtattggatactgggaattaccagattgattcaatggatcctgataagatgcttcagtgggaagatattatctgtgtaagatactatagcccttctgaggtacaatgccctatttgcttggaaagaccattgtgcccacagatcacatcatgcggacacatatattgctttccatgcattttacgttatctaatgatgggcaaagatgattatagaggtgagtgttggaagaagtgtcctctgtgtttcatgatgatatcatcaaaggatttgtatacaatacaaattactcaagtccagaatgtccgtgctggtgacgttgtcacatttacacttctgagcaggtcaagaaattcgctcactccttccatcaaaagctcctccagtgaaagttctacaacagatgaagagcattataatgttttctcaaagtttattttgacatctgatgtggagttgtctgttcgagatgcaaaattggatcttagtaattggttgcatatggctgactttaggccttgttgatgacttggagaaacttccatttgtttctgctgctttggagcaactggaagagaagacgaaatattggattgattacagaaattatggtggtagtcctccatcaaaagatagcttctctcctggatctagtttcaagtctaggaactcttttgatgtgaatacttctcagcagatgagtgagcacaagatctctctttcagatagagatatggtcaatggtatttcagaactctccatgtctcccgagttgagtaaaacctctggtaaaggaacaatatctaaagtaaatgagaaatgtaccacaaccattgattcaaatgaacatgacccatacacattttaccaggtgtcagatggccaacacctaattctccatccactaaacatgagatgtcttctaaaccattttggaggttctgatatgcttccacctagaataactgccaaaatattggagctggaaactgtaacacagtctgaggctataaggaagcgctatcggtttttgagtcacttctcattaacaactacatttcagttctgtgaaattgacttgagtgatgtagtgtctcctaactcactggctccattcttggatgaaatcaagaagcgtgagaaacaaagaaaacgagccgccaagaaggaagaaagtgagagagtgaaggcggaagttgctgctgctgttcaggcatcagctatgcgatttgagtatacaaattcctctcaaagtcacaacgatgtcatgttctctctggatgactttgaagccctgggaaacaacgctgggccgtccaccagtccaccagcgagtgaaaggaagcttttctctgatgtaacacgcttgggttttgcatctgctcaagactcacctcccttaagactcggaactggggatgcaaatggccaaagtgaaacctcgagagaccaagggccgttagcgacacccgcattatcatttgccagcatcatatcttccagtagagccgtgactgcagctgacaactcggagatgcagaaagcaaatggcgctgggaagaagggtaagaaagcaactagagtgcttttgtcgactggtggtggccgtcgatactgaaggactatagatgcattggaacgaacagtttggttgtttccatataatgccgtagctcaatgcaatgtgcatagtacataacctggctgggatacgcttgtaagttgtaacactgagcggcagtcgtgtgtgttttgcctttcttgtgggtgtgcttgcgttgtgcccacatcctgtcccttgcatgatctggaaacgagcgcagagaagcgtgtaccataactaataaaggtggcgcaacactttagttgtg

SEQ ID NO: 17524 - DNA, 2671 bp, Zea mays
  Clone ID: LIB3069-040-F12_FLI
gtttccctccgcttgccgagtgccgcgcgggagcacgcgcccatggcgacgccgccgccggcggcgacggcgtccgcgcttcccaagtctggggcggtatccaagggctacaactttgcatccacttgggaacagagcgcgccgctcacggagcagcagaaggccgcgatcgccgcgctctcccacgccgtggcggagcggccattcccgcccaacctggaaaaaagttcagggaaggatgaaggcgtggctgttcccgagaaagaatctgctttggaggaggccggtgcaatagatgcagtcttggtgaatacacatcagttctacaagtggttttcagaactggagtcagctatgaaatctgagaccgaggaaaaatatcgactttatgagaatacattacaggagcgtgtcaacacatgtgacgtaatccttaagcaggttgatgatacattgagcttatttgaagaactgcagtctttgcactcaagcgttgccacgaagacaaaagctttgcatgatgcttgcgaccaacttttggttgagaaacaaaggctgatcgagtttgcagaggcacttcgaagcaggctcaattactttgatgaattagaaaatgtatcaagcagcttttactctcaaaatatgaacattggaaatgaacagtttcttccactgttgaagcgccttgatgattgtatctcgtatgttgaaaacaacccgcaatatgctgaatctgctgtttatttggtcaagtttcgccaacttcaatctcgtgcactgggtatgattcgctcacatgtgttgtcaatacttaaaggtgcttcatcccaggttcaagctgcaattcgaagcagcgattctggcaaaaacattgtcacagagggtgtggaggcatctcttatctatgttcgcttcaaggcggctgctagcgagctaaaaccaatattaggtgaaattgaaagtagatcttctaggaaggagtacgcacagattctttctgagtgtcacagtttgttctgtgagcagcggctgtgcttggtacgaggcatggtgcagcaacgaatcttggagtttgcaagaaaagaggccttgccttctttgacaaggtctggctgtgcctatctgatggaggcatgccagtttgagcaccagctttttgcccacttcttcccagcatctgctgctgatgtttctagtatggctcctttaatggaccctctgtgcacctacttgtatgatactctgaggcctagactgatatatgaaggaaacattgattctctttgcgaacttgttgatattctgaagttgaagtgctgggggaacaactaagcagacgcggtgaatcagtagccggtctccgtccaatattgcaaaggatacttgcagatgttcatgagcggctagcattttgtgctcggactcatatccgtgaagagattgcaaatttccgtccttctgtcgaagatctagattatcctgggaaacttgaacgacctgtggatatgtcttcaagtgctactgttggtgacaactcagacatatatataacatggtacagaccattggagaaaacagtttcatgcctttcaaagctatatcgctgcttagagccttctgtcttcactggattagcccaggaagctgtagaagtttgctcaacatctcttcagaatgcaagcagggttatctcaaagaaagcaaccccaatggatggtcagctttttctgattaagcacctcctcattctacgagaacagattgctccatttgatattgagttctctgtcacacataaggagttggatttctcccatttattggatcacctaagaaggattctcaggggtcaggtctcattatttgattggtccaggtcaacatcactagctaggaccttttctcctcgtgttttggagaaccaaattgatgccagaaaagagttggagaaaagccttaaagctacctgtgaagagtttataatgtccataactaaattagtagttgacccaatgctttcttttgttactaaggtaactgccgtcaaagttgcattgtcctctggtagccagggtcagaaattagattcagttctagcaaaacctttgaagactcaagcttttgcttctcctgataaagttgctgagctagttcagaaggttgccgctgccattcaacaagatttgcccaaagtaatgaccaagatgaggttgtatttgcaaaatccatctactcggatgatcttattcaaacctatcaagacaaatatagttgaggctcatatacagctgcattcccttctgaagtcggagtactctagtgaagaaatgcaatccatcggtatgttgccgatacctgacctgcagtctcagcttgacagccttttgtagtttgcatacaccatacagcggcgctgctgtagtccatgttgacgttgcagtgcagttctttcaagtaacgcaagtaaagttgttaccacaatttcgaacctctctaccatatcgttgttgtaacttttcattgtttatattgaaaaatggaaatggaacgcctcccatgattcatgtgattgtggacaatctggaagtttgaactcatatcctgtggtgacttatgtatattgtacacgcacgttggatcctcctctgaaattgactggaatagtttcaac

SEQ ID NO: 17525 - DNA, 1596 bp, Zea mays
  Clone ID: LIB3069-040-F2_FLI
ggccgtgggctctggccttgcgtccaccgtgctcttcgaggccaacgtgctcgccgtcctggccgaggtcatctccgcggtgttctgcgaggtcatgacgggcaagccggagttcaccgaccacctcacgcacaagctgaagcaccaccccggacagatcgaggccgccgcggtcatggagcacatcttggaaggcagctcctacatgaagctggcgaagaggctcggcgagctcgacccgctgatgaagccgaagcaggacaggtacgcgctccgcacctccccgcagtggctcggcccacagatcgaagtcatccgcttcgccaccaagtccatcgagcgcgagatcaactccgtcaacgacaacccgctcatcgacgtgtcccgtggcaaggcgctccacggcggcaacttccaggggacacccatcggtgtgtccatggacaacactcgtctcgcgctcgccgctatcggcaagctcatgttcgcgcagttctcggagctggtgaacgactactacaacaacggccttccctccaacctgtccggtgggcgtaacccgagcttggactacggtttcaagggtgccgagatagccatgcctcctactgctccgagctccagttcctgggcaacccggtgaccaaccacgtccagagcgctgagcagcacaaccaggacgtgaactccctgggcctcatctcctccaggaagaccgccgaggccatcgacatcctgaagctgatgtcgtccacgttcctgatcgccctgtgccaggccatcgacctgcggcacctcgaggagaacgtgaaggccgcggtgaagaactgcgtgacgcaggtggccaagaagtccctgagcctgaacgccaggggcgggctccacaacgcgcgcttctgcgagaaggacctgcagacggcgatcgaccgcgaggcggtgttcgcgtacgcggacgacccgtgcagccccaactacgcgctgatgcagaagctccgcgcggtgctggtcgagcacgcgctggccaacggcgacgccgagcgcgacgtggacacgtccatcttcgccaaggtggccgagttcgagcagcaggtccgcgcggcgctgcccaaggaggtggaggccgcgcgcgcggccgtggagaacggcagccctctggtccccaacaggatcaaggagtgccggtcctacccgctgtaccggttcgtgcgcgaggaggtcggcaccgagtacctgaccggcgagaagacgaggtcgcccggcgaggagctgaacaaggtgctcgtggccatcaaccagcgcaagcacatcgacccgctgctcgagtgcctcaaggagtggaacggcgagcccctgccgctctgctgagctgcaccagcagagaaagacaatgtatacagaaggaaaacaaaagtatagcagcacaaaacagagcgtttcaaggtcgttgtgaagtgctttacgatcatactagcaggagaactctatatttaccgttgccctgtaccagtagctaaagttcatgtgaatgttgttgtgttcccgcagctgcgacgccatggcctgcgatgtgcatggtcttggctgctgcagctactg

SEQ ID NO: 17526 - DNA, 1411 bp, Zea mays
  Clone ID: LIB3069-040-F3_FLI
tggcgcttttacactacctatgctagtttgcctgatgctacatttccacgatggttaagctgactatgatagcgcgtgtcactgatggccttccattgtcggagggattagatgatagtcgggatctgaaagatgctgacttctacaagcagcaagcaaaactgttgttcaagaacttgtccagagggcagcatgaggcgtcaaggatgtcaattgagacaggaccataccttttccagtatcctaagacctttttctcatttgcaaaattctttgttccacaattaatcatttagaaatatatgtgattcttcatcatgatcctaaattagagtttttgtgaactggcaagtttaggcagcctaaccatataccgtaaacttgaccagtattgtgtatatattggattcaatattaagtagttcaagttcctttgacaagcaccagcttatgcatatcatatgattatcgtctgtctccattgatgtgtggattacaccaagtaagcgctatcactaatgacgtatggtatgaaaatgatcattttctgcactaaaatgcttctggtgctctagttgtaccttaattcaataaaacagctacatcatagaaggccgtgtttgctatttgactttgtgtgaccgttcttatcccaagaaacttgcattccagtatctcgaagatctcaaaaatgaatttgagaaagtcaatggcagccaaattgaaacagctgcaaggccatatgcatttattaaatttgatgcattcatacagaagaccaagaaactgtatttggataccagaacacagaggaaccttgctaagctgaatgatgagctctatgaggtgcaccagatcatgactcgcaatgttcaagaagttctcggtgttggtgaaaaactagaccaggttagtgagatgtcaagtaggttgacttcggatactagaatctatgcagaaaaggcgaaagatctcaatcgccaggcattgattcgtaaatatgcccccgttgctattgtgattgggatagtggtgatgctcttctgggtgaagaacaagatatggtgactggtgccatcttgcgatttcacagttatcatgctggaaccagctgagttgtcttgtcttccctcgtgcaaccatatgtttgatcgtggtcccaaaaagaaaagaaaagatggctcgatggtttatcccgcatctgccgattcaagcgactactttagctatcaaaagcaaaaccacggtagtagagatagccttggaactgcacatttctattaactggacatgtataaatagttctcgtgagcgcacaccatgtaatcgtcgaaattcatccatgtgttgtgacattttttgagcacagttgaacatgtggtggagcctggaggcaggtcattctcagccc

SEQ ID NO: 17527 - DNA, 516 bp, Zea mays
  Clone ID: LIB3069-040-G9_FLI
gcttcaagagaaagaagacatgaatctaggtgcccttcaatctgaagacgcttctaaagagattggggacaagaaaggtggtactatcgaaggggatcatgtcaaaggaatcagaaggagcagcaggctggaatctaacgacgagatgaagattgatgataaggctacaacgagagcaatggctaaggatgcgtttattaacaaaggtatatcttctaaccctttttctgttctcaatactgataattatgttcttatggatgttgctttaaagttgggagtagaattaggttcctcttttaatgaagctgtggaaaatttagaattgataaaatctctagaactatccaggaaaaatcttgcagttcaatctgtcaagagttcttttgatccaaatcatatggttattcctgactctgatgtggataatattgtccataatgagcaagaggacaacacaaagactgatatagagaatgtgatggttttaagaaaagggcataaaatttgtcacag

SEQ ID NO: 17528 - DNA, 1439 bp, Zea mays
  Clone ID: LIB3069-041-A6_FLI
ctcctgtccctctccgcatccaagggttgtagccatccgcatccaccggaccccaccgggaatggcggtttgagtaagttcccgtaccagggttcttcggtctgggaggccgaggggacaccgggtcggagtgaggggccgccatggcgagcgacgtgcccatgaccccggagctcgagcagatcgacggcgagatccacgatatcttccgcgccctccaaaatggattccaaaagatggataagattaaagattcaaataggcaagctaagcaattggaagatcttactgtgaaaatgaaggagtgcaagcgcttgatcaaagagtttgatcgcattctcaaagatgaggagtcaaataatccacctgagatcaacaagcagctaaatgacagaaaacagttcatgatcaaagagttgaattcctatgtcaccttgaggaaaacataccaaagtagccttggtaacaacaataagagggttgagctctttgatatgggtgctggaagtagtgagcctgctgctgaggacaatattcaaatggcatcagccatgacaaatcaacaactcattgatacgggaaggaaccaaatggaccaaacagatcaagctattgaacgttcaaaaatggttacttcccttactatacacccttgtcctgtttgccatggcaaaatttacaagacattcttgtaggtcgtagcacaaactgttgagactggagctcaaactgctgcgacattaacacagcaaacagagcaaatgaagagaattggtaatgagctagatactgtccacttctcactgaagaaagctagccaactagtgaaggagattggtcgccaggttgcgactgacaaatgtatcatggcattcctctttctgatcgttttgggtgtgattgctatcattgttgttaaggtatgtatagcatgtttgtcatcagtgtgcagaagaataccttcagttcaacattcttcaaggagaactcgtgtcatctccgtatattattctacaacaagtgtgagacgaatgaaaagcttaactacatattttcattcttgcagatcgtccatccgaataacaaaaacattcgagacattccagggctggccccgcctgctcaaaactatcagattcacaacaggagattgttgtgggcagaagcttccataggcatgtgatggctctgaatgtaggcttcatgtggacgcactgcctgcgaagcagcagctatccatagggcgaaagatacatagtaacaattctttgtgcctgtatatctattttgtcttgttaactccgagccctaggtctgtattcctgcgtctggtgtttgtacaccgctggccgtttggctgtgtatatggtacagagatgagatgttaaaaccaaaccagtaattatgacgaatacttgaaagagctacagtactgaaat

SEQ ID NO: 17529 - DNA, 1227 bp, Zea mays
  Clone ID: LIB3069-041-A7_FLI
agatgaggtaggtgcagaacacggtccattcatggatttgaaagcgagattcatggacttcaaacagagaaactatgtggagaatttttcaaattaccaaaatcttgctgagcagcaaacgccaaagttcatggtgattgcttgtgctgactccagagtctgccctaccgctgttttggggtttcagcctggcgaagcatttacggttcgtaatgtggcgaatttggtaccaccatatgagcatgagggatcagagactagtgcagcactagagtttgctatcaatacactcgaggtagagaatgtgctggtggtaggccacagtaggtgtgggggcatccaggcactaatgagcatgaaagatgattcaacatcaggaagcttcattaaaaactgggtttcaattgggaagagcgcaaggttaagcacaagagctgcagctggaaatttgagttttgacatgcagtgcaaacattgtgaaaaggaatcaataaatagctctctgttgaacttgttaacatacccatggatagagaagagggtgaatgaaggtactttgaatctccacggaggctactacaacttcgttgattgcacatttgagaaatggacattattgtaccgtgaagggttggaaggtggaagcaagtacgctataaagaataggtccacctggtcttgaccaatgaaggcctcatttacttgggtaaatttcactctgcgcccctgcagttcagcatggttttgctttgccactacgctgtgcatttccgtcgcacctttgctccattgtggtatttgtgttctgcagaagcgagtccctgtatcaaataactgtgtcaattgcgatgcatggcactatggcactagcatgtcagcttgctgtagtattgcatactcactggcaggtgcatcggcattgtagcagctattgtttgatacgtacaggaactctccactgtggaagcacaaagccacaatggagtgaggtgcgacgcaatgaacaatatggtggcaaagtgaaagtctgtggaactaccgggggcaaagtggattttgtgcaactatttgtgtgtcgttttccggttgataccattgagaaaatacgaataagttacaggatcagtcatagtgcatgtaattgccgccacatttggcgttaccttgttattgtaattgtaacatttgtaccatttgttgtatcattataactgtgagttacaatac

SEQ ID NO: 17530 - DNA, 441 bp, Zea mays
  Clone ID: LIB3069-041-B10_FLI
cgcgcgcccgaggagggtcaggaaccggcgccgcagccgcggtgagccccgtgtcgaccgggagtacgacatggtcatcgtcccgtccgacggcggtgggtgcctctccggctctgactcggacgactccgactggtccatcggctggctcgagccacaggcaccggagcttcagacggatggcgaccccgagaactgcttcgccgtcctcgtgccctgctaccgccacggccgccaagagcagcagcccgggaggcacgagggcaggtttcttggcgccggcaccctcaccaatggtggattctctgatggaaagaattttgtagagcagtggctttcttctctccagaactaataccgtccgacctgtcctagctaccctgtaaatagtatcactctgttttgttctactacgtttgtcctagtcgcagaatgtatcga

SEQ ID NO: 17531 - DNA, 683 bp, Zea mays
  Clone ID: LIB3069-041-B2_FLI
atccagattacattaagcacttgaagaagtttgtgtcaagcgttagcaaaaaagcatcatcgaaacctgacccaaaagaaacaacgtcaaaggacgacactaccagtaaagaaacagaggaagcgtacccggagaaacctcaagaggccaagaagtgccctcagatctcgcgaaagagcctggacagccgattcgggaaatccaaaacagtggatgttcctgataaaccacggatgagctcggacgacatcgacaagttccggaggagcagatgcttggtctggtgatgcctgtgttctgcacaaattgtcgaacagtacctgagcgaggatactatagcatggaagtcaagcaactgtattacatcatgctgcgaggaacggcatcagcggttcctgcagcggagaggaaaggactgttaaataagaaaaaaagaatcaggaagctaccgtcagcatccatcaaagacacagctacttgactgaaaactggtagttcctcagttaatttagcacttacaccgacaacatgttttgcagcatcggttagggtttccatattgtaaaagtgtaccgttattgtctgtaatcacgagggaccgatacaaacatttgcagagtctgaaagccttaacggaatcacgagcaccatagtctattctgggtgcaccagtattcgggctc

SEQ ID NO: 17532 - DNA, 1445 bp, Zea mays
  Clone ID: LIB3069-041-C11_FLI
ctaacacttacattgtcatcagtcatcgcggcctcagctatctgaatcacttgtcccgctcggtacgtagtagtagtagcatgggctgctgtggcgccgccatgtccgccaggccgcggggcatccacgaggagacgctgctgcgcgtcccgggcgcgtccgtgcacctcctggccggctcatccgacggcccggtcgagctcgcgcgcggggacctcgccgtcgtcaggctgaccaaggacgacgtggccgtggccaccgcggtgcgcgtcggcagggacctgggctggccgctggcgcgggacgagcccgtcgtcaggctcgacccactgcactacctcttcacgctgccggcggcggacaaggacgggacgttcctcaactacggcgtctccttcaacgccggcgccggcgccgacgcctccgcgctggcgtcgctcgacggcttgcttcgctccaacgcctgcttctccgcgccttcctccggggcggtggtcccgccgtccaagggctccagcagggcgcggccgcagccggggccggttgttgcgtcgggggacgggtactggaacgagttcgcgccgagggtggaaggctacaacggcgtgctggccaaggccatcgccgcgggcaccggccagctcgtgaagggcatcttcatgtgcagcgaggcctacgccagccaggtgcttctgtttctgtacgctgcccagtgcccctcccgtgctctgtggcaagtgacaagtccatccagtggagaatagctttgctgtgcgtcatgtctcacgtcccggaccattgttggttgcttgcaggttcagagaggagccgatctgtttcgcccacaggctgccggcagcgcacggagcagattcggcgacgccgctggtggcgccaacaggaacaccaagcctggagcagtcaacaagagtctcaagagggtcaggaagctgtcggagatgaccgagaagatgagccagtcgctgctcgacacggtcatctcggtgaccgggtccatggcggcgccgctgatccgctccaagcaagggcgagcattcctcgccaccgtgcccggcgaggtcatcctggcatctcttgacgccatcaacaaagtaatggatgcggtagagaacgccgagaagaagtcactcgctgcaacttcgaatgtcgtcgctggtgcagtgtccaggaggtacggcgagaacgcaggagaggcaacccaagacgcgttcgcgacggccggccacgccgtggggacggcgtggaacctcttcaagatccggaaggccgtcacgccatcgtcctccatgcccgggaacatggtcaagagcgccatcaagaacaggaactgacgtcggcaccagacagttgctcattgtgctcctcttgatgatcatatacccagaatgatcggacagtaattcaatgcgctcctcttactctgg

SEQ ID NO: 17533 - DNA, 682 bp, Zea mays
  Clone ID: LIB3069-041-F8_FLI
gtctgccttggctacttcatattccgtaatcagctttttaatgtatatgcgccaaagtatgatactggagggaaattttggcccgttgtgcacaacacaacgatattctctctggttgttctgcatataattgctattggagtatttgggataaagaagcttccccttgcgtccagtttgctacttcccctaccaccgctgacccttctgttcaacgaattctgccggaacagatttctgcctatctttgaagcatactctaccgagtctttgctaaagaaagatagagaagaacagagcaaaccagatatggcggagttcttcagtaatcttgtaacagcttactgtgacccagctctgaaacctttccaacgcacttctaactccgacgaacgcaccgagccgctcttggcctctctgtctagctccagataagctgtggatggcagctgactccgctgtgtgaatttcgatttgatttaagtgtttagatacggctagtagtataggtataattttatgctacattgtaagagtagaacttttgacagacatatagtttcttattgttgttgtctgttgtgcaattttttgcccttctggtgtggggggagttcgttgtacatatgtgaatgtacatgatattttgtgcacttctcagagatgaattgctcgttttatg

SEQ ID NO: 17534 - DNA, 432 bp, Zea mays
  Clone ID: LIB3069-042-A5_FLI
agctcccggtcgagaactacttcgtggtcgcggggcgcggcgccgtggaggccatctgcctcgccgtcgtcaccgacttcggcggaggctccggggctgggaacgagggcagcggcccggccatcatcctcggcagcttccagcagcagaactacctggtggagtacgacctggagaaggagaggctggggttccgccggcagtcatgcacgtcgtcgccgtcgtgaggtctcacgacgtcggcatggcggggatcggagtggaggccagtaattactccagagtccagtccacgtaacactccaaattccaattccaaaagctggctgcttgatcttttgttagtgctcgtgtactgctaataaaaaactaaatttactgtcatctactactactattaagttattgaaagacgtggcttgctttgggttt

SEQ ID NO: 17535 - DNA, 1131 bp, Zea mays
  Clone ID: LIB3069-042-C1_FLI
gcacaaaccagcagcaggcagagcaacgactagctgccaggcaagccggccgggggtgctgcaagagtgcaacaaacaatggccaccgcgctctccttcaaggccttggcactggccgcgctcctctccatggtcgtcgcctctggcgctcgcgccgagcaacagttcaagcgcaacgccaccaccgcctcgcaggacagatccttgttgtcctacagcagtggctggctgccggccaaggccacctggtacggcgcccccaccggcgccggccccctcgacaacggtggtgcgtgcgggttcaagggcaccaaccagtacccgttctcgtccatgacgtcctgtggcaacgagcccatcttcaaggacggcaagggttgcggctcatgctaccagatacggtgcctgaagagcaaccacccggcctgctccggcgtggctcagacggtgatcatcacggacatgaactactacccggtggccaagtaccacttcgacctgagcggcacggcgttcgggtccatggccagctggggcctgaacgacaagctccggcacgccgggatcatcgacatgcagttcaggcgggtgccgtgcaacttcccgggcctgaccatcaccttccgcgtccagcacggctccaaccccatgtacctggccgtgctcatcgagcacgagaacaaggacggcgacgtggtgcaggcggacatcatgcagagcaactccggccactgggagcccatgcacgagtcctggggctccatctggaggatcgaccccaaccgcccgctccgtggccccttctccatgcgcatcaccaacgagtccggcaggcagctggtggccaagaacgtcatcccggccaactacatccccgacgtcgactaccgctccttcgtccagtactaatgatcgacctcggtcattgcttgccgcttattaagcgtttaattgtttcttctttatttaattagtggctgccgttgccgaccgaacatgcatgcatgtgggggaaattggaggaggcaagcatcaatatgcaatgtgctctcccgcccactgtcactctaccgttattaattaccagtgtgtaaccagcaaatcatactacatatatatacatggttatat

SEQ ID NO: 17536 - DNA, 1741 bp, Zea mays
  Clone ID: LIB3069-042-D4_FLI
atgatcgaagccggcaagcggctgctcggcagaagccgctgccccatgtccctcaccgtgctcatcacgcagatgaccatgtccgccaacctgatgtccgacgtcgacgacatcatgcgacgggaagccgactccggcctggacatccgcttcgtccacctccccgccgtggagctccccaccgtccaccacggcctcgaggacttcatgatgcgcttcatacagctccacgcgacgcacgtcaaggaggccgtctccggcatgtcgtccccggtcgccgcggtcgtggtggactacttctgcaccaccctgttcgacgtcgcgcgcgagctcgcgctgccggcgtacgcctacatgccgtccggcgcgtcgatggtcgcgctcatgctgcggttaccggcgctggacggggaggtgtccggggacttcgaggcgatggaaggaacggtcgatctaccagggatgccgccggtgccggctcgtctcatgccgtctccgctgatgaggaaggacccgaacttcgcgtggctggtgtaccatggcaaccgcttcatggaggccgacggcgtcatcgtcaacacggtagccgagctggagccgtccatcctcgcggccatcgccgacggcctctgcgtgtcaagacgccgcgctccggccgtctacccgatcggcccggtcctgcctctcaagccgccgtccgcgcccggcgacggcgagcaggtagtagcacagcggcacgagtgcgtgaggtggctcgacgcgcagcccccagcgtccgtcgtgctgctctgctttgggagcatgggcggcagcttcccgtcgccccaggtccgcgagatcgccgacggcctcgagcgcagcgggcaccgcttcctgtgggtgctccgtggcccgccaccgccggacggttccaagtacccgacggacgccaacgtccacgagctgctcccggaagggttcctggagaggacgaagggccgaggcctcgtgtggcccacgtgggcgccgcagaaggacatcctcgccaaccccgccgtcggcggcttcgtcacccactgcggctggaactccatcctcgagagcctgtggcacggcgtgccgatggtgccctggccgcagttcgcggagcagcacctgaacgcgttcgagctcgtgtccgtcatgggcgtcgccgttgccatgcaggtggacaggaagcgcggcaacttcgtcgaggcggcggagctggagcgcgcggtccggtgcctgatgggcgggtcggaggaggaggggaggaaggcgcgggagaaggcgacggaggcgaaggccctgagccagaacggcgtggccagcggcgggtcgtcggacgcgtcggtgcagaaactggcgcgagagattttgcacaagcacgacgacaaggggtgtgccaccgcaagcggggagagcatgggcagcgtcgtcgttcccgcatctccggccggaataatatgatcccccgaacacggagaaatcgccgtcgtccacgaataaatcggaggccgccatgcgatccgtctggcactgctcacgttgtttgacattgttcagaatcgccgtgtgcactgtagtttcttatccgcagtagcttttactattcgaaataatgtagcatagcaatgcaagcgctgcttcttcctaagtccgtgcagcgtagcccgcgtgttcgagctagtttgtgttaagttgaatgagttaatggatgctagttgtagtcttgtggtct

SEQ ID NO: 17537 - DNA, 975 bp, Zea mays
  Clone ID: LIB3069-042-F6_FLI
caacgtgttcgacgccaacttcgacacgctggtgtcggcgctcaagagggtcgggctcggccacctgccggtcatgatcggcgaggtcggctggccgacggacggcgacaggcacgccacggcggccctcgcggagcgcttctacgcggggctcctccagcggctcgcggccaggagaggcacgccgctccggcccggcgcgcgcatcgaggcctacctgttcgggctcgtggacgaggacgccaagagcgtggcgccgggcaacttcgagcgccactggggaatcttcaccttcgacgggcggcccaagttcccgctggacctgcgcggcgacgggcggccggcgatgcccgtcccggcccggggcgtggagtacctgccccggcggtggtgcgtcctgaaccccatcagcatggccggggacggacggctcccggacaacgtcgcgtacgcgtgctcccgcgccgactgcacggcgctaggctacgggtgcagctgcggcgcgctggacgcgcgcgggaacgcgtcgtacgccttcaacgcctattaccaggcacagggacaggtggagtcggcgtgcgacttccaggggctcgccgtcgtcgtcgacgaggacgcgtctcagggcgcctgcaacttcagcgtgcagctcgttgggtcaggggctccggtggccaccggggtcaccacgatggcggccgtactggtggctctgtttcttgtgttgatttgagctgacgcaaggtgtggtgcttgcctgcctgactggaatcctgatgactgtactgtacagtgttggtcccctacagtgatgtactaaggcgggctccaacaagaccctctaaagggttctgtaccctaaatttagaggatacccctccagcaacgtcctctaaacggtcctctaaatttagagaacgctgctggatcctctatatgtagagtttctctaaacggttctctatctatttgaat

SEQ ID NO: 17538 - DNA, 1348 bp, Zea mays
  Clone ID: LIB3069-042-H12_FLI
aatgtgctacaaataaataaattaaaaccaaaagaccccggcgcggaggtgatcgcgctgtcgccgcgcacgctggtggcgacgaaccggttcgtgtgcgagatctgcaacaaggggttccagcgggaccagaacctgcagctgcaccgccggggccacaacctcccctggaagctccgccagcgcagcagcctcgtcgccccgtcgtcggcggcggcaggctccggcggcaggcagcagcagcagggcgaggccgcgccgccgcgtaagcgcgtctacgtctgccccgagcccacgtgcgtgcaccacgacccggcgagagctctgggggacttgactgggatcaagaagcacttctcgcggaagcacggggagaagcggtggtgctgcgagcgctgcgggaagcgctacgccgtgcagtcggactggaaggcgcacgtcaaggggtgtggcacgcgcgagtaccgctgcgactgcggcatcctcttctccaggaaggacagcctgctcacgcacagggccttctgcgatgccctagcagaggagagcgcgaggcttcttgcagcagcagcaaacaacggcagcactatcaccaccacgaccagcagcagcaacaacaatgatcttctcaacgccagcaataatatcacgccattattcctcccgttcgccagctctcctcctcctgtcgtcgtagcggcggcacaaaaccctaataacaccctcttcttcctgcaccaagagctgtcccccttcctgcaaccgagggtgacgatgcaacaacaaccctcgccctatcttgacctccatatgcacgtcgacgccagcatcgtcaccaccaccggtggtctcgcggacggcacgccggtcagctttggcctcgctctggacggctcggtggccaccgtcggccaccggcgcctcactagggacttcctcggtgtcgatggtggcggtcgtcaggtcgaggagctgcagcttccactgtgcgccacagcagccgcagcaggtgccagccgcaccgccagctgcgccaccgacctgacaaggcagtgcctcggcggccggctgccgccggtcaacgagacctggagccacaacttctaggcccgctatatacttcaagctgcattgagactttgagagacgaatgaacggaacacccaaactgcatgcactctagcttgaagagcaaccaaaactggagtagcaagtatggtgcactactgttgttaatttaccttaatttattgatctctgttagttctattttcatttagggcaatgcgggctagctaattaattcgatgtgcacaacttttgatgaatggaccagaaagtttatctt

SEQ ID NO: 17539 - DNA, 814 bp, Zea mays
  Clone ID: LIB3069-042-H8_FLI
ggacaatgatctatctgaatttgatgaatctcgagagataatagagagcctagttgatgaatacaaggcctgcgagtcgcctgactacatcaaatggggaatggaggaccctggagaggcaaatgttgtggcggcacttgactctaagttggtagtgtaaatataaaggtaccatctcacagtattaggcactttttatgcagaaacaatttgacgcacaatcatattgaattgattatccacttgaaaccttgaacacttgctttcttttgataaccatgtggactacaccaattattataaacgatgcacaatctctgctagatgttgaaaatgatactaaatccctcatttttcgtatctattgctggcaaataacatcttcacactttaaggctctactttaatgttatatcagtactgataaattcttggacaactgtcacttttagaagcaaataattatggtgctgtaattcctcacgtactatgtttagtctgataattttggaaattgcagtgttgtgcagcaatccacgcaactgaggaagtgctgtctacaatctacattcaagtcatgttggtcatccagaccaaacatgctactgtcacatctagtagtcatcagtttgacgccgcctgcttctatagatccaatcggagtgcagccaaagtgggttttgacgttattttgacctcaaatttgcctttagtctgtgctatgtatatttcgaaacccacttcctctggcctgttttcatttctttagggctagtttggaaactccattttttcaacggatttttattttctc

SEQ ID NO: 17540 - DNA, 535 bp, Zea mays
  Clone ID: LIB3069-043-A12_FLI
gggatgtctacctcgacctcctccaggccgactactcacttgttcccaataaccttgccgcaggtgaagcagcgcactgggataatcatcttcacctgcggcaaggttattgggaacaagtgggatgtctacctcgacctcctccaggccgactactcagaaggggatgctctggatgctttggaattgttccgctactgctgcaggcgaatgctcatgacacatgttgacctcattgagaagttgctcaactacaacaccctagagaagaccgagacaagttaagcgagcacatcatgctccaaaaacactactgtttcgcagtatcatagagcttaggtagtatgttgtctcttctctatcagtagaaatgggttgtgagtgtgaacatgcttttgctcatgagcattcaaggacttttcatgcgacagtgcttgttgccacctatgcaacgatgttggatattttaagtgatataattgctaaaagaaagctaatgtatttgtgtgaattgggtcgataatatttcgttgac

SEQ ID NO: 17541 - DNA, 1109 bp, Zea mays
  Clone ID: LIB3069-043-B3_FLI
gttggggatcctcagccttcggaggagtcgtgagtgcatacttcagtggttctttagtggatacttatggtgtaagatttgtttttggtgttacagcacttctgccactgatgacatctgctgttgcagttcttgtaaatgaagaacgcttacctttggggaaaagttcagtctcactttcagttccaagttcagaattaattgagagctctaagaaacgtatcatgcagatttgggattcagtaaagcaacccagcatactcctacccaccttgttcatattcctttggcaagcaacaccgcaatcagactctgccatgtttttcttcataacaaataagctcgggtttactccagaatttctaggacgtgttacgcttgtcacatctgttgcatccttactgggaatcggagtgtataatttgtttctgaaggaagttccattgaggaaaatctttctagtgacaacagttttaggttctgctcttggaatgacacaggttcttcttgtcactgggctcaaccggaagcttggcataagcgatgaatggttctccattggggattctttgattatcacagtccttggccaggcttcctttatgcctgtcctggtgttggctgcaaaattgtgccctgtgggagcggaagcaactttatttgccactttgatgtccatctctaacgccggaggtgttgccggaggtctggtgggcgcgggtctgacgcagttactgggagtcagcagagacaacttcgaaaaccttgctctgctgatcgcgatttgcaatctcagttccctgctacctctgcctcttctgggtctcctgccagatgaatcccgtaatgcagatggtgcacagaccaaaaatgactgatgcttgtatatctccacgcgtctttacaagacgaaagggcatacacatacactcatcggcacaaagcagcgcagctgatgacgtgaacaaaacatggaagctgatgtataggatgtattatctatgatgtatagtaagtaacgttagattaattatgaaacatatttgtaataattttaattgaaagtataaatactccttttcataaaacgaggtttacatttttttcgg

SEQ ID NO: 17542 - DNA, 1159 bp, Zea mays
  Clone ID: LIB3069-043-D11_FLI
aagaaattgaagcaaatcgctttacgaagatgtatacaagaaattttggatctaagggctctaaccactttttgaggcttgctactatttgatgaacatgtttgtaagttattagctatgctctatggagaactataaatgattcaccataataatatgaaagcctggtagtaactcgtgaggcacatactatttatgattgttatgtgccatcttatttgtttaccagtgccatattacttacgaaggcttttgtgatcattcagggagccaagaggatttgggttcgtggagttcgttgatgcttatgacgcttctgaggcacagtaccacatgaatcgccagatgtttgctgggcgtgaaataactgttgtacttgctgcggatacacggaaaaggcctgaggacatgcgtagacgaactggaccaagaggttattctggtcatgaagggcgtcgtccgaatcgtcatggtgcaggacggtcccgatctcgttcatactcgcgttcccgctcaccgcgccctcgtggtcgtggtagatcacagtcatactcccctgccccgaaaaggcgtgatgactactctgcttccccacctcgggcaaaggaagagcacccgaggtcatcaaaacagcctaaagaaaataacagggataggaggagatcctatactcctgatgatataaatgatcgccgtggtgcagacaatggtcgtgatgagaggaagaggtccccagcaggcgaggaggatgaggagcctcggcgcggtcatcataggtcaccccggccagcgtccatgtcacctcctgggtcacggtcaaggtcggcgtcgcctgttatcagcgactgatgaatgtggcggcgatggaactgttggccccatgattggggcggtttgtcagactcttgttatatctgctgctaggctctgttttgattttcctccgtggattgtttgtgtatgtggggctaagtccggtggttggtttgctcggaatgaaatgagtgggtggttcgtttgtcggtggagactctgcttgtaacctggtatggtattagtgccatttgttgctgctgttttatgatgatgataatgaccgtaatcattgtgcacatttattactattcccgtttcaaatcataaagcttgtctgttaatt

SEQ ID NO: 17543 - DNA, 2263 bp, Zea mays
  Clone ID: LIB3069-043-D5_FLI
ggaaatcactccagaattttgaaaaggtgacggaaatagtgaggagcggagaacaccggaatgatccatcctctcgtgctatccctgccctcccccgctataatatcgcgccctcgtcgccatcgtcaccacaccaccactccctcactgccctctcactcccgatccctgcaccactaccgcctcctccgcgtcacccctctcgtcgcctcttgcggcgaccggcggcggatcgtccgcggcgcaagcgcaaccatggggctcttcaccgtgacgaagaaggccaccacccccttcgaaggccagaagcccggtacctccggcctccgcaagaaggttactgtattccagcagcctcattatctgcagaactttgtccagtcaacattcaatgcccttcctgcagaccaagtaaaaggtgcaaccattgttgtctctggtgatggccgctatttctcaaaagatgctgttcagatcataacaaaaatggctgctgccaatggagtaagacgtgtttgggttggacaaaacagtctcatgtctactcctgctgtatctgctgtcatccgtgaaagaattggtgcagatggatcaaaggctactggtgccttcatcttgacagcgagccataacccaggtggtcctacggaggactttggtatcaaatacaatatgggaaatggtggacctgcccctgaatccgttaccgacaagattttctctaatacaacgacaatctctgaatacctcatctctgaagaccttccagatgttgatatttctgttgtcggtgtcaccagcttcagtggacccgaaggcccctttgatgtggatgtctttgactctagtgtaaattacataaagttaatgaagacaatttttgacttcgaagcaataaaaaagctactgacctccccaaagtttacattctgttatgatgcgctccatggtgttgctggagcttatgccaaacacatctttgtggaagagcttggtgctgatgaaagctcactgttgaattgtgtcccaaaagaggactttggaggtggtcatccggatcctaacctcacctatgcaaaagagttggttgaacggatgggtcttggaaagtcatcctcaaatgttgaacctcctgaatttggtgctgcagctgatggagatgctgaccgcaacatgattctgggtaaaagattctttgtgacaccatcggactctgttgccattatagcggccaatgctgttcaatcaattccttactttgcttctggcctgaagggagttgccaggagcatgccaacatcagctgcccttgatgttgttgcaaagaatttgaatctcaagttctttgaggtgcctactgggtggaaattttttgggaatttgatggatgctggaatgtgctcaatctgtggtgaagaaagctttggcactgggtctgaccacattcgtgagaaagatggcatctgggctgtgcttgcatggctttctattattgctttcaagaataaggacaaccttggaggagataagcttgtcactgttgaagatattgtccgtcagcattgggccacatatggtcgccattattacacacgctatgactatgagaatgtcgatgctggggctgctaaggagctgatggcaaacctagtaagcatgcagtcatcactttctgatgttaacaagttgatcaaggagatccggtctgatgtttctgaagtagttgcagctgacgagtttgagtacaaggatccagttgatggctctgtgtccaagcaccagggcatccgatacctcttcggagatggttcacgactggtgttccgtctatccggaaccggttctgttggtgccaccatccgtgtctacatcgagcaatacgagaaggattcctccaagaccggcagggattcacaggaggcccttgctccactggttgatgttgcgctcaagctctccaagatgcaagagtacactggccgctctgcccccaccgttatcacataaatttttgaagagtgatttacaatgagttgaggcgcttacacaaattttcattcaagcctcttgttctatagttctacttcctgttgcatctcaccaatgaataaaatgtatgtatcagactcgccccgtttttttttttgtccatgtactgcagtgcagcggactgagccgctggcacagcatgcggtaataatcttgtcacagtgacagtgctgtaatcgggagcgtgtttcttgtaatcttgttaggaagtgtt

SEQ ID NO: 17544 - DNA, 708 bp, Zea mays
  Clone ID: LIB3069-043-F2_FLI
tgagaacaaagagctgcgggtcggggtcttgatttgttggatgatatcttgttgggttataaagctgaatgaccaatggatattggcattacaatagacacactaaaaatatatgctgaaagtcagaaacaaaatacaatagagttgtgaagaaggtatttttgacaactatgcatcgtacctatcttggtggcgaaatcaacttcactgatggatctattaacccaaaatctacagtgggaactcctgcatacattgctcatgaggttcttctggagaaggaatacaatggaaaggttgctgatgtgtggtcatgcggagtgacgccatacgtgatgctgacgatcaccatccctgagataagaaaccatccatggttcttgaagaacctcctagctgacctaatggatgacagcacgatgaggaagcagtacgaggagcctgaacaaccgatgcagagcatgaatgagttcatgcagatggatctggctgaggcgaacattccagcagttggttcacgtggactcaatcagtttctgaatgatgacattgacctcgacgatgacatggaggacctagactcagatgccgatcttgacctggaaagcaagtggggacatcgtgtatgctatttgacaacattgaatactttgttgtgtcgcagattaccaagataattagagacaaggggcaggttgatgtgcttgc

SEQ ID NO: 17545 - DNA, 1185 bp, Zea mays
  Clone ID: LIB3069-043-F6_FLI
ggaacaatgaggattcatctggtgcactcacacgtggtggttttgctggagagctacaagttcagcaggttgaacaagatgaactacttccaccaccgaagttagagtcatcaaagtcacctgatggagggaagtccgtcagctcgttcccaaaccaagggtgtttctcacagttctttgagggtctggattggatgatcccgccttcctgctaccaagactccaatggcatccattcagttaccgcatcggatagcatctttaatccgtctgaaggtatacctccttccacaatgaacgcggacggcatggacgcgttccaaacttcctgcctttccgagtgctttcctaattccatccaagaattcatcagcagtccagatataaatacactgacatttatgtcgcctgagatgcaacatctggatgcccaacacgacggcagcaacttgcagagcacgtccaactcctatgtgcagatgagcttctcggaggagagccagagtgcatccttaagtggcctacacatggaagctgtccatatcaacagctcctgccttcaaccactggcgacagggagctttgatgcagggacgttctcaaaactatcaaacataaaagaatgccaggccttgcctctgcaggagattcacagcagctccatgggaacaccttcgtgcagtatggatgcggcggcggtcgagtactgtatggatcgaagtgtgaagccactgaaaccaccggtccggacatatacaaaggttcaaaagttaggatcagttggaagatctatcgacgttacacgatttagagactaccatgagttgaggtcagccattgcctgcatgtttggactacaggggaaactggaacaccctggtagttcagactggaagcttgtttatgtcgactacgagaacgatgttctcctcgttggagacgacccatgggaggagttcatcaactgtgtgagatgcattcggatcctggcgccttcggaagtacagcagatgagcgagaatggtgtgcatgtcttgaacgactgcatgcaaatggcttagaaaatcagggttatattgccctgcgcagcctgcacagtgtaacgtcgcaaatacgagaaatgagtgttcttcgtagccacgcagcggctcttcttgtaaataaaagatacatcacgtgcatccc

SEQ ID NO: 17546 - DNA, 729 bp, Zea mays
  Clone ID: LIB3069-043-G11_FLI
ctcaaggtcgaagtcgacagactggctgcagagcaggaacctgaactccaaaaccgcaatgtgggtgatgatggataccggctgtggcagcaggtcgattgggaaggatttgggatagggagttccatgttgccatcagaaccttcagctgctgcgcaagtgccatcaagggaagccgagcctgaaccgcacctggaagtggagcaaagcgtgtctccagccccaagtgcagcaacctcatacgatgttgctgttccacactggttccagcgccatgcggacccttctgagctcatggggttcgcttcccgtggcctgatcaaggccccgtttgtttccgcttttgagcggcttctggcggccataatctgcccgggtcatccaaacgcgcagattccatgccgactgcgagacgaagcgctttaaggagaagtggatatgcagctgttggagaaaagcggtcactccatcgcgtctccaggaatcccaaccgcttctcggtcgtcagtcaccccgcagtgcagtacagtgccaccatgccgaacctgacagacggttgctttgtgccatgcgatgtatctagtgacttgttgaattagtgatgcatgattcctttgttaacaaagctaacgcttcaacttcgacttgagcattactttgattttttgttgaatcgtgcatatctgtatcaatttatttattttgggtttatggtattgtggttcgatc

SEQ ID NO: 17547 - DNA, 799 bp, Zea mays
  Clone ID: LIB3069-043-H5_FLI
ctctctggctctctctacatgcctgcgtactactccctcaagcaagcaagctgcaagaggtcaagacgagcagtgactgtgagtgagcggcgtctggtcactctggtgtgaactgtgaagtgaggacttgttggaggaggacggagcgcgggccgcggagggtcatggcatggtgatggacctgctgctccccctcactttgcccctagtgctctaggcagccttagctagcctcgcagtcctgggaggaggagaaggacaaggtctctgatcagctccagcttgtctggtcaaagctgaggagcctgcttgggctgcctgtgagtccaagctcgacaggaccactgccactgtgaagcacagcggcagcggcgacgagacgaggacgcggaagctgccaagcggatagatctacgcaaaatggagaccaaggacgtgtcgccgcttgccgccgccgccgcggcgcccgtgcttgcaccggcctctcagcagcagcagcagccgccccagccgcagcagcaccaccaccagccaccgcagccgcagcaccagcaccagccgccgctgccgccgttcgcgcagcaggcggccccggcggcggcctcgtcgcccgccgcgtccatgcccggcggcatgcgcctctcgttcgaccatatgcccgggaaggcgcccggggagcagcaccaccaccaccaccacgcggcgccgcccatgctgtacgcggcgccaccgcagggcgccgcgggtgcgccggggggcagtgtgctcggcatgggcgaactgatgcgcaagaagcgcg

SEQ ID NO: 17548 - DNA, 905 bp, Zea mays
  Clone ID: LIB3069-044-A1_FLI
atcgtatcaaaggaaaactgaatttgtgtttagcctcaggattgctagaacaagttccggacctggaaggtcagtcagaaattccgaaggacagtcagggttcagctgacaggagtggaccgccaccagttttacgagcacagcccaaatctaaaccggaactcccagaaaacgctggtacatcaggagaaggaacttctgattccattcgtcctaaagggcccaacgcccatccaaccgaagtttctgaaaaggtattggctaaatcaaagcagcgtgccagagccagaaggagattggattttctgtcaaccccagtggagctcaaattgtgcactgctgcggcaagttgtcaaaggcctccccagaaaatggatcaaccgggtccagtggccgaaaacatctctccgtcagatgcatgtcaagacatttcacagaatgttccaccagagcgtgcggatgccatcacaccgctggcttctagtaaccaccattcaccaacgacaccagatgatccattctctctcgaaatgcatgaggcgaacgcatcagatcttctggacatgtcctactgtgatggcttgataatcgattctcgtcgtgatccacgtgacggtagcctcatgtagaagaaaaagttaccaacgcaaaatgacacttttaatagcaagagtgtcttcctgaaatccagcaactccctgtataaaaatcgtgttgcatgttggatggaacttgtatcttgtcttggcaaaaataattgcattgctgttctgttaatgcccctaactggtttggagagcatttttcttttgcaggtttgaagagcattttgaggggtgttgtaggtcaaaatgattttttttcgttgttttgggttggacaggtccccataactctttttatgc

SEQ ID NO: 17549 - DNA, 511 bp, Zea mays
  Clone ID: LIB3069-044-A5_FLI
ctcgcaattttcaagatgcgagaagatgatctactgcgcatccaacatatcggtgatgtgattgatattttgcaaacaaccacacatcatctatatgaccctgatgaactcctgacattcgcgtttgacaagattggttcaatgccaacaaatacaatcacaaaggaaaggaaaaagcaggagactgttgtcctggctgagcttgatcaaagaacaagacggctgagttcactcaagatggatggatagtttgtaaaatacaagttcttgaaagctgtagtcttggcctattcggcacctggtcccacagcgtatgcttcactgagcgaaaaatcatgggtctaccgaatactgggagatggaaagctgcagtatgtgtttgttgaacacgagtttttggacttcatattgtgtgcttttgtgtgttcttcctttgtgtttgcaattcatatttacaagatacgggccatggtgctgatttctcttattatgtatatgtctatttcatatc

SEQ ID NO: 17550 - DNA, 2135 bp, Zea mays
  Clone ID: LIB3069-044-D10_FLI
cttgaatcttgagcacagagtaggctcgctcacaggacagtcacttgcctgggaagccagatattattgcagcctcatacaccgcccttccctactgcttcctgagatttgagagctcgggcgccagatctgaaacctcttgtgttgtgcctttggtagttcggtgtagcattgagctagtagaggtgctgttccagttccaggatgagcaaggaggatgtcctcaaggtgcagacattgatgctgagagtgaacatacactgtgacgggtgcgagaagaaggtcaagaagaccctccacaagatcgacggtgtctaccagagcagcatcgacgcggaacagggcaaggtgacggtgtccggtttgctggatccggacaccatcatcaggaagctcaacaaggccggcaagccggctcagctgtggggttccaagcccggcatccctcagaacgcctaccatggcggcggcaaggcccattccaaggacgctggcggcggcaaggcccattccaaggactccggaggtggcaagggccattccaaggatgccggcggcggcaaggcccagaagggcggtgcgggtggcggcggtcacaagggccctggcggtggcggaggcggcggcggtggcgtgggcaatcctaagatggtgatgccgcagccgacgccgcagcagctccagcagctgcagcagcagctgcagatgaaggggctgaagcttccgccgcacctcttgggcggcaatatgccggcgttccccgcggctgcgccgatgaaggaccccaagtccgtcaagtttgccctcccggaggacaacttcgacgactacggcagcgagttcgacgatgacttcgacgacggcttcgacgacgacgaggacgactacgacgacgacggcctggacgacgacgtctacggcgaccccaagatgatgatgaagcccatggctgtgccgccgccggccggcgggggcgacaagaagggcggtggcggcaagaagggtggtggtggggggaacgagatcccggtgcagatcaagggaaacaaccacggcggtgccggtgggcagccgcacaatgcaaagggaggcgccccgggaggcggggcccacctgggccaggggaagaagggcggcggcagcggcgccgccgtcggtgtcggtggcccgatgggcggaatgctgcctcaacaaggcatgatgaggcctcctaacattcttggtggtgctggtgccggcttccccagcacggcccagatgggcggcggacctatgggcatgccggttggccacccgcacatgggtattatgcagcagggcggcggtggcggtggtggtggcatgccgggcctggggttccacccgggattgggcggcggcggaatgcattctggggcggatatgcttcaggccgccgcggcatccgggaaccccgtggcgcagcagcagtacatggccttgatgcagcagcagcagcagcagatgatgatgatgcagcagcagcaacagcagcacgggaacggcggtttaggatacccggcggcaatgggctacggctatggccggccaccgatgcattacccaatgggctacccagtgctgcccccgcactcgcatgctgagccttacaacatcttcagcgacgagaacgccaacagctgctcactgatgtgatcagcaattccgcatggaatggccctgttccaagtaaaccatctcaaggagctcaatgtcaccgctgatcaccgacagacatcgccatggttgaagcgccgtgaatcaatcaacaatcagtatgcttggggatgagtcctagctagaaccctgtccctttcctgctccttccccccctttctctagcttattttcgccttgctttaaaaaaaaaggaacttccttgaatgcgaagttaggtatagtaattatgaggtttccataagggaggggaggagagaggagacgatagggacttcgtacggggtcgttcgcttgtgggttcttccctcctggcttcattaaggtggactaatggtagaacaatgttgtcaatctcagtcgtaaatcagtgtgaatatgtcgtgatttctcttctaatctaactaactatatatatggtaataagttctgtttaacgt

SEQ ID NO: 17551 - DNA, 1679 bp, Zea mays
  Clone ID: LIB3069-044-D11_FLI
tccgccctccttgtgctccgccggcaatggcgtccaccgccgtcaagctcatcgacatcgcagtcaacttcacagatggcatgttcaagggcatctaccacggcaagcagtgccacgtcgccgacatcccggccgtactcgcgcgcgcgtgggctgcaggcgtcgaccgcatcattgtcaccggaggctccctgaaagagtccagagaggcattgcagatcgccgagaccgacgggagactgttctgcactgtgggagtgcacccaacgagatgcggggagttcgaggagagtggagaccccgagggtcattttcaggcactgctggctctagcgaaggagggtttagataaaggcaaggtcgttgctgttggtgaatgtggtttggattatgacagacttcagttctgtccggcagatatgcaaaagaagtacttcgagaaacaatttgagttggctgaagcagtaaaactgcccatgtttcttcacatgcgtgctgctggtgaagacttctgtgaaatcatgacacggaatttgcacagattccctggtggggttacacattccttcactgactcagcagaagatcgggacaggctactttcttttgagaagatgtttataggtgttaatggttgctctctgaaaactaacgaaaatcttgaggttctacgaggcattcctgtcgagaggttgatgatagaaacagattctccatattgtgacataagaaatactcatgctggaagccagtatgtaaaatctgtctggccatctaagaagaaagaaaagtatgagccagattcaacagtaaaaggtcgcaatgagccttgtttagttaggcaagttcttgaggtagtggctggaagcaaaggaatttctgacatagaaggcctgagtagaactctgtaccacaacacatgcaggctcttctttcctcaagatcttgacgcgtctgctaatgcgcagcttgagagtggtactgccgtccaggattgctgatgtcagagtgatttttttattataaatgtttccttttgactggtactgctgtccaggtttcgtacaacttccaatatgcctatgaaatatttttggtcttatatttcccatgtttcatgagcctgatgacatgtcaggcacgttctgactatgtacaaccctactgaggctatgtcctaaaatcatttagggctaatttgataatcatatttttttcaaggatttttcattttttttcaagggaaataaattagttcattttctctttggaaaaaatgggaatcccctgagaaaattaagttgtcaaactagctctaaaactgttctttttactgagtatacacaaaacataggtacaacttgaattgatcacatctttcaaacgtcaattgattcctcggtggctgcagttgcggcggcgaagggcgggggtaggacagggcgcccacgcggtggcggaggccgtggtggcgctgcaggttctggaactggaaggctgagaagcggggcgggggtgtaatggcggctgcggtggccatggccggagcgcagagatttatagaatatgacgaatattgaataaattattcactatccaggcgtaatgcccatttttttaaagataactatgcagtggatagctatttagcatattacaatggaacaagatcctgcacg

SEQ ID NO: 17552 - DNA, 1204 bp, Zea mays
  Clone ID: LIB3069-044-D12_FLI
aacaaactggtccggagggaaagattgtgagcaaggtctacttgtgtgagaaactgtctctcactaatgagatgtattttgccattacccttgataggaaaactgctggtccgctcattattgcttgcagcaagggaggaaccagtattgaagatcttgcggagaagtatcctgatatgattatcaaggttcctgttgatgtatttaaaggaataacagacgaggatgcagctaaagttgttgatggtctagctctaaagtcagcggataggcagtcttctatagaacagattaagaaactgtatgaacttttctgcaagtctgattgcacattgctggagataaatcctctggcggagacagctgacaacaagcttgttgctgctgatgcaaagttgaactttgatgataatgctgcatttagacagaaagaaatatttgcacttcgtgatacaactcaggaagaccccagggaggtcgctgctgccaaagcagatttgaactatattggtcttgatggagagattggttgcatggtgaatggagcaggattggccatggcgaccatggatattataaagttgcatggtgggacgcctgccaatttccttgatgttggtggaagtgcatcagaggggcaggttgtggaagcttttaagatactgacttcagatgatagagtgaaggcaattctagtgaatatttttgggggcattatgaaatgtgacgtgatagcaagtggaattgttaatgctgctaaacaggttgacctgaaggttcctgttgttgttcggttggaaggcaccaatgtagaccaaggaaaaaggattcttaaggaaagtggaatgactttgatcactgcagaagatcttgacgatgcggcagagaaagctgtaaaagcatccgtcaaataactatagtgtatcaatctgaagcttatttttttcactggtacaagatgagcagtgctcttttacggatttcgggctggggcagaagtcgcgaactgcaacttttttgaagtggggttattttgacctagttttcctgttaaacattgccagtgccgaaactttgtcgtctcatgttgataaacatttatcggggccattgggcagctgctagtttggcaattgcaaatcaatttaccttttggttcagagggcataggctgctaccctagtggctaaaaatttcgttgccc

SEQ ID NO: 17553 - DNA, 1251 bp, Zea mays
  Clone ID: LIB3069-044-D6_FLI
gtgttgaaggcgacgaggagaactacggctacagcgacgtggaagaggagaaggtatctccgaaggcctcgccggaggctagcgaggaggagagcaaggatgcgtcggagtcagaatccggtgagtctgatagcctctccgagtccagcggatcggaagcttctatgaggaagaagaaagggaggaataaaagtcgccgtagtagcaagcgcagccggcagcgccaccgccaccgctcatacagttcggagattgaggacgaaagcaagagcgacgatgattctgtgggctcttatgattcggaggagtctagggataggagcaaaaagaggtcgcgcaggcataatagatctaagaagaggagcaggagctccaggaggaagaagaggaggagccaggatacagcatcggagcaaagctctgaggaggaagaggaggaggatagtaagaaaaagaataagggcttgaagaggaagcggagcaagcgatctgattctgaagaatcggtcccttctgatgccactcctgatgatgtaaaagaaattgaagaaactaaagtgccagaaattgatccagaagcaatcaagttcaaggaaatccttgaggcccagaagaaggcttccttggagaacgatatgcctgttggtccaatgccacttccacgcgcagaagggcatattagttatggtggtgcacttaggcctggagaaggtgacgcaattgcacagtatgttcagcaagggaagcgtatcccacggcgtggtgaggttggtctgtctgcagaagagattcagaagtttgaggatctggggtatgtgatgagtgggagtaggcaccagaggatgaatgctatccgtatcaggaaggaaaatcaggtttatagtgctgaggataagagagcattggccatgtttaactacgaggagaagtcaaagcgggagcacaaggttatggctgacttgcagcgcttggtgcagagaaccattggccatgatgtgggaccttcacatgatccatttgctactacagatggttgagtaatgatttcttgttcaactagtcacctgtatcaggtgtgctttacctgtttgtgtttccttccctacattgtaattagtgtttttgaacttgcctagttatgccgcaaattgcttatgacattttgcatgtgaaccatagtaaaaaagagcatattattagcttgtatcttgtatgtgcaatattttttgttatgatgggttatatgtgctt

SEQ ID NO: 17554 - DNA, 509 bp, Zea mays
  Clone ID: LIB3069-044-F2_FLI
gcttcactctcctggtttattcctccgtgccgatctcgtcttctccggcgggaccatggcgccgtcctcctcccgattcgacgatccggcggcggtgaggcgccccccgcagcatgaacggaagccgccgtatatgttgcttctcccgctcgtctacgcccccgtcctccccctcatcaggatcgggctgcggcacaatcccgtggtgagggaccgcctcttctacggcgtcctcgccggcgcattcgcccacggcgcctacctcatatcggaactgtatgatgtggagagcaaatgatggacatccctcgaaggatgaggggataagttttcaggtagcaaaatttgattccatcgggattccagattgttggatgagagctgacatggcaattcagactaactagtgtgctatgtacccttatgttttctttggtcttgctattatgtttggcaaaaggatggaatggttgagcaaataaagtaattccagattgagaaatatttcc

SEQ ID NO: 17555 - DNA, 791 bp, Zea mays
  Clone ID: LIB3069-044-F7_FLI
gaggaggagcctgaggaggcgaagaagaagcgggaggaggagttcgactccttcacgtccactaaggcgcaggaccttgcgcagccgctggtcggcgcgcagatccccttcaagatccacatcgtcaaagaccacgacatgaaggagcgcctctgcctcgaggccgagcgcctcggcctgtccgcgatgatcatgggcagccggggattcggtgcctcgcgcagggtcgggaaagggaggctcgggagcgtcagtgactactgcgtgcaccactgtgtctgcccggttgtggttgtgcgctacccagatgatgccttcggggatgagctgcgaacggtacctgaaaatgagcctgtgtatcatgcggcgccggaggcccagaaagaaaactgagggaagtgcagggcggctaggcgacgaggggtggagaaagcagaggccgtcacgtcacgtcgtcagccagccagccctagcgtaacacaccggtgtcctgtctctccgactctccgtcccatggccactctgcatctgtaccaggaacctgtatatcatggacgagtccccgctgttttgcttcatgacatgtgtgttggtaaactgaagacttcaatgtttttggcgtgcatgggccgccgtgttcttcttctgcttgtgtcgtactggccttcctgcttggctcgctaccccgccagttcatttgccgatgactcggtggctggcaaacgagtggcaccgcggtcagccacaagggcaacacacgtacatgcattggttggtagctggcagcgggt

SEQ ID NO: 17556 - DNA, 690 bp, Zea mays
  Clone ID: LIB3069-044-G9_FLI
ggcatccgcagagagcttgttccgtccaggcaaccaaaaagcaagttgccccgccgcgcagaggaagaagagagcagaggaggatggctcgtacgaagcagaccgcccgcaagtccacgggaggcaaggccccccgcaagcagctcgccaccaaggtccgtccgtctgcccttctctacccgtttcggatccgctgttctgttctctagggttcccttctgagacgcgccggcggttgtgctgtggttgcaggcggcgaggaagtcggcgccgacgaccggcggcgtgaagaagccccacaggtacaggcccggaaccgtggcgctgcgcgagatccgcaagtaccagaagagcacggagctgctgatccgcaagctgcccttccagcgcctggtgcgcgagatcgcgcaggacttcaagacagacctccgattccagagccacgccgtgctggcgctccaggaggccgccgaggcctacctcgtcggtctcttcgaggacaccaacctctgcgccatccacgctaagcgcgtcaccatcatgcccaaggacatccagctcgcccgccgcatccgtggcgagcgcgcgtagccatcatctccggggatctgatgaatgtctagttaccaaacaaataggctgtattagcgtcgttgttctgtattcgttattttggattcggttgcagtg

SEQ ID NO: 17557 - DNA, 493 bp, Zea mays
  Clone ID: LIB3069-045-D7_FLI
ctgcccaagcgccgccgccacagctcgataccgccgcgggtattctcggcccgtaccagtcggtggcggagcgctcgcctgctgccgcgtacaacaccgacagcccagatgggaattgcttcgacaaaaatcgctgggggcatggttttgggcatctccttgcccaaaaccatctcccgatcaatggaggagattgtggaggcatcaagaattcgggagtacaagaaatttgattccagtacagccagcaagactccatctcgtggtccttttccgctacctccaccgcccaagtctgctcctggcaagctagtggactctaaagccctagaacatcttgatgcaccagttatggcggattgtctctactccgtctatgctttttgtaaggcctagggcctctgctacaaatgtggattgtcatatttccgaggccatcaatgtccggatactgttccgcttcacttggtagaagaattatggcatcagtttc

SEQ ID NO: 17558 - DNA, 973 bp, Zea mays
  Clone ID: LIB3069-045-D8_FLI
cacctgcaagcgcaagaagacccagccgtgctactcggggcctcgtccaaaggcggtgcacttcgaggagtgccgggaggtgagcgtgcagggcgtgacgctgcagaacgcgcagcagttccagctgacgttcacgcgctgctcctgcgtgaaggccagcttcctccgggtggtggcgccggcggacagccccaacaccgacggcatccacctcaacgacacctcccacgtccgcatcacggacaacctcatctccacaggggacgactgcgtctccatggtcggcaattgctctgacgtccgtgtgaaagacatctcatgtgggcctggccatggcatcagcatcggaagccttggaaagaaccggaccaccgacatggtggaggacgtgaaggtcgacacctgcttgctcaccaacacgaccaacggcgtccgtatcaagagctggcagggaggcacgggcttcgcgcgggacctgcggttcgagaacatcgtgatgaagaacgtctccaaccccatcatcatcgaccagtactactgcgaccagcccacgccctgcgccaaccagacgcaggcggtggaggtgcgcagggtggagttcgcgggcatccggggcacgtcggcgacgccgcaggcgatcagcatcgcgtgcagcgacgctgtgccgtgccgggacctggagctggcgaacgtcaacctgacgctggagggcggtggtgccggccgagccaccgccctctgctaccgggcgtcggggaagagcgccggcaccgtggtcccgccgtcctgcctcgccaggtcctcactgagagtcacctagcgaagcagtggccgaagcgcgtatgtatacacacacatgctgcatgaatgtcgattggagctgttggcatacccaaacaaaccaacctgtcgattgtacacgccgttgttgacgacaaggaaacacagagaagaaatatcggagtttacctgc

SEQ ID NO: 17559 - DNA, 420 bp, Zea mays
  Clone ID: LIB3069-045-E11_FLI
gtgagatctgcggtggggccaggaatctgatgtaaatagattattcaggttttttttcccctttgagcaacaccccggaggcgctatggcagctatttgtgcagtgatcagctaagcacctattgctgtattatttgtttgttgcagcagagttgaatgtgcattcttcgccttatggaggaggaatttatacagtgtggggttgccttcccctgcactttggcaggttagtgaagtgtgccctagaggaaagtggcatgtttgagagcaatgagattgcagggggctaaaatcccctttgttatttaaaattaaatagaagaggaatttagcctctcggatcccctcaattcccctgtatcccaaacaaaccttgaagtgttttctacagctttaggaaatgtggtttacttctatggt

SEQ ID NO: 17560 - DNA, 1073 bp, Zea mays
  Clone ID: LIB3069-045-G4_FLI
gcggcgatctagccggcggcgggcggcgcagcgatggcggggcaaaaccagcggctcaacgtcgtgccgacggtgacgatgctcggcgtcatgaaggcgcggctcgtcggcgccacccgcggtcacgcgctgttgaagaagaagtccgacgcgctcacggtccagttccgcgccatcctcaagaagatcgtcgccgccaaggagtccatgggcgagacgatgcgcgcctcctccttctccctcgccgaggccaagtacgtcgccggcgacggcgtccgtcacgtcgtcctccagtccatccgcgccgcctccgtccgcgttcgatctcaccaggagaatgtcgccggggtcaagctccccaagttcactcacttcgtcgaccccgccgcggcatccggggggccctccaacgcgtctccgagccttacgggcctcgcccgcggcgggcagcaggtcgccgcctgccgcgccgcgcacgtcaaggccatcgaggtgctcgtcgagctcgcctcgctccagacctccttcctcacgctcgacgaggccatcaagaccaccaaccgccgcgtcaacgcgctcgagaatgtcgtgaagcccaggatcgagaacaccatcagctacatcaagggggagctcgacgaactcgagcgcgaggactttttcaggctcaagaagatccagggctacaagaagagggagatcgagcgccagatggccaacgccaggcttttcgcagaggaacagctcgccgaggatctcgcgctcaagaggggcatctccgtgggggctgcggcaaatctgctggctgctggaggggagaaggacgacgacatcatcttttgatcgcctctttccatgatcatccaatcattcaatcgccctggaaacaataagttgatgctggagctccagaactgtacctgtttatagagtgatggcgggtttttttgtttcagtgagtagtctggtgcctggtcatccaagaccgatgaataatctgtacttgttgaggactaaatattgccaatgaactttagcacgcagtggttatgtgcagctggtgtagtaaattc

SEQ ID NO: 17561 - DNA, 705 bp, Zea mays
  Clone ID: LIB3069-046-C8_FLI
cagcgcgcgtgcgcctgaacgaagctacccgcaacctcgccgcgcgcgcccgccgccacaacctcgccggcgccgcgcgcgccccgcctccaccccgcgcggcgccggcaaatttctagggttcgtgtccaaacagccagttcacccgttccttatcttccgtcgttcagctggcgtcctctctctctcttgtggcgacgactgggtgacctccccgcccccgccgctctacgccaggtgcccaggtcttcctcgggcccttcgccgaagagcagccaacaggtaagcatggctcagaaaatggcaactgttgagcgagtagaagagcttctcgagaagctgcgtgctgcttcctgggatcatgctgtcaaaggtttgaacttagaagatggccatgcacactgcctcgacgtcatcttcaccagagcagactactgatgttgatggaagtaccactggtgatgtcaccttctaagtataacttgggattccggctctcatcaagtgactcctcccccttacgttgactttgcggacagatgtctcaattctagtggtggagctactaacaacaatccgatgtcctgatcgagagcgatggagctaatgtttgaacttgtgtgtttgaacttgtgaactatggatgtgaacctgtgtgaatttgtgaacttatgtatttggacttatgtgaatttgcgaacttat

SEQ ID NO: 17562 - DNA, 558 bp, Zea mays
  Clone ID: LIB3069-046-E1_FLI
gcgcgcaggaggtgccgacgacgaggatcgcggtggcgatgaccgggttcggcggggcggtgctggagggcgtgctcacgttcctgctggtgtacacggtgcacgtggtcggcgagcgcgagcctcggtcgcgcggcggcgacggcaagcgggagttcgcggccacggcgctgggcgcgctggcggttgggctcacgcagggcgcgttcgtgctggccgcgggcgcgctgacgggcgcgtccatgaacccggcccgctcgttcggcccggccgtcgtcagcggccacttcaagaaccaggccgtgtactgggccggcccgatggtcggcgccgccgtcgccgcgctggtgtaccagatcatggcgtgcccgagcgtgacggggaacgtggaggcggtggtcgtttgacaagctagtgtgcaactgtgctgtgcatccattcgttgtggttgtgaatgagtcgagggatctaaatgtgtgtgtgtgtgtgagagagagagagagagagatcatgatgacattgtgtgtgtaattagtttgtccagtgggctttcagttc

SEQ ID NO: 17563 - DNA, 1414 bp, Zea mays
  Clone ID: LIB3069-047-A7_FLI
gcaaaagcaatcgcgaaagcgagcgcgaggcgagtcggccggcgaagggggcggatggcgcgcgggctgcgcggcgtccgcgacgacctatccgagctggggcgccacctgctcgacatcgcctgcttcctgcacccgctcctcaacccggcccacaccgactccccgccacccacccccacgggccgccgccgcccgcgccgctccccgtccccgcaccccgccgcgccgccgtcaccgtcgctcctcgcgggcatcctctccgacctcgccgagatcggcggctccttccgcggcggcttctcccgctcctcgccggcgcccgaccaccccgcccccgacgcgctcgagtcacagcaggccgcctcgtccccgtccccgcgtccgcctcctcctgctgctgccgaccagatcgcagatgatgtcgtgggagcagcgcgtgccctcgccgcgcggcccgaggcgtggatcgacttccccgtgctcgccctagatgagggttctgtaatttctggtatccaaagagatcatatggaatccattgaaaaacttgtcccagatttagcatctctacggggtaggctctgtccttcttacatggatgaagacatattctggaagatttactttaggttgcttgagtcaaacataaatgagcatagttctgaggaagatatccggagcgtgccaaattctgtacatcacaacaatgagatagagtctgattctccacctcacgtctgtgagatagaaagtgtgaaaagcaaccaagaagggtaccaatcttcggatggtcgtgctttccccaagacaagatctgagcgaagcattgaccaatgggtatttgcaaagtcaaaatctgaagaaagcatggatcagtggtctgaaataccttcagatgtggaatccttcagagaaggtaaaaggtacctcagtagcgaggagctgagtgacgttgatagtgccaacgttgttgtcatggacaaatacatggattcactcctctctgaccggaggaaccttccctacgctagctcctcggtgcgccgggattcagtcagacgaaaacctgcttcgtccgccgattacagccgccgacctccgcagccaactccacctgcatcgctgtcaaagaaggaatcgtgggatgtcattgaagattcggagttcgatatacttgacagttagtaattgagatctttgcgatctcaaggctgtttatccttctattttcttccatgtttccccacacttcacctcgtttgtaaatgtggacgtgcaggtggcgtcagtgatagtgggaaaggactaatgttctttttaccaatatattataacagtgtgtgcatataaatcttctgagctcgcaagctgtgagcctcccaggttaaaagtgtttatatgttggcatcag

SEQ ID NO: 17564 - DNA, 986 bp, Zea mays
  Clone ID: LIB3069-047-E9_FLI
cacagaaaatggcgtcacttctccgccctctcgtcctcgtgctcctgatcgcctcctgcgcagcgcagcagtcaccgccggcgcagcccccgccaacgccgaacgcgccaccggccaactcgccgccccaggcgcctccagccggaaacccgccgccggcgccccaggcgccgccggcaggcaacccgccacctgcgcccaccgccactccacctccggccccgaccactccgcccccggccccgaccacacctcccccggctcccacaacgccgcccccggcgccgacaactccacctccgacccccaccacgccgcctccgtccccaccggcgtcgccaccgcccgctcccaccactccgccaccgtctcccccggcaagcccgccgcccgctcccgccaccccgccaccgtctccacccatggcgccacctcccgccacgccccctccacccgccaccccgccgccaccggccgcgcccacgccggccccgagcgtggccccgactcccccgcccgtggcgacaccggctgcgtcccccaagagcccgaagacgccgagccccgccgccgcgacgtccccggcgccctcgctctcgcccacgggcacgccgacgaacgaggactcgggtgcaagcgcgcgcgcggtcggcttcgccacggtggtggcgttggcgggcgcgggcctcgccgtcctgctttaaaaactagactccgactcttcctcctgtcctcacgccgatgttgtcaccccctccccgtgcctcgacgttgctgctcgctccatttcagtttcatcttttttttttttcctttggtgttgttatttaattttaccggccctacgatcgattcttgatgtacacgatgatgatgcattggttgctttggatccgcgggcgggtggtggttagtgttctgcccgcgggtgtcgccatgtacttttaccgcactacattttggttctatagagagaggatttgtgt

SEQ ID NO: 17565 - DNA, 1686 bp, Zea mays
  Clone ID: LIB3069-047-G1_FLI
tgatactccttcctcaaatgggcagcctaaacacttcttccagtcacaagcagcagcttcctctggtgtgcatgatatgcattcctctaacgggcagtctaaacactaccaatcacaagcagcagcttcctctggtatgcatgctatgtcttcctctaatgggcatcctaaacactacttcaagtcacaaacagcaccttcgtcgggtgtgcatgatatgtcttcctccaatgggcagcctaaacattttttccaatcacaagcagtagcttctggtgtgcatgatatggcctcaaacgggcagtctaaacccttgttccagtcccaagaagcaactgtactacagcccaaaaatgaagcaacatgggtgtaccatggacgacctggtgatggaaaggttggaacatcaaaaaaaagcagaccatcgacaagtattgggttcatcactaaaaatcaatcaataaatgctgcaaaatttgccatgaatttgaatggccaaagtattgtcagtgaccatacaaaatcagcaggcgcaaccgctatgcctgcccaagcaaatataccaaacagaggtcttgatgctcctcggaacatagtctcagcatttccagctaatgttagggagaaccagagcattccatcagctccagtggctcaatcttggatctcgtttggtgctgctacagagaacaaaccaaccattgtcagcccagctttcgttgacaataattgtggctggaaaatgccatttgctaatgtccaaccttgtgatgataccaaattaagcgttgttcctcagttctttagacatcctgttcaggtagttagagagaactcggttcaaaacaaggggctggtaatatttccccagttggtgcagccagatttcgcaagatcacaagggcaaccacagtggcaggggctgtttccccacatgcaacagaagccaggcaaggatgtactccgcccggacttgaacatcgggttcccatctccaggttcaccaccagctcgacaatcgtccggcatcaatttggaagcacagcagccagacctcgctttgcagttatgatctgggaaaagacaatgaaaacttcatacggccaggccaggatttatgctataatctctaagcatgtgaaggcatgaggagctcaggtgcgaaacaaggcgagaacagcattgggacatccgggacatggatcggtgatgattgattgtgatgttgactttacatgccatatggcgtcatcgcaactcatcaactcatcgcgtcgatgtacgacgatatcagaaaatggatggatgaacactgcttgaaatgagatcatgtctacttgggggcattctgacaggagttaagaatccagcatttggggaaatgctttggtggcatgcatgtagatagcacactagcatgcccatgatctgaaaacttggggcgctcctctctgaccacgatacagctttcttcggtggaaattttggcaccagaatttagaatttagaatttagaatataagccgttcattcggtagtgtaggtcctgtggtcacccctatgtaatgtaatgcccataccaaaatgaatgttggctgtaaattgttctgtgttgaatagattgttagggtagggcagtggccagtggccttcacacctcttctgaatgaaattgcttcttttgtt

SEQ ID NO: 17566 - DNA, 1116 bp, Zea mays
  Clone ID: LIB3069-047-H5_FLI
cccctcgtccctttcctggaaacggatcttaggtcgccgtcgctgtcgagtactccacgccgccgagacgtttcgtcgtcgcctagacattccacgccaccaccgagtactccatcttccctctcaggtacgagttcccatctttcgagtactcgtcgccgccgctgttttgcccttttccacgccgtcgctgctgcagcagaaaggatgcaccgccagaaatggagtccccccagaactggatgaccaagctcttgattggccctcgccggaaatggagtccccccaggcgcaaccaaccttatccctctcaacgagatagttgtcgacatcaatggaacatttgtgccttcactgagtgctcccgcgccaaccaacacaggcttctccctcaccattgatgaggtagacaacacggtcacttggtgacaaaacgcagtttagattgtctgtctcatctcacgaaaaatgatttcgagggtatttcaccggatctccgatgggaggaagaaggacctcaacatgtaccaagtgagaaagtgatgtacctcaaacttggattagctgctaaggatgaacgcgaaaacaaagtagagaggatgcttgcaattatacaggtcatgcaaatattcgaaatgagttggaagatgatggttcagccgccttagattgtgttcattttctgccccacgagactagagtgttttatgactctaaccatccagtgatggaggttggcagtctatacgcatcgatgactgaattcaggcttgcaatgtggcaatatgacatagaaaaagaatttgagttaggcactgaggctagtacttcgaagaaatacagagggtattgtcgaggtggcgactgtccatggagcatacatgcaagaattgagagggatggttcaccaaccataatcgtatgtttttatttgttcaccaaccatggagcatacatgcaagaattgagagcttgtatgaaaaaactaactccgaagaaaaagaagtaagggatgtttgtaatttgtccccgcctactactatggatcaggtgtaatgtgtttctgtgtaatgtgtaaatggaactcagtctatggaattcagaatgtgtctgtgt

SEQ ID NO: 17567 - DNA, 897 bp, Zea mays
  Clone ID: LIB3069-048-A8_FLI
gaggagagaccgcgcactacacacctcacgcctgaaggccagatctaagccttctcgtcctcgcccaaggacaacgataaacatctaagaaccaaacaaatcagagcacgaccatcggtctctaagcaaaacgcgcagcacgcacgtagcagagcgcgcatggggcttctggaccagctgtgggacgacacggtggccgggccgcgtccggactccggcctcggcaagctccgcaagcacgcgtccttctccccctcgtcggccgcgccgtcgccgaccgcggagggcgcggcgccgcccgccgtgacgcggagcatcaccatgctgcggccggcggcgctgtccgtcgccacgtcgccgcgcagcgagtccagctccgcgccgtcgtcgccgtcgcccgcaagcggcgctcccgactcgcccttcggcgcagcgacgacgcccaggggagagggctggaagaagctgcgccggaaaggcaggatggccgacggcgccgacgcccccggcacgccgaggagccccaccgtgtacgactgggtggtgatcagttcgctggaccgctgaagcagccggccgggccaagacgaggaggacacagcacaaggatggaggaaggcagccaccatcagcagcagctagcggactgaaggaggatcggaacagagaggccccccggccatgcgacctgcttaacagagagcttctggtcacggttctgttatactacgcgttaacggtgtatgtatatacgtcatcttcctgtaaatctccgtggtgtgaggtgctgctgattttgaagagagtgatgctcctgttatgtgctactagctagctagtgctgttgctgtatgagtacagtgtagtctactattaagggttgtcgtttggactgtt

SEQ ID NO: 17568 - DNA, 1045 bp, Zea mays
  Clone ID: LIB3069-048-B7_FLI
caaggtttcacaagatgagggcataaaggttgacagatccatagagttctcatatgaagaactttctgatgctacaaacaactttagtatggaccataagattgggcaagggggttttggttctgtttattatgctgagcttagaggcgagaaagctgccataaagaaaatggatacaaaggcatctcaagaattcctcaatgaattgaagattttgacacgcgtccatcacacaaatctggtgcgcttaattggttattgtgttgagagttgcttatttcttgtttatgaatttattgagaacggaaacctaagccagcatctgcatgggacgggttatgaacctctctcatggaccagtagagtgcaaattgcccttgattcagcaaggggtctagagtatatacatgagcacactgttccagtgtatgtgcatcgagatatcaagtctgcaaatatcctgatagacagagacttacgagcaaaggttgcagattttggactgacaaaactttcagaaattggaactacatcacagtcactcccatcactacgagttgttggtacatttggttacatgcctccagagtatgctcgatatggtgaggtttctcctaaggtggatgtctacgcttttggtatagtcctgtatgaacttctttctgccaaagaagctattgtgagatcaacagaattcactgatgcacaaggcctggtttatctgtttgaggagactctcagcatgccaaaccccatggaagctcttcaggaaatgattgatccaaggctaggaggtgactaccccattgactcggctgtgaagattgcgtaccttgcaaagtcatgcacgcatgaagagcccaggatgaggcctaccatgagatctgtagtggttgctctcatggcgctttcatccaaggaccatgagttaactcggggacacgattagcatagcacattgtccctggggctgctttccatgtcagatgaaaacaatacaaaagctatcgtgtacagatgcaatgtattttcgttctgattttgt

SEQ ID NO: 17569 - DNA, 695 bp, Zea mays
  Clone ID: LIB3069-048-D6_FLI
gtggtctatgcaattcagttgacatcaatgtatttcagataattctatggttggttttatggtggaaaccagttcgagttatggtcattttgccaaagatgttctttgcaggtgtatcactatttgctgcccttgggtttgttctgtatggaggaaggttatttctgatgttgcagcgttttcctgtagattcgaaaggaaggagaaagaaattgcaggaggttggctatgtgactaccatctgtttttcttgtttcttgatcagatgcgtcatgatgtgcctcaattcatttgataaagaagcagatcttgatgtcctgaaccatccaatcctgaacttcctctattacctgctggttgagatagtgccttcggctctggtgctcttcattctacggaaactgcctccaaaacgtgggatcacacaatatcacccaatccattagagagcaggccttggtgttttctggtggattgtcttatatagcgtggtaaatacagaaggcagagtgaaaagtaccacctttgctctcgagcttgcccagcttttcatacgagggaaggctttagaatctcaggtttagaaaatgcgatctctttctctcagatttagaaaatgtaaaatgtaatttatataactttattattctcagtgcatatcatttgttcacatcgcagtaatcgtttgcatgttt

SEQ ID NO: 17570 - DNA, 563 bp, Zea mays
  Clone ID: LIB3069-048-G11_FLI
gctcgtctcctcccacccgcaaccgcagggagagaaaggggaagcccgccgccgccccggcccccagcaaccagcagatcgggacctctgttctgcgcaatccatccatggcggaggaatcaggccgtcccttgccaaagtttggtgaatgggatgtcaacgatccggcttccgcagacggatttactgtcatattcaacaaagccagagatgagaagaagggtgggaatggtcaagacacagactcaccttccaaggaccccaggactgagagggtggagtcttatgctgcaaaaccaagcacgaagaaatggttttgttgtgtgacagccagccctacgcaatcctgaggaaggcaattgcatgcgctggaaatactgcccctttaattttctatacatactatccataagacactgtagaggtacccatggctctctgggctccaggatgggtgtctcataaaactctggcgtgcatgtatgtatggtgtgagagttgtcggcatacatttgcaaagtggacttctgcttgtaattctagtcctgtctctcttttttttt

SEQ ID NO: 17571 - DNA, 1606 bp, Zea mays
  Clone ID: LIB3069-048-G7_FLI
caagccaaagttgcaaagatggcttgatgagtttggggagtactatagcagagttgtggtagccctttctttggttgttgcacttttgggaccattactttttaagtggcctttttttggtaactcaggggttcaatttaccgtggattaggacttatggtggctgcatctccctgtgcattggctgtagctccattggcatatgcaactgcaatcagttctcttgctagtaagggaattttgttgaaaggtggccatgtcttggatgctctttcgtcttgtcagtctattgcttttgataagacaggcacactaacaactgggaagcttatgtgcaaagcaattgagcctatccatggacatttgggtgtgaaaagtggtcgtagtaatccttcttgctgcactccaaactgtgaaagtgaggcattagctgttgctgcagccatggagaaaggaacaacccatcctattggaagggctgttttagaccactctgttggaaaggagcttccagttgtcgctgtagaaagttttgaatgcctacctggtaggggagttgttgctactttgagtggtgtaaaggtaagggaaaatgaaaatgagctatccgaggcatctatcggttctgtggattatatttcttcactatatagatccaatggtgaatcagagcaaataagagcagcagcaaaaagttctgcatatgggcctgaatttgttcaagctgctctatctgttgacaaaaaagttactcttttccactttgaggatgaaccccgctctggtgtttgtgaagttatatccaccttaagagagaaagctaaacttcgcattatgatgctaactggagaccatgaatcaagtgcccagagagttgctaaagctgtttgtattgaagaagtccacttctctttaaagccagaggataaattaaataaagtgaaagcagtttcaagggaaggaggtggaggtttaataatggtcggtgatggtataaatgatgcaccagcccttgcagccgcaacagttggaatggttctagcccaacgtgccagtgcaactgcagtggctgttgcagatgttctgctgttgcaggataatatttgtggggtgccattctgcattgctaaggctcgtcaaacaacttcattggtcaaacaaagtgtagctctggccttaacttgtattgtttttgctgcgcttccttctgtcctgggatttcttcctctttggttgactgtacttcttcacgaaggaggaacccttctagtgtgcttgaactcgatacgagccctgaacactccgacatggtccttggtagatgacatccggaagctcgtcgatagcttaaggaattatttcccatccaagttcaacagctctccctcaagctacaccgcaaacactgctcccttgtagattaccatgtccagcaacggccgtctttggttaaccttgttgtttctgtggcaccgtttgaatttaggcgaggggttctaacctaattttgtaggcgcccgctgtactcttttcaccaccatgtaaagaaagaaacttggcttgaggttgagctgaaggtcaaaggacagtgatgaaacatccagtt

SEQ ID NO: 17572 - DNA, 1900 bp, Zea mays
  Clone ID: LIB3069-048-G8_FLI
cctcctgctggaattgacattcttgtagatggtcttgtcttatctccagcaagaaagctccaagctgcaccatgcccaaaaattgagaatgttctgtatggaactaatctattgcacaataatggcttcactcgtgggctttctgggtggagtcctatgggttcatgtcgattgagtatccagactgaagcaccccatatgttaccttctatcttgaaagaccgtgcaagccagaaacatataagtggtcattatatccttgccacgaaccgcacagatgtttggatgggtccttcgcaggtcataactgataagctaagattgcatgtcacttacagagtatctgcttgggtacgagttggttctggaggacatggacgtcaccatgtaaatgtctgtcttgctgtggataaaaaccaatgggtcaatggtgggcaagtggatgctgatggggatcaatggtatgaaataaaaggagcattcaaacttgaaaagcagccatccaaagttactgcatatgttcaaggccctcctgcaggtgttgatctcagagtcatggactttcaaatatatgccgtcgacagaaaagcacggtttgagtatctgaaggagaaaacagacaaggtgagaaagcgtgatgttgttctaaagttccaaggatcaaatgcagtgaatcttctaggttcatctttgaggatacaacagaccgagaatagctttccatttggatcttgcatcgcgagacacaacattgagaacgaggatcttgctgagttttttgtgaagaacttcaattgggctgtatttgagaatgaattgaaatggtaccatacagaagcagaacaagggcgacttaattataaagattctgatgagttgcttcagttttgtgagaaacataagatacaggttcgtggccactgtttattctgggaagtggaagacgctgtccaaccttgggttcagtcattgcaaggtcaccacttaatggctgccatccaaaatcgtttgcaaagcctattgtcaaggtacaaaggtcgatttagacatcacgatgtaaacaatgagatgctacatgggtctttctatgaagacagattgggaagggacattagagcttacatgttcagagaagcacataagcttgatccttctgctgtcctatttgttaatgattacaacgtcgaagatggatgtgacacaaaatctacccccgagaaattggttgagcaggttgttgatctccaagataggggcgctccagttggtgggatcggtgtgcaaggtcatatcagtcatccggtaggagaaatcatatgtgattccctggacaagctcgccatactgggtctcccgatctggattactgagttggatgtcacagcagagaacgagcacatacgagctgatgatctagaggtgttcctccgggaagcatttgcacatcctgctgtggggggaatcatcctctggggattctgggagatgtttatgtttcgagagcacgcccatctggtcgatgctgatgggacaatcaacgaggctggcagaaggtaccttgctctcaaacaagagtggctgacccgtatgaacggcagtgtcgatcaccaaggagagtttaagttcagaggataccatggttcgtacacagtggaagtgaacacgccttcaggcaaggtagctagatcgtttgttgttgacaaggatagcccggttcaggtgatcgctctgaatgtttaatgtgtgggaaatcatgcgcctgtcctgtattttagcgatgtactgaggtgttgaacacagatagtttcatagctgatgccacgccttcagtgtacagaaaatattttcacgtttattctctgttctattttttgggtgattataacgcgatatttacatt

SEQ ID NO: 17573 - DNA, 1283 bp, Zea mays
  Clone ID: LIB3069-049-A1_FLI
gcaaacagattgaacataacgaaaactgttcgaaagtattcaattgatcggaatttagtaccaactggatcagaattccaccctgggcctatccccattctcaataagcatggagatgatgtcgaagaggatcacgtggatggtgcattttcattgtcatctcgcaattttgatagcttttcacaccaatatcctgttttggttgtcaacttctatgctccctggtgttactggagcaatcgactgaaaccttcatgggagaagacagcaaaaataatgagggagagatatgaccctgaaatggatggtagaatccttctaggcaaggttgactgcactgaggaagttgaattgtgtaggagaaaccacatacaaggatacccatccattcgtgttttccgtaaagggtctgatataaaggagaatcagggtcaccatgatcatgaatcatactatggggaacgtgatactgagagtttagtcgcggcaatggaaacatatgttgcaaacatcccaaaagaggctcatgctttggaagacaaatccaataagactgttgatcctgcaaagcgccctgctccaatggccagtgggtgcagaatagaaggctttgtgcgtgtcaaaagggttccagggagtgttgttatatcagctcgatctggatctcactcgtttgatccatcccagataaatgtttcgcactatgtgacacagttctcatttggcaaagacttcccaaggatgttgcatgaattcataagacttactccctatcttcgtggataccatgatagactagctggccagtcttatactgttaagcatggtgaggttaacgccaatgttactattgagcactacctacaagttgtaaagactgagcttgtaacacagaggtcctcaaaggaactgaaagtgcttgaggaatacgaatacacagcacacagcagcttggtgcacagcttctatgttcctgttgtgaaattccattttgagccttctcccatgcaggtcttggtaactgaagtcccgaaatccttctcccatttcatcacaaatgtctgcgctatcatcggtggggtcttcacggttgctggaatactggattccatctttcacaacacactcaggatggtgaagaagattgagctaggaaagaacatttaaatttcgacgccgctgcaagtttaggcggatgcactaggtagccattgttttgttataactaggtaatgactcatgaaaatcggtatatgaaagatggcgtgctgaattgacagttg

SEQ ID NO: 17574 - DNA, 1341 bp, Zea mays
  Clone ID: LIB3069-049-B2_FLI
aggtgcagctgtcagaggcggagatccggcagctctgcgtagacggaaagcgggtgctcctttcccagcccaacctcctccgaattcacgcccccgtcaagatctgcggtgatatccatggccagtttgttgatcttctgaggttgttcgatttgggtggttatcctccagcttcaacttatgtattccttggagactatgtcgatagaggcaaacagagcttggagactatatgcctgctgctggcatacaaaatcaggtatcccgaaaaaattttcctgttgagggggaaccatgaggatgcgaagatcaacagagtctatggtttctatgacgaatgtaagaggaggttcaatgttcggctgtggaagatattctcagattgcttcaactgcctgcctattgcagcgctcattgatgacaagatactgtgcatgcatggtggtctctcaccagaatggactagtttggatcagataaaggatattgagaggcctgctgagattcctgattatggtctcttgtgtgatctgctttggtctgatcctagtcctgatggagaagggtggggggagagtgacagaggtgtttcgtgtacgtttggtgcagataagctcgtagagtttttggagaagaacgatctcgaccttatatgccgagctcatcaggtagttgaagatggttatgagttttttgcacaacgaagattagtgacaatcttttcagctccaaattactgtggagagttcgataacgccggtgctctgttgagcatagatgagagcctaatgtgttcatttcagattctgaagccaactgatatgggtccaccacatgcaagaaaacaaattccaaataagccagcaagagggtgaagccttcgaccagcatccaatactttcagcatcatgatcgtcagtcagctcaaagggggtgatctgttgtttggatagttggatccaccaggacatggcattagactcagcgtcttggttggcggcttggctgtaaaggatattctgtacagcattaggttggattcagcgcaccatctgttctattgttcttcctgccggcacagtacctcattggcagcttgacatccagtagatgttagtagtctctatttgttttttcttagctgtgtcatgcattgttttttgagcgtaacttgatgtatggtgatttttgtaatctttgtaatatgtaaatgctgcaggaaataggtctgcacaaattctgtccatcagcagtaccattcttttctttttttgacttccagttcttttgtggatctgaaagatgtgtgaagctgttatctaaagtcttaaaagatgctgg

SEQ ID NO: 17575 - DNA, 882 bp, Zea mays
  Clone ID: LIB3069-049-E1_FLI
accgagcgaattcaccacagcttctcaccaccgctaccttcgatggcacccaaggcggacaagaagccggcggcgaagaagcctgcagaggaggagcccgcgacagagaaggcggagaaggctccggcggggaagaagcccaaggccgagaagcgcctcccggcgggcaagtccgccggtaaggagggcggcgagggcaagaaggggaaaaagaaagcgaagaagtccgtggagacctacaagatctacatcttcaaggtgctgaagcaggtgcaccccgacatcggcatctcgtccaaggccatgtccatcatgaactccttcatcaacgacatcttcgagaagctcgcggccgagtccgccaagctggcgcgctataacaagaagcccaccgtcacctcccgcgagatccagacctcggtgcgcctcgtcctccccggtgagcttgccaagcacgccgtctccgagggcaccaaggccgtcaccaagttcacttcttcttaggctcatagtactaggctgggtggtgttggtagacgtggctcaatttatctggtaggggtagtgatggatgatatgatctgcgtctatttgagctgttaagactgatgaacattgttccacgtcacgttgtgtttgatgggcattgttccagatcacgttgttaagactgcagaactgtgtctgacatggaacaagtatgatacttgaaatttctgtgagtgcattgaaacgtgaaatctgcagcccttgaaaaaaaaatctgaaatacaactgcgtgttcatgatcaagttcaggatgcaggcacattttgtatcctatcattagtgctatttggtttatatatttataatgtaatagctggctaatatgataatgtt

SEQ ID NO: 17576 - DNA, 580 bp, Zea mays
  Clone ID: LIB3069-049-F2_FLI
cgccaagcggtgaagcagcatcggccatggaggagaccaagccagcgccagaggccatgctccgctgcgccagggccgcgctcctcctcgcctccctccgccggccacgcgcgccgacgccgacacaggatcgccgccggacctcctactctccctcctcggccgccgcagcggagctcgcgcggctccggtccgaggggctcctccgcagcgccgagatcgcagcggcgcggcgcgaggccgctgcccacgcgcgggtcgccggctccgagctgctcctcgtcctcgccgtggcgcccgccgtcctcctgctcctcctcctcgggcttctctaagccagcggcggcgtgggtagcgcgggggctggagtctggggccgcctctcctctccgtgagttcagttttggagtgcactaggtgttcgatgaaatgcatgtttgagtgtggcggcgagtatataagcatcagatttgtcccccttttgttttggctgcattgccctgtggacaaatgtggtctgggtttctgtgcggtttgggcattcgacgaaaagcctgttcgtgtttggtgatttcatttc

SEQ ID NO: 17577 - DNA, 965 bp, Zea mays
  Clone ID: LIB3069-049-F5_FLI
cagaccctgccccggttcaactgccgtggccgtctcgtccccgtccagtccacctttccctcttcctctccgactccgccgccggcggaaccccaaccggcgaggatggggaacatcttcgtgaagaagcccaagattaccgaagtggacagggccatcctcaccctcaagacgcagcgccgcaagctcgcccagttccagcagcagcttgagaaggtaattgaagcagaaaaggaagctgcacggcagttggttcaacagaagaagagagacagagctttgattgcactgaagaagaagaaagctcaggaagagctgttgaaacaagttgacacatggcaaatgaatgttgaacaacagctctcagatattgaactagcaagtaaacaaaaggctgtatttgaaagcctgaaggctggaaacgctgcccttaagtctatacagaatgagataaacattgatgatgtccaaaagctgatggatgacacagccgaggctaaggcttatcaagatgaaataaatgctgttctgggtgagcagctctcggctgaggatgaagaagctgttatggctgagtttgaaaacttagaagctcagcttgccgtcgagtctttgccagacgctcctgttactgaagtaagacctgaagagaaaatgaaagctccggctgacacagaagctgtgcctgaggacatcgatgaggctattgagctccctgatgtgcctacgaaagcgccagagaggcctgaagctccagaaaaaaccaaagttttggaggagccactgcctgcgtagtggatgaaactgagattagtaggacacagttagtttgcaggaattgtaacatacccactatttcattgtactatcttattttcagccatatcagaattttattgtgtacagcaagaaaaattggtgtttttgcaccatcgactatcactagtttggatttctcagtgccc

SEQ ID NO: 17578 - DNA, 1696 bp, Zea mays
  Clone ID: LIB3069-050-B1_FLI
ccagctttgaccgccgcctcccttcccctccgctactgctcctcctcaccccactcccccgcaggagcggcggcggcggcggcgaggtcgtaccccacatcggcgagcggcggcggcaccgccggaggcaaaggcaagatgttcgggcgcgcgccgaagaagagcgacaacaccaagtactacgagatcctcggggtgcccaagtcggcgtcccaggacgatctcaagaaggcctaccgcaaggctgctatcaagaaccaccccgacaagggcggtgaccccgagaagttcaaggagctcgcacaagcctatgaggttttgagtgatccagagaaacgtgagatttatgatcagtatggtgaagatgcccttaaggaaggaatgggcggtggaggatcccatgttgatccatttgacatcttctcatcattttttggaccctcttttggaggaggtggtggaagcagcaggggaagaaggcaaaggaggggagaagatgtagtccacccacttaaagtttctctggaagatctttacaatggcacctcaaagaagctctctctttcgcgcaatgtcatctgctccaagtgcaagggcaagggctcgaagtctggtgcctcaatgaggtgccctggttgccagggctcaggcatgaaagtcactattcgtcagctgggcccttccatgatacagcagatgcagcagccttgcaatgagtgcaaggggactggagagagcatcaatgagaaggaccgctgcccagggtgcaagggtgagaaggtcattcaagagaagaaggttcttgaggttcatgttgagaaggggatgcaacacaaccagaagatcaccttccctggtgaagctgatgaagcgcctgatactgtcactggagacattgtattcgtcctccagcagaaggatcactccaaattcaaaagaaagggtgaagatctcttctatgagcacaccttgtctctgaccgaagcactttgtgggttccaatttgttcttacacatctggacaacaggcaacttctcatcaaatcagaccctggtgaagttgttaaacctgaccaattcaaggcgattaacgatgaggggatgccaatttaccagaggcctttcatgaaggggaagctgtacatccatttcacggtggagttccctgactcgctggcaccagagcagtgcaaagctctcgagacagtacttccaccaaggccttcatccaagctgacagacatggagatagatgaatgcgaggagacgactatgcatgatgtgaacaacatcgaggaagagatgcgcaggaagcaagctcacgctgcccaggaggcgtacgaggaggacgacgagatgccgggcggagcccagagagtgcagtgcgcgcaacagtaagcagactatcatcaaggcaattgggaggggtggtgcccttaaagcgtgggagtgatctctggttttgctgtcgccgagctgggaaataggaagctgaatcgacctcttaagcggggaatgtatccttttttgctgcaacataaaaaatgctacccaggcatagctgggtaccttttaacttctgtttggggatttgctagagtgatggtttcgatatatagggggacttgaatgtctgtggaatgctacggtataacgcacatttgggtgcaatgtctgttgcattgctgtctgaatg

SEQ ID NO: 17579 - DNA, 604 bp, Zea mays
  Clone ID: LIB3069-050-B2_FLI
tcctccgccgtcgccgcgctgcaggaggactggaaccggaggtcggtcttgaagtcctgcgcgatctcccgcaccagccgctggaagggcagcttccggatgagcagctccgtgctcttctggtacttgcggatctcgcggagcgcgacggtgccggggcgaaacctgtgcggcttcttcacgccgccggtggccggggccgactttcgcgccgccttggtggccagctgcttccgcggcgccttgccgccggtcgacttcctcgccgtctgcttcgtgcgcgccatcggagagagctgcgtgaggcgtacctggtgggtctcttcgaggacaccaacctctgcgccatccatgccaagagggtcaccatcatgcctaaggacatccagctcgcgcgccgcatcaggggcgagagggcctgattgctgctctgtcttcctgtttctgtagtgtctgaactaggggatggaatctatcgcttcttgtcctgcaatcgtgtactgatgttctaggcaaatcagtttggctgttatgaatgtgattcagtgctttgattcataacttttgtcgagcaagatttaaattcaaagagcatttaaaaaag

SEQ ID NO: 17580 - DNA, 963 bp, Zea mays
  Clone ID: LIB3069-050-B6_FLI
gtggcaaaacatatatagaagtgttttctggtccaattggttgacaaaggtcaatgagtgttgtagcagccacctaatcaacaattggttagcagcagggatgtataaaccagttatggtagacctagcatatttaaaaaaacaaaaatatgaagcctattggcatgtaatgcttacggttcatcaaccaatgaagcaacccggacccgacgcagcgtgccctgccgccgtccgtcccccttcgtataatggacgccgacgaggcaccggagcccgttgtatccgcacgcctctgccgccgattccgaaggtaggatttcgccctcccgcgcggcaatggggtgcacgacctcccacgacgtcgtcgccgccgctgtcacctcctccaattcccggccccatgcgcgccgctcgtccgcgtccgagccctcaccgcggcgcggagaccccgccgcgctgtgccgcgagcgcgtggcgctcatccgcgccgcggccgaccgccgatacgcgctcgccgccgcgcacgctgcctacttccgctcgctcgccgtcgtcggtgacgcgctgcggtgcttcgtggcgtccgcgctcgcgcccgccacgcccgggtcctcgccggtgctcacgcttccgccttcccccgccaagctggtcgctgccgcgtccgccagcctcccgccgtggtcgtcgtccacggtctcgccgctctcgcactccctcgcagagaagcggtggatctttagggaggcggcgttgaagggaagcgcgagagagaggacacggtcacggactcaggccaccgctgctcacagctgcattagaatccgatttcgggtccgcgatcacacgtgtcaacgccggatacgggacgctcccgtgaagtgcggacggggcttacaaatatgtagatactgaaggttctatggtgtcaaaatcgcaaccgtgctcatacaaagctcaaag

SEQ ID NO: 17581 - DNA, 575 bp, Zea mays
  Clone ID: LIB3069-050-C3_FLI
gtggactttgccttcccgtacctgttgcagttcatccgtgaatacactagcaaggtggacgatttagtgaaggacaaaatcgagtcacagaatgaagaaagagccaaagagaaggaggagaaagatcttgtggctcagcagaacatgtatgcgcaactgcttcctcttgctctgcctgctccgccaatgcccggcatgggtggccctccacctccgatgggcggaatgggcatgcctccgatgggcgggatgggcatgccgccgatgggccctggtccgatgccagcattcgggatgccaccaatgggaagctactgagatgagatgtttttttgttgttgttgcagagagcttagatgatgatttgatatgttcctgtgtaagcagaggcggaaacctcattggagttgtagatggttacattttggaattaatattctttatggtaccaggaaatttttggcgagtgaatgattaggttggttgagcatgagctggtgaaagctggtaccatttgtatagtgtgatgaaatctttgtagacattttgcttgtgtaataataatacttgttcgc

SEQ ID NO: 17582 - DNA, 428 bp, Zea mays
  Clone ID: LIB3069-050-C5_FLI
gtcgttagctactttgaatgggttcagaacattcaaggtttcatgtgggccgaggaaaaagtaaacgatgaactagaaaagtacatgagcagtgcttttcaacacatgaaggccatgtgcaagtctctggattgcgaccttaggatgggggccttcaccttaggagttaacagggttgctcgtgccaccctcttgagaggctgggaggcatgagaccattgaccgcgcattacagattcgacaggtgcattcaataattcgtgtccaacaacgttggagcattagtgtctgatacgggaaaattcatcagaaacgaccggcttggaatgagcccgttgaaataacagtctgggtgttgtgcttgttgatcctgagttaccaatggttggttcaccagttcttggtgatgattagtgaaaattttattt

SEQ ID NO: 17583 - DNA, 1084 bp, Zea mays
  Clone ID: LIB3069-050-D12_FLI
gatgatgctaaggaggtagtccattaccaaacaatctcaccaaagagcttagctaaatctgttctcgaggaaggtggctggtcaaacttcatgtgctcaagggaggatactcagaataatgttgatgttgccattgtttttattggctcaaagctgcaatcgtcagacatatctaaagataagcaagttgatccaactttagcagacacactgaagctctccttcacacgctcagagttttccatggcattcccctacgtttccacgacagtcgacgagagactagaggactcgttgctatccagctttgccgagaactgcaacaatggtttcggaagaaaccgcatcacctacacagacacgtgtaccggtcaagatctgaagaaataccacaacatggatgccatcaatgacctggtagtgtcaggggtagcgtcaaggagagccaaccacccaagtggacagaccgatgtaatcgtcttctgtagcggcgggttcgagaatccaggcactgcgaaatcagaaggagagctgctttcccagcttgtggactcgctggacttgtcgggagccaaatacacggtcctctatgcgtcccaaccgtctggtttgctggagagcccttcgggcttgccgctgggtaggcatctcgcggagaagaagactaacggcacgaaaactgtccagggcgaaaaatgcgatggcgagtgcctcgtcaaatcgagtctcctcgaaggaactttcgttgggatagtgcttctcatcatcctgatatcaggactcatgtgcatgatgggcatcgatactccctcgaggtttgaagctccccaggagtcttgatctctcccttggactgcagaatccgcgggggggttgtgacgagggcacgcggcggcgttgaggggggccggtgttctgttggtgtgcactgtggatatatattgtttagcttcccatttggaagggagtacgccttgtgtattttttttaccgagccaactgtcactcacgatgtgctagaattttttggtgtaatatttgcgtttcgcgcctatggacaactaataagctgaggcattgcagc

SEQ ID NO: 17584 - DNA, 693 bp, Zea mays
  Clone ID: LIB3069-050-E1_FLI
caaaagggcaacaacttaaatatagtcgggaaattgcatattttgtaagcattgatttatcaggcaactacttaacaggtgaaattcctttgggtatcacatcccttgatgccttaatgaatttgaatttgtcatcaaaccaactgggtggaaaaattcccaacaagattggtgccatgatgtcgctggcatccctggacctctccatcaacaagctttctggtgaaatcccatggagcttatcaaacctgacatctttaagctacatgaacttgtcctacaacaatctgtcaggaaggataccctcaggccgccaactggataccttaaacgtggacaacccgtcactttgtggacctcctcttcaaaataattgttcaggaaatggtagcttcatgcctggttatcacagaagcaataggcaaaagttcgagcctgcatcattttatttcagtcttgtattggggcttgtggtagggctgtggatggtgttttgtgctctgttgttcataaacacatggagagttgcttatcttgggctcctcgacaaggtgtatgacaagatctatgtgtttgtagctgtaaaatgggcaagtatgactatgagtgcagcagctgcagaacgagagcacacaaccaatacaatgtaagtactgcgtgtgagttcgtccaaataaagaccatgttctaatt

SEQ ID NO: 17585 - DNA, 1559 bp, Zea mays
  Clone ID: LIB3069-050-E2_FLI
gcaaagccacgttagccgagagctcctctgctcctctcgtgtctggccgaacaggcagagcgaccagtctccagagcgctccccatggcgtcaggagctgcggcggcccctgtcgttcagactgtggtgctgaaggttgccatccactgccatggctgcaagaagaaggtccggaaggtgctcaggggcatcgaaggcgtgcaggacgtgacggtggacgcctcgcagcacaaggtgactgtgacgggcaccgtggacgccgacacgctcatcaagaggctgtacaagtccggcaagaagggagtgccctggcagtgtcacccgcccgccaagaacagcgagcccgcgccggaggccccgccggctccgcagcctgccggcgacggcggcaaggatgctgctgctgtggccgcggcggacaagaagtcggaggaggcggtgaaggagccgcagggcgagagctccgaggaggagaagaagaagaagccggaacaggagcaggaggacggggccgcagagaagaagcagcccgaagcagagtcaaaggaggtggagaaagtggaggcgaagacggacggcggtgacagcgagggagctgagacgaagcaggccaagggcgcagcagcagagccggcaaaggaagcccctgccggcgctgccaatgacgaggacgaggcaaagaagagcgacaaggccaaggacgccggcacggcggagcctgccgccgtgacgacggagaggtccctgcctttggcgccggcgccaaagcacgcgtacgagcatgagtaccggccgccctactacgccgcgcccgcgcagccggtgctgagctaccacgcggcgcagcgcagctcgagcgtgtcgcacttcgcgccgcaggcgcagccggcgtactccacgcaacaggcgcacccgcatcaagcgtactactccgcgcagccgcagccggggaagcagtggtcgccgtcgtacctgtacatgccgtacccgcacgccgcggcgccggagccttactaccagcaggactactacggcccgcccgggatgcacgcgtcgcctatgcacgactcgtcgtaccgcatcttcgacgacgagaaccccaactcctgcagcgtcatgtgagaggagagcggatcggcgcggcccgggccgccgtggccagcagcagcagcagcagcaggtagttggggggaggcggcgccgctagctaccgcaatagagaaccctctctctctctgtggttgtaagtagagtagcctgttgctggcctcttccacttagtatagaggtcaaacctctctccatgcacgacagagctttttcttcgtttccttttaatatcttttttactgtttctaatgataatgagatacgcacgcgcgtttacctgtagtgatgttcaccgcgtctacgcccgccggctacttcaagaaattttgtactatgggctaggacaaatagatatacgtatatggctagctagtagttttctctgtctagagaaaggcaaatgcgtattttgtatctccttattagtatatattactcctgcctgaccg

SEQ ID NO: 17586 - DNA, 1504 bp, Zea mays
  Clone ID: LIB3069-050-E7_FLI
gtgcgccctcgcgaggtcgaacccccaaggcgaggcgacgaaaccctcgccagtccccaactcgaacctcagtcaggcggcgtgagggagggagagttcgaggaccgaggcggcgtcgggcgagatgaagcttaacgtcaagaccctcaagggcaccaacttcgagatcgaggcgagccccgatgcgtcggttgctgacgtgaagaggatcattgagaccactcagggtcagagtacctaccgggcggaccagcaaatgcttatataccaagggaaaattctcaaggatgagaccactttggaaagcaacggagttgctgagaacagcttccttgttataatgttgtccaaggctaaggcatcgtcgagtggagcttctaccactactgctgcaaaagctcctgcaactctggcccaacctgctgcccctgtgccccctgctgcatcagttgcaagaacaccaacacaggctcctgttgccacagctgaaacggcacctccaagtgcccaacctcaggctgctccagctgctacggttgctgctactgatgatgctgatgtgtacagtcaggcagcttcaaaccttgtatctggcaacagtctagaacagactatccaacaaattcttgacatgggtggtggtacatgggaacgtgatacagttgttcgtgctctacgtgctgcatacaataaccctgagagagctatagactacctgtattctggaattcctgagaatgtggaggctcagcctgttgcccgagcacctgctgctggccaacaaacaaatcagcaggccgcatcacccgctcagccagcagttgcattgccagtgcagccatcacctgcctctgcagggcctaatgcaaatcctttgaacctttttcctcagggtgttccaagtggtgggtccaacccaggcgttattccaggtgctggatctggtgcccttgatgccttgcgacagcttccacagtttcaagcactccttcagttagtccaggctaatcctcaaatcttgcagccaatgcttcaagagctaggtaaacaaaacccacaaattctgcggttgattcaggaaaatcaagctgagtttctccgcttggtgaatgaatctcctgagggtggtcctggagggaacatactaggtcaactggcagctgctgtgccacaaacgctgacagttaccccagaggaacgggaggctatccagcggctcgagggaatggggttcaaccgtgagcttgtgctagaagttttctttgcatgcaacaaggacgaagagcttacagccaactaccttctggatcatggccatgagtttgacgagcagcagcaatagacgtggggtggatggaggaaaccgaggcagttgcagaacagcgagtgtcgttcttatgctatgctgctgactatcttttatttccatatatatttgttcggaatgctttctaagtacatattaattcaatatcaagcgttacaccgtgtatgaaagcctgtc

SEQ ID NO: 17587 - DNA, 875 bp, Zea mays
  Clone ID: LIB3069-050-G12_FLI
acaaattcgtcaatttggttcaactggagcacttgtctcaggagttgaagcaaaaattgttgatgtagaaacattgatatgtctgccaccaaatcaactaggagaaatttgtgttcgaggaccgaacataatgcaagggtatttcaacaatgtgcaagctactgaatttacaatcaagcaagggtggttgcatactggtgatattggatactttgatgagggaggtcagcttttcgtagttgatagacttaaagaactgattaagtacaaaggttttcagattgcacctgccgagcttgaagggctacttctgtctcatccagaaattctggatgctgttgttatcccgttccccgatgctgaagctggtgaagttcctattgcttacgtcgtaaggtcctctgagagttctttgactgaagttgatgtccagaaatttattgaaaagcaggtcgcatactacaaaaaattgaggagggtgacctttgtggacagcgtaccaaaatctgcttcagggaagatcttgagaagagaactcatctctaaagtcagatcatccaagctatagcaagccggcttctgtgttcgtaatactgcttgcctcctatctactcccctcagtctaaattataagtcatagatcatagatgtatatcatatctaaatacatcgtatgcagagaagctagaacgacttccaatttgaaaatttgtcagattgagcgtaaaggtttacatgttactgagcggagcttatcaagcaatacattcagcttgacacagtttgtgggacatgtatacatggtggtgtcggatgacttgtatcgaatattgggcctgatttacattcactattcgaaaatagtacagatatgt

SEQ ID NO: 17588 - DNA, 2121 bp, Zea mays
  Clone ID: LIB3069-050-H12_FLI
caacgtccaaaatccagaccgctggtaggagtatctcgtagacattgaacaacggctgcatggcgagcgcctgcgccacctccatccccctcgtctcggcgccctctgcatgcccgtccaagaagaccaccgtcgccaggttccggcgccgcacggcgacgtgcagggccagcagcggcggtggcggtggccggggcggcgaaaatgatggcctcctttggctgccccggcgggacgtgatgctcaacggcctgtccagtgtcgccgccgggctcgcctggtacccgggcgtcgcgtccggcgcggatgcggtgtgcaccagggccgacaaggtgaacgagaagaccgtgcagtgcacggacccggccgggcagcttccgtgccctctggtgtcgccgacggaccccgtggacttcaagccggaaagcaaggtgacgcgcatccggcagccggtgcatctcctgagccgggagtaccaggagaagtacaaggaggccgtcgcgaagatgaaggcgctaccggaagagaacccgctgagcttcgcggcccaggcggccatccaccaggcctactgcgacgcctactacaagtatgacccgacggccaaggacgcgccgttcgacgtgcacttctcgtggatcttcgcgccgtggcaccgcatgtacatctacttctacgagcgcgccctcgggcagctcatcggcgacgacaccttcgcgctgccgttctggaactgggatacgccggccggcatggtggtgccgccactcttcaaggactccatgggcaacccgctgtacgaccccaacaggaacccgtcgaacgtcgacgcgctggtggacttagactacctcaacgacaggaatgcggagcccatccctttcaagggcccacgggacgaaaagtacaaggaacttgtgaacaagaacctgtgcaccgtatacacccagcaaatacgtagcggcaagggcgccgagtcgttcctgggcgagaagtactgcaccgacatcgggtcaagcacgagcagcatgggttcgctggagcggatggcgcacactgccgtgcacgtctgggtcggcaaggcgggcccgacgccttcgtcggaggcgtgcagtgccgctaccggcggcttcccgaaccacaccaaaggcgggtacagctgcaacaacgacatggggttcctggggtcggcgggacacgacccgctcttctactcgcaccactccaacgtcgaccgcatgtggcacatctggtcgaccaggctcggcggcgggcagggcatcacggaggcggactggctcgacaccagcttcgtcttctacgacgacgtcaagagcccgcggaaggtgcgcatcaggttccgcgacgtcctggacacgcgcgacctcggctacacgtacgacgccgagtccgacaaggacctgccatggctgcgctgcaagatctcgtcgctggtgccccacggcaaggacagcccgccgaggtcatcgtcggcgaggaaggcggcggcgccggtgttcccgctcgccctgaccaagggccaggtggtggaggtgccggccgtgcctgtgccggccaaggacccggggaaggagcagctgctggtgatcgagggcatcgagtacgacccccaggcgaacaataagttcgacgtcgccatcaacctgcccgcggacaaagcgttgcaggtaggcccacagtacaaggagtacgccggaagcttcgccgtcgtgccgggctccggcgccgggaagacgcggaaagtgaagctctccctgtgcatcaccgaagtgctgttcgatatcgacgctgacggcgataaaaccgtcgacgtcgttatcgtgccgcgcacaaatgctaagatcacgctcaacgctcgccccaccatcaagaatcggaactaggagctagctgctactagtgctcatcaagcacactgtacgtacgtacgtatgtactcgatcgcgtggtcattcatcgaccatcatcgtttatatgctgtcacgcacagtgcgggacggccagtgttgcattattgtgtgttttatttcgcatggattaggatcgagccgcgccaatggtagattctacggaataaatataataacattgttatgattg

SEQ ID NO: 17589 - DNA, 1804 bp, Zea mays
  Clone ID: LIB3069-051-D3_FLI
ccaatctttaccccaggacaatgtttttatcatatcaaacccaaagtcaaaataccctgtgctgcagctggaccttagattgatatcagatcttgttgttgttatcgtgtctgctacatgtggtggaatcgcttttgcttgccttgggcaacctgtgattacaggttatctacttgcaggatctataattgggcctggaggttttagctttgtcaatgaaatggtgcaagttgaaacggtagcccagtttggtgtgatatttctcctgtttgcattgggacttgagttttctactgcaaaacttcgagttgttcgtgctgttgctgttctcggaggaatgctccaaattatgctgttcatgtttctttgtggtattttggctacactatgtggaggcaaaacaaaagaaggtgtttttgttggtgtgcttctctccatgtcttcaacagctgtggttttaaagtttctgatggaaagaaatagtatcaatgctcttcatggccaagttacagttgggacacttatattgcaggattgtgctgttggtctgctgtttgcgcttcttccaattttgagtggtacatctggccttcttcacggagttgcatcaatgacgaagtcgttggtggtattgataacgttcctgaccattctctctatcctctcccgcacgggcgttccttggtttcttaaactgatgataagtctgtcatcacagacaaatgaactataccagctggcagcggttgcgttctgcttgttatttgcttggtgtagtgataagctgggcctgagtctcgagttgggttcatttgcagctggagtaatgatatcaacaacagaccttgcgcaacatactcttgaacaaatcgaacctatccgcaacttattcgctgctcttttccttgccagcattgggatgctaattaatgtccatttcttgtggaaccatgtggatatactccttgcagcggtaattttggtgatcaccgtaaagacatttattgttgctattgtcgtaaaagggtttgggtatagcaacaaaacatctcttcttgtcggcatgtctcttgcacaaataggagagtttgcttttgttctcctaagccgtgcttcaagtatccatctcatcgagggcaagctatacctgcttcttcttggaaccactgcactcagtttggtgacaacccctctgctattcaaaatgatcccagcagtggtccacctcggggttcttttgagatggttttctgtcgataccaatcaggtggagctgggcctaaaaaatgatgtcctccgcattgatagcggcaagcgcataaatctgatagtccaaggctcacatgactcatgacacatggcacactgcaagctacttttttgtatggcttgagtttacaagctctgtaaagtgttttcacctgtattgaagagtttgtagcagatatacaagggtggaggcaagagaactcaactcagatcttgctcatagggtgagatcaatcctcccccatcatggagactgcatgggcagttgggtttgccgtttttgagagcagtgtgtctaggatgattggtggagtgagtggctgtcgaccccaaatgagggtctcgtgtaacataagaatgtatgatggttaattgattggatcagcatgataggatctaggcgtgatcgttatgccattgtatcctttcagcaaaactgtgtatcctcgcaacacgaaagtgtgtacaacagtatccatcagatcacgaatttcgttatgtaaccatatactcgtcctagttcatgatttttttt

SEQ ID NO: 17590 - DNA, 336 bp, Zea mays
  Clone ID: LIB3069-051-D4_FLI
atttcctaggatgagctgaaggcatggtggtctgctgctatgaagggtgagtggaagctaccgtcgaaggaagaactgggtgtgaaactaagagaaaaagagctacttcgcgcgtagaatggaacggttgcgcagtactaaaatatggaggcttctattgtacccatcctactaggaaattatgagccagttgatgaggcatgaattatttcacgacttggccgcggttagtgtgaaaaggcgacgctgctatatatggtcatcacccttggtttgtccgttcgccagatatcacgattatcatatttatcggttgtaatataagcttcttgtatt

SEQ ID NO: 17591 - DNA, 998 bp, Zea mays
  Clone ID: LIB3069-051-G2_FLI
ctcccatccagccgccaccaggtgcagagtctttcgtcatctcttctccggcgaagaacccccagtcgcccaccagatcacttgttaaactttgttgaggggtgatggcggtttctttcgcaaacctcaacaccgaggcagggcttaaaaagcttgatgagtaccttctcactcgcagctacatcactggctaccaagcttccaaggatgacttggctgtctacacttcgttttcgtctgctccctcgtccaagtatatcaacgtagcaaggtggtttaatcacattgatgcgctcgtgaggctgagcggaattactgcagagggccaaggtgtgaaggttgaatcctcagcagttccttcagccccaactccagatgttgctgaagcacaggccccagctgctgaggaggaggacgatgatgatgttgacctttttggtgaggagaccgaagatgagaagaaggctgctgaagagcgtgctgcagctgccaaggcttctggcaagaagaaagaatctgggaagtcatcagttttacttgatgtgaagccatgggacgatgagactgacatggccaagcttgaggaagctgttaggagtgtccagatggaagggctgctctggggcgcatccaagcttgtcccagtcggatatggtatcaagaagctgcaaatcatgatgaccatagtcgacgatcttgtctctgtcgacactctcattgaggactatctgtgcgctgagccagttaacgagtacgtccagagctgcgacatcgttgccttcaacaagatctaggcgtgactttcgatcagtccttcccctggggtgctggcgatggtggtggctgggcaatgcaccagcctaatttttccatagctatatgtctgctttgtgtggccagtgatattgccgtgagtatttttggatcctattcgagtcgaatgtaccagtaccagagttaatttgctttaattcgaaacaccgttccggttggaattc

SEQ ID NO: 17592 - DNA, 610 bp, Zea mays
  Clone ID: LIB3069-051-G4_FLI
cagtcatcagccgccgtagggagcaggagtgagggagcgcgatggcggagaagaagcagcgcccaggagggtccaggaaggacgaggtggttacccgcgagtacaccatcaacctccacaagcgcctccacggatgcaccttcaagaagaaagcccccaatgctatcaaggaaatcaggaagtttgcacagaaggcaatgggcaccactgacatcaggattgatgtgaaactcaacaagcacatctggagcagtggtatccggagtgtgccgaggcgtgtccgtgtcaggatcgcacgcaagaggaacgatgaggaagacgccaaggaagagctttactctcttgttaccgttgctgagatccccccagaaggcctgaagggtctgggtaccaaggttgtggaggacgacgagtagatctgcctgggtactgatctgtgtcaactgtcaaatcatttttttggtgtttttgagtttgttagcactaagttgatagccttgtgagaaaaattgagttttctgatggcgcgcttgttctcggctggttttaaacttttgaagatacctgcaccaagtattgtagtctgtcgttccaaatcttttctggaggc

SEQ ID NO: 17593 - DNA, 695 bp, Zea mays
  Clone ID: LIB3069-051-H6_FLI
aatggcagaaaacctaaacgtgaggttggcgaaaagagaaaagaactagagcatcccgtggagagaaggcggcggcagcgcctgtgggagatgtcaatcctgtgggagaagagcgcgggttggcgatggctggttcggcggacgcgtgactcgaagcccttctttttcacgttcgcggcgctgtgcggcgtcgtccccggcgtaatcggctacggcgtgatgcagctcaccggctcccgcaacgagcagctcgaggcccaccttcgctccacggcccgtcccgagaccacgatgatggggcaagtgaacagggagaggctggcggagtttctcggcgagctgcaacggaaagaggacacgaacgacaggtacgtggccgcgctgaggggggagaccctgaccaggaagcgctacgagcgcatccagcccgtgcctgccgccaacgcgcaagcgagccaggagactgccggagccagcgcggaggaggagaggcccaaggcaaagtgagtcatcagcgagacgtgcctcagtcaatttttacttgcctgacatacgcaggcttcggcataatgtaagcagtcagcgcctgtgaaacgtcattgcgcttggggtatttgactcccttttgttttgaactctgctgatgtaaatctttggattcaatggatggatgctagtagagctctggacggttc

SEQ ID NO: 17594 - DNA, 1080 bp, Zea mays
  Clone ID: LIB3069-052-E7_FLI
tcccacctccgccacctctagaaatctcggtcgcgatagcgcctattcatcccgccaccgccataatcgcccccaacctcgcgaacgagatccgcagattgagaggccttcaccaattgatttctgcgcgcctcgggcccggggaggcgatggcacggtgctgggcgacctgccggagaactgcgtcgtggaggtgctgctcaggctggacccgctggagatctgctggatggcgcggctcagccgcacgttccacgacgccgcgtccggggacggtgtctgggagtccaagctgctgacgaactacgtgcgcctcctcgccgtcgctgcggccggcgatggggaagcggggcaggccgccgggtctgcgccggaggcggagccgctgcccaagaaggaactgtacgcgcggctttgccgtaggaaccgtttcgacggcggcaaaagagttctggctggacaagggtggcggaggtctatgtatgtcaatttcttcaagggcgctttcaataacaggcattgatgataggaggtattggaacttcattcccagtgatgaatcaagattccgcacggttgcgtacctctcgcaaatctggtggtttgaagtcagaggggaggttgaattcttcttcccggaaggcacgtacaacctattctaccgcattcatctcggccgaccattcaagcggaaccagaggagttcagggagagatcaccaagttgcacataggtgtccatgggcaaacacccactcacaataattaagtcaagataccttaccgagtgtagtaatcctttggcagatatatgtctttaacggggccaaattttccaaatggtctacgaaggtcatcaggcttttttcgtgttcggggcggagtgtttttttgccttttgttcctaatgctcttggtcttcacaaccgcagagagaattggaccgtgtctccaaggaaaggaatgagttggtgcgtatcttgtgttatcattcgtggcagtattctgtatttctgtggatccttagaactgtacattttaccaatcttgtttgaatctaaattgagatgaggtctgatct

SEQ ID NO: 17595 - DNA, 882 bp, Zea mays
  Clone ID: LIB3069-052-F1_FLI
aaccctaagcagggagttgatttatccgctgcagccatgagtaagttgcagtctgagtctgtcaaggatgccatctcccagattgttggggatgccaaggagaagaataggaagttcactgagactgtggaacttcagattggtctgaagaattatgatccacagaaggacaagcgtttcagtggctctgttaagttgccccatatccctcgtcccaagatgaaggtgtgcatgcttggtgatgcccagcatgttgaggaggccgagaagatgggacttgactacatggatgttgaggctctcaagaaaatgaacaagaacaagaagcttgttaagaggcttgccaagaagtaccatgctttcttggcatcagaggccatcatcaagcagattccccgtctccttggtcctggtctcaacaaggcaggcaagttcccgaccctggttactcaccaggaatccctcgaatccaaggtgaacgagactaaggcaaccgtcaagttccagctcaagaaggtcctttgcatgggcgtcgccgtcggcaacttggcgatggaggagaagcagatccagcagaacatccagatgagcgtgaacttccttgtttcccttctgaagaagaactggcagaatgtgagatgcctctacgtcaagagcaccatggggaagccatacagggtgttctaagtatgctcttttgtgaagtctgctaggttctggcaccgaggttttattgaattaaactcttgttaaggatatgtttttggacgatcctatatttcgtcctggcgctactatgtttcagaatggtggtactactataagtatcctggcgctctaagtattgcttgaaaggatcaatataatttgcgtgtcataccc

SEQ ID NO: 17596 - DNA, 3419 bp, Zea mays
  Clone ID: LIB3069-052-F8_FLI
gttttggaggccgaggccattggtgccatgcggccagcccttttcttctccatggttcccatcgatgtgtttttgttcggttctctcgtcagatctgtataaataggcgcctcccttctccgccattcctcggtcctctgaagcgtttcagttcatcgattcagttcttgtatgcctcttgttgtattggttgtttcttctttctggtctaggtactaggactatagtaccaggatctgagtcgtttttttttgggtcttgctcctgtctgccgtttctttccccccttccagagttaggttctgttggtttcttgcctgcaatatagtttcgtggcgcagcgtcaagggtgtgtcgagacttaaaagactggttgttggcagttgggtttatgtcttgctggaggggttttagttttaggatgtcatcgcagcttttatgtcaacggatctgaaccgtttttcggtttcagttttctctgctgactgaagcttccgcttccgtttcggtttcgctgtgcaggcctgaggatccaggaagaggacagcaatgggggaaggtgcaggtgaccgtgtcctgagccgcctccacagcgtcagggagcgcattggcgactcactctctgcccaccccaatgagcttgtcgccgtcttcaccaggctgaaaaaccttggaaagggtatgctgcagccccaccagatcattgccgagtacaacaatgcgatccctgaggctgagcgcgagaagctcaaggatggtgcttttgaggatgtcctgagggcagctcaggaggcgattgtcatccccccatgggttgcacttgccatccgccctaggcctggtgtctgggagtatgtgagggtcaacgtcagtgagctcgctgttgaggagctgagagttcctgagtacctgcagttcaaggaacagcttgtggaagaaggccccaacaacaactttgttcttgagctggactttgagccattcaatgcctccttcccccgtccttctctgtcaaagtccattggcaatggcgtgcagttcctcaacaggcacctgtcatcaaagctcttccatgacaaggagagcatgtaccccttgctcaacttccttcgcgcccacaactacaaggggatgaccatgatgttgaacgacagaatccgcagtctcagtgctctgcaaggtgcgctgaggaaggctgaggagcacctgtccaccctacaagctgataccccatactctgaatttcaccacaggttccaggaacttggtctggagaagggttggggtgattgcgctaagcgtgcacaggagactatccacctcctcttggacctcctggaggccccagatccgtccaccctggagaagttccttggaacgatccccatggtgttcaatgtcgttatcctctcccctcatggttacttcgctcaagctaatgtcttgggttaccctgacaccggaggccaggttgtctacatcttggatcaagtgcgcgctatggagaacgaaatgctgctgaggatcaagcagtgtggtcttgacatcacgccgaagatccttattgtcaccaggttgctccctgatgcaactggcaccacctgtggccagcgccttgagaaggtccttggcaccgagcactgccatatccttcgcgtgccattcagaacagaaaacggaatcgttcgcaagtggatctcgcgatttgaagtctggccgtacctggagacttacactgatgacgtggcgcatgagattgctggagagcttcaggccaatcctgacctgatcatcggaaactacagtgacggaaaccttgttgcgtgtttgctcgcccacaagatgggtgttactcactgtaccattgcccatgcgcttgagaaaactaagtaccctaactccgacctctactggaagaagtttgaggatcactaccacttctcgtgccagttcaccactgacttgattgcaatgaaccatgccgacttcatcatcaccagtaccttccaagagatcgccggaaacaaggacaccgtcggccagtacgagtcacacatggcgttcacaatgcctggcctgtaccgcgttgtccacggcattgatgtgttcgaccccaagttcaacatcgtgtctcctggcgcggacctgtccatctacttcccgtacaccgagtcgcacaagaggctgacctcccttcacccggagattgaggagctcctgtacagccaaaccgagaacacggagcacaagttcgttctgaacgacaggaacaagccaatcatcttctccatggctcgtctcgaccgtgtgaagaacttgactgggctggtggagctgtacggccggaacaagcggctgcaggagctggtgaacctcgtggtcgtctgcggcgaccatggcaacccttccaaggacaaggaggagcaggccgagttcaagaagatgtttgacctcatcgagcagtacaacctgaacgggcacatccgctggatctccgcccagatgaaccgcgtccgcaacggcgagctgtaccgctacatctgcgacaccaagggcgccttcgtgcagcctgctttctacgaggctttcgggctgacggtggttgaggccatgacctgcggcctgcccacgtttgccacagcctacggcggtccggccgagatcatcgtgcacggcgtgtctggctaccacatcgacccttaccagggcgacaaggcgtcggccctgctcgtggacttcttcgacaagtgccaggcggacccgagccactggagcaagatctcccagggcgggctccagcgtatcgaggagaagtacacctggaagctctactcggagaggctgatgaccctcaccggcgtgtacgggttctggaagtacgtgtccaacctggagaggcgcgagacccggcggtacctggagatgctgtacgcgctcaagtaccgcaccatggcgagcaccgtgccgctggccgtggagggagagccctccagcaagtgatgcgcgacggcggccacagacctgatcgatcgatgagcgagagggagcactcggagtgtcgtgtcttttcccttgccatttctttctttttttcccttcccggaggcgaaaaaaagagtctgcttttgctaggcggcgggcgttcgttgctgctctttgcttcaagagttaaatttacctaccttgtcaaggtcttgttccatcattgatccgggtgtcgcttttttagtagtctgatggactgttagtagtttgcgttgcgtcggttgagagggaacgttggtggtggtggtgtgtgtgcagtcaggcgtggtgctccctttgtttcctggatgggatgttgctccttgaataataatcgtagtggccttggagcccttttcctgaaataagagcagcatcctagtgcttacctttgc

SEQ ID NO: 17597 - DNA, 816 bp, Zea mays
  Clone ID: LIB3069-052-G10_FLI
ccaccaccgtcgacgtcaccatcgccgtcgctggtggtgcgcagccccaggcaaacagtcagcctgatccgcaaccggcgaccccatcgtgactgggccccctcatcgaggtctccctctttcgccgcccgtgaccatggccccaagccgtcggaggtgtacggcttcgttggatccatcaccaccgtcattgccaccgccgtgtacctcgcctgggcatacacgcccgagcccgtcctccagtcactcggcatcacctactaccctagcaagtactgggcactggcggtgccatcgttcgtggttgtgaccgtggtgctgtccatgggcatctacatgggcctcaacttcgctgccactcctcctccgacttccttcagtactatcttcgatgaaaagagtagggagcacacagccttttttcctgcaactgaggatgagaggcccatcgaacccatctcagacatcggtattgatcggatcaacactcttatgtttggtgatagatgatttctcccggtggaatgagtttaccatggagcgccggattggaaacagatgcaaacgcgaaggaagatttccatgtcagctgaactttgttgcctgcatatgctattgagaggcccgtcgaacccgttttcagacggtagtattgatcagatcaggaatcttatacttggcggtgatagacgattactcaaaaatggagtgtgagtttacaacagagtgccagattggaaggcgtgaagaaataatccacattgttaagtgaactttcatattaccttcaagcataaccgacaaaggaattcgatc

SEQ ID NO: 17598 - DNA, 608 bp, Zea mays
  Clone ID: LIB3069-053-A5_FLI
ttgaccaactagcagagatgttcggtgtaacaacagttgatgtttggacttcatatgttgctggagaaagtgaggaaccaacatatggtaatttggacatgggtgaggaggaggatgaagtagatattaggagtccattgagcagcagtagtaagaagaggactggcagcaatactgatacagccagtagtcctcctaggaagcataaaagtccaatgattgaatgcgaagctttgatagacaccctacaatctttaaactccaaagacttggatgtggccaaacagatacaagaagaccacatagctaaaaataagaagttagaacaggaaaaagagaataaggagatagataaatgtttcgaactggccaaagaatgtggagcaactgaggagacagaggagttctatgtagccactaggatctttgcagaaagatactaccgttatgtcttcatcaaaatgactacaaatgcagggagaatggcttggttgaagaagtggtgcagggactggactggttgaagcatgtttcagttatattttatttgtgttgagcatcatttgtcatgttgtgaaccatttgtgttaagaacctttattcctatc

SEQ ID NO: 17599 - DNA, 1283 bp, Zea mays
  Clone ID: LIB3069-053-C7_FLI
cacggcctcaaggacggctggtacgacggcgtcagcatcttcctcgccgtcttcctcgtcgccgccgtgtccgcggtcagcaaccacggccaggccaggcgcttcgacaggctcgccaccgagtccgacaacatcgccgtcgccgtcgtccggggcggcaggaggcaggagctctccatcttcgaagtcgtcgtgggcgacgtcgtggtgctcaacatcggcgacgccgtgcccgcggacggcgtcttcatgcagggccacgcgctgcaggtggacgagtccagcatgaccggcgagccgcaccctgtcgacatcgacgccgagaagagcccattcctcgcctccggcgtcaaggtcatcgacggatgcggccacatgctcgtcaccgccgtcggcacggacaccgcctggggcgagatgatgggcagcatcaccagggagaagaccgaacccacgccgctccaggagcgcctcgaggccctcacctccagcatcggcaaggtcgggatcgctgtcgcggttctcgtcttcgccgtgctcaccgcgcgccacttcacgggcagcaccagggatgagcagggcaacccgacgttcgacaggcaccacgtctctttcaacaccgtcttcaccgcgctcgtcggcatcttccagcaggccatcaccatcatcgtggtggccatccccgagggcctcccgctcgcggtcacgctcacgctggccttctcaatgaagcggatggtcaaggagcacgcgctggtgcgcacgctctcggcgtgcgagaccatgggctcggtaaccgccatctgcaccgacaagacgggcactctcacgcttaatcagatgaaggtgactgagttctgggtcggcaccgaccgccccaaggcggcggccacggtcgccgccgccgtcgtcagttttctgcgccagggagcagggctcaacaccaccggaagcgtgtacaagccggacaacgtctcgccaccggagatatcgggcagcccgacagagaaggccctgctgtcttgggccgtggcggagctcggcatggacgccgacgcgctcaagaggagctgcaaggtgttgcacgtcgaggcgttcaactccgacaagaagcgcagcggcgtgatgataagggacaacgcgacgggcgcgctgaccgcgcactggaaaggcgccgcggagatggtcttggcgagctgctctgcctatgtcggttcagacggcgcggcacgcgaactcgacgcgggcaagaggaggaagctccaagagatcatcagcgggat

SEQ ID NO: 17600 - DNA, 1133 bp, Zea mays
  Clone ID: LIB3069-053-G3_FLI
gccctgatcacatcatcctgcttgtctctccccaacctagctccatctctctttcatctactcttccatcgatcgatccatcgtactgcgtgaggatggggaggggaaagattgagatcaagaggatcgagaacaccaccagccgccaggtgaccttctgcaagcgcaggaatgggctgctgaagaaggcctacgagctctccatcctctgcgacgctgagatcgctttgatcgtcttctctacccgaggccgcctatatgaatattccagtaacagcgtaaggtcgacgatcgagaggtacaagaaagcctctgccagcacttcaggaacagctccagtgacagatgtcaactctcttcaatactttcagcaagaagcggcaaaactgcgccagcagatacaaaccttgcagaattcaaacaggcacctgatgggtgaatctactggcaatatgactgcaaaggagctaaagggccttgaaagcaggcttgaaagaggcattgggaggatccggtccaaaaagcatgagctgctgctcgcggagatcgaatatatgcagaagagggaatcagatctgcacaatgaaaacatgttcctgcgggccaaggttgcggaggctgagcgagctctggagcaggaggcggcagaagaccagacgatgatggtgccggcggcggtccgcggggctacgacggagctgaaagcgctgccggcgtcgttcgacgcgagtggctactaccagtaccagcagcatcagcatgtggtggccgccgcctccgctgcctcctcgtcgcagtacgcggagcagccccagggccagcaggagtaccaccaccagactgccctccacctcggctaccacgtcaagatcgactccgccgccgacaaaggcttcctctaggcgctcgcgcgcatgcatgcgtgaagcgtctcatctcataatctgacgtacggacgatgggtgccggacagctaacgtaaggcacgttgtcatcgcctgaccatggagtggagtggttgttgctatatgtgcttctatatagagagagaaaataaggtgtcgatccgcgagtacctatatacgcaagctgtatcaaacaatattgtcatgagatatatagattaactatat

SEQ ID NO: 17601 - DNA, 1461 bp, Zea mays
  Clone ID: LIB3069-054-A9_FLI
gcaccaatgatgcgaagaactgtgatgggaacatatgtcatcgcaaagatcaagaaagaagacggaaatatttatgtcttgttgaatgggatgggtgccacaccagaaggaaatgttccattcctcgatttgtttgatataaatactgggagtaaagagcgtatatgggagagcgacagggaaaagtactatgaaactgttgttgcactgatgtcagacaaaactgacggggaactgctccttgatcagttaaagatacttacgtcgaaagaatcaaaaacagaaaacacacaatattacttgcagacttggccagaaaagaatcaagttaagataacaaatttcccccacccatatcctcagcttgcttcattgtataaggaaatgataagataccagcggaaggatggagttcaacttacagcaaacttatacctgcccccagggtatgattcatcaaaagatggacctttgccatgtctagtttggtcctaccctggtgaatttaaaagcaaagatgctgctggtcaagttcgtggttcccctaatgaatttccagggattggtgctacatctcctcttctttggttagctagagggtttgtgattctgtctggtccgacaatcccaattatcggtgaaggcgatgaagaggccaatgacagatatgtggaacaactagtaacaagtgcagaggctgcagttgaggaagttgtcaaaagaggggtggctcaccctgataaaattgctgtcggtggtcattcatatggtgcattcatgacagctaatctgctggctcacgctcctcatcttttctgctgtggaatcgctcgctctggagcttacaacaggactctaactccatttggttttcagaacgaggatagaacactctgggaggcaacaaacacatatgtcgagatgagccctttcatgtctgcaaacaaaatcaagaaaccaattttacttatccatggagagcaggacaacaattctgggacattgacaatgcagtcagaccgattcttcaatgccttgaaaggtcatggtgcactgtctcgtttggtaatacttccttttgagagccatgggtactctgccagggagagtatcatgcacgtcctctgggagaccgataggtggttgcagaactactgtgtaaatggtactagcaaggttgactcagtgtcagaggctgacagtaaaaacaaaacattgtcagctagtggtggcagtgcagcccgtgaaggtctaaaccctgaggaactctcatcattaccaagatcgcttctgtgatcaacttcagttggtgttcatgaaacattccctggacagcaagcctaaagggaaaaaatagtgtatcgttgcacttctaccttaaccgactaccagggatgccttgattggcctcatatttgtttcgattgctgcaggtgatcatgttactggcatgcaggagcc

SEQ ID NO: 17602 - DNA, 1352 bp, Zea mays
  Clone ID: LIB3069-054-C12_FLI
ggagcgcgcacgcacacacgagacagaagccgggaatcgaagcatcaagccctttctctgagcgccgatggcacggtatcttctcgcccccacttccacctcctctgccctcctccccaaggatggcgtcaagaactcgccgacgtcacggcccctccgcctccgtgcgctcggctccaggaccagcaaggcgcggcacatcatggcggtggcgtccgagcaggccgcgccgccggccaggtaccccaaggtggccgcccctaccaccggcccgatccccgccgccgagctgctcggagtcatcgaggccgccgcaaaagctggggccgatgttataatggaagctgttaataagccacgcaatatccactataaaggtgttgcagacctggtgacagacacagacaagttgagtgaatcagtcattttggaagttgtcaccaagaacttcaaagaccacctcatacttggggaggaaggcggccttgttggagattccctatcagagtacctctggtgcattgaccctttagatggaacaacgaactttgcacatggttaccccagcttttctgtgtccattagtgttctcttccgtggaaagcctgctgcttctactgtggtggaattttgtggcgggcctatgtgctggagcacccgtacaatttctgcatctgctggcggaggagcttattgtaatgggcaaaagattcatgtcagtcagacagacaaggtggaacaatcacttctcgtcacaggttttggatatgaacacgatgatgcctggacgaccaatatgaatctgttcaaggaatttactgacattagcaggggagtgcgaaggctagggtctgctgctgctgacatgtcccacattggacttggtattacagaagcttactgggaataccgacttaagccatgggatatggctgctggcgtcctgatagtagaggaagctggtggggtggtaactcgcatggacggtggagagtttacggtcttcgatcgctctgttcttgtttccaacggacttgttcatggacagcttttggaccggatcggccctcctactgaagaccttaagaagaaagggatcgacttctcgttgtggttcaagcctgacaagtacccgactgacttttgagctgcaccaagggcaccaccaccagccattggccaccataataaagcagccatcatttttttttgggggggggggggtccttcaagaagaaacaataatgtttttagttcaatagcactgtacttgtaatggcaatacgatgtacagttctttgactcgagtttcaagagagccaagctcctgaaagaacagagcttcacaagtg

SEQ ID NO: 17603 - DNA, 525 bp, Zea mays
  Clone ID: LIB3069-054-D8_FLI
gttgtcatggccgagactgctgagaccgactacaactcgagcttctcgatgcagagtccagaaagatgttgggaagggtgataaatcaggggataagggaactgctgagaagtttgcaatatatcagaagcatcgttcttcgttggcagacactgttcaattcaggaggccagctgctccaacttccagtgtgaatgctgatattgtgggaacatccactctgcagtctgcatctctaccgaaacaagaatcctcaacagctacatccaagagctatactttcagagaaggtgatagggtgcgttatgtgggtccagctcagttatcctcattgtcacaaaggctcctctccttttgctggcttcgctgttggaagcgagacatcatgtggtgtggataacgtccttgcagagcacgtgaactcaaatttcactctaatgccagctagctgctacatagtgcatttctgtatattatgagtatgtatacagaattttaaagtatgaatacatgtgttttaaagct

SEQ ID NO: 17604 - DNA, 696 bp, Zea mays
  Clone ID: LIB3069-054-E6_FLI
tacgtgccttatccttcaggtatgtctcatgttgactttgcttttgtaatggtactgttggcttcattgctggaatgctggttataatcaacctttactgctctatattgttctttttttggtttgcacaaccagggtggttggttttctgaatcaatcaatccatttcctcggacacaagataatttttgtatgttacacttcccaaaattgcaattaattcagaagtctgcctactttcattcagttagttctcagcaacactgaaaggatatgaatcagtcaacccgatagatgtttatctggttattccaaacaatctgacatcacatctgtttctgcaggcgagataaggaaaatctgaaatgctatcaccatttaaaacattggctcctggaagttcaggagtcgttcttaaacagcaactgctccttcgttcagcgcttctcatttctgattgtattgaccgagagcatccacctttccttctggtatcaactgaatgagttgccgacaccgacccatctgcgcataatggcaggttaggtgttgctgtagaatgagatggttaccatctttacaagctcaggctatatgatttcagcagcactgtaacctggggtgcaaatgttaaggccctgcaagcactttccaggccacaccaattctgcttggttcttgaagatacattcttcc

SEQ ID NO: 17605 - DNA, 1037 bp, Zea mays
  Clone ID: LIB3069-054-G5_FLI
caaattatttttcttcgcatttccaccacacagcatttttttcccagtactatatactaaaatgagtcattgataaattctgcagtttcatgtgtttgataggcactgttagcagctagaagttctggagctgtcatttttctaggcacatttggagctcttgcggtaatgaccattatatctgtagttcttggtcgagcattccactatgttgatggcatcattccgttcagctttggtggtactgatttcccagttgatgacattgctgcggcatgtctcttggtttattatggggttactacattacttgatgcagcctcaggtgatgatgaaaagatcaatgaggagcaagaggaggctgagttagcagtatcgaaattttctggaaatggtgcgggggtcatgtctgctgctggtactattgctagcacattcgtattggtttttgttgctgaatggggtgataaatcatttttctccacaattgcactagcagcagcttcatcccctctgggtgtcattgcgggatcactagctggtcatgccattgcaacattgattgcagttcttggtgggtctttgctgggaacattcctgtctgaaaagattatagcatacattggagggagcctattcttggcctttgctgcgattaccatagttgagatagtgacttgaaaagggagttccagcttccacaattcataaaaagtactgatcttttgtcagggcaatgaaaaatcagcttgctgatcgtaatggtagtacattgatgtgttaccgaacatgattgtccacaggaacttcattgttcgcatgggacgtcctaggcttgcgtagagtgttttgtttctggtgatgagaatttctgcttctttatccaagaacaatgtttttgtcatcatcatgatttgtagtggaaacactgatagtcaggttggtcggaagatgggactgggaggaaactatgaattccatgtagcttttgaacttcctcttacattatttacaagtatatgaatcagtcttttcgt

SEQ ID NO: 17606 - DNA, 818 bp, Zea mays
  Clone ID: LIB3069-054-G7_FLI
gggctaaccatcatcaacaaccttctccagtaccatcctgaatcaagtgagaagttagccatgggtgaattttttgggataaaacctcctgagaagaaggtagatgttgatattgcaacacatatagttgttgaagatgacggaccaaaaagaagcatactttacatagagaccgccgaccggcctggcctacttcttgagataatcaagatcatcgcggacacaaatattgatgtggaatcagctgagattgatactgaaggtttggttgcgaaggacaagtttcatgtaagttacagaggtggaaaactaaacagctccttatctcaggcgctgaccaattgcctgcgttattacctccgaaggcctgagacagatgaagacagctattgattgttgtgtttgtcgaaccttcctatagtgcattagaatcagaaactttggcttcagttccttcgctatgggccccttgtactgctgcaaatggagttttccattgtagctgataaagtgccgacaaggtgcatccatatgtgcataggtggcactgaatcggggctcactggaccagtttgatattgtagtaatatatatacagctgggagcaacataatttaggtttcgatcatcattatcccatttgattcctgttataagggatcacattggaaaaccctcacatgattgatgttgtctgtattctgtaagttggtgcaatccatttgcatgtaaaactcagctgcgtactgtggcgttctatgtagtggaataaataaaagagcattacgaaatcaccgagcagcttgctcctgctttcc

SEQ ID NO: 17607 - DNA, 660 bp, Zea mays
  Clone ID: LIB3069-055-A10_FLI
cacggtatatggccggcactgtgaaaagcattaagacacccaaaacagcttatgactttgaggtttcttggagagctctttctgatgacactgcccagcaaatacagttactaaagtcgattccaccagcaagcctaccagagattttcaagaacgcactttctgcaccttttcttattgacatcgtgaagtgtgcagcctcaattttccgggatgcggaggcattagctgtcagtattttggataatttggctcgagttccacgcttcgacttgataatcatgtgcctttcatccatgcacaaatttgaactgaggaagatatgggatcaagtattccttgctgaaaaagcgctggctgatgatcggatggaagctctgaggcagctgcgaggcagatacattccgggaggatggcaggatagcatgctcacttcgagttaaatcaatcaatcaaatgacgacgatgtaaagcaggattgttacaaaaaccttttgctggcttcgcaactgatgtctcttcatccatctgttctagaatccggagtgcctgtcgattgttaagcccactggtctggatgtagcgaacggttgaagcatccagtgtaggaacatgtgtcggctgcaaatggttcagatccgttctgttgtgcttgccgct

SEQ ID NO: 17608 - DNA, 1058 bp, Zea mays
  Clone ID: LIB3069-055-A9_FLI
tcgcggtgttattcctcccgagtcgcctccccctcaagttccacaaacgcaagccccaatctcgccgtcaccacctcaatccagcaaacgcaaaccccatctcgccgccgccgcgatgtctcgccgctatgacagccgcacgacgatcttctcgccggaggggcgtctctaccaggtggagtacgcgatggaggcgatcggcaacgccgggtcagccctcgggatcctagcggccgacggcgtggtcctcgtcggcgagaagaaggtgacctccaagctcctccagacctcgcgctccgccgagaagatgtacaagatcgactcccacctggcgtgcgccgtggccgggatcatgtccgacgccaacatcctcatcaacaccgcccgcctccacgcccaacgctacgcgctctcctaccaggaacccatccccgtcgagcagctcgtccagtccctctgcgacaccaagcaggggtacacccagttcggaggcctccgccccttcggggtctccttcctattcgctgggtgggacaagcaccacggcttccagctctacatgagcgacccatccgggaactacggcgggtggaaggccgccgctgttggggccaacagccaggccgcgcagtccatgctcaagcaggactacaaggacggcttgacccgcgaggaggccgtcgccctcgcgcttaaggtcctcagcaagaccatggactccaccagcctgactgccgagaagctggagctggccgaggtgtttctgcagccgggctccggggaggtacagtaccaggtgtgctctcctgaagcgctggggaagctgcttgcaaagtccggcctgacacagccaacacccgaggcataatgctctgttttgctgtggcttgtgatgcctactactgctcttagacatggtttaagcatttgtgcttctgttgtgtgaacttgaatattcgacgattatgtggtctaattttatgttgagcatcctagatacgttaatgtttcatctgtaactgtggattgccttgaactggttgcaaattggtgatttc

SEQ ID NO: 17609 - DNA, 1186 bp, Zea mays
  Clone ID: LIB3069-055-B11_FLI
gggcaccgatacaaatacaacgcaccgtccatctctccctccctccctccctccccctcgcaccgccgcgggacacgaacacgcgagccacccaaccggcccgaacccgatcgcaccgacgaggtggatcccaggggaaggctcctctttaccgccgccgatggacgtgggcctcggcggcgcgggtagttccggcagaggagggggagggggccggagcgggagcgggggcggtcgggacagcccgttcgctctcggcgggggcggcgcgtcggcggctgcgtggacccggctcgtcagctccggcgtggaggacgagctggtggctgcgtcgggaggaagaggaggaggtggaggacgcgcgggggcgagagcgggaggcctgccgcagggccactttttggacgcctgcttcctctgccggaagcccctccccagcaaccgcgacatcttcatgtacaggggtgacatcccgttctgtaccgaggagtgcaggacggagcagatcgaaatggacgaggagatggagcggaaggagagcacccagaagaagaagttggcgccgagagctccctctcccaaggacgtggagtccgcgccgaggcctcccaaggcccgggccgggtcaatccttgccggctaacaccgtgaagacgaaaagctcacaaacgagctagagctcgcgtgtgtgctcctccccctccccgaaaccaagagagatcagaacccccttgataccaccacctggaactaccgctacagttgcgtatatgggtttgtgtttttttgtttacagcccttgcgccattggtggcgccgtgaactcagtgtcagtgcctgcccgcttacctgtattgctgctgatgatgtatagagacgggcggagaggagaggagagcgctggtgtttaggaccgcatgcattcagaagctctctgtgctgctggccagatgtgtcgttcgttgtatcatgtatgggtgtttctggctttcgttctgggagatttttgtgagaatcttctgtgtgttacgtagtactcatagacaaatagctggtgttggtgttagggttaatgtttttcttaatgctcatgagagaaaattgaaaacgtatgcctacagtagaaataggcatgtgaagtgaatggacccttgtgctcataagtcatgacataacttgctcctgt

SEQ ID NO: 17610 - DNA, 1175 bp, Zea mays
  Clone ID: LIB3069-055-D11_FLI
tcgctgactctggagggtgtggtatatgttgttgatagtggattttccaagcagaaatgttataatccgatttcggacatagagagtttagttgtcgcaccaatatccaaggcatctgcaagacaacgagcaggcagagctggaagggtgcgacctgggaagtgctttaggatctatacagaggaatattatcttaatgaaatgcagtcagaaggaattccagaaatgcaaaggtccaacctggtctcctgcataatacagttaaaagccctaggcatagacaacatcctgggctttgattggccagcttctccatctccagaggcaatgattcgggctcttgaagttctattctccctaggtatcctcgatgaagatgccaaattaacagtacccattggctaccaagttgctgagatccctctggaccccatgatttcgaaaatgatcttgtcagcaaatgattttggatgctctgatgagatattgaccatagcatcatttctgtctgttcaatctgtatgggtttctgtgaggggagtgaagaaggaatttgatgaagcaaagcttcgatttgctgctgctgagggagatcatgtaacattcctgaatatctacaaaggatttcaccagtctggaaaatctagccaatggtgttacaagaacttcttgaattaccaagcactgaagaaagttgtcgacattaggggacaacttctcaggatagtgaagagttttggtatacaactgaaatcatgtgacagagatatgcaggcagttagaaaggccattattgccggttcatttactaatgcatgtcatctggaggaatacagccaaaacggaatgtataaaacaattaggacatcacaagaagtttatattcatccatcttcagttctctttagggtcaatccaaagtgggttgtctaccagtctctcgtctcaactgacaagcattatatgcggaacgttattgccattgagccatcatggcttacggaagctgcaccacatttttatcagttccgaacattcaatcctgctccccactaacattactgtgggcaggactgcacgtcgttttgtaattttagagaacttaactttcctagggccacaattttgttgaagaaaaggattgccaatatttgtatatgctaagcacttgtggc

SEQ ID NO: 17611 - DNA, 567 bp, Zea mays
  Clone ID: LIB3069-055-G6_FLI
gtaaaacgttaaaagtgcaggcccaagtttcagaagttaaaaatatcatgttaaacaacatagaaaagactttggaccgcggagaaaagttgagtgaactccaagacaagacttctgatctacatagtcaggcccaggagttcaagaaacagggggtgaagattcgtcggaagacatggctgcagaacgtgaaaattaagctggtgattcttggaatccttttgctccttgtgatcatagtctgggtatctgtttgtcaaggctttgactgcaccaagcatgaaacatagtagtaataagaatggtgcagcacgactgtggcagagctgcgatggatgtgagtttgtgctggtgaggtcaagtgtgtacccacatatgctttggctctcaagttcgattccaccagacaagtatcacggtacaaatgtaagtccgagctggtctttgttgcacgccggaggtaggtgtacttgcaatgcaagactagcatgatataaagtgatagcatggttccttctgtactagctgaattcgctagaatctagcataaaatgcatttcaattacc

SEQ ID NO: 17612 - DNA, 1874 bp, Zea mays
  Clone ID: LIB3069-056-C11_FLI
gtccgcatccccaaattaagccccgcgcgcaaggcagcaaacgcgccgcgcaccggaaggccccggggagctgcacgaggtggccccattgcggcatggctgctacggccgccgccgctggcgtcgagttcccgctcattggcgttgccgtggccacgctcatcgtgacggtccttgtcgcggccgtgatgcgccgccgccgccgtccctggcaccaggcgcctctggtggaggggaaacccgcaccagaggcaggctgcgcggtcagcgatggcgggacggacgtcatcatcgtcggcgccggggtagctggatctgcgctggcatacacgctcggaaaggatggccgtcgggtgcatgtcatcgagagggatctgacagaacctgacagaattgtgggcgagctgttgcaacctgggggttacttgaaattaattgagctgggcctccaagattgtgtggaagaaattgatgcccaacgcgtgcttggttacgcattattcaaagatggaaggaacacaaagcttgcttatcccctggagaagttccattttgatgttgctggtaggagctttcacaatgggaggtttatacagaggatgcgtcaaaaagctgcgtctttgcccaatgtccaattagagcaaggaactgttacctcacttcttgaagaaaatggtactgttaaaggtgttcaatacaaaaccaagtcaggtgaagaactaaaggcttatgcgcccttgacgattgtatgtgatggctgcttttcgaatctacgacgcgccctttgctctccaaaggttgatgtcccatcatgttttgttgggctggtattggagaactgccaacttccacatccaaaccatggccatgttatcttggccaatccttctccaatcttattttacccaattagcagcacagaggtgcgctgtttggttgatgtccctggtcagaaggtgccttccatagctaccggtgaaatggcaaactatctcaaaactgttgttgcaccccagattcctccagaaatctatgactctttcatagcagccattgataagggaagcatacggacaatgccaaacaggagcatgccagcggctccacatccgacccctggtgcacttctgatgggggatgcgttcaatatgagacaccctttaactggtggaggaatgactgttgcattatctgacatcgttgtcctgcgtaatctgctcaagcctctccgcaatcttcatgacgcatcttccctgtgcaagtaccttgaatcgttctatacactgcggaagccggttgcttccacaataaacacattggccggtgctctgtacaaggtcttcagtgcctcgcctgatcaagctaggaatgagatgcgccaggcttgttttgattacttgagcctcggaggcgtcttctcgaacgggcctatcgctttactctctggccttaaccctcggccactgagtttagttgcgcacttctttgctgttgctatctacggtgtcggccgcttgatgctccctcttccttcacctaaacgaatgtggattggagctagactgatttctggtgcatgcggcatcatcctccctatcatcaaagctgaaggcgtgagacagatgttcttccctgctacagtacccgcatattaccgggccgcacctacgggagaaaaggcatgaacagagaaccgattccgtgctgctggtccgaccatgaatgatctcatggcaactgatgtttcacggatgacatttttcctttgctagtggttagttattggttattgttagaccgtcgatggaatgaggaacctgtatagtgtttgtcctgggtactggtaaagttggaaaatgtgttgggtttgttct

SEQ ID NO: 17613 - DNA, 1034 bp, Zea mays
  Clone ID: LIB3069-056-G11_FLI
gttcccaggcaggcaggtcggcgaggagggcaggaagaccgaagaccgagccgtgcgggggctcgggacgggaacgggacaggaccccaaaatctcagatccttcctgcccgcccgcccgtgcccgtcgacgcgtcgttcttgccggccgcgccccacctccgccctctcctcctccagggggatcggatacgccacaggctgcgcgatggtgctgtgggtcttcggctacggctccctcatctggaaccccggcttcgacttcgacgacaaaatcctcggcttcatcaagggctacaagcgcacctttaatctcgcttgcattgaccacagaggcacaccggagcatccggcgaggacctgcacgcttgaaaccgacgacgaggccatatgctggggaattgcatattgtgtcaagggtggtccagaaaaagagctaaaagcaatacagtacttggagagaagagagtgtgagtacgaccagaaaatatccattgatttctacaaggaaggagatcccttgaaaccagctgtgacgggcgtcttagtgttcgtttccactccagatccaattggcaacaagtactatcttggccctgctcctctgcaggatatggcaaggcaaattgctacagccaatggccctactggctataatagggattacctgttctcaatggagaaggcattagccagcattagccacgaagatgattcgatcatagagcttgcaaacgaggtgaggaaggtgctcaacagaacaaaggagaccaagatcactggtgccaatgcttccctgaaatcacatgcccctcttgtgcacctgtccgcgcttccagaaggcaccgttgtggactcgagatagcgagagccttggacgttggacctctactcggaatttacttccagctcttgcatgtttgtggccatcatgtactgattttcccttttcaacagttgtcgtgaggctgtatcttctggagttaaaaaaaatgctaaaagccggcactaataatgatattaacttgaaaaatc

SEQ ID NO: 17614 - DNA, 1673 bp, Zea mays
  Clone ID: LIB3069-056-G4_FLI
caagcagcaagtcgatcgtgagcagctagctcttccctgctcatcgtcgccagctggtccaagggaggaggaagaagagatagatggacgacgtcggcggtgctgctgctggtggtggcgattcaaagcagctcttggttgaagcagatgggaacacacgcacgcttattttgaacaggccgaaccagctgaatgtactctcctctgcaatgattaagggactcctgagctgtttcactgcttttgtgaaagatgatggagttaaattgttgattatgaagggttctggaagagcattttgtgctggaggtgatgttgttgctggtgtccagtcaataaataatggatggaaatggggcgctgatttcttccgagatcaatattttttaaactacataattgcaacatgtatcaaacctcaggtttctcttcttactggaattgtcatgggtggaggcgctggtgtttctttacatggaaaatttcgagttgccactgataacacggtttttgcaatgccagaaacatctcttggtctttttcccgatgttggggcctcatattttttggctcggcttcctgggttctatggttctctaatacctccgatctttattcaattgaaatacatgtagctatgtcattgcaacgtatatttcaatgttctgctaacactcgagggatattatgtatcatcgtatcattcttcaattttagttttataccatgtgatttattcttagcaagtgtgattcttgcacaattgatctatgcaattacatatttgatcgtggagatatattaatataaagaaatgaaaaatgataatctttcttcttttcaagttgatttattggttccattatgaggtagccatatagttggtggtaatgacaacattggatatcttgttaaataaaacattactctaacattctgcaggagagtatgttgctcttgttggtgctagattggatggtgctgaaatgcttgcatgtggtctcgcaactcattttgtcccttcaaatagaatgctattgctggaagaatcccttaaaaaggtggacacctcgaatagttttgttgtatgtagtattatcgatcaattttgtcaacagccatccctaaaacaaaaaagttccttgaataggttggaaatcatcaacaaatgcttttctaatagaacagttgaagaaattatatcctctcttgaggaagtggcctcaaattcagcaagcaaatgggttgctcagacaattcagtatctaaaaaaggcttctcctactagtctgaaaatcacattgagatcgataagagaagggagaacacaaaccgttggggagtgcttgcaacgggaatatagaatggtttgccatgtcgtacgcggtgacttcagtcgagacatttttgaaggatgcagggcaatactagtagataaagataaaaatccaaagtggatgcctccaaggttggaacaagtgcatgatgatgcagttgaagagtatttctctagggttgatgatccagagtgggaagatttggacctacctgtcatgtgttcaaatggaagaattatggagtccaagctttgaatgaagcctttattgaacaatttaatggaacctcagttgtggttaaaataacaacacatcccatgttcgaagagtctatgt

SEQ ID NO: 17615 - DNA, 727 bp, Zea mays
  Clone ID: LIB3069-057-F6_FLI
caccaccatccacgcactgctagtaagcgagcttagctactgatcgtcgtcaagcactctcgagctcgatctctcgaagcggctagctgctagcagccaattaatggcgaagccttcgcaggtgctggtgtcggcgctcgccgcctgggcggtggtcctgctgctgctgtgcgccgccgcgccgcggggcgccgacgcggccacggcgtgcgacgccgcgcagctgaccccgtgcgcgggcgccatcatcgggagctcgccgcccaccgcggcgtgctgcagcaggctcagggagcagcagccgtgcctgtgcacgtacgcgcgcgaccccaagctgcagcgctacgtcagctcgcccaacggcaagaacgccatggccgcgtgcaaggtgcccgtgccgtcgtgctaatttaaacttctgttagcgccgccgccgccgcgcgcgtacgtacgtgtcgtgactcgtgaggcgtacctgtgtcggtagcagcatggcccactggacagggacagagtgtggcgtcgctttttttctgtttcagtacgtacgtacttggatcgcggaagcccgtgtatgcgtgttccgttgtggtgttgctgtactcgatctgctgcatgtgtgtatctaccgagctcttcggacagatacgcgtgcgtatgaataaatgatgtaataacgacgtgtgcatccgctatatatatgcatatctatacatatgcttttact

SEQ ID NO: 17616 - DNA, 1311 bp, Zea mays
  Clone ID: LIB3069-057-G3_FLI
ggacaggtcgcctgggatgagccggacctgttacagaacgtgaagagggaagaagctgtgcgtcccactgtacccggagcttccgctggagggccagttcccggcgccgatgttccacggaagccccctcctcggccgtggcggcgccggtggcccgatgtgctacttcccggacggcactcctgcaggcatacagggagccaggcatgctcaattcggcatatccttatcagatctccacctgaacaagctgcagccgggcctgtcaccgcacgggctccaccgccagctcgaccacggcgtgcaggtgcaggtgcagcagccgaggatcgccgccgggctcatcgtcggcggccacccggcggcccgagacgacgtctcgtgtctgctcaccatcggcaccccaaagagcaagaagccaccgtcagacgtcaagaaggcgtccacggcggcggcaccgcagctgatgctcttcgggaaagcgatcctcaccgagcagcagatatcgctaggcggcggcaatgtcgtgccggcgctgctggcgaagaagagcccctccgacgacgacgacgacgtggccgagaggacggtgagcaactcggacgtgtcgagccctgggaggagcaaccaggacggcacgtccagtggcggaggcccggcggcgcgggcgtgctggcaggaggaggagtgcaacaacagggcggcaggttctgaggacgacctcctcgggcactgcaaggtgttcatgcagtcggaggacgtcgggcgcacgctggacctctccgccgtcgcgtcgtacgaggagctctaccagaggctcgccgacatgttcggcgtcgacaaggccgagctgaccagccacgtgttctaccgcgacgacgcttccggagcgctcaagcaccctggcgacgagcctttcagtgagttcaccaagaccgcccggaggctgaccatactgacggacgagagcagcgacagcttagcgaggtagagtccagtctcaaggagacggcggttcggcagtttcggttgggagtgggaggcgccccggaacgggagcgcgtgcgtgcgtctgatccaggaccaaagatttgtcggactagtagctctacagtagtggagtacgtacgtacaccttgatgctgctgcttctgctgtcagttcaagtggccataaccataatgcagctgcctttggtcacagtgactgatcggatgtgttgtgtacatcggaccgttgatttgcgaacgcgattactgaaagattattattatttttttgtatttttgatataactaaggtgctttggtt

SEQ ID NO: 17617 - DNA, 378 bp, Zea mays
  Clone ID: LIB3069-057-H9_FLI
ttctgatattgtgtttggcgtacaatggtttggcgtgatgccatggagtgatccttggaggtgcctggtgtcctccctgccagtgcctgaagcaaaccatcctccatcagatttctctatcctcctttctttatacttacaatctctctgtttgaatgtgaaacatagtggtagagtagctaaactatttaggacctgagactgacgtgttcatgttgttagggagaagaaagatcccatggtccactgactcgggtgcatggggccttgaccaggatgcttaagctcgtcttggcattagttgagggtaacctcgtgtgttaacagaagacgaacaactttgttgaaggacttgagttcttttagcttgttgcttct

SEQ ID NO: 17618 - DNA, 594 bp, Zea mays
  Clone ID: LIB3070-001-G9_FLI
tgcaatcacaacgaacagaagctctcgatctcaccgacaccgaggaagaagagatcaatggcgtccgagcagggagtcgtgatcgcgtgccacagcaaggctgagttcgacgcccacatgaccaaggcccaggaagccggcaagctggtggtcatcgacttcactgccgcctggtgcggtccatgccgcgccatcgccccactgttcgtcgaacacgccaagaagttcactcaggtcgtcttcctgaaggtggacgtggacgaagtgaaggaagtcaccgcggcctacgaggtcgaggcgatgccgaccttccacttcgtcaagaacggcaagacggtcgcgaccatcgtgggtgccaggaaggacgagctcctggcccagatcgagaagcatgccgcgcctgcgcctgcgtctgcgtctgcctaaaggagatcagtcgtcgccgtcaataagggccagcacgtatggctgtaaatgttgtcgttatcagttctggctttgtcgtttgtgggcgattgtgaactagtagtatgtttgtttctatccgagccggaggcgatacttaaccatggatacttgttgtgagttcgtttc

SEQ ID NO: 17619 - DNA, 534 bp, Zea mays
  Clone ID: LIB3070-001-H11_FLI
aaaacctgccacgcttgaacggctctcaatcccaaccctaacagcaccgtctctcggatctgatctgatctgatcctccaattcgttcgtccacgtctcgccatggaggacgaggaacttgttgatcagaagaaatatcttgaggaacgatgcaagccgcaatgtgtaaaatcactttacgaatatgagaaatgcgtcaagagagttgagaatgatgatactggtcacaaacactgcactgggcaatactttgattactggtcatgcatcgacaaatgtgtagcatcaaagctctttaagaagctcaaatgatttgtgcgatgtgatgcgacttctgacaaagtgaatcgaatttgcataccttacacctttggaaagtgtatgagctcgtacatcttggaataaaacatcaatttttctttgctagcatgtggactggactgtgcataaatttcatgtgcatgcatctggtgtcaatcttgctcatttacgtgctgttttgtgagaaaacatattatcaaatggtttttcagt

SEQ ID NO: 17620 - DNA, 982 bp, Zea mays
  Clone ID: LIB3070-003-A9_FLI
aggaaatgcaaattttttatgtggctggttgtgcatgatagatgttggacagctgacaggttggcaaaaaggggaatggatcatcccgtctgctgtccgctttgtgaccaggcggatgaaactattaatcacttattggtcgagtgcagctttgcgaagcagttttggttccttttccttcggtctggggacttccaggtgctctgtccctctacaggggatggctgctttgactcttggtgggagaagagtgccgaggtggtgggcaagcctttgtcgggtggtttcaactcgctggtcatattgggtgcgtggtcgatctggaaacacaggaataggtgtgtgtttgatggttgtagcccgaatgttgaggtcgccctttcggcagctagggaggagttgatgtgctggcgtttggctggcgctaaaactctctctttcttccatttagaggagctgtcttaggcgttaatggtggtgtgagtttgtaaaactgttgtttctgttttggggttccccccttttttcttcttaatataaaaatacgcagacctcctgcgtattcaagaaaaaaacaacacagcctattggaagagcatgttcagccttcatcatggaacgggccaattgactatcaagggagagcttttcagcaaactaatatgtatgcaacaccaccaaacaacagttttgacacagggaggaactcattcatgccattagctgctgaatcttcttatggaccatttccaggatcctactctgagcgggtgcagaggcctggtggatacggattccagcaacagacaagcagcgaccgattgaatgttgttggcccacggagcagctaccaagggggttcttctaatcaccatgctggtagtaatgccatggatgacccggcagcggttgcagcagaattgcagcgccgctgggttcccccacagccaccaggcgtcatcatgccagaggctgcggccgc

SEQ ID NO: 17621 - DNA, 351 bp, Zea mays
  Clone ID: LIB3070-003-B4_FLI
gacaataagctaaacaaaattgccttcgcttcgaactaatctattttttcagatggtgacttccatgtgttcgattgtttgaggtgagggatgacgtgaagctgccaagctataagggtgaaaacatcaatgacaagatgttcgacgagaagaatcatatcttggacccataaaggatgctttaggagtacgcccaatccgctaccacgctcaacctactctgtgtcttctccactggcggctacaccgacattcagcgcgtcacgcagtggaaacttgatgtcaccgaacatagcaagtagggcgtcatgagaaataaaatcttccatgcactgagttgatttattctat

SEQ ID NO: 17622 - DNA, 751 bp, Zea mays
  Clone ID: LIB3070-003-E8_FLI
gttcctcgtctcccatcttcatcttcctcgcagcgccgggactccatcttccgcttcctcccttactcgcgctcggcacgcaggcgacgggagcggcgctcaggctcgggctctcagcggcgacttcagcggcttcccctcccgcatcgcgccctcgcctccggtcctccgcacatcggccggtgatcctgctttaagatgtcagaagcactcgagaaagataaagaaattgatgaagaggaagaggagtatgtattgctagagttggacaattgtctttattcagacatgtcgccaggtgctccgttcgtactctccggtttggatacattgacgcctaccttgataataggtgacagtcttaagatgatcggagaatatgaagaaactattggcacctgctatctattctctgaaactgaagctgaaccgaaacctacaagtaatgagatggcaccttctgaagaaaacacagacaaacaagttagcagcagtaaggaagcgccgtcgaaggaggtgaaccatctcgccagcgttcaaaagatcctcaaatttcggccaatcaatgcggagcattcgcagcatcgagcatatcagcacaaggacaaggaattctagaaaaaaattgtagctggctatctgccgttatcttcttcattggccatccaaacgaggtggtttgtacactttgctttgttctatacataatctgatctattgtatcgatctgtcggtaattgtttctcagcag

SEQ ID NO: 17623 - DNA, 590 bp, Zea mays
  Clone ID: LIB3070-003-F1_FLI
gcttgataagtcttgggcctgctgaatcctgtgaattttttcaccgttccttcattacttgatttcatggatgggtcatggaatcaagtaatgaaggaacggtgaaaaaatcgctgtcgatcactccacttggcagtgacagtggatactttgttaatataaccgttgtgaacagtgcagagaggactaatgatcgtctttcagtccctatcacaaaagctgagtttgctgtgatccgcacaactctgagttttgcattgccacatattatgggttgggaccaggctttaaccaatcaccatccagctcctccagctagcagcaggcccacggtagagcgtccacacccggattccgaatgggagaggtgaagctcccttttagcggctagacgatggaggcctttgggcaccagtacaagttgctgctgcaaagtatgtgtgcttgaacaatctcttagaacactgtctgccgaccgcattagatttctggaacttaaggctagatgaagcacgatgaaccattgtgtttgttcagtgcatgtataactatatcacgcctactaaaggcatatttgatatttctagtcg

SEQ ID NO: 17624 - DNA, 1034 bp, Zea mays; identical to SEQ ID NO: 3545
  Clone ID: LIB3070-003-H1_FLI

SEQ ID NO: 17625 - DNA, 371 bp, Zea mays
  Clone ID: LIB3070-003-H11_FLI
gcgatccaaatggaatggccaggtcggcagttcgggactagtaatcaccttggagacaccccttgacaacatggcaaggccttctttatccgttcaattgaacgggggtttcgagttctgacatttcccccgtgggctctagaatacaactgtatatactgtatctcatagcgagaagatgatatgccactgtatatattgcacacatgtagctgtgattaagtagatatcttcccaaccggtgaagtgtatagtcctaaaaacagacaaatggcttactgttttggttcactgaataaatttgaaggcttgtatgtcgtacctgtgcgttcgaagtatttgtcttcttcaataaaaattgtagtactcct

SEQ ID NO: 17626 - DNA, 610 bp, Zea mays
  Clone ID: LIB3070-003-H12_FLI
gcgatctagaacttaggtggaaggaagcaggcggccaccatggtgaagggacgcacgggacagcgcgtcaggctctacgtccggggcaccatcctcggatacaagaggtccaagtcgaaccagtacgagaccacgtcgctcattcagatcgagggggtgaacaccaaggaggacgtcgcgtggtacgctggcaagcgcatggcgtacatctacaaggctaagaccaagagcagcgagacccgctacaggtgcatctggggcaaggtcacccgcccgcacggcaactcgggcgtcgtccgcgccaagttcaagtccaacctcccgcctgagtccatggggcgcaaggtcagagtgttcatgtacccgagcagcatctaaggttaggtttttgttggagtaaaggtggactctaaatggccatgcttagttcttctctctgagcttaaaatgccatgtgttggcaacttagattgttcatgtactgaacctgttgaagttctaccaaaatttgttgtcgaacggctgaacagttgtcctaatgttatgctataaacagagcttatttccccccgtgccatcgctgtatgattgcagtattttttctctcgcc

SEQ ID NO: 17627 - DNA, 708 bp, Zea mays
  Clone ID: LIB3070-004-A12_FLI
ctcctgtgaaggagattaggaggacaatgagaatacaagcactgcgttgccatgttttgtacagccatgatggtagcaagttgaatgtaattcctgttttggcttctcgctcacaggctttaaggtatttgtatatccgatggggggtagagctgtcaaacatcaccgtgattgtcggtgagtgtggtgacacagattatgaaggactacttggaggcgtgcacaaaactatcatactcaaaggctcgttcaatactgctccaaaccaagttcatgctaacagaagctattcatcccaagatgttgtatcctttgacaaacaaggaattgcttcaattgagggatatggtccagacaatctaaagtcagctctacggcaatttggtatattgaaagactaaatctttgatctttgctggtcagcagaggaatcaaagcagtaggaatgtaggatcgaggagagtgacaggacttcccctctgtgcacttcgccgaaaagtaataatgggattgctatgcatggcccttgttgtacactagaaaattgggcacgcaaacttgtgtcagtttttccgctgttgcgaaattcagtgatggtgtttttgtaactataccaacctgtgtcagttttgccgttgttgcaaaactcagtgatggtgttttttgtaattattatacatccgaataataagactggtgtttccagac

SEQ ID NO: 17628 - DNA, 706 bp, Zea mays
  Clone ID: LIB3070-004-C1_FLI
attcgatccaactcctgagcactttctcctcgtccccgacaagccaatcgaagccgagatacggccatggactccaccggcaccggagcagggggtaaggggaagaagggagcggccgggcgcaaggtcggcgggccaaggaagaagtcggtgtcgaggtccgtgaaggccgggctccagttccccgtcggccgcatcgggcgctacttgaagaagggccgctacgcgcagcgtgtcggcaccggcgcccccgtctacctcgccgctgtcctcgaatacctcgccgctgaggttctggagctcgctggtaatgctgccagggacaacaagaagactcgcattattccgcgccacgtgcttctggcgatccggaacgacgaggagcttgggaagctgttgggcggcgtgaccatcgctcacggcggtgtgctccccaatatcaaccctgttctgctgcccaagaagacggcggagaaggcgtccagtggcgggagcaaggaggcaaagtcgcccaagaaggccgctaagtcccccaagaaggcatagactgactgtccggtgtgatctgatgtttagcagtaccttgttaccagtatgcggtgatgcgtaggctgtagatgggacgaatgtgctggtgtgtgtatgtgtcctgctgcaagttgccctttgctatttaaaatggaagaagaaatgcctggtttctctg

SEQ ID NO: 17629 - DNA, 1061 bp, Zea mays
  Clone ID: LIB3070-004-E10_FLI
agacgaaacatctccttagcttgccgtacatttttcttttcttctttacgcaaatggtaaaacgcttgggaaacacaattcagccctggcctttttccagttgagttcacctcttggctcttgcctcctgcatctctagagaggcacatcccagctccaagcttcgcgccttgttggatcgtggcgtccaagcaacggtggtagcggagcgcgaggcagtggccgcagaaggaagcgcgaagcatccatggaccaacgccaggtggttagcgagaattatgccaatcccataacatgcttcttccatgtgctattcaaggcgggggcgctagccttctacatcctattctcgctctttgtgaagagcttcgtcatcatcttcgtgatcacggtgctcctcgcagcgcttgacttctgggtggtgaagaacgtcagtggcaggatactagtcgggctgcggtggtggaatgagatcgatgatgacggaaacagtgtgtggaagtttgaatgccttgatggggagtctctcgctcggatgaacaagaaggattcatggctgttctggtggactctttacttgactgctgctgcatggatcgttcttggtatattttcactcatcaggcttgaggctgattaccttcttgttgttggagtttgcttgagtctaagcattgcaaacattgttggattcaccaagtgcaacaaagatgccaagaagaacatccagactttcgctcaaaatgcactcgcttcccgtgtcacatcatcgctgcaatcagcattcggtgtcatctgaagtcccacgcggaggccctggtattagtatattactcacagcggtgtacaatttgtcaaaaggatgagcttgcattctacgtttactgcctttcctctgattgcaaggatgtaattctaccagcgtagacagcaagcatattgtactgtcccgttatcattcttttttacctcatacaacaaataggtcgattttgatgtcattaccagaatcctttggtttatctcttgggtgatttatccatgaagcatacacttgtctc

SEQ ID NO: 17630 - DNA, 525 bp, Zea mays
  Clone ID: LIB3070-004-E3_FLI
catctcctcgcatttcttcccatccgatccccccttcgcaaccaaaaccccaactcgccccgcatcgatggcgcccaaggccgagaagaaacccgcggcgaagaagccggcggaggaggagcccgcggccgagaaggcgcccgccgggaagaagccgaaggcggagaagcgggtccccgctggcaagtccgctgccaaggaaggcggcgagggcaagaggggcaagaagaagggcaagaagagcgtggagacctacaagatctacatcttcaaggtgctgaagcaggtgcacccggacattggcatctcctccaaggccatgtccatcatgaactccttcattaacgatatcttcgagaagctcgctgctgaggccgccaagctcgcgcgctataacaagaagcctaccatcacctcccgtgagatccagacctccgtgcgcctcgtccttcccggggagctcgccaagcacgccgtctccgagggcaccaaggccgtcaccaagttcacctcggcctaggctgc

SEQ ID NO: 17631 - DNA, 695 bp, Zea mays
  Clone ID: LIB3070-004-G12_FLI
gcactttctcctcgtccccgacaagccaatcgaagccgagatacggccatggactccaccggcaccggagcagggggtaaggggaagaagggagcggccgggcgcaaggtcggcgggccaaggaagaagtcggtgtcgaggtccgtgaaggccgggctccagttccccgtcggccgcatcgggcgctacttgaagaagggccgctacgcgcagcgtgtcggcaccggcgcccccgtctacctcgccgctgtcctcgaatacctcgccgctgaggttctggagctcgctggtaatgctgccagggacaacaagaagactcgcattattccgcgccacgtgcttctggcgatccggaacgacgaggagcttgggaagctgttgggcggcgtgaccatcgctcacggcggtgtgctccccaatatcaaccctgttctgctgcccaagaagacggcggagaaggcgtccagtggcgggagcaaggaggcaaagtcgcccaagaaggccgctaagtcccccaagaaggcatagactgactgtccggtgtgatctgatgtttagcagtaccttgttaccagtatgcggtgatgcgtaggctgtagatgggacgaatgtgctggtgtgtgtatgtgtcctgctgcaagttgccctttgctatttaaaatggaagaagaaatgcctggtttctctgaggttgc

SEQ ID NO: 17632 - DNA, 539 bp, Zea mays
  Clone ID: LIB3070-004-H2_FLI
aaacccatacacagtttggttataagatcgagaccgccatccatggaccagtacacgattagcgagcaatataatcacacacttcatcaaacccatacacacgaaccgtaagtacactacacactccctgtccctgggagtcagagagacatggcgcggcagcatattgcaccgtcgcggcaacggctgcacggtgctccggcccctacctacgccgtcgtccgttcagttccccggcgccggcttgccgccgaatcccttcttgcgctcctcgatgaagctggaggagcgctcgttgatgttggacggcacccttggcgcctgcggcatccgcggccggagcccgctccgcctcggcacccgggcgccgctctgctcctccgctccggcgaccgacgacgcctgccgcttccggaacagcgacttcttcctctccaacgaggcgccgccgctgccctcctgcgcaggacggtcctccttgatcgtcaccgtcctcctcgtcaccttcgtctcctccgccttcgccaccgctggcgccg

SEQ ID NO: 17633 - DNA, 577 bp, Zea mays
  Clone ID: LIB3070-005-A10_FLI
ggctcgagaaaaagtgagggctgctgatgttgatgtcataacatttggccagtacatgaggccatcaaaacgtcacatgcctgtttctgagtatgttacgcctgaagcttttgagaagtatcgggcccttggtgtcgaaatggggttccgctacgttgcgtctgggccaatggtccggtcttcgtacaaggcaggtgaattctacatcaaggctatgatcgaagcggagcgagccaagggaaccgctgcagactcaagtgcataaccgagatagcacctcccggccccacccaccccttgacttggttgtgctgcaaataagctcctcactgcttttgtagtcagagagacatgtcgattttttacgtcataattgtaaccacacattcacttctattttttttggtcaattgaacagttccggcgccttcgtgccttggttcatcctccctctcaagtccaagaaaaaaaaagaggtatttgttgtagcagtatatttaggcgaccgcttcctttgtatctcgctcgtacagaacatgaatacagggcgtggggtttctgtgccgttggtagatcc

SEQ ID NO: 17634 - DNA, 582 bp, Zea mays
  Clone ID: LIB3070-005-C7_FLI
gccgcctcctgctgctaccccacccccttcgtccagcggcaagtgcccgctgaacgcgctcaagttcggcgtgtgcgccgatgtgctcggcctcgtcaaaggcgaggctggcaaggtgcctgccgagccatgctgtaccctcatcaaaggccttgcggacttcgaggccgccgtctgcctctgcacggccatcaaggccaacgtgctcggcgtcgtcatcgatgtccccatcaagctcagcgccctcgtcaactactgtggcaagtgcgtgcccaagggctacttgtgcgcgtaagcagcttccggcggtcacacgctcgtagctgttcacgtacgagattacatatgcacgcaccctgcatggcacgaatgcatgcattgtgtctgctgatatatctctcctgtctcagttgcattgtgcacctttcggttctacaaaacctagaaccattccagccaaatacttgtcagttcaattcgcatgtattgtctcttgttgaattcccatttttttttgtatttggtcatttcctcgtaagagtccgacaccttctccaaggaaaaagggcagtgttgagagtc

SEQ ID NO: 17635 - DNA, 716 bp, Zea mays
  Clone ID: LIB3070-005-F5_FLI
agtaggtccatacccagaatcccctcggctagctcggtttccgaaccttcctgacatgtctccaaagaaggtttctgctactcataatgtatatgtctcgccactacgatcatcaaagatggatactttactctcaccaagcccaaagagctattatgcatgtgtaggcgagagtacctatgcgttccaaagcccctccaaggacctgaaggctatcaacaaccgcctaaatagtgggaagaaagttagcggacgattgaacttcgacattgtcagcgatctggtcgtcgccagtagcctcaacggcgttcaaaatgccaagcccgcagccacggaagtggttcccaccaagacacctgtgaagtgcgagccatctgaatcgtgatctactctgatgctgcatcaccaatccagtgtaacttattataaatggttaggtgtcagatgctctgatttaggagtgtttgaatgcactagagataatagttagttagctaaaaaatgttagtggaattagctagctaactattacctaatttgctaaaagtagttgatagctaaaatattagctagactgtttagatgtctcaattttagcagctaactattagttctagtgtattcaaacattcccttagatattaggtggccttatttctgtttgtatttttgacatgtaaacatctttgtgagcagctctaccatctgtaaaatat

SEQ ID NO: 17636 - DNA, 1197 bp, Zea mays
  Clone ID: LIB3070-005-H4_FLI
aaccacaactgaaagggagagccgaagagggaagggggagaagcgaccgcgccgccaaaccctagccccgcgcaagcgaccgtgggggagctccactccgccgcgccgccccccgtccccgtttcgcgacatggccgattccccgcgcaggaggtactcaaggtccccttcatacagcagggggcacccaaaagggaggtcaagatcacaatctccagctcggtctcagtctaggtcacctgtccctgatcctagatctcaggcgaggtcaagatctagaagccaagagagggaggaggatgctgttaaccgtgggaatactctgtatgtgactgggctctcttcgagggttactgaaagggatgttaaggattatttttctaagcatggaagggtggttggttgccatgttgttcttgaaccccatacacgtgtttcccgtggatttgcctttgtcagcatggacactgttgaagaagcggagcgttgcataaagtatcttaatggttctgtaatggaaggtcgaaacatcacagttgaaaagtcacgccgtggtcgcccaaggacaccaactcctggaagctatcttggccatcggtacgagcgtagggagcgtgggaggttccatagaggctatggtggtgggcgtgatgagtattacggcaatggcggcggcgggtatggctaccgcaggtctccgcctcccatgtactcttcctacagggagagtcgggattattatccctcctacaaggacagccgggactaccctccctacagggacggcagggactactctcctccccacagggaccctcgggactactacgaaagcaggggtggccggggctactcgccgcctccttatggtggtggtaggtcaaggagggaccgatcggtttcaccgtatcggatgccagaaaggggctacggtggaggccgccgggtgggtggcggcggatatgacaggtaatgtagaggttttctctccgccggtggctgctgctgcgatggctgcgtatggctctcgcagctctggtgatatggttagactgctgcctgtagctgtgtacttggtgtactgtcttcccgcgtatgtggatttggtgaaaacttctgtatgagcaccttttatttgtagcctgcaatgattccttcttaagacagactggggactttggctccattgtgtgggat

SEQ ID NO: 17637 - DNA, 1236 bp, Zea mays
  Clone ID: LIB3070-005-H9_FLI
gcaagctgacaagtgagtcgaatcagcttactttctggagtgattcaccgactggggatggatcttcaccatattaccattccatagctggtggcatgtctccatatcgcagttatgctgtgatgtcaccatcaagtaaaccaaatgggtcgtctggaacaggagataaggatgataaagcaagtaggagcaatggttctggttcgtttgggaaagaccatgatcgaacctcgttggttggatcagatgatagtagcttcaagcgatcaagttccatgagctcaggaccagatggaacagtgcatgaagattcaatggatcaccacagagatactgattcagacacatgtcacttgggtgtgcttgtgcatacaaaagcagcattggatgcaaacatatatgacactcaacctggagggcgaaagacagttggaaataatttgattgtgaaagatcaagtcaatgatccattgactgaaaagatcgctgaacttagagaacccacatttccattggatgatggaaaagatttgcagcgtaatgctagtcatgagttaccacaacatctcgaagacaatgatgttgccaaaaaggaaatcataccattacaatctctgctccctttaccagtacccaaatcaccttcagagtcgtggctttctcgcactttgccatccgtgacaaataggtcacctctgccatcttttcttggaattcaagtacactcaaagaaacaggctccctgggtcataacgcaaccaaaggagaatgatcataaaccttccaggccacgacagataagatttgcagatgtagtagaaaaaccaacttcgttggattcggagatatgatatcttctcgcaaaaccagtatctatccattcatggtgttgccttgaaggctatcaaggtcatatacctcactggcacttacgagttcctaggatgtgcctctgctttttacagatgtggtcacttgatacagctgctggttaccacttaccatgttggtaattggagttcacatgccatgtttgctggactgtggtcagtatgtttctcatggtaagctggtaggtggtggtttaggtttggagtaaatcttatattcgtacaggatgacttcagctttcttccttactgtcgatagtgaaataaagcaatagtacccaaaaccaaaaaaggccgagttgttgcaaaatgtaatgcatcccaaagaataagaagatgtcaaaac

SEQ ID NO: 17638 - DNA, 659 bp, Zea mays
  Clone ID: LIB3070-006-D3_FLI
ggtgaagagagaaggaaggcaagattggaacgacaccaaagaacaatggagcgtgcggcaaaagctcttgctgagaagaatgagcgtgacttgcaagctcagcaggagcaagaagagcgacatagaattggtgaatcacttgattttgagataaagaggtgggctgctggcaaagaaggcaacctacgggccttgctaacaacgttgcaatatattctttggcctgaatgtggctggcgacctgtatcattgactgatctgattacagcagcatctgtcaagaaagaatacaggaaagcaacattgtgtatccatcctgataaggtgcagcagaagggtgcaaatcttcaacagaaatacattgcagaaaaggtatttgaccttctgaaggaagcctggaaaaaattcaactcagaagaactcttctaacaacttgtttaggaaaatgttgatcgcaaaacaagtattgggaaggacaggtaggcaagctatggtagatatttttattcatttctatatttagttatatagtgtttttcttatttccttgtttccgatttcttgctcgctctattcattggcatatgcacccttattttgtgtcatgtaacgttgtatatatatatctttccgtgtgcagtgtaagtaaacttgtgctc

SEQ ID NO: 17639 - DNA, 384 bp, Zea mays
  Clone ID: LIB3070-006-G2_FLI
catgagcttaatgacgcaaggaatgaattagcttcgatggatgataaccgaagaaaaatttctgaaagtatgtcccttgcggacaatgaagtggtggatgtccgagagatgatcaagagttttgataaagaaataaaagtctcaactaaagggataaatgataccaaggcgcaaaaggaaggtgttgagaagaggcgtactgaagctctgaaggtagttgctaagattgaacttgatttgagagatataaaagataggattgtgaatgagaagcgagcaaaggatgaggcagcgagggatttgcagagtgtgaggagagagagtgaaaagtctgaagcttgccaaattccaggaagaggaagagttttacgatttgtaagttcc

SEQ ID NO: 17640 - DNA, 1135 bp, Zea mays
  Clone ID: LIB3070-006-H7_FLI
ggagaagaaatctgggaagtgcatctaaagagtctgattccacagagacctactgttggtgatgtcaatggagatggccacactgatgttgtggtcccaactgtgtcaggaaacatctatgttcttagtggaaaggatgggtcaaaaatccaacctttcccatatagaacacatggaagaatcatgagtcctgttctacttctcgacatgagcaaacatggagacaatgcaaaagggctaactcttgcaacaacgtcctttgatggttatttatatttgattgagggatcgagtggctgtgcagatgttgttgacattggagagacctcgtacactatggttttggctgataacgtggatggtggagatgaccttgatcttattgttaccactatgaatggcaacgtcttctgcttctccactcaatcaccacaccatccgcttaaggaatggaggtcatcaaaccaaggaaggaataatgctgcatatcagtacaaccgtgaaggtatctatgttaagcatggttccaggaccttccgtgacgaagagggcaagaatttctggatagagtttgaaatcgttgacaagtacagggtgccctatgggaagcaagctccttataacgtgacggtaactttacttgttccggggaattatcaaggagataggcgcattgttgtcagtggtgtgtatcatcaaccagggaagcaacggatgatgcttcccactgttcctgttagaactactggaactgtggtcgtggagatgatcgataaaaatgggctgtacttctccgacgagttctcactcaccttccacatgcattactataagctgctgaaatggcttctgctactgccaatgcttggaatgtttggtgttctcgtcatcttgaggccccaagaaggtgcgccgctgccatcgttttcacggaatatcgactagtggtgaaatgccggtgacccattgaagctgacgaagtgactccccaacatctccatgacctaaatgtcttgttcagtgtagtatcccaacagttaaccatttcatggattatagttatattttttacaatgtacccatttagttctgcagaacaattttgtacacagccattttcaatattggctcaccc

SEQ ID NO: 17641 - DNA, 377 bp, Zea mays
  Clone ID: LIB3070-007-A6_FLI
ggctcgagcaaggactctgagcagaagaagaaggctatcaagaaagcaaaggcctctacaaggaacaggaacaaggatgctcgccgtggagaggctgaccgtgttattcctactttgaaaccaaagcatctgttctctgggaaacgcactcttggaaagacaagcaggcgataagctcagcacctcactgcatctggtaataaaggactggtgcactgttggtttgatcaatttgatgaaacgggtgttttttttgtgttcagccagcacttatttatgctactatttacgaaatttgtcttgatgtctctggtcctcttgatatatagttttagtgtttaattctgttgaatggtacaaagttatccatgtcccct

SEQ ID NO: 17642 - DNA, 921 bp, Zea mays
  Clone ID: LIB3070-007-B2_FLI
aatcttgacgggtctgtctacagtgtgcttattcatgggcattgtagggcaggaaatgttatgaaggctctcagcttccataagcaaatgctgcagcgtggttttgctccaaattcaacaagcacgatttccttgattaggggtctatttgaaaatgggatggttgtagaagcagatcaggtgattcagcagttgttgaactgttgttcccttgctgatgcagaagcatcaaaggctcttattgacctcaacttaaatgaaggtaatgtggacgcagtcttagacgttctgcatggcatggcaaaggatggactgcttccaagtccaagatgagggtgattttcaacattcaagaaccaccctctctgtggaatactggagacctgatggtcatgtttggtacatattgtctcatgagtcataacacgagcatctgaatcagtgttatgtggtaagaacggtctgccctaaatcatgatgtgctccatatggaaaaggctgaaagaagttgcctcatgctgcattattgtgtaaagtgagcaaccatttctatctcattaaccgctctgctcttaacaagtgaaatgaattttggttcttgataaatacttgattttgaagggcaggctggtttagtgatgagagttgtttcactaattcaccggatcttaggtttgaagcaacctctctgcatttgcagaggaaggctggtattgatttatcccttttctaggccccactcacgtgggagtctctggcactaggtctggccccttttataaatacttgattttgtattagcagctttttgtattgttgtttataataattattaggttagagaaggttgtactgatattttatgatgtattacttattgtcttacttttagacactataataaaagatcttgatatatgt

SEQ ID NO: 17643 - DNA, 371 bp, Zea mays
  Clone ID: LIB3070-007-G10_FLI
ggaaggcaaagcgtgcctcgatcttcatcaggctggtttctgcagccggcactggattcttctacgtgaagcgcaagaatcctcgtcgcatcaccgagaagcttgagtttagaaagtatgatccccgtgtgaacaagcatgttctgtttaccgaagcgaagatgaagtgagatcttgtttctccacaatgcagaactgtaataagttgtcaaccttttgcgaccagaaacctttatgccgttattagacagatgattaacgatcctatgtgtttttcctgctccaatgagctgcaagcagcagatggctagtgttttgtcattttgtgtgggaaactacaaatgaaatctggactcccatctttttctttc

SEQ ID NO: 17644 - DNA, 283 bp, Zea mays
  Clone ID: LIB3070-008-A3_FLI
cgtgcacttaagtcccatttgttctcgagtgcttgggcccgcctcactacctatcagcaagtccaacagatgtgaagcaacaaactatgccattgttagtttcagaaacattttatgctatcgtctacgtgtgattcaaagggcttcataaatatgaattataaaatcatgggatgtcctttcgaaggtataaacaacgaaatatcgtgtgtttcttaggataaactcatttcatgtccatgatcgcgccctattctaacggacttcaagatatttgaaaggg

SEQ ID NO: 17645 - DNA, 481 bp, Zea mays
  Clone ID: LIB3070-008-A8_FLI
tgaaagtttgtggaacaacatgatgattacttcgagcagaagagaaatgcagctcaactcatcaataagggataagttgttttcaaaaggttattgcagttttccgtgtgctaacttatagagtggcagctgatgctacagatgagtacgtacgcattggagaaagtactgcgctggaaagtctaagaatgtttgttaaagctgtaatagaagtttttggagttgagtatttgaggtcaccaaatgaaaaagatatcgaacaattacttgcacttggtaatgaaagatgttttcctggtatgctggtttcactagatggcatgcattggaggcggaagaaccgtatgccattgttgcaaggtcaatttttcgggcatcgccatacacctacaataattttagaagcagttgctttgctagatttatagatttcgcatgcttttttgtttgcctggatctctcaacaatatcaatgttcttc

SEQ ID NO: 17646 - DNA, 770 bp, Zea mays; identical to SEQ ID NO: 17488
  Clone ID: LIB3070-008-B8_FLI

SEQ ID NO: 17647 - DNA, 614 bp, Zea mays
  Clone ID: LIB3070-008-D10_FLI
cctcgctgccgtcctcgagtacctcgccgccgagctcctcgagttggcggggaacgcagcgcgggacaacaagaagaaccggatcatcccgcgacacgtactgctggcgatccgcaacgatgaggagctcgggaagctactggccggcgtcaccatcgcacacggcggggttctgcccaacatcaaccctgtgctgctccccaagaaaaccgctgtcgctgctgccaaggaaggcaaagagaagaagtcacccaagaaggccgccgccgccaagtcgcccaaaaaggtggccgcctcgtaggtccctggcaatgctgatgcactgtctctctctgtcctctctgaactgaaacgctcctaactgtcgttgtcggtcatggtcgttgttgtttgatgcgcttttattgtggttgttcgtgtgtaattgcttgcctttcgcccatttggcatgcactgtgtagggtcacactggtctaggttttcaatctgggaaacaccggtttagattcaaggagcgtgaactgtgaaggcaggtgagagggtgggatctgtgaatcactaggtgttgtttgtaataagattgcaaagatgtgtaaaatttgttttgtgcttcc

SEQ ID NO: 17648 - DNA, 608 bp, Zea mays
  Clone ID: LIB3070-008-E12_FLI
atgtcttctcttggataagctgtttggatcttcgcactctcgctgtgctgacaaattccaccctgtccagctcaagtgatccacataatatatctttccattacttaatacctgaaggaagcatactattagacataccggtatatattattgttcttagtcatcgcacaagactcttgtcaacaagaccaacaacaggatgaggactgccgtgcatgctgcgctttgcattgtgcttgtgataatgtcttcaacactgtcatcttgcgaggacgatgagaaggtatctatcgcatgtgacacaggatgcaatgccgcgatctcccgtctcaaatgcttcctgatggcctattctgaagggaaagtgttggtcagcagcaactgcgaaacgccgaccaggtgcggctgcgtgtttcgtcacaaacaagatgcaacccttatcgccggcgacgttggcaacaaaaagggatattgatggcagacgtgtatttcttggttgaataatatatactgctagaattaatatgggcaccaacaacgaaatatctataatgttattcttcagtgtaatgcttccagcatgttctgttttagtataactaaatatc

SEQ ID NO: 17649 - DNA, 245 bp, Zea mays
  Clone ID: LIB3070-008-F9_FLI
cactgttctgatcatgagtattgggttcgtagccgtcgttgctgtgctccatgtattcgggaagctgtaccgcacctccaactaggttggcattgccatatccaagaaagctgagtccaccaagagaggattcctgtagaacaatttaaatggatagcaagtgactatcagactctgttgtagaagtttatttatacaacttgcaatgctgcgaggctattcataaatgcctgcgagttttgttt

SEQ ID NO: 17650 - DNA, 781 bp, Zea mays
  Clone ID: LIB3070-008-G10_FLI
tgcccatctgatgatctcccgctagcttccttcttgctactcccgcagtccccagtccccacccgctgcgccctcgccatggatccgagctccgaaatcatactggacactccatacttccgcatctacagcgaccgccgcatcgaccgcttgatgggcaccgaaacggtgccggccggctttgatcccagcaccggcgtcacctccaaagatgtcgtcatagacagcgacgccggcctctacgtccgccaggcccagcctgcgggacatgccgtgcgagagggtgctcgtgtgcggggcggagctggactccctgctgccgagggacagggcctactacgaggccctcgcggcaagcgggtggagcggcacggtggagtggttcgagtcccagggccaggaccacgtcttcttcctcttcaaacccgactgcggtgagtccgtggcgctcatggatcgactcgtcgcgttcttcgctgcgaactgaaattcgtcatgtgcactcagtgttttatacatagtagttattgccgaggttttcaaatatgtaaaagtgccctataatttgaaaataggtatattttatataatatagggcaccaataaaatatctcgctgttgaaatgtcaaatctagattacagagcagtatgatgtagtatatttaagagcttgaaaaggtattttatatttttttaccaaattttatgaaacaagttattgttggagttgttttttctgtgtagaaccctatattttaatttaagacgtcagtttaaggt

SEQ ID NO: 17651 - DNA, 1022 bp, Zea mays
  Clone ID: LIB3070-008-H8_FLI
gagaatcagagctctgaggctgctcacatcaggccaccaccaacccctcacgtcggcggtggcgtcgtcggcgaaggcagagatggcgtccgtggccgcggcggaggtcgcggcggcggcgctccggtcggtgctgtcgcgcgcgcagcaggcggcggcgcgggcggggcgcgcgccggggtccgtgcgcgtggtggcggtgagcaagaccaagccggtgcctgtcatccggggcgtctacgacgcgggccaccgctgcttcggcgagaactacgtccaggagctcatcgacaaggcgcctcagcttcctgaggatgttgagtggcacttcattgggaatctgcaaagcaacaaagccagagccctacttgctggcgtgccaaaccttgatatggttgagagtgtcgatgatgagaagattgctaaccgtcttgatcgagtggtagctgacttggggagaaaacctcttaaggttttggttcaagtcaacactagtggagaagaatcgaaatttggagtagatccctcaggatgcatggaactagcaaagtatgtcaaactgaactgcccgaaccttgtgttctctggtctgatgacaattgggatgcttgattactcctcaacccctgagaatttcaaggcgctggctaactgccgggaagaggtgtgcaaggagcttggaatacccgaagagcagtgcgaattgtctatgggcatgtcggctgattttgaacaagcgattgaaatgggaagcacaaatgtaagagttgggtcaactatatttggtgcaagagaatacccaaagaagaactagggtgtttaactatatttggtgcccaaagaactagggtgcttatgcattcctgtcatgatggtagtggcacagaatctgcaacagatccaaatctgatgatgcatcatatatgtgcagttgtgtgcccattctactcagcttaaaacattttgacacctttttttggcccaaagtatcaataaggaaagttaataaaaagcattagacc

SEQ ID NO: 17652 - DNA, 1562 bp, Zea mays
  Clone ID: LIB3070-009-A4_FLI
gttggttcaggattgccactcgaaaaacaagcagctgcctaactctggctctgagaagcaaacaatcatggagagcgagagcttagaccatgtaggtaagcgtgtcattgagatgcttgatcaggtgactccagtggtgaaagaaatgttcagttccatggaaagctccagttctgcacaggcggcggcggcagcagcagcttggccggaggatctcccagaaagaagaacactccctcctgttctctgtcgcactacatcccatcatccatcagacggtgacgaggttgcgatgcacacaggacgttgcaaagttgaggcaccggcgcctgggcacgagacagatgagggcgtttgcaccagggaggaggatggccaaaccagcagccgtgaaccgccgtcagctcctattcctaccgctgagtttttaccgctgcagccgacgctgtcatcggtgtccccacatctgctgtcggcgccgccgccgtccccgatgcccgtggttggcttgtccatgcttctgcagtcgtgggaggcaacgcaagatggccacgccaccgccgtcgcagtggtgccacctgctggcgtcgcacagcctgctgaggcagcgccgacggcacacaaagacaccacgcccgtcggcaccagcatggaagtcgaaggctctacgtcctctgtgttacttgaagctggtcagcctgagccatgcgtggattcacccaatgggagcacgcaggcaccagcgcagggcggcaatgccgctgttccaaacgtgccgccgccgccgccgccagtaccggcgcacagaggcagatctcaagaggggccgtctatggacgagcccggtccggcagtgacagacacgccacctcgaccgccgtgtgaaatgcaaggaggaccacctgcactgccgccggccgccgccaaggtttcgccgtcgccgtcgccgccgccactaccggcgcacagaggcagatttcaagagggggcgtctatggacgagcccggtcaggcagtgacagacacaccacctcggccgccgtgtgaagtgcagggaggaccgcctgcaccgccgccggccgccgccaaggtttcgccagcgccaccgccgccccctggaagcatctcggcaacggtgcgcggcaagaaagccgcgagcaagctgaaacgatcgacgcagatgggcagcctgtacagacgcctgcgagacagagtggaaggctctggcagcacgcacggcgacaggatgcggcagaaccgcaagaggccccggacggtaggcgcgtccaagagcgacgccggcggccagggcatggccgaggcattggccgagatggctaagagatcgacgtacttccgacaaatcgaagaggacgcggagaagtatgcagcggtgatcctggagctgaaggacgccatcggctcgttccagtccaaggacatgtccgagctggtgaggttccgtcagcacgtcgagcggcagctggtgtgcctgaccgacgagacacaggtgttagccaggttcgagggcttcccttccaagaagctggaggcgttgagga

SEQ ID NO: 17653 - DNA, 453 bp, Zea mays
  Clone ID: LIB3070-009-E5_FLI
cctcaccgcttggctgaaatcaggcgcttcttcgaggactacaagaagaatgagaacaaggaggttgctgtgaatgactttctaccagcgagcgccgcttatgaagccatacagcactctatggacctgtatgctacatacatcgttgagggcctgaggaggtaggattctgatggctaggaaaggtggggaggatgttgacgaaaaactgggagaccatttaccgcatggaacgagtaccgttattattttatttgtgtcgtgtatactgctagtagtgaaccctcaatcaaagaccgaaatcccctggggagtcggagtcggtagtaggtgaagctagtaacaaggttggcgaaatattattttctggcctgactgcctatatatgttgtacgtgattggtatcgtaatattcattcgcttttgtgatacataattcgttattggatcttc

SEQ ID NO: 17654 - DNA, 650 bp, Zea mays
  Clone ID: LIB3070-009-E7_FLI
gcatagcaaaatctgctcctcaggctggcaaatccgagtcgttgactcgtttgccgttcattggctcgccacatcggctgattggcatacacgaatcccaggcccagcggcttacagctcagctcatcacaatgcgggccccgggagtcagagtcagacacacacccgggtcctggcctcctgggcgtccggatagcggtgcatgctcgcgtgcgtaatctacacgcacagcctgtcgcgtactagtattctacgtacacaccagatgcaagatggactgcatttcttttcctacacggctactacacctacactacactagcattagtcaaagcgtccagtagatcagtttttacgcgtagctacagatggatgtgttttttttttcattttcatgtcgccgcgggctgccgacgcgactgctgttaattaggttcccccgttctcctagctggctgccacggacggttgcggacgcgtgggtggacttgcgtttcacccactggatggtattctgcaagcaatgccgcatgtgcttgcgctcttcctcttcccaacgcacttcaggacgcacatcgctctcgtgttcttggagggcgtgtggacgacaaacatccatgactggccataacttgccgtgaatgcagtcg

SEQ ID NO: 17655 - DNA, 361 bp, Zea mays
  Clone ID: LIB3070-009-F4_FLI
ctcctgtcgtgatcttgcttcgtcagatgcgctggtgagtcggagcaacgccctgctggcgagccgtccgtcccagctccaccatggcgcctcctctcgcgaggtgaatctcccccaggaatggacgtattgaaagcgccgaatcggcaccgctgacgatctcccctaggttgacgggtcatatttgagacaaaaattactgtcgctaatgctagggataggtaggaaggggtagcgtttgctcgcgtgggttagagcgagagtgtgcatagttgtttgactaggaagttggaggcagcaggggttgcatcatcttttgcggtgcagaaacgcatcaggctctcttgcttcttttgttccc

SEQ ID NO: 17656 - DNA, 219 bp, Zea mays
  Clone ID: LIB3070-010-E7_FLI
ccaaatgccaatgggtatattaagcaacattttaactctgcactttgccgtggcggttaatgttctagtttcttgaatcgacgcaatttatctctagaacatgctggacctcctttgttgaccaagtgggttgctgatggaattcatgtctggttcatttgtttcaaacaggacaggacattctttccttctgtgggccaataccaagagctttaattt

SEQ ID NO: 17657 - DNA, 494 bp, Zea mays
  Clone ID: LIB3070-010-E9_FLI
ctaagaacagggcttcgtctcaatggaaggcaaaacagggcagctcaggtgctgtttcgtcgccatcgtgctcgtcctgggtcttgtccttgagtcccaccaggctgaagctggaggcaaatggtgctgcgaaaccgccaccggaaaataccattttaatcgctgcgttgactcgggtttggtcgacaatattgggttctgtgcgggtaatgccggttgcatcattatggaagacagatgtggaggccgttggccggtgcctgctcgtgatgcgctttccctggatgtcatttgattaattataagcaagtacgtgaagaaacgagggccagacgactgtcgtccagcgattggttatttgtgaacttgtcgtttgtcttcttatttcaactttccaataagccccttcgtgaagtgtcatccccttcaaagtctgtcgactgttacgtatacaaatctatatatcaaataaagacggcgccgtacgtgtgtat

SEQ ID NO: 17658 - DNA, 263 bp, Zea mays
  Clone ID: LIB3070-010-G2_FLI
ctcaaacggccgaaccgttgcttggattggagtgagaggagtgaccgtttagttagctcgagagagccgagagaacccaagaagcaagggcatggcttccttgcccgatcccacggtgtactacccgacgtcctccaacgccatcctgcgcgcgcatccgtccgccgccgccgcggcgtccaggggctcgttcggcccggtcttcgccgtgctcgcggtgatctccttcctcgccgtgtccgcctgcgtcgtcggcaggctgt

SEQ ID NO: 17659 - DNA, 318 bp, Zea mays
  Clone ID: LIB3070-010-G4_FLI
caaagctcggttgtaaggtgtccgcatgatgaccacatggattcagaagaattgcttgtttactcggccctcttcccgcactcctttgttcctttgctcatgtagtatagatgatagacttgaacaacatcaataaacgacattcaaaggccatgcagttagctcttcagtttgtctgctgtttgtttttcatggggacagcccgaaaggtcggtgaagcgttcaatgtttcgtgaagtgtccgaaaacagtcagtgttattactctgtagattccagctcgctcaaaactattcaaggccgatgacaagttgataac

SEQ ID NO: 17660 - DNA, 420 bp, Zea mays
  Clone ID: LIB3070-011-B9_FLI
tggaatctggatttcccctctatctgatggaatctggatttggtgccagtctgttttcctgtgattttgggataccagccccattccccttcatggagggtatgcgttgctgttggtcggcacactggaatggaacagatatagacagaaccttcaggttcataagcaaggagttgcgcttgaccgatctatggatctctctagatgcactgactaaggtgaattgaaagcggaactagacatgatgtttgaattcgagggtgaattagtatctgcaaaccaaaactggcagattgtttataccgacaacgagggtgatatgatgcttgtgggagatgacccgtgggagaatttgatgtggttgtgtatgatgtactttatattttggcatactatgcacaaaaacaaatgccttctatg

SEQ ID NO: 17661 - DNA, 531 bp, Zea mays
  Clone ID: LIB3070-012-A8_FLI
aacggcacgattctcctcctccgtccgcgtagctctcggtttcggcgatgtcggggcgcggcaagggcggcaaggggctgggcaagggcggcgccaagcgccaccgcaaggtgctgcgcgacaacatccagggcatcacgaagccggcgatccgtaggctggccaggaggggcggcgtcaagcgcatttctgggctcatctacgaggagacccgcggcgtgctcaagatcttcctcgagaacgtcatccgcgacgccgtcacctacaccgagcacgctcgccgcaagaccgtcaccgccatggatgtcgtctacgcgctcaagcgccagggccgcacgctctacggcttcggcggctaggccgcctccccttctgatgctttgatatgacggccgtggtcggttgtgtgtctagttggccggtctactgtagtttgttctgtatcttcgtttcgaggtgttccagtttctagcccatttggtgtaatattttcacagctattatcaatggaaagccctcggttctatcctc

SEQ ID NO: 17662 - DNA, 921 bp, Zea mays
  Clone ID: LIB3070-013-D7_FLI
tactcaccaagaggatcactggtaaggtttcaaaggaagaaactcctgatcttggaccttaatggtctgctagcagatataaatcaagattaccataatgcacacttggcacatgcaaaggttcgaaccaaattagttttcagaagaccatactgtgacgattttctgagattctgcttccagaattttgagctaggaatatggtcatcaaggaaaagggaaaatgttgaatcggttgttgatatccttatgaggggtcttaagcaatgcctactattttgttgggacatgtcttactgcactgttacagggtgcaaaacaattgacaacaaggacaaaccattagtgctgaaggaactaaaaagggtttggaataaggatgagccagacctcccatgggggcagggagagttttcaccttcaaatacattactggtggatgattcgccctacaaggctctgtgcaacccgccaaacactgcaatcttccccgaaccctacaattacatgaaccagagggatgattattccttgggacctggtggagatcttcgggtttatctgcagagaattgctgctgcagacaatgttcaaaattttgttcgggataacccatttggtcagaagtccatcacagagagtgatccaaactggaatttctatgtgaaaatagtcgataagatggagaagcaaatagttgatcaagtggaaacgaaaatagttgatgaagtggagaggtccttaggttaataggaacaaaggttcaatcaagagaaagttctgtatttgtttgtgttgattagcaggtgttttgcattgcgccagtgctatcatgtgtaatctaatttagtaattgttgtttcatagacaaaacatgatttgaagaatcttgataggttttgttgttccaaccgagggatg

SEQ ID NO: 17663 - DNA, 1253 bp, Zea mays
  Clone ID: LIB3070-013-E6_FLI
tgttaacgtactcatggagaacaaccacaaagactgttccaccttgttgagaccagtggatgcagaagattcattgagactgcataatatgtttcttccttttactttctggagttcacttttcactggcatgcttcaaattggggtcaagtactcacaagagacaattcgtactgatgcattatccataatgattctcattgtaaggacaacagatcccatagaagaacgccagaaattcggatttacttcagtaatgacgagattgcatctgctattgcagaaagagaacggattgcttgttaagaagcattctgtgcgtctacttttcttgcttctgaattgcccagtgatgttgaagttgctgtgtagtggaggcaaagacggctccaaacagatgggatcggaagcttgtgaaagtgatagatcacaagaagtcataagctcagttcttgtggatttatctgattgtttgacatgtggggaaacttgttctctggggattgagctttgcaggctcgtcatcattctgctagcttatatagcttccagtggcaaattgggatatgaggtgcttttagttccagtgagtgcccgtggtgccagttttttggagatgataatggaagtccttgcatcgcagatgcaatatgaaacacgagagttactaaaagaaagatgtttggtgatgagagaagctcttatcctgctaaaccggctggcatcacacgcaaactattcgaaaccaaccttggaagtgctgacgagaagcaagttatgcgcgacctggacgatcgatgttgcgaaccggctgccccatacgaggatggcaaatgatctcgcggagctggcccagaaattcaggtcgcgagtgtatgctttcatagaggagaaacccttgacaagcgacggtaccaatctgggcgcttctaataagagatgagatacccaggactggcgcagcctgaggtagcttgggtagtaatatggaaagcatattgctagcggctcgacaagtttagtttcttttttttttccttactgacactagggttttgtttaggagttagactggctttgctggggccagtcgctagcttttgctgttggtgtacagaggcgaatgctccctcgccatttttgagggggagggagaatgtagttgtactacggcaagtccttgggaacgtacatcataattgttgtttggacatcatctcatggctttggcattgaccatcgcagcttttttg

SEQ ID NO: 17664 - DNA, 650 bp, Zea mays
  Clone ID: LIB3070-013-F11_FLI
cactgatggataggagcaacgccaaagctggtgcttcagacgatgaacgtgagggggctcagcattgctcatgtaaaaagtcacctgcagatgtacagaagcaagaagctggaccacgagtctgctggagctggacacgatagagcagccatctactccggttctcaattctcatctcaattctctctcccctccgcctccccccacccccgcctccaaattttagtttagttttatctactccacagaagcatactgcacacgtacatagaaaacgccatggactacgtactgcatcatttccttaaccatcgtcgctgctcaattttggcagttttcaagcccatggatttgcacatgatgatgaggagaggagaccatcgcttccatgacatgtttctccatcgagctgccgctgccggctcggtcatctcctccccgctgctccacaacggggatttgttcgggtcacgggacgccgtctcgccggaggccagcaggctctacgcgctcctccaacgccggcagcagccttcctccacgcaaacgttcgccctcatgaactacagtagtagcctgatagatatgatgtacttaatcaaccaccagatcgaaatgaagaacaccatgcatgcatgcgcactgcactc

SEQ ID NO: 17665 - DNA, 956 bp, Zea mays
  Clone ID: LIB3070-013-F8_FLI
cgacgacgcgccgggggagacgtggcacatggtcttcagcaccgaaggcgagatcccgtatagagaggggcagtccatcggcatcatcgctgatggcgaagacaagaacggcaagccgcacaagctcaggctatactccatcgccagcagcgccctcggagatttcggcgactccaagacggtatcgctttgcgtgaagaggctagtctacaccaacgatcagggggagattgtcaaaggagtctgctcaaacttcctgtgtgacttgaaacctggcgccgatgtgaagatcacagggccagtgggcaaggagatgctcatgcccaaagaccccaatgcaacagtcatcatgctcgcaacggggaccggtattgctccgttccgctccttcttgtggaagatgttcctggaggagcacgaggactacaagttcagcggccttgcgtggctgttcttgggagtcccgacgagcgacagcctgctgtacaaggaggagctggagaagatgaaggagatggcgccggacaacttccggctggacttcgcggtgagccgggagcagacgaacgcggcgggggagaagatgtacatccagacgcgcatggcggagtacagggaggagctgtgggagctgctgaagaaggacaacacctacgtctacatgtgcgggctcaagggcatggagaagggcatcgacgacatcatgctcaaccttgcagccaaggacgggatcgactggatgcagtacaagaagcagctcaagaagggcgagcaatggaacgtcgaggtctactgatccatccttccgttgacgactgcggagatcaatcaaatcgttggctcgtcgccgcgcccgagtctgtcagactcaggtctctatctaccgatgtacatataccttacgatgatgaaagacattctctatctatcaatgtacatacatacatacataactt

SEQ ID NO: 17666 - DNA, 238 bp, Zea mays
  Clone ID: LIB3070-013-G9_FLI
aggaaattggattaaacagtgctctggcgaggggacatgaactgggagttcttgtttccttgctttatgtcgattaaggccccgtttcaatctcacgggataaactttagcttcctgctaaactttagctatatgaattgaagtgctaaagtttagtttcaattaccaccattagctctcttgtttagattataaatggctaaaagtagctaaaaaaagctgctaaagtttatctcgc

SEQ ID NO: 17667 - DNA, 1589 bp, Zea mays
  Clone ID: LIB3070-014-A5_FLI
cagatacccttccaaagtggttcagttgatatcgttactttcaaggggtcaaaactgaaaacgattaaagaagtctggatcggtcttgaatcaggttcatggagattagatggtttgagcttgaaagtaatacatggaccagttggtcagcctaaagaaataaatggaactccagaacagaagttcagcggtttgcagtacacttttgagaacgtaaatgtgttccttggagatgatggagcttcagtagctgaagcaaggccgacggctatcactgacctctcaggagtcggcctttctgatcttcaacaagggctgttatcctcaagaagcaaagctttaagcattaaggaagtaagagaggatgggttgagagagtacgccgaccttaaacaatctctgctgctctatgacgcatctatagtgataaccggcttctctaccttcatcttggcttcaaatgacagcgctgcctattcgttcctgataggtggcattggagggttcctgtacctgttgctgctccaaagatcggttgatggtttgcctgtgatcggttcaccttcagaagctggcggtgcacagccctcggtaaaaagtttcagcggtgtaaggaggccatggttgatactatcactagtactggttgcaggtgcagttgcactgaagtatggtgctggaggcgacagctttgcgctcacacccaccgacctctttgttggcactgcagggttcctagcaaacaaggttgctgttcttcttgcagcgttcatgcctatgctaagtgactcaaagagtgaagatggatctggtgacaacagttaattggacttctttaaaaatatgttagtaatagtttcctatagaagatctgtattcaaggctggaacggaattagctgcaaagggcaagccctagtttctgaactggaaaaaagatccctctcatcttggtgactgggtcatccttgcaagggttcaattcacagcaagagttcaagtgttagacatggaggacagctgtgtatcattatatcaagaagaagaagaagaacaaaagtctaggatactttgaagcacccttagaaaggcatgaccagtacagcagaagaaaaacagagacacaaaaactaaggacatggccataaactatggagctttttggctttcgccatacagcacaacttgatttcatcttagaaacttgagttgtagtatagtatactcacatatcggacactgaactgttaagatgatataccgactacagctttgttgtatgtaaaaatatgacatttgtgaggttaaatacacagtaactatcgaaacaaaatgcttggcgttgctccaaatcagcatcgtcatctgagtattttcttgaactggaggctctagagcgattgtagattcactcaacacaacattagcagtatacgactgaaaagttcctgtcaagttccgctgaacagtaattattattttttaacttattatcttatacagatctgagatgaacaccatttcctaggcagaattatcattatattcaattgtaagtattttaccagagtccatagatctagtcaccgc

SEQ ID NO: 17668 - DNA, 845 bp, Zea mays
  Clone ID: LIB3070-014-C11_FLI
ccaaaaagcgttgccccgccgcgcagaggaagaagagagcagaggaggatggctcgtacgaagcagaccgcccgcaagtccacgggaggcaaggccccccgcaagcagctcgccaccaaggcggcgaggaagtcggcgccgacgaccggcggcgtgaagaagccccacaggtacaggcccggaaccgtggcgctgcgcgagatccgcaagtaccagaagagcacggagctgctgatccgcaagctgcccttccagcgcctggtgcgcgagatcgcgcaggacttcaagacagacctccggttccagagccacgccgtgctggcgctccaggaggccgccgaggcctacctcgtcggcctcttcgaggacaccaacctctgcgccatccacgccaagcgcgtcaccatcatgcccaaggacatccagctcgcccgccgcatccgtggcgagcgcgcgtagccatcatctccgaggatctgatgaatgtctagttaccaaacaaataggccgtattagcgtcgttgttctgtattcgttattttggattcggttgcagggaaaaacagctttactgatcttatttgtgatctctggtggtcgcttcgcttctaagcgatcatctgtggtgctaaattcgtgctggttattctgttatggtcccgtgtttggtctggcggcctggtacatctcaagtgcccgacggaagttggccgttctgcatcatgtcggtttactgcgtcacagctccagctcactaccatccttctcttccgagatgctaatagttggccctctatttcattgagataatgttaatagttcgacgctgttgctggctgtctaat

SEQ ID NO: 17669 - DNA, 526 bp, Zea mays
  Clone ID: LIB3070-014-C3_FLI
cgaggagtgcgacgcgacttgggagccccagaactgctgggcctacgacgatggcaacaggctctccctcgcgctcgtcagcagttcctcaggttccatgatccggtcgaagcggcagttcgtgtacgggaccgtgtccaccatgatccagcttgtccccggcgactccgccggcaccgtcaccacctactatacgtcgtcgctgggcgacaaccacgacgagatcgacttcgagttcctgggcaacgtgagcgggcagccctacaccatccacaccaacgtgtacgctgccggcgtgggcaacaaggagatgcagttcaagccatggttcgaccccaccgccgactaccacaactacaccatctcctggactccctgcatgatcgcgtggtacgtcgacggcgtccccatccgcgtgttccgcaactacgcggcgagccacggcgtggcgttcccgacgagccagcccatgtacgcctactctagcatctgggcggcggaggactgggccacgcagggcggccgc

SEQ ID NO: 17670 - DNA, 758 bp, Zea mays
  Clone ID: LIB3070-014-C4_FLI
aatcgaccgagcgaattcaccacagcttctcaccaccgctaccttcgatggcacccaaggcggacaagaagccggcggcgaagaagcctgcagaggaggagcccgcgacagagaaggcggagaaggctccggcggggaagaagcccaaggccgagaagcgcctcccggcgggcaagtccgccggtaaggagggcggcgagggcaagaaggggaaaaagaaagcgaagaagtccgtggagacctacaagatctacatcttcaaggtgctgaagcaggtgcaccccgacatcggcatctcgtccaaggccatgtccatcatgaactccttcatcaacgacatcttcgagaagctcgcggccgagtccgccaagctggcgcgctataacaagaagcccaccgtcacctcccgcgagatccagacctcggtgcgcctcgtcctccccggtgagcttgccaagcacgccgtctccgagggcaccaaggccgtcaccaagttcacttcttcttaggctcatagtactaggctgggtggtgttggtagacgtggctcaatttatctggtaggggtagtgatggatgatatgatctgcgtctatttgagctgttaagactgatgaacattgttccacgtcacgttgtgtttgatgggcattgttccagatcacgttgttaagactgcagaactgtgtctgacatggaacaagtatgatacttgaaatttctgtgagtgcattgaaacgtgaaatctgcagcccttg

SEQ ID NO: 17671 - DNA, 348 bp, Zea mays
  Clone ID: LIB3070-014-F10_FLI
ggacactggattgattctctttcagttcttccatcatatattagtggaccagatgcaaccaaaattttatctatctgtccatctctgcagaaggctatcaagtcttctaaagcagtggtatttggagagtcatgtgtcttcagtaacatgtttattaagggtatttttgaccgacttgagaaagatatggactcgtttggtattagacttagtgttggtcaaggaagacctgtgaatacgaatctgggtagtgagcacaagacagggtctggtcagcactcggacacaaaagatcttggtggtaatggcactagcagtaccggtgcttcatcagacagagggtcaaag

SEQ ID NO: 17672 - DNA, 490 bp, Zea mays
  Clone ID: LIB3070-014-F12_FLI
ccacagcatcacgtccactcattagcaaggtagcccgtgctgcacctgcctgccagccgcagctgtcctgcctttgccttcccatagcatagccatggacatttggaagtccaaggtgttgcccaagatcaagctcgtcttcgtcaagagcgccggctacggcggtggcaaccgtggcggcggctacggcaactccgacgggaactggaggaactgagcggtggggcccgcgcggccaagttatcctgttcgctaccgtgatgtttaccctagtccagagggtttatcttcgttcgtctcgtttgttgttgcccatctgtgtttttgattgcaaggtcgctctgtgtcagttgttagtgctgtgttcatcctcggctccagcagacccatgcatcaaccagcatggactgtggatcgatggatgctgttactcctgtcaggatttgttctaagttaatcctaaggaaaaaatggtgcttcttggtgctgc

SEQ ID NO: 17673 - DNA, 468 bp, Zea mays
  Clone ID: LIB3070-015-A3_FLI
gaattcggttcgaggctcgggactgtgaagtggttcaacggaaccaagggcttcggtttcatcacccccgacgacggtagcgaggacctattcgtccaccagtcctccatcaagtccgacggctaccgcagtcttaacgacggcgatgccgtcgaatacaccgtcggcagcggcaacgacggccgcgccaaggccctcgatgtcaccgcgcccggcggcggcccgcttgccggcggggaacgtcccgacggcggcaacggcggtgggcgaggcggatacggcggcggcgaccgcggttacggcggcggcggtgaccgcggctacgggggaggaggcgaccgtggctacggcggcggcgaccgtggttacggtggaggtggcgaccgcggctacggcggcgaccgtggctacgggggaggcggcggctatggcggtgggtacggtggaggcggcggtggaggcggccgc

SEQ ID NO: 17674 - DNA, 673 bp, Zea mays
  Clone ID: LIB3070-015-F5_FLI
gtcccccgacatggtgtccgtgctcctcgaccaccacgccgaccccagcgcccggacgctggacggcgtcaccccgctcgacgtgctccgcggcctcacctccgagttcctcttcaggggcgccgtgccggggctcacgcacatcgagcccaacaagctgaggctctgccttgagctcgtgcagtccgcggtgatggtgaccacgcgcgacgacgacgccggggcagggggaggaggaagcgatgccgccgacgacagcttggtgagcctcaccatgaactccacgctcatgtaccagggccaggagatagcgggggcgatggccggcgaggccaggaaagggagcggcggcggccgagggagcccgtccaacttgtacttccccactgccttcccataataagtatttagtttccttcatcaagcaagcaatgccttttgttttcatacatatatgcatccatccatccaaagatgatggatcttcaatttcgttgtattagatttttaatctgcattgtgatgtgaggatgcatgatggtggtgtggctagctagatactaatgcaagaatttcatggtatttgatgtggattaattgttccatgcatcttagtacatgtaaatgatccgtctattggtctgggcagcaactgttttactttactttgttc

SEQ ID NO: 17675 - DNA, 525 bp, Zea mays
  Clone ID: LIB3070-016-G3_FLI
ctccctccctccctctgccccgggtttccagggaaacccacccccagatccaaatccagcgaagcgacagagatcaaggatggagctggaggtgggtgcgccttcgccggcgaggtacctggtgggggcagcgatcatgatggccggcgtggtgctcccgctggcgtacatgatcttccgcagcaagcgttcgccttcctccgcctccgccgcggggccctcctccttctccaagcagacgtaggaacaaagggctcatctgatctgagcgagtgggtgaatcgatcgccttcccctgatgcttgtcattctgtctgttttggcaccgcgagatcctccaactgcttctcgagactgggcatcatcacgtcaaatactagctgattagtagtcagttccttttgtaccttgtgtagatcagatcgattgcttatttggctgatttgatacaattataaacaatgggtttacttttgagtgcactacttacaagcatcattcatacggatttcagtttacctaaac

SEQ ID NO: 17676 - DNA, 635 bp, Glycine max
  Clone ID: LIB3072-012-B8_FLI
gatcccagagacagtgacagaaataaattgaaaacggagaaagatgaacggcgacgacgacaagggtttgctgtggaagctcccagtggtgaagtccgaccactttggcaaggtgggccccgccttcggcatcggtgccggctgcggcctcggtttcggccttggccttctcggaggagtgggtgttggccctggaattcctggattccaagttggttttggatttggtgctggatgtggtgttggtttagggtttggctatggtgtggggaaaggaattgcacaagatgacaacaagagatactctaatgttggaaatcctttccgtggttctagaagcatcatttctgaggatgatattactgcacttgtggacgaccttgtcattaatactaaaaagcttatcaaggcaacatcaaaagaaattgacaagtggagaagataattgaagagaccattttaagtacagttgtataaagaaaaagctctgtcaatattttccattatttatattaaatcaaggcaaactcagcttattcagactcgtaacagtatacatgagatactaaattgtcatgttaatacatagcgggggctgttatttggccttaattgaagttcgactccacaatcgc

SEQ ID NO: 17677 - DNA, 546 bp, Glycine max
  Clone ID: LIB3072-014-H11_FLI
gacactgattgagagaaaaataatggaggcttacactaaggttgtttgcattcttggacttttaatttttgtaagcatttcagatattcatagagtggagggtgcaggggaatgtgggaggtctactactccagataatgaagcaataaagcttattccttgtgtctctgccgcaaaagatgaaaatgttaaagttactaagaattgctgtgctcagatcgagaaacttggcaagaaccctagttgtctgtgtgctgttatgctctccaacacagcaaaaatgtctggagccgatcctaaggttgccataaccatcccaaaacgctgcaaccttgctaatcgccctgttggttacaagtgtggaccttacactcttccttaagatagtactgaggacaaggagggatttgggcgtgaaggcacaaaagctgttggctacaactgtgactacaaaactatgttttattgtccttgaaacaatttgatcaataatggcaagtagctatatggtgttcttcctgaataaaactagaaattttaatgttt

SEQ ID NO: 17678 - DNA, 420 bp, Glycine max
  Clone ID: LIB3072-018-B1_FLI
cagaggactgcgatggaattgcttgaacagtacatgcaattcaaacaagaggcagaaaaagatggcaagaagaacaagaaagagaaggatccattgaaaccaaagcaccccatgtcagcttatttcttgttcactaatgataggcgagcagctcttgctgccgagaacaagaatttcttggaggttccaaaaatcacatccgaagagtggaaaagcatgacagaagaacaaaaaagaccctatgaagagatggcaaagaaaaataaggagcaatatgccctagaaatggaggcttataaacagaagaaagatgaggaggctgcccatttcatgaaggaagaggaggagcagatgaaacttcaaaaacaagaagcattgcaactgcttaagaagaaggagaaaactgaaaatataatcaag

SEQ ID NO: 17679 - DNA, 669 bp, Glycine max
  Clone ID: LIB3072-044-H10_FLI
gaggatttaaacaactttgccgaagatttaaagcaagagggtaaaatagcaccagatgaaccagcaattctgcccccgttgcctatagtccctaaacctgaaaagcgtaaacccatatatgtaactcctcaatcaaagagaattgattacagggatagagattgggatagggagcgtgatagggactttgagctgatgcctccaccaggaagtcataaaaaggagtatgctaccccgatggatgttgaccaacccattgatccaaatgaaccgacatactgtgtttgtcatcaggtatcttttggagatatgattgcttgtgacaatgaaaattgccaaggaggtgaatggttccactattcgtgcgttgggctaacgcaagagacaaggttcaagggaaagtggtactgtccgacttgcatattactcccacaatgtcaacgatgaatctttgcacgaactaaattacattcataaatgaccactgtttcaatagaattgtcactttttagtgaattatttgtcttctatatcgcttggtcatttgtgcttggcaaagaggccaagtgggctctatcaggcctcatgtataaagtcttctaagatttgagagaagtgatttcagatatgaattttggagaaagttaattacatgtgaaatgcagaagt

SEQ ID NO: 17680 - DNA, 868 bp, Glycine max
  Clone ID: LIB3072-051-G4_FLI
tgaacttgtagatgaatttgaagattcagaagctataactccaccagaattagttgtgctgcccctgaatgccacggtggctgagcttaagaatcaagcagcaaatgcttttcaagatgtatatctaaggttcagaagacttcaagttgatgggctacatggttatagcggtgtcgacgattccacccaggtcaagctcttgttaggatcgagagatgtagtttgtgtccgaggaagatgcatcgggaagaatgggttgagcaagttccgaatggaaaggggacttgagaggtggactgtagattgcagctgcggggccaaggacgatgatggagagagaatgttggcgtgtgatatatgtggagtgtggcgacacaccaggtgttctgacatccatgatactgatcctgttccagctcgttttgtttgcctgaaatgccaaaactgtgaatcaaaactcaaatgtagtgggcactgcaaagatgagaccgtgactaacgttagtggtagtagttgcttcagaaacggcttgccagtgccatctgatgttatttgattagtcagattagatgtgtatgaaaagctcctttttttttgctttggcctgaaagaacatgtacataacacagataggccttagaggtagtaggttcagggatggggcatgtcttgttcatatttcagcaggttctaccttcggttgtttattgtgtgtatatatagtactaactgaaagatgtggacgggggtagtgagagtattcaactttcttttcttctgttcaaaaggagcttcttggtaaatttagagcgaattctaatgattatgggtcttctttttatgctaaaagtgattatggtcttctgac

SEQ ID NO: 17681 - DNA, 1011 bp, Glycine max
  Clone ID: LIB3072-056-H1_FLI
gagttccaagtcgcaaacaaagtaacactagaactcacaaaggacagaagaaacgcgaatgccaggagaactccaattaccacccgggttcagattccaccccactgacgatgagcttgtgaatcactacttatgtagaaagtgtgctgcacaaaccattgctgttcccatcatcaaagaaatcgatttgtacaagtttgatccatggcagcttccagagatggctctttacggtgagaaagagtggtactttttctctcctcgagaccgaaaatacccaaacggttcgagaccgaaccgggctgccggaagcgggtactggaaggctaccggagctgacaaaccgatcggaaaaccgaaagcccttggaatcaagaaggccctcgtgttctacgcgggcaaagccccaaagggagtgaagaccaattggatcatgcacgaatatcgcttagccaacgtcgacagatccgcctcaaaaaaaaacaccaccaccaacaacttgaggcttgatgattgggttttgtgccgaatttacaacaagaaagggaagattgagaagtacaatggtgttgcggtggtggatcagaaagtggccaagttatcagaagaggaggttcagttccagcacgagaccaagcctcagatcaagatgtacggccacgatgatttcaggaacgaccaattgtacatggacacgtcggattcggggcccaggttgcacacggactccagctgctccgagcacgtggtttcgcccgatggcacgtgcgagaaggaggtgcagagcgagcccaagtggaatgatcttgagttgggccccgacccagccttgggcttcgattttaatttcatggacctgacctcagatgacgcttttgcccctcaggttcaataccaaatcaaccatctctcaccgtggcaagaaatgttcacgtacctaccaaagacattttgatttttttagggtcaatgggaccccaagaaggaaatacgggtctcacatttattttt

SEQ ID NO: 17682 - DNA, 608 bp, Glycine max
  Clone ID: LIB3072-059-E6_FLI
cacagaaatcaatgctcagtattatcaacaagaatctgctaagctgcgacagcaaatacagatgctgcaaaattctaacaggcacctgatgggtgatgccttgagcacactgactgtgaaggaacttaagcagttggagaatagacttgaaagaggaatcactagaatcagatctaagaaacatgagatgctattggctgaaattgaatactttcagaaaagggagattgagctggaaaatgaaaatctttgcctccggactaagataactgacgttgagaggattcagcaagtaaacatggtttctggaccagaactgaatgtcattcaggcattagcttcccgtaacttcttcaatccaaacatgttggacggtggaactgtttaccctcagacagataagaagattcttcatcttgggtgatcaataatatgatcttcgctatagcctataactatctatccaattagccggaggctaaatgcattattattactactcttttgattgctcattaactagaccaaatgatctatatacattacatatgaattatggattatggatacttatgtttaatgattgtatgatatcataacaatatgct

SEQ ID NO: 17683 - DNA, 455 bp, Glycine max
  Clone ID: LIB3073-009-B12_FLI
gatccttaataagtcagaactttgtcacaactttttcccatcactttgtggaaagatattcattctaagggaaaaatgacagaggagcaatccaaaaaggtggctgagactgagagttttccctctaatcctgcacctgaacctgttgttgttccaaaggaggatgtggcagaggagaaatctgtaattccacaaccctctccctctcctgctgatgagtccaaagctcttgtcatagttgagaagactagtgaagttgctgaagagaaaccgattgaggggtctgtgaaccgagatgctgtgcttgcaagagttgcaaccgagaagaggctgccactaatcaaagcatgggaagaaagtgaaaagtccaaagcagataacaagtctcacaaaaagctttcagccatttcagcatgggaaaacagcaagaaagctgcagcggaggcagaattgag

SEQ ID NO: 17684 - DNA, 598 bp, Glycine max
  Clone ID: LIB3073-010-D10_FLI
gataccaaaaacaaaacaagccaagtgaaagagagaagaaaagtcaaagacaatgtcagggatcattcacaagattgaggagacccttcatgtgggaggccacaagaaggaggaggagcacaagggtgagcagcaccatggtggagaatacaaaggggagcatcatggtgaacacagtactgaatacaaaggagagcatcatgttggtgagcacaagccggagcaccatggaggagaagagcacaaagaggggttcctagacaagatcaaggacaagatccacggcgaggagggtggcaccgctgagggcgagaagaagaagaagaagaaggagaagaagaagcatgaacatggccatgacagcagcagcagcagtgacagtgattagattatctcccactgctgcatcacctatatatcttataaggtgtatgggaccatagtagcgagggctgtgtctttctctttttttccttcttgtcatttatatttatgagcgagagaaatagtgctgtggtttcgttggtttgtaacccctctgctttggttatgctggattgtatattatccttaaagaaataaaagattaaattatcag

SEQ ID NO: 17685 - DNA, 831 bp, Glycine max
  Clone ID: LIB3073-012-B2_FLI
agggaaagaaagaaagaaagaaggaaccgatagaagcaaaaatggcgatgttagcatcaccaccatctgtgaaactctcgctctcattccccctgtcagcttccaaacccaaccctcgcagactcttcaccatccgagccgccgagcccgaaaccccaccctccggttcggaccaatcccaggccgaaccggacccctccgacgacaccttcgacgaccgcatcaaccagctccgcctccggtaccgcagcggcacggggaagaaggcggagctccgaaagaacaaaaaatcaaagaaaggaacctccggatccggttcgggcgtgttcctgccaccggtgccgctgaaggaaccggtctccggcggcgtaaaggtggagctagggttcagccagtacagcgagcgattgaacggtcgcattgcgattttaggtctcacggcgctgttgctggtggagctcgccaccgggaagggtgtcattaactaccactcgccggctattattctgattcagatctatttcgtggccgcggttggagctgtctttgttaagtatgagaaggagaagatcagcgtttggccccaaactgattcttcaactaacaaataatgaaatcactttcaactaccgagtttacttgttatagcttgtggagctaaacgtgcttctatttttggctaatatattgtaaattattattctgttgaaatgaatgttgctttttggatatgatatgataagatactactcattattgtttcagattgagagagttcagggtgtggttgttttaccgtttcaatccactggcaggatgcaccattttacg

SEQ ID NO: 17686 - DNA, 797 bp, Glycine max
  Clone ID: LIB3073-016-G1_FLI
ggtaaaaggtgagggtgacccgtgattcgtgaacacaaacaccatcgccatgggcttcaatattctgagaaccacttccatctccactcctatctcttcctccaaatccaaacccattttctcaactcttcttcgttcttctccttccaccattttccccccaaagtccgttactcccaccactcttttcgtttctgccacccccttcttcactctccatcccaagcttggttttcgtggtgggattgtggccatggccgcacctggctctctccgcaaatccgaggaagagtggcgcgcaattctctcccctgaacagtttcggatcctcaggcaaaagggcaccgagttccctggaacaggagagtatgacaagttctatgaagagggagtttacaactgtgctggttgtgggactccactctacaggtccataacaaaattcaattctggttgtggctggccagccttctatgaggggattcccggagccataaatcgcaatccggatcctgatgggatgaggacagaaataacgtgtgctgcttgtgggggacatctaggtcacgtctttaaaggagaaggatttccaacacccactaacgaacgccattgtgtcaatagcatttcgctgaaatttgcgccagccaattcttattcttaataaaattgagtctgcagtttggacgtgactacttaagtacccaacatcggtaaaaaaattatgcaatgtacttatattatgaatgaagttaaaaaaaaatgatggctaaataacaatgttgataatttgtccc

SEQ ID NO: 17687 - DNA, 622 bp, Glycine max
  Clone ID: LIB3073-018-G7_FLI
gatcgcatttcatagcactcaccctcattaccaacacgaaagcatagccaaaaccttttttcgaagtctctgattttcctaatggctccggcaaaggcagagaagaagccggcggagaagaagccagcggcggagaaggcaccggcggagaagaagccgaaggcggagaagaagatctcgaaggaaggagggagcgagaagaagaagaagcgcacgaagaagagcgtggagacctacaagatctacatcttcaaggtcctcaagcaggttcaccccgacattggtatttccagcaaggccatgggcatcatgaacagcttcatcaacgacatcttcgagaagctcgcccaggaagcgtcgcgtttggctcgctacaacaagaagcccaccatcacctcgagggagatccagaccgccgtgcgtctcgtgctccctggtgaattggccaaacacgccgtttctgaagggaccaaggcggttaccaagtttaccagctcttgaattagggtttgttaggcggttgtgttgcagatctagggttttctgtggatttcttttcttaaaaattagtttgtagatgtaatgatctgaacagttgttaatggaaggtttcgtttgaatc

SEQ ID NO: 17688 - DNA, 696 bp, Glycine max
  Clone ID: LIB3073-019-D1_FLI
gaccacacacccttcttcatctctctttgatacccttttgttctttttggtgctttaatttgcactagcaagggggttggttttatttctgtttgcttgcaacaatggctgtggctaataagttactttctgttttgatcattgccctcattgccatttccatgcttcaaacagtggttatggcatctcatggacatggaggccaccactacaatgacaagaaaaaatatggacctggcagtctcaaaagcttccaatgcccatcacaatgctcaaggaggtgtggcaagacccagtaccacaagccctgcatgtttttctgtcagaagtgttgtaggaagtgcctatatgtgccaccggggtattatgggaacaaagcagtgtgcccttgctacaacaactggaagaccaaggaaggaggacccaaatgcccttaataaccttatgctatgttcttcatcaaattaacaaagatataatatagctttaatttattatatccatatcatataattttcttggtcctttctatgtcttaattaaccaaaaaatgtatgtccattttggtcttagtaatactttgttgtattgaagatgccttttggagatagtgtgtgtgtgggctcctctgcatcataccactccttattatggcattgttggcttttaaatgaagtgtgtctaatactgttgctg

SEQ ID NO: 17689 - DNA, 784 bp, Glycine max
  Clone ID: LIB3073-020-A10_FLI
ggaggcatttgaaaaagaaaagccttccatagcctcccaaaaaatgaagagcactaccttgttcgctctctttctactttgtgccctcacttcatcatacctaccttcagccaccgctgatgtggtgctggacatggatggtaatcctcttggaaacggttggcaaaatgaatatttcatgttgccagttacaagaggaagcggtggtggaatagcactagctgcaactggaaatgaaagatgccctgtaactgtcgtgcaatctcacattgagcgcgataaggggtatgcggcaacttttagagctccattccacctcctttttatcgcagaaggccttcctttgacgatttcattcgataactttgaagtgttaccgcggtgtgtccccactcctctttggtgggctattgtggatggtctagctgaaggacccgctgttaaaattgagtatagagatatagtagaaggttggtttaaaattcagaaagcttaccctctcggctataagcttttgttctgtccagtgcctcttgaggatagcacatgtggggatattgggatttatactgatgataagggattcaggcgtttggtggtgactaagaacaaaccattggtggttcagtttcagaaatttgatccactggccaagaataatcttgtgcttcctgccagtgagtgagagacaattagtgcatgactaaatcaatgctttggttgtaattaataaattattttctcactaaataatataatcaaagcttattatccttcatttgcg

SEQ ID NO: 17690 - DNA, 788 bp, Glycine max
  Clone ID: LIB3073-024-E3_FLI
gacacaactgaacaagataagctatccatagcagccaaagaaatgaagagtaccttgttcgccctctttctactttgtgccctcacctcttacctaccttcagccaccgctggtgatgtggtcgacactgatggtaatcctgttgaaaatggaggcacatactttgtgttgccaactataatattaaacggcggtggaatagaatatgccacatttggaaatgaaacttgccctgtcactgttgcgcaatctcgcgatcagttctgcaagggctttccgataaccatttcatccccagcccgaatccgtcacatcagcgaaggccttagtttgaacattgggttcactttcgcatccccgtgttcccccgcttctgagtggaccattgtgaaggatcaaccagaaggactcgctgttaaactcactgggtttaaaaatacagtgcccggtgtgtttacattgaagagagttcccgccgatgaaattatcggctacaacatcttgttctgtcctcttgataataacccatgtgggtatgttgcggttcatttcgaccaattccgaaacaggcgtttggtggtgtctgaggttcaggaggatgggttatgggttatgtttcagaaactttcatatgcatcaggattaactctttcatctgcatgaagcaccccttgccctcaaaagtcatatatgtactttcacgtagtgagagacatgagtgagactaaataaatgcttcatgctgtattcaattattgcaagtctaaataaaataatcgaagtttatg

SEQ ID NO: 17691 - DNA, 999 bp, Glycine max
  Clone ID: LIB3074-012-C7_FLI
gatccacacgctcacaataacacactgtcaccgttccgttccgttttcctctgtttttttttcttctttctttcaaatccccgcttcgtggaaatcccgaaccagaaaccatgcttctccgaaccgctgctgcttctgcttcgtccctctccctcttcagcccgaacgccgaacctccccgttcggttcccgctcgtggattggtggttcgcgcagcgaaaggatccacgaaccaccgcgccctgaccggagtgatttttgaaccgttcgaagaggtgaagaaggagctcgatcccgttcccaccgttccgcaagcttctctcgcgcgccaaaaatacgttgacgaatctgagtccgccgttaacgaacaaatcaatgtggagtataacgtttcgtacgtttaccatgccatgtttgcgtacttcgatagggacaacgttgcgctgagaggacttgccaagttttttaaggaatcgagtgaagaagaaagagagcatgctgagaaattgatggagtatcagaacaaacgtggtggaaaagtgaagttgcagtcaattgtgatgccgctttctgattttgatcatgcagataagggagatgcgctgcacgcaatggaactcgctctgtcattagagaagctaaccaacgagaagctccttaacttgcacagtgttgccacaaagaatggtgacgtgcagttggctgacttcgtggaaactgagtatctgggtgaacaggtggaagccatcaaaagaatatccgagtatgttgctcagctcagaagagttggcaaaggacatggtgtttggcactttgatcagatactcctccacgagggaggagatgcagcttgatgattattactacattacccccctttctattattattttgtatcttgctcatctaggtggctttctagtcttttgctagaaggtggaactgaactatatggatgaataaaataaatgtggactggtttcggtcctctcgtagatc

SEQ ID NO: 17692 - DNA, 758 bp, Glycine max
  Clone ID: LIB3074-018-D10_FLI
ataaccaagaagataattcaaaaaagaagagaccaagagagagagagagagatggggcgcaagaacacaattttcttggcattggttgttactttgatcactaaggagacaatggcagaacgacatatagttggtggaagccaaggttgggatgaatcaacagacttcaattcttgggtttcaggccaaacatttaaggttggcgatcaacttgttttcaagtactcttctttgcatagtgtggttgaactaggtagtgagagtgagtacaagaattgtgatcttggcaatgcagtgaactcaatgagcagtggcaatgatgttgtgaagctgaacaagcctggcacacgttactttgcatgtggtacaatgggccattgcgatcaaggcatgaaggtgaagatcacaacagtgtctggctctgagacctcttcccctgcatcatcatcttcttcttcatctaattcatcttcggcctcacaatgtctcgtttatcttgtgctcattgttggattgttgattgcctctcttcttaactaggtttggtccatgatttatgaagtttggccatggatttcattgcctatgttgaaataatagtttaataagagtggtcatgtgaaatttcttttaatcaatttggaaatgttattcatagaatgtcaatagggttggacttttggtcatcttgttattttgcttttgtcggagaaaaattaagaaattatatcatagaaatatgtaagatatacagtttt

SEQ ID NO: 17693 - DNA, 644 bp, Glycine max
  Clone ID: LIB3074-030-C2_FLI
ctaactccaacacacaccacactttctcccccttctgtcgtcagaagacgacagaagggagaaaaaggaatcggagatggaacagttagctatggaatggatgatggtgacgacatttacatgcgctcttggactggaaccattattggcccccataatactgtacatgaaggaagaatttatcaattgaagttgttttgtgataaagactacccagaaaagcccccaagtgttcggtttcattcacgaatcaatatgacttgtgttaatcatgaaactggagtggttgaatcaaagaaatttggtcttcttgcaaattggcaacggaggtttaccatggaagatatactgacccagctgaagaaggaaatggcggcttcacataaccgcaagcttgtccaacctcctgaaggtactcactattagtgtccaagatcataccgatattggatcatattgcatttgcagtatgcaatatatagtatgtattactcttgatccttctaaattcaagaacataatggggaatgctcaaaagagcttcatctttacctccattgagttgttttgttgcaatacattttcaactgtgttgaagggatgctctttgatttgtcctaattattgaaagcaactcttaaagc

SEQ ID NO: 17694 - DNA, 1162 bp, Glycine max
  Clone ID: LIB3074-031-B9_FLI
ggaggatatttcaaaagggtaattggttgtaatagcaaaaagcaaaggaaggatggggaacacgttctgcttgttctgtggttgcgttgctcaatccagcgtcggcgtcgtcgaacagtggggtcgcttccaccgcctcgcccaacccggcttccactttttcaaccctctcgccggcgaatgcctctccggtatcctctccaccaggatctcctccctcgatgtccgcatcgaaaccaaaaccaaggacaatgtgtttgtgcagttgctgtgttcgattcaataccgagtgattaaggaaaacgctgatgatgctttctatgagttgcaaaaccctcaggagcagatccaggcttatgtttttgatgtgactcgtgctattgttccgagaatgaacttggacgagctgtttgagcagaagggtgaggttgccaaagctgtcttggaggaacttgaaaaggtgatgggagaatatggatatagtatagagcacatactcatggttgatattatacctgatcctgctgtgcgtaaggcaatgaatgagatcaatgcagctcaaaggatgcaacttgctagtcagtacaaaggagaagctgaaaagattttgctagttaaaaaagcagaggccgaagctgaagccaagtatttgggtggggttggtgtagcaaggcagcgacaagctatcacagatggtttgagagagaacatcctcaatttctctcacaaggtagaaggcactaacgctaaggaggtgatggatcttatcatgattactcagtactttgacacaatcaaagaccttgggaattcatcaaagaataccactgtttttataccccatggacctggccacgttagggatattggtgagcagatacgcaatggactgatggaagcagccagtgctcaagtaaatgtggaggagtgattttgtaatattgccttagaaagtatatctctctctgtcacacacacacacacaatgatattctagttttattacttgtgtatgtaatatgtttctgctaaattttgtggaaggaaagttttgttcagttggaagttgtaatataagatgtttttcagtcgtattaaataatctttctagtcatgctatatgtcagaaattcaaaagatgatatgcaatttgctttatagc

SEQ ID NO: 17695 - DNA, 685 bp, Glycine max
  Clone ID: LIB3074-036-C1_FLI
gatctaagaatggctacttttcctactcttcatggcctgcacaaccctcttcctcgatctcaattcctaggccaagatcaccctctcactcaccaattccctctcaaacaacaagtgcatcacaaaacagcaccaactcatgaagttctaatgccacgtgctgcaaagttcaacatattggaaatgatgggagggagaggactatgcaacggggaaaagggtcttcagcaagagctgaaaaggcaagttgttgttccacaatcatcaatatcatcacaagaagaagcaccaagtggtgaaaaagaggagcaagaaggtgaaggtggtgatgatgatgaaggaagtgttaaggtaccagaagatggttttgagaaggaaatgatggggctaacagggggctttcctgggggtgagaaagggttgaaaaagtttattgagaaaaaacaaccctcctacaaaagcaactaataatgttgtctccctctcattttgaaagaggccattgtgaagaatattcaaaggaaattaatgttcatttttatttgatgttatatatctgtgcccttctgatttttgacaattcaaacttggatgaggtttgttttcttaagtcttatctcccccttttctgatgagtctcagaattttgtatggagggtttaattaaatgttttcctttcaattc

SEQ ID NO: 17696 - DNA, 658 bp, Glycine max
  Clone ID: LIB3074-040-B2_FLI
gaccgcaaactctctctgtaaagtgcaaagcctctattttttcttgtgaatttgaaggacgatgagttccacagaggtcgcagccacaacgaagaagggtggaagagggaaacccaagaccacaaagtccgtttcccgttcctccaaagccggccttcagttccccgtcggccgcgtcgctcgctacctcaaggccggtcgctatgcccagcgcgttggttccggttcccctgtttacctatctgcggttctcgaataccttgccgctgaggttttggagcttgccggcaacgctgcgagggacaacaagaagacgaggatcgttcctaggcacattcaacttgcggtgaggaacgatgaggagttgagcaagctgatggggtctgtgaccattgccaatggtggtgttctgcctaacattcaccagaatttgttgcccaagaaggccgctggcaagggaaagctcgagattggatctgccagtcaggagttttagattcttagggtttcatcttgttagtatttagagtgcaaaattgaaagaaaatggaactagctttggtatgtagttggccgcgtagtacagtgagactaggattgacattgaatgatgtatagtcattttatatgtgagaataactagttgttttggtttact

SEQ ID NO: 17697 - DNA, 754 bp, Zea mays
  Clone ID: LIB3075-001-A12_FLI
atacaacaataaaccatacaatagtagcaccaacagtagcagttcatcaaattacaactcctggacacagctagctagctgattttacaacatacatcatacggagcactactgcttgacaagcatctcctcacatcacaccgtgctgctctttacaacctgtagagcacagcacaccatctagcacaacaaaaacagctaccaggacaacggacacctgaacggccgggggggtggggtcactgaccagtgtgacacgtaccggccaccaccggagaacgccggacacaaaaacgccggcttcccgtcggttgtggttctctcctcctccggagaaccaaaccctaaataacccgagatctacaactgactcaccagtgacaaggaccaaacgaatcggacggacatctacacagaaccaaccaacgaacggacggacggggattagcactaatgatccaactagtgcccgcgcaggatgtctaaaatcccatctgcgcgacggccgttaaccttctttaaccctcctcctgctgcacgacggcagtgtgggtaggatgggagccagccagccagccagccaacaaggggcgacgattaattggcgaggagggagtcccagtcgatctcgtacgacgggtacttggtgagcgcgaagccggcggcctcgtcccacggcgcctcgctgaagtccagctgctgcatctccggcaccgtcggccctggcgaggcggacggcgacggggacgggcac

SEQ ID NO: 17698 - DNA, 817 bp, Zea mays
  Clone ID: LIB3075-001-D12_FLI
atttccagcgaggctctagctggtactcgggcaagagggaagacaagggcagatgactttcaaatcggtcaggatttgcttctaagtagcaaagaggacatcgaattcactatagtacgggacagcatcaagaacaagctggagatgatctgtgatgaggtggttgtccatcccagcaaggctctgcggaaacttccaagagtccagcatctgtcagcgcagttagctgcgcgaataaggaacgaagatgatgagtttgagattctaaacaccctccatccgagtccagctgtttgtggcttgcccactgaagaggcacgccaattcatacgggattgtgaaatttttgaccgtggaatgtatgccggtcctgttggctggtttggaggagctgagtgcgagttcgctgtcgggattagatcagcgttacttggaaaaggtcacagcactctggtgtacgccggtgcggggatcgttgaaggtacaaacccatcttttgaatgggatgagcttgatctcaaagcatctcagtttgcaaagctgttgcggtaccaagaacgacctattcgctaccaagaggctgaaaatctgggaacggtgatctgaatagagaagtacagaagaaactagaaagtcatcacaaagttcggcattcatttagcgagttatttatacaattgtttgtttgatatagtaagctagaagggggattcagttggatttgtgtaattatggaatccagaacagcggcagtgctgaaaaatacattgattgaacctgaatgggaaattgttcaatgtaacaaaaatatgtttac

SEQ ID NO: 17699 - DNA, 1334 bp, Zea mays
  Clone ID: LIB3075-001-D7_FLI
cctccatccgtgcgcctctcgctctcgctggtggtgctcctcctcctcctcctgctcccggggcgggcggcctccttttccacctcctgctggtgccagggccgggagggcgtcgcggaggtggcgcgcatggggctcgccggggacgggtcggcggacaccgcccacctcagtaataatgaaaatgggcggttcatttatggagttgcgagttctcctggtaaaagagcatcgatggaggacttctatgaggcaagaatagacgacgttgatggagagaaaattggaatgttcggtgtatatgatggtcatggaggagtccgagcagctgagtatgttaagcagcaccttttcagcaatttaatcaaacacccaaagttcatcactgataccaaggctgctatcgccgaaacttacaacctcacagattcagaatttctgaaagctgatagctgtcaaactcgagatgctggctcaactgcctcaacagctattattgtaggtgaccgtttgcttgttgcaaatgttggagattctagagccgttatttctaaaggaggacaagcgattgcggtttcaagggatcacaaacctgatcagacagatgagagacaaagaattgaggacgcagggggctttgttatgtgggctgggacatggcgagtgggtggtgttcttgctgtctctcgcgcatttggtgataaactcttgaagcagtatgttgtcgctgaccctgaaatcaaggaggaggtggtcgacagctcccttgaattcctcatccttgctagtgatggactctgggatgttgtcactaatgaggaagctgttgccatggtcaagcctattcaggacccccaggaagcagcaaacaagcttctcgaagaagcgtcccgaaggggaagctctgataacatcaccgttgtcatcgtccgcttcctatatggaactaccggtgataaatcaggcgcagacaaagagaccaccaatgaccaaaactcctaattacctcctgtagggatccctcatgcgtgtgttttcttctggctgttgtatctgatgctcaaagtagatgctccgtgtgtcttccgctgctgttccgcaaggaaactgactcccccgaccgtcgtcgtgatgctgcccgctcatgctcctagacgggaatgactgccgcagaatgacgaatagggctggtgtgtgttacagtatggtccttttcccctcctttccattaagctctgtgatgtagctgtccgtgctgttgattcatgagatcatgctagagatttttcctggcagtgcgtgtaaaactgtcgaactatttgaacgaaagttgt

SEQ ID NO: 17700 - DNA, 1200 bp, Zea mays
  Clone ID: LIB3075-003-B11_FLI
gcgcttgtgaaccgcaggcctcgggcgccgctccgtccagacaccagtccactcccacggacgggcccgtggcgtgaaagcgctggcgcctgccagtcgggcaagccaaggccgccactcgtagggccctcttctctgcgcttgctctgctggagcgcgccgccgaatagcacaatgccagcggcagcctctcatccgagccccacagggccacttgtcgctcgcccgcccgcgtcgtcgtctccgccggccggccggccggcctcccaaaccctagcgaggcgagcgagagagaaactagacgccatgttcgggtacaggaaggcggacccggacctcgaggccggcgggtcctcgctgctgtacccggggatgacggagagccccgaactgcggtgggcgttcgtccgcaagatctacgtcatcctcacggtccagctcgccatgacggcagccgtctcggccttcgtcgtcaaggtgcccgccgtctccaacttcttcgtctcctccaacgccgggatcgcgctctacatcttcctcatcgtcctgcccttcatcgtgctgtgccctctgcactactaccaccagaagcatccggtcaatctgctgctgctcggcctcttcaccgtcgccatcagcttcgccgtcggcatgacatgcgctttcactagcggaaaaatcattttggaggctgccattcttacagcggtggtggtgaacagcttaactgcttacactttctgggctgcgaagaggggccatgacttcaacttcctcggccccttcctaattgctgctatcatggtgctcatggtgttttcactaatccagatctttttcccactgggcaagatctctgtgatgatatatggtggattggcatctcttatcttctgtggctatatcatctatgacacagacaatatcatcaagcgccacacatacgatcaatacatatgggcagctgtttcactctacctcgacgtcatcaacttgttcctgtctctgctgcagctgctgagggcagccgatagctgagctcattaatggagtgtttggtttgagaaatgatatagtccatcatcttctcactcctcacttttttgtttggtttgtggaatggagtgagttaatccaccaccacctcattctttataattagttgtttagtactaatatgtggaataaagtcatcccact

SEQ ID NO: 17701 - DNA, 695 bp, Zea mays
  Clone ID: LIB3075-003-D11_FLI
acaggcaagacaggttggggtgtaagatccctcagttctatatcatcaggcagtttcatatgtgagtataccggtgagctattggaagatgaagaagctgaaaagagagagaatgatgagtatctatttgatattggtcataactaccatgataaagaactttgggaggggctgaagtcagtggttggcctaggatctgctacttcgtcttctgagaccatggaaggcttcacaatagatgcatctgagtgtggcaatgtgggaagatttatcaaccatagttgttcaccaaacctctatgcccaaaatgttctctgggaccatgatgatatgaggatgccacatgttatgttttttgctgttgagaatatcccgccactacaggagctgacctaccactataactataagataggggaggtctacataaatggcgaggagaaggttaaacattgctactgtggcgcctcggattgctgtggaaggctctactgaagcattattgactgctgttagctctatgttttgaacacctctgtcttgtctctgcggtacccttcttttttcagttcgccttggcttggcggcgttctgatgtttacagcaagctgcatttgatcttgctgttttcatttagaaaaaaacattctgcttcgcttctactgtgttttgaattgtgaatgaattttgaatgg

SEQ ID NO: 17702 - DNA, 1587 bp, Zea mays
  Clone ID: LIB3075-003-G10_FLI
ggttgagggagaagaagcaggggaggggaagcgatgagcaacatgctgcgggctcgccgccgcctggacctcctgcaggtggtgctcttcgccgctgtgctcctcgtcgtcgtcgccgacgccggcgtgacgagccagtaccggcggaagctggaggcgacggtggagatgccactggacgccgacgtcttccgcgtcccgccggggtacaatgccccgcagcaggtgcacatcacgctgggtgaccaggagggcacggcgatgatcgtgtcgtgggtgacggccaatgagctgggcagcagcaccgtcatgtacagcgaggcgtcgccggacccggagaagatggagctccgggcggagggcacccacacgcgctacgactacttcaactacacctccggcttcatccaccactgcaccctcacaaacctcaagcatagcaccaagtactactacgccatggggttcggccacacggtgaggagcttctgcttcaccacgccacccatgccgggccctgacgtgcccttcaagttcggcctcattggcgacctgggccagacgtttgactccaacacgacgctgtcgcactacgaggcgaacggcggcgacgccgtgctgtacgtcggcgacctctcctacgccgacaaccacccgctgcacgacaacacccggtgggacacgtgggcgcgcttcgtggagcgcagcgcggcgcaccagccgtgggtgtggacggcgggcaaccacgagctggacctggccccggagctgggcgagcacgtgccgttcaagcccttcgcgcaccgctacccgacgccgttctggtactcggtgcgggtcgcctccgcgcacgtcgtcgtgctcgcctcctactccgcctacggcaagtacacggcccagtgggagtggctgcgggccgagctggcgcgcgtggaccgcgccgccacgccgtggctgatcgtgctcgtgcactcgccctggtacagcagcaacggctaccactacatggagggcgagacgatgcgggtgcagttcgagcgctggatcgtcgccgccaaggccgacctcgtcgtcgccggccacgtccacgcgtacgagcgcagccaccgcgtgtccaacgtcgcctacgatatcatcaacgcccggtgcacgcccgtccggacaagggacgcgcccgtctacgtcacggtaggcgatggcggcaacatcgagggcatcgcggacaacttcacgcagccgcagccgagctactcggccttcagggaggccagcttcggccacgccaccttggagatcaggaaccggacacacgcatactacgcctggcaccgcaaccaggacggcgccaaggtcgtcgccgacggcgtctggctcactaacaggtactggatgcccaccgacgacgacatcaactgatgagtgatgatcacatcatgcatatgccatcgccaccactcatcaccggatccgggagttcggccgtagattagatctcgcttcgttctcggttcagttcgtccatgtcctctcatgataattgtgtcagcaaactttcaatttatttggcttgtgctaaagcacaataat

SEQ ID NO: 17703 - DNA, 910 bp, Zea mays
  Clone ID: LIB3075-003-H3_FLI
caaaatttgagtttgagtttgaaagaaggaagctggccagagatgatgttcgagaattaatttacagagagacattggaataccatcctcagatgttgcaggagtttcttggtggtggtgtcaaggcgaactttgtgtacccgagtggggtggatcgtttcaagaggcaattcgttcatctcgaagaaattgctgctaagggtgagaagactagcccacaattgcgacaacatacttccttaccaagagaaagagtaaatgacagcggcgacgaccttgagaaaccaagtgcagattactgcataagattgcatgtatgtgatcaactctcaagctctcgtaactttctgaagagcgaaagcatcagtgcttcccagtgtgtggtcatcaaaccgaagcgagagaaagatgaggagcccatatctgagtatgcgagcagtccagttgatggtgtgccaccgaggattgctcaactcaaaacctgagagccttaaggtacatccaagcaagaaggatctgtgcacatcgacctgttcttgaaccataggggaaaaaatgacatttgggaggtgcccaactattccagatacgtttccaatgctcaaaactagtagctctatatagcggcgcatcataagccgatttagaagaatagcagccggaactagggggaacatggcaaggctgattctatgatctttaaggttcagtagccaagagcgatacatcaagaggataaatagtcttggtaacctttaataaaagcttccttttttgaaaaaaggttcagtaggcagaattgctttctgatgattgtattgtgttgtaatggttccctttatctttctcccatggagctagatatatttgactcttgctccagaaatttttttttgtcggatggaattcc

SEQ ID NO: 17704 - DNA, 724 bp, Zea mays
  Clone ID: LIB3075-004-B1_FLI
gctggcggcgacacatttttttatccactgacaccctcccgacctccatcacctccctcgtcgtcgccccatccagaaccgaggttctggccgctgcgttctccctcttgtgcttcgacccgctggtggcgattagtgctcgcgtcaaccgccttgtccaccccctctaattccccctccgcaagccattgcctcgtagatttcttcgcgctgccactgtcgcctccggaatttccacccgccattgttgccgtgagagggacctcgccgggatcggggtgccgctcgaattgagtaggtcgaggagctcctctacgcctcgacgagcgtgtccgcgacaccaacactaggattggagcccctgtcgacaaagaattgctcgatggagttccgctaccgccgtggaccacgcgtcgccgtggacgagtgttcctgctgcgctactaccgcgtgaggtcacgaggatctaaagaatcaccctggtaactagaatctcaagtgccaggagaagaacaggtggttcaagaggagccacgtagcgaggagttcgattcgatctaggtggcgtctcccagttgactttctggcgccaaggatggattttagttcgatctatatttatattttattttgtaagacttccgctatgtaataagtactctgattatattgtgacatttatctctataaattctgttattatatatattgtcttctttggtgc

SEQ ID NO: 17705 - DNA, 1682 bp, Zea mays
  Clone ID: LIB3075-004-E3_FLI
ggtcggcactcggcagcaaactgaatggcgcttcgcgctgtggagctccggagattccttctccggcgcatcggcggcggcgaggcggccctgcctcctctcgcgtggcgcggccggccagcgagcacatccgccccggcggacgacgagctcgcggggaagagcgcctacgaggtcctcggggttggggagaccagttccagcgccgagatcaaggcttccttccatcgcctagccaaagagacccacccagacgtcgccgcggctgctggttcccgacggttccttcagatcctcgccgcctacgagatcctatcagattcacagagaagggctcactatgatagctacctgcgatcgcagaggcgagttgtggggaaacatcccaggccatctcagttcgtgtacccaagtggttcaggctcaggcattgtggtacctcgagagagcaatgttgttgaatggctgaaatggtacaggcttaccattgacgacatagttaccaagaagagggttgccactggctctggttattttgaaaggctcgaaagcgagctgtacacggctatccatgctgcatactatggccctgatgtcgactccatggatgtccttcctgattgctttgaagccgaggagagatctgcatatgaaacctctgagctattacaccttgtttcaggccgtgatctttttggtattgttactgtaactgatagtgtcaaagagctgtcagatgtttgtcgtgaaaaactggtaccctctggttgtagatcttcggaatttactcatgttgtttcaagaaatgcgaataagaattcaatatctatgaatcctgttgatatgaacaagcaagaaatgcgatatgaaaatgatgttccttcatcagattccttcaaggacattgagttgcaaatatgtgggaaattagttgctactgcgactaggagccccaactgcgattgcattgacaaatcggatttggaagaagatcacattcatgtgtatcttgttccaaatgcaaatatatctgatttaacacatgggaaacttctcctcggcacaattactgggttagccaccactggtgaggaaggatcttgctgtgtctacgatggtcacaacataaagacacacattattatgaagcacaggacattgatggtattggctttttgagcctcgttgttacatgcatgacactggtggatggtatatcgaaacttatgggagagacaagaaagggaggacgattccgtctcaaagacagtgggatggttccaatgaacattctgaaaagagattgcatcctgcaatgtatcttgctgctctggcttacagatctttggatcttgaagatgctggaagaagacgatggaatgtgactagcttgctgcaatggtccttatctcatcttcgtcagctgttcaaaaaaagttgctaatggagagaaaggggattgacacgagaacaccatgaaaatagttgtttggggtctcgctttaacaattagactgaacctgtggtgtcacaccctttgctggttctgttcagctgctttttagtatgctactgtatagttagaaactaatgtgctttcttgatatgatagctgataaggacatctttctgaggctgttgactaccctgcccgtttgatatacaacatgatagtaaaggtt

SEQ ID NO: 17706 - DNA, 443 bp, Zea mays
  Clone ID: LIB3075-004-E4_FLI
gcctagttgatgaatacaaggcctgcgagtcgcctgactacatcaaatggggaatggaggaccctggagaggcaaatgttgtggcggcacttgactctaagttggtagtgtaaatataaagtgttgtgcagcaatccacgcaactgaggaagtgctgtctacaatctacattcaagtcatgttggtcatccagaccaaacatgctactgtcacatctagtagtcatcagtttgacgccgcctgcttctatagatccaatcggagtgcagccaaagtgggttttgacgttattttgacctcaaatttgcctttagtctgtgctatgtatatttcgaaacccacttcctctggcctgttttcatttctttagggctagtttggaaactccattttttcaacggatttttattttctcaagtgaaattagttcattttttcttgcg

SEQ ID NO: 17707 - DNA, 580 bp, Zea mays
  Clone ID: LIB3075-004-F10_FLI
cgccgcagacccctccccttcgcttccttccctagcgccgacgcccaccagacgagatggccccgaagaaggacaaggccccgccgccgtcgtcgaagccggccaagtccggtggtggcaagcaaaagaagaagaagtggagcaagggaaagctaaaggagaaggtaaacaacgcggtgctgttcgaccaggctacctacgacaagctgctctcggaggtgcccaagtacaagcaaatcaccccttccatcctctccgagcgtctgaggatcaacggctcccttgctcggagggccatcaaggacttgatggcgcgtggcctcattcggatggtctcggtccactcaagccagcagatctacaccagggcaaccaatacataaggatggggaagaggtctaaaatgcattgtctgccctctctgcaggaggagctcgtctttagaacagttgccatctttgtcaagagttgccaatgttatgttactggtgatgagttccaggtgacggcaacattttagagattttgagtatttctattagttggtactatggtttgccaattataagttacttggcct

SEQ ID NO: 17708 - DNA, 898 bp, Zea mays
  Clone ID: LIB3075-004-H2_FLI
gttgcggctgacaaactcatatatgctcgtgagactattaagtcgattgctcgaaagcatggactggtagcaacatttcttccaaagcctgatttggatgattttggatctggttctcacgtgcatctgagcttgtgggagaacgatcagaatgtttttatggggtcaagtaaagataactttcatggaatgtcaaaaactggagaacagttccttgctggagtgtatcatcaccttccgtcaatattggcatttaccgctcctcacccaaacagctacgaccggattcagccagatacttggagtggagcttatctatgctgggggaaagagaacagggaggctccattaagaaccgcatgcccacctggtgtgcctcttgatttagtcagcaacttcgagatcaaatcctttgatggttgcgcgaatccacacttgggtcttgctgctatcgtagctgctggcatcgatgggctaagaagacaccttaagttgcctgagccaattgaatcaaacccttctgatcactcttcaaaactgaaaaggctaccgcagaacctgcaggaatctgtagaatcgctttctgcagataaggttttgcatgagttaattggtgataaacttgtcacaactgctatagcaatacggaaggctgagatcaatcactttgcgaagaatccgggtgcacttaaggatctcatccaccgttactagggcagaagaacggaatgagaagctacatcttcttggacgtggcaaggggtttcactgtatgaccaacggagagactggtagaataaattttgttccaacggttaacttcggattctcatcctgtgactgaacttttgatacccagtgtttctcttatcaaataataaaggttctttaaattttt

SEQ ID NO: 17709 - DNA, 876 bp, Zea mays
  Clone ID: LIB3075-006-B1_FLI
gtcgccatctccccaccacctcgtcaccgcagaccatgcccccacggggcccccgcgcggccgtggcctaccggtgaacgccacccagacacacgggaccgcgcagccggcgagcacggcatcgcacatcacgggcgcggccaagaggcgggagccgtgcgctgcgaagtgcggaagcgcctgttaattgctctccctccagtgccgcgcagtgcgcacagggttttaggaagggggcgacaccggtatcgccattcgccagccatggaatccgcaacggcggccgtccgcagcgcgtcgctagcccgggcccggcccgcgccgctcgtccacgggcgcgcgcgcggggcgggtcgcgtcgtgggcgctggcctcgccgcgcgcgcccggcggagggcgctcgtcgccgtagcctcccaccaggagcaccacgagccgctcccgccgcgcgcgcaggagggcggcgccgtggctgtggcgacgcaggctgacgaggcggaggtccatgcgattgacgctccggcggctgctgctgaaacctcgtcttcccaactggctgctggcaagacagtgcgtgttcgatttgtgctgaaaaggcagtgcacgttcgggcagagcgtctgccttgtcggcgacgaccctgcgctcggcctctgggatctgtcgaacgcgtttcctttgaagtgggcggaaagccacgactggaccttagagaaagatttgccggccaacaagctgattgagttcaagttcttgctccaagattccacaggaaagttgcattggcagggtgggccaaacagaagctttcagacaggtgaaaccgccgcaaacacattggttgtgtttgaagattggggtgatgtgaagaatcag

SEQ ID NO: 17710 - DNA, 1237 bp, Zea mays
  Clone ID: LIB3075-006-D6_FLI
catcctgacggcgaacatgaccaactacctggcgtccaaggtctcgggcggctggggctggcgcacccccgtgacgttcggcgccatcccggccgccgtcatcgcgctgggcgcgctcgccatcccggacaccccggcgtcgctcgtcgagcgcggggacacggccacggcgcgcaagacgctgtcccagatccggggcgtcggcgacgtgcgcgaggagttcgacgacctggccgccgcgagcgaggacgccaaggccgtgcagtgcccctggcgggagctcttcttcggcggcaagtacaagccccagctcacgttcgcgctgctcatccccttcttccagcagctcaccggcatcaacgtcatcatgttctacgcgccggtgctcttcaagacagtcggcttcaagcagaacgccaccctcgtgtcctccgtcatcaccggcctcgtcaacgtcttctccaccttcgtcgccatcgccaccgccgacaagatcggacgccgcgcgctcttcctgcagggcggcacgcagatgatcatctcccagatccttgtggggacgttcatcgggctgcagttcggcatgagcgggacgggcgacatctcggagcagtacgccatgtgcatcgtgctgttcgtgtgcgtgtacgtggccggcttcgcgtggtcgtgggggcccatggggtggctggtccccagcgagatctacccgctggccgtgcggtcggcggcgatgagcgtcacggtggccgtcaacatgttcttcacggccttcatcgggcagatcttcctcacgctgctctgccacctccgcttcggcctcttctacttcttcggcgcctgggtgctgctcatgacactcttcatcgccatgctgctcccggagaccaagagcgtgcccgttgaggagatggcgcacgtctggaagaagcactggttctggcgcaagttcgtcatcgacaccggcaacgacgcccgcaacgccgagatgaggaagaggatagcgctagagatgagctgatcatcgtcgtccatgcatgcagtctccatcgcccatgcatcatatatatgcagtaggcaggcaggcagatgaaggaaattacgtacacaagcgccaactaaaactaaacccaagtcaattacttcatatatcactcaatagctgctagaacatatatgaatggttgttgtagactgatcgtaatcccagatagttatgatatacatctttcatttt

SEQ ID NO: 17711 - DNA, 555 bp, Zea mays
  Clone ID: LIB3075-006-G10_FLI
aaactgaagatgacgtccctctcactaggttaaagaggctaaggagagggcctgcaaagactaacaaaaggtgacagaaagtgaaaatacacgccggtgcaatgcttcatttggactggacggattttggacttaacgagactgatgcatgaatcatgatggcatgagaccttcgtttagcacactgccagctataattctctagcttttgtgtagtagaatttggaaacatgcgttgctgttggattaggcgtctgtttgtaaataggtgtccctcgcattcaaatgttgcagcttaggccctgggatccattagctactaatagttagctagctaatagactaaagggtgtttgaacgtactagagctaatagttagttgactaagtgaaattagctagctaacaaatatttatctaactattagctaatttgctaaaaatagataatagctaaactattagctagactgtttagatgtcatagatgtcatcagctaactattatctctagtgcgctcaagcactccctagctaatattatatgctattaact

SEQ ID NO: 17712 - DNA, 1107 bp, Zea mays
  Clone ID: LIB3075-006-G3_FLI
gcaggaattcacgtcgatcgcttgagttagtttgcagccaagatgaacgacgccgatgtcgggaagcaggtgcagcagatggtccggttcatcctgcaggaggccgacgagaaagccagcgagatcagtgttgccgccgaggaggagttcagcatcgagaagctgcagctggtggagtcggaaaaacggagggtgcggcaggagtacgagcgcaaggagaagcaggtggacgtccgcaggaagatcgagtactcgacggagctgaacgcggcgcgcatcaagctgctgcgggcgcaggacgacgtggtgaccgggatgaaggagagcgccggcgacgcgctgctccgcgtcaccaaggacgccaacgcctacaagagggtcctcaagggcctcatcgtgcagagcctgcttcgtctgagggagccggcgctggtgctgcggtgccgagaggcggaccggagcctggtggaggcggtgctggaggtggccaagaaggagtacgccgagaaggccaaggtcaacctccccaagatcatcatcgacggcaaggtctacctgccgccgcagaggaccagccgcgacgcgcacgggccgtcctgctccggcggcgtggtgctcgcgtcccaggacggcaagatcgtctgcgacaacacgctggacgccaggctcagcgtctccttcaggcaaaagctccccgagatcaggaagaaactcttcagccagcgagtatcgtcctaatgttttttttttgttactctgatcgattgttttctgaaataaaccagaagcggtccgatcctacgaagatacacaggtcctgacattgggtgaagcccgtatgtgcacgtttcggatttcgcaacatcgatttgagcttcaacagttcttcgctagcttgtcggtagaggcggcaatggctgaagttgagtctgtatcccggtggataggggacctccgcgaccgttaccctgagtcgagttgtcacagtctgtatctatcgctcctgaaacctgaggggcctgtattgtttgtcaagcactttgtttcttctcttctgtttgtagcctactatatccactgaaatctaaggggcctgtattgtttgtc

SEQ ID NO: 17713 - DNA, 1406 bp, Zea mays
  Clone ID: LIB3075-006-H11_FLI
atcgatcgccacagccaacaccacccgccgaggcgacgcgacagccgccaggaggaaggaataaactcactgccagccagtgaagggggagaagtgtactgctccgtcgaccagtgcgcgcaccgcccggcagggctgctcatctcgtcgacgaccagtggattaatcggcatggcggctctggccacgtcgcagctcgtcgcaacgcccgccggcctgggcgtcccggacgcgtccacgttccgccgcggcgccgcgcagggcctgaggggggcccgggcgtcggcggcggcggacacgctcagcatgcggaccagcgcgcgcgcggcgcccaggcaccagcagcaggcgcgccgcgggggcaggttcccgtcgctcgtcgtgtgcgccagcgccggcatgaacgtcgtcttcgtcggcgccgagatggcgccgtggagcaagaccggcggcctcggcgacgtcctcggcggcctgccgccggccatggccgcgaacgggcaccgtgtcatggtcgtctctccccgctacgaccagtacaaggacgcctgggacaccagcgtcgtgtccgagatcaagatgggagacgggtacgagacggtcaggttcttccactgctacaagcgcggagtggaccgcgtgttcgttgaccacccactgttcctggagagggtttggggaaagaccgaggagaagatctacgggcctgtcgctggaacggactacagggacaaccagctgcggttcagcctgctatgccaggcagcacttgaagctccaaggatcctgagcctcaacaacaacccatacttctccggaccatacggggaggacgtcgtgttcgtctgcaacgactggcacaccggccctctctcgtgctacctcaagagcaactaccagtcccacggcatctacagggacgcaaagaccgctttctgcatccacaacatctcctaccagggccggttcgccttctccgactacccggagctgaacctcccggagagattcaagtcgtccttcgatttcatcgacggctacgagaagcccgtggaaggccggaagatcaactggatgaaggccgggatcctcgaggccgacagggtcctcaccgtcagcccctactacgccgaggagctcatctccggcatcgccaggggctgcgagctcgacaacatcatgcgcctcaccggcatcaccggcatcgtcaacggcatggacgtcagcgagtgggaccccagcagggacaagtacatcgccgtgaagtacgacgtgtcgacggccgtggaggccaaggcgctgaacaaggaggcgctgcaggcggaggtcgggctcccggtggaccggaacatcccgctggtggcgttcatcggcaggctggaagagcagaagggccccgacgtcat

SEQ ID NO: 17714 - DNA, 577 bp, Zea mays
  Clone ID: LIB3075-007-C6_FLI
cgccttcgctcgcgccgccgccgccgccgccgctacgccccgcacctcgcttcatttcgtgtcgccaagatgacgaagcgcactaagaaggcaggaattgttggcaaatatggaaccaggtatggtgctagcttgcgtaagcaaatcaagaagatggaggtatctcagcattccaagtacttttgcgagttctgtgggaagtttgctgtgaagaggaaagcagttggaatttgggggtgcaaggactgtgggaaggtgaaggctggtggtgcttacaccatgaacactgctagtgcggtcaccgtcaggagcacgatccgccgcctgagggagcagactgaagcatgatatagctctttatattattggggtttcctgtagttgctcttgtcaggcatgttgtgggggccttatctagtggaaatgtggaatcactgtactggctgttttgccgagacaatgctccttatatttggtttatgctctaggatctcaaagttgtgttgttgagatttgccctcggttaccgttctgaatctgacaaatgatatttgatcctgtgccatcattgacgtcg

SEQ ID NO: 17715 - DNA, 969 bp, Zea mays
  Clone ID: LIB3075-008-A1_FLI
gttcgaataacacagttgagcgcgacgatgggatccctcgctaataacatcatggtcgtgggtgtcgtccttgcagcgctcgtcgccggcgggtcatgcgggcccccgaaggtgccgcccggtcccaacatcaccaccaactacaacggcaagtggctcaccgccagggccacctggtacggtcagcccaacggtgccggcgctcctgacaacggcggtgcgtgcgggatcaagaacgtgaacctgccaccctacagcggcatgacggcgtgtggcaacgtccccatcttcaaggacggcaagggttgcggctcatgctatgaggtgagatgcaaggaaaaacctgagtgctcgggcaatccagtcacggtgtacatcactgacatgaactacgagcctatcgctccctaccacttcgacttgagcggcaaggccttcggctccctggcaaagcccgggctcaacgacaagcttcgccactgcggcatcatggacgtcgagttcagaagggtgcggtgcaagtaccccgccgggcagaagattgtgttccacatcgagaagggctgcaaccccaactacctggccgtgcttgtgaagtttgtggcggacgacggtgacatcgtgctgatggaaatccaggacaagttgtcggctgagtggaagcccatgaagctctcttggggcgccatctggaggatggacactgccaaggcgctcaagggccccttctccatccgcctcaccagcgagtccggcaagaaggtcatcgccaaagacgtcatcccgccgaactggagacccgatgccgtctacacttccaacgtccaattctactagactttgaattcccttcgattcatccggcgcggtgggctatggacctgcagcagcaagctaattaagtttatatatattgcatgagagagcatgcaccgctaaccatatatactactgagacttctgaattct

SEQ ID NO: 17716 - DNA, 1725 bp, Zea mays
  Clone ID: LIB3075-008-C2_FLI
atctgtttctcagcacaaggctgaacaagatagatttgtcgctcagttggcatctcttgagtctaggcatagctctgcagaaggaaagttgggagcagctcgggaacatgcagcatctgctcaagatgaggctgcagaatggaagaagaaatatgaaatggctgccgtgcaggctaaaactgcattggagagactagcatcagtgcaagaacaaattaacaaaattgcacaagaaagggaaagttctataagggcagaatttgcctcacatttggagggaaaggaagaggaaataaggaaattagttgctaagattagagaagcggagagtgaagaaagtgtattgactgaacgcttgctggttgtggaatcaaaaacacaaggccacaacaaggaaactacaggcttgagggatgaaatcaaagaactaacaagcaagttagagtatctaagagatagagcagtatcatatgaaaagcaagctagaatgctcgagcaagaaaaaaaccatcttcaagagaagttcttatctgaatgtaagaaatatgatgaggcagaacaaagatacaagtctgcagaaagggatgcgaagaaagctgttgagttggctgatgcagctcgaacagaggctattgcataccagaaagagaaggacaaggcacagcagttatctattgaaaaggtagcagttatagagagggttcaaagacaggtagacagactagagcaggaaaaggttaatctattgggcgaagttcagaggatgcataattctgaatctgatgcctggtccaaggttactttgcttgagagtagggttgctgagagggagaaagaaatggatgatttactgagccgtagcaacgaacaaaggtctagcactgttcgtgtccttgagagtctgttggcaacggaacgtgcagctagagctgaagccaataagcgtgcagaggccttatctctacagctacaatctgcccaaggtaaacttgatatactccatcaggagctgacatcgattcgccttgttgagactgcacttgacagcaagctcaggaccactacctatggcaaaaggttgagagataatgaagtacgactgtattctatccaagatatggacattgatcctccagagaggagcagaaaaagaaccaaaagcaacactagccccttgaagcctgtccaaactgaggatggtggttctgttcacatgagagaagacagcgttacagttagcacggatgtaaaagatgacaatccagatggttacaaaaagttcaccatagctaaactgaaagaagagctaactaagcatggatttggcacgcagttgttagagctcaagaatccaaacaagaaagatatactcgcactttataagaagcatgttttgtgcgagtaaataatggccacgtgaagttccagtcttcaacacataatctatccaaactagggaaacaatagagtagtctgtcagtatttttaacaagctgatgcctcattgttctccaggcattcgtttctgctgattggtttgtattttggtgttaacatcgaattagttccggtttgtgtctaggctttgtatttcttagcttgctggttggctgggtgaagttcttaggacttctgagtgctaaatgacctcgaccaacgctagtcgtgggcaagtttgtggtacgtttgtatatggtatattgctgtgtaaagagtgctttatcc

SEQ ID NO: 17717 - DNA, 1811 bp, Zea mays
  Clone ID: LIB3075-008-E2_FLI
ggtgcggcgagctcgggcatggcgttccacgaagtggagacgccgcgtcgatgctgagacgccggggcatggtcggcgcgcagtgacggcggccggcggctcggttcgtgcgtgcgtgcccagcattcttgcccctgttgagtcatcggctcgtcgctcgctcgcgcccccgccgctcgccccgcgtccacagggtcgccgccacggggaggcgcagagggaaaaggaagatgagctgctttccgtgcttcggcggcggaaagggcaacaacgacgacgccgacgcggagagcccgggcgacgcggccccggcgtctaacatgacgccgcccgcgatggtgcaggcgcccgccgcgtacttcccagccatcgaccgccgctccaacggccgcggcgccgcccaagcccggtggcgggaaccaggcgcacgaggcttccgccgatgactcggcgctgcggctcgccatcacggggcaggcgttcgcgttccgcgagctcgccgccgccacagaccacttcacgccgtacaacctcgtcggtgaaggcggcttcttccgggtctacaagggccggctagagaagagcgggcagaccgtggccatcaagcagctggacaagcatgggttccaggacaacaaggcgttcttgaccggggtcgccaagctcagccagctccaccacgagaacctcgtcgacatcattggctactgcgctgacggagaccagcggctgctggtgtacgagtccgtgcccgccggcaccttagaagaccacctgttcgatctgccggcggacaagaagccgatggactggtgcacgaggatgaaggtggcgcacggcgccgcgcaggggctggagtacctgcacgagacagcgaacccgccggtggtgtacggggaattcaaggcctcccacatacttctcgacgagaagctcacgcccaagctctccgacttcgggctcgcgcagctcggccaggccgggggcagcatgccggtggtggcgtcgcccatgatgggctccttcggctgctgcgcgccggagtacgatcgcaccgggcaggccaccatgaagtccgacgcgtacagcttcggggtggtgctggtgcagctcatctccgggaggagggccgtcgataccagcaagccggtggacgagcagaacgttgtcacctgggccatgccgatgttcaaggaccagaagagataccatgagctggttgatccactcataaagaaggaataccctgccaaagcgttgaaccaggtggtcgccatggctgcgatgtgcttgcaggaagaggactccgtgcgaccgctgatggccgacgtcgtcatgacgctaggcttcctcacggcgatgccgcctgacccaccggcccctgccgctccaccgcctgccgccgccccggagccgaaggaagacaaagaatcggaccattcagactcctcgtcatcttcttcttcagacgacgacgaagataacgaggaggaggaaaccgaggagcaatgataagggcgggtgtgttcaacttcgaaggcttcaaacgtggaagggccacgcagatgaagtggcttcgtgcacttggcgtgtacggagctcaatatgtgggaccttggagccacttggacttggtggttgtggcagttaaattggggtgttcacaagtgagtaatcttttttttgtgatgacgccaagcatgtaaaaatgtgagctatgacatactgatgggttacacattttgcactttaatttgtttttcgtatggtcattacaatttatacatggaaaatccacgtggaattacagc

SEQ ID NO: 17718 - DNA, 987 bp, Zea mays
  Clone ID: LIB3075-008-E3_FLI
ccgtattgttcctggtaaggactacataatcgactgtggcaaggggaagaaagtttatcagaagggtgatatggcatctgaaagcttgttcagctggctaggcgacgatgtgctaagaaaacccacctactcacgtttctgcgcacttctggataactacaacccccaccaggggtacaaagaagttgttacccagcaggataagcacgaagaaatagctttcgttgaagagatcgctagaacagcgccaattaagtacttgcaccggtacttagtgcagaagggggctgtgcctcaggactacgaggacttcaagagaatgctgacatccctatggtttgatttgtatggaagaggtggcaactctagctgctcttctgcctttgagcatgtgtttgttggtgagatcaaaggacggggacaaggggagagtgaggtatcaggcttccataactggattcagttttacctggaagaagccaagggaaatgtggattaccaaggttatatatttccaaggcgccgtggtgaatcgcctgattcagagatacagctgctgactgttcagtttgagtggcatggcgtgctgaaatcggtatccagcacgttggttggcgtcagtcctgagtttgaggttgcactctacacgttgtgtttttttgttggaggggaagacaaccgcgtcgatattggcccgtatagtgtgaacgtcaagtgctaccgattggggaacaacaaaattggatcagcctttcccattgtagagaactgattatctggtgctatgcttctgcaggtttccaaatattcactttcttcgtttcataatcaattacgtgaagttaacaatgtactattttacttgtgcatgaaaaggtaccatactgttcaatttgttgctgccatctgcaatagtattgctacttgcactgctaaaaagttgacgaccgagactgaagttacttttcatgattttgttgctgtggg

SEQ ID NO: 17719 - DNA, 1135 bp, Zea mays
  Clone ID: LIB3075-008-E4_FLI
aaagagttttttgtgattggtattcagtgggcttcaatatatcatcctgcactgtggtgtgccttttctctaatcttttcgttgcttcttgtaccacaagttttagcagtggtattcaaagatcggttcacatataaatctctatgcgcatatggtgggcagaggacactgttgaagtctctagttggtggtttcatctgttgttttgttgaactcgccaggctggttcttgtatggttattgctactgttatatgctatctatttagtttttataccttggttattcggtcaccctattactgaagatggtagcctgacttacatgacacataaaggctggattctgaaaggacccagtagtagcaacgaagtagtccatgctgggattccagatgtcatggtcattgttctacctcacctttgctttgtgttagtacccaccattgtgattttagctgccatggctgctgagagaacagcatatcgagagcattatctttctcgatcaggaaagaagaaagatgactaccgtaagagcaggagacagatagaacatgaaaacttttggaacggtcgctggattagcaaatttctgtgtcttctctgcgtggtggttctatgcaaacattggaagctttgcagagcgctcgtgaaggcttatgctatgaaccccttgctccatgcgccagtacttttcttcttcgttcctttactcatggtgtttggcatctacaagacacggtccatttagctgttctggagttctgaagatgtgctgcactggactgtccaataaatggtgcttcaactgtgaagactgaagactaacccacaactgaaggtgtgctacttcgatttctcactttctctctctttcagagagcagatttgttagattgtttaacaggcatatatagctttcgcattgcgctccgtataaatgagggactgcacggcatttcattagaatggaatggttaggatttggaccaaggaggaagggaaagttcttttttccctcctctgtttttgacctgccggctttgtttttgtacatttatccttcttgtgagactttgaccatctacagtataatagcactgtcgcttgcggaatgcgtatttacactgctc

SEQ ID NO: 17720 - DNA, 397 bp, Zea mays
  Clone ID: LIB3075-008-H3_FLI
gcggccgctcgcgcccagatgtactcaaacgctctccgcaagctcccctacatgcgccatccatgggagcatttgttggggatgggtctcggtgcagtgtttgtgaaccagctggtaaagtttgatgagaagctcaaggaggacctcgacaagatgcttgagcgcgccaggctagccaacgagcagcgctacattgacgatgatgaatagatgcccagatttatttgccagcgacctgtatttttttttgcaacatgttgtcagtacacatggccaggactgatgatcccccatcgtcttagttctctcagctttccgcatttcaactgtgatcttgtaataagatgtcggatctcatggattaccaatgtaatacaccaattatgggttcttgatc

SEQ ID NO: 17721 - DNA, 574 bp, Zea mays
  Clone ID: LIB3075-009-B1_FLI
ggtaacgctaagttagtttccacaaagcaagaaattagcaaggacacacgcaagaatattggcacttcacctagtccaaatggttctgctgtagtcaagaagcaaatgccaaaggagagcaaaaaggaagttgctactgagagaagatcaccaccaaagcttcataggagttcgccaacaccagcgaggacttcaccaacaaagctcagtccagcagcaaagcagaatggaaactctggtccagtttcttctgtatctactgttaaaaaaagagttagtgaaactatctcttgggactccctcccaacaagcctaatcaattcaggaaaggctgttgtccggaggaagaacattgctcttattgtagcggctgaggctcaaagggaggctgctgcagctgcgtatcttgtaaaaggccttgggtaagtaggcccatacccagatatttcatatgatatagtaattttagttgtataagttgtgaaagacgttccaaattgatgaatttgatgtattgaggtgctactatgttttgttgtttagcaaatgataccaattggcagtcatttttttt

SEQ ID NO: 17722 - DNA, 1292 bp, Zea mays
  Clone ID: LIB3075-009-B7_FLI
cggacttccatagccgatgtgcatgtgatgtgcatggatctaagcccaaagaaacccaacaaggccagcgccagcgacggcggagcctactacgactggtcccccgccgatctgcccatgctcggcgttgcctccattggtgccgccaagctctgcctcaccgccggaggtcttgccctacccagctactccgactctgccaagatcgcctacgtcctccaaggcaaaggtatcttcggcgtggttctcccggaggcgaccaaggagaaggtcatctccgtcaaggaaggcgacgcgatggcgctccccttcggcgtcgtcacctggtggcacaacaacgccgacgccgctatctccgacctcgtggtgctcttcctcggcgacacctccacgggccacaagccgggccagtttacaaacttccagctcaccggctccacgggcatcttcacgggcttctccacagagttcgttgcccgcgcatgggacctcacccaggacgacgccgccaagctcgtctccacccagcccggatccggcattgtcagggtcaaggacgggcacaagatgcccgaggcgcgcgacgaggacaggcagggcctggtcctcaactgcctagaggcgccgcttgacgtcgacatcaagaacggagggcgcgtcgtggtcctcaacacccagaacctgccgctcgtcaaggaggtcgggctcggtgctgaccttgtcaggatcgacgcccactccatgtgctcgcccggcttctcctgcgactccgcctaccaggtcacctacatcgtgcgcggcagtggccgcgtccaggttgttgggatcgacggcacgcgagtgctcgagacccgcgccgagggaggctgcctcttcatcgtgccaaggttcttcgttgtctccaagatcgccgacgaaaccggcatggagtggttctccatcatcaccacccccaacccaatctttagccacttggcgggccggacatcggtgtggaaggcaatatctccggcggtcttgcagtcgtcgttcaacaccacgccggagatggagaagctgttccgtagcaagaggcttgactcggagatcttctttgcgccttcaaactgattcattcgccggtggaaaatggtccatccatctcgagtaaacttggtgtcctgggtgtgttctttagcagcttcagtttagaataatcaggttatgtcttcatcatcagttttttagatcggttcatgtaataataaacttgagatggtacacatgtttcttaattagttctcttggtattt

SEQ ID NO: 17723 - DNA, 919 bp, Zea mays
  Clone ID: LIB3075-009-C11_FLI
ccgggcgctttcatagtcagccatggtaatggtatcgcatcgtagccactaaagtaagggagggccccaggaaagaagcgctggttcgatgaagctgcataaataaagccagcacgcaaaccagcagcgttcagaggaaacccatttacgtatatgcccttgtcccggttcctttccccatccccaactccattatttgcttgatccttgagaagagagaggaagacgagagctagaagcgaaggagaaaagcagttcttcagctaggcaggagggcacaggaaggaggagatggcgtcaaagaggattcagaaggagctcaaggatctgcagaaggaccctcccacctcgtgcagtgcaggtcctgttggtgaagacatgttccactggcaggcaacaataatgggtccatctgatagcccatattctggtggagttttcctagttacaatccattttcctcctgattatcctttcaaaccaccaaaggtggcatttcgcactaaggtgttccatccaaacatcaacagcaacgggagcatttgcctcgacatcttgaaggaccagtggagtccggcactaaccatcttcaaggtgctgctgtccatctgttccctgctgactgatccgaaccccgacgaccctttggtccccgagatagctcacatgtacaagacggaccggcacaagtacgagaacaccgcgaggacctggacccagaggtatgccatgtagtattttctctacctggcctttggggtcgctgctgcgttgtgttgccgggacctggacgtgcctccatgtattcgttctatccttcctgtataatgatgaaccgaattgggtttgcagtacagtgccgcgtgtggtgctgaatgctgctgtattgtgtcacttggaagctgtaattctcagtgtc

SEQ ID NO: 17724 - DNA, 1627 bp, Zea mays
  Clone ID: LIB3075-009-F6_FLI
ggtcaaattgagagtaaaaaataaagagttttgtacatggtctaagatcttcatccgctagggaatttttggagatggtctaagatcttcatccgccagggaattgcccgctaattggagtctctcccgtagtcccgtgtttgagttgttctcctctcatctccatcttcgcaacgaccacgaattccacggccaaccaatctctggtctatcgctctcttctccttgtctttaaatctgagactttttttgttcgcgtcctccgccctcaaccgtagccacctcgctgcccctgccgccgacacccctgctcgccgttgctgcagccgcacaggcgatggatcatgaagaagtgaccgaattcctgggccaggtgcccctcctgcagtgcctcccgggttcctctatccgcagaatcgcggaggccgtccaggtcaagaactacgaacctggtgactatgtcgctcgcgaaggtgaacctgtcaatggcctttacatcatagtggatggccaggctgaagtttctgcacctgcgaatgcagaagaagcaaatcgcccagactatgtgttaaataagtacgactactttggttatggaactaatagttctgttcatcaagtcaatgttgttgcactatcaaagctgacctgcttcatattgcccaatcaatatggacatttgttacaaccaaaaacaatatggaatgcagaggaaacacctgaacattctttgctggaacaaattttgcacttagaaccactagaggtcgatattttccgtgggtttactttgccggaagctccaacttttaggcaagtttttggaggacaattcattggacaggcactagcagcagcatccaagactgttgattgtctaaaaatggtgcatagtttgcatgcaatttttcttgttgctggagacaataacataccgataatatatcaagttcatcgggcacgtgatgggtccagctttgccacaagaaaagtggaggcaaagcagaagggcctagctgtattcaccttgattgcttctttccagaaggaagaagtgggttttgagcatcaggctgcaatcatgcctgatgttcctccgccagaacagctccttaatctggaggagatacgtgaaagacggcttactgatccacgcttcccatcccaatataggaacttggcagctaaaaaaaagtttattccttggcccatagaaatgagattttgtgaaggttcagcgtctcaacataaaccaagcttaaactactggtttagagctcgaggggaactctcagacgaccaggctctacacagatgtgttgtagcatatgcttcggatctactattttctggggtgagccttaaccctcatcgggagaagggtttgaagacatactgcctcagtcttgaccattccatctggttccacaaacctgtgaaggctgacgaatggatgctgtatgtgatcgagagcccatctgcgcacggtggtcgcggtttcgtcaccggacgcatgttcaacaggcaaggagagcttatcatgtcgctgacccaagaggcattgattcgaagggagaagccgcgaggtccaaatccgagtccgaagctttgaggcacctgacagcct

SEQ ID NO: 17725 - DNA, 1062 bp, Zea mays
  Clone ID: LIB3075-009-G7_FLI
atcgagcagaggtcgacaagacgagacaagagaatgcctgtgagcaggatcgccgtgggcgctccgggcgagctgtcccaccccgacaccgccaaggccgccgtggccgagttcatctccatgctcatcttcgtcttcgccggctcaggatcgggcatggccttcagtaagctcacggacggtggcgccgccactcctgccggcctcatcgccgcgtctctggcgcacgccctagccctcttcgtggccgtctccgtgggtgccaacatctccggcggccacgtgaaccctgccgtgaccttcggtgcctttgtgggcggcaacatcagcctcctcaaggccctggtctactgggtggcccagctcctgggctccgtcgtcgcctgcctcctcctcaagatcgccacgggcggcgcggccattggcgccttctcgctgtcggcgggcgtcggcgccatgaacgccgtggtgctggagatggtcatgaccttcggcctcgtgtacacggtgtacgccacggccgtggaccccaagaagggcgacctcggcgtcatcgcgcccatcgccatcggcttcatcgtcggcgccaacatcctggcggggggcgccttcgacggcgcctccatgaaccccgccgtctccttcggcccggccgtcgtcaccggcgtctgggagaaccactgggtgtactgggtcggcccactcgcgggcgcggccatcgcggcgctcgtctacgacatcatcttcatcgggcagcgcccacaccagcagctgccaaccacggcagcagactactgatgaccatcatcatcatgcactgaataattaagaccagaccactcaatatatatacatatgaagaataacatgccaaatctcatctcctagctagcaacttgattctccatatatttcttaaatacaaactaaactcgattgagtatagcttggtatgaaaccacatgtgtgtgatgttattttgtccttgtggtaatttgtacatctctatctctatcatattaaagcatcaatttcgacagtcgtcttccctcataattttac

SEQ ID NO: 17726 - DNA, 730 bp, Zea mays
  Clone ID: LIB3075-009-H10_FLI
cttgtgggaaaataacatatattcactgcaaagctggaaggggccggagtacaacaatcgtcttgtgctatctggtcaaatacaagaatatgacacctgcagcagctttcgagcatgtacggtctaaaagggctcgagtgctgttgacacattcgcaatggaaggctgttcaagaattcagcaagaagaacacggaccttcctgctctcacgagcggtcccgcaacagcatctccagcacgggacgcggcaccggtaacagtagcggatctgaacggcaataatgctccagagtttcttgcggaggatgccagcttgtctagacgcaacaccacaccgtcgaggccaacgattaagatgctgtcatgcttgtttccttctcgcatctgatgaatggtcactggacgtcgggtgtccgaggcgcatgcgtggtagcccccggtcgatctgtctgcgaagcggtgtgcagtgcagggcggcgcggcggcagcatacctttccgaaaagaaaacggcatcagcactggcgttagtcatatacttgtccatattcacccgatttgcctatatatatatatatatatatatatatatatatatatatatatatatatatatatatatatatatatatatatgggaaaatatcctatgcaattacttatcctggtgcaagcatgcaatcaagcgatctggtgtatccgatctagatctaatgatgactgttatttt

SEQ ID NO: 17727 - DNA, 514 bp, Zea mays
  Clone ID: LIB3075-010-G7_FLI
gcctaccataaaaagagaatctttcaaagatggcgtccaagaagatggtcctcgccgtggcggcactgctgctagtcacgctcgcactgcaggtcgcccctcctgcgatcgccatggactgcaaggccgggtgtgccgagatcaagaactccccactcggcataagcatcgaggagtgtctgaagaggtgcgaggggatcgccactgagcagggacctagggacccttacaaggataacaaacttgatatcccataaacacttatgacttgctgatatatttgtgcctatccaatcatttgtgatagatcaatgcatctttgtgttaaaaatagatagatcaatacatctgtatatatgctcactccgttcttttttatttgtcggcgtttagttcagaaatgaactagcggacgacaaatattagagaacggaggtagtactatgcaagcctacccatgaaatctggttcccctattggcgtctaacagtttattttgtattccacgatatag

SEQ ID NO: 17728 - DNA, 1671 bp, Zea mays
  Clone ID: LIB3075-011-A4_FLI
taggcgtcttcgtactcgcctacctccgcggctcaaacctttcccccttctcccaattcccgccgccgctccatcccgtaacgcgacaccatgagggagtgcatttcgatccacatcggccaggccggtatccaggtcggaaacgcgtgctgggagctgtactgccttgagcatggcattcaggctgacggtcagatgcccggtgacaagaccattgggggaggtgatgatgctttcaacaccttcttcagtgagactggtgctgggaagcacgtgccccgtgctgtttttgttgaccttgaacccactgtcatcgatgaggtgagaactggcacctaccgccagctcttccaccctgagcagctcatcagtgggaaggaggatgcagccaacaactttgcccgtggtcactacaccattggcaaggagattgttgacctgtgccttgatcgcatcaggaagcttgccgacaactgcactggtctccagggcttcctcgtcttcaacgctgttggtggaggaacgggctctggccttggttccctcctcctagagcgcctgtctgttgactacggcaagaaatccaagcttgggttcactgtgtacccttccccccaagtttctacttcggtagttgagccatacaacagtgtactgtccacccactccctcctcgagcacactgatgtggctatactgctggacaatgaggccatctacgacatctgccgccgatcccttgacattgagcgcccaacctacaccaacctcaacaggcttgtgtcccaggtcatctcatcccttactgcctccctgaggttcgatggtgctctgaacgtggatgttaacgagttccagaccaacctggtaccctacccgaggatccacttcatgctttcttcgtacgctccagtcatctctgctgagaaggcctaccacgagcagctctctgtggctgagatcaccaacagtgccttcgagccatcttccatgatggccaagtgcgacccacgccatggcaagtacatggcctgctgcctcatgtaccgtggtgatgtggtccccaaggatgtgaatgctgctgtggccaccatcaagaccaaacgcaccatccagttcgtggattggtgcccgactggcttcaagtgcggcatcaactaccagcctcctagcgttgtgcctggtggcgacctggccaaggtgcagcgtgccgtgtgcatgatctccaactccaccagtgttgtggaggtgttctcccgcatcgaccacaagttcgacctcatgtacgccaagcgtgccttcgtgcactggtacgtcggtgagggtatggaggaaggtgagttctctgaggcccgtgaggacctggcggcgctcgagaaggactacgaggaggtcggtgctgagttcgatgagggcgaggatggcgacgagggtgacgagtactagagaagtttgctgatgacgcagcatcaggccagtgtgctgcccttatcccgtgatctgccgagagttgctcctgctatcgtgttatgtgtgtctgttctgaagtattgtgtggtttacaacacctgatgttgtaagagttgttaattcccctgcattgctaccgggttattgagaataattatggctgtttacgttgttgcttcatctcggagatgctttacattt

SEQ ID NO: 17729 - DNA, 387 bp, Zea mays
  Clone ID: LIB3075-011-B6_FLI
gggaaccgccgccgacgccgcaggaggagacgcatcgaggttagcacgcgaagaagcgaccatgagggccaagtggaagaagaagcgcatgaggaggctcaagaggaagcgcagaaagatgaggcagagatccaagtaggcagatcgagatggattgtggacctgatgacatgcgtgggtacatacatttcttcggatgcgttggtgtgcctgtggagagatgtcaacctgccatggtgtcacggtccgccatcagttgaacgtcttgcctgcacttcagtaggccacttttcatggttctagttgtatttgaatccagcgtttgccactaagataaatcagacagtcgttttgtgaacctattatgatggagctttatttgctgat

SEQ ID NO: 17730 - DNA, 665 bp, Zea mays
  Clone ID: LIB3075-011-C12_FLI
gtcactgcaagcctaagcctgatcccaaaccgctgatatgttgtgtctgttgccactgcaagccggagaagaaggaagagaagaaggaagaaaagaaggacgaaaagaagccggcgccggccaaaacggagtacaagtttgtgccctacccgtacccgctgccgaaccccgcgatgtgcccgagctggccgtggcagtgcccgcctcagcagcagtgccagtgctgccagaagcctccgcctccgccgcccaagtcgccgccgaagccgccgccgtgcacctgttcgagccacgccgcctgtgtctgcggcaagacaccgccggcggtctggccaccgatgccgccgccggtctggccgcccccgtggggcacctgcaacgtcgtcaccgaggagagcccgtgctccgtcatgtgacgctacgcgcttgctttgtcatgtactcgtcgctgttggcctgttgctgtgctgccatcggtactggacctcggtgctacttgggccggtgccattctgtgtagtgaaggtacagtgcatcgtctgcagatgtgcttgcctcctacagtctcttatacgaacgtgtcacgccttgttttattgcagtaattatgtagcttccagccataatttgctactctgtatatgtggtataagatgaattttcat

SEQ ID NO: 17731 - DNA, 447 bp, Zea mays
  Clone ID: LIB3075-011-E10_FLI
ctggagacgcgcacggccggcttctcgttcgccgtcagctccaacatgctcttcaccttcctcatcgcgcaggcgttcctgtccatgatgtgctccatgcgcgccttcatcttcttcttcttcgccgcctggatcgtggtcatggccatcttcgtcctcacgctgctgccggagaccaagggcgtgtccatcgacgagatggtggaccgggtctggcgccgccattggttctggaagaggtgcttcgccgacgactacgacgcggccagggtctacgacaactgctagtgctaggcacgcgcgccgccggggattagtttttttgtcattgtaattagaaatcggcctgattaattgatttcgttgctatgacatttaaattgatgtcgtggcaatcaacaggcaaaactatatagtatatgagaaatatgctcgagttctcgtgtg

SEQ ID NO: 17732 - DNA, 1558 bp, Zea mays
  Clone ID: LIB3075-011-E6_FLI
ctcattgctgcctttggtgcgtgcatcgtctgcagaagaaagaaggcagcaaataaggagtctaggaaacccgatgacggccactggactcctctcactgactacagcaagtcacggtcgaacacctcagcgaagacagcgaccacagggagccgtacatcaacgttgccatccaatctgtgccgccatttctcgtttggcgagatccaggcggccaccaagaacttcgaccaagcctctctcctcggtaaaggcggctttggaaacgtgtaccttggagagatagacagtggcacgatggtggcgatcaagcgcgggaacccgacgtctgagcagggcgtccacgagttccagacggagatcgagatgctgtcgaagctccggcaccggcacctcgtgtcgctgatcgggtactgcgacgacatgaatgagctgattctagtgtacgactacatggcgaacgggactctgagggagcacctgtacaacaccaagagggcggcgctgtcctggaagaagcggctggagatatgcatcggcgcggcgcgggggctgcactacctgcacacaggcgcgaagcacaccatcatacacagggacgtgaagaccaccaacatcctgctggacgacaagctggtcgccaaggtttccgacttcgggctgtccaagacgggtcccaacaacgtcgacaacacccacgtgagcacggtcgtgaagggcagcttcgggtacctcgacccggagtacttccggcggcagcagctgacggagaagtcggacgtctactcgttcggggtcgtgctgttggaggtcctgtgcgcgcggcccgccctgagcccctcgctccccaaggagcaggtgagcctggccgactgggcgctgcactgccagaggaagggcgtgctcgggcagatcatcgacccgcacctgcaggggcaggtctccccgcagtgcttcctcaagttcgcggagaccgcggagaagtgcgtggcggaccgcagcgtcgacaggccgtccatggccgacgtgctctggaacctcgagttcgcgctgcagctgcaggggagcgcggaggacagcggcagcgtcgtcgtcgtcaccgacggaacgacgtcgtcgtcctcgaacaggtcgtcgccgcttatcgtctccgggcttcactcggacgagccgccgacggacagtacgaccaccaccaccaccacgtcgtcgacgacgactttgagcatgatgggacggagcctcgccagcgtggagtcggacgagctgaccccgagcagcgtcttctcgcagctcatgcatccaggtggcagatgaaaacggaaagtacaactggagtagatatcgtctgatcgatgtgctatatatatgtttctagttcatgctatatatatatatatgtgggcaactagtatagttatgctccatacatattcatcatatagttcatcctatatattagtatgtattgtgctagagccctctgaattatatatcttaaacatgtacctgagctatgttctcacttcttcaaggccgatctgtaatgtttgcgtct

SEQ ID NO: 17733 - DNA, 684 bp, Zea mays
  Clone ID: LIB3075-011-F5_FLI
gagttggcggcggtagttatcgcttccggcgatctcgcgcgtggagtcccgagtcgccaaggctgccgaaccctacggccaggccaagatttagtagtagctactataaatctgcagggtcgccagcactttggcctctcaacgcacgccccccgcccgacgtttccgatctcgtttctctcctcccgagtagcgaaatcttcgtacattctgagatgcagatcttcgtgaagaccctcgccggcaagagcatcaccctggaggtggagagctcggacacggtcgagaacgtcaaggccaagatccaggacaaggagggcatccctccggaccagcagcgcctcatcttcgccggcaagcagctggacgacggccgcatcttggccgactacaacatccagaaggagtccacgctccacctcgtcctccgcctccgtggtggcggcggccagtgatctggtctgctgatcgcctcccgccatggggactggctagctcttgccgctgcctgccagtgcgtgctcgtttcgtctttcattacgttatgtcttgctcaggccgtctcatgcatcttcatcagtctcttgtcttaggtcgtcgtttcttcttcacattggtaggaacgcacgttgtgcagtgctttggttaaaacaatttggagtaataaatctggcatattgttct

SEQ ID NO: 17734 - DNA, 930 bp, Zea mays
  Clone ID: LIB3075-011-G11_FLI
attcatgttgatgtcatggatgggcgctttgtgccaaacatcacaattggacccttggttgttgatgctctgcgtccagtgactgatcttccgttggatgtacatctgatgattgtggaacctgagcagcgagtccctgattttatcaaggcaggtgctgatattgttagtgtccactgtgaacagacatcgaccatccatttgcaccgaacagtcaatcagattaaaagtctaggagcaaaggcaggagttgttttgaatccagcgactccactcactgcaattgattacgttcttgatgttgttgacctggtgctgattatgtctgtgaatcctgggtttggtggccagagctttatcgagagtcaagtaaagaaaattgcagaactgagaaggttatgtgcagagaagggagtgaacccctggattgaggttgatggtggtgttggtccgaaaaatgcctacaaggttattgaagctggcgcaaatgccattgtcgcaggttctgcagtttttggggctccagactacgctgaagctatcaaaggaataaagaccagccaaagacctctagctgtagccgcataaagagctggacgtgtaatcatttactctgtgcaagtttaccagtgatgcgatctgtatagatgtgtgtcttgtccagctatacgtataccggagatgaaaggagacggaggcagtgaagaaatatccttttttttcttctcatttttcacgaggatgccgtgcactgctcccagaatgctgtgtccaatttacaaacgcacaggtggcacatgaactagcagagtagctctctcttgaaaggaaactgtatttggggtcgatgaaccctctggtgttattcttcagactggtaaacgatgtaacatgtttgataatcaataaagtgcgtcgtatggctttcct

SEQ ID NO: 17735 - DNA, 1280 bp, Zea mays
  Clone ID: LIB3075-011-H3_FLI
caccgacacgctcaagaacaagttgaacttcaggggcttcgtgatcacggactggcaggccgtggaccgcatcacgaacccgccgcaccagcactactaccactccatcaaggagacgatccacgccggcatcgacatggtgatgatcccctacgactacccggagttcgtcgccgacctggccaagcaggtgaagcaggggcagatcaagctggagcgcatcgacgacgccgtcagccggatcctccgggtcaagttcgccatgggcctcttcgaggacccgctcccggacccgcgcctcaccaaggagctcggcgcgcaggagcaccgggcgctggcgcgggaggccgtccgcaagtcgctcgtgctgctcaagaacagcaagaaggggcaggcgaagccgatgctgccgctgcccaagacggccaagaagatcctcgtcgccggcagccacgcccacgacctgggcagccagtgcggcggctggaccatcaagtggcagggggagaggggcaacaacctcaccggcgtcggcaccacgatcctggaggccatcaagaaggcggtggacaagaagacgtcggtggactacgtggagcgcccggacaaggacgacctggccaagagcgccgagggctacgagtacgcggtggtagcggtgggcgaacccccgtacgccgagacggccggcgacaacaagaacctgaccatcccgtcgccggggcccgaggtgatcaaggacgtgtgcgggctcgtcaggtgcgtcgtgctcgtcgtgtccggccgccccctcgtgctgcagccgtacgtggactacatggacgcgctcgtcgcggcctggctgcccggcacggaggcgcagggcatcaccgacgtgctgttcggggactatgggttcacggggaagctgccgcgcacgtggttcaagtccgtggaccagctgcccatgaactacggcgacaagcggtacgacccgctgttcccgttcggcttcgggctcaccaccaaggctgccgcgagtcacgattagcaattagagttagactctgcttttgctttttcggtgttgatgaaatagttagcgggaacggcaaataagcacttttttttgtagaagatacacaaagctttttttttgtaggtgtagttaaaaaagattgataaaataattgatttaggccttgtccgttttatcttgagatagtgatttagactggtaggaaattgaaaccctcataatccctttcaaccccttgattgtttgatcatcaaacgagaac

SEQ ID NO: 17736 - DNA, 1344 bp, Zea mays
  Clone ID: LIB3075-012-C12_FLI
gaggggagggaaggggaggtgaacggagggagcggaggaagatctcgggctctcagagctgcatcctgaacccatcgcgtaggaaggggcaaaggagtcggagctgatccggcagtcgctctctctcggattgagtacgatttgacgcatttgcggccgagctttcttgcacccaagatgagtgggcatggtgacactgcgacctcagctaagatggcgaaactgaaggagttgttgcaaaagagtgaaaaccacatttgtgctgactgtggtgcatctgatcccaaatgggcatcagctaatattggggtattcatttgcgtaaaatgttctggcgtccatagaagtctcggtacacatatttcaaaggttctgtcagtgacactggacaagtggtctgacagtgaagttgactccatgatagaagttggtgggaattctcaggcaaacgcaatatatgaggcttttataccagagggctaccagaagccacattcagattctacccaggaagagcgagaaaaattcatcaggtctaaatatgagctgcaggaatttctgaagccaagcttgcgcattgtttctcatcagcctagtgactctggaaaacatgccggaaatgcttctcattctgatggttccaagagtcaagtcggcatgatcgagttcattggaatattgaatgtcaaggtgattggaggcaccaacctagccatcagggatatgtcaagcagtgacccttatgtcgtcctgacacttgggcaacagaaagcacaaacttcagtaatcaatggcaacctgaatcctgtctggaatgaagaactgaagctctctgttccccagcaatatggacctctgaagctgcaagtgttcgatcatgacatggtgtccaaggacgacctcatgggtgaggccgagatcgacctgcagacaatgatcaacgctgccgcagcatttggcgacccggagctgctgggcgacattcagatcggccggtggctcaagtccgaggataacgctctcgtcagggacagcgccgtggtggtctctggtggcaaggtgaagcaagggatggcactgaagctgcagcacaccgagtccggcgagctggagttggagatggagtggatgccgcttaacgtgtagaaatctgctcaagttgccacctttataatgggtgtgggatacaaagaatttgttttgcttttgttgccaagagaaattgttatattttggtaattggcaagggctctcttcaaaataaagatctgaatcgctaaaaggtgtgttgtggatactaaaatttgagagatgattcacaagaaactcctttttttctaatct

SEQ ID NO: 17737 - DNA, 716 bp, Zea mays
  Clone ID: LIB3075-012-C6_FLI
ctactatcctcggcaatattaatgtaggcgaaggtgccatgattgctgctggctcccttgttttaaaggacgtacctccccacagtatggctgtaggtaatcctgcaaaggtagttggttatacagagaaagaagatccttctttaactatgaaacatgatgcaaggagagattattttgagcatgctgccatcagattgagatgattgatacacctaatgacgagtcttctttctattcgtctgtggaatactgtggagtaaaaaaagttccaaatcgccttattggcaagaagttttgtggagttaaaaaaaggtttcgtcgtcttactcgcaggaaaccttgtgaagttaaaaaaaaaatgtttgacgaaacgcatacggatgccattccggacatttcgtcacaggcacaaggctggatagtcgatgagctctgtgtttccctttctgcccagacaaccaaatgaagatggaaaagggtcacccagggctccaaaatctagagtgtagacaagcatgtccttaatgcgccttaaattggtctggatggcacttttttgtgataaactatctatctaaaccactgactaatgtctactctactctcaacaagatcaattaattgtatatttgatattaaagttggaatgtttagtatgacaaatttaatattttaaaatagatatgcatgaaatttgatcttgatctttttct

SEQ ID NO: 17738 - DNA, 564 bp, Zea mays
  Clone ID: LIB3075-012-F7_FLI
cgtcgacggtggcgagcctctctgtcccggtgacgacggcgaccttcgcggcggcggcggcggcgggcggcgccgacgtgctgatcgtcgtcccgaggagggcgggcgccgggcgcgtcgtctggttccccgcggcggcgcgccgcggcggcgggcggttggtcgccgtgcggtccagcgggccggccacgccgtcggagatctccgacaaggtgtcggagagcatcaagcaggcggaggagacgtgcgcggacgaccagaagggcgacgccgagtgcgcggcggcgtgggacgaggtggaggagctcagcgccacggccagccacgcccgcgacagcctcaaggagaccaacgccaacgacccgctcgagaagtactgcaaggacaacccggattccgaggagtgccgcatctacgacaactagctagtcgtatagctatataggccatcgacatgaaggacgaaggttgtagcacactacgaaagaatgatactctcgatcggcgcgtcatacgtggaatgaacttgtttgtatcaagctatctatacctcaatgcttctct

SEQ ID NO: 17739 - DNA, 1196 bp, Zea mays
  Clone ID: LIB3075-012-H1_FLI
gcaggaggacaagtggtggttgccctgcccaagagtgccgcccaaggggctgtctgaggacgcgaggaggaagttgcagcaaagcagggattgtgcaaaccagatactcaaggcggccatggcgattaacagcgatgtgctcgccgagatggaaatccccgaagtgtacctggagacactgcccaagaacggtaaatcttgcttgggtgagataatttatcgatacataacagctgagcagttctcaccagaatgtctcctagattgcttggatctatcatccgagcaccacacacttgaagtggcaaacagaatagaaggtgccatccatgtttggaaactgaaaggccaaaaaaagtcgacacctcaagccaaatcaaagatatcttggggtggaaaagtgaagggtcttgttggagataaggagaagagccacactttgtctgaaagagctgatggtctattgcagagcttaagattgagatatccaggcctgccacaaacttcccttgacatgaacaagatacagtataacaaggatgtcgggcagtccatacttgaatgctactcaagggttctggagagcttggcatttaacataattgcaagaattgatgatgtgatctatgttgatgatgctacaaacagatcagctgctgctgagtctgtttcgatcttcaatcgtggcacaggtgtgccagttcagaagaggatctctccaagcccattctctattcagaattcgccgtatggctctccgttcgcaacacccactttctgctcatccaccccagttacaggcagccctggaagggtacagcccccattaaacaaaaacattctaggaactcaagaaatcaaggtcgaaaagctcttttctggtgatctagagaaggtctggacatatgcaggaaacttgagcgctaggaaagacgctggagatgctcctgagagagactgaagggcgatggaggaaggtagacatgtaccgacagccgacagatcctgtaattgctagtagctagatcttcctgtacagaagcagcatgagtatttttttttgttctttttgtagcgagccgatcattgtgtgctctgcttacaatgaatggatgtcacctgatctgaacagagaaacttgtagtttcagctgtagtttttttttgttgttgtctggattggctgtttagcagtgt

SEQ ID NO: 17740 - DNA, 615 bp, Zea mays
  Clone ID: LIB3075-014-A11_FLI
caaggacatggtcgcactctccggcgcgcacaccatcgggaaagcgcggtgcacttcgttcagtgcgcgccttgccggcgccggcggcgtctcggaaggcggcgcgggcgccttcaaggacctcaccttcttgcagtcgctgcagcagctgtgcacggggtcggctgggtccgcgctggcacacctggacctcgccaccccggcgaccttcgacaaccagtactacatcaacctgctctctggcgacggtctgctgccgtcagaccaggcactggcgtcgtcggctgccgtgcctggggtagaggcggacgtcgccagcctcgtcgccacctacgccttcgacgcctccgtattcttccaggacttcgcggagtccatgctgcggatggggaggcttgcaccgggcgtcggcaccagcggcgaggtccgccggaactgccgggtggtgaacagctccgaataaagtcatgcatgctcacgctcaactatctggtcgtccgtgcggcttgcattgctgatttgttatcagctaagtcaagccagtaagtttgtttgggttaaaaaataatcggctttggcatgggaattatgataatggccatcgtttaaaaagct

SEQ ID NO: 17741 - DNA, 1688 bp, Zea mays
  Clone ID: LIB3075-014-B1_FLI
caacctcagagtccatatcggtccctttctcctctagtactggacaagctgttcgtccttttagtgcctcagtttttttgggttttgatgcagatccatcattgaatatcacagctcgaatccgtggtccaaatgatcagtacataaatcatatcatgaaagaaacaggggttactgttgtactaagaggaaaagattcggagaatcttggcagttgtcatagtgaagcctcacaacaacctctacacctatacctcacaagtatgcatttaaagaacctagaagctgcaaaagttttggcagagaacctcctggatacagtagcagcagaattcggtgcttccagaatttcttcttcaaaagtatatggtgctgttccacctcctcagcagttgttagctggtgtcgacacctcaggaacaaaatcagatgttcactatattgtagggcccaatgtgttatcgggagctacacattcctttgcatctactggagttattgctcctgttgttgctcctgcagtgacagtgcaatcaggggctccaacatattctggggttccactacccagtaacatggcctatcctattcccccagcaaacggtggggcattttacagtggttatggggacatttatccccaagcaactccgttgcagcagctggcattcacactcaagcatgcctcatcgtcggcaactcaggctgttccagtgacgtccacaccaacaagcatggctacaaaggggaactcaatcttggatgcggagatggataaacgatcccgaaggaaattccaggaactaccggtttcgaagggcccagcaacagaaagtcagaactcacaacaggggtccaaatttgttaagacaggtttagatagttcaggtaacattgggagctcatcaattgcacctccgaagaaagttcaccctggatcaaatggaatgcttccggcagaagaagcggatatgccatcacatctctctatatccactaagatgctaccaccacccctgaagagcatgctgccactgccacccagaagcatgcccccaccaccacctaagagcatgcctccaccgccaccaaaatttccttcagatgagtttttgtcaagaaacgagaacaagttttttcctttaaaggagccaacagcacctccaaggtcctttgatgcaatatcagtcttgccatctgaacgacgaccaagggagcctaaggaggaaaaaacaaaaggcacacctgtgtctgatactttgctgaaacttattgattatggagatgacgacgatgacgacgatattgatgtgacagacaacatacctaagggcaatccaactcctggttcagagcagaaaccattttgggctgtttaaaactgggtctgctaacgtagtctagtgtgaattcttgttgataaggatgcttgctgccttggtgcatcttctgaattgaagaggcaatcgagctccttgttcgtgtactgtagtaattctaacaggcaatgagatttctttgaacttgtattcattctggcgtagtcaaaatgaaccgtttgttgttttggttcagatacgatgatgtttcgtttttagattcgacgttggttgctgaactcgtagcattttattgtcggtattatgtaattgttagagcctatgtcaattttatatccactgtcgtgc

SEQ ID NO: 17742 - DNA, 777 bp, Zea mays
  Clone ID: LIB3075-014-E2_FLI
atcaatgtagcaaggtggtttaatcacattgatgcactcctgaggctgagtggagttaccgcagagggcctaggtgttaaggttgagccatctgcagttccttcagcttcaattcttgatgttgctgatggacaggccccagctgctgacgaggatgacgatgatgatgttgacctttttggcgaggagactgaagaggagaagaaggctgctgaagaacgtgctgcggctgccaaggcttctggcaagaagaaagaatctgggaaatcgtcagttttacttgatgtgaagccatgggacgatgagactgacatggccaagctcgaggaagctgttaggagtgtccagatggaaggactgctttggggcgcatccaagcttgtcccagttggatatggcatcaagaagctgcaaatcatgatgaccattgtcgatgaccttgtctctgttgacactctcatcgaggaccatctctgcgctgagccagtgagcgaatacgtccagagctgcgacattgtcgccttcaacaagatctaaatttccttgtgatggtggcaatggtggttggtgggcactgtaccagcctaatttataattttccatgagcatcttcaagagtttttctaaattatcatttggagtcatttacataaaaagcactttctatatctttttaatctcaacaacttttctatatcttgttggcaccatctttagctagcgagaaacctggatggctggaatagaagataactatatttagacaatacttttagt

SEQ ID NO: 17743 - DNA, 1669 bp, Zea mays
  Clone ID: LIB3075-014-G8_FLI
ccaacaagcaagaccgcttctgcttgtgatccgaaacctttcttcgaacgcaaaaagaaccccacccgacgtaccgcgagccggcgatggcgacggtggcgatggacatctcgaagcccacgccggcagcgtccggtgacgaggcagcggcggcggcgaaggggaggagcggcggcgggggcgaggggctgcggcagtactacctgcagcacatccatgacctgcagctccagatccggcagaagacccataacctcaaccgcctcgaggcccagcgcaacgacctcaactcccgagttagaatgctcagggaagagttgcagttgcttcaagagcctggctcatatgttggtgaggtggtgaaggtcatggggaaatcaaaggttctggtgaaggtacatcccgaaggcaaacatgtggtggatatagataagagcattgatatcactaagatcacaccttcaacaagagttgctcttcggaatgacagttatatgctccatctgatcctaccaagcaaagttgatccattggtcaatctcatgaaagttgagaaggttccggattctacctatgatatgattggaggccttgaccagcaaattaaagagatcaaagaggtcattgagcttccaatcaaacatccggaactgtttgagagccttggaattgcacaaccaaagggtgtccttctttatggacctccgggcacaggaaagacattgttggcacgtgcggttgctcatcacactgactgcaccttcatcagggtgtctggttctgagttggttcagaagtatattggtgagggctcccggatggttagggaactctttgttatggccagggaacatgcaccatccattatatttatggatgaaattgactctatcggatctgctagaatggagtctggaactggcaacggtgacagtgaagttcagcgtactatgcttgaacttctaaaccagcttgatggttttgaagcatcaaacaaaattaaggttttgatggcaacgaacagaatagacattttggatcaagcccttctgaggcctggccgcatagacaggaagattgaatttccaaatcctaacgaggattcacgtttcgatatcttgaagatccattcaagaaaaatgaacttgatgcgtggcattgatctgaaaaagatcgcggaaaagatgaatggggcctcaggagctgagctcaaggccgtctgcacagaggctggaatgtttgctcttcgtgagagaagggtgcacgttacccaggaggacttcgagatggcagtggccaaggtgatgaagaaagacacggagaagaacatgtccctgcgcaagctctggaagtgaggctcgtgcctacctttcacagccttcccgaagctagtggcagtgccttcatatccatatcttttaccaaagcagtggaatggcgtaacggcatgctctggacaatgttatctcaagttgcgccgcgcatgcttatgtttaaagttttccttataacgtctgtagtgtgttgttgcaaagttgattggctttatcagatcagctagattacggtactaatacattgctagctcgcgatgtggacactgcataatggttacttgctcggattatccacattctcgtgtgtaacatgcattgcaatgtcgtggccc

SEQ ID NO: 17744 - DNA, 439 bp, Zea mays
  Clone ID: LIB3075-015-A11_FLI
ccgatcagtggacctcatgtttggtgttcaaatcctgcagcattacaaattgatcacacttttctagctgcccatatccgcactccaataattgttataataataacaatttacacacaaaagaagaggtcatccgacaacgaagcgttaaagcccaaacacttgtattcggccgaaactacaaggcccagcagcctacaccatctaggcctcgggcttcaggataccatttaccacggataggcccacgacgaccccgagcgcctcggcgccggcgaccaccgcggcctgcactagcccgtccccggcgagctccgcgccggccaccagctgcaggccctcgctggcgacctccttctccgcctccgtcaccgcccccttcacggcctccccgcccaccgccgcggcctcctccacctcccgcaccgcctcggccgcc

SEQ ID NO: 17745 - DNA, 611 bp, Zea mays
  Clone ID: LIB3075-015-A9_FLI
gttctctcttcctggtccaagtgatcttgccaagttacgagcagcgagcagagatcagatcatccatcggcaatgtcgaacatcgggcagtccttccaggccggcaaggctgaggcccagggcgagtaccaggcggagcacgcggcgcagtgcgtcaaggacaccgccgcagccgcggccgacagtgcgcagctgcagcagcaccgccccaccggcaccgttgagcaggtggcgcagacgggccagggcgtggcggcaggcgtcaaggacacggtggcgggcgcggcggttggcgtcacgaacacggtggcgggcgtggcggcgggcgtcacgaacacggtcacgggcgccgtggcgggcgtcacgaacacggtgaccggcgcggcggcgggtgtcaaggacaccgtgaccggcggccactgatcgacgacccaagaatgcttcatgcatggccaagtgttgagggtttgaggccaaagatggcttgaatttccgtccttttttgctttattttttgacattattgttttaacatgtttcattcacccgtctctgattgggattgtgatcacgaccgcctgcaataaaaaaggccatctttactatgatcc

SEQ ID NO: 17746 - DNA, 1010 bp, Zea mays
  Clone ID: LIB3075-015-E7_FLI
ccgggtttctgagcatcaaccgcgcaatgagccttgacagcgtggaggttgatctgagccaggagcttcaggcgccgaccaggccaatcttgcaaacccaggttgaggctgcctggagaggacgggcaattggtgctgaggctgtgaatggagccagcgctcctagatggaggctagtccctactcgcagggagcaggcaaagtgggacagagcggccaaggcagccactggtggaagtgatgttatactaagggagtcaaagtcaagagtgcagcaaggagaccctaaggtattggcagctcggtccagagaagactacttacagctgaaacaaagattacagtggttcactttaggcattggtggcgttggtgtaatctctgcttatatttcatacactcctgaaattgctgtcagctttggtgcagggttgattggatcattggtgtatctccgcatgcttggaaccagtatagattccctagcaggtggaactggagaaactgtcaagagtgctgctgcacaaccaaggttgcttattccagtggtacttgtgatgatgtataacagatggaatcagatattagttccggattatggtttcatgcagcttgagttaataccaatgcttgttgggttttttacctataagattgctacattcgctcaagcaatccaggattctatacctccagtcggaaatcgtgaaggttgaaaagtgtcatgttgtatataaacgaaggtggtagccatggtccctggtcagtggtcacccagatagtaaggtatgtatagaagaatctggtctggtgtcatcgccaagtagatgagatgctcgttgaggacgccatttgaaaatctcgagtgcttaactatgttctgcacaaatattttgacgaaaggtgatgttaccacattcattccatattacacgcagatcatcagtgtataaatttacggctccgaacttttaccacaacgattaattgacaaaacaattgtatgattg

SEQ ID NO: 17747 - DNA, 603 bp, Zea mays
  Clone ID: LIB3075-015-F9_FLI
agtggagcagctgtatcaaacaatgtcatctcactgtcacaaccatggcgatgaatgttagctttctcagttttggtccagtttcgttactgaagttaccttttcaaaagagcaggtgaactatcattgtgcaattttgctgggagaaactcttgaacttaaatctttttgatatcactagacttcatcaatcatggtggagcctgttattgtcatgcagatgctcgctaagaagtctgcaactgttggttggtcaagggtgattggcgattttgcacatacggatccgcagttactgctgcctcaggttgctcagcaatgtgctgctggttgggcaccgaggaatccatcaggttgcatcctttttgcccggacgtcgatttgtgcagttgaagtggtaaacgtttttttatcttgtttcgtcatcatgtatatacgtaggcttgagtcattgttggctccacattttttggagatataaatgcggtaggagttatgagatgtccacagtcggccctcccttgttgaattcctttggatgtatcctctctctttcgtacatgcactcactgaaagtcaatgcaaatatctcgtgtttctagt

SEQ ID NO: 17748 - DNA, 630 bp, Zea mays
  Clone ID: LIB3075-015-H7_FLI
catcctctgccttgtcgatcatccatcgaccgcctcctgctcggcttcccaccccgcctgcctgcgttgcacaccagggaggagctcctccgaccgaccggccatgagctaccaggctcctcctccgggcacctcagcctacccgccgccgggcacggcctaccctccgccaggccagccgcaggcgtacccgccgccggcatacggcgcgccgccacccatggccgccggcgggtaccctcccccgccgcagcaggactctaagggcggcaacgacggcttcctgaaaggatgcttggccgctctctgctgctgctgcatgctcgacatgtgcttctgagttcgtcgtcaggggctcagggcacggggatggcgcgcctagagtccagaccgatctccatcatgcagtcaggcgaaaaacaatgcatggagctgttctttttttttccttcctttctgaatcatgacgatgatacatctttgtttccgtttccatcctgtatatgctttcccgtgctatgcatggaaacttcactagctaccccagcagggattatgttctctggcgttcatgcgcgtgtgttcttgagctctgaagtctgaaatgaaaacatctgcgatcggattcgt

SEQ ID NO: 17749 - DNA, 881 bp, Zea mays
  Clone ID: LIB3075-017-A7_FLI
gacaaatgaaaaggaacagcagcaagctgcacgagccctacagcagatagaagcaaaagctaaaaagagttatcaaaaagatttagagaataaccagaggaatgttgatggagacacttctgcagcacctggagatggatgggtgcttgactcggcgtcaggatattaccatgacaaatctactggactttactacgattcaaactctggcttctattattctgacagtttaggcaagtgggttacccaagaagaggcgtacaagtctgtgcaagcttcgaaatcagacgctggccaatcctcagcttcacaaacaaaagctcctgctgccgcagaaacagctgtccccgcgattaaaggaggtgcagctccaggccgggtggtaacgaaaccgttgaacccaatgagaccgattaagggcactcctgctccgtctgctgttgctgttaacaagaggaagagggatgacggcaagcccaaggcggtctccaaggaggaggaagcggccctcaaagcgcgggaagcagcaaggaagagagtggaggatagagagaagccgctgatgggattatacaagacgtactgatatcttgtccttgccagactgctactactcttcctccatgcatacgggtttgccaattacagtgtgatgttgtaaaataaatttttttaaaaaatctaaccgaacgcatcattcgcagaaggaatgccggtaatggtgtggcactggatttcagagcttttctgcatcagcaatgtgtgtccacacggtgtaatacctcatcagtggttcttgagtgaatcaagttccaatttgaatcttgtacaaggatatgttcattgttttttttacgcggatggagtgtcgtactcgtacc

SEQ ID NO: 17750 - DNA, 525 bp, Zea mays
  Clone ID: LIB3075-017-B11_FLI
caaccccgtctgcctctgcgagctcctctccggcgccgccgactcctacggcatcgccgtcgactacggccgcgcgctcgcgctccccggggtctgccgcgtcgccacaccgcccgtctccacctgcacagccctcggatatcacgtccgcgtgggcccagctgcggcgcccatgtcagggtctccctcgcccatgtcaggcatctctccctccggggagggcccacagttcccaggaacatcgccgaccgcctcgccgccgtcctcgaccagcaccgcggcgcgccgctcctccgccggcgcgggcagccacctcgtggccctcgccatgctgccgttggccgccgccgtcagcgggatgctctaaggtcgacgactccttcgtctccgcatgcattgcgcagctggacattgttgcgtagtataagctttcactgtgttttctattctatgctgcctctgttgtactatacacataccgcggactcgatcgattatcataaggcgttagccttgcttcttgcc

SEQ ID NO: 17751 - DNA, 1012 bp, Zea mays
  Clone ID: LIB3075-017-D12_FLI
tttcacggcaattgcagctatcatattcggatcgatattttggaatgttgggatgaaacgagacacaacagaagatttgatgcttgtcatgggatctctttacgcggcatgcctgtttcttggtgtaaataacgcctcatccgtgcagcctgtagtatcaactgagaggactgtctactaccgggaacgtgctgctaaaatgtactcatcgttcccatatgctgcagcacaggaaagctgcttctgtatcttcttttcatgttccttactttcacctacttcacgttctacgggatggtggcggtaggcttgaccccaacacaacaagttgcagcagtagtgtcatctgctttttactccttgtggaatcttctctccgggttcctcatcccccagtctaggatccctggctggtggatctggttctattacatctgtccagtggcctggaccctgcgaggcatcattacatctcagctgggcgatgtgcaggccaggatagtcggccctggtttcgatgggaccgtgcaggagttccttgaggaaagcctggggttccaacaggggatggctggtgtcacggttgcggtgctcattggcttctcccttttcttcttcgccgtctacgcgacttctatcaaggttctgaatttccagagaagatgaccagctgcctgagctaagtaagcctccgtggtttgcttttgctactgtgtggtgccaacatcaaagtctacttgctagctactcggcggatgccggatggatgaagcacccgttggtcgtaggattgaagttttcacacgtagagaggatggtagataattaaaggttcatgtctgtatatgattactatcgcaaatataatgagcaacagtagtgatgcatttgtgctgtacgtaagatatacagaagagtatgcctcatctgttgccttcacaataggcaaccacgtgactatttatctggtttttctatatatatatatcaacagagaagtaaaatgtcttct

SEQ ID NO: 17752 - DNA, 592 bp, Zea mays
  Clone ID: LIB3075-017-E1_FLI
gtttcattgattcttgaagagatcgagcttcttttgcaccacaaggtcgaggatgtcttgcaactgcggatcaagctgcggctgcggctcaagctgcaagtgcggcaagaagtaccctgacctggaggagacgagcaccgccgcgcaggccaccgtcgtcctcggcgtggccccggagaagaaggccgcgcccgagttcgtcgaggccgcggcggagtccggcgaggccgcccacggctgcagctgcggtggcaactgcaagtgcgacccctgcaactgctgatcacatcgatcgacgaccatggatatgattattatctatctagcttgtggtggtggttgaacaataataagcgaggccgagctggctgccatacataggtattgtgtggtgtgtgtgagagagagagaaacagagttcttcagtttgctatctctctctgcatgtttggcgtcagtctttgtgctcatgtacgtacgtgtgtctacctgcatgttggttgatccgattgcatctgctgtaaccatatattaattggtccacgatgatatgatttgatactatatatatactaaaaccggacttcttatt

SEQ ID NO: 17753 - DNA, 1151 bp, Zea mays
  Clone ID: LIB3075-017-E2_FLI
accgcgtcaagatcctcatgcagacgcatagcgtgcgggtggcgggagagagtgccaagaagggtgttggatttctcgaggctatggcagacattggaaagaaggatgggcttaagggttactggaaaggaaaccttccacaggtcattcgcattattccttacagtgcagtgcaactcttctcgtatgaagtttacaagaaaattttccggagaaaggatggagagctttctgtatttgggagacttgccgctggtgcttgcgcgggcatgacatctacacttgtaacttacccactggatgttctccggcttaggctagcagttcaatctggacacagcactttatctcaggttgctcttaacatgctgagagaagaagggctggcctccttctatggaggcttgggtccatctcttgtagcaattgcaccttacattgctgtgaacttctgtgtttttgacctgatgaagaaatctgtaccagagaagtacaagaatagaccagaaacatctctagcaaccgctcttctttcagcaacatttgcaactttgatgtgttatccgctggacactgttaggagacagatgcagatgaaaggcacaccatacaatactgtttttgatgctattccaggcattgtggagcgtgacggtctaactggtctttatagaggttttgtgccaaatgcgttaaaaaatctaccaaatagcagcattaaactgaccgtgtttgacacggtgaagacactgatagctactgggcagaaggagatggacaaattaattcaagaaaatgaggagaaaagaagctaggaaaagagccttggtcaatcttgaaggctttggtagaaagcatgcctctttgcagactccatattgctatgtttcctcgtttgctggtgacatattttaggatctaggcagcgcatctttctgttccttttcaaatagatctagtttccagtgctttccgtagcatccacattcatagagatagaggtgggcattgagttgtgatctctttatctagtgtcggtagcattcccctacagatcttacctattttaatagaggatagtgtatcaatgtgaccgccccagattctttaaatgtaattattatacataatagccagaacaatcaaatatc

SEQ ID NO: 17754 - DNA, 858 bp, Zea mays
  Clone ID: LIB3075-017-H5_FLI
tcattttagatgcacttagagaaacaggacaaaggggaatcattagccgtggttggggagctcttggaagtttttcagaagttccagttgatgtcttcatcttggaggattgccctcacgattggctcttccctcggtgtgctgcagtggtgcatcatggtggagcaggtactacagcagcagggctgatagctgggtgtcctactactgtagtgccgttttttggagaccagttcttctggggcgagagagttcatgcacgaggagtgggtcctgcacctatatctatcgcagaacttactgtagaagcactatcagatgcaataatattcatgcttgatccagaggtaaaatcacgaacaatggaactggcgatagcaataggcaatgaggatggtgtggcagcagctgtagatgcatttcatcgtcacctgccttcagaattgccgctgtcgccgcctgcacatgtggaggaagaacgcacagacttcttccaatggttttctcgaggcctggagaagtgttgtttcccattcagtttttaggtacggcagtccgtacgctaggtatatgtatgatttattcatttatgagttgaaaaggtatatcacagtaattttctaaaattggaataaatgctggtataagccaatggtgaggatgcaataaaaaagatcgacgcaattgtaaatgtttgggcagctacaattgtattcagaatttgctggtaggcctgaaatttgtgccccgatgtgccttccagtatgagtgtagtagctacagaactgagcgatcacgactgcaaaaatgtgtttaatttgctcgttttttccaaagaactatagaatatacaaagtg

SEQ ID NO: 17755 - DNA, 1081 bp, Zea mays
  Clone ID: LIB3075-018-B9_FLI
ggcatacaagagccaagaaagtgggaaaatgcatgcttgtgggcacgatgcgcacacaacaatgctcctaggagctgctaagctacttcaagctcggaagggtgacttgaagggtgctgtaaagcttgtgttccaaccatcagaggagggctatggcggagcctactacgtcttgcaagaaggtgctcttgacggcgtgtcagccatatttggcttgcatgtggacccagcacttccagtaggtgtcgtcgcatcaaggccaggaccattcacagcgacagcgggtcggttctctgcaactattcgtgggaaaggtggtcatgccgcagtaccccatgaatccgtcgaccctgttgtggttgcagccactgcaatcctcagccttcagcaaatcgttgctcgtgaagtggatcccctccatggtgcagtggtatctatcactttcgtgaaaggaggagaagctttcaatgttatcccggagtctgtcacctttggcggcacaatgaggagcatgacagatgaaggtttgtcgtatctcatgaagagggttaaagagattgtggaaggacattcttcggtacatcactgtactgcttcattggacttcatggaggaggagatgaggccatatcctgctgtggccaacgacgaacggatgtatgcccatgcaagggcagtgggcgagagcttgctaggcgaaaaccatgtcaaggttgctccccaagtgatgggcgcggaggactttgggttctacgcgcggagaatggccggcgccttcttcaccattggagttggcaatgaaagcaccatggtgactgtgcagcaaccccactccccctactttgtgatcgatgaggacgcgcttcctgtcggagctgcatttcatgctgcagtggcaatcgatttcctgaagaaacattcgtaaacaaaaacttaaataattaatggagagaagtaggcttttgattttctttgggtgttagatatgcatggttatatcgcttcttctatattatgttttaggtgtctgattttttctgttgtttagatgacatgaaatctttttattctttgactattg

SEQ ID NO: 17756 - DNA, 1115 bp, Zea mays
  Clone ID: LIB3075-018-C2_FLI
gagacattttcggggtgtcattaatttggaggattgtaatcttgaggataatttagacgatgaagatgctccaagaagttcgaaggattccaaaaaggcaaatatggtagataccggaaaagattctagccttatgttcaagattacccacaagattgcatataaaaatgtgttgaaagctcatagcgctgttatactgaaagctgaaagcatgagtgataaaactgaatggatcgccaagattaagggcatcgtcgacccaaaagggctttctgcaaagaaaccaagcgcttcagaaggcggtgccccagtgaggcaaagccatccagatggttccctagaaccagtactcaagaaacctgtgaaccatgaagaagagcttcgatggatatcccaggaagtccgtgcatatgtggaagcagtcctcaacaatcttgcaggaaatgtccccaaggctgtggttctctgccaagtagagaaagccaaagaagatatgctcagccagttatatacttctataagcacgcaaagcttagccaaaatcgaagagctaatccaggaggaccacaacgtgaagcggaagcgtgaaaagttccagctgcagtcgtcgcttctttccaaggtcactcggctgctcagcatccatgacagccggtcgggcagtgctggtctgtcgacagattctgctggatcagagagtagcccgaggaacggcggacactctggtgacgactggagatctgcattcggagctggatcggccagttggtctactggagcagccattgccggccgccgcgtaccgagtcgaggtccgccgccgcctccaccaaatgttggctgattgtgagcttttttagcagaacatgtattactcaaaacaaggtgaacgtatataggcttatgaatcgcagatcgtggattaatagaagaggtagattttttttcaactattcacattaattagtcctgtactaggatcgattcagcgtctgtccgatcgaggcattccgccaccggatacttttttttcatcttctcaaatatcaactgttgtctcccgttccgtcgtcataagttcatatactactaatattattttacgcacttctttc

SEQ ID NO: 17757 - DNA, 1363 bp, Zea mays
  Clone ID: LIB3075-018-C4_FLI
gctgcctgcctgtccttctcctctcctttcctctccccgcgcccaacagcctcacatgttcatctgaaaagttgagaacgacagttcctgagcacagggcgcgatggacgtcccggccgtggcggaccctggaacggagcgaggcgaaggcgcgctgatccagtgcccgtactgcgactcggaggcgatgcacaagctggcgcagatcctcctcccgggcctcgccgccgtctgcgtggacggcaccacgggggacccgttccgcagcccgtccgcggtggccgtggacctccgcaaggagatggtggactacatcacgcagcggagcgacagcttcatcgcggacgcgctgatcgagtcggaggcgaaccaggacgcgcccggggccgaggtgcccgacgaccccttcgagaccgtgtccgtcttcatggacgacttcgccagcaccaagcgcaacatcatcggccacgtctccggctggctgctcaccgacagccgcgacgacaagatcgacgacttcgtgcaggagatggaggccaccaagttctggccgctggagcgccgggaggccgtcgccgagctcctgctcaagaacgtcgacctcaagaccaggttccactgccccgagaagtacgagaacgaggagcgcctcgaggaccacaaggcgcagtgcagcttccgccccgtcgcctgcgccaacgacggctgccgcgccaaggtctccgtccgctgcgtcaaggaccacgacgccgcctgcgtgtacaagctgctccagtgcgagcagggctgcgacaagcgcctgctcaggcgcgacatggaccgccactgcgtcaccgtctgccccatgaggcccatgaagtgccccttcggctgcgattcctccttccctgaccgtgacctcgagaggcactgcgccgagttccttcagccgcatctgctcatggtccttaaggccatccataagaaaggccggtcggaacaagacctcaaggaccttgctcaaaagctggaaaagtttgatggagatggtaaactggctaaggctctggatgcaagacctcttactaatattgtcaaggacctcgaagccaagatgaaaggtggacaatcaagttaaaagggctgggtctttcatgcagacaaacttcacaggatggataatgacattgtttagttgaaaatatggtcccgcgcgcagcatacatacagagaagaatatgagttttgttttattcttatcttctttacgattttgctccctgtctgtcacaatcaaaccaattgtcagtcagtatgcatagtcgtccgctattgttctgtatcttcagcttttgtatgaggatattatatcatttgttttggt

SEQ ID NO: 17758 - DNA, 976 bp, Zea mays
  Clone ID: LIB3075-018-G1_FLI
ttggcggcgtcatcgtcaaccgtcacataaaccaactcgatcgatcgcgtgcgactgcgagccgtccgtccgtcatggcggacgtgctggtgggctccgagcgccgtgtcctcatcagcggctacgggtacggccttcccccgcagcccccgcccccgccgccgccggcagagagccagctgctcggccgcctcgatcagatcgatctacggctgcggcagctggaggagcagcagcagcgccgcccgtcgcacgccgacccggccccggccccggcccgccgcgcgccggcggcgcagcaccagcacaccaagtccctgccggcggcgctgcaacacgtgcaggtgcggagcgacctcatggaccgcctcaacctgctggagtcccgcatcaggcagctcagcagcgagctggacctggacgtcggcggcaaggccgccggccacgccgcccaccagctggtgctggggacctcctcgtcggtgccgccggtcgaggaccccgccacgtggtccgacctcgcgccggtggcggtggtggacccggcccctgctgcggcgttcggcggcggcggcggcggcaacgagagcaagagcaagcccgcggcggcggcggccggcgggagctggagcgccgtggagatcctgcagcggggcgcgcgccagctccaccgcagcaccagcagcaagcctaacgcgctcaccaaggtgaagaaactgcaagaaacaaaatgcgcgtgccagaaggagaagaggaaggcggagcgcagcaagacgagcaggcggtggttcatggttggatgctgaagaagtggaagttggcagtaacacgcatggcgatgaactgatcttggtcgatcgtgtacaagccatatatatttttttgtattgtttttgtactctgctttgatctacttccgtccaccattagttgtaaagtattgtcatggtccatgaatacagcatttttctcgtct

SEQ ID NO: 17759 - DNA, 2327 bp, Zea mays
  Clone ID: LIB3075-018-G2_FLI
caaaaaatggaactttgggaagaaaatctcagtactgccgtgagcctcgaagtgttgggaataactgagaagttttcagttgctgcaggcgctcgaagcatcactactgattacgcgaagctagattgtgtaacatcaatcttaatgggtcttttatctaggaaccaatccttggctttttggaaggctttccttcctgtggtctacaatatatttaatgttcatggtgcaacactaatggcaagggagaatgaccgcttcttgaagcaaattgcttttcatcttttgcggcttgctgttttccgaaacgattcgattagaaaaagagctgttgttgggctgcagattcttgttaggaactcattcaactatttcaaaaacactacaaggttaagggtcatgttgacaattactttgtccgagttgatgtccgacgtgcaagtaactcaaatgaaattcgatggttctcttgaagaaagtggtgaagctcggcgccttaggaaatcactggaggaaatggctgatgtgagaagcaaggatctgttaaaagattgtggcctccctgttactgcattggaggcggcccctgaaggctcctctgataataggtggtcttgggtagaggtgaaacatttgtctaaatgtctagtccaggcccttgatgctggtctggaacacgccctcctgggttctgtagtgactgtagacaggtatgcagctgccgagggtttctataaactagctatggcctatgcacccgttccagatcttcacattatgtggttgcttcatctgtgtgatgcacaccaggagatgcaatcatgggctgaagcagcacaatgtgcagttgctgtagctggcgtgatcatgcaggcacttgttggaaggaatgatgctgtgtggagcaaggagcatgttgcttcgctgcgcaagatttgccctattgtcaacactgatgtgagtgcagaagcatctgcagctgaagtcgagggatatggtgcatccaaattaacagtggactcagcggtcaaatatcttcaactagccaataaacttttcacacaagctgaactctaccatttttgtgcaagcattcaggaactcataattcctgtgtataaaagcagaagggcttatggacagctggccaaatgccacacatcgctcacaaacatctatgagtcaattcttgaacaggaggctagccctataccattcattgatgccacatactaccgagttggtttctatggtgagcgttttggcaagctcaataaaaaggagtatgtatttagagaaccacgggatgtacgtcttggtgatattatggagaagcttagtcatatatatgaggctaaaatagatggaagtcacactttacacataattccagactctagacaagtcaacgctgatgagttgcagcctggcttctgctatttacagatcactgctgttgatcctgtgatggaggatgaggacttgggtagcaggagggaaagaatattttctttatctactggtactgttcgtgcacgtgtttttgaccgttttcttttcgatacaccattcacaaaaaatggaaaaacacaaggtggtctagaagaccagtggaagaggcgcacagtgctccaaacagagggttcctttcccgctttggtgaaccgtctgccagttatcaaatctgaatctctggagttctctcctgtcgagaatgcgattggaatgatcgaaacaaggacagctgcattgagaaatgagctagaagaaccacggagttctgaaggtgatcaactcccaaggcttcagagcttgcaaaggatactccaaggaagtgtggctgtgcaggtcaacagtggggtattaagtgtgtgcactgcattcttatctggtgagccagcgactaggctcagatcccaagaactgcagcagctcatcgctgcattgcttgaattcatggctgtctgcaagcgtgcaatccgtgtgcatttcagattgataggggaagaagaccaggaattccacacccaacttgtcaatgggttccagtcactcaccgctgagctatctcactatatccctgctatactctccgagctatgatagaactgtagcaagccagaaattaggtagcatgtgaatggttgttcattcattcagttgcaggttcccaccaaatgtccatatttccattagctttggttgtatagttctaggaaccggaaattaactagtcttcgaagttctgtaccgtattgcagaaccgattcctgattttggagtgtaaagtctgtataatacctagtgttatctgttatgcaccagtt

SEQ ID NO: 17760 - DNA, 1081 bp, Zea mays
  Clone ID: LIB3075-018-H10_FLI
gatgcggtaaaagcgaaagaagaatccgatccgcttctccacgccgaacccggtaaggccgccgccgcttctcgaatggcctcaacctcctcctcctcgcctcagccgccgccggcggcggcggcagcgtcgcccggggcagcttcctcgcccgaggatcgccgcgcaggtggaggccgcggcggcccgcccccggtcccgccctatgtcaaggcggcggcggggtccctgggcggcgtcatggaggcgtgctgcctgcagccgatcgacgtcgtcaagacgcggctgcagctcgaccgcacgggggcctaccggggcatcgcgcactgcggcgccaccgtggcccgcgccgagggcgtgcgcgcgctctggaaggggctcacgcccttcgccacgcacctcacgctcaagtacgcgctgcggctcggctcaaacgccgtgctgcagtctgcgttcaaggaccccaccacgggcaaggtctccgcgcacggccgcctcgcctccggctttggcgccggcgtcatcgaggcgctcctcattgttacccccttcgaggcaagattaaacatctctctgttcctgagtcgctctttaactatcttgccctggctgcggtgctgtgcatcctatagcttacactgatcgtccaagaaccgtttgccgtttagacaccaatcgtttatactttattagatgtttcctgttgaataaacaacttgcttcctttatctgaaagaaggtcccaacgtgagagagaggttacgtttagattaccaatgtaaaagcggcatctactgtatagataaagaatggttataattatttattcttgtgtcgaagtggtgttggatgcatttttgccagcttgggattaaagaaaagacagccatgttctttgcagcaaatttgaagtttactagtatgttaccctgatgcagtcaaacacatttgaccaagaagttgctgtcaatcacctgtttctcgtttagggttaacttgattatgactgagaatgaagtaatttgttttcttatcatagtcatgatgtttggttgttcaatggaaacactattttttaatt

SEQ ID NO: 17761 - DNA, 1701 bp, Zea mays
  Clone ID: LIB3075-018-H12_FLI
cgaaccttctaataagtgggccactcttcctcacatcgcctccctcgacgatggccgccgccaccgccgccgccgccacggcgtcggcttcgtgtcttctccggaggtctatatcctctgcattcctcgcgaggcgcgcggtccctagcattccgcgtacaactctctgctattcctcctccgcatccgccagactcaaaccaacgccgtccctgtctccgcctgacacgtccgccaatgatggaggcggcgggatgaggtgggagtcagcgcgcaagaagagggtggtgctccgcatcggctacgtcggcactgattaccgagggcttcaaaagcagcaagagcttggcgtggattcgaccattgagtcagtcctggaatctgccatcttcaagtcagggggtattatcgagagtaattatggaaaactgcaaaagattgggtgggagaggagtagccgaactgataaaggggtacactcattggctacaatgatttcccttaagatggaaatccctgatagagcatgggaggatgatcctgatggtattgctcttgccagcttcattaactcaaatttgccggacaatgtgagggtttttagtatattgcctgcacaaaggagttttgatgtaaggagggagtgcttatatcgtgagtacttctatcttcttcctgctgaaattattggaattaaagatggctatagctctgaagaaatgcaagagcacttgtcagaattcaacaaaatactgaaaggttttgagggaaaccatccattccataattacactgcacgtgccaagtataggaaggttctcgcgggaagacacagaagggacaaaggagcaagcacggcgttgaagtccatgtcctctgacacgggcatggcagaaagctcttctgaagaaagcacttctccagatcacgatgaggacttgaatatttcatcaatctttgactctggtataccagaagacactcgtgtgaatggtattctgaagctttctgaggatcgggtgcagattcaagctaggtggctgcatgagcctgacgaaagggatagattaaacgcttcacatttcagagatatcattacctgttcctgtggagagttgcaaacttcatcagggattcagttcgttgagttgaccgtatgcggggtatctttcatgctacatcagatccggaaaatggttggaaccgccgtggcggtgaagcgtgggctactaccaagagacatcatagagctgtccctcgcgaagttctccagaatcgttctaccgatagccccttcagaggtcctggtcctcaaggacaacagtttctgcacgaagagcaagggagggaggatcgttcgccccgggatccagtccatgaacaagtcggaagcaaccaggaagggggtcgaggagttctacagggcagcgcttctaccagaagtagcgaagttcctggacccctctctgccgccgtggaaggagtggctggagaacctggacaggttctcgggcataccgggttcgcagctggacgaagtcagggaggcgtatcgagcgtggagggatgattacgaccgagcgaagatggctagaaactaggagtgctggcagtgtcgcaaggtggatgaactacctagcagtgaacaatgatgatttatatatactagttcgcttgatgtttatatattgagattcatac

SEQ ID NO: 17762 - DNA, 1086 bp, Zea mays
  Clone ID: LIB3075-018-H7_FLI
gatacggcctccattatttataaagaggatatagaataaaaaaaagagacgtccttggcgtggtgtcctcgtcctcgtgcccatctctgtcccaatcaaactgatcgatccgtcgcctgcagggccacagcagccgcggcgaggtcgtccgtcggattcggaagctcagttattactgaaaagataatacagtacctatggcttctctggacgccgtgcgaggagacctcgccctgctgattctgtacctgaacaaggccgaggcgcgggacaagatctgccgagcgatccagtacgggtccaagttcatcagcaacggcgagccagggcctgcgcagaacgtcgacaagtccaccagcctggcccggaaagtgttccggctctgtaagttcgtcaacgacctgcacgctttgatcagccctcctgccaaggggactccgctcccgctgatcctactcgggaagtccaagaacgcgatgctgtcgactttcctcttcctggaccagatcgtgtgggcggggaggacaggaatatacaagaacaaggagcgggcggagttcctcgggaggatagcgttctactgcttcctcggctccaacacctgcacggccatcatcgagctagccgagctgcaacggctgtccacgtcgatgaagaagctggagaaggagctgaagcaccaagagctgtacaagaacgagcagtaccgcatgaagctgcacaagtcgaacgagcggctgctggcgctcgtcaagtcgagcctggacatcgtggtggccgtggggctcctgcagctggccccgaagaaggtgaccccccgcgtcacgggcgcgtttggcttcgccagctccctcatcgcttgctaccagctgcttccaagcccaccagcaaagcagagcaaatgaggactccgactccaagcactgtttaccaggaaaataatcccccccggatggatgggactcacggctctgcgtctactagtataggtttgatttggttgccacatccccttgtatggcagactagactaatatatgtaatcatcatcataataattgataaaccatcctactaggataggtt

SEQ ID NO: 17763 - DNA, 782 bp, Zea mays
  Clone ID: LIB3075-018-H8_FLI
ctcgccggcgggacggagaccacgtcgtcggccgcggagtggatcatgtcggagctgatgaggaacccggaggcaatggccaaggcgcaagccgaggtccgccgagtgctcgacggcaagagcccgcaagaccacgaagggcaaatggacaagctcagctacacgaggatggtggtgaaggagggcctgaggctgcacccggtgttccctctccttcttcctcgtctctgccgggagacgtgcgacgtcggcggcttcgaggtggcccagggcaccaaggtcatcgtcaacgcgtgggcgttggcgaggagccccgagcattggaagcatccggaggagttctggccggagagattcgccgacgacactagcgtcgccgcggcggcggactacgtagggtctcagtttgagtatatcccgttcgggagcggcaggaggatgtgccctggaaacacctttggcctcgccgcgctggagctcatggttgcgcggctgctctactacttcgactggagcctcccggatggaatgcggcctgacgagctggacatggacaccgtcgttggttcgaccatgcggagaagaaaccacctgcatctggttgcgtcaccgtgcaaggagatcgagagctgatgttggtgttgttctgatttactgaataaaagctgtcacttttgatatattgttatcattttcataaaaaatacacttcctcgatgcaccgatacaaaacggctaaaaggctgcaggaccatatatttttacaggcgaattcggttatc

SEQ ID NO: 17764 - DNA, 895 bp, Zea mays
  Clone ID: LIB3075-019-A5_FLI
atatctcccctcccttccctcttctggtctccgccccgctccttgcctccgatccccaattcctccttcggatctcgcattcagcgcagcgcaggtgtgaaggaagggggacgcggaggaagatggggctcgcgttcgggaagctcttcagccggctcttcgccaagaaggagatgcggatcctcatggtcggcctcgacgccgccggtaaaaccaccatcctctacaagctcaagctcggcgagatcgtcaccaccatccccaccatcggtttcaatgttgaaactgttgagtacaagaacattagcttcactgtctgggatgtcgggggtcaggacaagatcagacctctttggaggcattacttccagaacacccagggtcttatttttgttgtggacagcaatgaccgtgaccgtgttgttgaagccagagatgagctccacaggatgctgaacgaggatgagctacgtgatgctgtgctgcttgtttttgccaacaagcaagatcttcccaatgccatgaatgctgctgagattactgacaagcttggattacactccctgcgccagcgacactggtacatccagagcacttgtgccacaactggcgagggtctgtatgagggcctggactggctgtccagcaacattgcgagcaaggcttgaggcctaccttgaatatcaactgcgaactgactaggagctccggatgtatcatggaaactcaggacagaatcgcagttgcaatctgttagatgtcttctaccggcactatatattttttttttgtttgatgtgtaatgatgttactgttcaacgcttattaccctactatactgttggatgttctttggacctgtttcatttcgcacaaggattggacttccaatatc

SEQ ID NO: 17765 - DNA, 1478 bp, Zea mays
  Clone ID: LIB3075-019-B7_FLI
cagcagagaaaggccggcctacccactctctctctctctccagtctccaccggcagcgccaatagtaatagccatgggctccaccgccggcgacgtggccgcggtggtggacgaggaggcgtgcatgtacgcgatgcagctggcgtcgtcgtccatcctgcccatgacgctgaagaacgccatcgagctgggcctgctggaggtgctgcagaaggaggccggcggcggcaaggcggcgctggcgcccgaggaggtggtggcgcggatgcccgcggcgcccggcgaccccgccgccgcggcggccatggtggaccgcatgctccgcctgctcgcctcctacgacgtcgtccggtgccagatggaggaccgggacggccggtacgagcgccgctactccgccgcgcccgtctgcaagtggctcacccccaacgaggacggcgtgtccatggccgccctcgcgctcatgaaccaggacaaggtcctcatggagagctggtactacctcaaggacgcggtgctggacggcggcatcccgttcaacaaggcgtacgggatgacggcgttcgagtaccacggcacggacgcgcgcttcaaccgcgtgttcaacgagggcatgaagaaccactcggtgatcatcaccaagaagctgctggacttctacacgggcttcgagggcgtgtcgacgctggtggacgtgggcggcggcgtgggcgccacgctgcacgccatcacgtcccgccacccgcacatctccggggtcaacttcgacctgccgcacgtcatctccgaggcgccgccgttccccggcgtgcgccacgtgggcggggacatgttcgcgtccgtgcccgccggcgacgccatcctcatgaagtggatcctccacgactggagcgacgcgcactgcgccacgctgctcaagaactgctacgacgcgctgccggaaaatggcaaggtcatcgtcgtcgagtgcgtgctgccggtcaacacggaggccacccccaaggcgcagggcgtcttccacgtcgacatgatcatgctcgcgcacaaccccggcggcaaggagcggtacgagcgcgagttccgcgagctcgcaaagggcgccggcttctccgggttcaaggccacctacatctacgccaacgcctgggccatcgagttcatcaagtgaaccaccgtcgccgcgatgagatggcatggctgccacatgctttgcttgcttggtcctcgtatcgtacgtcgccgtcgtcgtcttcttctggttattgcgctgctacctcgctgctctcgcgtatgcatgtacttttgcttaattttctttcttcatatcatgcactctggctggcctagactgcccccgatccatggtggccggtacgtcttgtcgagctcttgcatgtcgtggattctaaattcttcttctgcgtcgaattgtctctgccatgtgcgagtaataacaatcaaggttatacttacgatac

SEQ ID NO: 17766 - DNA, 403 bp, Zea mays
  Clone ID: LIB3075-019-B8_FLI
ggagttgctcttagggttggtcttgtgcatgtgggcaggtcttgctgttcccactaaatttctctcggtgcttccacattctgatgagaataggatcgtctcgctcccggctaacctggatttcatgatcttcaaccaccgtggaagagtgctgccgtcagactcagacctgaaactccgtacatagacatgtcgtcccagaatccagatcttttttctttattttccctgctgtaacctgtagggatgaaaacggtcggaaacggtatttattcggtaatcagttttttagtcgtttttctttgattgcgaataaataggatatataatctacaatacaaatttgtattcttgtttttaacatccagcttgtaaagattcataaaaggtaaaccttaaattc

SEQ ID NO: 17767 - DNA, 2011 bp, Zea mays
  Clone ID: LIB3075-019-D2_FLI
ctcccggctcccctgcctgcgcgccgtctcctccaggctccagcgcctcgcggccaccccgtacgtaccacggctgcacggccgatggcgtaccccgcggcgccgcacacgagcgcggccttcctcgccagcttcgcgacgccgctccccgcgcgctgcgcctcgcccccgacccggcgccgcgcggtgtcggccgccgccatcgccaccaccaccacctgcgtattcgccgacgccccccgggggatcaaggaggagcaggcggactcgggcgcccaggcggcggcggctgcggctgcgcggagggacgtcagcccggacaccgtggcctccatcatcctcggcggtggcgccggcacgcgcctcttcccgctcacgcgtacaagggccaagcccgcggtgcccgtcgggggatgctacaggctcatcgacatcccgatgagcaactgcataaacagcaagatcaacaagatctacgtcctcacccagttcaattcccagtctctcaatcgccacatcgcaaggacatacaactttggtgagggagttggattcagtggcgggtctgtggaggtgctggcagctacccaaacagctggggaatcaggaaagaaatggttccagggaacagcagatgctgtcaggcagttcctctggctttttgaggatgcaagactcaaatgtatagaaaacatactgattctgtctggtgatcatctgtatcggatggattacatggattttgtgcagaagcatgttgactctggtgctgatatttcagttgcgtgtgttccaatggatgaaagtcgggcatctgattttggattgatgaaggccgacaggaatgggcacatcactgatttccttgaaaagcccaagggtgcagatttggaatcaatgcaagtggacatgggattgtttggattatccccagagtttgcaagtacgtacaaatacatggcttcaatgggaatatatgtattcaaggcagatgttctcagaaagcttctgagaggccattatcctacagctaatgattttggcttagaagtgattccaatggctgcaaaagattatgatgtgcaggcttatttgtttgatggttactgggaagatattggaacaataaagtctttctttgaagcaaaccttgctctcactgatcagtctcccaacttctatttttatgatcccgtgaagcctatttttacatctcctagatttttacccccaaccaaggttttgaactctatagtttcacatggctgctttctaactgagtgcagtgttgagcactctgtcattggtatccgctcaaggttagaaccgggagtgcagctcaaggacaccatgatgatgggggcagattactaccagactgaagctgagagattatctgagctgtctgttggaaaagtcccagtcggtgttggagagaacactaaaataaggaactgtatcattgataaaaatgctcgaattggaaagaatgtagtcattatgaactctgagaatgtgcaagaagcagacaggccagctgaaggatattacattcgttctgggataactgtggtgctcaagaatgcagtaattctgaatggtacaaaaatttagaagattatagaattatctgcagaataccaatccctcagtgaagagcacagcattgaagcccacagcagagttctacgacgcagatgcagtcaataaaaaccccaatagcacaaaagattaggagactgtcgatgcagctaaagaagtgtggatataggcatggagcacctgcacctgcaacacgccaacggtacggacaaaccatgagcttgaggccatttcacgtcctttcataagcctcggctagtgccggcgcgcgcagggtatcttttgttccttttttctagcagtaatttacgtgaagtgtctgtacatgtagagggagagatagggtagtacgagagagcatgttatagtacctactcttattatttgtttatttatcgttgtgccgaag

SEQ ID NO: 17768 - DNA, 755 bp, Zea mays
  Clone ID: LIB3075-019-E3_FLI
caacaagacccagaacccacaatctttctttgtgcacagaaagaagaaagaacctatggcacagtcgtcgtccgcctccgtcaagctgctggttctggttgtcctccctgcgctcctcctgctcctcgtccaagcgcaaggggctcggccagcggcggcgaacgcgacgaccccgacccccaccaccaccaccgggtgcgcggcgtcgagcgtgacggtgtcgcagtccaacacgggcgacagggccgggtacgacccggtgttcgaggtgacggtgcgcaacgcctgccgctgcgccgtccgcgccgtgcgcctccgctccgagggcttcgccagctcggtgcccgtggacccgcgcctgttccgccgcgccggccgcgactacctcgtcgccgacggccgccggatcgagcccggcgccgacgcgcgcttccgctacgcctgggaccgcgccttccggatgaccgccgccgccgtgcgcgacgactgctcctgatggagtgagtgagtgcggtagctcctgcctgcaacgagtgaattgcagtagctcctgtccttcgtgagagagagactcgctctgtcgtgatccacagggaatttacctcggttttacgcttgtttattagcgcttcttcttaacgtattggctagttcgctggatcatacttcgaataaaaaaactccctctgccgcccgaacaaacaaaaaagtatgtttttttttcagtatcgtaaacaaagtcaatggttcacagt

SEQ ID NO: 17769 - DNA, 1841 bp, Zea mays
  Clone ID: LIB3075-019-E9_FLI
caacagtgaagatcaagctcctgagttttacaacattatgttagaaaggccaaagggagacggagatggatatgacttggtttttgttgatgcgatgcacaaggccaactacgctagtagaatctgccactcctgcaacccaaactgcgaagcaaaagtgacagcagtgaatggtaaataccagattggagtttacacacttcgaccaattgcagaaggcgaggaaatcacttttgattacaattctgtaactgagagcaaagaagagcatgaagcatcagtctgcctctgtggaagtcaagtatgccgtggcagctatttgaatttttctggtgaaggagcctttgagaaggtattaatggaattccatggtgtgctcgataggcatagcctgctgctacaagcttgtgaaatagactctgtctctcaacaagacttaattgacttgggtagagctggtcttggtacctgtttgcttgctggtttgcctggatggcttgttgcttacacagctcacctggtgcggtttatataccttgagagacagaaactccctgatgagatcttaaggcacaatgtggatgagagcgccagttccttatagaaataaacatggattctgagaagaatgatgctgaggttcaggcagagggagtattaaattcaagattacagcaaatagtgcatacacttgacaaggtgagatatgttatgagatgcatatttggagacccaaagaatgctcctcctcctcttgtaaggttgtctgggaaaagtctggtatctgccatctggaaaggggacagttcaatagttgctgaactcattcagtcgatggaacctcatgttgaagaagaggtacttagtgatctgaaggccaaaatccgtgctcatgatccgtcagagtctgaagatattgagggaggcacccggaattctctcttgtggctgcgtgatgaattgcgaactctttcatgcacttacaagtgccgtcatgatgctgctgcagatttgattcatttgtatgcttatacaaagtgcttcttccgagtccgggattataagacagtaaaatctccaccagttcatatcagtccgcttgacttaggccccaaatatgctgataaactgggaccaggctttcaggagtactgcaagacatacccagaaaattattgcttagcccagcttatctattggtatagccagaattcagaacctgaatctagattaacaagagctagaaaaggttgcatgtcgttgccagatgtctcatccttctatgtgaagtctgcaaagccatcacaagagcgagcttatggaaacagaactgtgagattcatgttatcgcgcatggaaaaacaggcacaaagaccatggccaaaggataggatatgggtgttcaagagtgatccgagattctttggtagtccaatgatggacaccgtgttgaataattccccgcttgacaaggagatggtgcactggctcaagactagaccaaatgttttcctaggctagtaaaaaaggtttgtaggcagataaggtggtatttggttctttctcctttttggagattttagtctacatgattctttttccgactcacaccttggctacctgatcatggggagtttagcttttagatagcagggtagtctcaccacccccatctgtacattcctctctccctactttccttgtagagatgtatctggttaataactgatagattcgtcattgatttgatgtagtgaattttccccataggaacgctccctcttctgtttcatgtaaatgcagaacaatttcaatcttgaattcagtaatgtgttacaggc

SEQ ID NO: 17770 - DNA, 901 bp, Zea mays
  Clone ID: LIB3075-019-G2_FLI
atcagcttgaagttatggaactcaaagtgtgaaattttgattgcatttgcaccatttgtagttgtcatggcggcattcgtagcattcataatctggaatggtggtatagtactaggtgctaaggaagctcatgttgtttcgccacactttgcacagtttctgtactttggccttgtgtcagctgctgccctccttccatggcatttcactcccaaccgagtattggatctattccacttgtctggaaagaacaaaacctgtggttctctggcagtattaatgggtcttggtttaagctttgtcgctgtacattttttcagcattgcccatccgtatcttcttgctgacaatagacactataccttctatatttggaggaaggttatccaagtaaactggatgatgaagtacatgttgattccactttatgtgtactcatggctctcaatcatcaacatcttagggaaatcacagacaaggatttgggtgttatcatttgtgctgtcagttgcactggtccttgtacctgccccgctggttgaattcagatactacacaattccattcgtgatactggttcttcactctccatcaattggcaatggcaaattgcttgccatgggatcgctttatgcagccgttgacttgtctaccctggtgatgtttctgttccgaccattccgttgggaacatgagcctggaacacaaaggtttatgtggtagtttaggataaagcacgggaagttgggaatagagcaaaaccttcattgtaccgtcgttttggttcgaacttctaacaggacgattaagcatacatgtgtcaggcttatttggatccttgagtgaatttaatggtaggagtcaaaacaatagcgctgagtatcgtcattttctttttgcc

SEQ ID NO: 17771 - DNA, 776 bp, Zea mays
  Clone ID: LIB3075-020-C8_FLI
gaagcattggcacgcaaaccatgtgatcctttgatagtggctacttttgcactagccttttacctgggaggtgatatgtctttggcagtggatatcggaaaatcaatcaaccgacaacatgatactggctttcgggagctcttagaacccaaagtctggactgataagcatttggcaggtgaagtacaaagctttgctgcattgatgaagcaggcattaactgaaatgactgatgagtatcatgtcgcaaatgctatggcaaaaatccctcaagcaccttcctcagatcttgtatttataccactacaagcctacctgaaggttctcaaatttatcgagtgtgttcaatatggcaaaaaggagcgtggccatgaaccaaaacgcgatgggatgatcaattaccataacctgtctaatggtacacatgcagaaataagaaacctctttacactggtggtttttgacacactgtaccctacagacacggaggatgaaaatgactgcagttcttagagagacatcatgattgggatgaattcaatactttgccagacatcaataaatactccatttgtcccaaaatatatttctttctagtcttttttttggtccacattcatcctaatgatagtgaatgtagacatacatacaaactatattcgtagattaattaatgaatgtttgtttagtttaaaacgaattatattttgggactgagagagtaataaataataaatagccagggacaactggagctgctgcatcagagtgaaggc

SEQ ID NO: 17772 - DNA, 454 bp, Zea mays
  Clone ID: LIB3075-020-D8_FLI
atcggcgacggcgaaggtgaagagctggacaagggcggcggcggcggcggcggccaccacaagcacgagggctacaagaacaaggatggcaagggaaacctgaagccctctcagtgcggcggggagtgccggcggcggtgctccaagacgcaccacaagaagccgtgcctcttcttctgcaacaagtgctgcgccaagtgcctgtgcgtgccgcctggcacctacggcaacaaggagacctgcccctgctacaacaactggaagaccaagaaaggagggcccaagtgcccgtgagaagatggcggcccaatacgcggttttcccggcggctacgcgggcgggccgccggcccaacgtaacctaccaccgtagttggaagcgtcgtaggttaggttaggaataacagtctctctttttttttctctccttgtttcggtgtttgtttgggccgggc

SEQ ID NO: 17773 - DNA, 1130 bp, Zea mays
  Clone ID: LIB3075-020-F6_FLI
taaagatgataagaaggggcatgaagatcagcaagaaataccagaacctgcagaagaagcacttgaagatgagttagaaattccagaacctgccgaagaaaattatggtggttatcattcagaagttgaggatgataggcgtaaatatgaagatgaagagttttatcatgagtcagaagatgaatatgttgacgactatgatgagcatgttgagtcctacaaatctgatgatgaccaaaaagatttaactgagccaggacatgcatcgtggttggacaaagttcagcagactgtacaaaatgttttccaaaaattcaacttttttaagacccctgtagatttgtcagaggcttctcatgttcgtaaggagtatgatgatgctagctcaaagctttcaaaaattcagtctaagatatccagtctagctgagaagctaaaacatgattttggtaatgacaaggagttctattccttttatgatcagtgttttgagaccaaggaagggaagtatacttacaaggtctgtgcatataagaaagcatcacaggctgaagggcacagttctaccaacctggggcggtgggacaaatttgaagattcgtacagagtgatgcacttttcaagtggagacaaatgctggaatggtcctgaccgaagcctaaaggttaggcttagatgtgggctgagcaatgagcttaatgatgtagatgagcctagcagatgcgagtatgtggctgtattgtcgacccctgcagtttgcgtagaggacaagctgaaggagctgcaaaacaaactggacgccatgtctttgaagcagcccgggcatgatgaactttaaaaactttagaatattccagcgtgaacataaagaagatgccaccaggaagcatagctctgacagttacatccataacatataggcgtggaagtcaatgaggtatatggacagaaacgggccaagcgggagaaatgagaatgtagagtttaggtcgcctaccaggctatattagctcgcatagaacaatttttttagctgaaatttgatgttgcaatcttccagactcatctgatggaatatatagtaagaaacagtacaccttgaatcagcatatactttacccagggttttt

SEQ ID NO: 17774 - DNA, 888 bp, Zea mays
  Clone ID: LIB3075-021-A10_FLI
cagttgatgatctagacttggttatcaaaacccttgaggaaaacggctttaaagatcggttttatattcattgtgatggtgccctttttggattgatgataccatttgttaagaaggcacctcaagtgacatttaaaaagcctattgggagtgtcagcgtctctgggcacaagtttgtcggatgccccatgccatgtggtgtccagataacaaggttggagcatataaatgccctttctagcaatgtggagtatctggcgtcaagggatgcaacaatcatgggaagcaggaatggccatgcccctatcttcctctggtacaccctcaacaggaagggctacagaggctttcagaaagaagtccaaaagtgcttgagaaacgcacactacctaaaagatcgcctcaaggaagcaggaatcggagcgatgcttaacgagctcagtagcacagtcgtgtttgaaaggccaaaggatgaagaatttgtccgaaggtggcagctggcttgtgaagggaatatagctcacgttgtggtgatgcccagtgtcaacattgacaagctagactatttcctgaatgagttagtggacaaacgggcgacttggtaccaggacgggataagccagccaccctgcattgccagagacgtaggtgttgagaactgtctctgtggccttcacaagtagcgagccttttgctttgcaagtgggttcactcttgagtcgagttaaaaagtgttatgttgtactgtgttcattcttgagttgagttaaaaagtgttatgttgtactgtgttcatgcgttctgcttctgtgtttctccacagtgtagcttatttgttgccatgggaataaaattccttctactaaattgattgatggaagttgcatc

SEQ ID NO: 17775 - DNA, 316 bp, Zea mays
  Clone ID: LIB3075-021-E1_FLI
tatatatatggtgtgtgtgagtgtgtttggaacttggtttaatttgtgctatcgctaagtcgtcgtcgttcactttctaaagggatttgatagtgttaatttgcctgtttgggccgataaacaaaccatgcgctcgtattgcacggcacggctggtacagtagttatacatgacgagtctaaaaccgtgctgcactgcacgtgtcgatacggttatcgtggccgtgtaaggccttgttcgtttgtgccggattggtgggtctgaacgattcctaaccggattgcttctctaatttatacaaactttgattagctgg

SEQ ID NO: 17776 - DNA, 1022 bp, Zea mays
  Clone ID: LIB3075-022-A3_FLI
gggagctggcaccagcaccagcaccggcaccagcggctcttcccgtgccggatcagtgcaacgccggggacggcgaccgcgggaggaaggccggcgtcgctggtcccggcgtgtgcagcggggcgcggagacgggtggccaagggcgccggtggcccggcgagcaccaagttccgcggcgtgcggaggaggccgtggggcaagttcgcggcggagatccgcgacccgtggcgcggcgtgcgcgtctggctcggcaccttcgacaccgcggaggaggccgcgcgcgtctacgacaccgccgccgtccagctccgcggggccaacgccaccaccaacttcgccgcgtccgccgccactaacagcggctccggggccggggccgggcaggacccggcgacgacaccggcagcgggctacgagtccggcgcggagtcgtcgccgacgtccgtgctccgcaaggtcccctccctgtcctccctcgccgaggacgactccgacgcgccggccgccgagcgccgcagcctggccgtcctcgaggaggaggagctgggcgagttcgtgccgttcgaggacgcgcccgtctacgccaccagcggcttctgggacttcgagcccgacgcggggttcctctacgccgagccgtcgtcgccggaggcgtcgtggaatgccgccgccgccgtcgccgagcccgcctcgtctgacgacgcgcccagctgggccgcgtcgccggtgcaggagaacgactacttccaggacctgcgcgacctcttcccgctcaaccggcttcccgcgattttctgaacaggtggacggggaacgccggaaccgggaacggcgccgctggttcgtctaccgggatgttattttggacgtcgagagtgcgctgtgtctgtgtctgtgtctgtgtcgtgcctacgcgcaccgtgtacttgtacgcctttccccacgccgtttttgttactatcttcgagtcgatgagaaatgtggaaatatgctgccgaacgatgagcacgtagagttttg

SEQ ID NO: 17777 - DNA, 1692 bp, Zea mays
  Clone ID: LIB3075-022-B9_FLI
gaagacgaggtagaggagggggcgagcgacagaggcagtggaggggcgcggtgaggaggccggcggcgcgcgcgcgcttgcggcgccggcggcctggcgatgggggaggtggccgcgctgcgccagctcgtcggccaggtccaggagctctgggacctctacggcgccaacggcaaccccgtccccaggtggtatttacctgacttcgaacatggttcaatcaaggatgattattgtgggggaagctcaggatacaactcggaattactgaagatcatggaaactaaccaatctcccccttgcaagcgaccgcggagagatcgaaaccgtgaaaaggcaccctcctcaaacaaaattgaagtcatggaacaagagatatggagagatttccctgaagatcttttcgaaactgtcatagcaaggcttcctgttgctgcaatttttcgattccgcactgtctgccgaaggtggtcttcccttttgggctcagacagtttctctcgtcagtactctgaagctccacatggactgccatggttctatacaatcactcatgagaattcaaacaacaatgttgcgatgtatgatcctttgctgaagaaatggcaccaccaatctgttcctctcaatcatacgaagatagttattccagtggcatccgtgggtggccttgtatgtttattggatctgagccacaggaatttttacatctgcaaccctcttacgcaatcactgaaggagatcccaccaagatcagtccatggttggtcaagagtcgttgtagggatggtgttgaatggaagaagttctagtgatggctacaaagtaatgtggttagatattgatgggacttgcgaagtttatgactctacaaagaacgtgtggtcttgccctggaacttttcctccaagcatcaaacttccacttgctctaaatttgaggtcacaaccagtggcggttggcagcatgatatacttcatgtgcgcagaaccagatggtgttttgtcatatgatgtaagcaccgggatttggaggcaatttgccatcccactgccactgcatctgactgatcacacacttgccgagttccagggaagggttatgctggtgggtctgctgtgcaaaaatgcagcgacctgcatctgcatatgggagttgcagaagatgactctcctctggaaggaggtggacagaatgccaaatctctggtgcttagagttctacggtaagcacatgaagatgaaatgcctgggcaacagtggtttgctcatgctctccttgaaggcgaagcatatgaaccgccttgttacatacaaccttttgaaaagggagtggcagaaggttcctgattgcatgctaccatggagtcgaaaaaggcaatggataacatgtggcacagcatttgatccggtcccctgcgccttggtctgacatggaattttaccttctttgtctgagcactataatattttagtcctttcatatcattggcctatctttagatctttctatgttgttgtgacaagttctgcgaaaacgcattactgtggtttgctttgtataacgccgccgaaacaatcgaacggtttcctttatcacctgctgttctgttaagcttgtaatctttctgaacgtgcagttacctgcccagagctgagttcattatacaataaataccgggatgttaatgtt

SEQ ID NO: 17778 - DNA, 1239 bp, Zea mays
  Clone ID: LIB3075-022-D9_FLI
cacaccgccttcgccgcggacgacgcgatcatcgccgccgccgccgccatcacgtcgcagcccggccggcggttcacgtcgtacccgccggcgagggcgcgcggcggctgcaggctggccccggcggcggcggcgcgccaggccacggacgatcccggcgccgctgtgtcctggccagaactagtcgtgccgcggcacgccgacttcgacgactggatggagaagcacccgtcggcattggccgcgttcgagtcggtgctggccgccgccaaaggcaagaagatcgtcatgttcctcgactacgacggcaccctgtcgccgatcgtcagggaccccgacagcgccgtcatgtccgaggagatgcgggacgcggtgagaggcgtggccgagcacttcccgacggcgatcgtgagcgggaggtgtagagacaaggtgttcaacttcgtgaagctggcggagctgtactacgccgggagccacggcatggacatcaagggccccacagcacagtccaagcacaccaaggcaaaggccggagccgttctatgccaacctgcgagggcgttcctgccggtcattgaggaggtgtaccgcgcgctgacggcgagcacggcgccgatccccggcgcgacggtggagaacaacaagttctgcctctccgtccacttccgctgcgtccaggaggagaaatggcgcgctctggaggagcaggtccggtcggtgctcaaggagtacccggacctccgcctcaccaagggcaggaaggtcctcgagatccggccgtccatcaagtgggacaagggcaacgccctgcagttcttgctcgagtctctcggttttgctggcagtaacagtgtcttcccgatatatatcggagacgatagcaccgacgaggacgcgttcaaggtcctgcgcaacttggggcaagggatcgggatcctggtgagcaagattccgaaggagacccgcgcatcctactccttgcgtgaaccttctgaggtggaggagttcctgcgcaagttggtcagctggtccaaggagagcaggcaacgggactagtcatggtccagtcagcaggcgatggaaagctttgcctagaagcggtcgacagggccggctctcgtttttttaagggccatagaccaacctcgatgtttaggcctctgatttttttattgtcaataactgtaataaaatagagggaaaataataaaaataatttaatggtaaattactgcg

SEQ ID NO: 17779 - DNA, 229 bp, Zea mays
  Clone ID: LIB3075-022-F1_FLI
agtgctgagcaggcctggcgacttgctgcttaatctgcatcgctctctattgcagcataccgttgagctgagaagcgtctaccttccctaagctaaacgaagaacgtatttttgtggtgggcgagtaggaaatggatgcatgtttttcacgtccagtaacctgtactgtacagtttcaccgagatgcagggttgttcatcagaaaacatacagggtgtgctttcggtgc

SEQ ID NO: 17780 - DNA, 563 bp, Zea mays
  Clone ID: LIB3075-022-G12_FLI
ccacgagccatacttcgccggtgtatcagagggcatttgccaccgatgaaccctccgcctccaccagaggcatcaccgtcgaaaccaccatctacatcgccagcagcatcaccatcggaatcaccaccagcagcatcgccaccagaatcgccgtcgacaccaccaccagagtccgtcgactacaccgccgacaccagcagcagcaccaccgaaatcaccgtctgatccaccaccagctacgccaccaaaatcatcatctgatccaccgtcgacaccagcagctacaccaccggcgactccatccccatcatcttaatcacgaaggatatttcaaaagcagtagtagtttagtcaaattagatatgcgttttaggattctagttgatatgcgtccattattttgttcacatcgaatgcagcagtgtgttagctatgtagttgcatacctatcataactaagtctattagaagtatttctaataatatttaggatctgtcatcaataaaatgtatgcaacaatacgactattgtattattttgtctactcaacatgcatgttatt

SEQ ID NO: 17781 - DNA, 792 bp, Zea mays
  Clone ID: LIB3075-023-B5_FLI
gctcaccgaaccctaaacctgagccaccgccctcccccggaggtccgccgctccgtgtgggactctaggcgtcgccggagccccctccaggggctagcggcggaggaagtcggaaaccgattacccctcccctccccttaccgggggagggagaaactagcggaggaggcgaatcaggtcagagtggggcacgatgaggatcatgatcaagggaggcgtgtggaagaacacggaggacgagatcctcaaggcggccgtgatgaagtacggcaagaaccagtgggcgcgcatctcgtcgctgctcgtccgcaagtccgccaagcagtgcaaggcccgctggtacgagtggctcgatccgtccatcaagaagaccgagtggacaagggaggaggatgagaaattacttcatcttgctaaactcatgcctactcagtggaggacaattgcacctattgtaggtcgaacaccatctcagtgtcttgaacgttatgaaaagctgcttgacgccgcatgtgcaaaggatgaaaattatgaggctaatgatgatcctaggaagctgcggcctggcgagattgacccaaaccctgagtcaaagcccgcacgtcctgatcctgttgatatggatgaagatgaaaaagaaatgctttctgaggctagggcccgcttagctaacactaggggtaaaaaggccaaacggaaggcaagggagaaacaacttgaagaagcaagaaggcttgcttcactacaaaaaaggagagaattgaaggcagctggtattgatacacgccacag

SEQ ID NO: 17782 - DNA, 1140 bp, Zea mays
  Clone ID: LIB3075-023-C3_FLI
gcgcgaggtgcggcgcctccaccggctcgtcggaaacgccgtggtcgatggataccatgtgatcgtcgggactgggtccacgcagctgttccaggccgtgctatacgcgatctcgcctgcaagtgacggcacgcccatcgacgtcgtctcgccggcgccttactactcgtgttacccagttgcgtcgagctttctaaactctgggctctaccgttggggtggtgacgccaatacatttgccggcgacgacaccagctgtgttgaggtcgtctgctcgccaaacaaccctgacggtggcatccgacatgccgtcgtcaagtccaaatccagcaaggcgatctatgacttcgcctactactggccgcagtacacgcccatcaccgaggcggctgcccatgatgtcatgctgttcaccttctccaaatgctccggccatgccggtactaggctggggtgggcactggtgaaggacactgaggtggccaagaagatgaccaagttcatggagctcaccacgattggcgtgtccaaggactctcagcttcgtgccgctaagattcttggggcgatctgtaacggctatgagcagctgccatcccccgcgggccaaacaagaagccacctcttccattttgctcgggagaaaatggcggcacgatggactaggctccgcgcagctttggcggcctcggacatctttactctcccagatgagctatctgagtactgtggtttcttcaagaagactgtcaccgccaatcctgcgttcgcatggcttcgctgcaagaaggatggtattgaagatctggagagctttctacgcgagaacaagatagtcactcgaggtggcgcaaagtttggagtggacgggagggttgtcagggtcagtatggttgacacagaccaagccttcaacgtgttcctggatcgtctagccacgatgaagtgagatactactagtgcaaataaacactttgtcgctgcatggatggatgacaatgttctaagtttagtgcaaggatgatcgttcggaaaacttaataatgttctatttgttctataattagatcatgttttctagtatagtagaatattcactgtcaaatgctatatataattgaggttgtgatctatttgatt

SEQ ID NO: 17783 - DNA, 437 bp, Zea mays
  Clone ID: LIB3075-023-D10_FLI
agagaaagagcgggaatggaggaagaccggagtggagaaagcgccgccgccggtgaaacctccggcgccggtgttccatcctctgtgcgtagtcgcgtgggtgcgccaacgtccgggggaatccgtccgtgccttcggagcgggctgggcgaccccgaatcgggcggaattccacgccggtgaacgtgccagagcagaactacctcctccccgtggtcggctcgctagcgcagacaatccccggagaagaacaggtggttcaagaggagccacacatcgaggagttcgattcgatctaggtggcatctcccagttgactttttgacgccaaggatggtatttagatattgttatatttatcttttattttgtaaaacttccgctatgtaataaatactctgattattgtgacatttatctttatacactctattatt

SEQ ID NO: 17784 - DNA, 694 bp, Zea mays
  Clone ID: LIB3075-024-C10_FLI
ccggaagcatcagccatgtcgaactcggcgtcgggaatggccgtctgtgatgaatgcaagctcaagttccaggagctcaaggcgaagaggagcttccgcttcatcgtgttcaagatcaacgagaacgtgcagcaggtggtggtggacaggctaggggagccaggcgagagctacgacgccttcacggcctgcttccccgccaacgagtgccgctacgccgtgttcgattttgacttcgtcactgacgagaactgccagaagagcaagatcttctttatctcttgggccccggatacatcgagggtgagaagcaagatgctgtacgcgagctccaaggaccggttcaagagggagctggatggcattcaggtggagctacaagcaaccgacccgagcgaaatgagcatggacatcgtcaagtcgcgagccctctgaaacagccccggccgctgcacctgcacgctgcaggggcgcatcggctcctgcatgcccgtgggtcgtcgaatccttgcttgtgtgttgggaacggtcttgtgttttcgtgtccttgttttcctggaagcaaaagccctgcattctatatgagactgtatgccattttccatctttttctctccccatatctctgccctagtcctgctaccgctgtagactagaacttatttggtgtttgatctcgtggcattgtcgagtc

SEQ ID NO: 17785 - DNA, 1220 bp, Zea mays
  Clone ID: LIB3075-025-A10_FLI
acaagtgacaaatgaatctgtttgaggcttgcttgaatccagattcattggatggacaagtgacaaatgacctgaagaaagctggcagccttagattttacaaaccaaaattcaaatatattttttgtgatatggatggtacgctgctcaacagtaaaagtcaagtttcagcaaggaatgcagaagctctaagggaagctaggtcaagaggagtaaacatagttattgccactggaaaggcacgtcctgctgtaatcgacgctcttagtatggtggacttatctggaaggactggtattgtttcagaatcatcacctggtgtattccttcaggggctgttggtttatggtttggaagggagacggatttataaaagaaatttggaccaagaagtatgtagagaggcactctcatattctatagagaacaagataccattagtagcatttagtcaggatcattgttattcgatgtttgaccaccctttggtcgattctctccattacatataccatgaacctaaggctaaaatagtgccatctattggtcagcttttagaaacagctgagatacagaaagtattgttccttgaaactcctgagaggatttcgtctgcactgagaccgtactgggcaaaggcgatagagggaagggcccatgttgttcaggcacagcctgatatgcttgaacttgtaccacctgcaacttcgaaaggcaatggtgtgaaggttctgttgaaccacctttccattagtccagatgaggtaatggcaattggtgacggagaaaatgacattgaaatgttgcaactagcttcgtttggggttgctcttgcaaatggatctgacaagacaaaagcagcggcaaatgtaattggcgccacgaatgatgaagatggagttgcacaggctatttatgaatatgccttctaagagcaacgaatcattttggactgggttaatttcttctgatttcccatttttcgtggactcaacacagaaccattgtagtggttccaacttgcaagtacacaccgctccaccggagcgcaatctcgctctggtgttacagtttctgaactgttagcaactgtaagacattttttagttggcatgaaccgaaatccagctaccagctctacatactcttggctggaatatgtaaccgctaaccggattactattttttctcattttttatgcaaaagcgttccttttttt

SEQ ID NO: 17786 - DNA, 1414 bp, Zea mays
  Clone ID: LIB3075-025-H6_FLI
gtagaagtggaattgttgctcttgatagagcagaagcagtaattgagataactgaatgggttgaagttccaaagaagatattgactctagagagtaacatcaccaatctgaattcttcttctgaagtaggagcagctaatagcacaacagatagtaaggaaaatctgagttctggcagtaatactaattcgagcactcccattgatgagagtaatgctcaagaaattattacagagaaggtgctaaagaaaagaacttttagggttccgttgaaggttgtggaaaaaacaactggtgctggaacaattctttcgaaggagttgtattctgaagcaaaaaataggttagaggcactcgataagaaggatgcagaacggaggaaaactgctgaacttaagaataacctagagtcatacatatattctatgaaggagaagctggaagaaagcgcagatattttgactgtctcaactgaacaggagagggaatcctttgctgagaaacttagtgaggtgcaggattggttatatatggacggtgaagatgctcaagctaatgaattcaaagagcgtcttgaccaacttaaagccattggtgacccaattcttttcagattgtcaagaactgggagacaaacaaaccatggctcccccaaaagagagtagatgaggttgtaagtgaagcagagaaagtgaaagcttggctgaaggagaaggaaaacctgcagaaaaatacccctgtctttagcccaccagttttcacatctgaagaagtttctgagaaagttctggacttacaagacaaggtctcaagtgtcaataggattccaaaaccaaaaccgaaggtcgagaagaaaacagcaaaggaggaagaacctgctagcaaggagaaaaccacctatacggaatctgcacccaacgagggtgaatacaccgaaacgtctcaggaatctaaggctcaagaagaggatcagtctgcatcagccaacactagtgattcagaacctgaacctcatgacgagttgtgagaaccagacagaatccataggaacaggtcgggacgacgcattacgcatgtactacaagaaggcagtttgaggataaattttggttgctcaattttttccaaaattttatttgacgaccgaaagacgaggctatgtaggtgttgaggaacactagatgctgtagggccaaaaatattttatcggtagtttctgattgctgtatagcagcctcatcgttgtgtaagttactcgcctcgaaggcgtagttcaggatctagaatcgctttgttatactgaactcatttcattttttaatgaagaatgctatataggattttacgtcagtaaggtattgttgtactgagctgatttgattttttaaataaataatttcatagattgtacgtc

SEQ ID NO: 17787 - DNA, 851 bp, Zea mays
  Clone ID: LIB3075-026-F9_FLI
cgccgagctcctcgaaaccctaggagcgtgcttgaccggcggcggcgaggtgatggcgatggaccctgacgcggtagcgaaggccttcgtggagcattactaccgaacgttcgacaccaaccgcgcggcgctggttgggctgtaccaggagacctccatgctcaccttcgagggccagaagttccagggcccgtccgccattgccggcaagctcggatctctccctttccaggcctgcgagcatcagatcgtcaccgtcgactgccagccatcgggtccccagggaggcatgctcgtcttcgtctccggttccatacgcaccggccccgaggagcaccccatcaagttctcccaggcattccatttgctgccggccgctgggtccttcttcgtgcagaatgacatgttccgcctgaactatggctaaagacagccgatactcttgtgatgaaggaattgtttaagggtttcatgttgaaacgatgaatacttaatgttgccgctactctggtctcttttgtatcttctttgttggctgcttcactgtattacaagaaattgctagacttggattatttcagttgttttgaatcatgtactggttgcaccatttctttgtggaatgtgaattgaaacggtcgtagctacttgatacgcattttgttacaacagcaggcattcgagtttctggtgcttgtacctggagctgttggaaattttcgcttcttctgcagagggaagtcttcgggcaagatgtggtaaaccccccctcgattttgtatgtctggttagcgaggttgaattgaatactcttgtgtctatgactaataaaattgaattcagtgtgtacc

SEQ ID NO: 17788 - DNA, 1057 bp, Zea mays
  Clone ID: LIB3075-026-G3_FLI
gacaacctgtatggttgccgccactcgctccctgatggtctgatgagggccactgacgttatgatcgccggaaaggttgccgtggtctgcggatacggtgatgtcggcaagggttgtgctgctgccctcaagcaggctggtgcccgtgtcattgtgaccgagatcgaccccatctgtgccctccaggctctgatggagggtcttcaggtccttcccttggaggacgttgtctctgaagctgacatcttcgtgaccaccactggcaacaaggatatcatcatggttgaccacatgaggaagatgaagaacaatgccattgtctgcaacattggccactttgacaatgaaattgatatgctcggccttgagacctaccctggcgtcaagcgcatcaccatcaagccccagactgaccgctgggtgttccccgagaccaacactggcatcattgtccttgctgagggtcgcctgatgaaccttgggtgtgctactggccatcctagctttgtcatgtcctgctcattcactaaccaggtcattgcccaacttgaactgtggaaggagaagagctctggcaagtatgagaagaaggtgtatgtgctccccaagcaccttgatgagaaggttgctgctctccacttgggcaagcttggtgccaagctgaccaagctcaccaagtctcaggccgactacatcagcgtgccgatcgagggtccctacaagcctgcccactaccggtactaggcacacggcttgcagctcactcgggccgttgtgtgctatgaagttcgctacactggcctgtcagttatcttttgcatgcatatgcattatcatatacgcagtcgcgtagcaggttttcttatggttatcgcttgagctgaggggggagggaaggagctgtttgcttttgctgaagaataatggtgtagtcggctggggtgaggcgatgtgcgttgccagatacagttttgtcttgttgactctacttatctgattatcatttgtaagcgatttgctcaagttatttgtcgtttatgaataacttgctttcctc

SEQ ID NO: 17789 - DNA, 773 bp, Zea mays
  Clone ID: LIB3075-026-G4_FLI
gctggcttctcctccccctcttaccaagtcctcttcgggttagggttacttagggttttgtggaggggcgatggcggcggctgatgtggagtaccgttgcttcgtcggcgggcttgcctgggccaccagcaacgagtcgctggagaatgccttcgcctcctacggcgagatcctcgactccaaggtcatcaccgaccgggagacggggaggtctcgcggcttcggcttcgttaccttctcctccgagaactccatgctcgacgctatcgagaacatgaacggcaaggagctcgacggccgtaacatcaccgttaaccaggcccagtcccgtggcggtggcggtggcggcggtggctacggcggcggtcgcggcggcggcggctatggtggcgggcgccgtgacggcggttatggcggcggtggcggctacggcggtcggcgcgagggtggtggcggcggctacggaggcggtggcggctacggcggtcggcgcgagggtggtggtggcggctacggcggcggcggcggcggctggagggactgatgtgtgggcccatcctggcttcggccgagttatcttatctatctatagtatcgtgttaccgttcgcttctgtcaccgtgttagtgtccgttctacctttggattaggtgttggtacccctgttgttccctttggttgctcccgctatgaaacgagacgagagaagaatgagcaaggtttttgttcgcagctatttttgtccaatgatattgatatgttgttcccctgtc

SEQ ID NO: 17790 - DNA, 666 bp, Zea mays
  Clone ID: LIB3075-026-G6_FLI
tctctgtggagtaggtcgcctgacgaactcacaaatcacaaggatacgccgagacgcgcgtctcgtttctcccttcctcagctgctggccccctgcctgcagccattgccccgctcctcgaggtcaaatggcccctgcccccgctctcaccgccacatccgtcctgaagcgatcccacctacccggcgtccactcgttggccggtcgccggcagccggggcgggaccgcgtctcggtgctttctccagcgatcccgccgccccgcgtttcatggcagcaaggatctggagtggttgctaagaggctcctctgggcgagtgcgagtggttccttcgagaaagataacatcggggaggacgtggtgttgccttctcagatagcggtggagaataaagtagatttgttgaagattttgaagagtgccaactcaattattccccatatagtgctggggagtacaattctcgcgctggtgtacccgccttcgttcacatggttcactaccaggtactatgcaccagctttggggttcttgatgtttgctgttggtgtaaactcaagcgccaatgatttcattgaagcaataaaaaggccagatgctattgctgcgggctatatcggacagttgtcattaagcccttgtttggattcctttttggcactcta

SEQ ID NO: 17791 - DNA, 645 bp, Zea mays
  Clone ID: LIB3075-027-A3_FLI
cctctactacgcgcttctccacgtcgggctcgccggctccccgcgcaaccccttcctctctcacgagatcggcggcgaggacggcgccggggatagcgacctagggttctccaagtgggccgagaagctccgtggcggtgcctcaggtgaaaaagatgctcagcataagagaaagctaactagcaaatggaagcccacgaccaaaggcacactgaagagaacctaccgagtacgatcaacggatgagggaaggcggatcctgaaggagattgcttcagttctgtcccaagatgatcattttgtggatgcttcgtctcacaagggttgccaaattaggagggaaagtgctcatggcgaaagtgtttgctgctacaacgtgagagcgttgttcgatgagcttccaactcctcacctgcttctggagataacaccgtttcctgctggacaacttacggacaacgactaccgtaaggcagagaggcttgagatggtcctgaggctcagcacttctatttaaaaaagctggggactgatttttcaatttcccctaatacttaatttgcccaagttgtaaattgtcgtcctatgggcctgtaaattgacgcagttggcaaagaatcacttgaaaacacaagttctggttgc

SEQ ID NO: 17792 - DNA, 512 bp, Zea mays
  Clone ID: LIB3075-027-D1_FLI
gcctcaaccattagtgcaggaggaagatcttagctgggaggagattgaggatgttggcgatgaagatcagaagaatggggttagcaaacggtcaagctctgtcagcaaagtggaggatctccggagacgtcttaattctgtggaagatgatgatgaggacctaagttgggatgtcgatgagtagaaagaacgtgtggagccctgcactgagttgtctgaaggacttctaaattagagagactgccatcctaagcataaattgaatttgtatggtgccgatgaagaagctttgtggatggattgccacaatgtgaatattgtgatggacactggtgattcaaattcagtgggggctcattagtttccttgcaagaactcgatagaatggtagtgttttttctgttagtgttggtaatttgtttccagttagcatacgtttgttgcaagtccaacatgtaccaccttcctgtttgaatatgacacatagttcatttcagattcacaaagtaaac

SEQ ID NO: 17793 - DNA, 695 bp, Zea mays
  Clone ID: LIB3075-027-D8_FLI
agaagaccacacagacttctagatttattctcaaagcttgcaagaagagctgatgcagaggatccaatagaaaaggctcttcttggtcttccaacggatggccttcgcgtgcttcttgaatacgtccgtgaatggaatacgaagcccaagttctgtcatgttgcacagtttgtgctttttcggttattgaggagtttctctcccactgatatcctggagatcaagggcatcagtgagctccttgagggccttattccgtattcgcagaggcatttcagccgagtcgatagactagtccgaagcacgtttctgttggactatacgctgatgcgaatgtccgtggtagatccagatgtagatgcgggaacaatcaaagatgaaatgaacggttcgtctgcggagaacggtgaacttgcagagcctcggcctgcttcacctgtaccacagaagtcaagcaagaagagaaaatctggcaaatcaggtaaaaagggcaaggagaagaaggtgaaggttgcctcgagcggactactcagcaaggatgtttctgttgaaccctaaatatatagctgagaatctgtttttttatgcatgccgccaattttgtagctgctgttgcaactgacgttgcccaacacacgaatcccatatgatgtaaatgcatttttgctgatttattaggagggcgaagtgctatc

SEQ ID NO: 17794 - DNA, 656 bp, Zea mays
  Clone ID: LIB3075-027-E11_FLI
cgccgaggaaccccttcacagcgcggaagatggctgaacaggaggcccagtcgtggttgaggcaccaaccccagttcttggggagcctatggacttgatgactgctctgcagctcgtgatgaagaagtcaagtgctcatgatggacttgtgaagggtctccgtgaggctgccaaggccatcgagaagcacgccgctcagctttgcgtgcttgctgaggactgtgaccagccagattatgtcaagctggtgaaggcactctgcgcggagcacaatgttcacctggtcactgttcctgccgctaagacccttggcgagtgggctgggctttgcaagattgactctgagggcaaggcaaggaaggttgtaggctgctcctgtgtcgtcgtcaaggactacggtgaagaatctgagggccttaacatagtgcaggagtatgtcaagtcgcactagatgtgtgacatgtttcagtgatactcttgatttggacctgggcttaaaattatgcttttgcatctggggcttgcctaggagattagaacattttactagaagagccgaagaggatatgtatgaacaatttggacatctgaattttttttgtttatggtgctgtcgtctggttttaatgcaaatcatgaagagccgagtttattct

SEQ ID NO: 17795 - DNA, 950 bp, Zea mays
  Clone ID: LIB3075-027-E4_FLI
agcaggtgttccgtgagcaccacgacggcggcggcggcggcgacgacggcggcaacccgttcgcggcgcagctgatggaggtgatggagctgctgcacggcaacctggaggccaagtcgcggctgtacaaggacccgtcgctgagcaacatcttcctgatgaacaacgggcggtacatgctgcagaagatccgcgggtcggcggagaccaacgcgatgctgggcgaggcgtgggcgcggaagcagtcgaccaacctgcggcagtaccacaagaactaccagcgggacgcgtggagccgcgtgctggggctgctccgcgacgacggcgtgctgacggtgaagggccacgtgcagaagccggtgctcaaggagcggttcaagcagttcaacgccgccatggacgagatccaccggacgcagggcgcatgggtcgtcagcgacgagcagctgcagtcggagctgcgcgtctccatcgccgccgtcgtcgtgccggcctaccgctccttcctcggccgcttcgcgcagcacttcagcgccgggagacagacggagaagtacgtcaagctcagcgctgaggacgtggagaccatcatcgacgagctcttcgacggcaacgccacgtccatgacgaggaggaagacatgacaacaataacaacaacactagagcttcttgcttgacagtgccgcggcacgtccattggccggtccagcttattcatccattatcgatttgagcaatgtgttgttcctttttttttgtttcctcttcaaaaattcttctttttatttgtcttctgtcaactaaaaacgttactgtactaattttggtccagcaacagtcgatccatgtactaagaactgtacttactaccagtgcttctgtcaggagccagggcagctagatcatctctctgtaactctttgtacccatatatgtactgcttgcctg

SEQ ID NO: 17796 - DNA, 839 bp, Zea mays
  Clone ID: LIB3075-027-G3_FLI
cggacgcttgggctggcgttggccacggagccccccaacgacgagctcatgaagaggactcccgtcggaaggaaaggcaacttcatcagcaacaccatgtggaggaacatcatggggcaggccctctaccagttcctcgtcatctggtacctgcagtctagggggaaacggctcttctggatcgacgagggcgccgccgacgccgacctggtcctgaacacggtcatcttcaactgcttcgtgttctgccaggttttcaacgaggtgaactcgagggagatggagagggtgaacgtgttccgaggcatcctggacaacaacgtgttcgtcatggtcctcggcagcaccgtcgtgttccagttcgtgatcgtgcagtgcctcggtagcttcgccaacacgacccctctcagcctcgcgcagtgggtcgcctgcgtcgccatcgggttcgtaggcatgcctatcgccgtggcggtgaagatggtgccggtggagtaggccggccttcagtggaggcagccaggcagttttggccgttgttgcttgccctcgtcatacagacatcttcctcgcttatgatctagacttctctggaggtcgagccgccatggcgatcggctcgattctgaaaagtgttgggtagaatcttgtagctttgaaagtttcagtttcagttttttttttgttcccagacgttcttcatttggaagtagtaactgttggcttgaaatgtttattacagatgtactgattttttttaagaacagaacaggttttattcatttgttattctacaaagggttcctgtgtcttgagatatatatagtgttgtaatttctagt

SEQ ID NO: 17797 - DNA, 786 bp, Zea mays
  Clone ID: LIB3075-027-G6_FLI
tgccgccgccgtttctgcatctcccatcttcgcaacgccggcgctccatcttgcgctccctccctcactcgctctcggtacgcaggcggcggcggcggcggcggtggcggctctcagattcgggctctcagcgacggcgtcagcagcttccactcccgcctctcgccagttgcctcgcgccctcgcctccggtcctccgcacaccgccggttacccttctaaaacacctcatccccaaatgaagcacatattcaagattgctgcaatactggtagcaatctctgctatctggattgctctccttgaaacctccactgttcctcgaagttatacttggctgcttcccatctacttggtagtggctcttggatgctatggcctttttatggttggatttggacttatgttcttcccaacttgtcctcgagaagctgtactactgcaacaggatattgtggaggcaaaggaattcttaggaaagaggggtgttgatgtgggctctgagtgagatcaattttaagtggttgacatacatgtctgttttgaaggatcaccattctgttccttggaataggttgcttttttgggtactgtagataggaaacatataattccactatgttcagctattactaacacggtttttgtgagttggcatgttatagttctgcttttgtcaatgatggggctcacattgacttgccggtgtttttcaagttttaaagactgaactgttctaggaatatttggtttctatcttgatttcccgtcagtggaccatttacc

SEQ ID NO: 17798 - DNA, 1484 bp, Zea mays
  Clone ID: LIB3075-027-G7_FLI
cggagccaccggggagcgggagggcatgtttctgttcggagattcatatcgccgaagggtgttcttcaagtacgagaagaggattaggacgcgcagccctccagagaagatctttgagtacttcgcatccgtccacagcccagagggtgagatgtacatgttacctaccgacctgatgagggcggttgttcctgttttcccctcatctgagtccaaaaatgtcagggaagggagattgaagggggagcgccaccctggcgagctacaatgtgctccatctgagtttttcatgctattcgatacaaatggtgatggtgtcatctccttttctgagtatatcttctttgtaacattacttagtatccctgaatcaagcttccatgtggcttttaagatgtttgaccttgaccacaatggggaaattgacaaagacgagtttaggaaagtgatgacactgatgcgatcctataatagacaaggagctgcccatagggatggtttacgctttggacgcaaggttggtcagccagtggaaaatggtggactggtcgaatacttctttggcaaggatgggaatgaacatctacactatgataagttctctagttttttgaagaaattgcatgatgagattgtccgcttggagtttagtcactacgatgtgaaatcatccaacacaatacctgttaaggactttgcgttatccatggttgcttctgctgatatgatttacatagacaagttactggatagagttgaggatttggacgacaatcttgacctcaaggatctgcgtattacctttgaggagttcaaggcatttgctgatcttcgaagaaggttggaaccatttagaatggctatcttcagctacggcaaagtaaatggtctgttgacgaagcaggatctaaaacgtgccgcatcacatgtttgtggagtggacttgactgataaagtagtagacataattttccatgtgtttgatgctaactgtgatggtaacctgagttcagaggagttcctgaggtcattacaaaaaagagaaagtgatattcgccagccagcaacgtcaggtttcctaggggtgatcgcctgttggctgaactgtacaaagtgttctcttcaacagatgctgtcccagtagattcttttttgacgctcatgacagtcttcagttgcccttggttgctctgtgcttattgagctggagaacgtcatcggggagttctgaagtgtgaagaggatttttgttgtaaatattaccctgcggcccctgcttagtagctcctacgttaccacgtagcagctgtaacctgtaaggaattccttccgttctcgttcaagggcttcgatgacatacatcttctcccctgacattaaatctccgtcgacttagctggagccttgctacctatcttgcttttagctcatccctgatgctaatattctgtggattgtggttgaacaatcacacttgtaagact

SEQ ID NO: 17799 - DNA, 1028 bp, Zea mays
  Clone ID: LIB3075-027-H1_FLI
cgaacaaagtacaggtccatttctagcctatcgagctcctcaggtagtaaaaccctacctacacctcgtgccgcctccgtcgccggctcgcctccccatcgacgcgcaggcagccctgcgtttgctccccgtcggtcgggaaaggggcgcgccggcgctgcctccagcaatcaactcgccgcatccaatcacggcgcctccctcctcgattggctcctcggtggttggttgttataggcaggcgggaaggatgttctcgctgagccagatcgagcacgacctcccgatgccgccgcacctgctgagccgcccccttcccgacgccatcaaggccgagctcgagaggctcttcttggacaaggtaatcacaaaacttgggctgtgcgtgtctgtctatgatatccgatccattgaaggcggttccatccatccaggggagggctgctcgacttataaagtttcatttcgtttgctgatgttcaagccttttaatggggagattcttgttgggaggattactggatatgacgataagggattgcaggtttcacttgaattcttcagtgacatttgcatacctggacacttgatgcagtttggcacagtaaggggaccagatggtaggtggatgctgaagactgaattaggcgatgagctttatctagatctagatgacgagataaggttcttggtttctagcacaaaatacccgcctataccaattgatcaaaatgaggatgacccaccatttgctccaatgcagattgttggaagtattaaaggggatggccttggtcttcttgtttggtgggcagctgatgaagaggagggggaggaggcggcagaggaagagcaatagcatcgtgttgcttgagggctcacttcgtgtaatttacagaatcagcctggtagcatgtgtagtgtaggggtcaggttcctaggagaattatgtatgtatgcaatcccctgaaattttctaaatatctgtgagctatatataattttatagcgcagagatctctccctgt

SEQ ID NO: 17800 - DNA, 1177 bp, Zea mays
  Clone ID: LIB3075-028-B5_FLI
gcgcgtggataacctggtcatcaccggcaagggaaaccttgacgggcagggcccagctgtgtggagcaagaactcctgcaccaagaagtacgactgcaagatccttcccaactcgctggtgatggacttcgtgaacaacggggaggtgtccggggtcacgctgctcaactccaagttcttccacatgaacatgtaccggtgcaaggacatgctgatcaaggacgtgaccgtgacggcgcccggggacagccccaacacggatggcatccacatgggcgactcatccgggatcaccatcaccaacaccgtcattggcgtcggcgacgactgcatctccatcggccccgggacctccaaggtgaacatcaccggcgtgacctgcggccctggccacggcatcagcatcggaagcctagggcggtacaaggacgagaaggacgtcacggacatcaacgtcaaggattgcactcttaagaagacgatgttcggcgtccgcatcaaggcgtacgaggacgccgcctccgtgctcaccgtctccaagatccactacgagaatatcaagatggaggactcagccaaccccatcttcatcgacatgaagtactgccccaacaagttgtgtactgccaacggcgcctccaaggtcaccgtcaaggacgtcaccttcaagaacatcaccggcacctcctccaccccggaggtcgttagcctgctctgcactgccaaggtcccatgcaccggcgtcaccatggatgacgtcaacgtcgagtatagcggcaccaacaacaagaccatggctatatgcacgaacgccaagggcagcaccaaaggttgcctcaaggagcttgcatgcttctagaccctccgtcgactgacccatctctctagttataatttttctctcgtccttgcattgcccattacatgctatccattggtaacgcacaacagtaaaacgacagacatccgacagctatattatgttcgacggtgtaacaccctgaatttgagggtataaaatttcttctctaaataccaaccaaattcaggtgttacctcttgtctctctctctctctcttttccttttgattaaaagtaagtgaattaggcgagggtttaattatttattttgtcaaaacttatgtgagtcatgaaatgttgcatcatgctgagcct

SEQ ID NO: 17801 - DNA, 1096 bp, Zea mays
  Clone ID: LIB3075-028-D12_FLI
gctacgcaccaccattatattgatcgatctatgctgctgctggtcgcaaacgcaccgcagcttcacgggcggccctctcccgaaaatcgagcaccagagtgttccaatcccttctccatataattattggtgttagtttcctgctttccctagtccctcgcaatcaacagatacctcatggacgatcaggagaacgagaatgagcacgagaagcatgccgatgctgggactgacgtcgaggacgaagaggaggacgaagatggccacaagcgtgtcgtcgttcttgggccccaagtccccctcaaggaacagctggagcttgacaaggatgatgagagcctgaggaggtggaaggagcaactcctcgggcaagtcgacaccgagcagctcggagagactgcggagccggaggtgaaggtgctcaacctgaccatcctgtcaccggggcggccagatctagtgctaccgatcccgttcgaggccgacgacaagggctatgcatttacgctcaaggatggcagcctctatagcttccgtttctccttcactgtctccaacaacatcgtttcaggcctcaagtacaccaacacggtctggaagactggagtcaaagtggagaaccagaaaatgatgctagggacattcagtccccagcaagagccgtacgtttacgagggtgaagaagagaccacacctgctggcatcttcgcaagaggttcctattctgctaagctaaagttttttgatgatgatggcaagtgttatttggagacgagttactactttgagattagaaaagagtggccagggccagcaacctaatgatatatggagcggcggtgttggattcgttaaacacatacatgttagaactcttagttaagacaagcagaagatctattatattctactgcttctagctagaggatgattgcttcacatgcatatcgtcatgtttaaccaccgtacgtataatttgtttggagtccattattctacgctatttgggtattattattgttaattcacattatagaatcagtcgtgtatggagattcaaagatatatttatatacttatgaccttcttactgaac

SEQ ID NO: 17802 - DNA, 1615 bp, Zea mays
  Clone ID: LIB3075-028-D3_FLI
cgccaccgcctcgctcgcgcacccgctccacctctgccgcctccgcctcgccgccccgcgctcgcgctccccctccccacggcacgggcggcgcgccatgtcggtccgcagctccctcatcgacccggacggcggcgcgctcgtcgagctcgtcgccccgcccgaccgcctcccggcgctgcgcgcggaggcggaggcgctcccgcgggtgcgcctcgcccccgtcgacctccagtgggcgcacgtgctcgccgaggggtgggccagcccgctccgcgggttcatgcgcgagcacgagtacctgcagagcctccacttcaactgcgttcgcctccccgacgggggcctcgtcaacatgtcgctccccatcgtgctcgccatcggggacgccgacaaggagcagatcgggggtaagccggacgtcgcgttacaagggcccgacggcggtgtcgtcgccatcctgcgcagagttgaaatatatccccacaataaagaagaaagaatcgcaagaacatggggtacaactgcacctggtttaccctatgttgatgaggctattgcgtcagctgggaactggctgatcggtggcgatctggaggtgttggaacccatcaaatacaatgatggtcttgatcactacagactttcacctcggcaacttaggaaggagtttgacaagcggggggctgatgctgtgtttgccttccagttgagaaacccagtacacaatggtcatgcactattgatgaatgacactagaaggcgtctcttggaaatgggttacaagaatcccattctactactacatcccttaggtggttataccaaagcggatgatgtcccactgccagttagaatggaacaacacagtaaggttttagaagatggagtgcttgatcctgagactactatagtgtctatatttccctcaccaatgcattatgctggtccaacagaagtgcagtggcatgcaaaggcacgaattaatgctggtgccaatttctatatagtaggccgagatcctgctggaatgggacatccaacagaaaagagggacttgtacaacccagatcacgggaagaaggtcctgagcatggctcctggtttagagaaactcaacatactgcccttcaaggtagcagcttatgatacagtagcaaaggagatggctttttttgatccttcacgcagtcaagattttctgttcatctctggaaccaagatgcgcacttatgccaaaactggagagaatcctccagacggtttcatgtgcccgggtgggtggaaggttcttgttgactactacaacagcctgcaagctgaagaagcgactccagtccctgtatgaggcaagctactatttgactaagagattattcaatggcggggaaacatacaagcaagtgatcagatcatttgagcttttttccttattgattctttaggttagtagttgattgatatatgatcagatcttttcgattgtttgtttgtcttaaatatgagactctgaagcatggaaaaactaaagatctgcacaagttgagccaaaacagcatggccattgttctgtagcgaagccggttgaactatataataaaagatgaaagggtgc

SEQ ID NO: 17803 - DNA, 379 bp, Zea mays
  Clone ID: LIB3075-028-E5_FLI
gccgttttctcgaagaaggcagcctcttcctcgtcgccggcgacgtcaccctccgcggctatcagggatgccggtcagggtggtagataccgccacgccttcctctcagccctccccagggcaagaagcaaatactggacacccatctcctcctagctgttcactcttaagtgctggaagatcttttgctgggactcaaaatgtttcaagcctgcagaaggatgaagcatggaaagtgaatgtacgcatccatggttgtgatcttgaacagggttatttatgtggaacgatggaagcgcttaatgttccattagcagatacacctgttgtgactttctgggagggggagataggtgtccagtatttgtctagatcgcga

SEQ ID NO: 17804 - DNA, 387 bp, Zea mays
  Clone ID: LIB3075-028-H8_FLI
gtagcgattgcttgtaacccgagcgggggcaataaggtagtgtggatgtcaattgtggtgcatgtgcctgggtctagtgctacaaactgtggaccacccattccaagttgtgtagtgggtttcggatgccttggtgaaagcctttgcatcccaacacctaaagtggtggacattgcgtgaggctggcttcacagagcagcgagtaccgcccgccaccagcggtggaaggataatgagtcgctatgctataggccaattgaggcacatgtgccctctctggtagaccactatctttttgctatttttcttatctacttttgttcctatgtaaccattacgagtatcacgtttttgttctgcatcttggaataaattaaattttgatct

SEQ ID NO: 17805 - DNA, 727 bp, Zea mays
  Clone ID: LIB3075-029-A4_FLI
ttatgagaaggagcgtcttgatgctgaactgaagctggttggtgagtatgggctgaggtgcaagcgtgagctttggagggtccagtatgcactgagcaggatccgtaatgctgcaaggcacttgctcacccttgacgagaagaacccccgtcgtatctttgagggtgaggcacttcttcgccgcatgaaccgctatgggctgcttgctgagggtcagaacaagcttgattatgttcttgccctcaccgctgagaacttcctcgcaaggcggcttcaaacacttgtcttcaaggctggcatggccaagtccattcaccatgctcgtgtcttgatcaagcagcgtcacatcagggttggcaggcaaattgtcaacgtcccatcattcatggtgagggtggagtctgagaagcacattgacttttcactgtcaagcccattcggtggaggccccgcaggaagggtgaagagaaagaatcagaagaaggcaagcggtggcggggatgctggtgatgaggatgaggagtgaggatggacaagtagtgttacaccaatataataatattatctagttttcttgaacttgttcgaatgatgagtgcttagctgtgtgatctgacgcagagtcccctgtgctgactctgtgtcatggatggtccattttatcttgtggtattatcagcctttacataactgctatgtttggatatgttcaattctgttgcaattt

SEQ ID NO: 17806 - DNA, 688 bp, Zea mays
  Clone ID: LIB3075-029-E6_FLI
acgctccgcgccgagctgccgtccctgaaggagcccgccatccggatactcaccgtctgcaccatcttcctgaagcgcgctgccgctgccgggctctgcctcgccgacatcggcgacatgatgacccgcgagttcacggctcagcaggatgggctgagcacactcgaggcgctatgcaagcaagcgcacgactccgtcctcccacacccctcgcccgacggcgacggcgacggcgtcgacgagagtacaagcgtctccggcgggcggaaacacgtgtcgttcggcgacctgagcctcgcggagtggacgtcgttcctggagaggttcgagcagctgctgccggcggcgctcgaggacaagaagtgcgctgtgctagggacgtcgacgtcgtcgtcgttctgaccgtgctacgtactggtcaatcactaccgccaccatttgcatgcatacatgcgtgagtgcgtgcgtgcgtggatgcaaaataatacacgtgtgcatggcgctgtgctagggacctactagctccgtctggatgccttttgtgtgtctactacgtagggtcgtcgaccttgtacggtggcattggcatgcatgctgttgggatgggatcatgggagttgggagctgctgtggaacacccttccaaagaagctgacgtgtgggggcaatgccacccgataccttgaac

SEQ ID NO: 17807 - DNA, 637 bp, Zea mays
  Clone ID: LIB3075-029-H10_FLI
gctaatgagacgggatgttgctatgaagaagggtcttccagttcttggtgtctttaggacctttgccgctgttggagttgatccagctgtcatgggtattggtcctgccgttgcaatccctgcagcagtgaaagctgctggccttcagatggatgatattgatcttttcgaaatcaacgaggcttttgcatctcagtatgtctactgctgcaagaagttggaacttgatcctgctaaagtcaatgttaatggcggtgcaatggctcttggacatcctttgggtgctacaggtgcacggtgcgtcagtactcttctcaatgagatgaagcgccgcggcaaggattgccggttcggagtgatttctatgtgcataggttctgggatgggtgccgctgctgtgttcgagcggggagacggcgttgatgagctcaccaatgctcggggaatctcgacccacaactggctttccaaggacgccatgtaaagctacacccaccaaaatttgccggaactggtagcattgtttccagatcgctgtatggagcgaattgggcaataaaatgattttgtatttgtcacccctgctggggatttaggaagatttttacgccattggtatttgaacttgcttacctgg

SEQ ID NO: 17808 - DNA, 794 bp, Zea mays
  Clone ID: LIB3075-030-A8_FLI
gttccatggagccgatacagctctgctgctctctggatcaagcatgtgtggcgatgtttccgtgaacatcgcaccggtggaagactacgaactgccaccggaagcgtactcccatgcaggagcaaggtctccgggtccgggaacgccgacgggggaggccgtgaagaaggcggaggaggtggtgagcaccatgctggccaggggcttcgtgctgagcaaggacgcgctgcggcgcgcacagtccttcgacggccggcaccagcagctgctgtccacggccacggcgcgggtggcgtcgctggaccgccgcctgggcctcagcgacaagttcagcctcggcacggccgcggcccgcggcgcggcgcgcggcgtcgacgagcgcttccaggtcacggagcgcgcctggggggccttctcggcggccggggaggtcgtggccggcagcccctacgcgtcccgcggcgccgcctgggtgtcggcggccgtcggcgccgtcgcccgggccgcgtccgacgtcggcgccatgaccatggagaaggtgggcagggccgaggaggagggggaggcctcggcggcggagcatggtcactacgcgtcgtcccgtgtcgacgtgcacgacggacagggaggtgcagctcagcacggtgaccataataaggcaatgtgataaaagtagtagcgcgcacgagtatgaatccataaacgttttttttttgaaaaataagatagaaatgtaactgcatgcatctgtccgattattttgacacaataaattctatatccttatcggtttg

SEQ ID NO: 17809 - DNA, 618 bp, Zea mays
  Clone ID: LIB3075-030-A9_FLI
atcaaaggagcagctgccactgcacgcgaagaggggacctattcccttccaaagcaacgaactttcttccgcggtttatctgttgtagcgcttgcctccgcactcgtcactcacctaacagcctccatccccgctgtgttgttgcatcgaccgtccctggagatggatcggcggacatctcagcagcagtgcagcacgagcaggcaacacgagagatggatcgagtacatgagcagcacctagacaggaactggacggacgtggacaggaaccggatggagatggatcgagtacgtgagcagcatggcagcacgggatgccaaggggaaaaaaatggattggcgccgatgaaaactgatttagttgctaaatactatatttgaggctctgttgttggagacccaagttttatgtcactcctaagtagattagatcggttctacaaattaaatttaggacctcggtttaggattcctttttggagttgctctaattagctgtagtgggatattttacgtaggaagcatggcttagatagaacaattaggcgagagcaaaaatctctaaactacagtcaacctgtagtgggatattttagattatttatttttttgacat

SEQ ID NO: 17810 - DNA, 937 bp, Zea mays
  Clone ID: LIB3075-030-B6_FLI
cagatccagaaatcattaaattacagcttgaatttctttgatatgaaaaaattcacctcgaatacaaatgtccacaggatacaggaagctccttacaatactactaacctcatttctgtacatgatccccagacctcagtttttttttccatcacaactgttctgggagataggtgcatccacatcctggactggctggatccatcctccaggaaatcctgctatgtgttgaagaccgaattttttgtaaactactactactactaccgtttggcactgcagacccttttgttatttgtggtcacggatgaaagttgagatccctggagcaaggtctcatgtggagatcccccttattcatcagttattctgtgaactcatgcatggcagaacgccatgctgattttgtgacatgaacataatggttacggacgaaataagcactatggtatggttgacgcaagagctacagtcgctttatgtgactttgcctgtttgtctgaacttgcattgttgtcgttgatttcggcctgtttatcgaggcagtcttgttactttttgacagaccctaatgtttttggtttgtttgttgacagattccaaaaactagattaccgaaacaatatgagtggatgaatatgcaggagagtcagagcttctactatggcttctgctaaggctggagcttttacgtacaggggagccactacttatattgaagataggggtaaaaatgtattatgaaatgaggacttgttgcaggagcaatagaagctcgagccattcgtgcaggtgcctccaatctgcagcaggctgtggaatcaaggtgagataattttcagctttatttgtaatagtcttgctcagattcggtagttcatatgcttcgttcctctatgagttgtctttatgataaatataaaagagcagccttttc

SEQ ID NO: 17811 - DNA, 1290 bp, Zea mays
  Clone ID: LIB3075-030-D3_FLI
tgccattctctcaagctcaagtagtgatgaagatggtcgtgggaggcggaggagatcttatggttctactatcatcattccgacggatatgttttggtacttggatgcagattattatagaagacgtcgagtagaaaacgaaaatgggatgaactttattgaatctgtattttcatttgtgtttggggatggtgatccaaacgatgggcttgaagaaaagcggtggaagatgattggacagtatatttcatcaaatggtggagttgttacagctgaagaactggcaccatttcttgatgtgccacctccatcagaagagtccaaggacgatgaatcatttgttcttccagttcttttacgctttcagggacatccagaaattgatgagcagggaaatatcctgtatcgattcccatcgctgcaacgtactgcttcatcaaaaagtggtaggagcagggaatatgtgggtaccaaatggtctgcaatgtttagcggagttgaaaagtacttagaggagaaaccgtggaaattcagtaaagcgaatgcaacagagaaggcgatggttgctggtttgggaggactcaatctctttggtgtcatcattcttggaaacttgttgaagcaaatgacagtgacacctggtggactaatctcatttgccgcacagttatatcctttgcttcagatatacgctggctccttttttgcaatacctttgtttagatggtttctgctacgcaagaccaacaatggcattaaaaagaggaataaggccagagaacagagagctcaggagctcgtgtcaccagattcttctctaagaagaaagttgctcagtgcacgtgatatggctgaacggaaagtaatcacgccagaggagattgtctatactactgaaaaggatctattggagcaggattatgaagtcaaggagtgggagaggagatttaaggagctcgagtcagagtgatggacatgaccgatatacttgacacttgcagtagctctacatggtcctcaccatacttgtcggtgatttttatccgcatccaacggagtggaagatggatctgactgaaccactcgagcaagcgaaactggatggtactggacctcactaattgtcgtgtcaccaccagcccaccactgaccacttcgctatggaagttttgtggaagctgttggtttaattggaaccgaccattatttgcaagatgatgttcgtatctgtgccattgacctgcatatatgtatagttccaatcacggatcaaattcagaatttgacacg

SEQ ID NO: 17812 - DNA, 1225 bp, Zea mays
  Clone ID: LIB3075-030-E5_FLI
cgattctgtctccctcaggtcgagattcgagagttcccgtgttcgtccatccgcgctgtgaggttctccgatggccgagaagtcacccagctccgcgccgcagggtggttctggtgggaatgaatcattcgataatcttgtaattcaagctccacagcttatgagggaggattacatacagaatgctgtgaagtttctttcacatccgaaagtgaagggttctccagtatttcacaggcgttccttcctggaaaagaaaggccttacaagtgaagaaattgatgaggccttttgtagagttcctgaccctaagccaaatggaacagatgctgtagctgctggtaggcaacaagcaaacaatcccagtcaatctgttgtgctgcaaccttatacagaagttcaaccacaagcagctactgcctctgccactgctggaccaattgttccacatacaaaggcacagttgagctgggtaaacacactccttggtgcaggtctttttcttggtttaggggctagtgctgccataaccctaaagaaattggtcatccctagtctgaaatcttggactcgtagagtcgttgctgaaggagatgaaaatgcaaagagtgaacatacttccaaactttgtgaagaaattagggaagccataaaagtttctgcatcagccttttctgatattgctaaaataaaccaagaagtgcttgcttcaaaagatgaagataggaaggtactcatgaagttaacagaagcattcgagtcacaagaaaatgtgtttaaatcattgagtgagaccttaaatcgtatcagggagaatcagctttcacaacacagcctattggaagagcatgttcagccttcatcatggaacgggccaattgactatcaagggagagcttttcagcaaactaatatgtatgcaacaccaccaaacaacagttttgacacagggaggaactcattcatgccattagctgctgaatcttcttatggaccatttccaggatcctactctgagcgggtgcagaggcctggtggatacggattccagcaacagacaagcagcgaccgattgaatgttgttggcccacggagcagctaccaagggggttcttctaatcaccatgctggtagtaatgccatggatgacccggcagcggttgcagcagaattgcagcgccgctgggttcccccacagccaccaggcgtcatcatgccagaggct

SEQ ID NO: 17813 - DNA, 1531 bp, Zea mays
  Clone ID: LIB3075-031-A1_FLI
gcaaaaggaacataaggatagaggagagaaataaacaatggggaagggagatgtggctaccaggtcaaaatctcaaaaatcaccagcaatacagaatgagcagagtacacctgctaacccgcccacagcatatcctgattggtctcagttccaggcatactataatgctgctgggacagctccagtgaccccacctttttttcatccatctgtagctccaagccatcaggggcacccatatatgtggggtccacagatgatgtctccttatgggacaccaccaccatatgcagcaatgtatgcacaaggtacaccatatcagcaggcaccaatgccaccgggttcacacccatacagtccttatcctatgcagttaccaaacgggacagttcaaactccaacatctggtgctggtggtacagcgacagataaatcaaataaaaataagcggaaggcttccctcaagagatcaaaaggaagcttaggtagtctggatgttgttgcagtaaaaaataacaagtcaccggcaaagccttcaacttcttcctccaatgaaggttcttcacaaagtgagagtggaagcgggagttcttctgaaggaagcagtacaaattcaaaaagtggttcaagggtgaaggataattctgaacaaggacagggtaatgatgctaggagtaaatgtactcaaagctctgtcgttgagcccacacaaccatcttcagggtctgttgtgcttaaccctatgatgccattttggcctgtgccccctcccatggctggcccagcaactactctgaatatgggagtggattactggggtactcctgcttctgtacccatgcatggtaaagttattgcagcaccgacatcagctccttcgtcaaattcacgtgatattgttctcagtgatccgactatacaggatgggagagaactgaagagacaaaaacggaagcaatcaaatagggaatcagctcgacgctcaagattgcgcaagcaggctgaatgggaggaagtagccaatcgtgcagatttgctaaagcaggaaaatagttcacttaaagaagaattgaaacaacttcaggagaagtgtgatggcttgacctcagaaaatacatctctacatgagaagcttaaagcgcttgaggatgagaaatcaaatggaaattggtacaaggattaaaggctgaaacttctctctttctgactgctgatataatttggtggtaacctgataggacgacaactaaagagattcttcttccagttgtgctgctgtgctgtgttgtctttcttccctcttcgtgctagatgctacagaggtacaactatgtagaaacccccaggtggtgtttgaagcctgggggggcttagcggtgtggtattggtatagctgttgtagagctgctcactgagcttcttgacagaaactgaagcgtgctaaagcagtcgtgtgatttaagattcagacggactaatcttacggatagtactgtaactgcactaatgaatacaaatagcctttttactg

SEQ ID NO: 17814 - DNA, 1055 bp, Zea mays
  Clone ID: LIB3075-031-C1_FLI
gcggcactcgctcgtctgcccattgccctgccgtgtcgacgcagattgatccggtccgatccatcaccgtggcgtagcccagctccgccttgtcgtcgtgggcgcgttcatggcggtccgaactatcaaggtgaccaacgtgcctctctcggcgaccgcggagaacatgaaggagttcttctccttctccggcgagatcgagtacgtcgagatgcgaagggactcggagacgtctcaggttgcttatgtcaccttcaaggagttccatggagccgatacagctctgctgctctctggatcaagcatgtgtggcgatgtttccgtgaacatcgcaccggtggaagactacgaactgccaccggaagcgtactcccatgcaggagcaaggtctccgggtccgggaacgccgacgggggaggccgtgaagaaggcggaggaggtggtgagcaccatgctggccaggggcttcgtgctgagcaaggacgcgctgcggcgcgcacagtccttcgacggccggcaccagcagctgctgtccacggccacggcgcgggtggcgtcgctggaccgccgcctgggcctcagcgacaagttcagcctcggcacggccgcggcccgcggcgcggcgcgcggcgtcgacgagcgcttccaggtcacggagcgcgcctggggggccttctcggcggccggggaggtcgtggccggcagcccctacgcgtcccgcggcgccgcctgggtgtcggcggccgtcggcgccgtcgcccgggccgcgtccgacgtcggcgccatgaccatggagaaggtgggcagggccgaggaggagggggaggcctcggcggcggagcatggtcactacgcgtcgtcccgtgtcgacgtgcacgacggacagggaggtgcagctcagcacggtgaccataataaggcaatgtgataaaagtagtagcgcgcacgagtatgaatccataaacgttttttttttgaaaaataagatagaaatgtaactgcatgcatctgtccgattattttgacacaataaattctatatccttatcggtttg

SEQ ID NO: 17815 - DNA, 1018 bp, Zea mays
  Clone ID: LIB3075-031-D8_FLI
tgttcaaccaggtcagagatattccttgtggaacaaaaggtggtgttatgatcagctttgacaagatagaggtcgtgaaccgccttcgcaaagagtttgtgcatgaaaccctactcaactatggtgtgcactatgacaagacatggatatatgataaaatccatcatgagattaatcagttctgcagtgctcacagtttgcagcaagtttacattgacatgttcgatcagattgatgaaacaatgaaagaagctattcaaagagactgtacacgctatgctcctggaattgaaatcatcagtgttcgtgttacgaagccaaatatacctggtagtatcagaagaaactttgaacttatggaggaggagcgtacaaaggcactgatcgccatggagaagcaaaaggtagcagagaaggaggcagaaacacagaagaagattgcgctatctgaagcagagaagaacgcacaggtgagcaagatcctgatggagcagaagctgatggaaaaggacagttccaagcgacaggagcagattgataatgacatgtacctcgcacgagagaaagcagtagcagatgcaaactactacaggatattgaaggaagcagaggccaataggctcaaactgacacctgagtatcttgagctgaggttcattgaatcaatcgccaataactcaaagattttcttcggtgaaaagattcctaacatgatcatggatcaaaggttgctcaagaactaccttgatgctgctcctaggaaggaccattatgagatgtagaagcgtgttccgtgagttggaagcaaaagacctttgtgtgtgtgatcccaccgtccacgcagtagataggattcccacgagccgttcagtacctcagtaagccagaaaagactcatcaggaccctcttgaagatttagatgcaaaaattttcttcgccaaaaatgtacagttttgctcactgacttaggacatgtttggagcatctatttttttagaaactggtttatgaaaactg

SEQ ID NO: 17816 - DNA, 928 bp, Zea mays
  Clone ID: LIB3075-032-A3_FLI
gtgggatctcaccgtttcttcctcgtctccgtctctacacggcggcgccgccgccgccagctgctgccaggagccaagcccaagcctgagcttaaaccatgccgattggttctcttttcgtgtcgaggctggccaggtctagccatgccctccccgctgccgccgccgcggccatctctcaggcgcccaggccccagcacatcgcatctcctatattctccggccttggagcagcggctcgtgatttcagctcaagggctctatggaagggagcattcgtcgatgccttcctggctagaataaagaagaacagagaaaacatgaatgggaagaagatttggtctcgtaggtcttctattttgccggaatttgttggttccactgtgctcatttacaatgggaaaagtcatgtccggtgcaagatcactgaagggaaggttggccataaatttggagagtttgcttttacacggagacgaaggccccatcgaacaataacaggaaagggaaatcaaggaaagggcagaaagtaaaagtagaaatgtgcatgaaaggtgggtttaaggacagcttgatgacggcgtagctgacgaacaagcacttgaatcaccagaattcatgatctggactgttttttcttagaccaataaccgcaggaaaatgttagctcatcttacttaggggtaatttggtaactctatttttccaagacatttttatttttctaagagaaaattaactaatttttcttagtaaaatagaaatcccttagaaaaatgaggttgccaaaccagctcttaaaaatttgcctacggactctgttcctctgttatttcctgcttgctatcggtgtgatcggtataccttaaactgattgtaagttatgctttagagtgattgtttatgaacaaaactagctacatttctg

SEQ ID NO: 17817 - DNA, 676 bp, Zea mays
  Clone ID: LIB3075-032-A4_FLI
gctggaccaaagtttgagtatagatgggccgatggggtgcagatcaagaaaccaattgaggtttcagcaccaaagtatgttgagtacttgatggattggatcgaagctcagcttgatgacgaatccatcttccctcagaaactcggaaccccttttccacaaaatttcaaggaagttgtgaagacaatctttaagcgacttttccgtgtttatgctcatatttaccactcacattttcaaaagattgtcagccttaaggaggaagcacatcttaacacttgcttcaagcattttacattgttcacttgggaattcacgttgattgacaaggctgagcttgcaccacttattgatctaattgaatccattgtttcagtttgttgacatgacatcaatgattatttggatcattttcttatttttggagagcaaggagttacaactaagtgtccagtatgagggtgagactaagaatggtcaaaagtttttttttgttatcttttaggtgtctgtctctacaatgggacttgtgcatgtttgtcttatgaagtcctgaagaaactatttagggctcaatgagataatgttgtgtatccttctcttgaatgactccataagttctgtttgcaacaagcattaatttctcattcctaaaggagaactttattcatctatt

SEQ ID NO: 17818 - DNA, 1075 bp, Zea mays
  Clone ID: LIB3075-032-C4_FLI
ttcgtccaaccgcaattgctccatccaaccttgaagagatgtatgcttcagacatggctatgtcgccaagattctccaatgatcaagttcactcagtctactcaccagcacacaaatcagcacttctaaacaagtttcatcatcagcaaaagggcctactgtcgcctgtcaatactaacaggatatactcgcctaggggtcttgatccatcagttctccattctccatttggtggtatgtgtcctcggtcccctcggactatggagccagcatctcccttaactgtctgtgtcggggctactgctacgcagcgtgatatgttggatcagttctcttccctgaacaagcatcaggtgccatctgcgggatcgccacggaatcttaatgtctcatggggcaacattggtaccccaaagagtaaggtggattggggtgttgacaacgatgaactagtccgcttgaggcaccctgtgcaacctggaaatacagaagaggagccagatgtgtcttgggtgcagtcactggtgaaccatgctgagctgagtggcaagaggggtgaaatggcaggcatggcttctcgaccaactaataggcctgaactgagcagtcaggatgactcactggatgagagtgttattgcttcttggcttgagcagcagatgcacttggagccgaagtaactgtgaaagaggtcttttgctctcaaggtggatgaaaccatctttttgccgggttagtttcctagaagaatatttgtcctagtaaataataatattccttttgtattcttgaattttttgttcgcgaagtcagagatggtggttttcaggaaagcattcgctcacagattggtagctgaaagcagctgtcaagaattggtaaacagcctcgttaccttggaggtcctaactagtattcttttgattagttcagatgaggtaaaattcatatattccaccgtgagagtcaatagtatctgtgttggtctctgtaacaagagaggttatagatatttttttccatttatcaatgaacgatttcatgaatacattgataattcccatttattcttctg

SEQ ID NO: 17819 - DNA, 611 bp, Zea mays
  Clone ID: LIB3075-032-D12_FLI
attaggctctccgagtctccggttccctcctctcggcggcggctcaggtccctctccatctccggcgtggcgcttggcgtctgacctcaacaagcaagaaagcaaatggcaggcggcagggttgcgcatgccaccctcaagggcccgagtgtggtgaaggagatcttcattggactgaccctgggtctgatcgcgggaggcatgtggaagatgcaccactggaacgagcagaggaagactaggtccttctatgacatgcttgacaagggccagatcagcgttgtcgtcgaggagtaaagagttcttcccagttattttcaaagaactctctcgagagcatgacaaagtgattgcttgctgtggagatttgtcctggaaataagcacaaccatttgggaacaccagattttgtcgaattttcctttccttttgatgaatatttgagcacgtccatgtcaataccaaacatctggccttttctctctctgttttttttacatatgtttatgtggtcttagcgagtagctgtgctcgactttgcgttatgaggtatgccgtatgtgattggatcacggtgacctaacaggctatcccacacttgtgtttttacc

SEQ ID NO: 17820 - DNA, 985 bp, Zea mays
  Clone ID: LIB3075-032-D5_FLI
gtggggagcaccggcgacacgacgacggccgaggcggaggcgccggcgccggtgggtgactacgagctgctggagcgcctgggggggcgtcccccgtacacgtccgtgtggcgagcggtctcccggtccaccggcgcgcccgtggctgtgaagcaggtgcggctcaccggcgtccccgcgcgcctccgcgacagcctcgactgcgaggtccgcttcctcgccgccgtcagccaccccaacatcatccgcctcatcgacgtcgtccagacccagagctgcctttacctcgtcctggagctctgcgagggcggggacctggcggccttcatccggcgcaatgggagcgtagacgagcgcgtggccagaaattttatgaaacagatcggagctggcttacaagtgctgcaccggcaccatgtcgtccaccgggacttgaaacctcagaatatcctgctctcttctccgagaagcagcgatgcgatcctcaagatatctgattttggtcttgcaagggttcttggacccggggagtacgcagacacatcttgtggttcttgtttgtacatggccccagaagtgatgctgtttcaaaagtacaatgacaaggtagacatgtggagcatcggcgcgatcctatttgagctcttgaatggctacccgccattccatggcagaagcaacgtctgcttcagtgcatcaacagaagcacgtctctcccgttctcagaaccactggcgtctaccttaggccccgattgtgtcgatatatgcaccaggctactatgcactaatccagtgaagcgtctgtccttccaagagttcttggaccaccgcttcttcagagtatgagtacccaagccatggggaccaccgggcagcgacatgatctgaagaacatcaagaagtttcttgtccttcaagtgctgactgactctgttgtaaagcgttcagaaattgatgcccagtgctcgtcgtcttggttttct

SEQ ID NO: 17821 - DNA, 935 bp, Zea mays
  Clone ID: LIB3075-033-B12_FLI
cgagaaatcccccatttcatcagaaagcgcgattactgctaaacaagagcctctatccaggtctataccaatcggatcgatcgcgaggaccttatcatgggacgacgcttcccaagaggctcctccgcagtgttctaccaaaggagacagcaaccacgagcaggagcagcacgagttcgtcgagaagacgctggcatccgctggcttctgcaacgagaagacccaggacatctttgcccggtggcattcgctcgaccggcccttggaccccgccgtggtcgagcagctgctggaacgcaaggtggaggacgccaagtgccgagagaggcggtcgaaccagaggctcctaatcgactctgtcaacgccgccctgctcgacatcggccagagcaaagtctgggggggcgcgtacccttgcaccgcacggcactattccaacgctccgggagttggcacgtgcgatgatgatgtgctagtgaccgacgaggcgtggaggctggtgaggagctggctcttcgatgacgagaacgacatcgccgggttgggggacaacgcgggccttgcggcggactgggttgtcggtagggagatccacggcaaagggtgggccgagacgctgcggatggaggtggacgagatgagcagggagatatgtggcgaggtcctgggcgagttggttggggaggcgttttcggagcttgccggcgctgcggggtggcattgaagctgcctgccttctattttccctgcttgtggtggcgtccacctgctgctgctgcttttacttccaatccggttcttgtgtgtatattaccctcgtaactgctcaaagtgttccctgctgctgcctctctatctgtgttgcatctctttcagcattgatacattcacggtaataacatttacggatgaatacagctgctgcactgcacttg

SEQ ID NO: 17822 - DNA, 1098 bp, Zea mays
  Clone ID: LIB3075-033-G12_FLI
aattaaagagatcaaagaggtcattgagcttccaatcaaacatccggaactgtttgagagccttggaattgcacaaccaaagggtgtccttctttatggacctccgggcacaggaaagacattgttggcacgtgcggttgctcatcacactgactgcaccttcatcagggtgtctggttctgagttggttcagaagtatattggtgagggctcccggatggttagggaactctttgttatggccagggaacatgcaccatccattatatttatggatgaaattgactctatcggatctgctagaatggagtctggaactggcaacggtgacagtgaagttcagcgtactatgcttgaacttctaaaccagcttgatggttttgaagcatcaaacaaaattaaggttttgatggcaacgaacagaatagacattttggatcaagcccttctgaggcctggccgcatagacaggaagattgaatttccaaatcctaacgaggattcacgtttcgatatcttgaagatccattcaagaaaaatgaacttgatgcgtggcattgatctgaaaaagatcgcggaaaagatgaatggggcctcaggagctgagctcaaggccgtctgcacagaggctggaatgtttgctcttcgtgagagaagggtgcacgttacccaggaggacttcgagatggcagtggccaaggtgatgaagaaagacacggagaagaacatgtccctgcgcaagctctggaagtgaggctcgtgcctacctttcacagccttcccgaagctagtggcagtgccttcatatccatatcttttaccaaagcagtggaatggcgtaacggcatgctctggacaatgttatctcaagttgcgccgcgcatgcttatgtttaaagttttccttataacgtctgtagtgtgttgttgcaaagttgattggctttatcagatcagctagattacggtactaatacattgctagctcgcgatgtggacactgcataatggttacttgctcggattatccacattctcgtgtgtaacatgcattgcaatgtcgtggcccattcaatatctcatatttttaacgtgtttt

SEQ ID NO: 17823 - DNA, 1644 bp, Zea mays
  Clone ID: LIB3075-033-G3_FLI
cgcagagataggcgtcttcgtactcgcctacctccgcggctcaaacctttcccccttctcccaattcccgccgccgctccatcccgtaacgcgacaccatgagggagtgcatttcgatccacatcggccaggccggtatccaggtcggaaacgcgtgctgggagctgtactgccttgagcatggcattcaggctgacggtcagatgcccggtgacaagaccattgggggaggtgatgatgctttcaacaccttcttcagtgagactggtgctgggaagcacgtgccccgtgctgtttttgttgaccttgaacccactgtcatcgatgaggtgagaactggcacctaccgccagctcttccaccctgagcagctcatcagtgggaaggaggatgcagccaacaactttgcccgtggtcactacaccattggcaaggagattgttgacctgtgccttgatcgcatcaggaagcttgccgacaactgcactggtctccagggcttcctcgtcttcaacgctgttggtggaggaacgggctctggccttggttccctcctcctagagcgcctgtctgttgactacggcaagaaatccaagcttgggttcactgtgtacccttccccccaagtttctacttcggtagttgagccatacaacagtgtactgtccacccactccctcctcgagcacactgatgtggctatactgctggacaatgaggccatctacgacatctgccgccgatcccttgacattgagcgcccaacctacaccaacctcaacaggcttgtgtcccaggtcatctcatcccttactgcctccctgaggttcgatggtgctctgaacgtggatgttaacgagttccagaccaacctggtaccctacccgaggatccacttcatgctttcttcgtacgctccagtcatctctgctgagaaggcctaccacgagcagctctctgtggctgagatcaccaacagtgccttcgagccatcttccatgatggccaagtgcgacccacgccatggcaagtacatggcctgctgcctcatgtaccgtggtgatgtggtccccaaggatgtgaatgctgctgtggccaccatcaagaccaaacgcaccatccagttcgtggattggtgcccgactggcttcaagtgcggcatcaactaccagcctcctagcgttgtgcctggtggcgacctggccaaggtgcagcgtgccgtgtgcatgatctccaactccaccagtgttgtggaggtgttctcccgcatcgaccacaagttcgacctcatgtacgccaagcgtgccttcgtgcactggtacgtcggtgagggtatggaggaaggtgagttctctgaggcccgtgaggacctggcggcgctcgagaaggactacgaggaggtcggtgctgagttcgatgagggcgaggatggcgacgagggtgacgagtactagagaagtttgctgatgacgcagcatcaggccagtgtgctgcccttatcccgtgatctgccgagagttgctcctgctatcgtgttatgtgtgtctgttctgaagtattgtgtggtttacaacacctgatgttgtaagagttgttaattcccctgcattgctaccgggttattgagaataattatggctgttt

SEQ ID NO: 17824 - DNA, 1242 bp, Zea mays
  Clone ID: LIB3075-034-A10_FLI
catccaccgaagggagcctagcgggaagttgtataattatgccgcggcatctaaaggggctaaggttctggatttcaataaggaggctaagggtgcttccaacatcttagataaagacaaagacaagtacctccgcaatgcttgctcagcagaggggaagtttgtcatcatagagctttctgaagaaactttagtagatacaattgcaatcgcaaattttgagcattattcgtctaatccaaaagaatttgaactgctgagcagtctgacatatcccacagaaaactgggaaactcttggaagattcactgccgcaaatgcaaggcttgctcagaattttacttttcttgagccaaagtgggctagatatttgaaactgaacttggtaagccattatggttctgagttctactgtactctcagtatgctcgaagtgtatggaatggatgctgtagaaaagatgcttgaaaacttgattccagttgagcataagaaaacggaacctggtggcaagttaaaggaacccattgagcaaattcctttgaaagagtctgctggaggaaaggaatcctcacaggaaccacttgacgaagatgaatttgaactagaagatggtaaaccaaatggacatggtgatccatcgaagaatggtgctagtgatccagtttcagagacaaggacacttcaggctggcaggattcctggagatactgttcttaaggtgctaatgcagaaagttcaatctcttgacgtgagcttctctgtcttggagaggtacctagtggagttgaacaacagatatgggcaaatatttaaagattttgattccgatattgatagcaaagatgccttgttagagaagatcaaaacagagctgaagaatcttgagagcagcaaggacagcattatgaatgaaattgaaggtatcatctcctggaaagtagttgcttcctcgcaactaaaccagcttgtcctagataatgctctactcagatcggaatttgaaacatttcggcaaaaacaggctgacatggagaacaggagtcttgccgttattttcctcagttttgttttcgcttgcctagctcttgctaagctgtctataggcatcatgtccagattttgtagattctatgactttgagaagttccataatgtaagatccgggtggcttgtgctgctgcttagcagttgcatcatatccaccattttgataatacagtaacacaagcattcaacctc

SEQ ID NO: 17825 - DNA, 607 bp, Zea mays
  Clone ID: LIB3075-034-A6_FLI
agctgaagctggaagaaggacaggacgtcacagcactcgctctagaccaagaaaacaccacccttctggtttcgacagctgataagcagctaatagtctacacgggtccggctccaagtaccccgtaggtcaatccattagctccccggtgcttggttggaaaattgtaatggagatcagcgctagctatcttgacggcccaactgacagtgagctcggagacgacagtacagataatgcacgttaggcgacgggcttctcttgccgtgagcatggcgctgctgtacgtagaggctccaatggattgtgctgtaatacaagactgagactggaacctgaaatgggcgacatgtgcaccaaaaggtgaagagccgttgcgctgctggaaaactctcctgtacagggacctcgttgacattttccatgtagtcgtagtgaaacctgccacgctgcggccaaaataattgttagaagcagcaatccgaatgtaattattgccagtgcctcgtgcaacggcgagccggcacgcaaagatttgttagcttgttgtcattgcatctgtgtacaaagtctcgtccaagaaattgattcactttcgcttgcgcac

SEQ ID NO: 17826 - DNA, 210 bp, Zea mays
  Clone ID: LIB3075-035-B10_FLI
attggaacatctcttgtggaagaagataaacttgaggttgcaacttcccttattgagaaggcaaaggcaaagggggtttctcttttgcttcccagtgatattgtagtagaatgtctttgtgccttctaaaatgtgtatgtcaacgtcctctttagggactcattctccacatatataacattgtcatgtgtgacatattgtgttttactt

SEQ ID NO: 17827 - DNA, 1256 bp, Zea mays
  Clone ID: LIB3075-040-F10_FLI
gaacgccgggccgtttcacttgtcttcttcctccgatccctcccggcggccggccgggctcgggcgttttccccttttgtttcccatggaggacgccaagatggggaacggcgccaccatccgcgcggtgctcgccatcctccagtggtggggattcaacgtcaccgtcatcatcatcaacaagtggatcttccagaaactggagttcaagttccccctgacggtgtcgtgcgtccacttcatatgctcctccatcggagcctacatcgcgatcaaagtcctgagaacgaagccgctgatcgaggtggcctcggaggaccggtggaggaggatattccccatgtcgttggtgttctgcgtcaacatcgtgctggggaacgtgagcctgaggtacataccagtctcattcatgcagacgatcaagtcgttcactccggcaacgacagtggttcttcagtggctggtttggaggaaatacttcgagtggcgcatctgggcgtccttggtgcccatcgtgggaggaatccttgtcacctccgtgacggagctgagcttcaacacggctggcttctgcgccgcgctggtggggtgcctggccacgtccaccaagaccatcctggcagagtcgctgctccacggctacaagttcgacagcatcaacacggtgtactacatggctccgctggccacgctgatcctgtcggtgccggccgtggcgctggagggcggcgccgtgctggggtggctgcggacgcacgagtccgtgggaccggcgctggcggtcgtcgtcacctccggggtgctggccttctgcctcaacttctccatcttctacgtcatccactccacgacggcagtcaccttcaacgtggccggcaacctcaaggtggccgtggcggtgctggcgtcctggatggtgttccggaaccccatctccgccatgaacgcactcggctgcggcgtcacgctcgtcggatgcaccttctacggctacgtcaggcaccgactctcgcagaaccaggcgcccagagcccgcttggagatgcagatgctgccgctcaccgtcgacaagcaaggcgacaagatataaaaagtcttttggaataaaccatctgattctttctgatccacctagcctaaccgccgatcgagaatgcatccaccatcagatatgacaggaaattattttttgttgccagccagattttgataatgagtcagttcagttgttgcttaaagagaaatgtcatcaggtc

SEQ ID NO: 17828 - DNA, 1055 bp, Zea mays
  Clone ID: LIB3075-041-B12_FLI
caacgctatggccgccgggagggagagggaccgggagatgctcctcccggtggtgggcggggagcatgtcgccggcgatgaggacgactcggatccgaccacccccgtcatcgctgggccgctgccgccaacgacgtccgcgcgcgtgctccacctccaccaccatcccaccggcatcgaggcattctcacgagtgataaggagctgggcgtggaagaagttcatgtctggatggtgcgcaactctcgtacatatgaatactgcgtcatcctgctcccgatcgccatcaccttctacacgacatggtggttcatccgcttcgtcgacggcttcttctcgcccatctacgtccatctcgggatacacctcttcggcctcgggtttgtcacctccatcaccttcatcttcctcgtcggcgtgttcatgtcgtcgtggctgggcgcctcgctcctcggcctcggcgagttcttcatcaagaggatgccgctcgtgcgccacatctactcggcttccaagcagatcagcgccgcgatatcgccagaccagagctcaagagccttcaaagaggtggtgatcatccggcaccccaggatcggcgagtacgcgctgggcttcatcacgtcgacggtggcgctgcgaggcgccggcgtccgcggcgaccaggacctcgcctgcgtctacgtgcccaccaacaacctctacctcggcgacatcttcctcatgagccgcgccgacgtcatcgtcccggacctctccgtccgggaggccatcgaaatcatcctctcaggcggcatgtcggtgccaaagatcatatcggcggtggagggggccgtcggcctcggcgaccatggccgggcagtgaaggactcctagctcacgcttcttccaactcctgacggttgacgcttccttctctatcacaatcttgggttgcttttcgaggttctgaatgttctagactgcaggttttaggcaacgtgctccagttttcatccgtcatagaaaaatatattttggtatctagcaaacttctgctgtataaattctttcatgcg

SEQ ID NO: 17829 - DNA, 1195 bp, Zea mays
  Clone ID: LIB3075-041-C2_FLI
atggggcaaaaaggcaatgttctttgaccaccgagcaaaccccagcctccgttactctccttcctcttggctcgcttcggctcccgtcgtccccttccttgagatctctaggatacgagcgcattcgcatcgcttcgcctccgccgcggcctggggagatggcgggtttgggaaaggcgatgtacgcggtgggattctggatccgggagaccggtcaggccctcgatcgcctcggctgccgcctgcagggcaagtacttcttccacgagcagatttcaaggcatcgcaccatcatgaatatctttgacaaatccccacatgttcatagggatgcatttgttgctccaagtgcatcccttattggtgatgttcaagtcgggcaaggagcttccatttggtatgggtgcgtcttaagaggggacgcaaacaacatacaaattggatctgggaccaatatacaagacaattctcttgtgcatgtggctaaatctaatctaagtgggaaagtctttccaacaatcattggtaataacgtcacaataggtcacagtgctgtgttacaaggatgcacggttgaggatgaggcttttgttggcatgggggcaaccctattagatggtgtcgttgttgaaaagcatgggatggtagctgcaggatcccttgtaagacagaatactaggatcccttgtggagaggtatggggagggaaccctgccaaatttctgaggaagctcacagatgacgagatcgcatttatcacggaatcagcttccaactattccaatctgtccaaggtgcatgctgccgagaatgccaagcctcttgaaaagattgagtttgagaaggtgttacgcaagaagtttgctcaccaggatgaggagtatgattcctccatcggcatcactcgaggggccccaccggagctgacatccccaaatccagcccaataaacctctgtttttgtttctgttttctctttgacgccttaatcattttgtattggacagcgctggattttgaccgggccatagttccatgacttaggtggcttatgtttacttttcctccccaataatcttgggtcgagcgatgttataaagctggccatgcacttcttccagattctgtattcgttgtgtttaagatgtgctccctggagagttccaccaaataaactgaaatgcattgttttgac

SEQ ID NO: 17830 - DNA, 1112 bp, Zea mays
  Clone ID: LIB3075-041-D3_FLI
caatgttctttgaccaccgagcaaaccccagcctccgttactctccttcctcttggctcgcttcggctcccgtcgtccccttccttgagatctctaggatacgagcgcattcgcatcgcttcgcctccgccgcggcctggggagatggcgggtttgggaaaggcgatgtacgcggtgggattctggatccgggagaccggtcaggccctcgatcgcctcggctgccgcctgcagggcaagtacttcttccacgagcagatttcaaggcatcgcaccatcatgaatatctttgacaaatcccttattggtgatgttcaagtcgggcaaggagcttccatttggtatgggtgcgtcttaagaggggacgcaaacaacatacaaattggatctgggaccaatatacaagacaattctcttgtgcatgtggctaaatctaatctaagtgggaaagtctttccaacaatcattggtaataacgtcacaataggtcacagtgctgtgttacaaggatgcacggttgaggatgaggcttttgttggcatgggggcaaccctattagatggtgtcgttgttgaaaagcatgggatggtagctgcaggatcccttgtaagacagaatactaggatcccttgtggagaggtatggggagggaaccctgccaaatttctgaggaagctcacagatgacgagatcgcatttatcacggaatcagcttccaactattccaatctgtccaaggtgcatgctgccgagaatgccaagcctcttgaaaagattgagtttgagaaggtgttacgcaagaagtttgctcaccaggatgaggagtatgattcctccatcggcatcactcgaggggccccaccggagctgacatccccaaatccagcccaataaacctctgtttttgtttctgttttctctttgacgccttaatcattttgtattggacagcgctggattttgaccgggccatagttccatgacttaggtggcttatgtttacttttcctccccaataatcttgggtcgagcgatgttataaagctggccatgcacttcttccagattctgtattcgttgtgtttaagatgtgctccctggagagttccacc

SEQ ID NO: 17831 - DNA, 750 bp, Zea mays
  Clone ID: LIB3075-043-B5_FLI
acagaatctttgttatctggccaagctatttcttgatcacaagacattgtactatgatgttgatttattcttgttttatgttctctgcgaatgtgatgaccggggatgtcatatggtgggatatttctctaaggaaaaacactctgaagaatcttataatttggcttgcattctcactctccccccataccaaagaaaaggatatgggaagttcctgattgctttctcatatgaactttccaagaaggaaggtaaagttgggacaccggagcgccctctttctgatcttggcctgctcagctatagaggttattggactagagtgcttctggaaattctaaagaaacataagggtaacatatctataaaggaactcagcgacatgacggcaataaaagccgatgacatcttgagcacgctgcagagcctggacctaatccagtatcgcaaagggcagcacgtcatctgcgcggacccgaaggtcctcgaccgccacctgaaggcggcgggtcggggaggcctggacgtggacgttagcaagctgatctggactccctacaaggagcaaggctaaaagcgcagctgctcccagccccagattagagtccctgtacataacgtttggtactaggatctcccctcagctctcacttcactcgtgtaccgtgaaaactgtacactgtaacaaccacattgctgtgtttgtgctgtctgccgcgatagtctccgaaatcgaaagaaacatcaccc

SEQ ID NO: 17832 - DNA, 322 bp, Zea mays
  Clone ID: LIB3075-043-B7_FLI
cactcctcttgctggtagttgggtttgccattatcttggtcatgctcttcacgggtaagaatgggaacgacagctgccactggtgccattacctgaactgcgtaccaacgtccagatggaagtgcgatacctgaattccgcaaagtatatgctccactggtgttcgtgtgttcgtggaaatgtacgaccaaatgtatcctccacttgaccatcctgcgcttcttttgcccggattctccctggttccatgaaatacaaatgttccagaattgtagcacgagcttgtaactgttgatttcggcataattgatgtattcatctc

SEQ ID NO: 17833 - DNA, 951 bp, Zea mays
  Clone ID: LIB3075-043-D3_FLI
tcttcggggtgatcgattacacagcattatgggtcgcgtgaagctacagatcaagaggatagagaacaacaccaatcggcaggtgaccttctccaagcgtcggaatggcctcatcaagaaggcctatgagctctccgttctatgcgacatcgacatcgcgctcatcatgttctcgccctccaatcgcctcagccacttctccggcaggcgcaggatcgaggacgtgatcacgaggtacatcaatctcccggagcacgacagaggaggagttgttcggaatagagagtatctgatgaagatgcttggtaaactcaaatgtgagggtaacatagccgaacaactcacacctaataaagagccaataaattccaacgtagaggagcttcagcaggagattaagacgtaccaacaccagatggaagtcttaaaggagcaacttagatctgacaacattgatgtcgatgaacgatttcgagacgtgtgagaaattcctcatggacaccctcacttgcgtggaggagcgaaagaaatatttgctgtgcaaccacgtggccccgttcgatccgtcggcctccaacatgcaacaacacgtagacgtacgtaggtgtctggtgtctttaataattatggttggaacacataattacttccgttgattcggttcagcgagtacgtaaccgtaattagtagagtacgtaattaacgattcaacgtggaggatgatcatgggtccagatgttcgccctgccgccggcgccgcctcaccaacaggagcaacaaggggacgacctaggaggcgccgccagcgcgttcggtggcgatgtctcgtggttcgccgatgggatgccgacgtcgtcgatctttgctgcgtcggacccaatcttgtactttaggtaggagaaattccattggatgggcgacatacagatatatatcacctctttttcgctt

SEQ ID NO: 17834 - DNA, 1256 bp, Zea mays
  Clone ID: LIB3075-043-E4_FLI
cttccaggttctcccacccacacggccacacgcccacacccactgctcctctaatctcacatgctcatgcatcctcctaatgtaacctgaagctttaagaaaacaaagtgctcccggaagactccaagctgcagctaccggccttcctctcccccattccaattccgagaacaggggcggcggagtcaaccaggtacgatgtgctcggtagcgaggctggcgtttgtgcttgcactggccatagccgcctcatcaattacggttgcggagagcagagattttaatatctttgctcagggcagcttgcctgatgcaaccaagggatcgtcaggtctagctgcaaccagtggaaagttgtgtcagttatgcgagcagtactcatccgaggcgctcctctatctcacacaaaacgagacccagactgagattcttagcattctacaccatgaatgtgccagccttgccccactcaagcagcagtgcatcacgctggttgactactacgtaccccttttcttcttggaggtctccatggttacccctgagaagttctgcgagtcgatgcatctctgcaagaaggggatgaagattagcctacccacccgggagggtacttgtggtttgtgccaccatgttgttgttgagattcttatcatgcttaaagaccccaacatgcagctggaagtaatcgacctactcaccaaaacatgcagcaaggcgcagaactatgaacagcagtgcaagcggctggtcctcaagtatattccactgattctggtgaagggccagaaattccttgagacaacggatgtctgctctgtgatacatgcatgcaaagcaggcacacaagcatcaatggaagccatgcctctgtctgccatgttgtgaaggtgatgcgaatcagaataaggcttatttgcctaggagatcaaattggggagaaacgatgaaaagtcagatgactgttttaagctctcttcctctattgctgaaacactattgatcggtgaaaattcgtctgtgtaaaattcttgtgtaaatttgggggtatatccagtgtttctctgaagtatacagcaactgcagctacaccaatctcttcggcattgggttgagaagttctaagcagtaattgcattttactgtatcatctatttgtttgtaactactgagagttattaattccttgtttctctgttgctctgacaaattctctgtaacattagagttatactaaaactttaagcttgcttttg

SEQ ID NO: 17835 - DNA, 1930 bp, Zea mays
  Clone ID: LIB3075-043-H10_FLI
ctagcttgctcttatccgcctgcagtccatggccaccgtcagtctcgcgctctcgctgcgattcgcgccgtcgtcgcgaccgctgagtctccaccgcaggaggcccgacgccgtgacctgccgcgcgaccaccaccacgttccaccggctcgacgccgtcgcagtgagagaggaagagtctaaatttcggagggccgcggcggagggctgtaacttggtgccgatcacgagaagcattttctctgatcatcttactccggtgctcgcgtaccgttgcctagtcaaagaagatgatcgtgaggcgcctagctttctgttcgaatccgtagaacaaggctcagaaggtacaaatatgggaaggtatagcgttgtcgcggcccagcctgctatggaggtattggcgaaggctaacaaagtcacggtgatggaccatgagttgaagtcgaggagggagcacttggtgcctgatcccatgaagattccaaggaccatcatggaacagtggaacccgccgcaagttactgatggcctccctgatgcgttttgtggagggtgggttggattcttctcatacgatacagtgcgttatgttgagacaaagaagcttccttttagcaaggcaccgcatgacgacaggaacattcctgacatgcatttaggcctctataccaacgtcattgtgtttgatcatgttgaaaagaaaatgcatgttatccactgggtgaggacggactgctaccaatctcttgacgaagcatatgaagatgggacaaatcggcttgaatctttgctatcaaaattacattgcttcaacgtcccaacgctttcttctggttctataaaacttaatgttggaggctttggatcggcgacgctaaagtcaaacatgtcaaaagaagagtataaaaatatcgttgtccaagctaaagaacacatcttggctggtgacatttttcaagcagttctaagccagcgcttggagagacggacgttcgcggacccctttgagatctaccgtgcgttgcgcatcgtgaatcctagcccatatatggcctatctacaggcacgaggctgtattctcgtggcatcaagccctgaaattcttacgcgggtacaaaagaggacggtagtcaaccgaccgcttgctggaaccataagaagaggcaaaacaaaggcagaagacaaagttttagaacaattgcttctgagtgatgaaaagcaacgtgctgaacatattatgcttgtagaccttgggcgcaatgatgtcggaaaggtctccaaaccaggttcagtaaaggtggagaaattgatgaatattgaacgatattctcatgtcatgcacatcagctcaaccgtcaccggtgagctacgtgatgatcttacgtgctgggatgcactacgagctgcattgccagttggaacagttagtggagctccaaaggtgagagcaatggagttgatcgacgagctagaagcggacatgcgtgggccgtacagcggtggcttcggagggatttccttcaacggcgacatggacatcgcgctcgcccttcgcaccatcgtcttccccaccgcatcccggttcgacaccatgtactcctacgcgaacgggaagtcacggcaggagtggatcgctcaccttcaggccggagccggcatagtcgccgatagcaagccggatgacgagcaccaggagtgcctgaacaaggctgctggggctgctcgcgccattgacctcgccgaatccacgtttctccaagagtagtcgcctaggcctagctatagtccggaactatgttgttagttgattatggattattgtactggaaaacatatatatgttttatttatttacttggttgaataaaaactcgattgtaataaagttattagtattaaatgtaaaacaaatgaccatctttttagcatc

SEQ ID NO: 17836 - DNA, 1788 bp, Zea mays
  Clone ID: LIB3075-044-A11_FLI
gcctcccctggcagattcgccaatcacaatcgagcttccagttggaggagatcggctacgtttcctgtaggttccaatggtgcagcttccgggctccaagaagcggcacgccgagatggccacggcggcgaccgtgaaggcggaggtggagggtttgggctgcggcgatggttctcctcacaagcatgtcaagccaatgccgcagccgccgccgcagccgccacctcccgaggacttgccctttgatgtgcttgatggacctagcccattgggtctgcgactaagaaaaagtcgatctctggtggaccttattcaatgtaagctttttcaggataaatctgcccatgaacagtttgatgggcacaacaatatttctgatacacccatgaagaaagaggttagatctggggctccaacagctggtgaacggatgaaagcttcaaattttcctgcaaatgttttgagaattggtagttgggagtacatttctcactacgaaggtgatttggtcgcaaagtgctactttgcaaagcataagcttgtttgggaggtcctacataatggtctcaagagtaagatagaaattcagtggtcggacattattgctttgaaggcaacctgcccagagaatgaacaagaaggggtcttagatctagtgttggctcgcccgccacttttcttcaaagaaactgatcctcagccaaggaaacatacactatggcaggctgcatcagattttactgatggacaggcaagctccaaaaggagacacatcttgcggtgcccctcgagtttgttaagcaggaattttgaaaagctcattcaatgtgatcaacgtctacgtgaattgagccagcagccagctgccatattgcaaaacccaggttttgaacctaagcgatctatttttcaaaatccaaatgaatcgaaggactgccttgatattggtggcttgaagtttgaacataataaagctactttgcccaagttcactgctcccctctcaacacgtgtcttttcatcactgtccaataatgttggacgaccaataaacataggatttggtgctggacattttgggggcaatgttcctgaagaatcaaagaattgcaatcaatggaatcaattgatagtgcctggattggaggcactgcaaggtgatgaaaggagtgcaggtggtcctcctttgacaactaacgatgcaatttccaaaaaagcctgggaagatcttgttcaacaccttttcagcgacacaccgagtctgccagccttagatgataataatttgacgtcaagggttgactccctttactcgttgcttgagaaagacacagctccacccgccatgcgcgaccctgaatgcagtagtgatggtggggacatcggcgcaatccaagtggattctgatggctttaaggggaggctcgacccatcgcctccaggaatttccagaaacgattctctcgatgagctgcttctgaacctccccaaaatagcttctattccacagttcttgttcaacaggacagaagattctgatgaataaagcgcgcagtcaacttgtggtcttcaaccctaggactaaagcagcaaattgtgaatatgagcaatgagtcagcgacgctaggattctattctacttcttccccgtagataattcagtagattggtgcagcaaaaacgtctgctcattatttcactagctgagaaactccacatgcaacattggaataacattttgtttacgtttggatggcattttaaatactactcttttccttgtcggat

SEQ ID NO: 17837 - DNA, 687 bp, Zea mays
  Clone ID: LIB3075-044-A12_FLI
gaggagaaccagcagcctccaataagagccagccagagaaactaataaaactctcgccgccgccatccgagcgaacaagccaaccgaccccgtccccaaggcaatccgccgccgacgtaccaccaccaccgcaggagcgagatggagatgaagaggatcctcttcgccgtcctcgtcgtcatcgccgcctcggccaccgcagtgctggcctccaccgaggccgccgccgcgggcgccccaactgcctccgagtcgtccgccgaggctcccgctggcgctggcgctggcgctgccgctggcgccgccgcctcggggccctccgccagcagcggcgcgcccgccctcgccgccgcgcccgccgcgctcctcttctccctcctcgcctactacctccactaagcgtgtgcgtgcgtacgtacgcgcgcatggacgacgatggatccgtccaccgttgccattgcagttgcctcgctcgttcttggtgactgttgctgcggtggtcgacttggaagacgtcacctgcaccgctgttcccatatattattgatgtgatctgatatgattatatatgcatggtgacgggtttatgataattccatagacataatttaatttaatttatgtatttgtgtcaagtcgttctgtaatcatgcgatgaaatatatgatttggttttccatttgtttg

SEQ ID NO: 17838 - DNA, 497 bp, Zea mays
  Clone ID: LIB3075-044-A3_FLI
ctgctggggactggaccagggacagggagcaacaaagctgagtcctcctcctccatggcggtacggtggcggccgacgtttacaaaggcgagctgacgccgctgcagcggcacgtcgccttcttcgaccggaacaaggacggcgtcatctaccccgccgagacataccaagggttccgcgcgatcggggccggcgtcacgttgtctgccttcagctccgtcttcatcaacggcctccttggacccaagaccataccggtatatatgcatggcattggcatctctcccccctcaacaggcaacaccctcagcgacatcttgaaatgcttctactgtctttccgtagatcgtcatccgcggtgttcgtttaggattatttgatttcgtagaatacgtggaaaaaaaaagttctgtggcactgaaacatcaagaattgtaaaataccacccaaacattattgtgttttatttactgacatacatattttgatttcgggac

SEQ ID NO: 17839 - DNA, 1390 bp, Zea mays
  Clone ID: LIB3075-044-D2_FLI
ccacgaacgctgttgtgtcatggagtgccgccaacaatagctttgttttgggatcctcatatctttggcacggtgctgctgccaaggtacttcaagcacaacaacttctccagctttgttcggcagctcaatacttatggcttcagaaaggtggatcctgacagatgggaatttgctaatgaggagtttctgagaggtcagaggcacctcctcaaaaacattaggcgtcggaaacctccacactcatctccaaatcaacaatctcttggctcttacctcgaggtaggacactttggatatgaagaagagattgatcagctgaagagggataaacagctcttgatggctgaggtagtgaagctgaggcaggagcaccaaaatactagatcagatctacaggccatggaagagaaattacaagacaccgagcagaagcagcagcagatgatggcattcatggcacgagtcatgcagaaccctgatttcatgcgtcagctgatctcccagcgggagatgaggaaggagctcgaggatgctatctcgaagaagagaaggcgccgcatcgaccagggacatgaagctggtagcatgggcactggttctagcctggagcaagggccacagggagtgtttgaaccgcaggagccggtggaatcagtcgccaacggtgtgccatctgatctggagagttcgtctgttgaggcgaagggattggaggttcgacagggtgtttcttcaggtggttctgagcatctgaatggcaggccaagcggagagttaaatgatgatttctgggaggaccttctgcatgaggggggactcggcgcagatgcaggcaatgctgttggtcaggatgatatgaacatggacatggacccagatgttagcctgcctcaactgaaacaacatggacccagacattagccgctcttgtgctatgacaatggctgtgactctgtgagtatctttacagttatgctcgttatatccctgtggtgtacctgtttcgatcgatcgtcttcgaccaaatgtcacgtcgactgcagtctccagttgttaatacagtctgttcagcacgctgatttaagtatttgggtcaagatgttcatataatcctgtggtatccagagatattatagtttgttttcgtaactgtttgcgcagagaccatgctatgttgcctgcaggctatcagtgtatttgttctaacagatcgcgacgctggtacaacgcagtgacctgccagactggggaccactatgagattgtagggaaagaccagatagcttgtgtatgtaaaagtggtcattctatcattctatgtatgctgatccatagtagcctatcatgtgcaacgctattgccctttgggatttggcatttcactgta

SEQ ID NO: 17840 - DNA, 598 bp, Zea mays
  Clone ID: LIB3075-044-E1_FLI
ccatcccctcggctttgtggccaagccggcgatgctgccggatggttctgtcaatctcatgctctggaactgcgtcgtccccggcaaggaaggcactgattgggaaggtggatatttcccggtcactctccatttcactgaaaattacccaagtaaccccccaacctgcaagttcccacgaaggtttttccatgtcaatgtctatgattctggggatgtatgcctgtcaatacttggtgatgcatgggcgccttctatcacagtgcggcaaattctaataggcatccaggagctgctggagaacccaaacccagcctctcccgcacaggattttgcttacgatgtttttgcagagaatatgccagaatacaagagacgcgtccgtgagcaagccaagaggtatccgtcgctcgtgtagccgtggacctctgcaacacaattgctgctaaccaagtagtcactcactttggtgtagtggaacttgttcatgacgtgcttaactatggtgtctagttagccgtacgcttgttggaactgctaaagtgcagcttattggaactgctaaaatgcccttgactacgtcttattattatggttt

SEQ ID NO: 17841 - DNA, 524 bp, Zea mays
  Clone ID: LIB3075-045-G1_FLI
cgccctagaatacacgcctcgtgagcatgcctttagatatgggagcgccaccatagccgtctgccgccgccgtccccgcttagcactcgtggtgcgctcccggacacctcgacggtggtgtggatcgtgtcccgggggagaatcggacgcggggagccacgttgtggggggggattgctcgccgccgagtcatccctgccgtggagccacgcatcacgtcgtcggggttctctacgccattatcattgcagtgaggtcacgaggatttgaagaatcatcctggtacctagaatctaaagtgccaggagaagaagatgtggttcaagaggagccacacaacgaggagttcgattcgatctaggtggcgtctcccagttgactttatggcgccaaggatggactttagttcgatctatatttatcttttattttgtaagaattctgctatgtaataagtactttgatgttattgtgacatttatctttatacactctgttattatatatattgtcttctttggcgc

SEQ ID NO: 17842 - DNA, 676 bp, Zea mays
  Clone ID: LIB3075-045-G5_FLI
ggcaggccaggatggagctgcaatcagtgatgtgggagtatgtcggcatcgtgcgctcgacggggcggctgaagcaggccgagtggaggatcggtgacctggagtcggagtgggaggagttcctgttccggcgggggtggaagccgaccacggtgggcgtcgaggtctgcgagatgcgcaacctcttctgctgcgccaagctcgtcgtcaggagcgcgctggccaggcgcgagagccgcggcttgcacttcaccgaggacttcccgtacctggaggagagcaggaggaagcctacggtcatcttcccggccgccgtgcaggagctcacgtggagctccaagccgttgcagaggcagctgcaagcagatgacaatgcatgcagttcatccggctgggccttggggattcgttaattcattcattaatttttaagaactctcagtcgacagcatacacaaaatccagacagttaggctgtagtagcctgcgtatctttgcaattcttgccagttccagctgttgcaacttgtaaacggtgttgttggagctgcattatggtttatgaaccttgatccgtagtatatgtatgtggtgattggctgattgcacaccaactgatgaccattgtgatgtcatgcagaaaaaattgcgagaacttctgaatttcatttaccac

SEQ ID NO: 17843 - DNA, 1719 bp, Zea mays
  Clone ID: LIB3075-046-B2_FLI
caaacatttgcttattagtccggttcacttccaggctagggtcgcaaggatcgggcgacctttgggtggagatgaaggggttcttcatggcatcacagtaaaaccacattgcatgttaagaatggcagtttttaatggaactataaatttcatgagttcactgttgagtcttcatccaggacctcagtgggcagcagcgcagcagaggtggaggtccatcgggagaatgtggagacagcgacgacgagcccaacggtgatttcgccaaattcggcccgtggggcggcgacggaggacagccgcaggacatcggaacactaccctgccgtctagacaggatcaagatcagcagtgggcttatcatcgactcgatcgagttctcgtacgctggccctgacagccagtaccgcaccgcaggcccttggggtggtcatggaggagacaacagctctgtgagtgtgatgaacatttaaaaaaacaaactatccaccgagaacgtggtattcaaaattgtcccgagggacaatgaagtataacttctctttgatttccttacagtttcagctagctggttcagagttccttacaggtgtgtctgggtcaatcggcacattcaacggccatgcaaacgtcataacgtctctgacgttcgtcaccaacgctcgtagctacgggccgtttggaagagggcgaggcacatccttccacatcccagtgcagggcaatggctgcatcgtcggtttctttgggcgctccggacggtacctcaacgcgatcggtgtctacacggcgccgaaacccgaaccaaaagcagttgggaaacaagatgtgtgctgtgctaatttattttagttataatttgtgtttgtgtttttttttgttggtttgttctgtccttgttttgtttgactcaaactggtttttgttactcgcacagggtggtgatgaggccgtcgtcgccaggattgggccttggggcggggttggaaatgctctccatgacatcgcagagaggccgcatcgcctgcacagagtgacgatcttcagcgggacgatcgtaaactcgctggagtatctgtacagcgatggcgacgggcagcagcacaccaccggtccgtggggcggctgcggaggaactggtcgaaagattcatcttgcccctgaagagttcatagtggaagttactgggacattccatccatgcgcgtgggacagaacaatacccagtgtcgtgtcctctctgacgctcgtgaccagcacgggcaaaacacacgggcctttcggaacgcagctgggagccgcgttccaggttccggtgcagagcgacagcaggatcgttggcttcttcgcccacggagacaattacatcgaagcaattggcgcctacgtgaagaaattgacagaatccagcaaccgttaactcttggaacaacttgcagctgttcacactgtttcttgggccattgctccttaaatttagtccagatggccaaggagcaaccaaacagaaatcgctatggcagggaagatggactaaactggactgtggcacctccagcatagcctgctcttagattagtgaccagacatcatcgagatatttcgatattataataaatgaggaacccatctcagatgtttatgttagctcctcagtttttgcttctgaatgattaatttagatcttccttatttttgcaataaatgaggattcttttc

SEQ ID NO: 17844 - DNA, 1503 bp, Zea mays
  Clone ID: LIB3075-046-C12_FLI
gtcgtcctccattctgtcgccgctgtgttcgtgcctctcctcgctccccgatcgctgcccctgggcgccgcgttcgccgccggatctgggcgcgcgacggtgccccagacgaaccgatggcgcgggcggcgcttcgattgggcgtgcgcgcgctcgcgctcctcgtcctcgtgtcagtggctctgcttccacttgtcagttccgacgatgggtacagacactgcgagggtgtcgtcaggggctgggcggatgcctcgtctgggcgcgtgaaggacggggacacactgagcctcaaggatttgctcttcttcctccacattcctaggactggaggccgcacctactttcactgcttcctcaaaaagctgtatacgaacgcgcaggaatgcccgcgttcttacgacaaactacggttcgatccaagtactttggacatctggccttggaagtacttggttccatggatgagggaagatctgtttgccaggagagatgccaggggtgtttacaaagttcatagtagtaagaaggttaatgcatatgatgtggatgatatggttatgccattacatcggtacatcaatgatccagttgcccatgaaatcattcataatggggctacctttcagattactgggttaacgaacaactcatattttgatggagcacatgaggttcgacattgtgtcaggaatcatccagatcttggtcgtattgtgcttgaagttgctaagaataggctggaccagatgctatatgtaggacttacggaggatcatgaagaatcagcgaggttgtttgctcatatggtaggagcacaggtgctttcacaatctggaacattgactttagatctcaaggaagatctgctcattgagactgattctcacccatccatggagcctgaggacgaagaaacaaacggacatctgaatagcacacatggttggcagaataatgaagcgatgaactctaccaacgacgaacatggaaaaggaaatatgactgttggtaaactgatggaagcttatgaaacttgcattgccaaactgtggaagtctcaatctggccgacgtaaaatatccctaaagaaagttcaggaagcgaacttttcaaaagaggcacggaagctggtacctgaggcaattctgaaccaaatcatctcgttgaacagccttgatatggaactttatgaccatgctaagaaaatttttactcaggaacatctgatgctaaaagctcagcaatccatggtggggcagcacagacagtttggagaacaaaagggttggatcggcgtaatgtgcagcgacgggatttgccctccttggatggtggtcttggttgttctagggatctccacgatcatagttttggtcacattagctgtaacgacgagaaaaagaacgtctaaacttaaggtttaaccggaattcgtgaggcagtctatagattttgatgtatagcctgggacagaggttttagagcaactccaataagtat

SEQ ID NO: 17845 - DNA, 1514 bp, Zea mays
  Clone ID: LIB3075-046-D6_FLI
tcgattggagactcatgatctgggtactggtccagtgaaactaaattcaagctttaatgagatgcacagtgctgatagacaatgccttgactcagctgatgttcctgcttcaactcagcctctgtcagtttcacctgttttgatgagtgatgagcagcatgtcgatgacgcccattctgctgtcaaggccattgagcacctgggcaataatctggctaacataaagcagaaatccctgcatatggatgtcctcatgttagaggacgcccaagttgcttccatggctgcagtccctgggcatgagggagaatctgtcgacgctggatcaaattcttttgatattttacttggagctctggctgaagagtccaaggcagcagatgctcctgggaaagatgaagttggcaaagcttccttgacattaataacactggctagcaatgagccctctgttacagaaggcagagttgtagacgtggtggaaacagacacaattttgggagcaggaaaagatgataaacaagttgatcaggcacatgacttccatttgtcagatctggtgtctagatgcatcgggagctcaaatagatccgatatcatatgctatgtcagacgcaaacacaaaaggaagagggattactcgtgtttcgtccgctctccctgtgagagcttgaggccaaggtccaagcctgcagtagtcgaggagtcggaatggagcagaacagccgaggcttcttttgctaaaaggggtaagaggacacaagcagtgggatcatttcagtgtgatattgatctgtgtggcatggcatttgagactagggccgaactcaatgcccacaagcgcaatatttgcactgacgagtcatgtggcaagcgtttcagctcacacaaatacttgaagcgacatcagtgtgtccacagcgagatgaggccatttaaatgcccctgggaaggttgtaaaatgaccttcaagtggttgtgggctcagactgaacatgtcagagtgcacactggagagcggccatacaagtgctcggctcctgactgcgggcagacattcagatatgtttcggattacagccgccacagaaagaaatttaaccattactgacagctttagttttccgagttattggccgcagctcggggcaaatctccagctgcttgtgtcggtgggccttgtttgttgtagtagctcagctcacgtatttattaacaacctgacagctgataggcctagtgaatgttccccgttaacaatgtgctagtaatttagtcggtgtaggagttagaaattgttgtggggtgaagtgcaacccccttctgttggtgtaggtttgcataagctgatcacccccccactgacacgtggccattcattatttgtttctcagatcagtgatgatgtatttaatccctgatgacaaacttcatgaacactgaaaccatatgatgttggatgtcaaaatgatcaggggttgccaccgtgctcatgtaattcctgtctttgacgc

SEQ ID NO: 17846 - DNA, 1442 bp, Zea mays
  Clone ID: LIB3075-046-E2_FLI
tcgatcacgacaagatggcgtgcacagacaatgcgatgagagccttgttcctcctggtcctcttctgcatcgtgcatggtgagaaggaagagtcaaagggcatcgatgcgaaagcgtccgggcctggtgggttcttcgacatcaccaagttgggcgcctccggcaatggcaagacagacagcacgaaggctgtgcaggaggcatgggcatcggcgtgcggcggcactgggaagcagacaatcctcatacccaagggcgacttccttgtcggacaactcaacttcacaggcccttgcaagggcgacgtgaccatccaggtggatggcaatctgctggcgaccacggacctaagccagtacaaggaacatggtaattggatcgagattctacgcgtggataacctggtcatcaccggcaagggaaaccttgacgggcagggcccagccgtgtggagcaagaactcctgcaccaagaagtacgactgcaagatccttcccaactcgctggtgatggacttcgtgaacaacggggaggtgtccgggatcacgctgctcaactccaagttcttccacatgaacatgtaccagtgcaagaacatgctgatcaaggacgtgaccgtgacggcgcccggggacagccccaacacggatggcatccacatgggcgactcatccgggatcaccatcaccaacaccgtcattggcgtcggcgacgactgcatctccatcggccctgggacctccaaggtgaacatcactggcgtgacctgcggccccggccacggcatcagcatcggcagcctagggcggtacaaggacgagaaggacgtcacggacatcaacgtcaaggattgcactcttaagaagacaatgttcggcgtccgcatcaaggcgtacgaggacgccgcctccgtgctcaccgtctccaagatccactacgagaatatcaagatggaggactcagccaaccccatcttcatcgacatgaagtactgccccaacaagttgtgtactgccaacggcgcctccaaggtcaccgtcaaggacatcaccttcaagaacatcactggcacctcctccaccccggaggccattagcctgctctgcactgccaaggtcccatgcaccggcgtcaccatggatgacgtcaacgtcgagtatagtggcaccaacaacaagaccatggctatatgcacgaacgccaagggcagcaccaagggttgcctcaaggagcttgcatgcttctagaccctcagtcgactgacccatctctctagttataatttttctctcgtccttgaattgtccattagttgctatccatttgtaacgcacaacagtaaaatgatagacatccaacagctatattatgttcgacggtgtaacaccctgaatttgagggtataaaatttcttctctaaatgccaagcaaattcaggtgtt

SEQ ID NO: 17847 - DNA, 535 bp, Zea mays
  Clone ID: LIB3075-046-F4_FLI
atttgctgttgttctagaggtctttgaagttgctccttctctgttcatggtcgatgttcgaaaggttgccggtgacactccggaataccacaggttttacgagaacctatgcagcaaactttgcagcataatctggaggccaaccgaagtttctgccaaatctacgccgctgaggacgaccacctgctagccgcctagcccagcactgagctactgtagtggcatcaccaagagacgtgattcgtagccgtcagaaagggagagcttctgttgaatctagcattgctcgtggagctgggattcatgttgaccaccaggtgtttgtatattgtagtaacgctattgtagatagtctgtatagctccatttgtgcagttgtacgtagcaggaatatgttaaaaaacaacttttaatgtcaggtataatcggtttgcatccaggaagcatctccaacagtgtcttaaatcagtactctatttttaaatatagggttcaacttataaaaacagttttaacaatgccctattttatattt

SEQ ID NO: 17848 - DNA, 771 bp, Zea mays
  Clone ID: LIB3075-047-B6_FLI
ccccgagaagtacgagaacgaggagcgcctcgaggaccacaaggcgcagtgcagcttccgccccgtcgcctgcgccaacgacggctgccgcgccaaggtctccgtccgctgcgtcaaggaccacgacgccgcctgcgtgtacaagctgctccagtgcgagcagggctgcgacaagcgcctgctcaggcgcgacatggaccgccactgcgtcaccgtctgccccatgaggcccatgaagtgccccttcggctgcgattcctccttccctgaccgtgacctcgagaggcactgcgccgagttccttcagccgcatctgctcatggtccttaaggccatccataagaaaggccggtcggaacaagacctcaaggaccttgctcaaaagctggaaaagtttgatggagatggtaaactggctaaggctctggatgcaagacctcttactaatattgtcaaggacctcgaagccaagatgaaaggtggacaatcaagttaaaagggctgggtctttcatgcagacaaacttcacaggatggataatgacattgtttagttgaaaatatggtcccgcgcgcagcatacatacagagaagaatatgagttttgttttattcttatcttctttacgattttgctccctgtctgtcacaatcaaaccaattgtcagtcagtatgcatagtcgtccgctattgttctgtatcttcagcttttgtatgaggatattatatcatttgttttggtatataaatcaaggaacgggccatatttcc

SEQ ID NO: 17849 - DNA, 946 bp, Zea mays
  Clone ID: LIB3075-047-B8_FLI
acgatctctgcccctccttccccaaaatcatctctctcccgatcttggcctccccagattcaccacctgctctcctctccggctacgaccttggctcatcctgattcggacacgcaacatggtttaccactctagtttcgctgatgatgatgggatcacaaaagcttgcagctgtcctttgcttccactgaaaactcatatcaagggcccggcaccagcctctgaccctgataaagcggacattgttgatgaagccataactttctttcgagccaatgttttcttcaaaaatttccatgtgaaaagctcagcagacaagttattgatctatctgacgttttatatcaatattgccttaaaaagactagacggttgccggacactagctgttgggactaaagcaatcattaatctgggattggagaaagttcctgtacctggggaaccagggtttcctttccctggacttttcactcttccccagtcccaggaggaagcagaattgttgaggaattatttgaagcagataagggaggaaacaagtggaagattgctcaactgtgcatacagagctaatggctttccaaacaagtggtggttggcttttgctaagaggaagttcatgaacattgtcatcctttagacttgggctttttgtaccaactggttcaagctgttttttcactcatgatcgtgtgaagtatccacctacaacaaagatagttatcctacatcccaaagtaacaagccaaagacttcgatgataggatagatgaatgacataagataaattatttattcccaatttgcgatatataaccgtgggaacagtaattatcatgttgtattgccttttgtaattctcaccctgctatatcagagagacgaaacctgatatagggtatattctacaatgatgtctaaaacgagacagtttaaatgttct

SEQ ID NO: 17850 - DNA, 894 bp, Zea mays
  Clone ID: LIB3075-047-E2_FLI
tgattcttaagatggagctcagaattgcttatttaaccaacttggcttctaacatgtccattaggctttaagtttaacctgatgacatgtcataatttgggcgctaaactcatgtgcatgagatatattcttttgtgcacaatcgttttcttagcgggtgtctgattctgtatcacctttgtgtcgttgacttgttttatgtggctctgttattgcgggtgcagctctgttataagggctattaataaggtggtggttgttaaactatgtcctgcatatagtagagactgtgagctgatatgttttcagctaatcattaaggatcggaaatcttcatacaaattccatctctactgattattcacttgctgtagcttttgtgatccttaagatggaacagataattgcttatttaaccacgttggcttctaacgtgtccactaggctttaagtttaacctgatgacatgccatatatttggtactttttagttgcccctatggcttatatgctttaagttctaacctgctgtgattctgatgctgctcgacttggtggatttcaatgaagccgaaagatgttgctgccttgcagaatggtgtgatggtgtctagacacgacccaatatgtattctaatggtgtgtttcgttggacgtacgaggaaggatggaagagtgtggatacattttctatgatgtttggatgagagtcatgcgggagtgaggtgaacaatagagcaatttttagtggtggtgtggtctaaaaaatcgagcggacggtgtcgccttcgtcttatcctactttgaccttaaacgaaacaatccaactcgtaccagagaagaaactatattgtcttggttagttagaagaaaagaatgtctgatgtgtttcat

SEQ ID NO: 17851 - DNA, 786 bp, Zea mays
  Clone ID: LIB3075-047-F4_FLI
gcgacgatgatgccacagctgcgtagcctcgtcgcgctggtcctcgtggccacggccatagccgccgctcccggcgttgggtttgtcgtcaccggccgcatctactgcgacaactgccgcgccgggttcgagacaaacgtgtcccacgccatccaaggcgcgacggtggagatggagtgccgccacttcgagtcgcagcaggtccacgacaaggcggaggcgacgacgggccccggcggctggtacaggatggagatcagcggcgaccaccaggacgagatctgcgacgtgcgcctgctcaagagccccgaggcggactgcgccgagatcgaccactcccgcgaccgctgccgcgtcccgctcacccgcaacgacggcatcaagcagagcggcgtccgctacgccaaccccatcgccttcctccgcaaggagccgctccccaactgcggcgagctgctccgcgcctacgacctctacaacgagacgtccgagaattcctaagcgtccaaacaaaagttctctcgctcgctttttttttaaaaaaaaaatcccatatacatatagcacatttgtttcggtttgttgatgcgcgcatgcatgctagcagacatctttcctaaaaaaaatttaaataatttccatctcgcattattttagtagctaccattcatgttttctgagtagttgtataaatgctaccaccgtcatcttttgtacccggccggaacaaacgaaaaacacactatctatgctgtgttgtgaattcaattcttgaccatcttctct

SEQ ID NO: 17852 - DNA, 1323 bp, Zea mays
  Clone ID: LIB3075-048-B4_FLI
ggggaggcaaagccgcgtagtgctggacgtcggctgcggcgtggccagcttcggcgggtacctgttcgaccgcgacacgcttaccatgtccctggcgcccaaggacgagcacgaggcgcaggtgcagttcgcgctggagcgcggcatcccggccatctccgccgtgatgggcacccagcgcctcccgttccccgccaacgtcttcgacgtcgtgcactgcgcgcgctgccgcgtaccgtggcacatcgacggcggcatgctcctcctcgagctcaaccgcctgctccgcccgggcggcttcttcgtctggtcggccacgccggtgtaccagaagctcccggaggacgtggagatctgggacgaaatggtgaagctgaccaaggcgatgtgctgggagttggtggcgaagaccagggacaccgtcgacctggtcggactcgtcatcttccagaagccgatagacaacgtctgctatgataggaggccggagaaggagccggcactgtgcgagccctccgacgatcccaacgctgcatggaacataaagttccgggcgtgtatgcaccgtgttcccgaggaccagtcagtgcgtggcgcccggtggccggtgctctggccggcgaggctgcggaaggcgccatactggctggaccgcagccaggtgggtgtgtacggcaagccggctccggacgacttcgcggcggacctccagcactggaagaaggtggtccggagctcgtacctcgccggcatgggcatcgactggaagaccatccggaacgtcatggacatgagggccgtctacggagggttcgcggcggcactgcgggacatgaaggtgtgggtgatgaacgtggtgaccatcgactcgccggacacgctgccggtgatctacgagcgcgggctgttcgggatctaccatgactggtgcgagtccttcagcacctacccgaggtcctacgacctcctccatgccgaccacctgttctccaagctcaagcccaggtgcaaggtgttgccggtgatcgtggaggtggaccggatcctgaggccgaacggcaagctcatcgtgcgggacgacaaggagacggtggacgagatccagggcgtggtgaggtctttgcagtgggaggtcaggatgaccgtgtccaagaacaagcaggcaatgctgtgtgcgaggaagacgacgtggcggcccacggaaatcgagaccagatgacctaaccgtgtagttgtttcaaaacacgtaagtacagaacagatcgatctacacacttggtgctgcagtattgcaataactaagtgagctagtccttatatgac

SEQ ID NO: 17853 - DNA, 728 bp, Zea mays
  Clone ID: LIB3075-048-C5_FLI
gttgcagcatcacaagcaaactgaagtcactcacagctctccagcttccatccagaaaggagaaggaaacaagctagtggacaaccaaccatgatcagcgccaagaagattgctcatctcgccaagaagtggcagaggatggctgcacaagggaggaagcgcctcgccttgggggcggcagcaaagcaagccgacgagtgctgcagctatgtggcgagcaagggccactgcgcggtgtacacggccgacggggcacggttcgaggtgccgctggcgtgccttagcaccccggtcttcggggagctcctacaaatgtcacaggaggagttcggcttcacgggcggcgatggcaggatcacgctgccctgcgacgcggcgatcatggagtacgccatgtgtttgctcaggagaggagcctctgctgagctagagcaggcgttccttagcaccatggccatgtcatgccactgtgccagccacatggcgccgtatgttggacgagctcacgagccagacagcagattgttgtttagtttctgttcagtgtagtgtagatagtggagcaaaggtattagctagataaatattattccaagccttctgatcgtgtgcaaggatgcgactaatcaagcaaggtcttaagaagttagagagacatgatttatgttctgtacttttcgaaaattgtgaggactactcacattacatagcgaaagactttcttgtgc

SEQ ID NO: 17854 - DNA, 1437 bp, Zea mays
  Clone ID: LIB3075-048-C9_FLI
cacgacaagatggcatgcacaaacaatgcgatgagagccttgttcctcctggtcctcttctgcatcgtgcatggtgagaaggaagagtcaaagggcatcgatgcgaaagcgtccgggcctggtgggtccttcgacatcaccaagttgggcgcctccggcaatggcaagacagacagcacgaaggctgtgcaggaggcatgggcatcggcgtgcggcggcactgggaagcagacaatcctcatacccaagggcgacttccttgtcggacaactcaacttcacaggcccttgcaagggcgacgtgaccatccaggtggatggcaatctgctggcgaccacggacctaagccagtacaaggaccatggtaattggatcgagattctacgcgtggataacctggtcatcaccggcaagggaaaccttgacgggcagggcccagccgtgtggagcaagaactcctgcaccaagaagtacgactgcaagatccttcccaactcgctggtgatggacttcgtgaacaacggggaggtgtccggggtcacgctgctcaactccaagttcttccacatgaacatgtaccggtgcaaggacatgctgatcaaggacgtgaccgtgacggcgcccggggacagccccaacacggatggcatccacatgggcgactcatccgggatcaccatcaccaacaccgtcattggcgtcggcgacgactgcatctccatcggccccgggacctccaaggtgaacatcaccggcgtgacctgcggccctggccacggcatcagcatcggaagcctagggcggtacaaggacgagaaggacgtcacggacatcaacgtcaaggattgcactcttaagaagacgatgttcggcgtccgcatcaaggcgtacgaggacgccgcctccgtgctcaccgtctccaagatccactacgagaatatcaagatggaggactcagccaaccccatcttcatcgacatgaagtactgccccaacaagttgtgtactgccaacggcgcctccaaggtcaccgtcaaggacgtcaccttcaagaacatcaccggcacctcctccaccccggaggccgttagcctgctctgcactgccaaggtcccatgcaccggcgtcaccatggatgacgtcaacgtcgagtatagcggcaccaacaacaagaccatggctatatgcacgaacgccaagggcagcaccaagggttgcctcaaggagcttgcatgcttctagaccctccgtcgactgacccatctctctagttataatttttctctcgtccttgcattgcccattacatgctatccattggtaacgcacaacagtaaaatgacagacatccgacagctatattatgttcgacggtgtaacaccctgaatttgagggtataaaattttttctctaaataccaaccaaattcaggtgtt

SEQ ID NO: 17855 - DNA, 703 bp, Zea mays
  Clone ID: LIB3075-048-G10_FLI
cacgccgtcggcgtcggccactgctcctcgttccgcgcgcgcctgtcggcgccgccggcgcagatcgtgccggcgtaccggaacctgctgtcgggcaagtgcgcggcggcggcgggcggcgccgacgaccccgtggtggccaacaacgtgcgcgacgaggacccgcgcgccgtcgcggcggccttcccgtccttcctcgggaagctgcgcaaggccagggactttctggacaacagctactaccacaacaacctggcaaggatcgtcaccttcaactccgactggcaactgctcacggagaaggaggcgctggggcacgtcaaggagtacgccgagaacggcaccctctgggacgaggacttctccgacgcgctcctcaagctcagccggctgcccatgccgccgcacagcaagggcgagatcaggaagacgtgccgctgggtcaaccaccactgatcctgctcaagctctgcacccggccggacggaaatataccagatgggtcttcacgccgatttgtttcgatcttctttcattttgttgctgtatgtttgtttgattattatctgatgatatgcatgtgtttttttatgcggttgatctcttgttgtatcttgttctttcatgtatgtatggactatgggcaacagtaatctctactaacaattaagggagcagtgtagactgcccccgcctgtgcccc

SEQ ID NO: 17856 - DNA, 994 bp, Zea mays
  Clone ID: LIB3075-049-B9_FLI
gctgatttgtggcgtcagctactgccactccatgcaaatctgccaccgagacttgaagctggagaacacgctgctggacggcagcccggcgcctcgcctcaagatctgcgacttcggttactccaagtcgtcgctgctgcactcgaagcccaagtcgacggtcggcacgccggcgtacatcgcccccgaggtgctctcccgccgggaatacgacggcaagacagccgatgtgtggtcctgtggagtcactctttatgtgatgctggtcggtggttacccttttgaggacccagacgacccaaagaatttcagaaagacgatcgggaggatcatgtcaatccaatacaagataccagagtatgtgcacgtgtcgcaagactgcaaggagctgctttcaaggatctttgttgcaaactctgcaaagagaataacgatcagggagatcaggaaccacccctggttcctgaagaacctgcccagagagctcacggaggctgcgcaggccatgtactacaagaaagacaacagcgccccgacctactccgtccagtccgtggaggagatcatgaagatcgtggagaaggcgcggacgccgcctccttcctccacccctgtggctggcttcggttgggcggaggaggacgagcaggaggacagcaaggaaccagacgaggaacacgaggacggcgaggacgagtacgagaagcaggtgaagcaagtccacgccagcggggagtttcatctcagctgctgagggttttcgccggcctgctagtctgtggtaccagccgatgatggacctgctagtctgtggtcttgtttccgagttttctttcattttttctttcttttgctgtggtgccgcaagactgcaacagttgtaaattattgaagggggttccagcgttgcccttgtattgactgattcaagctagcatggggaacatgattatggaataaaacaggtcgttgagcatgctccggttgtaactgc

SEQ ID NO: 17857 - DNA, 1128 bp, Zea mays
  Clone ID: LIB3075-049-D6_FLI
ataaactacaggaagagagagggaagggaccacaggagagtcattaagtaaatccacttgttgtctgattagggtaggaaatgatgtctgaaagtgacgagcacggctcgctcctagacaagatcaacgagaagatccacgagtacaagcactcatcgtcgtcttcctcgtcagactcagatgatgacaagaagtccaaaaagtctaagaagaagaagaagctctttgggaggaaacatccattgcatcacgttcttggaggaggcaaagccgccgatcttgtgctgtggaggaacaaacaggcatccgggagcatcttggcaggggtgactgtgatctggctgctgtttgagggcatcggctaccacctcctcaccttcctctgccacgcactgattgtgtttctcaccgtctggttcgtctggtctaatgttgcgtcctttgtcaacaggtctcctccaaagtttccagaggtgattctatctgaagcccaatgcctgaaggtagctcatattgcaaggaaagaaatcaacgaggctttctatacattgcgcaatgtcgcttctggaaaagatttgaaaacgtatctgatgtcaattgcagtgctttggttcatttcgataattggaagctgcttcagcttcttgactgtgtcttacactattattttgcagttttcctgatggcatacactctgccaatgttatatgaaaaatacgaagatcaagttgatgttgtgggtgagaaggcccttattgagataaaaaagcagtacaaagtgattgatgcgaagcttatctctaagatcccaatgttgtctgagaagaaacaacattgaaactgcgctacagaggtctagttcagcacattaccaatatatggaaatagtttgattagctttgctatattaacacttcacattctttaagatgacaacatagatattgtatggattcttagtgttgactcttccgagtcctagaactgtgtcaaccatcatataaagtagttgcttcttcatgtcagatagtctatttgattttgtattgatgtggacatatatatgcttgacattgtgattatttgctattcctatatgttactgggtgcatttaatagtatttatac

SEQ ID NO: 17858 - DNA, 893 bp, Zea mays
  Clone ID: LIB3075-049-F3_FLI
acgacgcggaggcggagcgtccggcggcttcgcgtacctctccgcggcgtcccccgcctacgacgctgcgtgccgccgcatcgccaggtacgccggcgcggcggtgctgtccgtcgactaccgccgctcgcccgagcaccggttccccgccgcctacgacgacggcttcgcggcgctccgcttcctcgacggcgggcccgggcccgaccccgaccccggcgcgatcgcgggcgccccgccgatcgacgccgcgcgctgcttcctcgcgggggacagcgccggcggtaacatcgcgcaccacgtcgcccgccgctacgcgctggacccttccgccttcacgaacctccgcctcgccggcctcatcgccatccagcccttcttcggcggccaggagcgcacgcccgccgagctgcggctcgtcggcgcgcccatcgtctccgttccgcgcaccgactggatgtggcgcgcgttccttccccacggcgcggaccgcacccacgaggcgtcatcccccgacgtcgccaccgcgggcatcgacggcgcccctgatttcccgcctgccacggtcgtcatcggcgggtacgacccgctgcaggactggcagcgccggtactgcgacgcgttgcgcggtaaggggaaggaggtgcgggtgctggagtaccccgacgccatccacgccttctacgtcttcccggagttcgcggagtccaaggacctcatgctacggatcaaggagatcgtcgccagcagcgagtgatgggggacggacggcgtgggcgcgcgcagctgtcgctcagatgcgtggtggatgtatctgcgactgtgctaagtggctagggtcagtgttgtggactggacggtgctgtctagtgtgtgacgtggttcgtcgtgtg

SEQ ID NO: 17859 - DNA, 1262 bp, Zea mays
  Clone ID: LIB3075-050-A5_FLI
aatggaggcagacatacatagtggtgatgcggtgaagaaggagcttcatcaagtgcatatggaggcaaagagacttattactgaaaggcagatgctgacccttgagacagaggatgtgaataaagaattacagaaactctctgcctctggtgacagtaaaagccttcctgaattgctagctgagctagatgggctaaggaaagagcatcttaatttacgatctcaatttgaatttgagaaaaatacaaacatcaagcaagttgagcagatgcggacaatggaaatgaacttgatgaccatgactaaacaagctgagaagttacgaggtgatgtggcaaatgctgaaagacgggcacaggcagctgtggctaaagcaacagggcatgcagctggtgcacaggtgacagcttcacagcctgggacagctcaagctacagcggttccagcagcagctacagacccatatgcaggtgcatatgccagttacccccctgcatatcagcagggagcccaggctggggcatatcagcagggagcccaggctgggacgtaccagcagggagcgggaacccaggctggggggtaccagcaaggagcccaggctggggcgtaccagcagggagcgggagcccaggctggggcgtaccagcagggagcccaggctggggcgtaccaacagggagcccaagctggggcgtaccaacagggagcccaagctgggacatatcagcaaggaaaccaggctggagcatatccctatgcttatgatgctgccacggcttacacatatgcaggttattctggctatccagttgcaggctatgcgcaaagtgcagtgcccaattattcctatgctgcacctccacagccaataagcagtggtgcagctacagacgccgcaagcctgtatggtgccgttggtagcgccggatatcctactgcgcaagttcagccgagcagtggccctgcaaatgcagcgccaccacctccaccaccaccggcagcaccatatccaagcacatatgaccaaaccagaggagcccagaggtgaaatctgggatgtaaaccagatggctgtttgccatgcacatttgttgagcagacaaatatagactctgtcatgccccatttgtagactgattactggttcagttatgtagatccagttacgggtagattaatttacatcacgacggaagagttgatgtatgcgtaactgtgttggtacttgggttgatcggagcaatgcggcattaaaccac

SEQ ID NO: 17860 - DNA, 564 bp, Zea mays
  Clone ID: LIB3075-050-A6_FLI
gaagtttcagatgttccattcgtcccttcggacaggccttgggaaaccatattcagcgggtcgtctcatgttctcccgcctctcacaaaactatgctctgcattcttgtcatcgctgctggagaaacggcctgttgcaaacgagtgagccgccctagaacattgtcctctcatacaacggtaggtatactcgccagttgcagaatggaaatgcggaaggaaatccgtccgtgacgatgcatatgcccacttgaagagttcagagatgctgggtgatgccatctgaggttggttatggttatacagatatcacacggcccacgaggatcattttgcagcgatactcgacggccaacctactgatcgcagcaattttgttttcttctccgcttgacatgtaatcctgacagtaaaactagaaaatcttagtgtgctttatctgatgcgatgacgcggtgctcgttgaggtgctgcgactgtttggctattgagctgtctacggcacaaccgcatttcttttgtactattttgtttttttttcaaagaaagctcacgcttggatatc

SEQ ID NO: 17861 - DNA, 1144 bp, Zea mays
  Clone ID: LIB3075-050-C8_FLI
gtgggagcggagtaataaccaaacaacggggagagagagagagagggaggaggaggaggaggaggaggccaggaggttttcgttcgctcgttcgccttgcctggggacggggttgccgttggcgccgtagaggtcccagagctcctggacctggccgacgagctggcgcagcgcggccacctcccccatcgccaggccgccggcgccgcaagcgcgcgcgcgccgccggcctcctcaccgcgcccctccactgcctctgtcgctcgccccctcctctacctcgtcttccgggtcggggtcgggccttccggtcgcaccctccctttccgcttcgctaaatggacagcagcgaagcaggtgacggcgtgaggccgcgcgtgccgtgtccgtttgcgtggcttcgccctcgccgtgttcccgtccccgtcccgtgtggtgtgggtgcggtttgcttttgtttgctcgggtttatagatagctagtgtcatcggttgggttgggtttgggtgtggtgcggtttaagtaagcatcaatgatgtcttttgttttataattgttttataatataactatgtaatatatggtcatactttatagtgggaaatacaataccaagataacacacgtataaacatgtttatgctattactaaaaaaactataatcataatttatgaaacattaatggccgtggtttccttctcacaaaggtaaatttgtagattagagagtggtttgcgggttgcaggttactattctgatggccttgctctagagagcctaaacaaaaaatggattgttgcctatttaattaaagttttttttgtatttgatgatcaatatagttatttagactaatgtgtttgctagtgttgtttattatagtccaaaggatgaacgaagacaacgaaatgatcaaggagatcaacactctaaagcaagacattgaataattattaaagatctatcaatatcatgcaaaagagtccaagacataagatgtaataagcccacacaagaaacacaaatacatagaaaacgggctagcactggacaggtgcagtgtctattaaaaattaggctgaagaataagtacaccaaacgcatatgtaaacctaacaagtataccagatgtcacattggat

SEQ ID NO: 17862 - DNA, 744 bp, Zea mays
  Clone ID: LIB3075-050-H2_FLI
cgcgtgccctcgccgcagccatcttccatggcggaccagctcacggacgagcagatcgcggagttcaaggaggccttcagcctcttcgataaggatggcgacggctgcatcactaccaaggagcttggaactgtgatgcgctcccttggccagaaccccactgaagcagagctgcaggacatgatcaacgaggttgatgctgatggcaatgggaccattgacttcccagagttcctgaacctgatggcaaggaagatgaaggacaccgactccgaggaggagcttaaggaggcctttcgcgtcttcgacaaggaccagaatggtttcatctcggctgctgagctccgccatgtcatgaccaacctcggcgagaagctgactgacgaggaggtcgacgagatgatccgtgaggccgatgttgacggcgacggccagatcaactacgaggagttcgtcaaggtcatgatggccaagtgaggagccgtccccgttatctatgaattgaagttaaatatcaggcacacaagctgtactttgccatgtcccttttgagtacacatcagtatcatgcaggaggtaatgtctagtagtggtcggtttaggtggtgtagtcatgggaactcgacatcagatacctggtctcttttgattgtgatgttatcttgcattattgctcctgctggagcttttaggatttgttgtaagctcatattttcaggggggtttggatcttttgtgcgagtc

SEQ ID NO: 17863 - DNA, 1450 bp, Zea mays
  Clone ID: LIB3075-052-F11_FLI
catcgatcacgacaagatggcgtgcacaaacaatgcgatgagagccttgttcctcctggtcctcttctgcatcgtgcatggtgagaaggaagagtcaaagggcatcgatgcgaaagcgtccgggcctggtgggtccttcgacatcaccaagttgggcgcctccggcaatggcaagacagacagcacgaaggctgtgcaggaggcatgggcatcggcgtgcggcggcactgggaagcagacaatcctcatacccaagggtgacttccttgtcggacaactcaacttcacaggcccttgcaagggcgacgtgaccatccaggtggatggcaatctgctggcgaccacggacctaagccagtacaaggaccatggtaattggatcgagattctacgtgtggataacctggtcatcaccggcaagggaaaccttgacgggcagggcccagccgtgtggagcaagaactcctgcaccaagaagtacgactgcaagatccttcccaactcgctggtgatggacttcgtgaacaacggggaggtgtccggggtcacgctgctcaactccaagttcttccacatgaacatgtaccggtgcaaggacatgctgatcaaggacgtgaccgtgacggcgcccggggacagccccaacacggatggcatccacatgggcgactcatccgggatcacgatcaccaacaccgtcattggcgtcggtgacgactgcatctccatcggccccgggacctccaaggtgaacatcaccggcgtgacctgcggccctggccacggcatcagcatcggcagcctagggcggtacaaggacgagaaggacgtcacggacatcaacgtcaaggattgcactcttaagaagacgatgttcggcgtccgcatcaaggcgtacgaggacgccgcctccgtgctcaccgtctccaagatccactacgagaatatcaagatggaggactcagccaaccccatcttcatcgacatgaagtactgccccaacaagttgtgtactgccaacggcgcctccaaggtcaccgtcaaggatgtcaccttcaagaacatcaccggcacctcctccaccccggaggccgttagcctgctctgcactgccaaggtcccatgcaccggcgtcaccatggatgacgtcaacgtcgagtatagcggcaccaacaacaagaccatggctatatgcacgaacgccaagggcagcaccaagggttgcctcaaggagcttgcatgcttctagaccctccatcgactgacccatctctctagttataatttttctctcgtccttgcattgcccattagatgctatccattggtaacgcacaacagtaaaacgacagacatccgacagctatattatgttcgacggtgtaacaccctgaatttgagggtataaaatttcttctccaaataccaaccaaattcaggggttacctct

SEQ ID NO: 17864 - DNA, 1089 bp, Zea mays
  Clone ID: LIB3075-052-H3_FLI
cagagcagcatttcgagtaacacagttgagcacgacgatgggatccctcgctaataacatcatggtcgtgggcgccgtccttgcggcgcttgtcgtcggcgggtcgtgcgggcccccgaaggtgccgcccggccccaacatcaccaccaactacaacggcaagtggctcaccgccagggccacctggtacggtcagcccaacggtgccggcgctcctgacaacggcggtgcgtgcgggatcaagaacgtgaacctgccaccctacagcggcatgacggcgtgcggcaacgtccccatcttcaaggacggcaagggctgtggctcatgctacgaggtgagatgcaaggaaaaacctgagtgctcgggcaatcctgtcacggtgttcatcacagacatgaactacgagcctatcgctccctaccacttcgacttgagcggcaaggccttcggctccctggcaaagcccgggctcaacgacaagcttcgccactgcggcatcatggacgtcgagttcagaagggtgcggtgcaagtaccccgctgggcagaagatcgtgttccacatcgagaagggctgcaaccccaactacctggccgtgctggtgaagtttgtggcggacgatggcgacatcgtgctgatggaaatccaggacaagttgtcggctgagtggaagcccatgaagctctcttggggcgccatctggaggatggacactgccaaggcgctcaagggccccttctctatccgcctcaccagcgagtccggcaagaaggtcatcgctaaagacatcatcccggcgaactggagacccgatgccgtctacacttccaacgtccaattctactagactttgaattgccttcgattcatccggcgcggcgggctatggacctgcagcagcaagctaattaagttggccgatatatatataatatataatggaagccctgggctttgattattggggaagccccaaccagaatgcggataggccaccaccccgcatgattacgttagcatttatgctggtataaccaaattatataattttcatatactatgcaatgaatctaagaaggcagttcacct

SEQ ID NO: 17865 - DNA, 1442 bp, Zea mays
  Clone ID: LIB3075-053-B3_FLI
tcgatcacgacaagatggcgtgcacagacaatgcgatgagagccttgttcctcctggtcctcttctgcatcgtgcatggtgagaaggaagagtcaaagggcatcgatgcgaaagcgtccgggcctggtgggtccttcgacatcaccaagttgggcgcctccggcaatggcaagacagacagcacgaaggctgtgcaggaggcatgggcatcggcgtgcggcggcactgggaagcagacaatcctcatacccaagggcgacttccttgtcggacaactcaacttcacaggcccttgcaagggcgacgtgaccatccaggtggatggcaatctgctggcgaccacggacctaagccagtacaaggaacatggtaattggatcgagattctacgcgtggataacctggtcatcaccggcaagggaaaccttgacgggcagggcccagccgtgtggagcaagaactcctgcaccaagaagtatgactgcaagatccttcccaactcgctggtgatggacttcgtgaacaacggggaggtgtccggggtcacgctgctcaactccaagttcttccacatgaacatgtaccagtgcaagaacatgctgatcaaggacgtgaccgtgacggcgcccggggacagccccaacacggatggcatccacatgggcgactcatccgggatcaccatcaccaacaccgtcattggcgtcggcgacgactgcatctccatcggccctgggacctccaaggtgaacatcactggcgtgacctgcggccccggccacggcatcagcatcggcagcctagggcggtacaaggacgagaaggacgtcacggacatcaacgtcaaggattgcactcttaagaagacaatgttcggcgtccgcatcaaggcgtacgaggacgccgcctccgtgctcaccgtctccaagatccactacgagaatatcaagatggaggactcagccaaccccatcttcatcgacatgaagtactgccccaacaagttgtgtaccgccaacggcgcctccaaggtcaccgtcaaggacgtcaccttcaagaacatcactggcacctcctccaccccggaggccattagcctgctctgcactgccaaggtcccatgcaccggcgtcaccatggatgacgtcaacgtcgagtatagcggcaccaacaacaagaccatggctatatgcacgaacgccaagggcagcaccaagggttgcctcaaggagcttgcatgcttctagaccctccgtcgactgacccatctctctagttataatttttctctcgtccttgcattgcatattagttgctatccattggtaacgcacaacagtaaaacgacaaacatccaacagctatattatgttcgacggtgtaacaccctgaattttagggtataaaatttcttctctaaatgcaaaccaaattcaggtgtt

SEQ ID NO: 17866 - DNA, 785 bp, Zea mays
  Clone ID: LIB3075-053-D11_FLI
gaattccctcctcctccgcctctcccgcagtccctctcctcctttccctcccccgtcgcgatcgctctgtgctccgcctccgtccgtcaaggcctgctcttgcgccgttcctcctcgcccaatccgccaggttctccgcggtgtgttcctgacgctgttgaggcccggcgtgtgcgttgcatgcaggggatggccacattcgagctctaccggaggtccaccattggcacctgcctcaccgagacgctggacgagctcgtctccagcggggccgtcagcccggagctcgccatccaggtccttgtgcagttcgacaagtccatgactgaggcgctggagatgcaggtcaagagcaaggtcagcgtcaagggccacctgcacacctacaggttctgcgacaatgtctggaccttcattctaacagatgcaaccttcaagagcgaggagattcaagaaacactgggaagggtgaagatcgtggcctgcgattccaagttgctgcagcctcagcatccataaaacaagagtcgcctgctccatacatgttcactggcgccacccaaaccttcctagttcatgtgaatttttgctccctatgaactttttcctagagtaccatggctgtcaacatgttatccgtactgaaatatggaatacatggttttgctttttctttcttttctgttctcgaatacgcaaaaagatctgcacgtcattgtaactaaggtagtcctcttcccttcacttcctgcagaggtcacaaatctatctcatagtcgatcgat

SEQ ID NO: 17867 - DNA, 864 bp, Zea mays
  Clone ID: LIB3075-053-H6_FLI
ccgtttttcctcgtcctcgatccagccccctgccgcttccagctccgatcgatctgatccctccccaccaccacgcccatggcggaccaactcaccgacgaccagatcgccgagttcaaggaggccttcagcctcttcgacaaggacggggatggttgcatcacgaccaaggagctgggaactgtcatgcgttcactggggcaaaaccctacagaggctgagctccaggacatgatcaatgaggtcgatgccgacggcaacggcaccatcgattttccagagtttctcaaccttatggctcgcaagatgaaggacaccgactctgaggaagagctcaaggaggcctttcgtgtgtttgacaaggaccagaacggcttcatctctgccgccgagctccgccatgtcatgacaaatcttggggagaagctaactgatgaggaggtagacgagatgatccgtgaggctgatgtcgatggtgatggccagattaactacgaggagtttgtcaaggtcatgatggccaagtgagccacagaaccataagctcaaggcggtgcattgcatattagtcaagatgcaatgcaactcttatttcatcgacttccagtgaaacattctgctagttgtagtttttgaaaggcaatgcagttgctgctttgttcttccctccagtgtgttttcagaactgttgattcatgtgaaactgtaatgattgccctccctgctgtgtcttggttgcagttgaaaccatatgtagctacattccccctcccaccacctccacacatcaacttctgcttcaccttttttagcatcaatggatggccggttgtttttaatgcgatgatctgcagttatcgtggc

SEQ ID NO: 17868 - DNA, 492 bp, Zea mays
  Clone ID: LIB3075-054-C11_FLI
ggcacgccgcagttccccgggaggaccgtcacgctcgagcaccagcccggagcgacttgctggggagttgcttacagaataaaggaggaagataaggagatagctttggagtatcttgaggtcagggagaagcaatatgatgagaaggtttaccttgacttgtatactgattcatcgcccaaagtaccagctgtcgaaaatgtgatggtatacttcgccaccagtaacaaggagaacaatcaaaactatcttggtcctgcacctctggaagaaatgaccaggcaaatttaccttgctcaaggcccatctggacctaacaaagagtatgtgttcaaactcgaggacgcgttacacaaattaggagttgtagaccaacatgtccaagaactggcaaatgctctgcgtgagtattctgacaccgagttatctaagtgaaagatcacatttaccccttgtttggagggtaaggatttataaataaagttagaattc

SEQ ID NO: 17869 - DNA, 281 bp, Zea mays
  Clone ID: LIB3075-054-F4_FLI
ggtaaatgaatgctcggttacaacgtgctaaatcctttgccaatgctaattctcaacagggagaacatcagtgaccggcatcctattcaggcataggcagtgatgttctccctgttgagaattagcattggtaaatgaatgctcggttacaacgtgctaaatcctttgcatctggccaaatttgtaaataagcactgggtgatgcccatcagtaaacacatgatgctactgctgttaaactaaatgtggcaaatttcataatgctaggtattgttctcggt

SEQ ID NO: 17870 - DNA, 590 bp, Zea mays
  Clone ID: LIB3075-054-G1_FLI
acaccctgccaccaacgacaggttaccttcttcgggcccttctcaccatttcctcatttaagccccgtgtgccttgctcctcggtgtttcctccagatagtagtgtttcctcagtggactagtgtgaagctgtgcttagcgtagcggaagggaggaaggacaaggcaaggcaactgatggcggcgggcggcggaggcggctcggcggcgccgttcgtgtggaagacgtacacgatggtggaggaccccgggacggcaggggtgatcggctggggcagcggcaacaacagcttcgtcgtcgccgaccccttcgtcttctcgcagacgctgctccccgcgcacttcaagcacaacaacttctccagcttcgtccgccagctcaacacctatgtcagttaaatcacacactccagctagctaaattgattgccgtctctcttctacgagctgaaccctgctcttgggagagcgctggatctgtataaactttggcgtgtgtaccgaatgctcttgctgtgctgtaccaacacaaatttgtaaattggtttttgttggagaaaaaaaaaggaaatatgtaagcttgctacctgc

SEQ ID NO: 17871 - DNA, 1096 bp, Zea mays
  Clone ID: LIB3075-054-G6_FLI
tgaagctcttcaaccgctggaccttcgacgatgtccaggtgaacgatatctcgctgaacgactacctggctgtgactgcggcgaagcacgcgacattcctgccgcactccgcggggcgctactccaagaagcggttccgcaaggcgcagtgcgccatcgtcgagcgcctcaccaactcgctcatgatgcacgggcgcaacaacggcaagaaggtcatggccgtccgcatcatgaagcacaccctggagatcatccacctgctcactgacgccaatcccatccaggtggtcgtggacgccattatcaacagtggaccacgtgaggatgccacccgtattggttcagctggtgttgtgagaaggcaggctgtggatatctcacccctgagaagggtgaaccaggccatctacctcctcaccactggtgccagggagagcgctttcaggaacatcaaaaccattgctgagtgccttgcagatgagttgatcaacgctgccaagggctcttccaacagctacgccatcaagaagaaggacgagattgagcgtgttgccaaggccaaccgttgagtggagcttgtatcctggtgcacttgcactagaactacgtttctggcagtcgtatttttttcttgtgtttttacccatgtttagactttgagacctatatctaaggttttggttctcagtgaacaatgaaaattactgtgaaatgcagttgttttggtgcagaaatgcgcactgagatattctgcttgtgaatttgtgagtgctgttggcgtcgccgctggcttgccgatgtagtatttcttgtcactcagatgtcaccggttctatgttggcaatcttctgtaggttagacaattgatgatagcaggtgcaaatcaagctgctggtgcagattaggcaaaccaatacaagaatgggaagatcttttttttttaaaaaaaacatgtttcaaaccagcctttttcacccccaggatatttttagcttaccttgcttgcgttggtttgtaccaatagttttatctgcactgcacctctccgtgttattggttaggtgacacaattgtagctatggatctgtttgtttcc

SEQ ID NO: 17872 - DNA, 621 bp, Zea mays
  Clone ID: LIB3075-055-F3_FLI
taaaaatcaaggctacacaccaacttactttctaggtctcaaattaaatggcctcctcgtcctcctccttgctgctggcgtcgatggcggtggcggcactctttgtcgtcggctcgtgtggcggcgcgctcaccttcacgatcggcaaggactccagctccaccaaactatccctcgtcactaacgttgccatctccgaggtgtcggtcaaggagaagggcgccctggactggtcggatgatctcaaggagtcgccagccaaaaccttcaccctcgatagcaaggagccgattaagggccccatctccgtccgcttcgctgtgaaaggtggtggctaccgcgtcgtcgatgacgtcatccctgccgacttcaagcctggctctgtttaccagacaggcgaacaaatctgagtaatggattctgctgcgtgcagattatattgatctctaaaataaatgtttgacagagactaattaagcacacaaacaaagcaaggcactaattcatttcctatgtttactttgtggtaggcaactgcaaaacaatgtattgtatgcatgttctcctctcacatatgttgttggtgtgctgtatatataattaatttcttaactttttttc

SEQ ID NO: 17873 - DNA, 828 bp, Zea mays
  Clone ID: LIB3075-055-G1_FLI
ctcaaggcggcgcgccccgagtggagccccgccgcgatgcgctccgcgatcatgaccacggcgcgcacccaggacaacacgggagcgcccatgcgcgaccacgatggcaaggaggccaacgccttcgcctacggcgccggcaacgtgcaccccaaccgcgccgtcgacccgggcctcgtgtacgacgccggccccgacgactacttcacattcctctgcgccatgggcatctccgcggcagacatgaagcggctcagcgccggcaagttcgcgtgcccagctaatagcgctaaggaggcgcccgccatggaggacctcaactacccgtccatcgtggtgccgtcgctgcgcggcacgcagacggtgacgcgacggctgaagaacgtcggccgtccggccaagtacctcgcgtcctggcgcgcgccggttgggatcaccatggaggtgaagccgagggtgcttgagttcagcaaggtcggtgaggaaaaggagttcaaggtgacggtgacgtcgcagcaggacaagctcgggatgggctacgtctttgggaggctcgtctggacagacgggacccactatgtcagaagccccgtcgtcgtcaacgccctcgcatgatctatccagttcgtgctaactagagtacactacctactactactacttgagggccttgtggatttttgtgacatcttagataagtagtaaggctctaaaatatatttttatttcttcttgttattattagtaaagaaatgagataggtttttttttgcttagctaaaagacatatcatctataataaattttggctctttgcatgggaacttg

SEQ ID NO: 17874 - DNA, 556 bp, Zea mays
  Clone ID: LIB3075-056-C4_FLI
cgcggttcaacgaacgtcggcggccattcacagccggccggcacctgcccccctgccccacggttcaacgaaagtcggcaggttcttccctccaggcaagataatagtagcacctttgagcactgctgctgaaaatgagctgcgccgaattgccacctgaaaccccagctgtgaacggagaagggtcatctgccgccaccgccgccgctcctggtgccgggtcgaagccgaaaaagaagatatgctgcgcgtgccctgatacaaagaggctgagggatgagtgcgtcgtcgagcacggtgagcctgcttgcaccaagtggatcgaagctcacaagcgatgcctccgtgctgaggggttcaatgtctgaaacttgtagtctgtcgggctcgctttcctagaaccgtaggaaatggaaacattagaaaaatagagttatcaaactagtcataataataccttaatgccaggagttatacggcaaggggaaatcacgatgtgaaaattatgttggcgatgaaacgtatttgagaatgagattgttgaattttattcgct

SEQ ID NO: 17875 - DNA, 741 bp, Zea mays
  Clone ID: LIB3075-056-C9_FLI
gtctcaaggacatcaatcgtggtctgcgcacagagattaggcaaaggatgggcgaggatctggacagtctggacttcgacgagctgcgcggcctcgagcaaaacgtcgacgcggctctcaaggaggttcgccataggaagtaccatgtgatcagcacgcagaccgatacctacaagaaaaaggtgaagcactctcacgaggcgtacaagaacctgcagcaggagctaggcatgcgggaggacccggcgttcgggtacgtggacaacacgggcgccggcgtcgcctgggacggcgcggcggcggcgctgggcggcgccccgccggacatgtacgccttccgcgtggtgcccagccagcccaacctgcacggcatggcctacggcttccacgacctccgcctgggctagcgcatccatcaccatgctgggtggtgctgctcgatcatcctactgcatggcaatgcaagctggttggttggttcgctcatgcttcgtccgtcaacaaagcaagtaagcaatgcaatgcaaccgaggtactgtaatagccaataaaatctactgcatactgcaaacccaattactggtagcttagctaccgcgtgtgtacgaatcaaccgattaattaccgcgcccttgcatgtcgtcgtcgtccgtgcttttggcgttggtagacatgtgtgtattgtatgggtcctgttcatctgcatccatgcatgttgtttatgattgtaattgttgtgtg

SEQ ID NO: 17876 - DNA, 1298 bp, Zea mays
  Clone ID: LIB3075-056-D1_FLI
catattcctaagctatcatggtgcaccggacttccatagccgatgtgcatgtgatgtgcatggatctaagcccaaagaaacccaacaaggccagcgccagcgacggcggagcctactacgactggtcccccgccgatctgcccatgctcggcgttgcctccattggtgccgccaagctctgcctcaccgccggaggtcttgccctacccagctactccgactctgccaagatcgcctacgtcctccaaggcaaaggtatcttcggcgtggttctcccggaggcgaccaaggagaaggtcatctccgtcaaggaaggcgacgcgatggcgctccccttcggcgtcgtcacctggtggcacaacaacgccgacgccgctatctccgacctcgtggtgctcttcctcggcgacacctccacgggccacaagccgggccagtttacaaacttccagctcaccggctccacgggcatcttcacgggcttctccacagagttcgttgcccgcgcatgggacctcacccaggacgacgccgccaagctcgtctccacccagcccggatccggcattgtcagggtcaaggacgggcacaagatgcccgaggcgcgcgacgaggacaggcagggcctggtcctcaactgcctagaggcgccgcttgacgtcgacatcaagaacggagggcgcgtcgtggtcctcaacacccagaacctgccgctcgtcaaggaggtcgggctcggtgctgaccttgtcaggatcgacgcccactccatgtgctcgcccggcttctcctgcgactccgcctaccaggtcacctacatcgtgcgcggcagtggccgcgtccaggttgttgggatcgacggcacgcgagtgctcgagacccgcgccgagggaggctgcctcttcatcgtgccaaggttcttcgttgtctccaagatcgccgacgaaaccggcatggagtggttctccatcatcaccacccccaacccaatctttagccacttggcgggccggacatcggtgtggaaggcaatatctccggcggtcttgcagtcgtcgttcaacaccacgccggagatggagaagctgttccgtagcaagaggcttgactcggagatcttctttgcgccttcaaactgattcattcgccggtggaaaatggtccatccatctcgagtaaacttggtgtcctgggtgtgttctttagcagcttcagtttagaataatcaggttatgtcttcatcatcagttttttagatcggttcatgtaataataaacttgagatggtacacatgtttctt

SEQ ID NO: 17877 - DNA, 789 bp, Zea mays
  Clone ID: LIB3076-001-A6_FLI
tttcgaattccctcctcctccgcctctcccgcagtccctctcctcctttccctcccccgtcgcgatcgctctgtgctccgcctccgtccgtcaaggcctgctcttgcgccgttcctcctcgcccaatccgccaggttctccgcggtgtgttcctgacgctgttgaggcccggcgtgtgcgttgcatgcaggggatggccacattcgagctctaccggaggtccaccattggcacctgcctcaccgagacgctggacgagctcgtctccagcggggccgtcagcccggagctcgccatccaggtccttgtgcagttcgacaagtccatgactgaggcgctggagatgcaggtcaagagcaaggtcagcgtcaagggccacctgcacacctacaggttctgcgacaatgtctggaccttcattctaacagatgcaaccttcaagagcgaggagattcaagaaacactgggaagggtgaagatcgtggcctgcgattccaagttgctgcagcctcagcatccataaaacaagagtcgcctgctccatacatgttcactggcgccacccaaaccttcctagttcatgtgaatttttgctccctatgaactttttcctagagtaccatggctgtcaacatgttatccgtactgaaatatggaatacatggttttgctttttctttcttttctgttctcgaatacgcaaaaagatctgcacgtcattgtaactaaggtagtcctcttcccttcacttcctgcagaggtcacaaatctatctcatagtcgatcgat

SEQ ID NO: 17878 - DNA, 775 bp, Zea mays
  Clone ID: LIB3076-001-H6_FLI
ggctggggagcccacggcggtggcgccttctccggcaaggaccccaccaaggtggaccgcagcggcgcctacgtggccaggcaggccgccaagagcatcgtggccagcggcctcgcccgccgctgcctcgtgcaggtgtcgtacgccatcggcgtgccggagcccctgtccgtgttcgtcgactcgtacggcaccggcacgatccccgacaaggagatcctcaagatcgtgaaggagaacttcgacttcaggcccgggatgatcagcatcaacctcgacctgaagaagggcggcaacaggttcatcaagaccgccgcctacggccacttcggccgtgacgacgccgacttcacctgggaggtggtgaagcccctcaagttcgacaaggcatcggcttaaggttgggagtgttcactgtggacatgaggactaccttcctctggctctgctgttacctgcaagcattgctgctgctggatgtgtgtgtttgatcagtgactggctgctgctccatagaagatgaacggagagaaggatgatgaagaagggctttggcaatcgccgctgcaactgcaacccatgccatgccggcttagtgattgggtataatttggcttggcagcagccagcattattatgtgctgatcttttatctttactagtttggtcgtccgatatctttctttctttctccccccccccccccctttcgactctgtactgaaactgctgagagattcgcagtattgttgtatcgtattcgtatgctactgtt

SEQ ID NO: 17879 - DNA, 525 bp, Zea mays; identical to SEQ ID NO: 17750
  Clone ID: LIB3076-002-C4_FLI

SEQ ID NO: 17880 - DNA, 2007 bp, Zea mays
  Clone ID: LIB3076-002-H8_FLI
gtttacaccttgacacctaaggccagagattggagagagaaagaagcagctgagtggagcaagaaagaagaggtcatggcggtgtagtctatcagctgagtgggaaagagtggagcaatggtggggggctgtgccagcggcgacggcgccgccgaagggacgctcgcgaggtggcggagggcggcggccaagcggatcggcctctcatgcgcctccttcttctcctacgccgcctctccctccccgcctccttccaagaccatctcccactccgcactgaatgcgcctgatggagagcagcaaaagatggaggaacccaccagcaccagagtggctgacaagaatctatgtgcaatatgtttggaactcctcagcacgagcatcagcagcgatgttgatagtggtgaggcggcagcaatctacacagcgcagtgctcccactcattccacttcctatgcatcgcctccaacatccggcatggcaacgtcagctgccctatctgccgtgcacaatggtctgagctaccacgtgacctgaaggttccaccattgctgcacaaccagtcagacccaatccttcgcatcctggacgacaacattgcgtcatcccgtgtgaaccgaaggtcctccatccgtgctgctcgctacaacgatgatgacccggtagagcctttcaccttggctgagcatgtggatccatgtctccgcttcgtcctcatcccggcaccggtgtcagctcaccatcacgtcctcgggcattacccctgtggacgcatgttgccactgcaacagcaatgccagtacagcggctcctccatgctttcaccaccgcagattgcttcaccaagtggtcaaaggcgagcctacctctctgtcagtcttgctccacagccagccatggacctggtcctggttgccagccctaacggaccacatctgaggctcttgaagcaggcaatggcgcttgttgtcttctccatgagggcaattgaccggttagccatcgtcacgaatgccaccactgcaacccgtgctttccccttgcgccggatgacgtcccatgcaaaaagaatggcgctgcaggttatcgaacacctttgctgtgttggtgggactgatccagtaggggctctacacaagggcctcaagatattggaggaccgggcgcatcggaacccgagcaactgcatccttcacttgtctgatcatccagtccgcaactgtgttggtggtgtggacatgaaccactccagcatcccagtccaccagttccatgtcgggctcgggttcggggtgcggagtggatttatcatgcatgagtttgaggagctcctcgcgcggttgcttggcggcgtgataggcgacacccagctgaggataggggagcatggcggaatggtcaggcttggagagctgaggggtggtgaggagcggaggataccgctcgaccttgcggcagattgggacatcatactcgttggttacagttacctggagggtggaagagaggagcagttgaggacaggtgagatcgccgttgggttcgaagagaaaggtgacaacgggtactgtggaatgagagagatggggctgagcattggcggcgagaggaggagctgctgcgccgagaggcgggactaccatgacccgttcatggcacggcgatgggcgaagcatttcaacgtgtacagggcctgagtagaagaacttgatcgtcagctgctgcaaaatatgagtcttgttggtttcttttctctcttttttccccattcctgcaagcatctaggtttggtgtctgtttttttggcttcttttgttgtggatctgaatccctgtaagatctctctctctctttctctttttgcatgaaatgtgtgggttctgtctgacaaaatctgcttgtgttgtgtgaatctgaacgtgaacagatcatactggagaaaaaaaaaagcagcaaaactagaaatattatttgattgagcttgcaaatttggaagccagggagtt

SEQ ID NO: 17881 - DNA, 1548 bp, Zea mays
  Clone ID: LIB3076-003-B12_FLI
gtttttgatctctcaaaagaggctccagataaggtattgcatcgtttatatgccaaccttgaaaggctgaagatggaaggagacattcttgcagttcaaatttggaggacactgaggctaattgttgcaggcggtgatggtacagctagctggctgcttggggtagtcagtgaccttaagctttcccacccacctccagtggcaactgtgcctctgggaaccggaaataacctccccttttcatttggatggggaaagaagaatccttctactgaccaagaggctgtaaaatcattcctcgggctagtaaagcatgcaaaagaaattaagattgatagttggcacatcattttgagaatgcgagttccagaggaaggtccatgtgatcctattgctccactagatttgcctcattcattgcatgcgttccatcgtgtctcaagtagtgattctctcaatatggaaggttaccacacattccgtggaggattttggaattactttagtatggggatggatgcagaagtgtcttatgcatttcattctgaaaggaagaagaatccagagaagttcaagaatcagctgacaaatcagggtacatacgctaagcttggacttaaacaaggatggttttgtgcttctcttagtcagccatcatcaaggaaccttgctcaaattgcaaaagtaaagatcatgaaaagagctggtagcctctgggaggaacttcgcattcatcacagcattcggtccatcgtgtgtctgaatttgcctagtttttctggaggtttgaatccttggggcacacctggcacgaggagagcagaagatagggagttcactgcaccttttgtcgacgatggacttcttgaggttgttggcttccgtgacgcctggcacgggctggtcctgctggcccctaatggacacggcactcgcattgcccaggcccataggatccgctttgaattccacaaaggcgcagcagaccacacgttcatgagggttgacggagagccatggaagcagccccttcccaaggacgatgacacggttgtggtggaaatctctcaccttgggcaggtcaccatgctagcaaatgagccgtgcaggtccaagagcgtcaacgaccagtcgtcactgtcgccggcgcacgacagtcatggtgatgacaaggatatcgttgaggaggatgaagacgagtgggaggacggcaggaggaagtttggggcggcagatacatttaagattcctgacgagattgacattgctcatttcagttgagctttgactagtgcatcgtcgtgtgcgttctgatcatacgagtatggtttggtttataaccatctcctttcttttgatttcatatatttgcgatatgattgttgcagccatgtgtaagtgaatcctaggtaaccaagtgctgcgttgctatatatgatcaatgtatgtatagattcagtggaacggtaaaaacacgcgaactctacggttttctccttttgttgttaccagttcaattgaacaatatagcgggtgtttggtttgggt

SEQ ID NO: 17882 - DNA, 523 bp, Zea mays
  Clone ID: LIB3076-003-E1_FLI
gcaaagcttcaaagcatctctgcttggattttagcgagcggcaacgacgagcgacccaatggggttcgtgctggtggtctctctgcccttcatcttcctctccatcctcctcggcttcggctgctacttcctcggcaagcacaggggccgggaggagatgcggaccggcgtcggcgcgcagatctacggcacgccgctgccgccgcccggcgtcgtcggagcctcctcgccgccgcctgagccgttccacagcaagaaacaatggtccgaggctgtgtgactgagattcagacgtctctccatccatccattctactactactacttatatgtcttggtggtgatgttggatttatattctttcttctttaatttcgccctggctgtcttgagagtgtagattgagagtcaaatatgtgcttgtgtggatgttgtgatacgattgcaatcacactttatatcttctgtaatcaagcaaaaaccaatgcgttgcagtagaatggcttgtgtgtgtgactcctgc

SEQ ID NO: 17883 - DNA, 592 bp, Zea mays
  Clone ID: LIB3076-004-A9_FLI
caacgtcgccacttcactcacgattggagtttcacctcggcagcccagccagccagtggttcctcggctcggaggaacaggcgaacagcaagagcttctgaagatgaaggcgatccccgtggctctcctgctcctcgtcctggttgctgccgcctcctcgttcaagcatctcgccgaggcagcagacggcggcgcggtgccggacggcgtgtgcgacggcaagtgccgcagccggtgctcgctgaagaaggccgggcggtgcatgggcctgtgcatgatgtgctgcggcaagtgccagggctgcgtgccgtcggggccgtacgccagcaaggacgagtgcccctgctacagggacatgaagtcccccaagaaccagcgccccaagtgcccctaggccctaccgctctaagggagggaggatgacccaggatttcgctcgcgatcctgcacagcttctagtcttgtactgctagtttagcgcgccgagcgtcggaatgtcgcgacggttccttccgtgcttgtgtgctgtgtttctcctcggacgtgctataacctagaataataaccaatgcactgtatctgtgtgcttgtc

SEQ ID NO: 17884 - DNA, 1186 bp, Zea mays
  Clone ID: LIB3076-004-H1_FLI
cgtgtgcgcggcgccactatgcgtgttgcctcttcccctgctgaagcggggaattctcgctccagcgtcgagtccaacctccggagctctaacgctgctcatgcgcggcgatctagtgctggcgtcacaagcaacggtgttcacaagattctgttccctgatggtcatcaaagtgacgatgaacctccaagtggggacatgcggtatggtacaggacgtttctacaaggagaatgggagtatagaagggagattggggaactgtgactccgactccaaccatcatacctttgatgaagcgagcgtgggcaagtttgagaatggagggactcattcaggtttggatctgtatggtgagtcgatggcgttacttcagtcggcacaagaagcgcttgagaatgagatccaaaagtttgtggaaatcaggaaagaaactgacgaagattccacagctcaccaaagtgaaatcgaatggagcagctcacctgtagaagaactaaatgagaagataaagatggtcgaattgaaactggaagaggccaccatgctcatcaatgagcgggattcagaaatacttgaactagatgcactcagccatgtacaaccacagaatacagtagcatgtaacaactatccgctgtccctacagtctgatgtagaccggctgttcctggagaagatggaagcagagattcagtgctttatccttacaagagcttctcaggactggaaactcctgacaatggattaatttgctcttaacgaggcacagaaatcccttctgtcggatcacaaatccctagaaactaaactgaggcacgccgagaacagggcgatgatgctggaggagatggtggataaactagagtcgcaatgcaaggcgctgtctgagacttcagaagttctgaagctgcaggccggagctagcagggcctctttgttctgctcgatccagtttgtgctgctgtgcatagccattgggaccctcctcgttcgcttcctgtcctcttctccggagattgtacctacttgaggttagagaattatgccagtcagcctttatgtaggcgttgttgaacggttgtttactgtaacttattagggcatcaatcgccttacagattttcgttttttgtaccatcaactcgattttgctagtaatttctttatgaatacgagtttactcc

SEQ ID NO: 17885 - DNA, 514 bp, Zea mays
  Clone ID: LIB3076-005-A7_FLI
gaagaagatgacaacggtgtcaaggcattagaggagggcgtgtcccctgagaaatcagccgctggcaaaccattagaagaagacccagtccatgagaagccagcggacgcagtagctgagccgtcatctcaggacgacactgccactgaaaagccctcagctacaactgacactgcagaaactgcatgagacatcagttagctggttaaagttagttagcaacagttttaaacggagtgtggatcgaatactattggtcatagttcggcgtggcttctgtttgttttttttttggtggggtgggggtggggtataatgcttgagttgtaaaatttgagggaaagaaactatagtattgatttggtttttttacaagcaataatcccctcctccacatgttaggaggaggataccattgaagttctatacataggatttgtgtgcggtttgattttttgtttggaagttgtactttgtaatcgattttgtgcaaatatgactgtgcttgctcatt

SEQ ID NO: 17886 - DNA, 307 bp, Zea mays
  Clone ID: LIB3076-006-B6_FLI
cttcgagtacatcaaaggcgtagtgttggatcctgtgccttttgacatcgagagggatttggtgactgcaacaatgaagaagaagagaaagaatatgctgaactattaccagtctgagattgacacaatatacaaaaagctggaggcgcagaagagtgctgccagagctaagtgaagagatgtgccctattcgaccatcagctgaaaacaagggaaacgacaccgttgtaaatttcacattaatattgcgaagtaacaactcagggctatgagtaaggaataaaatgtatattgtgcctttgtctat

SEQ ID NO: 17887 - DNA, 451 bp, Zea mays
  Clone ID: LIB3076-006-E9_FLI
gcgccggcggcgttgcctggcgagccccgcgctccctgtcgccgctccgccgtgccggcagcgccatcatcccggtcccggtgagcgagtgactagctagtaggctggccggcgtgcatggtgtgtccgagcatccgtcgacacgcggttctctcggctgcccgcgcgccgccggttgtagatatcgctaggcgcgtacgtacgtagcgagcgtgaccagtgttcttggggggtgttagtgagtgagcctgcccgtgctttgcgcctgcgcgcgcggacatgggatcggagcttggtagacgacgacggtatatagtaggtagcatcgccatgtgtacgtactgcgtggttcctggtacagtagcatagcatgctctgtttctgtatcctgctgtgctcttcttcttggtggtgtgtgtatgtatatataaatatatgtttacgatgagtt

SEQ ID NO: 17888 - DNA, 702 bp, Zea mays
  Clone ID: LIB3076-008-B9_FLI
ctcccggcttcctcacacggcactccagccgctagccctcactcaaccagacaaccagtacaccaccgccaccaagcccgggccgaataactctgccgggcaaccgccgcccttcgccggcaaagaacgcccaccagatccaccccggcctgctatggagtccgcggtgaacccgaaggcgtacccgctggctgatgcgcagctgacgatgggtatcctcgatatcatccagcaggccgccaactacaagcagctcaagaagggagcgaacgaagcgacgaaaaccctgaatagggggatatcggagttcgttgtgatggcggcggacacggagcctctcgagatcctgctccacctccccttgttagccgaggataagaacgtcccatatgtatttgttccatcgaaacaagctcttggccgtgcttgtggtgtgacaagacccgtcattgcttgctcagtgaccagcaatgagggtagccagctgaaacaacagatacagggtctcaaggactcgattgagaagcttctcatctgatttacctaagatctttcagtgtgatgggcctcggcgacacatttttcagaggcttggactggtgatggtgtcttgtttacattacgctttccaaactatatttgaacactgctaagtcaatcatatttgaattgtgcttcactttatatttgtgattgtcatgt

SEQ ID NO: 17889 - DNA, 1810 bp, Zea mays
  Clone ID: LIB3076-008-D12_FLI
tccggccagccttgctggtcccatctcttgccttaccaacgctagccgccggttcgcttacttggtgccgtcttttcgaccgatggatttcctccccttggactgcacggtgctttcgaatagcatctcggtaccttaccctgcttctgtcaacgcgggcttcaacggaactgcaagaggagccatcgcatttggcgagacaatgttagaatggagagttcctaacattaccgatgtctgccgagactgcgaagctgaaggaaggctctgtggatttagctccgagagtaggcaagcattctgtaagagtaagaatcacagttcacgtctcaaggtcattgcaggtacgtggtttcagtgcacttttgacctattgagtgttatttctatttcttaacaacaaaaccgcagcacgctctcatagtcgtttcatccacaaaagatctgaataatcgattgcaatctaataacagactgattttctcaaaccctgtctgttcagtaacgacgccagtagccgcagtcctggttctttcagcaatggcaggtgctgcattattacacctggccctgaaatctaaatacgacgacgagatacacaggaaagtggagatgttcctcgagacctacaggacgctgaaaccgagaaggtacacattctctgaagtcaggaagatgacaagacggttcagcagcagacttgggcaaggcgggtttgggagcgtgtacaaaggcgagctgccgaacggaggagtgcctgtgcctgtggcagtcaaaatgctggaggactcgacgggggaagaggagttcatcagcgaagtcgcaaccattggaaccatccaccacgccaacgtcgtccggcttctagggttctgctccgagaggtcaaggcgtgctctggtatacgagttcatgcctaacgcgtcgctggagaagtatatacgctgctcctcccaagaacagtcgttaataccaacggccagtaagatgctggaaatagcgacagggatcgcccgaggaatcgagtacctgcaccagggctgcgaccagcgcatcctccatttcgacatcaagccttccaacatcttgctagactacaacctgaacccgaagatctcggatttcgggctggcgaagctgtgcgcgagggaccagagcgtcgtcgcgctgaccgcagcgagaggcaccatgggctacattgcgccggagctatactctcggaacttcgggacagtgtcatgcaagtcggacgtttacagcttcggcatggtggtgctggagatggtggtggtgagtgcaaagaggaggaagtacagcccagcagagaccgaggaccagaacgacgacgtttgcgttccagagtggatatacgaggaaatagtcaccggacaagagcccagggaaatggcacgaggagagagagacatggtgaggaagctggctatcgtggctctctggtgcattcagtggaacccaccgaaccgcccgtccatgactacagtggtgaacatgctgacggatagcttgcagagccttaagataccccctaaaccatttgtttcatcctttgttggccagtaaccatgaagaaaaagctctagagaccacatggtgaccattcagatagatattcgtgtctatcacttgtcggcatatgcatgtatcagtgatgatgccctgtgtctgtcgtagttttgtgtcatacccttttttttcctccttgtaaccactagattgtatacattgcaattttctggtggtttaaccatgttcacgaatttctaatgacattattagcaggacgttacat

SEQ ID NO: 17890 - DNA, 1176 bp, Zea mays
  Clone ID: LIB3076-008-G7_FLI
cagctcggttgctgggacacgcgatcgagctacagcaaagaagactgcagggtggcgcggcgggcatggaggatctgtacagcatccacccggggatctcgcgccacggggcggcggcgactagcgaggcgtccggggtcgccggtggaccgggctcacccccgcccccgcccccgccggcggcggatctgacggagctggtcaaggcgcagatcgccgggcacccacgctacccgtccctcctctccgcctacatcgactgccgcaaggtgggcgcgccgtcggaggtggccacgctgctggaggagatcggccgggagaggtgcgccgccgcctccgccggcggggaggtcgtcggcatggaccccgagctcgacgagttcatggagacgtactgccggttgctggagcggtacaaggaggagctgtcgcggccgttggacgaggcggcgtccttcctcagcaacgtcaggacgcagctcagctccctctgcggcggcgccgcctcgctctccgatgaaatggtggagtcctctgaggacgagccatgctcaggcgacacagatgcgacgacagacccagggcaggagcacagctcgcgcctggccgaccgcgagctcaaggagatgctgctgaagaagtacagcggctgcctgagccggctgcggtccgagttcctgaagaagaggaagaaagggaagctgcccaaggacgctcggtcggcgctgatggactggtggaacacgcactaccgctggccgtaccctacggaggaggataaggtgaggctggcggccatgactgggctggacccgaagcagatcaacaactggttcatcaaccagcggaagcggcattggaagccgtcggaggacatgcggttcgcgctcatggagggcggcgtcgccggatcctcctccgggacgacgctctacttcgacacgggcaccatcgggccgtgatcacctctgatgacaagccgtttcgaattgagggcaaattgttggttgatacggagattagttacatgaagcaatatccgctgtcattttgtcggattcattgtgtatatgcatgggcgacaacgtgtattgtcgggtacacagtatgtagtggcatgtaaagacaccgtaacaatataacatgaattgtttaattgcctgttgcattttgatc

SEQ ID NO: 17891 - DNA, 993 bp, Zea mays
  Clone ID: LIB3076-020-C8_FLI
gagcggtacagcgagcagctgatggcgctggcgtgcaggctcctgggcgtgctctcggaggccatgggcctggacacggaggcgctggccagggcctgcgtggacatggaccagaaggtggtggtcaacttctacccgaggtgcccgcagccggacctcacgctggggctcaagcgccacaccgaccccggcaccatcacgctgctgctgcaggacctcgtcggcggcctccaggccacgcgcgacggcggccggacctggatcaccgtgcagcccgtggagggcgccttcgtcgtcaacctcggcgaccacggccacctcctgagcaacggcaggttcaagaacgcggaccaccaggcggtggtgaactcggagtgcagccgcctgtccatcgccacgttccagaacccggcgcccgacgcgacggtgtacccgctggccgtgcgcgacggggaggcgcccatactggaccatcccatcaccttcgccgagatgtaccgccgcaagatggcccgcgacatcgagctcgccaggctcaagaagcaggtcaaggccgacaagagtgccaacaaggagttcgccgactccaagcctctcgacgccattcttgcctgatatggtagggggggcgcgactaccgtaccgatccgttgctattgctgcgtgtgatttcatcatctataagaacatatatagctacgtgcgaccgtgtggtgattaattaaggtctgaataaaataatagccgcacaaaactaggaagcgatcgatcaccccagataaatgtatgtgcgttcccttttctttcaagatgtgtaattttttcaacgtgcggttccagatatgcatggactggaccggagtgcattgtaattcttttgtttcccctgttgaatatgcaagaggtgtgcatgtctttgtatgaacgaacgaactagacacacttgtatctgctcccttcgttcaataaatatacgacgccgccgttgatttt

SEQ ID NO: 17892 - DNA, 475 bp, Zea mays
  Clone ID: LIB3076-022-A10_FLI
atctgtgcctgacaatgccttgcctgaatcccaccacactgattgtcggtgcgctgactcatctgaatcaggaacagaagaagatgtggagattgatgatgagaagaaatctgagactgctatgacaaatgaatgagcgttatgggcttggaatgataggatggcggatcagattcttttgctggtgagcaatgccactcaagcaggggcgccgtacaattttaacagcgctgctttgctattgaggagtctggttgttactgcatactcgggcacgcacgctcttttatcatctcacctcatcaccatcatcccacatggaccaatgtcgtctggcggctcctgattttggtctcttcgaactgtaatatctgcagtgagttttttccatcagtttttattttttttttccgggtttctgcatctgtaatagctatttcttcaagcgcaaaacatgtcttctctttgttgctat

SEQ ID NO: 17893 - DNA, 1304 bp, Zea mays
  Clone ID: LIB3076-022-B9_FLI
cactatccaagattccttttacttcaatgtgctcccatttgctgaggacatcagagagtttcagtttcggtccttcagcagcctgccatcatcatctcagcccactgaagaacaacaagaagctgcagataacctagtgaagatgttagacctagcaccacctggaagagaggtcctcaagcctgagtttacgccaaatcccatcttggagagattttacagttaccttgatctcaagtcaaagcagccagatgcaaatgtcccaccgcttgaaagatctctaaggaggataaccgaacctgatcctgatgtggttggccacaaacacaattaatccagaatttaagcaaagcttttgtgctgaaggagaaccccaagaaaaagaaagcacgaacacaggaattgttggcatatactggtgcaggtgatcaagctaaatctgtagaggacagagttctggaaaatacacatccttcaacagagaatgttgtggcaatcagagattcaaatccagttcaagattttgaggccatgctggctaagagatctagctcaacatggactcagaaggctattggagatatgcagaattacatagcagctttgttacagaactccagtgatgggggcaactatcaaaaagcacttgaatgttttgcttctctgcggaaggcctgtattattgaacaggaaccacaggaattcaaccagttcctaacgaacatttacgagagattgaaggaaggtgatgctgccaagttctttcaacttctctcctcaaaaaacatttcacttatcaacaaagaggaagcgcctgacagtgatgtgactgaagagatggcaagaagtttctacctgaaacgagaaaaggcgtctcagtaggagctggaagaagccggtaactcgaagcgccttgggtttggagatcatcggaggactggattgtgaaactgggtatctgcatgttttgaaactgggtatctgggtggaactggaactaatactcaaactctctgggttgagtcactgttttgctgcacaatctgctgcctactacgtttcgactagattcagctttgggtactactgtatgttgtttgactggagtagcatgtccatagatcacatacttctgcagtgttcattcgagtgaatgcattcatgcggtgaaatgcagcatggataggtctaggaagaaacattaccatcatttcctaatgttggagcgctgcctagaaaaggatctttttctgtaagtggtctggtgcgtcaaaccctccaaagcccaaaataatcctttcaac

SEQ ID NO: 17894 - DNA, 1474 bp, Zea mays
  Clone ID: LIB3076-022-F9_FLI
agagagagagagagagagacggccccgcagcggcggaggcggagatgggggcgtcggatctagaccggcagatcgagcagctgaagcggtgcgagccgctcacggaggcggaggtcaaggcactgtgcctcaaggccatggagatcctcatcgaggagagtaacgtgcagcgcgtcgacgcccccgtcaccatttgtggagacatacatggacagttctatgacatgaaggagctgttcaaagttggaggtgactgcccaaagacaaactatttgttccttggggattttgttgaccgaggattttattctgttgaaacttttttgcttcttttggctttaaaggttaggtatccagaccgtattaccttaatacgaggaaaccatgagagcagacagatcacacaggtttatggattctatgatgagtgccttcgcaaatatggctcagtcaatgtctggagatattgcactgatatattcgactatttaagtttgtctgcacttattgagaacaaaatatttagtgtccatggaggcctttctcctgctatcacgacactggatcagataagagtaatagaccgcaagcaagaagtacctcatgatggggctatgtgtgaccttctatggtctgatccagaggacactgtagatggttggggactaagtcctcggggtgcaggattcctctttggtggaaatgtggtctcatcatttaaccattcaaacaacatagattacatttgtcgtgcacatcaacttgtcatggaagggtataaatggatgttcaatagcaagattgtaactgtatggtctgctcctaattactgctacaggtgtggcaatattgctgcaatcctagagctggatgagaacctgaataagcagttccgcgtatttgaagctgctccacatgaatcaagaggtgttcctgctaagaggccagcaccagattactttctgtgatgctacacagcgaacgcttgagcttactgtgctttcaagcgctggacctcatgttgcaagaagagctcaggccctacagctttccagccaggaggtggttttcaggatgtgtaaattgagtgtcatcttctcccttcaggtccatgatttgtaagagagttggattttggcatccagttttttcacagaacatcacccatttgagctggagaaatacgcccttgcgaaggggtttcatgtgatgtgctaaaagtacacgttgtaagatttttttgcgattgcataccccctagaaaaaccgttcctggaatatgtggcaatcaggaaatgtgtcgatgctctggaaagtgtaggagatttttgtagtagtcatttgcgcgtgctgttagggactagggagcatgtggtcaggggacactagcactagcttgtcggcatgcaatggtgtattgtaactgtctttatgcagcatctctaattcaaatagctaactacatttgatgtct

SEQ ID NO: 17895 - DNA, 491 bp, Zea mays
  Clone ID: LIB3078-033-D12_FLI
ggccggagatccatgcctttgtgagctcgagtggagagaaaaaaaaaaggagcagcgaagagcgaacgaccgagatgctggagaagctgtgggacgacgtggtggccgggcctcgcccggagacgggcctcgagaagctccgcaaggccaccaccgcccgcccgctcgtcgtcgtcgacaaagaaataactacatgcatcttctcatctgctggattgagtacatagaacacttgtgcaacacattcggcgagaacacgggtcatctttatattctactttctttaagtataccagtgtgagtaccagtgtggtccgtagttattcattatcgcccccacgggatgttgtacccattgacacttaaataaagggtattttcatgcttgggccataatcaagttctcatattttttctatgaatccaaaatatgtggtcttctgtccctgtatgtcaaaagcatcgatacgaacaccgctattttgtgcaac

SEQ ID NO: 17896 - DNA, 1273 bp, Zea mays
  Clone ID: LIB3078-033-D2_FLI
gggcgacttcaaatcgatccccttgatcgatatcggcccgcttgtcgaaaagattgatgatccaagcatggccaacgataaggatttactgcaggttgtccggttactggatgatgcttgcaaggaggccggattcttctatgtgaaaggccatggtattgatgagtcactgatgagggaagtcaggaatgtaacccgtgaattctttcagcttccttatgaggaaaaattaaaaattaagatgacacctcaaagtggatatagagggtatcaaaggataggggaaaatattaccaagggtaagcctgatatgcatgaagcaatcgattgttatactcctattagacctggcaaatatggagatctcgctaaaccaatggaaggatctaacttatgacatttcaagaaagataatgcgaggtatagccttggctttgggaggggcaattgatgcttttgaaggggatacagctggagatcctttctgggtgttaaggttgattggttatcccgtagatattccagaagagcagcgcactgatactggctgtggagctcatacagattatggacttctaacactggttaaccaggatgatgacatatgtgcccttgaggggggcacaactcttcggtgatgtgctgggagctgcagaattctgtggctcgggaggggagcgcggcgtcccccccaaccatgatggaagtggatggctctgacaagaggaccaacactgctgttcctgaaccatctttgcttccttctgagcttgtgcagcattttgatcaaccactgtccaaaggaaagattaaggccatcaagaccttgctggaaaatgggaagcagttgaagaagaaggtcaggggctccaaagtcgcgccggctgttctggcatgcccaactgcgctggtctaatggtggagctggctctttagggtcgtcatcctgtttttatccatgttaccgtttgctggagtgttgacaatggtagtgtgtcagggtctgttcccttttggtggttcaaaaatcaggccttcctacaagtgtgtggaacgtagtaaggtgtcagctatgggggagcaaaatcagtttctcccacccttgttgtcttgtttctgcccctggctttgtacttggtcttctgcggccagcctcatgggaattgagtcagtctatttggccttgttgatgttgcaacgattatctagtagtcaatttttctttaatgtcacaatcaaattgtaatgtgctatgctggaatgtgagaggtct

SEQ ID NO: 17897 - DNA, 680 bp, Zea mays
  Clone ID: LIB3078-033-D5_FLI
gcaactgtattgctgatgagcattatttgccaaccctcttcaatatggttgaccctggtggaatagctaactggtcagtgactcatgttgattggtccgagggaaaatggcatccaaggtcatatagagctgcagatgttacatatcaactcttaaagaacataacgtctgtcaatgagaatgttcacattacaagtgatgataaaaaagttgtgacacagaccccatgtatgtggaatggaacaaaaagaccctgctatctttttgctagaaagttttacccagaatctttgaacaacctgctgaagctattctccagttacacatcggcttgagttctacatgattcttttggcattttgcctaggagattcctctaggatttatctttttgtgcttcatgtaaattgtggaattgatacttagaggcttaacagagttacagatccagggccttgatgtaattctgagtcccttggtagggctgaggtgatgtttgtttattattgacgctgccctccctgtcattcgtggtgctctctgtatgactatgtttcttttagcccttcacttttttctcttctcttttattcttagattcctagctcccatattctgagtaacaggggttttgtcagttcttactgttattataagattatttttttgtagacacgaag

SEQ ID NO: 17898 - DNA, 1202 bp, Zea mays
  Clone ID: LIB3078-033-H8_FLI
gagaaagatgaatttagcaggctgttgaaagcaaaaatcaatgagcttggcatgtcggacaggatcgagtgtacaccaaatgattcaccttcaggaaaattgactgtgcctgtgctgcaagagctcatttctgcccttgcaactgacatgagcacttcaatctcccaatgtagcaactactctggtgcatcagcacccttacgctgcaatggaaatgttgactgcatcaatccagcgcattgtatattctccaatgagcaatcacctgattttcagaaatgctatcagggtgaacaagatgttgattcttctgctacatcgctaaacaatgagcccaatcagccaagtccaacatcagtccttgaagcatctttctcaaatgatacttctttaggaagtccagttgaaaagaatgaaggaaaagacttcattgtgtcaattgagaacaagatggaagatctctttaatttggagtctgacatcgtcgatttagcaatgtcaattgacacaaggaaaactgatgctgaagaagcacaccatggcaatgacaagttatcatgtttacagaattttcttgcacatgatttcaatatcttggaatctaggctctgcagcattagagaagctatttcaaatgctgaactgcttctgggcattagcctcttgcatagcacaacatcaggtcttccactccatcctttcattgttgaaacgctagaaaatactatggatatgtttagtggaggagagtactcagattttactgaagataagaagtatcaacataccaacttcctgtttgactgcattatagagtcactggattcaaaattctgcaatcttggcaaatgtggatacaaggcttggctgaagttgcctcacagtttgagcaaagatctgttgaagcgccagctattggaaaacatcagcaactggagggagtcaagtgggactgctcttagacaagtttctgacaaagaagtggaccaagtgactgacaggtgggatgcaaaccttgaagcatttgatataagcattgcaatcgagaacgacattcttgaggcgcttgtcggtgagttcgcagttgacctatggtgaaacggcgtattgactgccctatatgtatatgagatattgacatgtttggacttctgctcgcatgattctggataaataagatactgcggatatgtttgtttttc

SEQ ID NO: 17899 - DNA, 885 bp, Zea mays
  Clone ID: LIB3078-034-B6_FLI
aaagctgatgcagaagcgaaggcgaaaaaactaaaatcaagaaagcataggaggagaggagattcttcctcggactctgacagtgactatgacagcgatgttgatcggaaacaccggaggaggaaggatcgtagaaggaacaagaagcatgagcattctgactctgatgatgccaggagacgcaagcataggtccagaaagggctcagactcaagtgatgagagcaaccgtgaatatgaaagcgggtctgaagaagaacgtacaaagaagaagcgttcgcacagaagaaagcatcacagacactcttcaatgtcagactctgaagacaacagtgatgaggatgagcggagatctgccaaggaccattctcagccccgcagacgccaccatcagtcttctgatgatggctcggacaaggtcaggttgagacatgggaagcgtctgagatcaagtgacgagaatgctcggccagattccaacagccataagcatctcaggagccaatccttggaggagtcatcagatgatagagatgatgatggaccagagaagataagaaatggcaaaaggtatcacaagaatcatcaccgtcaccaccaccatcatcgtcaccatcggcaccaccatgaaagacataataactcagcagaacctaatgacaggaggcaagtactgaaagatgaccagagggcccttgaaggtagcagtgcagactgaaggtatccaccagaggacggaaagattgattcttcattcgtgatgttcccagttatttgttgtgctgataacatttctttgatttgggctatgaaacgttagaagatactgtggccattctaccaattatgttggttttgagaatttgataatactgagttaacaatg

SEQ ID NO: 17900 - DNA, 1140 bp, Zea mays
  Clone ID: LIB3078-034-D10_FLI
caggacgatatgctgaacgcaaaggagctggtccaatgggagaatggcttgtcattcaatgacatagcggctaggcaggggattcgcatccgcagacactgccgccccactgcctccttgaaggagatagaggaggagctgggagccccccttaacatcctagagaagatcatttgggacaaggagattgaagtagctgaggggcatgctaagaagcctcttgaggaggtgattcaggctgcaacgaaagcccctccttcaagagacttctatggcgctttagaagctgcctacaagcgtaatggggtgcctgcattgattgctgaggtcaagaaagcatccccgagtaggggtgtgctcagggagaactttaatcctgttgaaattgctcaagcttatgaaaagaatggagctgcatgtttgagcattttgacagatgagaagtactttcagggaagctttgataatcttgaaaaggtgcgcagctcaggagtgaagtgccctcttctctgcaaggagtttgtcattgacaagtggcaaatctataatgctcgctctaagggtgctgatgcaattttactaattgctgctgtgctaccagatcttgacataaggaaatttcttcagatttgcgaagagttgggaatgacagctcttattgaggttcatgatgaaagagagatggaacgtgtgctgaagataaatggagttaagcttattggtatcaataaccgaagccttgagacatttgttgttgatacttcgaacaccaagatgttgctcgagaagcatggggatagcatcagggagaagggaattttggttgttggtgaatcaggtctgtttactccggatgatgttgcttatgttcagaatgctggcgtttctgctgttttggttggggaatccctggtgaagcaagagtgccctgggcgagccattgttgggttatttggcaaagaacttctgcactgaatgagaggacaaagattgtagtagtacatggtttggtggtgaggtgttagtgctaggctgctagctgttagccatagcatcatttgcagtaatagcattggttttattaataataccaccgaatgtgacatgcagaataaaaataatgttcaataagttccattc

SEQ ID NO: 17901 - DNA, 891 bp, Zea mays
  Clone ID: LIB3078-045-C1_FLI
gatccggcctggacctggagcgctggacagcagcagcagcagcatcgagctcgaggccgctccgccaccccgcactcgcctgtcgcctcttctcgctttcgccaccggggcagcgatccgccatggctggacctgctgttctcaatgagcgtatcctttcttccatgtcccagaaacatgttgctgctcacccatggcatgatttggagataggaccaggggctcctgaattcttcaattgtgtggttgagattcctagaggcagcaaggttaagtacgagttggacaaggcatctggtctgatcaaggtggaccgtgttctttattcctctgttgtttacccacataactatggcttcattccacgcacactctgtgaggataacgaccccctggatgtcctcatactgatgcaggaacaagttgtccctgggtgtttcctgcgagctcgtgctattgggctcatgcctatgatcgatcagggcgagaaagatgataagattatagcagtctgtgctgatgaccctgaattccgtcactacacggacatcacggacctcccaccgcatcgccttcaagagatccgccgcttttttgaagattataaaaagaacgaaaacaaggaggtcgcagtgaatgagttcctgccagcgaaagatgccatcaacgcaatcaagtactcgatggacctgtatggctcatacgtcatcgaaagcctgaggaagtgatctccagctgcttgattgtggttgtggatgctacaccattttctcaacagctcatccagagtaccgtagtacagacttaacacgaacgaactgtaatcgtgaccaagggatattattaccttctgttcatgttgaaacaatcagcagtgcctttctttccatt

SEQ ID NO: 17902 - DNA, 318 bp, Zea mays
  Clone ID: LIB3078-045-D1_FLI
gtccatggaagtgatagtcctgataatggcaagcgtgaaattgaactgtggttcaaagaaggcgagctctgccaaaatgggaatcagttcaagcaccgtggcttatagaataactcttgctaatcatttccagagttgtattcaatgtttttttttgtgttcgtcttgattcaaggagccatgcaagagtgtatgagtttagttcggctaagtaattagctcatgagggcttgaattatcggttctttttgaggattgaggatttgtgcaactgaaacctttgatcagttgctcatgttgagaagctaatttcttgtc

SEQ ID NO: 17903 - DNA, 780 bp, Zea mays
  Clone ID: LIB3078-045-G2_FLI
ttccgagtcgtcgcatcaggtccgatcccctcgattcgccggcggcgccaccaaccagcaagctgccagagttccagatcggtcttggaacaattgttgtccagtctagtaatcttctttcacctcaggaggcacaacttgatggcaatgtagtcacagatttgccaagtgatcctatattgcacaacatgagaactcgaagggttcaagctgccagcatgggcatatcagaatcaagacaaaagcaagtctaccttatttcactgataaacaaaggcagagttgtggccaaagggaagttagtgactacagatagccaaagagaaatattaggagcaaagcttggaccaaaatattgtggggttcttgttgaaggccttgaaaatattgaacttggcaatattatagatgaggaggtacctagaccatctaatcagattcgtacactaattgatgctattggctatgttattccttggccaattacacatgtgaagcaagctagaagctcatcttgtacccgcaacaagttagtacctgcagcacgtggacaaagctagatggcgtggacaaagctagatggaagtctagtataattgcaaagtgaatcagttagattatagtagttactaaaatttttaagtgatatttgtatgatattgccactttggctttgcttctttgtgaacacaattggcagttactgaacatgtttgctatcgagttagttagcttcttgatattttgccaaggccaaaagcaatattattgagggtttat

SEQ ID NO: 17904 - DNA, 853 bp, Zea mays
  Clone ID: LIB3078-045-G4_FLI
gttccccttccccctcttcgtctccgtcggcggcgtcggaccgaacccgagcccggagccctaactaaccctaggaggcaggcggcggcggggatggtgtactacgcgctgttggtgggcgcggagctggatggcctcaccaacctgcagccccgccacggctgcgacgaccccaacttcccctactacctcaagctcaagtgcgagaactgcggggaggtcaccgccaagtccacctacgtcaccctcagcgagcaagtcgacctgcccaaaggacacggcgccgctcacctcgtccagaagtgcaagctttgtgggagagatggaacaattgtgatgattcctggtcaggggacaccacttactattgagcagagccagaaagaggagaagacttgtttgatggtgtttgactgcagaggctatgaacctgttgagttttcctttggcactggctggaaggctgaatctgtgcatgggactccttttgaaattgactgctctgaaggtgaattttctgagtatgatgagaagggagaatgccccgttgagctaggcaagctgcagtcaacattcaaagtggtgaagaagcatgagaggggtgggaagactagatttgtctagatcgagtgacttggaatctgacagatattggagttggcggtgtataaatggtagatttgggctgaaggtcatgcgtgatccgacctcctttttcttctatctgttgattctgtggatgccgtgaaccatgcgaagctttcggtgatagtgtccacaggagcattaccctgtaccgaaactcatctttataacttaccaccaatgctcgaacatgttgctggttgctggt

SEQ ID NO: 17905 - DNA, 1831 bp, Zea mays
  Clone ID: LIB3078-046-C10_FLI
ctcatttcgccctccctccgccggctagggttactgccaccgccttccacccctccccgactgcccgtgggtggaggaggctggttggcgtgcagggtacctcggcggcggagatggagccggacttctcgaccgtgggcgggcccagctttgagttcgctttcaacgaggccaacttctccgaccgggaattgcggatcgaggtcgtcgcgggggattacgacgcgccggggtccactggcggcggttccggaggaggtggcctcgccgactgggcgcgccatcggaagcgccgacgcgaggagctcttcaaggagaaagaatctacaacctacatgtcagaccaaactaattttaatgaagtcgaagcagaagagtgtgatgcatatgaagaaaatcaagaggaacctgtagcaatgatggaaggatctccacctgatgttgatcaagatggtgatgatgagcaaggtattgatccatcttgggctgctgtggttacgccggttttacgagtcaagacaatttatatcagttcggcgattcttgctgcgaagagtcctttctttttcaagcttttctcaaacggcatgaaagaatcggaccagagacatgcaacccttagaattactgactcagaggaaattgccctcatggagcttttaagctttatgtatagtggaaagttgacaactactgagcccactcttcttctggatatcttgatggctgccgacaaatttgaggttgtttcatgcatgaggtactgcagccagttgctcacaagcttgcagatgaccacagaatctgcacttctctacctagatctcccttgctcagtttcaatggcagctgcagttcaacctctgacagatgcagctaaggattttctcgctgtaaagtacaaggatttgattaagttccaagatgaagtgatgaacatccctcgtgctggaatcgaagccatcttgtcaagtaatgacctccaggtggcatctgaagataccatctatgacttcttactcagatgggcccgtgcacaatacccgaaatcagaagagagacgtgaggtccttagttctcggctgctccctcttgtgcgattcagtcatatgacgtgtaggaagctgcggaaggtcctagcctgcacagatatagaccacgagcaagcaaccaagtgtgtcaccgaggctcttctgttcaaagctgatgcaccacaccggcaacgagctcttgcagcggacgcaataacctgccggaaattcgccgagcgggcttacaagtacagaccactcaaagttgttgagtttgatcggccctacccacagtgcatagcatacttggatctcaagcgcgacgagtgctctcgactctttcctgcagggcggatatactcgcaagcgttccaccttgcagggcagggtttcttcctctcggctcactgtaacatggagcagcaaagcgcgttctactgcttcgggctcttcctggggatgcaagagaagggctccacgagtgtgacagtggactacgagttcgctgcaaggacgagaccatccggcgagtttgtgagcaagtacaagggtaactacacattcaccggtggaaaggctgttggatacaggaatctctttgcaatcccatggcagaagttcttggccgatgacagcctcttcttcgtggatgggatgctgcatctgagagccgagcttacgataaagcaaccctagagcaatggtctctgtatagtggtagttgttacgacagatgaaaaagatatcggatgggaaacctcacgagttccagttcgctgcaagtttccagatttgccggt

SEQ ID NO: 17906 - DNA, 1086 bp, Zea mays
  Clone ID: LIB3079-002-H7_FLI
ctgtggaatcgctggtaagcctagacaagtggtcgatgacatcgacaagctggacgtcaacaatgagctcgcggtggtggaatacattgaggacatctacacgttctacaagattgctcagcacgagagacggccatgtgactacatcgacgcccaactcgagatcaactctaagatgagggctatcctggctgattggataatcgaagtacaccacaagtttgaactgatgcccgaaactctctacctgaccatgtacatcatcgatcagtacctctcgctgcaaccagtcctgcgtaaggagctgcagcttgtcggcgtttcatctatgctgatcgcctgcaagtacgaggagatttgggccccagaggtgaacgacttcatcctcatatcagacagtgcatacagtagagaacagattctttcgatggagaagggaattctgaataggctggagtggaacctgactgtccctacagtgtatatgttccttgtccgttttctgaaggccgcaacattgggcggcaaagttgagaaagagatggagaatatggtgttcttcttcgctgaattggcgctgatgcaatacgatttggtgacgcgcctgccatcgctggtcgctgcttctgctgtctacgcagccagactcactctcaagagggctcccctttggaccgacaccctcaagcaccacacgggcttcagggagtcagaggcagagctcattgaatgcacgaagatgctggtgatcgcgcactcgactgcccctgagagcaagctgagggttgtatacaagaagtattccagcgagcagttcggaggggtcgcgctgcgtccacccgcagaggagatctgcaagtgaacgaaggctactttatccgtgtttgcctattgcttgctttaggggaagtggcgatggaaggcgagtctgacattcgctaggcttttttatgtttgcttgtttcagacagccgtttgtttgctaggctgttctcagagtcggttgttatctgacttgtgatggcaactataattctatctagtacaacatttttattcataaatgtgaatggtgttttacaaggt

SEQ ID NO: 17907 - DNA, 248 bp, Zea mays
  Clone ID: LIB3079-003-A2_FLI
cggcacactgcaggaacggcaagggaatgatagctagcgctcttaattgatcagctgatcagatgatctgccgccacgcacacgtcgtcttgtatgggctggctgctacaatgcaaccggtagatctccctgcttagtttcttgagatcgagggctccagttcttgctttgcattctgcaaccgttgtccaaatgtccacaatctttgccttccgtcaaattttaatacatggtcggaacattgaggc

SEQ ID NO: 17908 - DNA, 699 bp, Zea mays
  Clone ID: LIB3079-003-B1_FLI
ccttgatgggactattcgagcatgggatttgtttcgctatcgcaacttcaggacatttaccaccccttcacctaggcagtttgtttctttaaccgcagaccagagtggagaagtcatatgtgctggaacacttgattcgtttgagatatttgtttggtcaatgaaaactggtcgattgttggatgtactcagtggtcatgaaggaccagtgcatggtctaatgttttcaccaattaatgctattctggcttcatcatcatgggacaaaactgttcgcctctgggatgtctttgagagcaagggtgcagtggaaacttttcagcactcacacgatgttcttactttagcttatcgacctgatggaaggcagatagcatgcagtactttagatggcctaattcatttctgggatccatctgatggtttgttgatgtataccattgagggacgcagggatattgctgggggtcgcctcatgacagataggagatctgcagctaatacaagtataggaaagtacttcacaacattgtgctattctgctgatggaagttctattttagctggaggaaacaccaaatatatttgcatgtatgatgttggagaacaggtcagtaaatctttcttggcacgattgtatttgtacattgaagcatagttttaccaacagctatgagtgtgtcttcactctacagtttt

SEQ ID NO: 17909 - DNA, 1294 bp, Zea mays
  Clone ID: LIB3079-005-H10_FLI
tcgcgcgccgctgcgttgagccaaggcgcaatggcaacctccacctcagttcccgtcctcctgctcctcgccgccgccgccggcctcctcctgctccccggctcgctggcgtggcagagcagcaactgtgcaccgggcgcgcccggcagtggctcgccgacgtggccttcacccggctccggctccggcggcggccacagcaagccgcccaagcaccaccatggcaagccgcccaagtgcccgccgtgcaaccctccgtacgtgcctccgacgcctcggccgtcaccgccgtacgtgccaccgtatgtcccgccgacgcctcggccgtcaccgccctacgtgccaccatacgtccccgtcccgccgacgcctcggccctcaccgccgtacgtgccaccatacgtccccgtccccccgacgcctcggccctcaccgccctacgtgccaccatacgtccccgtcccgccgacgcctcggccgtcaccgccgtacgtacccccgacgccacggccgccgactccgccctacgttccaccgacgccgccctacgtcccaccgacgcctcggccatcaccaccaccgtacgtgccaccctacgtccccccgacgcctcggccatcaccaccctacgtgccaccgtacgttccgccgacgccgccggcggtgcggacgtgcccgatcgacacgctgaagctgaacgcgtgcgtggacgtgctgagcgggctgatccacctggtgatcgggcaggaggccaggtccaagtgctgcccgctggtgcagggggtggcggacctggacgcggcgctgtgcctctgcaccaccatccgcgcgcgcctgctcaacatcaacatctacctccccatcgcgctcaacctgctcatcacctgcggcaagcacgcgccgtcgggcttccagtgcccgccgctctacgactgatgaacaccaccaccagccaacacttctatacgcgccgccatgcatgcatgatgtgatggcatcctgtgcaagctagcgctagctagtagtagcatgtctaccatttgctccgtgatttctctagttcttgctctcgcgagtatgcgtacgtaatgcgttgcttctcgtcaggactcgggaacttttccaactccgatgctaagcgtgtagcttgcttaatcagtcgatgtaccatgttaatcaagtgctagccctttctctgctctgtcgtcgaagttcttcggtcttcacttcttgatctgcagatgatatatgaaaacgttatacgaaatggaatataatattctatcttgttgac

SEQ ID NO: 17910 - DNA, 653 bp, Zea mays
  Clone ID: LIB3079-015-G4_FLI
ggcaggagggcacaggaaggaggagatggcgtcaaagaggattcagaaggagctcaaggatctgcagaaggaccctcccacctcgtgcagtgcaggtcctgttggtgaagacatgttccactggcaggcaacaataatgggtccatctgatagcccatattctggtggagttttcctagttacaatccattttcctcctgattatcctttcaaaccaccaaaggtggcatttcgcactaaggtgttccatccaaacatcaacagcaacgggagcatttgcctcgacatcttgaaggaccagtggagtccggcactaaccatctccaaggtgctgctgtccatctgttccctgctgactgatccgaaccccgacgaccctttggtccccgagatagctcacatgtacaagacggaccggcacaagtacgagaacaccgcgaggacctggacccagaggtatgccatgtagtattttctctacctggcctttggggtcgctgctgcgttgtgttgccgggacctggacgtgcctccatgtattcgttctatccttcctgtataatgatgaaccgaattgggtttgcagtacagtgccgcgtgtggtgctgaatgctgctgtattgtgtcacttggaagctgtaattctcagtgtc

SEQ ID NO: 17911 - DNA, 2263 bp, Zea mays
  Clone ID: LIB3079-015-H1_FLI
ccaaaatccaaatcaccacatccccccattaatttaaggggtttttatgtccaccgccgccgccagcgccaactaaacccgcgacgacggtcgaccatggcgtcctcgctgctctcctcccccgctaaacccaccatcaccaccaccaccaaaacgaccccggccccaagacccgcccgctccgcccatgtccatgtcctctccgccgcccgctgcctccgcctccgcctccgcgcgtcgtcgcagcatcctccgcctccgcccaccccgcggtcgcggcggccggattacgtcccgaaccgcatcgacgaccccaactacgtgcgcatcttcgacaccacgctgcgcgacggggagcagtcgccgggcgccaccatgacgagcgcccagaagctcgtcgtcgcgcgccagctggcccgcctcggcgtcgacatcatcgaggccgggttcccggcctcctcccccgacgacctcgacgccgtgcgctccatcgccatcgaggtcggcaacccggcgccaggacccgccggggaggaggacgccgtccacgtgccggtcatctgcggcctctcgcggtgcaaccggaaggacatcgacgccgcgtgggaggccgtgcgccacgcgcgccgcccccggatccacaccttcatcgccaccagcgacattcacatgcagcataagctcaggaagacgcccgaccaggtggtcgccattgccagggagatggtggcctacgcccgcagcctcggatgcactgacgtcgagttcagccccgaggacgccggcaggtcaaatagagagttcttgtatcatattctaggggaagtcataaaagctggagctacgactctcaatatcccggacactgtcggatacaatcttccttatgaatttggaaagttgattgctgatataaaggcaaacactcctggaattgaaaaggctatcatttccactcattgtcagaatgaccttggtcttgcgactgccaacacactagcgggcgctcgtgcaggagcacggcagttagaggttactattaatggtattggtgaaagggctggaaatgcttctttggaggaggttgtcatggcaattaaatgccgcagagaactgttagatggtctctatactggaatcgattcccgacatatcactttgacgagcaaaatggtgcaagagcatagtggacttcacgtgcagccacataaagctattgttggtgccaatgcgttcgctcatgaaagtggaattcatcaggatgggatgcttaaatataaaggaacatacgaaattatatcgcctgatgatattggtctaacacgtgcaaatgaatttggtattgttcttgggaaactcagcggaaggcatgctgtgagatctaagctagtagagcttggatatgaaatcggtgacaaggaatttgaggacttctttaaacgctacaaagaggttgcagagaagaaaaagcgcgtaactgatgaagacttagaagcgttattgtcagatgagatattccagcctaaggttatttggtcccttgctgatgtacaggcaacatgtggtacacttgctttatctacggcaacagtgaaattggtagcaccagatggagaggagaaaatagcatgttcagtcggaacaggtccagtcgatgcagcttacaaggctgttgacaaaataatccagattccaacggttctccgagaatacagtatgacatcagtcacagaaggcattgacgcaatcgcgacaactcgggttgttgtcactggagatgtgagcaacaacgccaaacatgccctgactggccagtccttcaaccgctccttcagcgggagcggggcatccatggacattgtggtgtccagtgtcagagcttacctgagcgccctgaacaagatctgcagtttcgctggcgccgtgaaagccagcagcgatgtagctgagaccgcaagcgtcccgagcacagaatgagcttccgtttagttcacagtgacatgttcaaaatttctggaaggatcttccattgagcttaggacaggcaggaagtcttggggcctatgtagtgtacaatttatgtgtgtcatatcccgtgctcgttgccagtttgtattgtaccatatataaaccatagaatatgttgccatttagaagtctggccaaggtcagctgtaatgattcacatgcttatagcctggaaacattagacattgaaaacccgagcggtgaataaaggatgcccaaggtagaaactgtgatg

SEQ ID NO: 17912 - DNA, 932 bp, Zea mays
  Clone ID: LIB3079-031-D8_FLI
gcaccctccacttggtgctgcgtctcaggggtggcatgcagatcttcgtgaagactcttactggcaagacgatcacccttgaggtggagtcctcagacaccattgacaacgtcaaggccaagatccaggacaaggagggcattccaccggaccagcagcggctgatcttcgccggcaagcagctggaggatggtcgcaccttggctgactacaacatccagaaggagagcaccctccacttggtgctccgcctcaggggtggcatgcagatctttgtgaagacattgactggcaagaccatcaccttggaggtggagtcgtctgacacaatcgataatgtcaaagccaagatccaggacaaggagggcattccaccggaccagcagcgcctgatctttgctggcaagcagctggaggatggccgtaccctcgccgactacaacatccagaaggagagcaccctccacctggtgctccgcttgcgaggtggtatgcagatctttgtgaagaccttgactggcaagaccataaccctggaggttgagagctccgacaccatcgacaacgtgaaggcgaagatccaggacaaagagggcatccccccagaccagcagcgtctgatcttcgccggcaagcagctggaggatggccgcaccctagcagactacaacatccagaaggagagcactctccacctggtgctccgcctccgcggtggtcagtaagccatggttcatttaagctgctgctgtacctgggtatctgcgtcgtctggtgccctctggtgtacctctatatggatgtcgtcgtctaataaacatctgtggtttgtgtgtcatgaatcgtggttgtggcttcgttggtttaatggacctgttgtgtcctctgtgttgtacccaaaactcttctgcagcagtatggcttgaatcctt

SEQ ID NO: 17913 - DNA, 1109 bp, Zea mays
  Clone ID: LIB3076-008-H10_FLI
ttttattatatggatgtgtgcacaggtgcacgtagataggtagaatagaagggagattatagctagctagaggcagcgagcagctcggttgctgggacacgcgatcgagctacagcaaagaagactgcagggtggcgcggcgggcatggaggatctgtacagcatccacccggggatctcgcgccacggggcggcggcgactagcgaggcgtccggggtcgccggtggaccgggctcacccccgcccccgcccccgccggcggcggatctgacggagctggtcaaggcgcagatcgccgggcacccacgctacccgtccctcctctccgcctacatcgactgccgcaaggtgggcgcgccgtcggaggtggccacgctgctggaggagatcggccgggagaggtgcgccgccgcctccgccggcggggaggtcgtcggcatggaccccgagctcgacgagttcatggagacgtactgccggttgctggagcggtacaaggaggagctgtcgcggccgttggacgaggcggcgtccttcctcagcaacgtcaggacgcagctcagctccctctgcggcggcgccgcctcgctctccggagatgaagctatccgtgatcagttcagcggtttgctacagtaagcatatagatctggttttataatcagttcgtctttttaattgtcatctaaaactcggaaataaaaaacccattaataataactccccgctcacatgcatctcaatctctccggccggtcgccgacgagacgagacgacctgccatgccgccattgtggacatgcatctttgcggtgcattattgctgttcttgtgggaactgtgaactgtgaagcgaagaaagctagcgcgtgtgcgactatagaggggcgactggcgaggatggatactagctgctttgatgaatgcgtgcgcgtgtgcgtgttcttcttgtgtggtcaaatcgtgtccatgcaaatggggtgcaggagtgtcagacgccggggtcggatgagtaaagttttgagcgtgtgcttcgtgtaagacactctccagcaggatgtaaaataggagacttatgatatgggatctaagttactgtacaccaacc

SEQ ID NO: 17914 - DNA, 1488 bp, Zea mays
  Clone ID: LIB3076-009-D2_FLI
ctcctctagctgcatccttgtactagagcatggcgaagctcgcatctattgctcgcagtatgcttagattcccaaacggaagcatgaggcttgttatggtaacggttattggagcagtccttggctttttcattgggatttcattcccttcggtcagcataacaaagcttcactttccagatagctttatttcgtacattgaagacaaagacgctggactcacgacccaagctatactcaatcatgcttggacttctgccagaaacgcaaggggaaatggtaccgaaccgacttcaaacagtaccttaaagatttatgtcccaacgaaccccaagggtgcagaggggctagcaccaggtatcgttgtatcagagtctgacttccatttgcgcaggttatggggagacccaagtgaggacctgcctttcaaaccaaagtaccttgttacctttactgttggagttgagcagaaagcaaatataaacagagctgtgaagaagttttctgacaattttgctattctgttattccactatgatggccgggtgagtgagtgggatgaatttgagtggtcccagcgagctatccatattagtgtcaggaaacaaactaaatggtggtatgccaagagattcctgcatcctgatattgtggcagcttatgagtacatattcatttgggatgaggaccttggggttgaacattttaatgcagaggagtacatcaaacttgttaagaagcataacttggacatctctcaacctggattagagcctgatcgggggttaacatggcagatgaccaaaagaagaggtgacagtgaggttcacaaggacacagaggagaggcctggctggtgctctgaccctcatcttccaccttgtgctgcttttgttgaaataatggctccagtcttctcaagagatgcatggagatgtgtgtggcatatgattcagaacgacttggttcatggttggggcttggattttgcgctcaggaaatgtgtggagcctgctcatgaaaagattggagttgtcgattcgcagtggatcgttcaccaagtggttccttctctggggaaccaggggcagtcagaaaacggaagggcgccatgggaaggggtgagggcgcggtgcaggaaggaatggggcatgttccagaccaggatggcggaggcggagaaggcgtattacaagatgatgggcatcacccctccaaactccacgcgtgtctagccgcgcctctcttcttggttttccatccccgccaccctgacctttgtggtggcgggtgagctgatgatactatactatagcactacttgattatagggagttagagatggtgggtgtagctgcttttgatggagaggtccttctgtaagtaaatgcgaggcaaaactgtgatgagaaaacatgtacacgaggatgattacctgatgatgatgatgatctatctattataaaaacatatataccgttaccgagc

SEQ ID NO: 17915 - DNA, 719 bp, Zea mays
  Clone ID: LIB3076-011-B12_FLI
cgtgggatgcaggccccacggaacaccagatattttgaggtagaccgcggcgaggtgcccaagggcagcgcctagatcttcttctggatggtcaagttctgtaacgacaatgtggcagaggagatgccctgatcttcgtacgtcagtttgcctactaagcatccacaaaatctcattataagttctgagaaggccaagtcaattgttcagtatattacaaaagtcaggttggagaactcccttgttcaggcttttgtctttcttctgcagaaggagagatgacgtgctgcatgacatgatggcatgtgaggcagcaacctcttctccgcaacccttgtcatggcctggagttggtgttctaggaaggagcacaattttattagggtagccaccagagttgaggtcccttttcaatggacgaacttggtgctgtggacgacatctgctattgtagctaggcgcatacatgttttcctataaatgctagctctgcaatcaccaaaggaaaacacaagagtactcttggaggaaagtttagcattcagtttaacaaaccttaccaactcatgccttgtttgaatgcaataatgcatgttatgttgccctgttgttgcttggacacatgcttggcatggctattttctggttatgtcacaactcacatctcccatgtaaatttatggctatgatatgcatcaaacaagcttatattttgctct

SEQ ID NO: 17916 - DNA, 606 bp, Zea mays
  Clone ID: LIB3076-011-F7_FLI
tacccacatttcctttgaccccccaccgtataatatatcttggaggtaaaagagactgggcttcagatgttccttggtgatctagttgtgcgctttcgatctggtattgctcagatagtcagatgtttctccgctgtaggctggttcaagatcaagccatctaaggaggaggtggcctgttcatattgtgaaacatcatgatgcttattttgggcatcttaagctatcttctctggcacatcaatgatttcatgagcttcaaggcccctttattttaaaagttgattctttgcataatcctctctgtgggtgcctacaaagtttaaatgtggacatggctgtcactactcactagtctcattgaagcatcatggtgcaaatcctgcttcaaggtctgctattgatagcttagagatggctgtgatgtcaacgcctcagcattaatttggacttctaggccttccttgcgtatttatgctttatataagcatatggggtatggtcgatcttgtctattgcccttcggagttcctttcaacttcacttgagcctttgatggcacaattggagtcatgtgcctctgctcagaaaatcagtttttaactg

SEQ ID NO: 17917 - DNA, 1217 bp, Zea mays
  Clone ID: LIB3076-011-H8_FLI
cccccggccctgcagcccggaagagcatatggagcagagggcagtgctgtggtgcatggttccatcagaacagtaggaagaagcgacctcgcagatcacgagatgggcctacgtcagtggcagctgtcatccagcggtgggctgagcgcaacaagcatttggagtatgaggaatctgaggaggcaaagcgaccaagaaaagcacctgcaaagggttcaaagaagggctgtatgaagggaaaaggggggcctgacaatactcaatgtggataccgtggagtgaggcagcgtacttgggggaagtgggttgctgaaataagagagccaaatcgtgtcgacagactctggctgggtaccttcccaaccgcggaggatgcagctagggcctatgatgaggcagccagagcgatgtatggagacttggcacggactaacttccccggacaggatgcaacaacctctgcccaagctgctctatcatcgacctctgcccaggctgctccaacagctgttgaagctcttcagactggcacgtcatgcgagtcgacaacgacatcaaatcactcggacatcgcatccacctcacacaagcttgaagcctctgacatctcgagctacctaaaggaaaaatgtccagctggatcatgtggtatccaagacggcacacccattgtagctgacaaggaggtctttgggccgttggagcctatcacaaatcttccagatggtggtgatggttttgatatcggtgagatgctgaggatgatggaaagcgatccacataatgcaggtggagccgacgctggcatgggacagccctggtatcttgatgagctggattcgagtgtcttagagagcatgctccagccggagccggagccagagccagagccattcctgatgtctgaagaaccggacatgtttcttgctggcttcgaaagcgctggtttcgtcgagggtctggagcggctaaactgaatttctgatgtttgaccgttgatcctcatcccacttcatgtctgagcttgtgaattcggaggcaaacattggcagaacttataagctctagcaattctaggctttacattcctctgtgatagttctctatgcatgggaactgggtttgcttcacaatttttgtaagaccagaagtgatgtaaatagttcccaccttgtggaaggacaagaaaaaaataaataaaaagagtgcttgctttc

SEQ ID NO: 17918 - DNA, 1011 bp, Zea mays
  Clone ID: LIB3076-013-D10_FLI
ctcgccgacgcccaagccggcgctggccgacccggaggaggaggacgagccggggaacaacgccgccgacggcgtcgggaacgggaaggagtacgagaagatcgagttcccggacctgaatctcgtggaggagaaccagatcatggtctccgagtacaccaggctgccgtgcgcggccgtggaaacgcagagctgcgacagcctcctgacctcggagcacgatgacggcgccacggccctgagccgggacgccgccgtgcgcctcgtagatagcttctcgacggacaacagcaccgccgactcggtgggcgccttccagagcgacacgccggtcagcagcgtgtctaccacggagttcccggccacccctcagtctaactccagctcggagccgtccgggaacgcccactcgtcggctgaccacaaggcgaaggcagcgtcggagaccgccgacgcggaggtcgactcgtcccgcaccgtccaggaggtcccgccggcgaactcgccctgcgccgcgtcggaggctgccgtgcacaagccggtgatcagcgtcaacatcgagcaggaggtgaaggtggacgggaaccaaatcatggacatgtacatgaagagtatgcagcaattcacggattccctggccaaaatgaagcttccagccttggacatagacaacggtagcagcgggaagagcagtcccgcagcagccacacccagcgcagactccactggtgccgactcgaccgcggtgaagaagccgaccgccgccgggcagcaggagaagccctctcccaaggtgttctacggcagccgggcgttcttctgatctccggttcgctgatcagcggtagcacaccgctccagccgccgagtaacgaagcaaagagacggcatttgcagtcgtctcagctgaatcttactagcgcagaggaataacaccttctcaggctcttgttctaggtttgtcagatcggggatgagttactgtctttaatgtatccgtcagtacttatg

SEQ ID NO: 17919 - DNA, 1285 bp, Zea mays
  Clone ID: LIB3076-013-D3_FLI
cttcacagtaacatgtccagttgagttttcagtgaaagcgacatttttttggtattttagtgttatggatttgtaatgctattgagtcttaaatctctgcagtcatggacgattttctttgctcatcctgtgataattttgcaacccattctgcatgcttatatgcagggtacagtcgatgactcagttctctgaaagcagtgatgtttacagctttggagtttttcttttggagcttattactggcagggaagcagcttccttgatacctacagagtccagagaatatttggcacactgggtaatttctactgacatgtagctgtaagttatctagaaaggaaagttatggagttctgcttaatctccagcaaaatatcattctggtgtttagtgtacctaactgtgaagtcaggccacacatttccaaaacttgaaaacagctagagcataaactgttttcatagttattaggagtgagaagtgtttgtcatgttgtaggatcacataaattcttattaggatatattattgaatactgaaagtccttgttgatgtttgataatggatacaactaattgtaccttagttgagacactttttaagaggaaaataacaatttgaaaaaagtgctgcaattctcgtgcataaggatatttcttttacgcgaaagggccactaccgtaaaggatatttcttttactcactgcttactgaaaaaacattttcttgtcacattgaatgatcgaaagatggaagcgcatttcagttcaaatgaactgattgacccaagattagccggcaacttcactgcagaaggtatgaaggagcttgttggtctggccttccaatgcttgaacccatcatcaagacgccgaccgaggatgaggcttgttgcgactgaactagaccggattctagagacggagatgtccatgacaacgttcatgggcgacggaaccaccattgtcacgctcgggagtcaattgttctcgtcgtgaagcgacgttgggattgatttcatgtctgctatttgatgacatgatgattgtgtgtgagagcctaacaacagctattgtttctgccatgctgttcaggctctgcattgttatgaaatgccatgtatggtcatttttaagcttgtcatggttgataggtaggagtgagaagaaatagagctgtatgtatgtctcttttttcttctttttgttgcatgggagaagaattgtatgtaaatcttttagattgttaactatccttcaatgtatttgcagattgttcttcc

SEQ ID NO: 17920 - DNA, 1438 bp, Zea mays
  Clone ID: LIB3076-014-F10_FLI
gaccggttgcttaactatgtaaacgaagagttggcagaaagcgacgtttacatgtcttaccttcctcttgcacacatctttgatcgtgttgtggaggaattgtttattttccatggtgcctctattggattctggcaaggggatgttaagctactagttgaagatattggtgtgctgaaaccaacaattatgtgtgctgttcctcgtgttcttgatcggatattttctggactacaagctaaaatttcctctggtgggtttttaaagagtacaatgtttaatcttgcttacaaattcaagcagtttagaatgatgagaggagctaagcacaatgaagctgcttccatatgtgacaaagtagtttttagtaaggtgaaagagggtcttggtggaaatgttagagttattttatctggagctgctccacttgctacccatgttgaagaatacttgcgtgtggtcacatgtgcacatgtcgtacaaggatatggtctcacggaaacttgtgctggatctttcgtctcgctaccaaatcaaatgtccatgataggaactgttggccccccagtgccaaacatcgatgttcgtctggagtcggtcccagaaatggattatgatgcacttgctagcaaacctcgtggagagatatgcatcaggggagaaacattattctcaggatactacaagcgtgaagaccttacaaaggaggtcctcattgatggatggttccacactggtgacattggtgagtggcaacctgatggatctatgaaaatcatagaccgtaaaaagaatatattcaaactttcacagggtgaatatgtggcagttgaaaatttggagaatgtttatggtcttgtttctgctatagactcgatatggatatatgggaacagctttgagtcctttcttgttgctgtggtcaatcccaacaaggaggttctcgagagttgggctgcagcaaatggaataagtggtgatttcgagtccttgtgcaataatccaagaacaaaagaatacattttaggagagctgtcaagaataggaaaagagaagaggctcaaaggttttgaattcgtaaaggatgtgcacctggaaccagtaccgtttgacatggaccgtgatttgatcaccccgacatacaaaaagaagcgtccgcaactgctcaagtactaccagggcgtgattgacaacatgtacaaaagtgctaagtgaactcactctacagtacacatcccgatgaagattcccaacgctgaatcttgaatgagcagccagaagttctgctgtgtatatgctcgtagtttgtatgcgagaattcttcctgtatcagtttttcagaaacgatttgccttgggcatatatatatagcaaaaccggcaatgtggccagcagccaagtggagacaccgtttcaaattgattgaactatggcgaat

SEQ ID NO: 17921 - DNA, 509 bp, Zea mays
  Clone ID: LIB3076-015-A10_FLI
agcttatgttcctatatgactactagctagaagttagagcctagatgatggctgcttctgttggcgtgaaagctcgagtgctcctaaatggtcgtcgtattagctgatacgacatcgaaccgatgcaatagataatattgtttacacgtattctcgccgagaagggagtagtagtattacctgatatctatgctaattcaggtggtgtggtcgttagctactttaattgagtgggttcagaacattcaaggtttcatgtgggccgaggagaaagtggacgacgaactagaaaaggacatgagcagtgcttttcaacacatgaaggccatgtgcgaatctttggtgctgccgaagtgtgccgtgacattggaattgcgggtctagaaaaacaagctcattagatttctgaaaaaacattaggagttattagattggtagcatttttttaagatttaaaattttatagaagtcatcattttcgtttattggaagaaatatttttggaagtt

SEQ ID NO: 17922 - DNA, 410 bp, Zea mays
  Clone ID: LIB3076-015-C10_FLI
agcatccaaaacaactccactcctcccaccccaagtccgaagcttcctcctcctccaactcctcctcctccccgtcccgcagtcgcactcgcaccgcacggcagcaggtagctagctagctagctgcgggcttctgtagccaagcagggccggagcacgcacgcacgcgcgagcgcgagcgcatggcggcgtccgcgagccgggcccgcgccggcgccggcggcgctggcgaggagtacgaggacctgctgccggtgatgggcgagcggctgggcgtggcggggctgctggcggagctgcgcgcggggttcaggctgctggcggaccgggagcggggcgccatcacgcccgacagcctgcggcgcggcgcggcggcggcgctgggcgtggccgggatggcgcacgccgac

SEQ ID NO: 17923 - DNA, 790 bp, Zea mays
  Clone ID: LIB3076-015-C7_FLI
gggaagactggaagctggacacactgtgtgacctgtatgagaccctggccattacccagagtgtcatctttgtcaacacccgccgcaaggtggactggctcactgacaagatgaggagcagggaccacaccgtttctgccactcatggtgacatggaccagaacactagagacatcatcatgagggagttccggtctggctcctcccgtgtgctcatcaccactgacctgcttgctcgtggtattgatgttcagcaggtgtccctggtcatcaactatgatcttcccacccagccagagaactacctgcatcgtattggtcgtagtggtcgttttggtaggaagggtgttgccatcaactttgtgacccgcgacgacgaacgtatgctgtttgacattcagaagttctacaacgtgttgattgaggagctgcctgccaatgttgctgaccttctgtgatcaatttgaagaaaaaacaaaacaaaaaagggtggtgagggaacttggtaaggcttggttttgtcgaaataccgtgggagagggggtgataaggacggtggggtttctatgttgaagtcgtggtcatggacaatttgtgattttttctcctttatgccatgttttggaatttttgtagctgcctaggccttgtggtaatgtgctgctgtgggggttcattagtgtgaagaggaagacgctgctggcgctgagtctttttctctttattagtattttgtttaaaactatgtatgaccgaatggtggtatttatttgtgtcatccttgactctt

SEQ ID NO: 17924 - DNA, 497 bp, Zea mays
  Clone ID: LIB3076-015-E5_FLI
cgtccttcgccgccgtggcggtggccgcgccctcgcgccgcggcaccttcgccgtggtcaggtccgccaaggtcgaccgctgccaggagcccgccacgctagcagcaaccgaggccaggcccgccgccgacggacgccgcgccgtcatgctcgcggctgctgcggcggccgtggcagccatcggcggcgccggcgccgccatggcgggccccaagaacgggacccccgaggcgaagaagaagtacgcggccatctgcgtcaccatgcccaccgccaaggtctgccacaactgagcacgcccgcgttgcatgcagctgcagggccggggggtggtatataattaatgtacgtgccacggtgttgttgtccctattgttggttcgagctttagatgcatgcctgacgtgaggccgcttaattgctttctgacggcctcggagctgtaagaatatcaagtgcactgcaaaactgaattcggttgaaaccgttcttatttt

SEQ ID NO: 17925 - DNA, 637 bp, Zea mays
  Clone ID: LIB3076-015-G8_FLI
cggacaccatcgacaacgtgaaggccaagatccaggacaaggagggcatcccgccggaccagcagcgcctcatcttcgccggcaaacagctcgaggatggccgcaccctcgccgactacaacatccagaaggagtcgacgctgcacctggtgctccgcctcaggggaggcgccaagaagcgcaagaagaagacgtacaccaagcccaagaagatcaagcacaagcacaagaaggtgaagctggccgtgctccagttctacaaggttgacgacgccaccggcaaggtcacccgcctccgcaaggagtgccccaacgccgagtgcggcgcgggggtcttcatggccaaccacttcgaccgccactactgcggtaagtgtggcctcacctacgtctacaaccagcaggcgtaggatgcccctcctttctgtcgggaaggaaaatgggaagtcttgctaggtgataatcctttttgctttgttttgttttgttgcaatggtagtagtttcttggaacagaacacctgtatctcttttggcgacgcgtagtttgggtttaattatatcatgttgttatgggtcctgtcaagcactgttgaattcgaatggtttttgaattaatcttgtactatgtttttatg

SEQ ID NO: 17926 - DNA, 932 bp, Zea mays
  Clone ID: LIB3076-017-D12_FLI
gataattccaataatgcaaaagaggcccgatttcggttttgtaagtttcctggactctgagtccgtaaaacagatcttatcagaaaggggccctcatttcatctgtggaaatgaagttcatgtcaaagcatacagggaaaagcatgaattggagtacatgatgttaactgagaaagatatccattgtaactgcggtgtacgcgatgtgtcagatgtgggcgatttgcaattttgccaccattggcagtggacttcgctaatttgctatcggacacacaaatcatagacacataccggacccacaaatcatagacacttgggggtggcgacattgcaaatatttcgtcagatgtagatgcagttggtgagcatcatacagtgactattggtgactttgggcttcagacgaccttggaatttgactactgagactctgagaggaagcttcgtccactaacaaacattgacaaaagactcaagtgcaagtgctctgatcagtgacttagaagacttcaaatacagttcatttttcagttaacaaaaggaggaagttagaactacgccgtataacaatcaaatacaatacaattcatttttttcagttaacaaaagaggacatgacagaacatgaacatttcatacgaaacctgtatgaccggcagatacatctaggtgtagttgaagtatgttagcaactcgtaatacacgacctccaaaccaatagctagaggaacactctgtatactattctggcaaatcagggtacaacagaatgtattagagatagaagaaccggtaacatgagaggaaaggagaggaggcagatgagagtaatggggaaatgtagtcttcagtttgtaaattgattctttgatgatcctccacagcttcaacatgtctccttttatagctgaatatgcctaattgccacc

SEQ ID NO: 17927 - DNA, 731 bp, Zea mays
  Clone ID: LIB3076-018-G4_FLI
cttcttcttttagcctgctttttttttgcaaaaattgattgtgtttgcaggttgcgtgctagcctgaggaatgctaacttacaagcgaaagagaacattagaaaagctgctcaggaggagagggagcttcttctagggggtggagaagagtcaacaatccgtaggcgtaatctccagacaaaggttgggatgacatctgctgctgaaagtatcaccgagagcctccgacggtctcgccagatgatggttcaggaagtggaaaggagtgcaagtaccttggcaacatttgatgaatcaacaagtgttctccggaaggctgaaggtgaatatcaaggacaccgctctttgctaatgcgtacccgtggtttgctctccacgatgcaacagcaagatgttcttgataggatcatcctgaccatcggctttatcattttctccttggcggttctttatgttgtctcaagacgtattggtctattgacgctgcaaaggaaactggccgatgccatcagatccggttcattatcagccgatgacatcgtagcgaatgcccaacgtggacctgccccagcaaatgttcctgctcccatctacgatgaactgtgattcgtttgtcctctgtattgttaaggttagttttgcatgtggctattgggattttgtccagtgtgtggtggtcatgtaccgatctgcgattcattaaaataatttcaaatgaaaaatagttaact

SEQ ID NO: 17928 - DNA, 376 bp, Zea mays
  Clone ID: LIB3076-019-F10_FLI
cagagaacgaggacaaggaaggtcaagatggctcatccacggccggattgctggagaagctcactgtgagcgagggcaaatctgaggaaagtggcaagtcggagtccactgattctggcaaagtgaccgaaaccaaagccgatgcagccccagccgagtagttggtgtggttgcacgcagatcctccccgtgctgaatcagttcctctgccctttagccatgaaatatgtttgctaatttttttggggcgagttggagcagtctcatgtgtttgggtttgttcttaaaaactttgagttaattggggttggaacgttcggtatgcaagtgtagtatttcactgcgtggatcgttatggattgcggtaaattcatat

SEQ ID NO: 17929 - DNA, 583 bp, Zea mays
  Clone ID: LIB3076-020-A4_FLI
cgcggcctcacgggcagcgagatggcgcgcttcaagttccgcaagggctgcctcaccatctacgtctacgccgtgcgccggctcggcgccgccgggttcatgcgcaccgacgacctcaggcgggtgctgcagtccgtcgtcgagctcaaggacttcctggaccacacagccatgctcgccatcccgagccagaagagcatcaccctgcagtcccggacagcggtggctcactgagaggagatcgtcgtcacagggcatctcacctccagagcctcgagtctgatctgattctgatgacgccgcaagaacctcgatcggttcagcatcgcagaacagcctgaacaggtatggtcgtcggtttgtagctgtaatcttcagagggcctatctcattttttttgcccccctctccctctctcggttggattcgtttgttcagtgtcggtggtgcaagtgttcgcctcctctgctgggagagcagatgtatagatctgttgagcaaaaaaaagaagaagaagtgttcccgcaaatcaagcatagtttttattatatatataaaaaaatcccaaaggaaatttcccttc

SEQ ID NO: 17930 - DNA, 706 bp, Zea mays
  Clone ID: LIB3076-020-A6_FLI
gaaatgtcatgtctgtgttcaattatcatccaaggaggggagcgacggcaacaatagctcgaggagacgcgccaccaccagtgcaccacgccaccacccccgccccaatcaacgccgcagcagtagggacgcctataaatgcctaggtgcgtgcgggcactaccactaccagtcagggcaagactcgcagcccggacaaggtaaggcgacgtacggcagcgatggcgccggtggtcatgatgagcatgtgcgtcgtcgtgtcgctggtggcggtgcagctgcaggccacgagcagcgacggcgccacggccacaccgtccgtggtgctgccgccgatgacggtgccccgtgtgcgcggccggttggaggccggtcgtaagctgcaggccgtcgacgccgtcgggatgggcatggactccgtggtgcgtcggacggtggtgctcaccacgatgcagacgagcaactcgccctccctgggctacggctcgctccgcccgaacaacgctgtgtgcgggtccagctgcgccggcagacctcctggtgagccgtatctgcatcagatccgcccgtgtggggagtattatcagtgtccgtctacaccgtcttaattagatctaggcggcgcggcgtacgtttcatcaaattcaataaacataaatatgtataggtgagaactctatgaaatatatatgaatgtgtcatgtat

SEQ ID NO: 17931 - DNA, 1213 bp, Zea mays
  Clone ID: LIB3076-023-B5_FLI
ctctgcttcgactctcttctccaactccgcctcggcgtcgtcgtgcgcttcgatctttcccatttccaaccggaggggaggcgtcggcgcaataataggaggcgcctttgtttcgcccatcgccggcatggggaactagcttcgtggctgggccccacgccatgcaaaccagtgagaccaccgggaccgcatcgccgccggctgttgagccggaggccgaggacaaggtggaagagggggcgcgggcgaatgaggaggcggcggcgaaggtgggcggcgacgacgaggatgactgggaatcggagcatgaggggaggagaggcaggcggcagcggtgccggcgaggcggtgcggcgggggacagcgccgtggccatggtgaagcgggagctgctcacgcgctgcttgacgtgcccgctctgcgaccacctgctccggcaggccaccaccatctccgagtgcctccatacattttgtagaaagtgtatctataaaaagctcaatgatgaggatctggaccactgtccagtatgtaaaattgatctgggctgcactccagtcgagaagcttaggtcgaaataagctgctgcgggcagaccgtgaaccctgggcaacctgtgcgcaacttggtggagcggtggctgagggttggcccggcgcgcccgctgcacacggtgatcggctcctccgggggagattatgtgatggtgataagctatgggcggcccaagtccgcgtcctgttaaaaccatatcaccatcgacggcctggcgaggtcgattcctagttcgaacaagggttggtgccgccgccgctgccgccgccggggaagaggccgtcgacagataaactcaagcagcggtagcgggctgctctgccgcagcagctcgtcctctcaccggcgtgttctttaaggatctgttcgttcgttcgttgttgccatacatgcacatgtgatggaagtcgctgtaatttggtagtacttggtaggctgtgagtgagaactgacgtttaggttggaggcgagatcgttaacctgagcttaagtgttgggggcgatgagtccgccgtgtatgggagaggcgctgctggttcagttctttttcctccgttttttttttcacttcttgaagggaaaaacacacacaaatacataatgtactacctccgtttatttgtcctgaactaatatccagccgtgactgattcggatc

SEQ ID NO: 17932 - DNA, 1127 bp, Zea mays
  Clone ID: LIB3076-024-B10_FLI
aagtggcacagtttaaagatcttgctaaccgtgtgacttctgagatgagaaatgcaagaacaagatcacctttaaccgccagcatgtccttgaaacctgaagtcagtcaagaatccagtgtagacacctgtacaagtgagataagaagttcatcatctggcaagcaaagaaggttccgttcaccgttgtcagtgagagagctagacgataagtcacctgtcatcagcagggaactgtacctgagtgcgcgaaagtacaagactccctctcctccggttagaagctcactctctgtcgagagaggcagctttgccaaaatcgtggagaacactggaagcatcgactgcacaccgatatccaaggtcgaagtgcctccaaaagtgtggtccagctccagcaactcgaagaccacaccttcatctgtcctgacagctcagaacctacggaaattccgggactccgaggagaacagaaccaaaattccgcctgtccggcagagcatggtgaagaacaggtctgagagtacgccaaagactcacaatgaagagaaaccggcgaacaggcactcgggtaccaaagcgaggtctgaggccaggaacacgagggactcgtccgaaatcgagaacgagtttgcgggcgatgaacctactttccacttcaaccgaactgcgaagaagttaccgacaaaggtgatgacaagacagtcccagaacatagatgtcagtgtcagggcctctgtccggggggagatggagcctctgaccgaaggaaggcaacgccggaactggagcaagccgccgcacgccgagaggaccaatatgccgttgccggacatccggcgcagtgtctccctgccgcgcgggaagaaccctcttgtgtgaatctagctcgtttcgccaaccaggcattctttcattggttgtttgtttctttatcctgtggttcgatccgaatgtaggctctacggctgtgtagaacacgtcatccggatgcataacacaaagtctgtcgagttgcttccaccaggctcccatgaaaacgcaaagttcacgctcttatgcgcgatgtaaaaatgtatggattaatgttgcactgcaggctgaagcatctcgttccagtggtgattc

SEQ ID NO: 17933 - DNA, 1004 bp, Zea mays
  Clone ID: LIB3076-024-E6_FLI
cgctttctcctcttccgccccaccccggtgaggcgctgatccatcgcctcggacagcggctccagaacctccgcgttgcagtggttggggttggcttcgtgctattcagaaacacagtagcgagaactattcggtggggccgaagatggtgtcgctgaaggtgccaaagcgcctcgccgcaagcgttctcaagtgtgggaaaggcaaagtgtggcttgaccccaatgaagttagtgagatctccatggcgaactcccgccataacatccggaagttggttaaggatgggtttatcatcaagaagcctcagaaaatccactctagatctcgtgcaagaagggcgcacgaggctaagcagaagggacggcactcaggatatgggaagcgtagaggtaccagggaggctaggctccccaccaaggtactgtggatgaggaggatgcgcgtgctgaggcgcctgctccgcaagtaccgcgaggccaagaagatcgacaagcacatgtaccacgatatgtacatgaaggtcaaaggtaactcgttcaagaacaagagggtgcttatggagagcatccacaagtccaaggctgagaaggccagggagaagacgctctccgatcagttcgaggccaggcgcgccaagagcaaggcgagtcgcgagaggaagaatgctaggagggaagagaggctggcccagggcccaagagaaataccaccaccagtctcagccacagctcccactaccggggcaccgaagaaagcaaagaagtgaagtattgcaacaaagctgcagctttctagtccagtacttcgtaattttggagcgccctgatcaattttgctgttatacagcttcgtgtcttttattttccaaaagctaccgtacctggattgttagagatgtttacgcagagtttctttggaagaggatccgctcaaaaatgtttatttggatcagatggtctcaggaaatgtggttatgttttatggaaatttatcctgttgct

SEQ ID NO: 17934 - DNA, 2241 bp, Zea mays
  Clone ID: LIB3076-025-F12_FLI
ttaaaccgtgcttttttatttttgattatcgacggcctagcctgaagaacagtagaactcagactcgagcgctccaaagcgagccaccgccgatctgctcctccctcttgaccctcctccgtgcgctgcgcaggcatgaggcgcctcctcgtcggcgccctcgtcctttgtatcgccgcggtggtggagtccaagccgcctctcgactctctgggcatacccccgcaagatgaggcgtactacataggcggcgtgatcaaatgcagggacggatcgggcaggttttccagggaccagctcaacgacgacttctgcgactgccccgacggcaccgacgagcccgggacatctgcatgccctgaggcgaaattctactgcaagaatgcaggccacactccagtcacgatcttctcgtcacgagtgaatgacggcatttgtgattgctgtgatgggagtgatgaatatgacagcaatgtcacctgtaagaacacttgctgggaggctggaaaggtggcaagggagaaattgaagaagaaaattgctacatacaaaaatggtgttgttattcggaaacaggaagttgaaagggcaaaagaggcttttgctaaagatgaagcagatttagcaaaattgaagggcgaagagaaaatgctccaaggacttgttgataaactcaaagagcaaaagaaattaatagagaatgcagaggaagaagagcgtttaagaaaagagaaggaagaaaagagaacaaaagaagaagctgaaaagcaagctgctgttgaaaagggagcgcttgatgcctctcgggatgtagattctaaggaaattcatgatcatctgcaagaaggtgaaaacaagcatgatggacatgcaacaggccatgataatcatgtaacagaaagcagggcatctactgagcagcatggttctgtaaggaaaaatggtattagcgttgaaggtggaactgtagatgagttgccgcaggagtctgcagcacctaccatagagaaggattctagctctgacaatcctgagggtttatctagggaagagttaggtcgtatggtggcttctcgttggactggggaaagtgtaactgaggttagtaaagatgataagaaggggcatgaagatcagcaagaaataccagaacctgcagaagaagcacttgaagatgagttagaaattccagaacctgccgaagaaaattatggtggttatcattcagaagttgaggatgataggcgtaaatatgaagatgaagagttttatcatgagtcagaagatgaatatgttgacgactatgatgagcatgttgagtcctacaaatctgatgatgaccaaaaagatttaactgagccaggacatgcatcgtggttggacaaagttcagcagactgtacaaaatgttttccaaaaattcaacttttttaagacccctgtagatttgtcagaggcttctcatgttcgtaaggagtatgatgatgctagctcaaagctttcaaaaattcagtctaagatatccagtctagctgagaagctaaaacatgattttggtaatgacaaggagttctattccttttatgatcagtgttttgagaccaaggaagggaagtatacttacaaggtctgtgcatataagaaagcatcacaggctgaagggcacagttctaccaacctggggcggtgggacaaatttgaagattcgtacagagtgatgcacttttcaagtggagacaaatgctggaatggtcctgaccgaagcctaaaggttaggcttagatgtgggctgagcaatgagcttaatgatgtagatgagcctagcagatgcgagtatgtggctgtattgtcgacccctgcagtttgcgtagaggacaagctgaaggagctgcaaaacaaactggacgccatgtctttgaagcagcccgggcatgatgaactttaaaaactttagaatattccagcgtgaacataaagaagatgccaccaggaagcatagctctgacagttacatccataacatataggcgtggaagtcaatgaggtatatggacagaaacgggccaagcgggagaaatgagaatgtagagtttaggtcgcctaccaggctatattagctcgcatagaacaatttttttagctgaaatttgatgttgcaatcttccagactcatctgatggaatatatagtaagaaacagtacaccttgaatcagcatatactttacccagggtttttacatg

SEQ ID NO: 17935 - DNA, 1132 bp, Zea mays
  Clone ID: LIB3076-027-H9_FLI
cgctggagaaggtgcctgtcaagaacgcggacctatacgtggtgtacgtgaaggccggcacgtacaaggagtacgtcaccgtgggccgtccccagacgaacgtggccttcatcggcgacggcgccgagaagaccatcatcacggggaacaagaacttcaagatgaacctgaccaccaaggacacggccaccatgcaggcgatcggcaacggcttcttcatgcgggacatccgggtggagaacacggcggggcccgagaaccaccaggccgtggcgctgcgtgtgcagagcgacctggccgtgttctaccagtgcaccttcgacggctaccaggacacgctgtacacgcacgcgcagcggcagttcttccgtgactgccgggtgaccggcaccatcgacttcatcttcggcaactcccaggtggtgctgcagaactgcctgatccagccccggaagcccatggcgaaccaggccaacatcatcacggcgcaggggcggcgggacaagcgctccgtgggcggcaccgtgctgcacaactgcaccatcgagccccacccggacttcaaggaggaagccggcgggaagatccgcacgtacctggcgcggccctggaaggagtactcccggacgatctacatccagaacgacattggcggcttcatcgaccccaagggctggctcgagtggaacggcgacttcggcctcgagacgctcttctacgcggaggtggacaaccgcggcgacggcgccgacatgagcaagcgcgccaagtggggaggcatcaagaccgtcacctacgaggaggcgcagaaggagttcaccgtggagaccttcatccaggggcagcagttcatccccaagttcggggtgccgttcatcccgggattgctgccgcaggagcaaaaaggcaggacacactgatcatcttccagcctgcttcactcactcactactaccacctaacatcagttggactggacctgcacttcagcgagtcacccccggcccagcccactaatatgtccactgtactctagtattcgatttcccaatcttttttctcttctcttttgtcaattattaattatatacatcttttattattagtcctatatatatacgttggcccaatt

SEQ ID NO: 17936 - DNA, 892 bp, Zea mays
  Clone ID: LIB3076-028-A11_FLI
agctacaggatgttctccctgggatcattaaccagcttggtatgttacaatctgtaccttaacgtttaggatattatccaaaaaatggttatcttgtactacctccgtccgtttcgaatatttgtcttccgttaattcacttttaactaaaacatggcaaataaaaaagaacagagggagtaacatatttgatgctttgtttgattaggcaagttctgctcatttaatttgtttgttattatctatagtcctggtcttttctaattttattagaaatgtgttgctgcattccaccatttcttgttttgtcatttgtggtgttctctcgacagttaccacttctagacgcacgacaatggatgtatacttctaggcatattttatctgttgccttgaagtttggcagtttctgttctgcctccctgttgctgtatgtgtttcaatcaatcaaatacaaaaagcaacaagcgtgaagcaaacagaagcttgttgccacaatacaaatgatatgaaagagggattaacaccttttctattcttccaggccctgacaacatggagcacctgaagaggattgccgaggagatgcagaagcaggtggctgctgccggtgcggcagcacaggtcaaggaagacaacgatgacgatgttccagagcttgttcctggagagacttttgaagaagtagctcaggagacaaaagcctgatcataggctctaaatagtgaaatgttactgcaccaatgctgtgaggtcatggttttcgtgtgatggcactcttcttcctcccctcctaggccagccccagccactctttgtgttcgctgttggaaacttttagtttctccatctcaagcttttacctaaggttgtgcatgttgagatgccatgg

SEQ ID NO: 17937 - DNA, 765 bp, Zea mays
  Clone ID: LIB3076-028-C8_FLI
agctggagagttcttcaagaatggattcttcaagaatttttcctgtgacctgagtggagcacagccactactaacaatgaccatttctgaaactctgaagtatgagtacagcctaacttgtccaatttgcttggacactttgttcaacccttatgcgcttagctgtgggcatctgttctgcaaagcctgtgcatgtggtgctgcttctgtctacatcttccagggtgtcaagtcggcacctccggaggccaagtgccctgtctgccgagcggttggtgtgtttgatcgtgctgtgcgtatgactgaactagaattgctcctcaagagaagggacaaagattactttctgcagagactgcgcgaagagcgaagtgtgatggtgaagcaggccaaagaatactgggactcacaggcaatgctatcgatggggatttgaaagctacaatgttcttaccagttcaattgttgtggctaattacatctgaaggttctctggctaattacatattttagttcctggcaagcgtcaatcaattaagttaactgcgctcacataacagaaattgacatagcagaagctgagcccatcgaagaagcaaacaaaatcagttgcattctatcattctccgcctgattcagatttggaagaatcgaacggatttaactaatttctttgttccttccgttctactacaagcttgaaatgacgaaactcatattgtatttacatatctactgattattgggttatttaccctatttact

SEQ ID NO: 17938 - DNA, 436 bp, Zea mays
  Clone ID: LIB3076-029-C12_FLI
gggcggttcctgtgccctggcacccccgggctcgacgaccctctctccaacccgttctcggaggccgccggcgggagcgcggcgcgcgtcgccgccgagcgcgtgctcgtctgcgtcgccgagaaggacgacctcagggacaggggcgtctggtactacgagagcctcaaggccagcggctaccctggcgaggtggagctgctcgagtccatgggcgagggccacgtcttctactgcatgaacccgcgctgcgacagggcgcgggagatggaggagcgcgtcctcggcttcctgcgcaagtgagcgagcgacggagcgcgcgccttgctacgcgattgagatggaataatttcaccgtttccagatgtggaggcgtttgagcatgaggccatgagggtcttatttgtttgcttaagatcaattgattgaagtttcg

SEQ ID NO: 17939 - DNA, 549 bp, Zea mays
  Clone ID: LIB3076-029-E10_FLI
gacgaaggaagctttggagatatgtcaagtggtgatgttgatgaagataacgagagaatagaatccgtaaaagctgctgcagtttcctctgtcgtcggtgttctggctagtttgcccatatctttctatgaagttgaagatcttccacaactattccttcggtcatcaattgttttcataagttgtgctttgtttggagtcacattccggtacgctgttagaagagatctggataatatccaactaaaaactggggctcctgcagcatttgcttttgttagaggccttgctctgctggaatctggtagaaccttcgagctgagtactgataccttaatatcagttactcttgatgctgcagtcagtgtggttgagaacattttcatatttctgcctgctgctgttgcactggactactgttttaagatgagatttttgagtccctttcctagaagaaaacaatagcttctgtgaagaatatgtatgatcaataacaatcttgatagctcaaatggtcatatgtaacacaaatgatatcttagattcatt

SEQ ID NO: 17940 - DNA, 916 bp, Zea mays
  Clone ID: LIB3076-031-D11_FLI
gactgctcttagtgtgaccgggttaacagagagcgggcgattgggtttcgggaagagggcaccggcaatgtcaacgacgacggaggcggcaaagagcggctcagccgcaccggtgcggtgccagcggatcggctgcgacgccgtattcaccgacgatgacaaccgcgagggctcctgccaataccacccctccgcacctatgtttcatgacggcatgaaagaatggagctgctgcaagcaaagaagccatgatttcagcttatttttgcagatacctggatgcacaacaggaaagcatacaaccgaaaaaccaatcacaaaagctgtttcatctaaccgtacaaaggcaacaccgatccagtcctctaagcagggtgtgggagttgatgtgtgtgcaaggtgtcgtcaaggtttcttttgctccgatcatggatcacagcccaagccacaaaagccagctgctaccgacgatacaaacaaggaacctgttgagaaatcagctgttccaccgcccaagaaaaggatcgatgtaaatgagctgaggacatgtaaaaataaaggatgtggtaaatcctacaaggagaaggataaccatgattctgcatgtgactaccatccaggtcctgccgttttccatgacaggatgagagggtggaaatgctgtgatgttcatgtcaaggagtttgacgagtttatggagatacctacatgcacaaagggttggcataatgctgatgcggtgtgaattcacgccatgcttaaggctgttttcatgttgtatcgtcacctgccatgtaaacaccatttctgcagttcattgaggatttcatttggaagtgtgacaagagctttgaggacgggctgcctaagctttgcgcacggtagctgtctggaaatcttacgtgattctccttgc

SEQ ID NO: 17941 - DNA, 489 bp, Zea mays
  Clone ID: LIB3076-031-H1_FLI
cacatcgatgaactaactgcaggaggtgctcatcatctggggagagttcgaccagatcttcccggtggacaaagcgcacaaggtgaaagagaagctcggggagaaggcgacggtgaaggtgatccccaacgcggggcacctgccgcagcaggaggacagcaagctcttcaaccgagtcctcctcgacttcctgctgcgcccttcgtccaccgccgcctgacctccaacggcagcgcccaagccaaacagcttagcttgctcggctgccttcttctttggttatccattatcatcctgccgcgcgcgtttccggcgttcttgtttgtttgtagagtggaggaggcgctgccgccttctgtttttgtttgagggtggcaatgtgcagatcctacctgtttggttgtgctgtgaaaaaaaagttgctgtgggctgtggaaaaagattttatcattattttatcattaatgcccttgtgtcagatccattatc

SEQ ID NO: 17942 - DNA, 1222 bp, Zea mays
  Clone ID: LIB3076-031-H5_FLI
catttctggcgctgcggctgaattgctggcgccggctggttcctgcaacctgcagcccgagccggagtttcggccgccgatgtgggaggtcttgcagtcgctggtgcgccagcgcttggtgcaaagggcgaacatggcgaggacgcagtcgcactcgcggcgccacggcgaacccgttactgcttcaagagatgttctcgtggtatgctcatctactggatggacagatgaaaagcacatgctttatcttcgattattggaagaaacatttgtgcaccaattacatggaagtggttgcatttttaagggactgtttaattgctctccaagatattgtaggcaaatgaaatcatctaagcaaattgttaaatacactacgcctggtcaggggtgtgccatagttgagggtggcaaagtcaagtcctgcataaaggctgagcatgttgagtcaccttcctgttgtggaaatcagcaagatgaaaaagttcgttccctggaagataatgcatcaaccactaagcccatggaaaaagccacttcccatgcaagggcagcaagcccaggacaagcttccacgtgctatgttggcaaacacagacattctccttccagaagtgcagaggggtcggatcagaactttgatgaggaaacccaagggactggagaatcaaaacatgaatacaacccgaagcgactgaaatctgctgatggcacaagggatcatcaggttgtgaatgcagaagctcatcaggtgggctgccttgatgtgagtgacaaaaatagcgagaacttcagtgcatcgtcaaaagtgcttgctgcatcacttgatgttgaagctgggtctccctccggcgactgcaaggatcatggaccaaaaggataatgcaatgtccaccgagtgttttctggagttgactaacacacccacctggcgcgccgcaactgaatcagagataggaagtcaatcagtgcaagtttgtaagataagctagcttgcccgttattctggtttggaagtcaaaatagttcgttcaacttagcctaggcagttgacggttttgttgtgtttctgagggactctgatacgaaaatcaaattccctttgttctgtgtttggcgctgcaacctgtaaatggagtgctttttttttgcgtaccgtgatatctgcgttttggaatactataatatcagaatttggagcgtgtttcgccatgctcgcctc

SEQ ID NO: 17943 - DNA, 615 bp, Zea mays
  Clone ID: LIB3076-032-B1_FLI
gggaatctgcccttgccgccgccactgcccgatccaggtgtgcagactgctccctcctcctctccgctccgaatggcccgcacgaagcagacggcgcgcaagtcgaccggcggcaaggcgccgcggaagcagctggccaccaaggcggcgcgcaagtcggccccggccacgggcggcgtgaagaagccgcaccgcttccgccccggcaccgtcgcgctccgcgagatccgcaagtaccagaagagcacggagctgctcatccgcaagctcccctcccagcgcctcgtccgcgagatcgcgcaggacttcaagacggacctgcggttccagtcctcggccgtggcggcgctgcaggaggccgcggaggcgtacctggtggggctcttcgaggacaccaacctctgcgccatccacgccaagagggtcaccatcatgcccaaggacatccagctcgcccgccgcatcaggggcgagagggcttgagctgtcgcgctgctgctgttcgtcgttgtaatgtctgaagtagatggtggtgggtgctttctatgccgtgcctatttggctatttcggacgtgttggttcactgaatggaaaatggaatgccatttctcgtc

SEQ ID NO: 17944 - DNA, 1142 bp, Zea mays
  Clone ID: LIB3076-032-E8_FLI
tcatcccccttgcaagtatagtctcggcggctctagaagacgatgggcaaggacgacgtgatcgagagcggcgctggcggcggcgagttcgctgccaaggactacacggaccctcccccggcgccgctgatcgacgcggctgagctggggtcctggtcgctgtaccgcgccgtgatcgccgagttcatcgccacgctgctgttcctgtacatcacggtggccaccgtgatcgggtacaagcaccagacggacgcgtcggcgtcgggtgccgacgcggcgtgcggcggcgtgggggtgctgggcatcgcctgggccttcggcggcatgatcttcgtcctcgtctactgcaccgccggcatctcggggggccacatcaaccccgccgtcaccttcggcctcttcctggcgcgcaaggtctccctggtgcgcgcgctgctctacatcgtggcgcagtgcctcggcgccatctgcggcgtcggcctcgtcaaggcgttccagagcgcctacttcgacaggtacggcggcggcgccaactcgctcgcctccggctactcccgcggcaccggcctcggcgccgagatcatcggcaccttcgtgctcgtctacaccgtcttctccgccaccgaccccaagcgcaacgcccgcgactcccacgtcccggttctggctcccctccccatcggcttcgccgtgttcatggtgcacctggccaccatccccgtcaccggcaccggcatcaacccggccaggagcctgggcgccgccgtcatctacaacaaggacaagccctgggacgaccactggatcttctgggtgggccctctcgtgggcgctgccatcgcggccttctaccaccagtacatcctccgggctggcgccatcaaggccctcggctccttcaggagcaacgcgtgatgagcggggcttggctgtggagcaatggcgggcgacctacgggcgggggaagtcgtgagcgaggagaatgacatcatcgatcgacttgggtgccggtggttggttcgggtcgccttttttgtttcagcagctgctgcgttgcgcgcgtgcgtgagatttggtttggtttcgttcccctgcaatgtaatcatgtcgtgactctcaagggattattccgctctgctctt

SEQ ID NO: 17945 - DNA, 580 bp, Zea mays
  Clone ID: LIB3076-032-G3_FLI
tggccaagtcgctcaagaccgcactgcttgttcttggctacacatctaccggcctatccttattcgcggcttttgggctgctgttgctagcccagcagattaactctgagaacaaatcggagtaactgacaggcactcgctgaagttgtggacctcatgccttgcctttctatgctccaatgaggcaaacgttcatagggaattgcatacactgggaccttgtgtgtatcagtgcatgcaatgttctgtataaaaataaagagccaattgtttgtgattacggataaaataatcggtggagatattgaagcaaacagggaagtcaacctgggactgactgaagaacaaattgttagtgaacgcaacagagaactgcttgtattcaaaattgtgctttcagagtgtggtactgctgttactcatcaaaactgtaaaaaatcgatcttaagggggtgtttgtttgggtaatctaacaacttttgaactatggattatataatctaagcggattataatcccaaacaaacatcccttaagtatgatgaatgagtatatattctgtataatttttttggcgagg

SEQ ID NO: 17946 - DNA, 719 bp, Zea mays
  Clone ID: LIB3076-033-B8_FLI
gcgccgactctgccgtctccctcgcctctttcccctcgtctcgtctgcatccgcctccgccgccccaagacctcatcacctccccttcgccgtgaaccctaaccccgcgcccctcgccccctccttctcgtcgtcatcgccgcccgcttttccgggcccccatcgcctcttctcttccacgagtggttcaagcatggtggtcgtgggctccgcggactccttcaacagcatcttttccaaggtgcaagatgaaaagctaccagctgtcttttactacacggcggtgtggtgtggaccatgtagggcgatcgcacctttagtatcaaagctgagcagccagtatcccaagataccggtgtacaaagttgacattgaattggaaggactgggaaacaaactccgtgatctaaacatatgttcagtgccgacgttccacttctatcacaaggggcagagaattagtgaaatcgtgggtgctgatgcaaagaaaattgaagctaccatggaaagtctccacaagcagcagtagaagtttcagagcagagcctcaacctcacaccaatggaatggtttaatctacctcgcatgagaagtgttgcgcacttttggattcgtgtttttctttacgtgtcacaccgtgtgaacgccagcgtttcgtcatcagatgcttgtgattcgtgccggcttgtttcatgtgaagacatcagatgcttgtgttt

SEQ ID NO: 17947 - DNA, 1462 bp, Zea mays
  Clone ID: LIB3076-033-D8_FLI
caggcggcggtggtgttcgtggcgctgtacctcatcgcgctgggcacgggcgggatcaagccgtgcgtgtcctccttcggcgccgaccagttcgacgagaacgacgagcgggagaagaagagcaagagctccttcttcaactggttctacttctccatcaacatcggcgcgctggtggcgtccacagtgctggtgtacgtgcagacgcacgtgggctggggctggggcttcggcatccccgccgtggtcatggccatcgccgtcggcagcttcttcgtgggcacgccgctgtacaggcaccagaagcccgggggcagcccgctgacgcgcatcgcgcaggtgctcgtcgcgtgcgcgcgcaagtggaacgtggccgtgcccgcggacaagtcgcggctgcacgagacggtggacggggagtccggcatcgaggggagccgcaagctggagcactcggagcagctggcgtgcctcgacagggctgccgtggtgacggccgaggacggcgcggaggcgagcccgtggcgcctgtgctcggtgacgcaggtggaggagctcaagagcgtgatccggctgctgcccatctgggccagcgggatcgtgttcgcggcggtgtactcgcagatgagcaccatgttcgtgctgcagggtaacacgctggaccagagcatggggccccggttcaagatcccctcggcgacgctgtccatggtggacaccatcagcgtcatcgtctgggtccccgtgtacgaccgcgccatcgtgcccctggtgcgctcctacaccgggaggccgcgcgggttcacgcagctgcagcgcatgggcatcggcctcgtcgtctccatcttctccatggtggcggcgggcgtgctggacatcgtgcggctgcgcgccatcgcgcggcacggcctgtacggcgaggacgacatcgtgcccatctccatcttctggcagataccgcagtacttcatcatcgggtgcgcggaggtgttcaccttcgtggggcagctggagttcttctacgaccaggcgcccgacgccatgaggagcatgtgctccgcgctgtcgctcaccaccgtcgcgctcggcaactacctcagcacggtcctggtgaccatcgtcacccacatcaccaccaggcacggccgcatcgggtggatcccggagaacctcaaccgcggccacctcgactacttcttctggctgctcgccgtgctcagccttctcaacttccttgcctacctcgtcatcgccagctggtacaagtacaagaagacggccgatgattaccctggcgccaaaggggagcacggtacagagcactgatgggcgagatggcggaaatggagtgatttctatgtgtggttagctgtctgtcgacttgttttgccacagtttgggtgcttaaacgttaacgtacgtactagttcaatatagtgtctcgggggcgaattggttgttt

SEQ ID NO: 17948 - DNA, 408 bp, Zea mays
  Clone ID: LIB3076-034-C3_FLI
cccgaccaggccgccatcctcaaggtgaaggagatcaagaacggccggctcgccatgttctccatgttcgccttcttcatccaggcctacgtcaccggcgaaggccccgtcgagaacctcgccaagcacctcagcgaccccttcggcaacaacctgctcaccgtcatctccggcgccgccgagaggacgcccagcctgtgaggacgcgccacaagccggcagcgatgccaagtcatgcgctgctgccgtccttgattttaccggggaaagagctgtgtgtgagggtctgaagtgaagaacgtgccatgcccatgcgtgtacattatcgagagggggaagaaaccttctcattctgatctctgatatgactgctgcttcagattgcgcctgagatatgctaagtttttg

SEQ ID NO: 17949 - DNA, 479 bp, Zea mays
  Clone ID: LIB3076-034-D4_FLI
atcgagatgagtcacacagactacacaaatatattcggacgtgctagatggcctgatgctccacagcgggtcctggaaacacccttctatgatgagtggaagaataatttcccagaccaggaaacagaggaagatcaacccatcataggccactctatcatccatggtgtgcacaaggatattcgtcggtttgccggtactgttccaaacgcgacggcaacaggagatatcgacatcatggccatgtattcgggtcagggtgttgggctaatcacggagatcataccagctgctcaagttgtcaaaagtctggtcgctgaagcgaaggaagtcatcagagaaaagctttctggttaccaatagaatccttcctgaactgcaaactagaagtatctgtgtgtgagtagtcaccaatcagaataatcggaagcaccaaggtttaggtttgattcttgtgctatttttaagtacaataaagt

SEQ ID NO: 17950 - DNA, 784 bp, Zea mays
  Clone ID: LIB3076-034-E1_FLI
tccaaggctcactcctcaccagcttctgctctctccctcctcatctctgctttgctctggaccgttaactctccagctccccctcgctccgttcccttccgcccaaatcactgggaccaccaccgccttcttcaagatcggcgggcgggcaccggccggcgatgacatccaccgtcaccacaaccgttgggtgcggggggctccccgtccgcccgttgtcgacagcgaccagaggacgcccacgcagatgcgccgtccgagcccaggccgcgggagcggatgcctccaatgataagtcagtggaggtcatgcgcaagttctccgagcagtacgcccgccgctccaacactttcttctgcgccgacaagacagtcactgccgtcgtcatcaagggacttgctgatcacagggatactcttggagctcctctatgcccttgtaggcattatgatgacaaagctgcggaggtagcacaaggattttggaattgcccatgcgtccccatgcgtgagaggaaggaatgccactgtatgctttttcttactcccgataatgactttgctgggaaggatcaggttatctccttcgaggagatcaaagaggcgacatcgaagttctaagcccttgtatttgtcacggagtgtttacttgacagctaattttttatatgtatatgtacttaagtagcatctataagatatgccatcaggaaaattttcataaaatgtgcagtaaacagcacttcgcaaggctgccgatcatataagccgccttcggccttttt

SEQ ID NO: 17951 - DNA, 464 bp, Zea mays
  Clone ID: LIB3076-035-A3_FLI
cggccgccactgatctgctctgttgctggtgactaggagcagtagcgagagggattctggatggccaagtcgaagaaccacacggcgcataaccaatcgttcaaggcgcacaagaacggcatcaagaagcccaagcgccaccgccagacctccaccaaggggatggacccgaagtttctgaggaacttgaggtactcaaggaagggcaacaagaagagtggcgaggctgagtccgaggagtaagatgatggtgattgagtttgtggcgacaaatgcatctcttgtatcgctaagagtcttagctgtgaacttagttctcacttctgtgtgactgtgatcaaaggagatccatcagttggtaccgaagtgtattttatgtcttgttggttacctggaatttaattaaaaccatcagttgtatccttttgagaattgggcaattgatgtgtcgttttctgttctgc

SEQ ID NO: 17952 - DNA, 1019 bp, Zea mays
  Clone ID: LIB3076-035-H4_FLI
cgacaacaacggacacacacatcgtctatcagtgctcatccaacaatccgtgcgcgaccaaggcaataatggtgtcgtcctcccgtgctgtcgtcgtcgtcgtcggcctcctcgtcgccgcgtcctccctcgccgtcgctgcctccgatggcggtgggccgacgtacgggtacacggcggggagccccgacgggccggagaactggggcaagctgagccccgcgtacaagctgtgcgggcaggggaagcagcagtccccgatcgacatcgtcaccaagcaggccgtccccaacgccaacctcgacaccctcaaccgcacctacgccgccaccgccgccacgctcatcaacgacggccacgacatcacgatgacgttcgagggcaaggtcgggacggtaatggtgaacggcaaggcgtacagcttcgagaagatgcactggcactcgccgtccgaccacaccatcaacggccagaggttcccgctggagctgcacctggtccacaggagcgccgacggcgcgctggccgtcatcgggatcctctaccagctgggcgccccggactccttctactaccagctgaagcggcagctgggcgagatggccaaggaccggtgcagcttcggcgaggaggagtcgcacgagggcgtcgccctcatccacctgcgctcgctgcagaagcgcaccggcagctacttccggtacacgggctccctcaccgtgccgccctgcaccgagaacgtcgtctggagcgtcctcggcaaggtgcggcagatcagcaaggagcagctgcagctgctcaaggcgccgctgcccgggaacgacgcacgccccacgcagccgctcaacggcaggaccgtccagttctacaacccgcccaacagcaccgtctccttccatatgtaatgtaatgtaatttaatatgattaacgagatgtatatgtcgttcgtgttatgaagtaataatatatgtgcatgcattattattacctatatattatttggtgcagtatttgtggc

SEQ ID NO: 17953 - DNA, 702 bp, Zea mays
  Clone ID: LIB3076-036-D6_FLI
gcaacggtggtaaccgcagcaggggcggcgcgaggttcgagctgcagctgcacctgtcgccgccgccgcccgtggctaggagggtggaggtggacggcggaggcgacggcagcgactcgtcgtcgtccccgagctcgtgcgtgtcgtcggacggcagtccagggagcaagtcgccgatggtgatcggcgcctgcacgcggtgcatgatgtactgcatggtggccaagaaggacttccccacctgcatcaactgcaagcagccctgcctcgtggacctcctccactgctctggcgccggcggcagcggcaccggcaaggccaagtgaaaggacggtcagcgtgtcgtaccgtaccccggccgtcggtccagttgatgctcatacggatggttagctcaggccttagcttgtgggctttgtgcgctcatctcgaggcgcggtgggggagtgaccgccgttggatcatccactggatggacatggcctacttggtttagtaataggctagtgtagtactccccctattagctagctgctgatgctattagcttatcttcgtttatgatgttgttgcttctttaaccgcggcatcggtatgtgatcgccggcgtggttcactgcctattattgttgctggcaatggtttttagctgtaacaatgctatgtttaaatggagaatgtcatctttcgatggttgtttct

SEQ ID NO: 17954 - DNA, 471 bp, Zea mays
  Clone ID: LIB3076-037-G11_FLI
cgccccgtagtgcagtgcagtgcagcagtgtgctacctcctcagtcctctcactccatcacaaacgctagtcttcctctaaagctcggagcgagtctcagaagcgatggcgtccaagaggctgctgctggcggcgctgtgcgtggtggcggcggcgctgctcgccgtgcggtcggaggcccacggcctggaggacttcgcaagcagcgacgcgacgccggagatgcagaccttcttcaagcccgaggccgcggcgctcccggaggccctggacgcgtcctccatgcccgccgccaccatggccgcgaagccggaggccacgtcgatcccgaccaccaccaccggcaccacggcggcggcggcgggcacctccgccgcggcaggcactactgctgcgtcgccgccgcgcaggtccgtgtccgtggccgccggcgtggcctgcggcgtggctgccgtggccgtggtcggcatc

SEQ ID NO: 17955 - DNA, 650 bp, Zea mays
  Clone ID: LIB3076-039-B9_FLI
tcttgccaatgcaattggtggtcaggccctgagattagaagacctggaaactttcagacctgaagaagggatgatccttgctaatgcaacatcattggggatgtacccaaatgttgatggtactcctattccaaagaaagccttgggtttctatgatgtggtatttgatgccgtatatgccccaaaagttactcggcttcttcgagaagcagaagaatgtggagttaaagttgttagtggtgtggaaatgtttattagacaagccatgggtcaatttgagcatttcaccggtggtatagaagctcctgaaagcctgatgcgtgagatagcagcaaaatacacctagcaggctaatggcgaaaacctatctttgatgaatatttgcccaaagattttctcgggctgagtgaataaatgttttgcagttatcatgtttgctgttatgttagatttagccgacttgtcacctgcacactgtaagattatgttgccatgctatagtgttcttgtacctgcaatagaagagttgcaagaataaagagtcagcttagaaccaacgttatgatgaccaagggggaaaatatgcatcaaacaatgattcagttggcagttggttcagtgctgatcatggcggttatactgtcctgcat

SEQ ID NO: 17956 - DNA, 542 bp, Zea mays
  Clone ID: LIB3076-041-C9_FLI
ccgaggtcgcgttgaacgatcacagccatctggttctcaaagaggatgacgttataggtatcttagaaactgatgacgtgaaagacatgaagcctctgaacgaccgtgttctaatcaaggttgctgaagctgaagacaaaactccaggaggcctactgcttacggaaactgccaaggagaagccatctatcggaacggtcgtagcggttggcccaggccccctggacgaggacggcgagaggctcgcgctgtccgtctccgcggggagcactgtcctgtactccaagtacgccggcagcgagttcaagggcgccgacggcacgaactacatcgtgctgagggcgtcggatctgatggccgttctctcctgaactgggcttgggctggaggacgaacgaggtgcaggtgcaggagcaggcttagcaataccgtaggattcctcgcggctttcccgtcccctcccccctcctacttggttgtcttgtttgactgtcttctgaggaaccgaacaacagtaataagcacaccgatgccgttcatac

SEQ ID NO: 17957 - DNA, 1107 bp, Zea mays
  Clone ID: LIB3076-041-E11_FLI
ggtgatgatttccttgcaatgttggaagaaagcaaggagcttacatcatcaacaagatggagcaaagcaatacttatgtttgaagatgatgaaagattcaaagcagttgagcgtccaagggagcgtgaagatttatttgagaactatcttgtggaactgcataagaaggaaaaagccaaggctgctgaagaacacaaaagatatgtagcagagtacagagcttttctagaatcatgtgacttcatcaaggcaagcactcagtggagaaaagttcaggaacgcctggaggacgatgaacgttattcccgacttgagaagtttgatcggttggatatttttcaagagtacattcgacacctagagaaagaagaggaagagcagaagcgggtacaaaaggatcaagtgagaagacaagagaggaaaaaccgtgatgggtttcgtaaaatgttggaagaacatgttgctgatggcacacttaatgcaagaactcggtggcgtgattactgtgcacagataaaagattcacagtcctacttggctgtagcatcaaacacatctggctctacaccgaaagagttatttgatgacgtgatcgaggaacttggcaaacagtatcaagaagacaagatccaaattaaagaagtggtgaaatctggaaagattcctatgacaacttcatggacattagaggaattccaaactgctactctggaggatgatgctcttaaaggaatatcaaccatcaacatcaagcttgtatatgacgatcagcttgaaaggctcaaggaaaaagagcaaaaggacgctaagaagcgccagcgcttgggtgaaaatttttcagatcttttgtattccatcaaggaaatatcagcttcttcaacatgggatgattctaaacagcttttcgaggatagccaagagttcagggccttggacagtgagacttatgctagagagctttttgaagagtgcgttgtccacctgaaagaaaggttaaaagagaaagaacgtttgagggaggaagaaaaggcaaaaagagagaaagagcgtgaggagaaagagaagaagaaagagaaagagaaagaaaggaaggagaaagaacgcaaa

SEQ ID NO: 17958 - DNA, 1168 bp, Zea mays
  Clone ID: LIB3076-041-G8_FLI
attggacaccgaatgagcagcgagcaccagtttaggcaagtgagcagctcgccagttgtcggtcgcggcctcctgcgctcagcgcttcgctcgcggtgccggtgcgtgaggtgaggttgatgggcgcggagggatgagcgagagcgccttgaccataaggcggctgagcgggccgtcgaacggcggcggcggcaatgcgggagctagctcttgcgcggtcggcacctggggaggaggaggcggcggcggcggcggcaatgcggcgagcatccggggcgtcaacgtggggctcatggacgagaaggtgctgcagctcgtgttcctggcgctcaactgggacccacagtcgctgtgcgcggtggcgcgggtgagccggcgcctgcgcgccgtggcggagcgggtgctgtggcggaagctctgcgtctcgcgggcgccgcggatggtggcggcgctgacgggaggccccgcggcctcggcgccggcggccgggcgcgtcggcggcgggtggccggcgctggcgaagctgctgctcttctgctgcggcgccgcgggcgcgggcgcgggcgtgccgggccacttcgccccggtctcccgcttctccaagacgtccgggcggagcttcctgccgcgccgctgcgcgggggacctgctgtacgtgtcggacccctgcgagcacgccgtggcgggcgccgacgacgtcggcgtctaccgcggcgtgttccgcggcttcatgcggtcccggacgcgggcgtggctggtgggccaccgcgccgcgctggagccccgcgcgcgatgcccctactgcggcgcgcgcgtctggagcatggccgccgcggggctcgccccgcgcagcgcgtcccgcaggctcggcgcccacgagggccggctcgagtacttcgtctgtgtcagcggccacctccacggcagctgctggcttgtgcgcctctccgacagcgagggcaccggacccgacgccgacgacggcgccagcgacgaggacgacgccgatcgacgggagggaagtgtacagagtattagatagcgtcaacttggcatttctccaccttgttgtctttgattcatcttgtaaagttgtaaattgatagactagctccaacaagaagctttaaagggttctgtaccctaaatttagggtgcgtttggttgc

SEQ ID NO: 17959 - DNA, 615 bp, Zea mays
  Clone ID: LIB3076-041-H6_FLI
ggcagtaccagtagcgcccggccttcagcttactacaacgaagccgctgatcctcctggggtcaccagagcagatcttgaacctgctccaagagacggtggcagggaaagccaggaaaggcgccgctccttctcgtttctgtggccgtttggcccgtcgagttccagatccagttcttaccagtacgaacagaatgttgatgagcctgcagtatacgatccaaaccagatagcatattctgagtggcactatgaccactgactgaaaccctgcagcaagtgcaagctatctgcaattcgtgccttcaaccctcagctttggagaggcattcatcagctgtaatggctgcttgccgtataaaaaaaggatggttcttgcctgttatattgtgttcagtgcatagccttgctccgtatgtcctccgtatatataatcccttgcgtgtagtaagcggtgaactgaatgcatccagaatatcatgtcatgataaacttgaatatagtttcatggttgttatttcagactgaaaataaaatcaatcttctgttccggttatactgattctgaaagaattctagacctccgttctttctttcaagacctccgttcttgaat

SEQ ID NO: 17960 - DNA, 348 bp, Zea mays
  Clone ID: LIB3076-044-D8_FLI
gtggcggcgagcgcgggcggggcggcggcgcagcagtgcagcgcggcgcagctggcggcgtgcgccccggcgatcatcagcgggtcgccgcccacggcgtcgtgctgctccaacctgcgcgcgcaggagccgtgcttctgccagtacgcgcgcaacccggcgtacagcagctacatcaacagccccaacgcccgccgcacgctcacctcctgcggcatcgccgtcccgagctgctagggcgctagctcgtgcctcgtggtgtggatgaataaaaagatgcatgtcgatctctgcttactgttatcgtatctgtagtacctcgtgtgatatgaacaatatgtattattt

SEQ ID NO: 17961 - DNA, 554 bp, Zea mays
  Clone ID: LIB3076-044-E8_FLI
cttcgccttcgtggacgccgacaaggacaactacctcagctaccacgagcggctcctgaagctggtgaggcccggcggcctcatcggctacgacaacacgctgtggaacggctccgtcgtgctccccgacgacgcgcccatgcgcaagtacatccgcttctaccgcgacttcgtcctcgccctcaacagcgcgctcgccgccgacgaccgcgtcgagatctgccagctccccgtcggcgacggcgtcacgctctgccgccgcgtcaagtgaaaaaaagaagaagaagaaaaaaaacataataccctgcgttcctgctgccccggctgtctggcccccactactgccaccgacggcggcgccgaacccccgttccaatcatcatatcgtagacgacgcgcagcattaaactatcaatcaccggatctggctctttcttggccctgtactgtactattaatgttccgttcttgtttttttattcggaattgtcgccgtttcagtatacgtaaatctcgaggtcgataatacagtaatactaccaatttaactgtat

SEQ ID NO: 17962 - DNA, 479 bp, Zea mays
  Clone ID: LIB3076-046-C10_FLI
gtcaagcatctttgatgccaaggctggtatcggactgagctcttctttcatgaagctcgtgtcttggtatgacaacgagtggggctacagcaaccgggttctggatctgatcgcccacatggccctcgtcagcgccgccgccaagctctgacgtccgtgctcgttcctccagtagtagcctaggagaaaggctgcaattttgacggccattttctgttagctgttgtgtggaataaagatcaaatgctggaacacttcgaactcgcgcgagactggactcagatccatggcctgtattttagttgtagaagggggcaaatttgcaccgtagtaccatggcatggctatatgcggaactgttgattgatgagtcgttgtacggtttgtcgacttgatgatatgttgatgtgggagcccctgaatgaggcggtattaatggaaatataggatggcaatgacaatccgtcaacttgcaccct

SEQ ID NO: 17963 - DNA, 1341 bp, Zea mays
  Clone ID: LIB3076-047-B9_FLI
gagatgctgaatcgtcaggtcgtgaagtctgattcagcgattatcaagattccagagctcgactttgagatccctccagaagctcaacgtggaacactttctactgtggaagggattattatgcgagctgtggatgagctgcaggctcttcaagatgaacggaagaaagtggatcctcagaaggccgaagctatcgatcaatttttactgaagttgagatctcttgggtcaggagaggctgcattcacttttattcttgatgatcctgcaggaaacagctttattgagaatccgcatgctccgttattagatcctttactatctgtgagattctacgaaagaactcgtgaacaacaagcagcacttggttttcttgctgaaccaccaaaagaacaacctggagaggctgtattgcctgcttcagcagtggaatccaattctgatgggttgcaaagcgtgccccatggctcagttggagctgttgcaggtcgtcgtgctatagctcagggaaaccctgatgaagttgctgcagcattgtgtagatattcagcaccagaagaggttgatactttaccatcaacatgtggagcctgtggaacagaatgcgtcacacgtttctttgctacaaaaatcccatatttccgggaggtgattgttatggcaacaacatgtgacatgtgtggttatcgcaattcagagctgaagcctggcggtgaaattccagctaagggaaagaaaattacactgcgtgttcaaaatgcacaagaccttactcgtgatgtcataaagtcagattcagctagcgtaaaagtacctgaacttgagttggaactttcatgtggaacgttgggtggtatggtcacaactgttgaaggtttaattgtgaaaatatgtgaggctctggagagaatacatggatttcaattaggcgatagtacactggaatggaaaaagaagaaatgggatgacttcaaggagagactatccaagcttctgagtttacaagaagcctggactctaataattgatgatggattggcggcttcatttgtggccccggctactgattcgttagaagatgatagccaactaaccattgaagagtatcagaggagttgggagcagaacgaggaacttggcctgaatgacatggatacgtcctctgcagacgcggcttacaacacgaccagcacataatttttttagttttgttgtgccgaatgtatttgttacgctatcagtttactttgatgaactttcagtgtgtatactaatatcaacaacttatatttcctctgacgataaacatcgagcggtaatgcgtcgaacgatatttgggat

SEQ ID NO: 17964 - DNA, 2204 bp, Zea mays
  Clone ID: LIB3076-047-G3_FLI
gggggaagaacaccaaccaagcaggacttggtttttgggaactccatgggctgtggaattgtccccaggaatcccctctgggtttgacgagattcatacagatacatatatttaattttttcccctttcgtttgctcaaaaaatcaattgtacaggcgaaactgcttgtttgtgctttgtttcttccgtgtttgtttccttgggattttcctctggtccgttcttcttcacctgtggggtgggaggagcagagacaatcatgggaaagcaaggaccctgccgtcattgcggagtcacaagtactccgctgtggcggaatgggccaccagataagccggtgctctgcaatgcgtgtggctcgaggtggagaacgaagggttcattggcaaactacactccaatgcatcgcaatgacaatattgatgatgatgaacccagagttagcaagctgaagccaccgacgtcaaagttgaagtcacagaagaaaaaaacaaatcacattataatggagaatggaccattctctagtcagaatttccgaaagatgggggatgatgacccaagctatcggtctagttcaggatctgcagtatcatactctgggagttgtgccccatatggtgctgctgatgcaagtgaaatgactggttcagcacagtcacatgcttgggagtccctagtgccatcaagaaagaggagctgtgtcacccgtccgaagccttcacctgttgaaaagcttgcaaaagagctgaactctatcatgcatgaagagaagttatattacctttcagaatcatcagaggaagacctactataccatagtgaaactcctatcggttcctttgaaataggctctggaagtgtgcttctaagacatccaaactcgaaatcactggaggaagaatcaaaaacaagctcaattcctgcagataataaatcatatattacaagtgaatcctattcagactctgcctcatttgtcgttcacagtggaaacaaggcagcaattaacttaaatcttccaactgcaaggtcgaagaagtcgccgctgcatatggaagacaatgctagaagggataaacttcattatgagaatcagcatgtcctggagagtgttgattcgcctttagtttcagtagatttagaggatgttataaactatactaacttcatgaaatatctaactaaagaggatcgacgtcagttgctcaaatttcttcctcctgtggactccttaacacctcctgaaagccttagaagcatgttcagttgtatccaattctctgatgctattgacagctaccagatgctgcttcgagagggaattctcgacccatccttatgtggtgatgaggaatggaagaaagtgaagacgcttgccttaactaatttaacaaaatgcagttggctggagtgctataaacagaaaaagggagctaaagaaaccgggggagtggggggcatcagtggaccggaaggctttaccaagtctactatgaaaccactcaaaagaccccgtgacacccactttcagagtgacgcagaactagatggtaccatgaggagtcctctaagagttctaaaatccggggctttggctcttcagtttgaaagttcatctttgccaaaatctagctatgccaccgaagattcaacctgcactggaggagcacctaatctattcatgttacccctagaaaagctaccattactggtcccttctcagtatgccgtctctgatcaagacttgctgctggaaatacctctcaacgcacgacacccagaggcagaacttctctgtcaaccatctcagctgatgagctctataaccagcagctccacctctatgggcggggttgctgaaggagaagggtacctgaagcaaccatagtctcaggtcacatcagcaagcagcttaggaacagccagtagttgcagtttactttaacctcctggatcgtgtcgcctctctgtgccgatcaccaatgggcctaagtgtccttatttacataacaatgtgcttcgtatgccaacttggcgaattgtcggttcagctaatatttgtagcatgcttttggatcggctttctgctggttttctgtaacatatggctcatggagaaagcattaacttatctctgtatggaaaaaaaaatatcaccatattgtaggaaaatgaaaaaagaggataatggagagttgttt

SEQ ID NO: 17965 - DNA, 1094 bp, Zea mays
  Clone ID: LIB3076-047-G4_FLI
gttgactagacttttgatcacaatgcaacaaagaataggggcagcaaaaactgatatggaggatctcatagcacgactaaatcaggaagcagctgttaaagaatatcttactacaaaggttaaggatttggaggttgaattggaagccgcaaagcaaaagggtagagagacactgcaacaagctatcctgactgaaagagagaggattacccagatgcagtgggatatggatgagctccgtaggaagtattctgagatggagtcaaacctgaaggctgaacaaaatgagaaaactcgtgcagagtcagagaaaacaaccgctagtgataaaaatgaaacattacttgaagaattagaaatcaaacgaaaagaagtcgagactttgaaacatcatcttgtagaagctgaggcaaagtctaaagcagataagaaagttcttgtaaaagaggtcaagtctcttagaaactcccaaacagagatgaagaaagtgttgaatcagtatcttgaacagaagactggtttagagagagttattattagagataaacagaggtcagcacgtgcaaagttatgccgagtgaaatttcttcatgagtgtcgactgctgcatgagcgtctactggaatgtagtgctaaatttctagcagaagaacaaggcaattttactattgatccttcgtccttgcctgatgcattagatcttctagcaacatcagacaatagagtacgcttactcattgctgaggctcaacttttagcacgagatgatgaacaaggctcttctgatgatggcgacaattctgatagcatatcgtcattaactatgagctgggaagatgcaaaagttacagatgaagatgcaacgaaaatactttctgatctacttattgacaacgcgcagctgaggctgcgtcttaatgctgtcatccgcaacgctgtaaatactgccgtgaagccagagaaagaaggtagtggcgaggttcttcccaaaaagacagtccttaactggttgttagacagatgagaacacctatgtatattcctgtgatttaggtttcaaacttacgcggcttgaccaaaattatatgatgagc

SEQ ID NO: 17966 - DNA, 1405 bp, Zea mays
  Clone ID: LIB3076-048-E1_FLI
gacctcttacagggcgatatgttccaccagaagtggctgcagtccgtgtacctcttctccacctttcaaacttccaaataaatgattggcctgagctttcggcaaaaagctttgcaatcatggttttgatgcttccatctgatagtgcaagaaaatggcatgtacatgaattggagctggttgaggttgttgctgatcaggtagcagttgcactatctcatgcggctattcttgaagagtccatgcgagcacgtgatttactaatggagcagaatgttgccctggatttagctcgaagagaggctgagatggctatccgtgctcgcaatgattttctagctgttatgaatcacgaaatgagaacacccatgaatgcaataatagccctttcctccttgcttttggaaactgagcttactcctgagcagcgtctaatggtggaaacagtactgaaaagcagcaatctgttagcaacactcatcaatgatgtgctagatctttccaaactcgaggatggaagccttgaactggagattaaagcattcaatcttcatgctgttttcaaagaagtgatgggtttcattaaaccaattgcatctatcaagaggctatctgtatcggttatgttggcaccagatttgccgttatgtgccattggtgatgaaaagagactcatgcaaactattctgaacatctctggcaacgctgtaaagtttaccaaggagggacacatcacacttgtagcttccattgtgaaggctgactctttgagagagttcagaaccccagaatttcatccaactgcaagtgatgaccatttctatttgaaagttcaggtaaaagatacaggctgtggaattggtccacaggatctacctcatgtatttacaaagtttgctcatcctcaaagcggaggaaaccgagggtttaatggtagtggtcttggccttgccatatgcaagaggtttgttagtctcatgggagggcacatctggattgacagcgaaggaaccggaagaggttgcaccgcaacattcgtcgtcaagctcggcgtgtgtgacaacacaaacacctaccagcagcagctgatccctctagtatggccaagcagcgcagactccgatttgcgtgctccgaaacctcttccggacgggagaggatctactcccttgaaatctcggtaccaaaggagcgtatgagcctagtgtaaatgattgacggcatagtgccaagtaggggaccgattagtgccaccgtctaattttgtttgtaaccctgtcatagcaggcatatgatgtacaaatactgtaaagcaaatggagactgcggccgtgtatctgggtggcaacgctgacttgctgcattgagtggtatatacatatgctaccagcggattgaattgctt

SEQ ID NO: 17967 - DNA, 939 bp, Zea mays
  Clone ID: LIB3076-052-A10_FLI
ctccactccaaacaaggggaaggcgagcgacagacaaacccaccccatcgcccctcctctgtctcctctcttgcccacccgccccaatgtcgccgcccctcgagccccacgactacatcggcctctccgcctccaggagcaaggcgccggcggaggaggccgcgtccggagctgggcccatgtacgtgaaggtgagcatggatggcgcgccctacctcaggaaggtggacatcaagatgtactccagctacgaggacctctccctggcgctcgagaagatgttcagctgcttcatcgctggtcaaagtggtctgcataaatcatcgagcaaagacaggctgactaatggctcaaaggtggatgccctcaaagaccaggagtatgtccttacatatgaggataaggatgcagactggatgcttgtcggtgatcttccctgggattattttacctctatctgccggaagctcaaaatcatgaggggctctgatgctgttggaatagctccacgaaccgtcgagcagacaggtcagaacaaataagctttggcctttgcctgcatccaaggaagacatctgagctagctgggagagtatgttgaaggctgaagcctgaaatagttgccgggaatcgtcaaaacccgtcaagtgtttagtgtagttttcacgtgtccttgagacatgtgcatttgtatgtttgtgacgtgatccgttagatcgtgcaatcgtaggttgctgttcttgtgccctttaaaggccagacagatcagggagctctctgcttccttagtgcacttgctttgcagcattccttgttattctactctgaaatcatacatcatgccacaagaaccgatggttcgtgatgtcaagagagctgccctaattgttccattgtaacctcgtaattgtgttcttccgcaggagaaattggttctgc

SEQ ID NO: 17968 - DNA, 363 bp, Zea mays
  Clone ID: LIB3076-052-D1_FLI
gcgccgtgctcgacaacctggcgctctccgacgtcgggctgctggaccagatctcgtccgccgacgacgtgcgctccgccgagcgcgccgacggcgccggccaggtgtactacgagtacgaggtggcgggcgccagcgcgcacagcctcatatcggtgacgtgcgcacggaacaagctgtacgcgcacttcgtcaccgcgcccaacgccgagtggagccgcgacgaggccatgctccgccgcttgcacgagtccttcaagaccatccagcccggcgccccgccaccggccacggagacctagctccatctgagcacgagcgagaaacctactgagcgattcgcggtgcgttgtaattgctagt

SEQ ID NO: 17969 - DNA, 813 bp, Zea mays
  Clone ID: LIB3076-052-D11_FLI
gtgcaggtggaggaggcgtacgggctcacggagcacagctgcatcacgctgacgcacgctagcggcggcggcgaggacgtggggtcggcggtgcaggtcgccaagaagaagtcggtcgggttcatcctgcccaacctggaggtgaagttcgtggaccccgacacggggcggtcgctgcccaagaacacgccgggggagatctgcgtgcggagccaggccgtgatgcagggctactacaggaggaaggaggagacggagcgcaccatcgacgccgcggggtggctccacacgggcgacgtcgggtacatcgacgacgacggcgacgtgttcatcgtggaccgcatcaaggagctcatcaagtacaagggcttccaggtcgcccctgccgagctggaggccatcctgctgtctcacccgtccgtcgaggacgccgccgtcttcgggctgccggacgaggaggccggcgaggtcccggcgtcgtgcgtggtgcggcgacgtggcgcgccggagagcgaggcggacatgatggcgtacgtggcggggcgcgttgcgtcgtacaagaagctccggctgctgcgcttcgtggacgccatccccaagtcggtgtccggcaagatcctgcggaggcagctcagggacgagttcggcaagaagacggcagcagcgtaataatgcacatcatcctgtgggtggctgcttgatgaagacaataatacaattagggtacagtcagatgttccaagctactgatacaattgttgtttctgcaaacagtactcccaactagtgcatatacattggcattgtggaccc

SEQ ID NO: 17970 - DNA, 709 bp, Zea mays
  Clone ID: LIB3076-052-E9_FLI
ccgcattcgttccaactcctgagcactttctcctcgtcccagacaagccaatcgaagccgagatacgaccatggactccaccggcaccggagcagggggtaaggggaagaagggagcggccgggcgcaaggtcggcgggccaaggaagaagtcggtgtcgaggtccgtgaaggccggtctccagttccccgtcggccgcatcgggcgctacttgaagaagggccgctacgcgcagcgtgtcggcaccggcgcccccgtctacctcgccgctgtcctcgaatacctcgccgctgaggttctggagctcgccggtaatgctgccagggacaacaagaagactcgcattattccgcgccacgtgcttctggcgatccggaacgacgaggagcttgggaagctgttgggcggcgtgaccatcgctcacggcggtgtgctccccaatatcaaccctgttctgctgcccaagaagacggcggagaaggcgtccagtggcgggagcaaggaggcaaagtcgcccaagaaggccgccaagtcccctaagaaggcatagactgactgtccggagtgatctgatgtttagcagtaccttgttaccagtatgcggtgatgcgtaggctgcagatgggacgaatgtgcttgtatgtgtatgtgtcctgctgcaagttgtcctttgctatttagaatggaagaagaaatgccttgtttctct

SEQ ID NO: 17971 - DNA, 1304 bp, Zea mays
  Clone ID: LIB3076-052-G8_FLI
gcaataatgggctggttactgctttcatgtcgaatctgattacttctgattgatgcatatcctttttggctgttggctagcgaatgctttcagaaaccacctcttctgtttagctattttgggcagtaagtcaagcagtgctttgtattttgtaaataggcattctttatgttaataaatctgtatagaaacaaaattggtcattcaataatcaatagtattatcagaattacatttctgtactacaacaattattttatcaaacaagttaaaaaactatcttgggaattttatccaacctatttttttctaagtcatgtttaggaaggtaggtttgtaatttttactattacaagcagttatactaattgctattaaatactactcaatttacatttagcattctgtattcagtgctgagttgcttcatttgtttatggttagctgttactccttcggttacaaatacttgaacgacgtttttgggttgtctgaactcattcattctattctttgataacaacttacattttatgtgttgagttcgagggtttgaaaactacacaagcacattaaaatagtaaggtagtgtcataatagttcatttttattacataactatatattataattaaaaatttgggtcactgatatcaatgtgtaaaacatcacttatttgcagctaaatggagtatatcattactatacctttgtctttttatatttatataaaaacacaatcgaatggagtccattcgtttcattgaacttgtctttgatgctatgaatgtttagtcacatgtagcagtttatgccctggtgtattaagagggtgcactaactgtgcttgttgattccctgttttctattaagtctaagttctgtttatatggatttttgtatgtatgattgcattgttctttgtatgaggctgcatatggcgaggcgatgtctagtcagcacggaccatactatgactagaggacctcacctattgatccccaggctgtgtatgcaagtggtggaaaagctcatggaaggtacacaatgtttgctaacgtcatcgacttgagccaggtgagggttcagcgtggaggtttgtcgaggtctgctgctcgtagctcccgtcgctccactcaagatccagcaaaagtggagcaactgcgcgaagaacttaggcgaaatcctcttcgctagtggaggtatcgaccatcactcgtcactgtaacccgatggtgatcgacgaccatgagcttccatgttattgtgttctgatacttgagaattttattatgagtatgatg

SEQ ID NO: 17972 - DNA, 1258 bp, Zea mays
  Clone ID: LIB3076-053-E1_FLI
cacttcttcagcggcagcgtggcaacgagagcaacgaagtattcaaaccgaaaacaatggagccggtgcggaagagcgtgtgcgtgaccggcgctggcggcttcgtcgcgtcggagctggtgaagctcctcctctcccggggccaatacgcggtccgcggcaccgtgcgcgaccctggtgctagcaagaatgcccatctcaaggtgctggaaggagctgaggaaaggttgcagcttctcaaggctgatctgatggactacaacagcattgcatcagcagttgccggctgtgagggtgtcttccatgtagccagtcctgtcctttcccatcgaccctccaaccctgaggtggaggtcatagctcccgctgtaataggtacaaccaatgtgttaaaggcttgctatgaggcaaaagttaggcgagttgtggtggtgtcttcatgtggagctgtgtatgctaatcctatttatccgaagggtaaggtgtttgatgaagactgctggtcagatgaggattactgcaggaagaaggaggattggtatttagtttccaaaacactgtcggaacgagaagctcttgcttttgcagcaaaaacagggctggacgttgtaactgtttgtccgtcattagtatttggacccttgatgcagcctacagtaaatttgagcagggaaatgatccttaaatatttcaaagatctcgagactgttgaaaatgtactcagtaatatggtggatattcgtgatgttgctgatgctcttcttctgacttacgaaaagccagaagcgtctggacgatacatctgcagttcacatgcaataaaaatttctgatatgataaacatactgaagaccatgtatccgtcttacccttatcccaaaaattttgtggaagatgatgtcaactctgtatacagctctgagaaactgcagaagctggggtggaccttcaagcctatagaggaatccctccgtgacactgttgaatcctacaaggcatttggcatcctgaattgaacatccaactaggactgtttccatctgctgttgcctccgaactcctcctgaataatgtaggcgcagttaaacagcagcagcactgccgatctctttatttttcaatattgttatctagtggttcaggaccaaataagtaggccaggtgctgactgttgtatggtttgtggcctattgtcgttgctaaaaactagaaatgcgcgtactaatgttgcattgctgcacttgatttgtttatcgcg

SEQ ID NO: 17973 - DNA, 1157 bp, Zea mays
  Clone ID: LIB3076-053-G3_FLI
cgcgcggcgcggtcatcctgaccggctgcaaggctgagtacttcgtcctcgagaagaaccacagcagcggcagcggaagcgggcggggcaagaagtgcgtgggcctggtggcgacctgcgcgagcaacggcgtcaccaagaaactgcgcatcgaggccaaggtttcgatcgcggcttgtggggcgctgatgacgccgccgctgctgcggcgtagcgggctcaagaaccggcacatcggcagcaacctccacctccacccggtgtccatggcgtggggttacttcccggagaacaagcaggaccccccgctctctggcaagtgctacgagggcggcatcatcaccagcatgcaccgcgtcacggaccgcaccatcatcgagacgccggcgctggggcccggcgccttcgccgcgatggtgccgtgggagtccggccgcgacatgaaggagcgcatgcgccggtactcccgcacggcgcacgcctttgcgctggtccgcgaccgcggcgtcgggttcgtggacggcgaaggacgcgtgcgcttcaccccgagccgcgaggacgtcgacgagctccgcaacggcctacgccgcgtgctgcgcatcttggtggcggcgggggccgcggaggtcgggacccaccgcagtgacggtctccggctgcggtgcaagggcctccgcgacgaggacctcgaggcgttcctggacgaggtgaccatcgagaaggggcccatgcactcgagggttgacaagtgggctctccactgctcagcgcaccagatgggcagctgtcgtatggggtccagccctaaggacggcgccgtggatggccgcggcgagagctgggaggcagagggcctgtacgtgtgcgacggcagcctgctgcccacggcggtgggcgtcaaccccatgatcaccatccagtctatcgccttctgcctctccaagggcatcgccgagaccatggcccaggggcagggcaagggacagtagcctatgattgagacgcgcctggcgatggtttaattcatgcgtgcaacactgcaacatgtgtgcgttcttgttaatcgagtgtggtgaaagcgtcgaaaaatgtgtttgtgcattgtgtttgtgcaaatggtacgcgaatcacaatacatcctgtttcctgccccggtc

SEQ ID NO: 17974 - DNA, 1085 bp, Zea mays
  Clone ID: LIB3076-055-A5_FLI
aagcggaagcgaggcgcccgtcatgctctgcctcagcctggtcgcgccaccaccgatggcccccgccggccggcggcggcggcggcggcatccgacttctgtgacccgccgcggccaaaccctcgccgccctcccgtgccactgtggacggcggcacgtcatcggtgcctcctcggctgccgctctccttcctttcctcgcccctccttctctggccgctccgcccgtcgaccccgacgtggtgctccagcgagtgcacccgtcgaggccggactggtatgaggagttctatgcctcggccatggaccagggaatgaaatcatacgaagcagagatcgcaggatacaaagtaaagctcttctctcatctgtcgcctgcgggaaagaacattctcgagctcggtgttgggacagggcctaacttcaaatactatgcaagtgaagatggggttaatgtgatcggagtggaccctaacaagcacatggagaagtatgcaagggctgctgttgtgtctgctggactcgcgtcgtcgagcttcacattcaggagaggggttgctgaagccttgccggcagaagacaattccatggatgtggtggtcggcacactggtgctgtgctctgtaaacaacatcgacatggcactgagagaaataaagcgagtcctaaagcccggtggtctctacgtgttcattgaacatgttgccgcaccagatggtacgttgctccgcttggttcaaggtgcgcttgatcccttgcagcaattggtagcggacggatgccacctcaccaggagaaccggacagagcatccgagatgctgggttctcgagtctgagcctggacggtgtccgactgtcgaacgcctacatcattagccctcatgtttatggcgtagcctgcaagtgaggtaccagtccctaaatcctcattggcaaagtccttcgacgagttgtctatatcttatttagcacttcggcttggtatctttgtctttgtaattggcgaaaaagaaatcgggaatggactataggaatacaagtacttcaaagaaaatgggaaggaagtgcttttgccttctaaaagg

SEQ ID NO: 17975 - DNA, 1070 bp, Zea mays
  Clone ID: LIB3076-055-B11_FLI
tcttggagggggtgacccttggagaggggccagatcagcatgtgtggaagtttactcaatccgattgctacactagctaatcagcctactctgctttctttgaggggtctgtcaagttcagaccttggagattaatttggaagagttgggcctcctctccgctgcaagttctttctttggcttgccaggaacaaccgatgttggactatggatcggcttgccaaacgaggcctttctcacccagattcatgtcccttgtgtgaccaagccggtgagacccttcagcacattctaattggctatatcttctctagacaaatctgggccttgattttgcaatccttgcatctagaggccattacgcccaatgggggcagagttgggcagagttgggtttcttctcatggtggacgcgctctgtcaagatggttcccaagaacattcgaaaagggtggaacactctttttattctgatagcctgggaaatttggaaatttaggaacttgtgtgtgtttgaaggctcccagccaaatgtggaactcctacataggataggaagtgagggtcttctttggtgtgctgcaggagctgcaaggttgcttgagctcctgaataggtcgttatccccagcctcctaggtgctggtggccctggtcgtcggtttttgttgttcttttgtgtaaaacctagctgtctgtacttgggttgggtcattttgaccttgttgtctttttttaaatgaaatgacatgcagctctccccggtcgttcgagaaaaaaaagatggcatgaacatgtccaattcatagaacattgaacaactaagttatttttgtgtttaagttttctttacattaacctttttttcctccaaacaccccgattctattttgttacactcaggatgttggggggtgttaacacacggcgactctgaattggccatgctaaggaaaacgatagtgcgatgtgaagtatatgtattttctgaaagccagatcgtttgggtctagccctgatgtatgcagaacaagtgattattgtaatggatcctgattatcctcatcatcc

SEQ ID NO: 17976 - DNA, 1456 bp, Zea mays
  Clone ID: LIB3076-055-E4_FLI
gcttggttcttcatgtcgttccactggccaccgagacaaaccgccaatctcaaaggctgccataattggtgttgctgtgggtggacttgttatcctcctgatgatcttagtagctgtatgcaggccacaccatccacctgcttttaaagatgccactgtaagcaagccagtgagcaatggtccacccaagctggtgatccttcatatgaacatggctcttcatgtctttgatgatataatgaggatgactgagaacttgagtgagaaatacatcattggatacggggcatcaagtacagtttataaatgtgttctaaagaattgcaaaccagtggcaataaaaaagctgtatgcccactaccctcagagccttaaggaatttgaaactgagctcgagactgttggtagcatcaaacaccggaatctagtcagccttcaagggtactcgttgtcacctgttgggaacctcctcttttatgattatatggagagtggcagcttatgggatgttttacatgaaggctcatccaagaagaacaaacttgactgggtgactcgcctacggatcgctcttggtgcagctcaaggcctcgcttaccttcaccatgactgcagcccacgaataattcaccgggacgtaaaatcaaagaatatactcctcgacaaagattatgaggcccatcttacagacttcggcatcgctaagagcttatgtgtctcgaagactcacacgtcaacctacgtcatgggcactattggttacattgatcccgagtacgcccgcacctcccgcctcaacgagaagtctgatgtctacagctacggcatcgttctgctggagctgctgaccggcaagaagccagtggacaacgagtgcaatctccatcacttgatcctatcgaagacggcgagcaacgaggtcatggagacggtggaccccgacgtgggagacacctgcaaggacctgggcgaggtgaagaagctgttccagctggcgctcctctgcaccaagcggcagccctcggaccggccgacgatgcacgaggtggtgcgcgtccttgactgcctggtgaacccggagccgccgccgcagccgcagcagcagcagcagaaggcgcacgcgcaccaccagctgccgccgcagccgtcgccgccggcctacgtcgacgagtacgtcagcctgcggggcaccggcgccctctcctgcgccaactcgtccagcacctcggacgccgagctgttcctcaagttcggcgaggccatctcgcagaacatggtgtaggggaagacgtagacgttcggtgaggcgccttgagtgaggccgattgcagggagtagtttgactgacattttgtgggacgcagcgcaggagattaacatgggactcagtagctagggtgttgttagctgtaaaaagtcatgtgacgcaacgcaagagcagcggagcttcttcctc

SEQ ID NO: 17977 - DNA, 645 bp, Zea mays
  Clone ID: LIB3076-055-G11_FLI
gggctcgtctgcctctgccctgcccttgccctgcccccatatatgcatgccattgccacccccaaagtgtaagcacaaccaacagcaaagaagagacgacgtcgatcgatcgatctcagcaaccaagcaggtcgtaggtaggcatggcggccgagaaggagggcgcggtggtgaccaagggccacgacgaggggatgaaggcggcggcggcgctgctggaggagttcgggctcccgccggggctgctgccgctggaggacgtgacggaggtggggttcgtgcgggccaccggctacttctggctcgcgcagcgcaagaaggtggagcaccggttccgcaagatcggcaagcaggtgagctacgacgtcgagatcgccggatacgtccggcccaggggcatcaggaggctcaagggggtcaaggccaaggagctcatgctctggccgcccgtcaacgagatggccgtcgacgacgacccgcccaccgccggcaagatccacttcaagagcctcgccggcgtcaccaagaccttccccgttgacgccttcgccgccggccagtagccacccacgcgtaccatcttatattatatcactataataatacatacaccattatatatggcgcatatatatagtattaatt

SEQ ID NO: 17978 - DNA, 707 bp, Zea mays
  Clone ID: LIB3076-059-D4_FLI
cgcattcgttccaactcctgagcactttctcctcgtcccagacaagccaatcgaagccgagatacgaccatggactccaccggcaccggagcagggggtaaggggaagaagggagcggccgggcgcaaggtcggcgggccaaggaagaagtcggtgtcgaggtccgtgaaggccggtctccagttccccgtcggccgcatcgggcgctacttgaagaagggccgctacgcgcagcgtgtcggcaccggcgcccccgtctacctcgccgctgtcctcgaatacctcgccgctgaggttctggagctcgccggtaatgctgccagggacaacaagaagactcgcattattccgcgccacgtgcttctggcgatccggaacgacgaggagcttgggaagctgttgggcggcgtgaccatcgctcacggcggtgtgctccccaatatcaaccctgttctgctgcccaagaagacggcggagaaggcgtccagtggcgggagcaaggaggcaaagtcgcccaagaaggccgccaagtcccctaagaaggcatagactgactgtccggagtgatctgatgtttagcagtaccttgttaccagtatgcggtgatgcgtaggctgcagatgggacgaatgtgcttgtatgtgtatgtgtcctgctgcaagttgtcctttgctatttagaatggaagaagaaatgccttgtttctc

SEQ ID NO: 17979 - DNA, 1531 bp, Zea mays
  Clone ID: LIB3076-059-H12_FLI
cacagctctgccgcttgcctccgccggcgagggaagggacgaggcgccgagccggcaaccgttttcggggttgctggcggcgattggctgcggttccgcatcaaggctggtcgaacgctgcccctcctgattggtaggtagctcgagatggatctgattcttccatataaggttggggacctcgcggagtccaaatccttggtgagcggttacagaggtgcatggtttcgctgtaagatacataatatgcgtgtcaggcttggatacctggagtgttacttggaatacattgattatccaggcgaaaaaaaggaatgggttaggctctttcgaaagaactctgcaaggtccaaccaaaattcaagtgatagtattcacaccatgataaggccttcatttccaaaatggtattttgtgcatgaagttcctgagcagttcccaaatagtgatgtcacagcaattgttgatgaaacctggcaaattggtgatcgagttgattggttgaaggaaggttgttattggtctgggacaattactaagataatcaatgaagatctggtcgagatagagctgccggcacctcccataggtgaaggaaaatgttataaagctaaatgtagtgatctgaggcctactctcgagtggtctctagcaagaggttggatggtccctctttcacaggcaaatggaaaaggttggcatgctgctcgtctacttcaacattataaatctgaatcagatgatgataacgacgacaacgatagctgggatgcccggcaaacggtgtgcagagcttcaaacacgcatgaggaagctccaggccccatggtccccgcacctccgtcagccacaaacaacgctcccagccacacatatcagaaggatgctgctgtcgcatccacagaggacctgctgaagcccagctcaacatccaagtcgccagaccccaggcacgacgcccaagctagcactcaacctgcaggtacgggggtctccatgaagccggaaccggttattggagtctcaacaatcaagaaagaggactcctccttgacagaaggtgaggttgatggcggcacggaagagtgcctggagaagctgggtgcgatcaaagccaggctcaaatacctcatgcagggcacgcggctggaacatgagcgcagcgccaccttccgtgggtagtcaggcagatgaagctgcatcaaaggtgcaacttcacgcaggggtttagggtttagggccatctaacgcctgttgtggttgctgaattttgtgtcctgtggttacaggtattattgtcctgaataatgacgctgtgaataagtggtttgtttttttgagtgcggcaatttgtaggagctaagaggaatgtgttgctgagttaatttatgaattagaccgtgtccagcagttcactcatatggtcatcctaaacaccgcgcagtagagtttgaatattagtatgaggatggataaactggtgcagatagccttatgttgtgaatgaatatgttgctgagtaatcttttcc

SEQ ID NO: 17980 - DNA, 896 bp, Zea mays
  Clone ID: LIB3076-060-C3_FLI
ctcctatcgtcggagaaccaccgaatccaccgcatcgcagagacgagtagaggttagatttaggctgaggtaagatggtgtgcatccggcaggcgaccatcgaagacctgctggcgatgcaggcgtgcaacctgatgtgcctgccggagaactaccagatgaagtactacttctaccacatgctctcgtggccgcagctcctcttcgtcgccgaggactacggaggcagcatcgtcggctacgtgctcgccaagatggaggaggacccctccgagccctgccacggccacatcacctccctcgcggtcctccgctcccaccgcaagctcgggctcgccactaagctcatgtccgccgcgcaggccgccatggaccaggtcttcggcgctgagtacgtgtcactccacgtccgccgatccaaccgcgctgccttcaacctctacacctctaccctcgggtaccagatccaggacatcgaggccaagtactatgccgatggggaggacgcgttcgacatgcgcaagctgctccggcagccacagcccaagaagcaccaccaccaccaccatcacggccccggtgggtgctgctcccacgacgcaccagttgcggcgactggttcttctccccagtcttctggttcacccgataagaaggctatcacttgatgtaggactcgtatctacagagaggaatcaccaagccaattgtactcatctttcctctcactgggtatacaatatagtagttgtagcgagcggtctttccgtagtagaacggagaaagacctgtgcagtgagtatttgtgtacttggccgatggctcgaatcgtctgaccgaatcagcgagaatggcaaccaaatatgcttcgtacttgatacccgtgttgccttgag

SEQ ID NO: 17981 - DNA, 616 bp, Zea mays
  Clone ID: LIB3078-001-B4_FLI
ggcgtccgccaaggtcgccgatcgcatcgtgcgcgttctcgccatcgatctcgagggggggcgccgcgaggtcgtcggcctctccgggcagacactcctccgcgcgctcgccaacgcggagctcatcgagccggcctcccaccgcctcgaggatatcgacgcgtgctccgccgagtgcgaggtccacatcgcgcaggagtggctcgacaagctgccgccaccgtcctacgaggagcggtacgtgctcacgcgcgcgtccaggaaccgcgagctcaacaagcacgcgcgcctgggctgccaggtcgtcctcacgccggagctgcatggcatggtcgtcgctgtccccgagcctaagccgtgggacatcccgtaatggcctgccgcgacgaatggcaaggtgcggctttcgacgctgtgagccttccttcattcccctggctcggtcaagcttgtgcgcctctgccatacccttttatgttacggatttgatgaagaataatagtttgatgggaaaaacctgccattggttaacttttgttcttttgaatgtggagtgtaatggatgctgtaatgtggaatcccgttgcaattaccgcagttcaatgtttcatgggtt

SEQ ID NO: 17982 - DNA, 676 bp, Zea mays
  Clone ID: LIB3078-001-C2_FLI
cgacaagctgcttcagctgttcttgttgcacctgccgcgacacgcagtgctgtactccgatctgccgctgttcaaagaccccttcgtgcagccccggctgctgcacctgcagccttcccagctgcagctgcaagacgccaccaggctgcggccattgccgaccccagtgcagcagctgctgctctagtggttgcagctgcgcggactgcccgtgctcctgctcctgccccccgtgctgcagctgccccggctgcttctcctgtgaggggtgctcggctggctgcctcggcgctctcaaccggtgtctcggcggcctgtcgtcgtgctgcagtgggatgcgaccttcctgctgcaagtgtcagtcgtcgtgctgcgaggggggttcgtcctgccgcgacaccggcacgggagcgtgctgccgcggttcgtgcctcggtgccccggcgtcgtcgtgcccggagtgctcctgcggctgcgtgtgctcctgctccaggtgcaaaggaggatgccgctgcccgtcctgtggtagtaatccctgctgtcctggtggatgcttgtgctagatcagagtattatattactactagctagtgtgtctgttgctcttcttttcctgttgtggatgatttggcgtttgatttggatggaacctcgctagtgcataatattcactgtc

SEQ ID NO: 17983 - DNA, 1602 bp, Zea mays
  Clone ID: LIB3078-001-D5_FLI
tggtcctccttgttttcatccgcctgtccatcagtttcgaggcccacctatgtttaaccttagacctcaaatgaagttaaaccagcctggagtttcatatcccatgcatgatgctgtcgataggttttcaacccacatgcacccatttgggtggcctaatcatctggatgaatcatgcccacctcatatgcaagtttggaatggaggcagtagtgtgtttccgggtgaaccctatatttacggtagacaagagtgggatcagaatagacctcatggtggcagcagagggtgggagctgactggtgatatatccaagggaccaaatgatgtgccggatgctgaacttctgatagctaagaaggatccttactctgcaataactgctgtttctgattctggtggacaacataatcttcaaccccaggctgagcaaaaggagattggacacttgactgctgaaaaatttgaaacaaaggatgattctaaaagttcaaaaagtttggaatctcttcaaggagtacaacatgtgacttctatgctgacaaagaatggtgcggtcttttgtaaagactatctagccagaatcaatgtttcacatgaccttgttgagtctgagttgtacaaaaggtgtatatccttgctgggagacttgggcgtaacaaaagcctctcatttggttaggaatggaattcagcaggataacgaaaatattgaaaaaatgtctacaaaatatggacacctcaaccctttcagttcacgttacctcaagagtgacagtactatctttcagagggctttggcccttcgtaacaaccagactcgaaagggtttaattattgtctccgcatctgtaaaaatggaagcgaacatggatgtactagaagatgaccatggcaaggaaatgcttgaacaagtggtgagcaatcctgctctgcaacgtcacactgaggtcatggaggaaggatcactgtcaaaacaggaacttggtgatggcatagaggggactattccagcaactataggatctgggggtctggatgcacctccagaaattccccaacctgaggtggtggtggcaacaacagcaatcacacagtttaacaaggacatggaggatgtgttacctccagcaattgaggatggtgcactacaagcaaccctcgaacatgctgttggcatactggaagttacacctggtgatggcttggggaatgttgcaccttcttcaggtgatgacatggagattatgccctctgctatgacagaacctcgactaggcaaagaaactgctcctgttgctagccctcctgacagtcaagagaagccatccatcatgcatgattctgagacaggtatggaggttgataaagttatcgatgatattcatggggatggtagggtgagctctattcttggcaccaaacttgatgttgctgcaagtgatggggattctgaagctttgttggtggaaagtagggtaaatttaagtcggatacctaattccccagaaagtacacattgaacaccttttattccattttaatttctttttgtctgagggtcttctgccctcagcctagcccgagttgccatattttgttt

SEQ ID NO: 17984 - DNA, 636 bp, Zea mays
  Clone ID: LIB3078-001-F1_FLI
gtccgcgctagctgaggacggtacagcggcacagaggtgcgacgtacgacgacgacgacgcaggcgccacacatggcatcccagctctccgccgccgtgccccggttccacggcctccggggctacgccgcgcccaggtccgcggtggcagcgctgccgtccgtgagggtgggcaggaagaggtcgtcgtcgcagggcatccgctgcgactacatcggctccgccaccaacctgatcatggtgacgacgacgacgctgatgctgttcgcggggcggttcgggctggcgccgtcggcgaaccgcaaggcgacggcggggctgaagctggaggcgcgcgactccggcctgcagacgggtgaccccgccgggttcaccctcgccgacacgctggcctgcggcgccgtcggccacatcctcggcgtcggcatcgtgctcgggctcaagaacaccggcgccctcgaccagatcatcggctagatccctacgtcgtcgttgttaagatcagactcagcagcctcgatcgcgccgccggccggcaggtgcctgcaggtggtgactttgtaacgtgtgtgcgtgcgtacgtgtacattgcatccatcttggttccaatggacatatagctcctgttgctcctct

SEQ ID NO: 17985 - DNA, 653 bp, Zea mays
  Clone ID: LIB3078-001-F4_FLI
agacgtgcttcagagcgtgggcgctgcacgcccccgctggcagcaaggacaggctcctcgtcggcaacctggtgctgccgtcgaagcgggcgctcgcgccgctgtccgtgggccgcgtcgccacgcgccggccgcggcacgtctgccagtccaagaacgcagtggacgaagttgtggtggcggacgagaagaactgggacgggttggtgatggcgtgcgagacgccggtgctggtggagttctgggcgccgtggtgcgggccgtgccggatgatcgcgccggtgatcgacgagctggccaaggactacgccggcaagatcacgtgctgcaaggtgaacacggacgacagccccaacgtggcgtctacctacggcatccgcagcatccccaccgtgctcatcttcaagggcggcgagaagaaggagagcgtcatcggcgccgtcccgaagtccacgctcaccaccctcatcgacaagtacatcggtagttcatgagcatgccatgccatgccatgcatacatgcatcgacgactaaacacatatgtgtatctctagtagcctttgcatacgggatatgatcaattcaagcagccagccgtctgctactgctgtgttatatataccatacctccatgtcgaatccagagtacatt

SEQ ID NO: 17986 - DNA, 1252 bp, Zea mays
  Clone ID: LIB3078-002-A2_FLI
cgcacttcttacatttggagatccataatgcatttgggctttcagacagtgaagaatcacaggaacctaccaagcgacgcaatagattgggttcagcaggccttgcaccgcattacgccaatatcatcagtcagatcgatactcttgtttctcgttcaagctctgttccttcaaatacaagggatacattataccaaagtttgccaccaaccataaagtcatctctccgttctaagctacactcctttggagtcaaggaagagcttactgtttctcaaatcaaggctgaaatggagaagaccctgcgatggcttgtccctattgcaagtaacaccaccaaggctcatcatggtttcggttgggttggagagtgggcaagtaccggatgtgaactgcaagccaactgggcagctggacctgacccgaattgagacactgtaccatgctgacaaggacaagactgaagcatatatcctcgagcttgttattaggcttcatcatcttatcagtcaaactaaaactgctaatggtgagaggtctccaatcaagtctcctgtccagtctcctacacaaagaggggcctcaatcacattgtctccaaacataaaaaacagcaattcatcacctcttctgacgcaagaagaccaagacatgctaagtgatgtcaagtacaggacatttatccctggtataagcaaaagccaagagttttacactaaggaaatacatcataatcaaagcaggttaagcaaaagtaacagccattcaccaagcagtggcaaccggaaagaggcgctatcgatcaggaggctgcttcctgtgatcgactttgagatcgaccggacaaaagcccttgatgtgattgatagagttgacgatctgagagtacaatgatgaacctagattaaccaatgccaaagtctgaaaaatgcaccctcagtctatgatccacaaaatcaagattgcttgaaggataccagtaatcgctgagctaaattggcatgctgtcagagtggagagtcagtattgcagcaaggtgcctgcttgagataaccggcatcatggtgccagtttgatggcaccgttagggttagggatggtggccatgggcgcatgtcctggccaactttgtatgatatatggcagggtgaataggaaagtaaatttgtattgtaaaaagggatttcttctgtttgttaaagggatttcttctgtttgttagctcatgtacaaggaatgcaagttttgagcg

SEQ ID NO: 17987 - DNA, 685 bp, Zea mays
  Clone ID: LIB3078-002-A6_FLI
cgtcggacttcaagaaccaccagctgcctctggcccggatcaagaagatcatgaaggccgacgaggacgtgcgcatgatctccgccgaggcgcccgtgctgttcgccaaggcctgcgagctcttcatcctcgagctcactatccgctcctggctccacgccgaggagaacaagcgccgcaccctgcagcgcaacgacgtcgccgcggccatcgcgcgcaccgacgtcttcgatttcctcgtagacatcgtgccccgcgaggaggccaaggaggagcccggcagcgccctcggcttcgcggcgcctgggaccggcgtcgtcggggctggcgccccgggcggggcgccagccgccgggatgccctactactatccgccgatggggcagccggcgccgatgatgccggcctggcatgttccggcctgggacccggcctggcagcaaggggcagcggatgtcgatcagagcggcagcttcagcgaggaaggacaagggtttggagcaggccatggcggcgccgctagcttccctcctgcgcctccgacctccgagtgatcgatcggcgcgtctcttggtcctggcctcctggcttagctacatgtgcatgatgtcaatcgttcaatgtgccatgctgtgtatattctacagcaaacgtggtaatggagctgctatgcatatacagaacg

SEQ ID NO: 17988 - DNA, 808 bp, Zea mays
  Clone ID: LIB3078-002-C3_FLI
tgctgatcagagtaaagcaaagattcttaagtatcatattgtgaagacaccgagatcggtttacaaaactgtcccaaactgtgagccttgccggcctctccaaaggtcacctatcgaaggtttctatctagctggtgattacacaaagcagaaatacctggcttctatggaaggtgcagtcctatccgggaagctttgcgcccagtccatagtgcaggattatagcaggctcgcactcaggagccagaaaagcctacaatcaggagaagttcccgtcccatcttagttgtagttgcctttagctatcgtcatccccactgggtgctatcttatctcctatttcaatgggaacccacccaatggtcatgttggagacaacacctgttatggtcctttgaccatctcgtggtgactgtagttgatgtcatattcggatatatatgtaaaaggacctgcatagcaattgttagacctttgggaaagcaaaagcgataaagagatctcagatagatattgtgttctttcagacggtggttcctattcctatcaatcggttaatccatcccacatgggaggatttgtggtaagcttagtcagcaaacctctggtggtccctgaaggcctgaactttatcgggagagctgctgtagcaatccccgaagccgtgtgccgtttatcttgtcgggcatactttatttgctgagttgcagttattaagcatagggaggtgcggaatgcacttcgggcgtcgaagatatttttgctcagattccttgcgtctcaataattgtccttttgaatcccagat

SEQ ID NO: 17989 - DNA, 1473 bp, Zea mays
  Clone ID: LIB3078-002-E3_FLI
catcgatcacaataagatggcgtgtatagacaatgcaatgagagccttgttccttttagcgctcttctgtgtcgtgcatggtgagaaggcaaagtcaaaggacaacgatgcaaaagcgtccgggcccggtgggtccttcgacatcaccaagttgggcgcctccggcaatggcaagacggatagcacgaaggctgtgcaggaggcgtgggcatcagcgtgcggcggcaccgggaagcagacgatcctcatccccaagggcgacttcctcgtcggaccactcaacttcacaggcccatgcaagggcgacgtgaccatccaggtgaatggcaatctgctggcgaccacggacctaagccagtacaaggatcatggtaattggatcgagattctacgcgtggacaaccttgtcatcaccggcaagggaaagctcgacgggcaggggccagccgtgtggagcaagaactcctgcgtcaagaagtacgactgcaagatccttcccaactcgctggtgatggacttcgtgaacaacggggaggtgtccgggatcacgctgctcaactccaagttcttccacatgaacatgtacaagtgcaaggacatgctgatcaaggacgtcaatgtgacggcgcccggggacagccccaacacggacggcatccacatgggcgactcgtccggggtcaccatcaccaacaccgtcatcggcgtcggcgacgactgcatctccatcggccccgggacctccaaggtgaacatcaccggcgtgacctgcggccccggccacggcatcagcatcggcagcctagggcggtacaaggacgagaaggacgtcacggatatcaacgtcaaggactgcacgcttaagaagacggccaacggcgtccgcatcaaggcgtatgaggacgccgcctccgtgctcaccgcctccaagatccactatgagaatatcaagatggaggactcgggctaccccatcatcatcgacatgaagtactgccccaacaagttatgcaccgccaatggtgcctccaaggtcaccgtcaaggacgtcaccttcaagaacatcaccggcacctcctccaccccggaggccgtcaacctgctctgctctgccaagatcccatgcaccggcgtcaccatggacgacgtcaacatcaagtacagtggcaccaacaacaagaccatggccgtatgcaagaacgctaagggcagcgccaagggttgcctcaaggagctcgcatgcttctagaaccaccatcgacccatctctctagttatacaatgtgtttggttgttggatgctgagagattggttctcagctcagatgcaagctgcgcctagcctgtgtaggtttgtgctggtacattgagagctcttatttatttgctttgattgcaattaaccaggatgaccatagcccttgtttggtttgctgtttttataagttgcatgaacacaacttctgtttggtt

SEQ ID NO: 17990 - DNA, 373 bp, Zea mays
  Clone ID: LIB3078-002-E5_FLI
ggaagtgatagtcctgataatggcaagcgtgaaattgaactgtggttcaaagaaggcgagctctgccaatgggaatcagttcaagcaccgtggcttatagaataactcttgctaatcatttccagagttgtattcaatgtttttttttgtgttcgtcttgattcaaggagccatgcaagagtgtatgagtttagttcggctaagtaattagctcatgagggcttgaattatcggttctttttgaggattgaggatttgtgcaactgaaacctttgatcagttgctcatgttgagaagctaatttcttgtcatatttacatgtaataaagtccctctactacagtaataaattagtatttcctatggtccaatt

SEQ ID NO: 17991 - DNA, 1184 bp, Zea mays
  Clone ID: LIB3078-002-F8_FLI
tgggaatggaaaaacaatgcttgccaaagctgttgcatcagaatctgaagcaacattttttaatgtttcggcttcttcattgacatcaaagtgggtaggagaagctgaaaaacttgtcaggacacttttcatggttgcaattgatagacaaccatctgttatttttatggacgagattgatagtgtcatgtctacaaggttagctaatgagaatgactctagcaggcgtctgaaatctgaatttcttatccagtttgatggggtgtcctcaaacccagatgatctagtaattgttataggggctactaataaacctcaagaattggatgatgctgttcttcgaaggctggtaaaaagaatatatgtgccactacctgatccaaatgtacgaaggttacttctgaaaaatcagctcaaaggacaatcattcaaactgtcgaaccatgattttgaaagacttgctgtggagaccgaagggtattctggaagtgacctgagagccttgtgtgaagaagctgcaatgatgccaataagagagctcggtccacaaaatattcttactatcaaagcaaatcagctgcgacctttgaggtacgaggacttcaagaacgcgatgacggtgatcaggccaagcttgcagaagagcaaatgggacgagctggagaactggaacgaggaattcggttcgagctgacggagacgcgcgctgcctgatgatgatgatcaagcggccctatttccagatgtacatgatttatgtctcacacacacatggtggcttacacacacacacgcgcccatcggccatcgatgcgtcctcagtctggacagcgcgtcttcaacagaagcagaaggtacaatataatgctgggaacagccctatatgtatacccattgaaatgccgctgcccaagttatttaaaaaaacaaacctctagtgtgtgttattattagcctatagctgctctgggccgccgagggcgaaatcgaagtatcgtcgggcgtgttcggcaggctgcaagctgacactgttgcagctgtttggactgctgcagctgcaatccatagagagaaaaatactgtagaagccgcagccgcagccggattgtagccgcagcgaacaagccggtcgttgtgtaaaaagaaacacaaaacctacatgcttaatgactcgtatatgtgtt

SEQ ID NO: 17992 - DNA, 780 bp, Zea mays
  Clone ID: LIB3078-002-F9_FLI
gctcctcgacccccgcccaacactcccagccgtcacgccgtcgccgccgcgagtccttcattcaccatgatcatctccaagaagaaccgccgcgagatctgcaagtacatcttccatgagggggttctatatgccaagaaggactacaacctggccaagcaccccaagcttgacgtgcccaacctggaggtgattaagctcatgcagagcttcaagtccaaggagtatgtcagggagaccttctcctggcagtactactactggtacctcaccaacgatggcattgagcacctccgcagcttcctcaacctgccgtcagaggttgtgcccaacaccctcaagaagtcctccaagcccccgtcccgtccctttggctctggcccaccgggtgaccgccccaggggtccccctcgctttggggaagacagacctaggtttggggatagggatggttacagaggaggtccacgaggtgcaatgggtgattttggtggtgagaagggtagtgctcctgcggatttccagccatcttttaggggtagcagacctggctttggccgtggtggcggcagcgcttttggtgccagtggatcttccatggagtgatctatcaacttaagcgggaaaattcaaaggataggcacatgtttgttgatctttgaacttttgaggacaatgagattttggtttaccgagctgttgccgtggcttgacatggttttgtgatcctcctttttttgttacattaaattattaaagcagcaagtcatcattcgcatc

SEQ ID NO: 17993 - DNA, 1016 bp, Zea mays
  Clone ID: LIB3078-002-H2_FLI
ctgggctctggcgccaaccaagctcaggtcatagacaacaagacgccgattggcatcggtgccaccgtagttaacaactgggcagtgtacgacgggccagggccgaacgcaaagctggttgcccgtgcacagggcttgcatatccaagccggcaactgggtcaactccttcagcctagtgttcgtggatcaaaggttcagtgggtccacgcttgaagtgaccgggatagtagttgaatccggggagtgggctattgtagggggcaccggtcagtttgtcatggcaaacggtgtcatctccaagaagttccatgagcagagaagcgaagggaacatcatacagctcaccatccatgctttctgtccggtgctcggaccgacaaagcgcttggctacaaaagttggaccgtggggtgggagcggcgggtctccggtggacatcacggcagagcctcagcgtctgaagagcatcaccgttgctactggcatcgccgtgacctcgatcgccttctcctacgtcgactccgccggccaaacccaatctgctggtcgctggggcggttccggtggagaaactgagccggtgatccagctcggcgactccgaggtgctcacggagctgtccgggacgatcggcaacgtcgacggccacaccgtcataacctccatcaagttcgtcacaagcctcaagacctacgggcctttcggagcatggggggacgggagtgacactccgttcgcggtccccgtgcagcaagggagtgccatcgtcggcttctttgcacgagctgggatctacctcgacgcagttggcgtttacgtgcgatccctgtgatgatgactgacgacagaggcagctagctgctctgctctgctctgttctgctccaccggcttcatcgcgcgggttccagtcacccaccgttttatttcctactcctacatgtgtgttgcctctgtgtctgaataatttcgataaataaaggactcgatccgccagagattggcacttgaatcg

SEQ ID NO: 17994 - DNA, 1787 bp, Zea mays
  Clone ID: LIB3078-002-H4_FLI
gcgcgaaggcacctagcagccgccactcgccgaactgaggaacacgcctggcgacgggatacagcagcagcgcgcccctctatccccgacgcgacggcgccctgcagctgcagataaacctgttccaatgggcaaacaaaaagagggtgtggacaaaagaactgctaggaagatgatccgatctacggaaggctgtgcaaagagcattactttcgagaggaacaacaaatcagacgatgtgcagcttcacgatctgccgaatgacatcctaggtagcatactatcacggttgacattcagagaatcctcacagatgggccttgtttctcatacctggcggcggctgtggagaagctgttgccggaaactggtcttcaccagtgccaccatgttccaacccggaaataggagcatcaaacatacaaggaccaactttgccatgagagtcaacagtttcttgcgtcagctacgcactcatcctactcttaataagtttgttattaagttcgggctgcgcaggaagcacactcgccatgtcaacagatggattcgcttctgctccgtgtcgcgagcaagacacatcactattaatttcactcctggagtgaaagattttttcatgggtccagccaacagcaagtacatcttccccctgaacgttttcagtggtccagaaggctcctctacacatgtcagaactcttcatctgggctatgtctgtctggacacaacctcgtctgatttcatgatctttgcaaatcttaagaagctcactctgcacaaaatttcctttttgggagacctccagtgcctgatgctgccagaatgcaattctcttgagtgtctgagcatcagcttctgttccttgcctggtttaagcacatgccaaccgctgcaacgtctgcgatgtgttcgtttgcactactgctatctaaaaaagattgagctggaagctccaaatctaacatcgtttgacttgaccaaccaaccaattccatttgtgcttggtggatctctgaatgtaatggaagccaacattaaactgttagctaaggactcaccttatggtgataatctggactacatctacactgagcttcctgctgcgctgtctcatgtgcataaactctcgataacctcgggtctcttcgtttatgatcagctgcaagggttttccaaaacctcagccagattcatcaatctgaggcatctgaccatgtatttgcctctttatggggaacctaagtcaattagtgggattcttcgcttggcctacctactggaattggccccagctctagaagaattggaattgcatgtgaatggcggtggcgtggatgttgggtgggcactcagacggaatatgttaccgtactcacacaataggctcaagagggtccttatttcaggagccactgtatgggaggggctaatggagctggcatactacattcttcggagtgccaatagactcgaaagtatggtcttagatccaaagataaggattgggggtcctcagctggatggttggatgattgatattggtagggagacgatcaaaaatatttttgagggagaggagtttcagagcattattactattctgtaagaatggtaagataggccacaggattttggtggtcacaccaagtggccatgtttgattatgccataggtttgaccagtatggtcataaatgtttgttgttttcatttccgacctcaggaaatgtaaattaatactccctccatccatttttcattcgcgtatacttctcggcagtgacc

SEQ ID NO: 17995 - DNA, 739 bp, Zea mays
  Clone ID: LIB3078-002-H8_FLI
attgttctcaagctcagagcttcgccgaggaggcgacgacgatggcaatcgccgggcagtgctcctcctgctattatacgtcacccaccctgcagctccagctccaacgacggcacagccacctgccgctgcagccccaagccgcacgaagagcgcggcggccgaggttgcaggtggccacagctgccggcagcgggcccatcagggcggccacggacgccgagttcttccagccttccgacaccaggccaatcatgctcttcgacggcgtctgcaacctctgcaacggcggcgtccgcttcgtgcgggagcacgaccccaacaggagcatcaggtacgtgccgctgcagagcgagtccgggaggaagctcctgcagaggtcagggaggtcccctgacgacatctccagcgttgttctcgtcgagaaagacaggtctttcatcaagtctgaagcggtgctgaggataatggagtacctcaacctgcccttcccgcagctcgccgtcttcctcaagttcgtccctctgttcctgagggacttcgcgtacgacaacgttgcgaacaacaggtacgccatgtttggccggtccgaagcagaagcatgcgagatactgtaacaactggtgcccctgagatctcgatacttagtctatacgattcgatgtcaacagtctgcatacatgatgtaccacgaacatctatgtgtgcgtagttttagccatctaaacaaagctcaaac

SEQ ID NO: 17996 - DNA, 1035 bp, Zea mays
  Clone ID: LIB3078-003-B1_FLI
gacacgatcgcgagcgcacgcacgtaagcacgttgtcggaagctcaagttagaagaagcaccagtgactgatcgatggcggcccaggctctcctctccggccggcagctgctgggccgccccgtgcagtcggccgtctctaggtcgtcggcgaggaaggcgcccttcgtcgtcagggccagctccagccctccagccaagcaaggtgccgacaggcagctgtggttcgcgtccaagcagtccctctcctacctcgatggcacgctgcccggcgactatggcttcgacccgctgggcctctcggacccggagggcaccgggggcttcatcgagcccaagtggctggcctacggcgaggtgatcaacggccgctacgccatgctaggcgcggtgggcgccatcgccccggagatcttcggcaagatgggcatcatccccccggagaccgcgctgccgtggttcaagacgggcgtcatcccgcccgcgggcacctacaactactgggccgactcctacacgctcttcgtcttcaacatggcgctcatgggcttcgccgagcaccgccgcctccaggactggtacaacccgggctccatgggcaagcagtatttcctcggcctcgagaagttcctcgccggctccggcgacccgtcctaccccggcgggcccctcttcaacccgctcggcttcggcaagaccgagaaggagatgaatgagctcaagctcaaggagatcaagaacggcaggctcgccatgctcgccatcctcggttacttcatccaggggctcgtcaccggcgttggcccgttccagaacctgctcgaccacctcgccgaccccgtcaacaacaacgtgctcaccagcctcaagttccactagaacgttggtgcatcagcatacctgctgccgccgccgccagttgtttgctgtggaaagctagatgcatgcgtgttgtaaaggaacctgaagcgttgcatcggtcatgattcatgcatggccagcctgctgcctgtaacaacaaactagtattgatctt

SEQ ID NO: 17997 - DNA, 422 bp, Zea mays
  Clone ID: LIB3078-003-B2_FLI
atcgacagcgtggtggatcccctccgcgacttcgccaaggacagcgtccgcctcgtcaagcgctgccacaagcccgaccgcaaggagttcaccaaggtggcggcgcggacggcgatcgggttcgtcgtcatgggcttcgtcggcttcttcgttaagctcatcttcatccccatcaacaacatcatcgtcggttccggctaggcttacaggagtacagggcgactagcatgggagtagtgcaatacttttgggagcaatagataacgaggatcctggtctttcgaatagtattgttaatgaaatttttcgttcggttgtgtttctgatgtaatcgttgtactgagtagaccttctggataccggattctgagtagacctttgaatccttgatggatcagccaatctcggaaaggaagtttcgt

SEQ ID NO: 17998 - DNA, 1043 bp, Zea mays
  Clone ID: LIB3078-003-C3_FLI
tcccgagtggtcaatgtcggttctactccagggattactagatcaatgcaagaagttcaattagacaagaaggtaaagttgttggattgtcctggtgttgttatgctcaaatcttccaacagtggtgtgtctgtagcccttcgaaactgcaaaaaggttgagaaaatagaagatccagtcgctcctgttaaggagatcctaagtatttgcccacatgagaagttgctgtctctatacaaggttccaaactttggttcagttgatgatttccttcagaaagtagcaactgtacgtgggaaattgaaaaagggtggtgtagtggatgttgaagctgcagcgagaattgtgcttcatgactggaatgaaggtaaaataccatattttacactgccgcctaaaagagatgctggggaggactcagatgcagtgattatatccgaggatgggaaagaatttaatatcgatgatatttacaaagctgaatcttcatatattggtggtttgaagtccattgaggagttccatcatattgagattcctcctaatgctccaccggcgatcgatgaagagatgctagaggatggtggcaagaaaccaagcgaagccatccaggaaagccgggacagggaggagcaaatgcccgacgtgaaggactcaggaggaagcaaggcagccagcgccagcacgcagaacgacaagttgtacaccgccgagggcgtactcgaccctcgcaagagcaaagcagagaagaaacggcgcaaggcgagcaggcccagcgcgctgaacgacatggacgcggactacgatttcaaggtggattatcggatggaggacggtgggagcgagggtgcacacgcggatgatgaagatggcggagatggatccgaggataatgaaccaatgaccggtgtcgatgatgcatgaattgtcatgtcgagtgccactttgccagaaatgatttgtcccaatgggggttgggaaattaacccacgacagttttgtgcttagtttgtttcttcaatgaaagatgacagttgcgtttt

SEQ ID NO: 17999 - DNA, 582 bp, Zea mays
  Clone ID: LIB3078-003-C7_FLI
caagcagtagctaatgaacggggctctctcgcctggatatagtagattcattacacattggttggtatgatccatatgaagcctgagtgatcaggatcttgttatttcatttgtgttcgggagaggggttggtccacagccatacggaaacgaaaggttgatgtacagggagcagagaggactaaagtcggtagaagtgagcttgatctaggacagtgctctccaattcgttccattgaacacaagtagcagtacaaatagaactcatcctaagatccttggaggcttcacttgtatatactcagctgggtggataggtggtgggtgtatggtgtgattttggcatccaattggaatggcaaaggtaatagtgttattgtactaggaattctttcccttttttttctttctcggggcctagaattctcatgttgcaaattatttttgagttgccacagagatttgccaggagggctcgaagtcatgttgttttgtataatagtgctctcagcctcattgtaatttcagacaaatgctgatgtgtacaattttgtgttaaagtttgagaatttttgggggtgg

SEQ ID NO: 18000 - DNA, 1074 bp, Zea mays
  Clone ID: LIB3078-003-D12_FLI
gggcaagcagtgctatgagatggagatgatggttaggcatgatctttctataggttaaaagaacagattatccaacagctgatggaacctgcattagagatattatgttgatgtcacagatttagttgatgctcatgtgaaagcgctcaacaaggcagacactagaaaagtcagtatttacaacgttggaacaggaagagatagagaggcccgcaaatagttaatctgggacaacatatctctgtactggccatagaggacaacaaaaaaaatcaaaagttgaagaatcaccaacggtgcctcctttgcaccctccagctcaagaacctgggcccgagccagttcaacaagtcatgcccacagctgaagtgctgaaccaacagatttactgtagggaatcaatgaatcagcccgaggcacatctgaaatagatcaaaacaaggtagtcgccttggtcgtggttccacatgataatccgccaaaagcacttgcttctaccagtcctggaagcgtggcgactagctggagcaaatcagattctgtgcgatgaaaagcaagtgaaagaggctattgttcaggtactaatttgccatagtgttggtctatgactgaatggtacaaaatacatgcaatgaatggatgatactttccagttaaatcatgtaattggaatacagtggtgccgtcagcggtgcggattgggggcttctagagaaagggtctagcgtcgtgccctgcttgacgaacagtgtgttgatatgtgccatcatcgcactgggaacgaacgtgatggctagcacggggagcatcttgagcatctgctttgtctccaccactcaccatgctctgagcctgtgttggtatgcagacttttccctttgtttcagaagaagatgcagttgcattgcacattgttggaacccacgatcaccacaaaattgagggaatatgtcattactcatttgcataactcattagtcattaccttgtcaaggtttatgctttccatcacgaacggttggagttgcaacataacgatactttggtataccaaataaagttactctgttcacc

SEQ ID NO: 18001 - DNA, 900 bp, Zea mays
  Clone ID: LIB3078-003-D3_FLI
ggcgacttcggctttgatccctggggcctcggatctgacccggagagcctgcggtggaacgtgcaggcggagctggtgcactgccggtgggcgatgctcggcgcggcgggtatcttcatcccggagttcctgaccaagatcggcgtcctcaacacgcccttctggtacaccgccggcgagcagcagtacttcaccgacaccaccaccctcttcatcatcgagctcatcctcatcggctgggccgagggccgccgttgggctgacatcatcaagcccggaagcgtcaacaccgatcccatcttccccagcaacaagctcaccggcaccgacgtcgggtaccctggtggcctgtggtttgacccgctcggctggggctccggctcgccggagaagatcaaggagctgcgcaccaaggagatcaagaacggacgcctcgccatgctcgccgtcatgggcgcttggttccaggccgagtacaccggcaccggccccatcgacaacctcttcgcccacctcgccgaccctggccacgccaccatcttccaggccttcacccccaaatgaggagctctgatgaacttggcagttcgaggagtgctaccacacatgcatgcattgttaggtttgatggccgatatggaactttttctttttgttgggggcggactactgggtagactgtcaacgatgatgatgatgatgatgaaatgttcgtggtgcgatgcatggtgtacttgtactatgttgtaactaatgtaaaaatgcgatggtcgttagatgctatgtcctcttaattaaggcggacctacatgcaagtaaggatgcaaataagggtattcagtatttaattgaatactcattattttttgcaaaaaaatatgtatacatgtatatgttact

SEQ ID NO: 18002 - DNA, 766 bp, Zea mays
  Clone ID: LIB3078-003-D6_FLI
gcacccctagccaggcaagcctcctgctccagaagcagctcaaggatcttgcgaagaaccccgtggatgggttctccgcagggcttgtagacgatagcaacgtcttcgagtggcaggtcaccatcatcggcccgcccgacaccctatatgatggaggctacttcaatgcaataatgaccttcccccagaactatcccaacagcccgccatcagtaagatttacttctgggatgtggcatccgaatgtttatccggatgggcgtgtttgcatttctattcttcatccacctggtgaagatcccagtggttatgagcttgcaagcgaacggtggacaccagtgcacacggttgaaagtatagttctgagcatcatttcaatgctctctagtccgaatgacgagtctccagcaaatattgaagctgccaaggattggagagagaagcgggatgagttcaagaagaaggttaggcaatgtgtccgcaggtctcaggaaatgctgtgaaggaggaacatgggggagttgaatgagtctgcaatcggtgtgctgcaattcacaaccaattatctcatgtcagcattcttttgctttcccctgtatattttttcaaccgatgtcactcgtatagtggtgttgggtctctttagacaaactcgggacggttgcttatcctaaaaattcgattgtactgcgtggcatgaaatgatcgattcgaagaatattttgaacatgctgccacctaatcaaaaaatttcatgtttaacatc

SEQ ID NO: 18003 - DNA, 552 bp, Zea mays
  Clone ID: LIB3078-003-E1_FLI
catcatcaagcccggaagcgtcaacaccgaccccatcttccccagcaacaagctcaccggcaccgacgtcgggtaccctggtggcctctggtttgacccgctcggctggggcagcggctcgccggagaagatcaaggagctgcgcaccaaggagatcaagaacggacgcctcgccatgctcgccgtcatgggcgcctggttccaggccgagtacaccggcaccggccccatcgacaacctcttcgcccacctcgccgaccctggccacgccaccatcttccaggccttcacccccaaatgaggagttgaacttattattagcattttgaggagtgctaccacacatgcatcgtcaggttgatggccgatatatatgaaacttcacattttttttggtggggaaggactgctgagtagactgtcaatgatggaatgctcgtggtgcgagtgcgatgcatggtgtacttgtactatgttgtaaccagtgtaaaaaggggatactcgttagatgttatgccatgttctctgaatcaacggcttgatgatttgtgc

SEQ ID NO: 18004 - DNA, 848 bp, Zea mays
  Clone ID: LIB3078-003-F7_FLI
cctccctctccgaaatcaaggtagcatacaccgctgcagtttctagagccctctctgccactcgtgatcccactagtcacgatgcctgccctcgccaagcccgcctcccgcaccgccaagcccgccgcggctccgaagccgaagcctgccgccgccaagccgaaggcggccaccgctggtgcctcccacccgccttacttcgagatgatcaaggaggctatcacggcgctaaaggagaggaccggctccagctcgcaagcgatcgccaagtatgtgggggacaagcacggcgcgtctctgccggccaacttcaagaagatgctttccatccagctccgtgggtccgcagccaagggcaagctcgtgaaggtcaaggcttcgtacaagctctcggacgccgccaagaaggcatcccccaagaccaaggctaagccggcaaaggccgccgctgccaagaccaccgcccccaagccggccaaggccgccgccgccaagtcaaagaaggcagcggctgccaagccaaagaaggccgctgctgctgggaccaagcgcaaagtgcccgagaagaaggtcgtggcgaagccgaagaagtcccccgccgccaaggccaaggccaagccgaagaccttgaagtcccctgcctccaagaaggcacggaaggcctccgcatgagatgggttgctttaggtctaagctctgattgtggttggtgtcagttaggtactgtacaaactaagtgtgtgcccaaagtgtctcaggcggtgtgttatgtgcttagcaagttctatctatcagactgttttagtttaacaatggttttacctctggcttttgtagtcaggtttctg

SEQ ID NO: 18005 - DNA, 662 bp, Zea mays
  Clone ID: LIB3078-003-H5_FLI
atgatatcattaagctcaaggattattttgatcgaaggaacgaggcaaagagtcaattaccattgacaaaggctactgtaacaaaggtcgaggttgttggtatgggtgatcgcgtttgtgtggatctttgcagtatcatgcgacctggtgaaggccttctggttggatcctatgcgagaggaatgtttcttgtgcattctgaatgcttggagactaattacattgcaagcaggcctttcagagtcaatgcagggcctgtacatgcatatgtcaccgttcctggtggcaagacaagctacctctcagagttggggtcaggaaaggaagtcatcgtgatcaatcagagtgggctatggcgtactgcaattgtcggtcgtgtgaagatcgaatcaaggcctctgatccttgtagaagcgaaggatcactctggagacgagacgtatagcatttttctacaaaacgcagaaacagtagcacttattacccctaacacaggatcaagtggaaggaccgccattcctgtgacttcgctgaaagtcggtgatgaagttctggtgaggaaacagggcgccgcccgtcacactgggatagagattcaggagtttattgttgagagatgaaaatggaaacgctgaatgcaccagtttcacgtcgttttgaac

SEQ ID NO: 18006 - DNA, 635 bp, Zea mays
  Clone ID: LIB3078-004-F3_FLI
caccagcctcgtcgttaggacgtaaggtaagacacccaggggcgagccagtgagtacagagagtagccttacgtagcgaagctcagagcaagcgagggtacggtcaaggggggtgatggcgctgtctcgacgcatggcggctcccgtcctcgtcctcatgctcctcctcgtcgccacagagctggggacgaccaaggtggcggaggcgaggcactgcctgtcgcagagccaccggttcaagggcctgtgcatgagcagcaacaactgcgccaacgtgtgccagaccgagaacttccccggcggcgagtgtaaggcggagggcgccacgcgcaagtgcttctgcaagaagatatgctagtagtagcctcggctttgctggcacaagcaggtcgtcggcacgcaacgcaattcaagcatcatatcggtcctcctcccgcgttgctgtctactcgaccccgttttctctttcgatcgatttcgttgtttcctgttgctctcttcttttcccgcgaataatatgctccatgggatctcactgttgtactttctgcatccgttggtagtcaggacgatccttcttcccgctgtcacgtgtgattcaaaatggatgtactaatgcaactgttcgttcttcc

SEQ ID NO: 18007 - DNA, 741 bp, Zea mays
  Clone ID: LIB3078-006-A2_FLI
cgctcgccacgcgccgtccctggcgcgagctcgcggacccgcgcgcgctctccgtcccgcgcggcttctcagacgcctaccgccgggcgcgcgccaacctcgcgcacttcgccgccaactacgcgctcgtcgtcctgctcgtcgtcttcgtctccctgctctggcggccggtctccatgctcgtcttcctcgcctgcttcgccgcctggctcgtgctctacttcctccgcgaccgcgacgtggacgggacgctcgtgatttgcgggcggggcgtcggggacggcgtggtcgtcgcggtcctctccgcggtcacgctcgccctgctgctgctcaccggcgccacgggcttcatcctcacctcgctgctggtcgggcttctgctcgtcctgctccacgcactgctgcaccgccccgccgacagcatcgacgacgaggccgggagatggtacacgccagtgccgccgtccaactactagctagtctgagcctctgaggtgctgctcctcccccttttgcttcttggttactggattgcagaccgatgttcttcagttcttgatccgttcgtgctcttgtccatagaaaatgtgcttaaatttgtgttcttcgttatctcggaagatttattactgaaattatgcttttgaagtgatcaatctcttattactgaacttatgcttttgaagtgatcaatctcaagtcaataaaatctgttctcacaccaaatggaaatctgaaatc

SEQ ID NO: 18008 - DNA, 871 bp, Zea mays
  Clone ID: LIB3078-006-E10_FLI
gtgctgctgctctaaagaagggaggagaggaagtagcgacaaattattatattttaaggctgttgaactcatgctcgtggatgcccttgttgaggctaatgattacttggggatatcattgcatgcacatgatccagaagaattttggaagttggatgacacaatcattaaaacaattgagactgctcctaacaatgaactgaagaaagcaaaagaaatcattcaacgtattcgccgaagagaactctacaagttttgcaaccagtattctgttccaaaggacaagctggagcatttcaaaaatattactgcacaggacatagtttgttcacagaaatcttctgaggtgctgctgaaggaagaggatgttgcagtatgcaatgttaagatagatcttactcgtggaaaatataaccccctcgaaagcatcaagttctttatggattttggttgcaatgagaagttcccgatcatagatgatagagtcagccacttgctacctgcgtacaatgaggatagaattgtgagggtctatgccaagaaccctgagttggttgatgtggtgtcagaagcctttgagaatctccaaatgagaatgtatggtgagaagactcaagtgcacgagacgcccaagaaaaagaagattaggtccaactagccggttgtatgttgtcaaatcagtctttaaatagcaatacaaatatacaattacgtcacatgaaaatagcttgacaaacaagaagctctatagataaagcatcccagaataaacaggttttagatggtagtctccactggtaaggtatagatatttagtgtacatctgaagtacaaacaacactgcatgaagtataaaaactcacgttgacgt

SEQ ID NO: 18009 - DNA, 741 bp, Zea mays
  Clone ID: LIB3078-006-F9_FLI
cggcgcacatcctggtggccttatgaagagaaggaaggtcgtggagcacatcatcctgctcagagccaagcccaacatctcagacgctgaagagaaagacatgctggactacctatacacatcgcagtaccagatgcgagggatactcgcggtctcgctaggccgcatcgaggaccccaacagcgacaacttcacgcacgctgtgttcatgcgtttccagcagaagcaagacatcgcggagttccagagtaacgcgtactactccaaagttgtcgacgagcacgtaaagcccgtttcctatatttcgagtccgaggtggaagacgacattatacctctctttcgcaggggagagactgcgtctagagaggcaacggaggacgcattagcgtctcttgacaagttgatcagccaatgcagcgcttctattgtgcaggcaacatgtggctgctgtttggatcgtccggataacgggtacagtcatgctgcagtaatccgtttcccatcatctgatgagttgaagctgttcagggagagcgaggagtacaaggatatgtgggcgtccaagttccgcccgatcgtggagagatccctgcacctgcacttcaccgttgaccccgtggggaaccagctgatgtagaccaaccgagtggtcatccctatacatgggaccaagagcatctgtactgtacagtgtaaaacagagagatggggtaatatagaggataccgatagggtcaac

SEQ ID NO: 18010 - DNA, 1184 bp, Zea mays
  Clone ID: LIB3078-006-H9_FLI
ggtatggcagctaccctcgccggtgtatgcaaggtgcctctgacatctgtcctactactttttgagcttacacaagactatcgtatagttctacctttgctcggggctgttgggttatcatcctggattgcttctcctcaaaggttctctaaaagaattaggagtaagctggattcttgggaggataaatcgagtattcctcagcaagcaaacgacatgctcactgaaaacaaagaggccacttccatggatgcagctgatttgtcgttagaattatataaaattgaaagctccctttgtgtctatgatgccaacgacagcaatatgttcaaaaatcttactgttggtgaggccatgaaaactaactacttctctgtctcaatgacaaccccattaattgaggcactagatcttatgcttgccgagaagcagccctttgttatgataactgagaataacacatctgcaagaggcttgctggcactaaagaatatccaagatttttgcaaagctgcaaaaactaccagatcacaagctgaggtaaaggaactcctgatatctcatgtttgccaagcaggcaagtgtaaatcgtggtctgtgacgcctcagatgccacttactactgcagagaagattatggactctcatgatgtggatcacctacctgtagtttctgaggatgctaatcttcaggacagaggacttttgataggttttgtagaccgagaatgcattgccattgctcgaagagccatggcaacaaaagaaattttcagttctatgtatgggatcaggaaggaagagaggtagcacgaaaggaaggaatgacacgacacagaagcactccctacttggcaaatctggcttcttttcctggtcaaggctaatacctctccaggttattagttgctaagtaaaaacgtgcttcaggcatgtggttaaggtgggtctccatatttttctcgaagtatcccgcttaccggttaccaccatgactatctgcaatggtgaggttttgttgctcttgtttgctacaagttctcaatgttagaatatacccgtttagggtttggggtcttccccgtgtaatgaccatctcacccctctgtaatgggcctgacccagtttactcagcctattaatatatcacccaacccctgttagggttagggttttcattctcc

SEQ ID NO: 18011 - DNA, 618 bp, Zea mays
  Clone ID: LIB3078-007-F2_FLI
agctatagcagcctagcacacaccaccacccaccaccaccgcgccacagagctgccgagagtgtgctgtgcttcgctcatcgaccgaccgatcgatctcggcatggcggactgggggccggtgctgatcgggctggtgctcttcatcctgctctccccgggcctgctcttccagatccccggcaagggccggatcatcgagttcggcaacttccagaccagcggcctctccatcctcatccacgccgtcatctacttcgccctcctcgccatcttcctcctcgccgtcggcgtccacatttacctcggctagctagtcgcccgtcgtcgccgccgggctgagcgaggctagctgctggcgcgcggcggcccggcccggcctggctttatttgacatcaatctgggtggctggattaggtactgcgtggtgcggaggcatatactactatatacatttacatgttcatctccatctgcttgctagctgtatgttgatttatttagctactactttatcaacgacatcctcgagtccagatacagtatatccaattaatcccttatgagcatgcttctgatagatggccattaataatacatatgtcatgtttttttatt

SEQ ID NO: 18012 - DNA, 551 bp, Zea mays
  Clone ID: LIB3078-007-G12_FLI
cgaagccagccagccagccgggtcctcccgcgtagctagcgtaggcgtaggcgtagccgtagcagcgtgtgcgagaggggaagaaatgctggaggggagggcgcgggtggaggacacggacatgccggcgcggatgcaggacgcggcgacctccgcggcctcgcgcgcgctcgacctcttcgacgtcgccgactgccgcgccatcgccggccacatcaagacggagttcgacaagcggtacggcgtcgggtggcagtgcgtggtgggcgccaacttcgggtgcttcttcacccacagcagcggcaccttcatctacttctccatggagcgcctctccttcctcctcttcaaggccgccgtcgtcgcagccgccgccgccgctgccgtcgcctcctaatcaaccaagtctccgtccatcacaccgtgcactttgtactgctagctagtatctatatatatctatatatgccatttgtaatgtccagaagctcagaccctgtacggccagcagcccgtgtagtagtgtaaatacatcgcgccatgcttcgctc

SEQ ID NO: 18013 - DNA, 1007 bp, Zea mays
  Clone ID: LIB3078-007-H9_FLI
aaggagccgtacgtcgggaggtgcctgctcaacaccaggatcaccggcgaccaagcgcccggggagacgtggcacatggtcttcagcacagaaggcgaggtcccctacagagagggccagtccatcggcgtcatcgcggatggcgaggacaagaacggcaagccgcacaagctcaggctctactccatcgccagcagcgccctcggagatttcggcgactccaagacggtgtcgctgtgcgtgaagaggctggtctacaccaacgatcagggggaggtcgtcaaaggagtctgctcgaacttcctctgtgacttgaagccaggcgctgaggtgaagatcacagggccagtgggcaaggagatgctcatgcccaaagaccccaacgcaacaatcatcatgctcgcaacgggtaccggcatcgctccgttccgctccttcttgtggaagatgttcttcgaggagcacgaggactacaagtacaccgggctcgcgtggctgttcctgggcgtccgaccagcgacaccctgctgtacaaggaggagctggagaagatgaaggagatggcgccggacaacttccggctggacttcgcggtgagccgagagcagacgaacgcggccggggagaagatgtacatccagacgcgcatggcggagtacaaggaggagctgtgggagctgctcaagaaggacaacacctacgtctacatgtgcgggctcaagggcatggagaagggcatcgacgacatcatgctcgacctcgcagccaaggacgggatcaactggttggactacaagaagcagctcaagaagagcgagcaatggaacgtcgaagtctactgatgatgatccttcattatactgttcagctcaagcaatctggtggtgatgagtttgcattgcattgtacgtagtattgcggagatcaatcgaatcgtttggctcgtcgtcgttctatcgatgtacatacattatatatgatgaaagacatatataatcgtttctttc

SEQ ID NO: 18014 - DNA, 848 bp, Zea mays
  Clone ID: LIB3078-008-A8_FLI
cgagaacaacggcggcagcagcgacagttacggcgataggcgcggcggcggtggccctgcggcgggaggcaccagcaccaccaccagctgcaatggcttcgatggtggcgagcacaacgaagccgcggacgcgcaggcgacggggcaagctgccgccgccgccgccgcctccacggagctgatccgggaccccaagagggtgaagaggatccttgccaaccggcagtcagctcagaggtcgcgggtgaggaagctgcagtacatctccgagctcgagcgcagcgtcacaacactgcagaacgaggtgtccgcgctgtctccccgtgtggcatttctggatcagcagcgtaccatactgaccgtcggcaacagccacctcaagcagcggatcgcagctcttgctcaggacaagattttcaaggatgctcatcaagaggcgttgaagaaggagatcgagaggctgcgccaggtctacgagcagcagaacctcaagatgtcagccggcgctgctgcctctgaccatggcccgccaccggtgcgcgcggagaaagagctcatgagctagctacccagtcgatccacgcgtgcccgctgtgcagtgcagcccgcccgccttatcattaattaacatggagggaacattgcatcatgatttctctttttttcggattatgtggatgttttcttctttctttctttcttcttccattgacacgtgtgcgttaattctttgtatgttgattttgggatttggttcactgtgcaaattgtggtaaagtcatcagggaaactgatctgttgtgtaaatcacttttttgaagcattacattcctgggaatctggttacc

SEQ ID NO: 18015 - DNA, 600 bp, Zea mays
  Clone ID: LIB3078-008-B1_FLI
gcgagagcggagagagagagtgagggaggcgccgacgccgagtcctttcttcatcctgcatctgccgctgtttccgacaggatgtttctcacgaggacggagtacgaccgtggggtgaacaccttctctccggaggggcggctgttccaggtcgagtacgccatcgaggccatcaagcggcggcatgcttgccagccaataccttttttcaaagcactttggcatttcttgatgcctctacggatttgaaggtgtaccaattcttggcgtagttgcagtactacggtggcggctgcatggcctcttcctgctgtgctgcagctgctcttggagtatagctgtagcccctccgtactgtccggatcagagctcgttcagaagcaaaaatgcaggcacataatgatccattcaaaaggtttttaggaaaactattggagtgttacctttatttttggatataatacttttaaggagatcccaatttttacgttttgggagttatttttgatacttgttggagttgctcttagtttattactgtgtcaatttcatccgagatgtaatgccatgcctttaaaaaaaatttatttaccctttgtc

SEQ ID NO: 18016 - DNA, 587 bp, Zea mays
  Clone ID: LIB3078-008-F1_FLI
gtggcagggctgccagctttaacatcattccgagcagcaccggtgctgccaaggctgttggtaaagttctccctgatctgaatggcaagctcactggtatgtccttccgcgttcctactgtggatgtctcggttgttgacctcaccgtcagaatcgagaagggggcctcctatgaggatatcaagaaagctattaaggctgcttccgagggtccactcaagggtatcatgggttatgtggaggaggatctggtttctaccgacttccttggtgacagcaggtcgagcatcttcgacgccaaggccgggatcgctctgaacgaccacttcgtcaagcttgtctcgtggtacgacaacgagtggggctacagcaaccgcgtcgtcgacctgatccgccacatgttcaagacccagtagagggttttccccctgcttctcatggatggttgctgcttgtgtatgccgagaataaatgtggatgtcgccaggttcatgctgagtctggacatgttttgcacttttgtttccatttctgccatcatctgtggcagatccgctcgctaatatgggacctgagattagcttttt

SEQ ID NO: 18017 - DNA, 402 bp, Zea mays
  Clone ID: LIB3078-008-G10_FLI
gaagcttcagcggtgcttgtttcaactgcggcgaatccggccaccgcgcaacggactgcccaaacaagtagtaagatggaagagatggcgcggtctccccttgccgcacggggtcgatgatcctgattggccggagcatcaatcaggatgcacgcagagcgaaatcccaaagcccactccacctgctgatcggtgtactacgcccgacacccagccgacgttattactggctacagttttgcgtggtcgtctggcgtcggaaaacagaggaaggttttggcatcctgactacagttactacatcaagcggagttccttcagcttattcatgtcacacggacactactctacactacagggatatgttagtatttctttttttatatgtattttttttgtggt

SEQ ID NO: 18018 - DNA, 1078 bp, Zea mays
  Clone ID: LIB3078-009-B6_FLI
cccacgcgtgcgggagcaaaaaggcagtagcagagcacatgtcaacaaacacaagtgacaaaagaaacgaggatgacggagcagagcaccagagacgtgcgcgcgatgctcaccgcctcaccgtcgagactcgatcgagagttagtgcaagaagaaagaggtgcgagcaagagggatgaacggcgccggcaatggtgagccctcccttgtagttgtagcggaggaagggccgccgaacgatggcaacggcgccggcgttcacgcacccaacttcggcgcgaatgaagcggacacgctgctggtggtggcgacactgatcacagcgctgacgtaccagctgggcaccaacatcccgggcgggtactggcaggacgatctcaaggggcacgacggcctcgcggggcacgtcgccggagacccgatcatgcgtgacaagcaccggcggcggtactggctgttcatggcggcgagctgggtggggttcggcacctcgatgctgctcacggtggggctcatcacgggggtgcccgcgaggtcgcgcttcgtccggttcgcgttcctgctggcctactccagcctcgtgctcacgttcgtgacgtcgcagccgcgcacgtcgctcttctgggacctcatcatctgggctgtcgtcatggcgctgctcgccatcgccaccaagtacatgcgcctcgacaggctccccagatgggcgcgtaccttgtgccatgctcctccatccgcgttctgctgctcacgttcgtgactcgtgagcgagctcgccatggacgagcgagctcgtcatctgggtcgccgtcatggcatcgacgcatcgttgccatcgtcacgaagtacaagcacgtcgacagacctccccggctgggtgcacaccgtctatcttcagtaccagcttgctagtagcaacaatgtgtgtgttttcaaaaaaaaaggaagaatgtgtttttatctttgtttaattttggccgtaatgtcttgtttagtggctgatgttcttgttctctgctactgtgtgcgtcctcattggttgatctgaatctgatgttaaatgtatcgctgttcagtc

SEQ ID NO: 18019 - DNA, 910 bp, Zea mays
  Clone ID: LIB3078-009-B7_FLI
ctcgcctcgggtcaaaccctaagcagggagttgatttatccgctgcagccatgagtaagttgcagtctgagtctgtcaaggatgccatctcccagattgttggggatgccaaggagaagaataggaagttcactgagactgtggaacttcagattggtctgaagaattatgatccacagaaggacaagcgtttcagtggctctgttaagttgccccatatccctcgtcccaagatgaaggtgtgcatgcttggtgatgcccagcatgttgaggaggccgagaagatgggacttgactacatggatgttgaggctctcaagaaaatgaacaagaacaagaagcttgttaagaggcttgccaagaagtaccatgctttcttggcatcagaggccatcatcaagcagattccccgtctccttggtcctggtctcaacaaggcaggcaagttcccgaccctggttactcaccaggaatccctcgagtccaaggtgaacgagactaaggcaaccgtcaagttccagctcaagaaggtcctttgcatgggtgtcgccgtcggcaacttggcgatggaggagaagcagatccagcagaacatccagatgagcgtcaacttccttgtttcccttctgaagaagaactggcagaatgtgagatgcctgtacgtcaagagcaccatggggaagccatacagggtgttctaagtatgctcttttgtgaagtctgctaggttctggcagcgaggttttattgaattaaactcttgttaaggatatgtttttggacgatcctatatttcgtcctggcgctactatgtttcagaatggtggtactactataagtatcctagcgctataagtattgcttgaaaggatcaatataatttgcgtgtcatacccgcaaccttttctgc

SEQ ID NO: 18020 - DNA, 1578 bp, Zea mays
  Clone ID: LIB3078-009-B9_FLI
ttcaagaatggtgccctccactatattgatactattcagcaggcactacctgatattgcatggggcaaacgaagccgtgtcatattggatgttggttgtggagttgccagctttggaggctacatgtttgatagagatgcgcttaccatgtcttttgctccaaaagatgagcatgaagctcaagtacaatttgcattagaaaggggaattccagcaatatcagctgtgatgggcaccaagagacttccgtaccccagcagagtctttgatgtcattcattgcgctcgctgcagggtcccttggcacatcgaaggtggcatgcttttgctggaattgaaccgcttgttacgccctggtggttactttgtctggtctgccactcctgtttaccaaaagctcccagaggatgttgagatttggaatgccatgtctactttgacaaagtccatgtgctggaagatggtcaacaagactaaggataagttaaaccaagttggtatggtcatatatcagaaaccaatggacaatatttgctatgagaaaagatctgaaaacagcccgccattgtgcaaggaatctgatgatgcagatgctgcttggaatgtaccgttggaagcatgcatgcacaaactgcctggtggctcaaaagtccgaggatcaaaatggccagagttatggccgcaaaggcttgagaagacccctttctggattgatggttccaaggttggtgtctatggaaagcctgcaaatgaagattttgaggcagataatgcccactggaaacgggttgtaagtaaatcgtatgtgaatggcatgggaattgactggtccaaagtgagaaatgtcatggacatgagagctgtctatggaggttttgctgcagctctgagggaccaaaaggtctgggtcatgaatatcgtgccgatcgattcaccagacacgctgcccatcatctacgagcgcggtttgtttggcatgtaccatgactggtgcgagtctttcagcacttacccaagaacgtatgaccttctgcacgcggaccatctgttctcaaagctcagaaagagatgcaaactggctgcagttttcgccgaggtcgaccgtgtactgaggccacagggcaagctgatcgtgagggacaccgcggacacgataaatgagctggagagcatggccaagtccgtgcagtgggaggtgcggatgacctacaccaagggcagcgagggcctgctctgcgtcgagaagtcgatgtggcggcccaaagaactcgacgctagcacgtgatctgtgttgaggaggaactgctaccacgtaggggtgaaattagaggaattttgtcttctagatatgcgtatggctcttgttggtgctgaaaggaccagaaaatatttggtgtaaactgtagaacaatacatctgttttttctgccgtttgttttcgtttttgttttttcacaacgttgctgtaagttagtgctggaaatcacaggtacattcagttctactgggcacgttgttggcttgtcggatagcagtcgaacgatcttgtgctgcatatgttatatttgaactgttgtgc

SEQ ID NO: 18021 - DNA, 595 bp, Zea mays
  Clone ID: LIB3078-009-D9_FLI
caacctcttgatcctccacttcctgccgctgccgctgcccgtctcccccgcgctggccctcgcgctcgcatacgccgccgcctacctcgctgtcgaccgcagagccggcgcagtcgcggggctgctcttcctcgccgcatgggccgccagccgcgccctcgcggcccgcctcggcttcgctctctcctggaagcttgtcctcgtcacgcagctcttctgctggacctggcagttcctcggccacggcctcttcgagaagaaggggccgagtgttagtgatcttcctgaggtgttcttgatggagccgttcctcatcttcctgcagatactgaacaaactgttcggctatgagccgtatcctgggttctgcaagaacgtggacaggaagatcgaagccgatctcagggcgagcgagagctcaagcagaggaaggacaacctgattgattgggaattcgggagtgatcctccggagcggtgcgcgaaattgtaccatctatacatgtagcatattgcctgccatttgtgttgttttattcaggtatatgatatctgcgcaccattatatagtgtagtaaacatcagtcatgtgtgtt

SEQ ID NO: 18022 - DNA, 566 bp, Zea mays
  Clone ID: LIB3078-009-F9_FLI
gcgcaagttcgaggtccacggcgccatgttcgcggcgctgagtcaggaaaacagcctgaagaatttggattcaaggttcgtgatacctttcttggagcaggtcgtggtcaccgtgcggtcatctctcaatgctaagcagaagctgaacaccctcaagtccgttgtcaggtacagcgtgaggctaagaaggatgatcattaggatctcgcagatgaagaattgccatgctgctggagatgatttctttgaggagatttgcaagttcacttacatgaacagtgggacagtgtgcatagagtagaggtgttgctgcatttgccattcttgaagtgatttaacactaaatcaaggcagtttttacccatgctgtttgcttaggacagtttactggataattcattgtttgttttgttgttcaccgagcttgaatgtatcctgcacttcaggcttgaaatcgtttggttctatttgtcactagtctaagttttgcgcctgttaactgcactggtaataagtggctttggtttgttgctgttctttgatccaagcaatttttcccatttggt

SEQ ID NO: 18023 - DNA, 727 bp, Zea mays
  Clone ID: LIB3078-009-H3_FLI
cgacctcttcgcgcgccccttccgcaagaagggctacatcccgctcaccacctacctccgcacctacaagatcggcgattacgtcgatgtcaaggtgaacggcgccgtccacaaggggatgccgcacaagttctaccacggccgcaccggtcgcgtctggaacgtcaccaagcgcgccatcggcgtcgaggtcaacaagcaggtcaatgggcgcatcatcaggaagcgtatccatgtccgtgtggagcatgtgcagccgtcccgctgcacagaagagttccgcctgaggaaggcgaagaatgaccagctgaaggcggatgccaaaaagtgcggcgaggttatcagcaccaagaggcagccattgggtcccaagcccggcttcatggtcgagggcaccaccattgagaccgtaactcccatcccatatgatgtggtcaatgatctcaagggtggatactaggttgtttggtccatctacctgcagtacccagttctacatctgtgttactctagtgcgtgcaactttgctcactctgagcagtagtatgaacctgttgtgtgttcctgttgaaagatttcccattttaggtgcaaacctgagtttctccgaacgcgttataccatgaccttgcttctgagaacgaagacgtgctatttttgcattttgttgtttggaccacacactggaaactgggaatgtgtggcttatgaccctgagagctacttt

SEQ ID NO: 18024 - DNA, 346 bp, Zea mays
  Clone ID: LIB3078-009-H7_FLI
cggctacggtggcggcggcggctacggtggtggtggcggcggctacggcggtggcaaccgtggcggcggctacggcaactccgacgggaactggaggaactgagcggtggggcccgcgcggccaagttatcctgttcgctaccgtgatgtttaccctagtccagagggtttatcttcgttcgtgtcgtgtttgttgttgcccatctgtgtttttgattgcaaggtcgctctgtgtcagttgttagtgctgtgttcatcctcggtttcagcagacccatgcatcaaacagcatggactgcggatcgatggatgctgttacccccgtcaggctttattctaagttaat

SEQ ID NO: 18025 - DNA, 934 bp, Zea mays
  Clone ID: LIB3078-009-H8_FLI
ctccatcctggacacgtgcttccagggccaggcggcgcggctgcgcgtgcccgaggtcaccatggccttcgccggcggcgcggcgctcaagctggccgccaggaacctgctggtggacgtggacagcgccaccacgtgcctggccttcgcgcccgcccggagcgccgccatcatcgggaacacgcagcagcagacgttcagcgtcgtctacgacgtcaagaacagcaagatcgggttcgccgccggcggctgcagctgagaagcgacacctacatacacgcgcatgcacagaccgactcggtaactaaaactaaaacgagcagcgcatgcatgcatctaccgtccggtttcgtctgaaaccatcattaatttcgatcgtccactccacgcacagcaagttctttacggaccttgccgcatatgatatgtacatggtgacaagataaggtacaggagaattgatgaaagaagcgttgccggccagtcgtcgttgcacaagaacaaacacataaattaaaacattattacaggagtagggtatttattgtattgttcaggccagaaaaatatgtggaaagtgggtctttaacttaattcggaagaagcatatagcactccaaaaaaaaaagattcatattcatcacatagccaacagatagcatgtagtagctgttcatgcatgtaattctttggcaagtcctggtcaggaagtaccatttactgtgtgtaggacgaataaactgaagtgatgtgtatgtttctgatttctttcgtacttgcaacccggggcccacgtggtttttttactcccttctatatgtactgtggaaaatattgtaaccgcacaagacacactcctatgctatatatgttgtatgcacaagacacactttgttaacgaacaaagagatcgatgatgcaaatatttatcact

SEQ ID NO: 18026 - DNA, 528 bp, Zea mays
  Clone ID: LIB3078-009-H9_FLI
gccacgcgcagctccacagcgccgccaataacgcgccttgccctgggcaggagccgtccaggatcgcgcccatgtcaggcggcaccttcgtcgccgtgcctggcaagatgcactacccgtccgcggagtgcgcgtccgcgtttctctgctccccgatcaagaagcacttgttagatcacttccacaaggcacccctgccggtgccggagtaccacccggtgcctgaccacagcaagccgccggtgccggagtaccacccggtgcctgagcacagcaagccggcgccggagtaccaccctcccacgccggaataccaccctcccactccagtgtacgggcagccaaagccaactccgatctaccatcctcccgctgagcactgagttcgatcaacaacgaacgccagagctagaagaacggcaggcttctgttagttattaattcagtactgcacgtgttactagtgcgcctcatgcatggagaataaaatggtgtgaaatatagctgggagcttgtactttattagtt

SEQ ID NO: 18027 - DNA, 1441 bp, Zea mays
  Clone ID: LIB3078-011-D1_FLI
gcgtagccactacccagtagtacccagtagccatctccatccagccatccaggctcaaaccctagggaatctacccagaaatcacaccccaagcagggtcctatcgtatcaagaagccgtcgcgggggccggatcgccgcggctcggagagaagcggagcgaaaatcatctgcggaaaggtaaggattcggaggcgggatcaggagctgaaagaacctgttcgaggtggcctagactcgtagggatcgcgttgacattgggagaaatcacggagaggcggaaaccgagcaatagccaataggggaagggaagagcaacagtgcccggggcaccaagaattcgttgcatagatccaggagaagaacaatagaaatctgggcagaacgagagcagaactgactacaagatgcctcaattgagaactgccagcaggccggcgctcgccagcaactctgctggtggtttttttatcaggagaagggtagcatcaccaggaacttcccaggcaaagggcgccgccaagccgctggctcgacgggtccgaacacctgcagcgagggctaaaccaaagaggagaagccccctacctgactggtacccaagggtcccactccgtgacatcacatcaatcgtaaaggctcttgagaaaagaaatcgcctagaggaggatgcggcttggcaacacatccaatcgaatgaagattcttcacagcctgtggatccaacaactgcagaacatagtgatcctgattctcaaagcacgcaaactcaagaaacaccgggtgctgttgcttctggtccaagctcaacttcagctgttgcaaaccgtgtggcttctgtggctgagggcaagcaagaggcaacggactgctccttgcaggtggctccatccaagccaaatgatccatctcccgctgatctggagaagaaactgtcaggttcgatagagcagattgaaaagatggtgaggcgccatatgaaggaaactcatccaaaggctgctcagccttccaaggtagttgtccaaaggcgcatactgatgtccatgcgatgagctcagcaacgatttctcttgtctgctgcgttcttggccgctagtcaaggtatgtctagggatggggattcctggttctctgcttgaggacactgtggtaggagtaagagggatttctagcttctctgcttgagagcatggctatctgttggtacaacttgccatggtatgcttactgcaatacgacttcagttggcttcaccagaaacgaaccactgttgttcacgtctttctgcttgtgaagtataagacttcactgcgtagtagtaaggcgtactagatatttgtggcgtttagttcaccgaaaagatagagcagttacgagttgtagtaacagcttgaattcttgacacttcaattgatacagttagccttgcttattgttcc

SEQ ID NO: 18028 - DNA, 1783 bp, Zea mays
  Clone ID: LIB3078-011-F3_FLI
cagattcaagatgatgaggcaagagctaagaaatgagctacaaagtcttaactctcggatttgcttgacaactaatctttggacctcaaatcagaagttgggttatctttgcttgacagcccactacattaatgcagactttatcttgaaaaaaaagattattgcgttcaaatatttgaaatatccacatacaggcctagcaatcaaagaaggaattacagagtgtctcaaagagtgggggataaaagagaagatgtttactatcacattagataatgtttctaacaatctgtcagtgcgtgaccttcgagaaagtgggctatttggaggcgatcttcgtattgtccaatgttgtgcacacatattgattctcttagttcaagatggaatggcaattgctcatggagcaatctataagattcgtgagctggtcagacatatcaattcctcaccctcccgcatacaagcttttaatgggattgctgagaggtctggattgccttcaaaggatagatttaattcttgacgttccaaaccgttggaattcgacacacgacatgattatggaggccattgagtacaaggttgtcttgaaaagatatgctgaagaacaacttgagccttcaccaaatgatgaagagtggacaaattctgaggcaattggagagtttcttgaggcatttgagaaagctacaaaagcattctcgacacatagaagtccaacatctcatttgtttttacataatgtgctatgtatccatcgaactctgagaaatacaaattggcaaatcaattgtgtgcttaaggattcggcacgggcgatggatgctaagttcgataaatactgggagaagggcaagtataacatgacacttgtcttagccaccatacttgatccatcaaagaagatggattttttggacttcttttatgagaagatgtctcaatattttgttgacatccagataaacgtggtcttggttaaacaatgtctcaccaaattatttgaaaaatatgcaacacttgttcaaatagataataaaagttcaccttttattgatataaggactagtaatttaggctcaacagttcttggaaaaagaaggttggatgaagaattttctcaatggtcccaaataagaggaagacgttttccaaagtctgagcttgacacatacttagaggaagaacttgtgagaatagatgaaagatttgaaattctaaattggtggaggacaaatgcaaacaaatacccggtgctttcagctatggcgcgtgatattttagcaatacctttgagcactgttccttcggagtttgcgttcagcgctggtggtcgtattcttgatgataatcgaagcacaatgacacccagaaaccacttgaatgctttgtatgctgtaaggattggttatatgaatacccaaatattcaagcttagttgatctgacttccttcaaacatgttgaacagtacggcattcaagggagatttatgcatcattctgcgggctcctgtagctgcttagggatgacccttccactgctgctcgcttcaagcttgatcagatactctttctactgatacgcaaggtgtaaaactgccgtgttatgtggtagattggtgtgtgtactgttttctttatgtgtaaaactgtctgcttgatcaggggtgagtattgttttctttatcactctggattcatggtaatgagttcctatttcagtatttcttgccaaaaagattgttgtgcattaaggatatttgacagatgttctttgtt

SEQ ID NO: 18029 - DNA, 1116 bp, Zea mays
  Clone ID: LIB3078-011-H12_FLI
tgcttctctcccagccgtcgccgactctatctctcccttccctctcaccacctcctcgtcatcctcagcgtgcacgccgcgcgtggccgtagtggggggtggccccgcgggcgcgtcggctgccgaggcgctggccacgccgagggcccggatgcgggtgctctccccttccaacctcgccgctgacttctcccgcgcgctgccgcctggggcacccatccccatgctccgtcgtgaggtgctccactccttcctccgccgtcgaggccgagctcgtccagggcctcatcacctccgccgtgagggaagctgactgaaaagagcgatgtatacgcatttggagtggtgcttcttgagctactaatgggacggaagcctgtcgagaagatgagtcaaactcagtgccaatcaattgtgacatgggtacggtacaaaaaaatacactaaaccctagaatatctctaattgccacaatttggaactttagtaatgaacaattgtcaactctcattctcacggaatgtgtattgcaccttgattttatcttatcatatattagaaaacatcggcttcatcatcagtgctaacatttaaggagtccatgcaatttctttgtgtgctgatatttgagacaagctgaaaaatcataaacaggccatgccgcagctgactgacagaacgaaacttcccaacatagttgacccagtgatcagggacacgatggacccaaagcatctgtaccaagtactgtctcgatagcctgttaatggtcttttacttcatatgaatttatccttccaaccatcttgattgctattctgtacctctgcaggtggcagcagtggcggttctctgtgtgcaaccagaaccaagttacaggccgctgattactgatgttcttgcttaacttcataactgatgaagtttccaatcacaagatttacttaatttatactattatcttctgttgcagtattgattataaatgttgcaaacttgcaagtaccaaagactcttttcaattaaaatgttgattctattttccatttctactatttgtattgtatattatttatttgtattaatagttaatgtagttcaagtggactttagaac

SEQ ID NO: 18030 - DNA, 481 bp, Zea mays
  Clone ID: LIB3078-012-A11_FLI
ttgagaggtttgatcgtgatcgaagtggcaggatcgacatgtcagaactgcgcgatgctcttctcagtctcggatattctgtgtctccaactgtccttgatctgcttgtgtctaaatttgacaagactgggggcaagagcaaagcaatcgaatatgacaacttcattgaatgctgcctcactgttaaggggctgacagagaagttcaaggagaaggacaccgcctactctgggtcggcgactttcacctacgaggccttcatgctgaccgtgctgcctttcctcattgcgtagtggcagtccactccgccgctcaaaacaagctttataagcttttccaatagtactgtaatattatgcctgctgtaaagagatttatgttcgcagagttgtttttagacgagttgttttgattctggatttaacttgtgttgtgaatcataaagttgctctgaaatggagaatgtacctgttggttgaac

SEQ ID NO: 18031 - DNA, 888 bp, Zea mays
  Clone ID: LIB3078-012-C3_FLI
tctcctcctccgtcccatcactctctgctcgcgcactctcacctgcccgcgccgtcttcgaccgccaccaagatgaacaaggagaggctcatgaagatggccggcgccgtccgcaccggcggcaagggcaccatgcgcaggaagaagaaggctgtacacaagacggtcaccacggacgacaagaggctgcagggcactctcaagagagtaggggtcaacaccatccctgcaatcgaggaggtgaacatattcaaggacgatctcgtcatccagttcttgaaccccaaagtgcaagcttccatcgcagcaaacacatgggtggtcagtggatctccacagacgaaaaagctacaggatgttctccctgggatcattaaccagcttggccctgacaacatggagcacctgaagaggattgccgaggagatgcagaagcaggtggctgctgccggtgcggcagcacaggtcaaggaagacaacgatgacgatgttccagagcttgttcctggagagacttttgaagaagtagctcaggagacaaaagcctgatcataggctctaaatagtgaaatgttactgcaccaatgctgtgaggtcatggttttcgtgtgatggcactcttcttcctcccctcctaggccagccccagccactctttgtgttcgctgttggaaacttttagtttctccatctcaagcttttacctaaggttgtgcatgttgagatgccatggaaatccattttgctgattatttggtttgtggtcggttcacaatattacatgtgcaccaggttttgctgggttatcactatataatgtttgtgtagtctacacaccgtgactaactcttttgcaggggtattgtaactgtgctttgctgtttccag

SEQ ID NO: 18032 - DNA, 486 bp, Zea mays
  Clone ID: LIB3078-012-D1_FLI
cgccttcgctcgcgccgccgccgccgccgccgctacgccccgcacctcgcttcatttcgtgtcgccaagatgacgaagcgcactaagaaggcaggaattgttggcaaatatggaaccaggtatggtgctagcttgcgtaagcaaatcaagaagatggaggtatctcagcattccaagtacttttgcgagttctgtgggaagtttgctgtgaagaggaaagcagttggaatttgggggtgcaaggactgtgggaaggtgaaggctggtggtgcttacaccatgaacactgctagtgcggtcaccgtcaggagcacgatccgccgcctgagggagcagactgaagcatgatatagctctttatattattggggtttcctgtagttgctcttgtcaggcatgttgtgggggccttatctagtggaaatgtggaatcactgtactggctgttttgccgagacaatgctccttatatttggtttatgctct

SEQ ID NO: 18033 - DNA, 665 bp, Zea mays
  Clone ID: LIB3078-012-D3_FLI
atcgatctacacacatacatagtttcttctactacacgacgacaaacatggggaagcctgcgaagatcggagagtggggtggatacgccggcgatcgtcgggatctgagggctactccggaccggctgatcgaggtgaaggtcacggcggacaacagcagctgcatccgctccatctccttcatctacatcggagccgatggcaaaccgtacgaggaggggccatggggtttcggccatgctggcacggagtacaagattgatctgtgcaggttcgacgagagcttgacggagatctccgggaccacgggcccagcctacaacattgacaatctggtcaagtctctcaaatttgtcagcaacaaacgtacttacggaccgtacggcagggacgagggcaccccgttccgtgtcaaggtgatgaacaacggccacgtcgctggcttctttggccgctctggagattgcctggacgcgatcgggctctacgtgaaccccaactaataactaaaacgatggatcggatcatctgcatgcatgcatatgcagtatgctgcttgcctgcctgtaacgaatatgaatgcataaaataacgcccctgctgctcccatgcatcagcagtgtgtaccactatgttatatatatatactgtatttcctaccgaat

SEQ ID NO: 18034 - DNA, 886 bp, Zea mays
  Clone ID: LIB3078-012-G8_FLI
ttttttgttttttccgacgaaggttcaaggccaccggcgccaagcgcaagaaggtcggcggcgccaagcgcgggctcacccccttcttcgcgtttttggctgagtttaggccgcagtacctggagaagcaccctgagctcaagggcgtaaaggaggtaagttgcttcttctcaccctaggcatgtagctgggtttcgcttaggtggctggtatatgcctttgctcgtcggtgactttgcttataggtgagcaaggcggctggggagaagtggcgctctatgtcggatgaggagaaggcgaagtatggcggtagcaagaagcaggatggcaaagcaagcaagaaggagaacactagctccaagaaggccaaagctgatgttcgggagggagatgaagcagaaggttctaacaagtcaaaatctgaggttgaggatgatgagcaggatggtaatgaggacgaggatgagtaaatagtacgatggggaacagcagctttgcaattgagtgtttgctgctttacttatttttctatatgctgttccttttgatgttatatgctgtaaggaaaatctgtacatgatggtaccttagggtatggcatgctggagttcccctttaacccgaagagccggatacttttgccagcctcgtcagcatgtgtaaacagttgttttcttgttttatcgacttattgggtgactacccaagagttggtttgtagtcaatgaggtatgctgccccctgtggtgctacgcagctgcagcaacatcagatggtcaggctaaaatcatgttgtgggatctgattctaatgatgcttatttagtactattacaaatatctatcgttgcttatataaatttgttaaaccttgagatatttttacc

SEQ ID NO: 18035 - DNA, 807 bp, Zea mays
  Clone ID: LIB3078-012-H6_FLI
ggaagatgcaatatattggcgaactcgagctcaaggtgcaaaccctgcaaacagaagccacaacattgtcagctcagctagcattgctgcagagagacaccactgggctaacaaccgagaatagtgagctgaagattcgcctgcagaccatggaacaacaagtccacttacaagatgctttgaatgacaccctgaaaacagaggtccagcggctgaaggtggcaacaggacaggtgggcaatggtggtggagggatgatgctgaactttggggccatgccacgcctggtcggaggcaaccagcagatgttccacagcagccaagcgatgcaatccgtgctggcgacgcaccagctgcagcagctccagctccactcccagcctcagcagcagcaactgcactcgctgcagctccagcaggtggcgagagacctcaagatgaaagggcatctgggcggccaaggccagtggggcgatgggaagtctgggagtgggagcaggagcagcggcagctgagcctactggcaccgtggcacgggagttttggtgtatgtggtgagcaggaatggtgatcccttgttttgggggatgttgctgtgcaggtgtaattatcgttaactcagttgtctatctataggcccagttcagcttgagttttatggttaactcggcgatctttataggctcagctcacctgcaacgcacttcagttcagaaactcggatggtggcagatgtttgtctgttggatgttgtttgtatctcttttgctagtttaagggtaaaaatggttggcatttcagtgtttc

SEQ ID NO: 18036 - DNA, 775 bp, Zea mays
  Clone ID: LIB3078-013-A6_FLI
atagaccacagccagtcagccacatcactagctatctgtgcagaggcaatggcgtccaaggttgagctggtggtggaggtcaagtccccggctgacaagctgtgggcggcgctgcgtgactcgacggagctgttccccaagatcttccccgagcagtacaagagcatcgagaccgtcgagggcgacggcaagtcggccggcaccgtccgcctcctcaagtacaccgaggcggtgccgatgctgacgttcgccaaggagaagcttgagacggcggacgacgagaacaaggtggtgtcgtacagcgtggtggacggcgagctggcggacttctacaagaacttcaagatcacgctgaaggtgactccggccaaggcggagggcgagggcggcgccgtcgtcagctgggccatggagttcgacaaggccaacgaccaggtgcctgacccggacgtcatcaaggagaccgccaccaagacgttccacgacctcgacgactacctcctcaagaactagatggagcgagaactggagatggtccagtacagtacagttccagtccattcatcgacgcgtcacagtttactagtgcacgtcgctggtgtggtgtggtgcccgtgctggttccttaatttgcttactagctagctacgtaccgcggtccgtgtccttgtctctggctgatgtttgctgcctgcgtccgtcgtgcatccgacgacgtgtcgttgcgttgcgcaccggtcctccgagtcaataaagctctccgtgttcattgcgc

SEQ ID NO: 18037 - DNA, 374 bp, Zea mays
  Clone ID: LIB3078-013-G10_FLI
catatgtaatgtgagagcaccacataatataactgagtacatgacacacacacacatgcttcacaagattcaaatacaaaatacaatcacaccacgtcgagggttgcatagatttagctcgacgtccttattcatctttgcactacacacatgcatgcataaacatgcatggcttggccataaacatgaacatagatacggctacctccaccatcccagaatgattgaaacgattgaaacagagacaagtgatgagcaacaaggcaatctagtttcctccacccccacctcctcctccagtaccaccaccaccaccgcctccaccgccgccacctccgccgccgccgcctcctcctcctcctcctccacctcca

SEQ ID NO: 18038 - DNA, 578 bp, Zea mays
  Clone ID: LIB3078-013-H9_FLI
ggcgtgtggaagaacacggaggacgagatcctcaaggcggccgtgatgaagtacggcaagaaccagtgggcgcgcatctcgtcgctgctcgtccgcaagtccgccaagcagtgcaaggcccgctggtatgagtggctcgatccgtccatcaagaagaccgagtggacaagggaggaggatgagaaattacttcatcttgctaaactcatgcctactcagtggaggacaattgcacctattgtaggtcgaacaccatctcagtgtcttgaacgttatgaaaagctgcttgacgccgcatgtgcaaaggatgaaaattatgaggctaatgatgatcctaggaagctgcggcctggcgagattgacccaaaccctgagtcaaagcccgcacgtcctgatcctgttgatatggatgaagatgaaaaagaaatgctttctgaggctagggcccgcttagctaacactaggggtaaaaaggccaaacggaaggcaagggagaaacaacttgaagaagcaagaaggcttgcttcactacaaaaaaggagagaattgaaggcagctggtattgatacacgccacag

SEQ ID NO: 18039 - DNA, 545 bp, Zea mays
  Clone ID: LIB3078-014-D6_FLI
gggcgcatcggcgacgacggcgttgcgccctggtccatctaccgaactcgcctacccgcggtcctcgtcgttcacaggcggcgcgccctcgtccaggtccagtcgtcctcgttcacgaaggcggcctcgtccagcctactgttccttctgctacaaattcatagtcactgatggggaaggcaaagcgtgcctcgatcttcatcaggctggtttctgcagccggcactggattcttctacgtgaagcgcaagaatcctcgtcgcatcaccgagaagcttgagtttagaaagtatgatccccgtgtgaacaagcatgttctgtttaccgaagcgaagatgaagtgagatcttgtttctccacaatgcagaactgtaataagttgtcaaccttttgcgaccagaaacctttatgccgttattagacagatgattaacgatcctatgtgtttttcctgctccaatgagctgcaagcagcagatggctagtgttttgtcattttgtgtgggaaactacaaatgaaatctggactcccatctttttctttc

SEQ ID NO: 18040 - DNA, 657 bp, Zea mays
  Clone ID: LIB3078-014-E10_FLI
gcgcccaatctccacttctttatcttctccgaggtgagagagcccaggcgatccaattccaccctcgttctcaggcactgtcacacagacacagctgacctgccactgccaggaaagtaggtcgaggatgccccgcagcggcttctcggggtccttcaggtcgcccaagatcgacgtcgtcatcgacatgggaaaccccttcctcaaccgcaccgtcgacggcttcctcaagatcggcgccgtcggcgcctgcaaggtggctgccgaggagaccttcgagtgcctccacaggggggatgtttcgaagcacaaggttgagcatgccctgaggaagatgtgcaaggagggcgcatattggggcactgttgctggagtttatgtgggcatggtgtacggcgtggaaagggtccgtggccgcagtgactggaagaacgcgatgatcgggggcgccttgtccggcgccctgatctccggcgccagcaacagcgacagaggcaaggtcgtcaaggacgccatcaccgccggcgcggtagccacagccgtcgagttcatcaactgcattacctagctgagcaaggagcaactgcatttgcagtgccattgtcgtgcaaaaatatgaataaagtacttcgccatgtccagttcataaaccacccc

SEQ ID NO: 18041 - DNA, 932 bp, Zea mays
  Clone ID: LIB3078-014-E8_FLI
ggaaaggcaaggggaagggcgggggcgcgtcgcctgagaagggcagctctggggcgccctccggtgaggacgactccaggagcagtgacagcggcagcgatgagtcgtcagagacgagagatgatgacactgaccataagggttcatctgcgcccaagaaaaggaaatctggtaacacgtcggctgaaggtgaaccgtctcaagctgctgttgtgcgctatgctacggttgagtcgccatatcccgcaaagggaaggtctgcctcaaagcttccagtgtctgcacctggcagggcagcgcttcctagtgccaccccgaatctgaacattgggatggacatttggaatacttctcctgccttggctgttcctgcagtgcagggggaagcgaatcctgggttggcgcttgcccgacgtgatagcgttactcaactggatgaacgtgaattgaagagggagaggcggaaacaatctaacagggagtctgcaaggagatctaggttacgcaagcaggtagtactggaatcagtacatcctcatttcttgcagaatggcatggtgaaaaatatacaaacacacgcacacacacgcacatgctcactagttcctgtcaatctggtgaagatctgtttgcaagacaattcaaggcaagtaggctaggggatagtattacaacctggagccaaatttccccagaattagttgtatcctaggcccaccaagctttaactagagtcatcaaagatctttgaaattcatttattttgggttaactgatactagtttatttttaaacataaggatgcggttgcttggcctctggctctgggaagtgtttcgataaataaatggtacctgaacctacaggtgttgtaccattagttcagaacccagaaatttttttgtggctctctgacagagcaaccttatgtc

SEQ ID NO: 18042 - DNA, 1018 bp, Zea mays
  Clone ID: LIB3078-014-F6_FLI
gggaaaggcaatcccaattcctggggtacatgaagtttctggtgagatggaagggattgttacagatcctttcttacgccctgtgccagactatatcaggatggtggatgatgaagttgggcgagctctctcaagggattctatttatgacatggactcagaagatgaacaatggctcattcagttgaaccattcagattctgatccaaacagctatcaaaggaatcatatctcttacgaagactttgaagtgttaataagcatatttgaaaaggatgcctacaacaatccccaagggaaaaatgatttgagcgagcttctttccagatatcctgctttactaaaggatgataacgtgcatgctgtgtatgggtattggacgagtaagaggtccaagagagctgcaccattgctaagggtatttcagggcgcacccataaggcgaggacatctaccacaaaagtctgccatgaagcgaaagagatctttcaagagacaaaaaagccgagctggccgtggaaagcatgaagctttattgcaagacaatgctgaagatgaggcagctttgcagagagttgcccaagctgatcgtgcagcaaaacgggctctagaaacagctattcaactgcgcaacagagcccagtctctcatgacaaacgcagagctcgcagcatacaaatccatcatggctctcaggatcgctgaggctgctaggatatctgactcttcccgagatattgtttgtacaatcctcgactaaagatggatatgggctgatcgatttgtgtggagggcatggggaatactctttttttttctttggttgcatcattgcccatgatgttggcttttcgacaagctgtggggctattttttcgccctcccctcgggttgtcaactttgtcaagccaattttgaggtgaatgcttgaactgaaaactgtaattccttgtataaattaaagtagctagctaggttctgtatcttatgggatctgatatgtagaaatgatgaaagg

SEQ ID NO: 18043 - DNA, 743 bp, Zea mays
  Clone ID: LIB3078-014-G6_FLI
cccgaaaatctccccgctaacaaagcagtcctcccaccgcacgcaacgcagcctcgacctcgacctcgacctcgccgtcgccatggcgagcaagcagacccgccgcctcctcgtccttgccgccgtcgccgtatgcctcctcctccccgccgcctctgtcgccaccgacgtcgattactgcagtaaaaaggagtacccggtgaaggtgagcggagtgcagatcgtgcccgatccggtcgagcccggcaagcccgccactttcaagatctccgcttctactgataaaaccatcgagaaggggaagctggtgatcgacgtcaagtacttcttcttctacgtgcactcggagacgcgcgacatctgcggagagatctcctgtccggcgaccggcgacttcgtgctgtcccacgagcagacgttgccagggttcactccaccggtgaggtttccgcgcagccagcgggtcgtacacgatctacatgaagatggtcggggacgacgacgaggagctgagctgcatctcgttcggcttcagcattgggttcgtcgcctccagctgaaacccgcctgagctgcgcgccagaagtcgcccagcatggatgccattatgtaaaccactagaacataaaatttcgagaaagaatgcattacgaaggagacgctcagatttcttcaacctaaagcgcagaagtttgtcgactctgaaatgaaatggcttgcgtgccgtcgttgttcgtcaaccg

SEQ ID NO: 18044 - DNA, 723 bp, Zea mays
  Clone ID: LIB3078-014-H2_FLI
ccttcatcgcgcggcgcgtgctgaaccggcgcgtgaagccgtacctcccggacttccgcacggcgttcgagcacttctgcatccacgcggggggccgcgcggtgatcgacgagctgcagcgcagcctgggcctgtcggacgaggacgtggaggcgtcgcgcatggcgctgcaccggttcggcaacacgtcgagcagctcggtgtggtacgagctggcgtacatcgaggccaagggccggatgcgccgcggcgaccgcgtgtggatgatcggattcggctccgggttcaagtgcaacagcgcggcctgggagtgcatcgcgccggcgcgcaccgccgaggggccctgggcggagagcgtcagccgctaccccgtggacatccccgaggtgctcaagcactagccgctatcccgtggacatcaggccgggcatgcatgtgaccggccgacgacgtgacagcgtgttttggacttgcttgtggtgctggccgggccggacgcgttgaatgccgagcctgacgcgtccatgtgtgcggtgcgctccagcccggacaggtggttgcgagagggtacaccgtgttaaatccgggccatttacacacgtatagtactcgtgctcctctagatcgtgtaccccttccttctcttcttgttcttcttctttttaccttccttttcaacatttgttttcccactaataatttacttgtgtccattttaaaaac

SEQ ID NO: 18045 - DNA, 297 bp, Zea mays
  Clone ID: LIB3078-015-A3_FLI
gatcggatcaccttcttgcattggttcctctctctctctccctccttttttttccctttatctcatcatttcttttctcctgcatgcaatggttccttttgcttccaacaattctcctgctgatgtatccagcatggcatcatccatctacaattacgtacgtagtgcaacgactgtcgattcgttgggtgaggaacatatatgtgaatgcaagctccggctaccatacatgtgtaatgtgtaatagatatatatacaaaactgccgaggcgccgacaatactttaataactggtcc

SEQ ID NO: 18046 - DNA, 1306 bp, Zea mays
  Clone ID: LIB3078-015-D2_FLI
gtagcctccgtcgcgtcgagcatcgatcatgtcggcctactgcggaaagtacaaggatgagctcatcaagaatgctgcctacattggcacccctggcaagggtatccttgctgctgatgagtccactggcaccattggcaagcgcctttccagcatcaatgtcgagaacgttgaggagaaccgccgtgccctccgtgagctcctattctgctgccctggtgctctccagtacatcagcggtgtgatcctcttcgaggagaccctgtaccagaagaccaaggatggcaagccttttgttgatgtcctcaaggagggaggcgtcctccctggcatcaaggttgacaagggcaccattgaggttgttggcactgataaggagaccaccacccaaggccatgacgaccttggcaagcgctgcgccaagtactacgaggccggtgcccgctttgccaagtggcgcgctgttctcaagattggccccaatgagccatcacagcttgccatcgacctgaacgctcagggtctggctcgctatgccatcatctgccaggagaatggtctggtgccaattgttgagcctgagatccttgttgatggccctcatgacattgatcgctgcgcttacgtcactgagaccgtccttgctgcctgctacaaggcgctcaacgagcaccatgtcctcctggagggtaccctcctgaagcccaacatggtgactccaggctccgactccaagaaggtgactcctgaggtgattgctgagtacaccgtccgtaccctccagaggaccgtccctgctgctgtgcctgctgttgtcttcctctctggtggacagagcgaggaggaggccacccgcaacctcaatgccatgaacaagctcagcaccaagaagccgtggtccctgtctttctccttcggccgtgccctccaggcgagcaccctcaaggcctgggctggcaaggtggagaacttggagaaggctagagctgccttcctcgccaggtgcaaggccaactctgaggctaccctcggcacctacaagggtgatgctgccgccgacaccgagagcctccacgtcaaggactacaagtactgagttgcttctctttgcgtgcccgttttggaactcctgcctacgagctaggttgcggagtgtggtttgctcgttagagcttattttcggacatccaaaaaacatgcttcctatgtgggatgatggttatctttatatttgtatgttaattagtctctttgctgttaaatttcgtgtaagttggtcctgccgatggagaatcgagcagccccc

SEQ ID NO: 18047 - DNA, 708 bp, Zea mays
  Clone ID: LIB3078-015-F3_FLI
cgggcccatcctggacgacgagatcaacgaggtcatcgtgcgcccgctggtgcacggcgccaggctgcacgccgtggtggacgcctgctacagcgccacggtcctggacctcccctacctgtgccgcatgtccaggaacgggttctggcagtgggaggacgagtgcccgccgtcgggcgcctggaagggcaccagcggaggccacgccgtgctcatcagcggatacagcgagggcaaaggcaacttcgccatgatgcccgacgcccacgcgtcggtcgtcggggccatgacgcacagcttcgtccggacgctggagtgccagccgcgcggggtcacctacggccacctgctcagctccatgagggccatcatgaagaaccgcggcgggggctgcgatctgcagggggccatcggcgcacccatccgcaccgtcgccaacttcagcggcgtgcaggagcctaacctgtcctcttcggagacgtttgacatttaccgcaagcagttcgtcctgtagacaccacgccacaccagtgtttgccccgccggccgcttgtaatgaattgccgtcgtagtatcagaataatcaattatctatcggccatgatatgatatgatatatcaagaaagaaggaactaatacctagagtacttcgttcatctgtattagcagtgaacctctcaatgaaataactaagcatgttcaatgtc

SEQ ID NO: 18048 - DNA, 1082 bp, Zea mays
  Clone ID: LIB3078-016-A1_FLI
cagattgccgcttgagacattgtttgatgaatttgttgttgcccatatccttgggtggtggggcaaagctgtaatgatacgaaatcaacttctactttgggtcttgtcgattggctttgagctaatggagctaacgttcagacatatgctgccaaactttaatgagtgctggtgggatagcattatcttggacatattgatctgcaattggtttggtatttgggcaggaatgcacacagtccgtcactttgatggcaaaacttatgaatgggttggactgagccgccaacgaagtatcatgggtaaggtgaaaagatcgttgagccagttcactcctgctcaatgggacaaggatcagtggcatcctttcatggggccactgcggttcatccaagtgctgttcctctgcgttgtcttcatgaccgtggagcttaacacattcttccttaagttttgcctttggatccctccaaggaaccccttggtcgtgtacagattgatcctctggtggctgatcgccatcccaaccatccgcgagtacaactcctacctgcaagacaggaaaccggtgaagaaggttggagccttctgttggctctctctagctatatgcatagtggagctgcttatctgcatgaagtttgggcatgggctgtttcatgacccgatgcctacctggctgatcatcttttggagctcggtcgggactgcactcgtgattttcttgctttcgtggtcatggaggagtcaccaaaggttcaggagaaagcagctctgattgtttcagtttgctacttttctttttcgaattttatataggcgttgtacatatttgatatggtttgtgatgtaacttacgttttaggggtggccatttttctgctgcccctggcaggaacttggtttgtcacgatagatcatgcattgttgacaacatgagattgattaataaattgaaataaccgcgacatcataaccaggtgtaattaattattaaagcaaggtcactgcatattttggttccaaactaattctgggccaacaatgcacagttctgtaataccaatgaccaatcattatct

SEQ ID NO: 18049 - DNA, 627 bp, Zea mays
  Clone ID: LIB3078-016-A4_FLI
attctcacagagaaaggcctcgagagcgtgtcctagttgcggtactggatggccgtgtcaagatggcgaggccgacgacgtgaacgaacctggggaggaggagctagcctcgccagctaaccatccctcggggaagaagcgcaggagagtcaaagctgagctggtggaggaaaacgacatcgcaggcccgtcgacggaggtgcctaggactaggaggaccctgagaagcgctaaagccgaagcagtcgaggccgatcaagaggcgtcgtccaccgcagcttcgcagccaggcaggggttctaaaacaaggaagaagtgagtgatgactgatgatgcatgcttataaaggagggagattgcaaatgctcctcctttgccatgtgtagatactaccgtagacgtgctggtatggtatccggtgggtagtttttcaagtgccagagcaaaagagccttctagttctgctctttgctacagtagggactcgtagactggtggagctctctcatgacgtctaagttatttatcttgtgaagccattcccatattattacttgtttgttatggtagttgagaacatcttggagcactgaaaaacttgagggcatgggatggggtgctgtcgct

SEQ ID NO: 18050 - DNA, 886 bp, Zea mays
  Clone ID: LIB3078-016-A6_FLI
gggagctctgcatcctgatccaccacccccatgcctgccttgctgcatccgtcgtcctcggtccatgagatctgaggctcatgtagccgatgagtccttttttttttctttctcttcctgctgtttctccaagattcaagttggctggccgtgcttatccgtgcaggagctgaagcaggtttctgccctgttggtggtgatggtatctatcggtacccgtactttgcgtcgctttattcccatctttgctggtgaggtgctatgtcagcgttgtcacactcgtttattttgttctcatattcttcggtttcccgttcgtaccggcggcgcgtgcattttgcggtggggctcctggatctcgctctggacggaggcacagacagcttccctggcgtccccaaggtgctggtagattcacgccaagaggccaccgtgctctctatcgcttgctggctgagcgctcatcgtcacatcgcgcgcggcagcttctatcttgtggttcatctgtacttttgactgacatgtgatgtgccatgaagctctgagtctctgacccagatctttgcatgcgttcgcgcagtgctcctgggccgttcggtgcagtgctctcgcaacgcttcagggtctcttgctagacatctgtaaggtctgggatgcagggagtcgttctagcagaaacatcattcgccgtggacatgatgcgccaagtttattattcttgtttgggctagggatcttgcgttttttagctatcttgtaaccaaatgcagcgtaatgggaaacgaggtatctatgcgccagtgccacttggatactgtgtcgttggatgtttgtaattgtaatatactcagcgtttcttgcttcaataatgatgtttattatatgt

SEQ ID NO: 18051 - DNA, 2068 bp, Zea mays
  Clone ID: LIB3078-016-B5_FLI
acgcggtggacctgggcttgttcccagttcattactgccttttgatgtttcggttgtacttcgtgggccatactggatacgcattatatatcgcaagaaattttctgttgacatgcgctgctttgctggggatcaggtttggctccagccagctactcctcctaaaggtggaccttcagttggtggatcgttgccatgcccacagttccggcctttcataatggaacatgttgctcagggtctaaatgctcttgaacccaacttcatgaatgctacacaggctagtggacacttaaataacaatgcaggagttccacaaactgctcctagtgcaaatcgtttaaatgctacccctggtgtttctatggtcaggccaacatctggtgttgctaaccatgtagcagccagtttgagtcgagcaggaaatgccatgttggcttcttcggctcttgcttctggtattagtggaacttctgtgcgacttactgctggagctggtctccctgttcacatgaaaggtgaactaaacacagctttcataggactgggggatgacggtggatatggtggtggctgggttcctttggcagctcttaaaaaggtgctgagagggatcctaaagtacctcggagttctatggttgtttgcacaattgcctgaacttttgaaagaaatactaggatcaatcttaaaggacaatgaaggtgctctcttgaatttggatcaagagcagcctgcactccggttctatgtcggaggatatgtatttgcagtaagtgtacatcgggttcaactgcttctacaagttttgagtgtgaaaagatttcaccaccagcaacagcagcagcaggctcaaagcaatgctcaggaagagctagcagcagttgaaatcaatgaaatatgtgactactttagcagacgtgttgcctccgaaccatatgatgcttctagagttgcttcttttatcactttgcttacattaccaattttggttctgcgcgagtttttaaagctgattacatggaagaaaggtctttccccggttcatggggacattgctactgcacagagggctcgcatcgagctttgtttggagaatcactcaggatcagcttcgtctgataacaccgagaacagcagtttagccaagagtaatattcatcatgatagagcccacagttcagtagaatttgccctgacatttgtacttgaccatgctcttattcctcacatgaatgtagctggaggagctgcctggcttccatattgtgtatctgtgaaacttcgctattcttttggggacaacaatcatatagctttccttgctatgaatgggagccatggtgggagagcctgctggttgcagtttgaggagtgggaaagatgtaagcagaaggtttcaagagctgtggaaactgtgaatgggtctggtgtagctggagaggtaggccaaggaaggctgcgaatggttgcagagatgatccaaaagcagcttcaactctgtctacaacagctaagggatgacccactttctgcaggctcgactgcatcatgaacttgcttggaatgagctctatcaaggccattgatgtctgtcatattcagcatggcctttggctttgttaacgtgtagatgtgaaggaatacacatttggtagcagtgacagtttcgcctgaggcttgctcagatgacaattttgtacagtataaatggtggcggttgactctgatggacctttagttagcccatttgaacgtggcctgtaacatagctagggtgggtaataatgtgccaaggtggaattgctcagggatgcaaaatgatcttcgggaattggttgtctgtatcatctactgtaatcgtgtcctttttctccctttctgatggatagttcatttttggattcgttatcatctttcttctgtctgtactatgttaatctagacattggtggatctggtatatgtgttgttgtacatgatatattggcactggacttgagactgacgcatttgacgtcttagtattagcaggacatctctagttgtgttcagagtgattggaccc

SEQ ID NO: 18052 - DNA, 951 bp, Zea mays
  Clone ID: LIB3078-016-D3_FLI
ggcagaccatccgctctggtggcgaggagctcggtcgctggatgctgcgttccgaggagatcgagttcatcgattgggttggtgcgaattcgttcaggggtgtctatagaggaaagaaggtttgggtcaacaaattgaggggctgtgacatgggaagtgcttacgaagttgagattcgtcaggacttgctgcagttgatgagttgtggccagaggaacatcctgcaattccatggcatctgtttcaatggaaaccatgggctctgcatagtaaccaggatgatggaagggggatcagttcatgatattcttacgcagagaaacaagaggctgtccctccgggacacggtcaggatcgctcttgatgtcgccgacactctggctttcatgaacagctacggcattgcgtaccgcgatctcaatgctaggaagatcctgctggataggcaagggaatgcttgcctcggggatatgggcattgttaccccctgtagtaatgttggtgaggtcactgagtatgagacgtctgggtaccgatggctggctccagagatcatcgctggagatcctgaaaccgtctccgagacctggatgagcaacgtctacagctacggaatggtgctctgggagatgatcaccggagaggaggcctactctgcctactctctggtgcaagcggccgtcggaatcgcggcctgcgggctgaggccggagatccccagagagtgtcctccttttctgaggtcactgatgaacaggtgctgggacaattcccctctgaagcgccctcagttctctgagatcatatccatcctacaaaggcagcagaacgttagatagtgttcttttcttttcttttttttctcttccccccttccttctatattattatatatgctatatatcagtttggcttggctgtttgcatgcctaatcatgcaggaaactgcat

SEQ ID NO: 18053 - DNA, 1712 bp, Zea mays
  Clone ID: LIB3078-016-E6_FLI
ccgtttgtctaagatatgcttgcaagaaatcagcatatttgaccagatttcatttgaaaaatggtcttaccccttgcccacattgattaaagaggaagttttaccaaagatatgtgatttgcaagacagattcgaccagctcaatgcactaaacattcagctggaaactgaagttgcagtcctcaaggatggcatgaaagagctggatgaagatcttggaacttcgcgatctgagcttcagaaaaaggtttctgaacttgaacagttagatcagaaattttcatctgtgaaggaaaaacttagtattgctgttgcaaaaggtaaaggtttgatagtgcagcgtgacagccttaagcagtctttgctggagaagtctggtgagatcgagaaactcacacaagaactgcagttaaaggaaacattgctgaaagagttggaagccaaactcaaatcctatacagaagcagatcgaattgaagccttggaatcggagctgtcatacataaggaattcagctacagctctaagggattcatttcttctaaaagactctgttcttcagagaattgaagaggtcttagaagaactagatttgccagagcaatttcattctcgagatattgttgaaaaaatagaactgctgtcaaagatggccattggcactcctttcactctacctgatggtgataagggatcctctgttgatgggcattctgagtctggtgtggctatgaatgtcatagacgatgagcagaactcaaattcaaattcagtatctgatgaagtaaagagcaaatatgaggaactgaataggagattctgtgagctggctgaacagaacaatatgctggaacaatctctagtggagaggaacagtcttatacagaaatgggaagaagtccttggccaaattagcatccccccacagttcaggatgttggaagcagaagataagttagcatggttaggaaacagattcttggaggtggaacaggagagagattcattacagttgaagattgagcatcttgaggattcctcagaaatgcttattgctgatctagaagagtcacataaaaggatatctgaactcagtgcagaggtggttgctataaaggctgagaaggatttcttttcacaaagcctagagaaactgagatttgagttccttgggctctctgagaaagttgttcaagatgagtttgttagagataaattgcgaatggatctatctgaactgcgggataagttcgctgaaaaatccgaggagagcaggcactaccatgaaatggacaccgaggtccacaaactgctgaatttggtgcaaaacacattgcaggatagcactaactctgaaatttcatctggaggcatttctgctgtgttgtgcttgggcaaaatgctgaagaaacttttagatgactatggcactcttctgtacaagtcgactgaaggcaattttgccgagagagacattcagttagaggatatcaagccatctaaggatgcctctaaatcggacactggtgcatacgagaaagagatggaactaaattctttaaataacgagttagatcatgctcacaacaatctggccttagcgcaacaggagtgtgatgaagctgtggagaaggcacaatcactaatgatggaaattgagaccttacatgctcaaataagtaaattgcaggaaagtgatgctgaacaaatgc

SEQ ID NO: 18054 - DNA, 846 bp, Zea mays
  Clone ID: LIB3078-016-F12_FLI
tatcaagaatatgtgaagggcatatcgtcaacagggatgcaatccaattgtggttttgaagggcaagttaatgcatgctggactcacaaaatgactactaaggaactagatacaatacggtttgccggttttctagtttcagttattcatggaaggtacgatatcattgcacaattgtgccatgcaaaacgtctagcagaaaggcttcttcctgttgcaagaatggtagtacctcatggtgcacatctagtaagccatgaaagaccagacgaggtgaacaatgcacttatggatttgataaaggccaccaaatctgcgataaaacctgaagagtggtcagcccagcccgagaacacgtcggaaaccggggcgctcatttctgcgagacccatcaccgtcacggtgcgaacagatgcaggcgtagacgccaccgcagctgtctataacttgcttgggaagctgcaactgagcttcctttatctcataggcgtgatagtcatggggtttgaactcatgaggaacattgtaagggtgatgaagccagtaagggttgcagcaattgagtcgtaagtcataagaaccaaatacatgtacgttgttcttgagaccttgtggtagtcgagatgatactttcacttctccccaatgcctggagatgatgattttagagtagcatctgttaacacatgtgaaactcggcctgctcctagtagcagaataatacgaaacactgagaaaacagtgcgcgcctggacagaaatgtctatggcaaggttgcccgttggcgtatgtacctgtaagagtatctgtaccataccgagatttggaatcgatgctttgctgctt

SEQ ID NO: 18055 - DNA, 722 bp, Zea mays
  Clone ID: LIB3078-016-F7_FLI
ctcgtctagatccgttcatcctggtggttttgtgaggtcgaaagcggcgagcgaattagaagatgctggacaagctgtgggacgacgtggtggccgggcctcgcccggagacgggcctcgagaagctccgcaaggccaccaccgcccgcccgctcgtcatcaacaaagacgcggacggcggcagctacaagcgggcgcagtcgatgccgtcgaccccgacgacgccggtgacgccgtcgtcgtcgtcgtcgtcgacgacgccgcgcggcgccggcaacgtgtggcgcagcgtcttccacccggggagcaacctggccaccaagggcatgggcgccaacctcttcgaccggccgcagcccaactcccccaccgtctacgactggctctacagcgacgagaccaggagcaaccaccgctagatcgggcgagatggatggacagtgaagaggccatgtttgctggtccttgtggttatctaaaacgcacgcatgctctattatagctagtcatcactatatatatacttgtgtttgtgtattgttgttcttgttctgctggtgtctccgccgtttaatttgacctatgttatggagtgagtgatatatgtgccgtcactcctagtatatagtagtgagtgactagttggtatgtgtagtactgtactatcttttctccatatgcatgttttgccagcgcgtaatgaatgtaatgtcagtactgct

SEQ ID NO: 18056 - DNA, 919 bp, Zea mays
  Clone ID: LIB3078-016-H1_FLI
agggaatgccacttattcgacatttccagttcgctatgtggaaggtctacgagcaacagttacatgaatgggaatcgaaagtatgcagaatgcagggttcatcaaatgggtaccaaggaaaaaaaatgcctcccaagcctgcattgtttgccttctgtttgaggcctcgtggactcgatgtaccatacaagggaccaaagcagcgttctcataagaagcttatgtctacaggctgccatagcttttcaagacagcatgatggcttttaccggcaagtatcaggtaggagatacaatgaatgcactgtggatgggcggatatgcgaattatatgacattggttctctttattccctaacagggtactctcccaggttctctacaagaacaggttctcttcgggcatttgagtcctcggaaagttctacaccaagatttttcaggacaaatattgtcaaaaggagtgcaaccgttgctttctctgatgatcaccagccgtcgccttccttccgccctcagagagttaaacggagcgcatctgaccattggaacactgtcattcatgactggcagaactcaaagcatctctttccgggctcgccccctgttgatattgaggagctcaaactgcgggatgctgcaagcgcagcacagcacgctgctgccatggcgaagctcaagagggaaaaggctcactgcctgatgcagaaggctgaccttgccctccataaggccacggtagccctcatgattgctgatgcaatcaaatcttccagcaggaacaagtctcgggattgccgaaggggatttgatgaatgaggaacgctgacttttttttgccttttgccgcgagcccttggcgtatacacacaacttgaactcgatgcttttgctgatgatgggagcgtgtttgcttatct

SEQ ID NO: 18057 - DNA, 693 bp, Zea mays
  Clone ID: LIB3078-016-H10_FLI
ggttgctctagatccgttcatcctggtggttttgtgaggtcgaaagcggcgagcgaattagaagatgctggacaagctgtgggacgacgtggtggccgggcctcgcccggagacgggcctcgagaagctccgcaaggccaccaccgcccgcccgctcgtcatcaacaaagacgcggacggcggcagctacaagcgggcgcagtcgatgccgtcgaccccgacgacgccggtgacgccgtcgtcgtcgtcgtcgtcgacgacgccgcgcggcgccggcaacgtgtggcgcagcgtcttccacccggggagcaacctggccaccaagggcatgggcgccaacctcttcgaccggccgcagcccaactcccccaccgtctacgactggctctacagcgacgagaccaggagcaaccaccgctagatcgggcgagatggatggacagtgaagaggccatgtttgctggtccttgtggttatctaaaacgcacgcatgctctattatagctagtcatcactatatatatacttgtgtttgtgtattgttgttcttgttctgctggtgtctccgccgtttaatttgacctatgttatggagtgagtgatatatgtgccgtcactcctagtatatagtagtgagtgactagttggtatgtgtagtactgtactatcttttctccatatgcatgttttgcc

SEQ ID NO: 18058 - DNA, 1160 bp, Zea mays
  Clone ID: LIB3078-017-A2_FLI
ccacgcgtgcgcagctccccaactgttagaatggacgacacggaagccgccaagaacacggccaccaccggccccactttcgcctcccctctcttctctttctccaacctcggcggtgcttccttcggctctggctttggcttcaaatccagcgctcctctgccgcctgccatcgaggtccagctctgcgaggaatcacccgttccggcagctaggttggagccagtcgtggtcgatgactccttgacgatctacaagggcagagtgagtacatctgacgtgtttggtgtcaaagactctgatttggtccctggaaaatatgaaggtgggttgaagctgtgggaaggttcattagacttggtgaaagccctgaattctgatatcaaagaagataaatttcatctggaaggcaaacgcgtattggagcttggatgtggacatggcctccctggcatttttgcgggtctcaagggtgctgacctgattcatttccaagatttcaatgccgaggtgcttaggtgcttgactataccaaatgtaaaagtcaatcttttcaaggattcaccagaaggaacatgtacatgtccgattgttggtttctttgctggtgattggagtgaaatggataagctactactttgcggggatgctgagcaagacaaaacagccagtggtgatacagaaggtaaaatgtgtaatggttatgatatcatcctgatggctgagactgtttacgcggtatcttgtcttccaaatctctacaggctcatcaagaagtgcttgcgctaccctgggggtgtggtttacatggcagggaagaagcattactttggagtaggtggtggcacaaggcagtttctgcgcttggttgaaaaagacggtgccatgcatcctgagcggctcaatgatgttgctgatggatcatccaatgttagggaggtttggaaattctcattcaaatagattagcactgcccctgcgattgtcgggagaactggaaacatgtactggactccatattgggtgagagggaggtcttataggacttcctggttctgttaatctacctgtgactgtttcaaaaagctgatctttctcttttggagcactgctttgctcttgtagactaaaaaaaatcgcttttacctctggtttctgtt

SEQ ID NO: 18059 - DNA, 459 bp, Zea mays
  Clone ID: LIB3078-017-C11_FLI
cggacatcatgctccaggaggtctttgacaggctgaaggccaaggacatcaatcttcaagtgaccgagaagttcaaggagcgggtggtggacgaaggctacaaccctagctatggtgcacgcccgctgaggcgagccatcatgaggctgctggaggacagccttgctgagaagatgctcgcaggggaggtaaaggagggcgactctgccatagtagatgtggactcggaggggaaggttgttgtgctcaatggtcagggcggcataccggagctctcaactccggcgatcaccgtttagctcgtacataacaaatgacaaaattaatagcatagtttttgttcaaacacattatcatttatggttagaatatctgtgtatatgtagtggtatagtcaatggggaaatcgttcctgcctctaaattcctttttttcaagttaaggtgtttcttttgtcgc

SEQ ID NO: 18060 - DNA, 797 bp, Zea mays
  Clone ID: LIB3078-017-F2_FLI
gagcgctccggcacaggaagattctgagttcgtgcctaaacgctcgtgggagtttaccatttcatactagatttgtacgccattcagatcctgacatgcttgaggtgggcaacggcggcatgtccgaggcggagtaccgctctcacttcagcatctgggcgctcgccaaggctccgcttctgatcgggtgcgacgtgcgggcgatgagccagcagacgatgggcatactcagcaactcggaagtcatcgccgtgaaccaagatagccaaggtgcgcagggaaagaaagtgcagtccagcaatggcttggaggtttgggctgggccgctcagcaacaacaggaaggccgtggttctctggaaccggcagggataccaggcaaccatcaccgcacagtggtcgagcatcgggctcgcttcttccactgctgtcactgctcgcgatctatgggcgcactcgtcgttctcggctcaaggccagctatcagcttcggtgccacctcacgactgcaagatgtatgtcttgacgccgaactagctcagaagacaagagcggattgttccatggcgcgtgggatgcaaccattcggtcaggattcagggaagaagagtatgcagtgcaggcaaggatttcaagagaaggaaattcgatatcatttggttatacaggatatgagtgcgaatggaggaataatttatactaatactatggaagtgtatctaaggcgccgtcaaaatgccggtgcctgtgttactggatgtttgtaacgagagttgcagcaataaaattggcttgccc

SEQ ID NO: 18061 - DNA, 720 bp, Zea mays
  Clone ID: LIB3078-017-G3_FLI
ctccttcgccttcgctagctgattcccgtcaccatcaagcctcagctccccggcctcccactatctccgcgtcgccgtcccagccacagtcccacgcgcccagcaccatccatccgtccgcaagggggaaagcacgctagctgagctgagctgctgagagagagagagaggcaaaccctagcacgcacaagcacagcaacgtatacgcttccccccgccgattcatccatccatcgcagcgcgcaccgggcgggcgggccgggacgacgacagctaagctagcacatcgcaatagcatagcatctatctccgccgcagtacccaccaccaccaccaccatgatcttcccccctgccttcctgcaggattcctcgagctggaacgataaccagcagcagcagcaccaccagcagcagcaaggccacggccacctgctggttgccgtcagcggcagcggcgacgccaatcatgagctcctccagcaaccaatcatggggggagcgcttcccgatggaggaggaggaggtggtggcggggggcaggttgggggccccgccaagcccatgtccatggcggagcgcgcgcgcctcgcgaggatcccgctgccggagccggggctcaagtgcccgcgctgcgactcaaccaacaccaagttctgctacttcaacaactactccctcacccagccgcgccacttctgccgggcctgccgccgctact

SEQ ID NO: 18062 - DNA, 746 bp, Zea mays
  Clone ID: LIB3078-017-H5_FLI
ggccaacaggtgcaggttttcctcatttttattagatcctttcttagcgatcttggatctccactctccaggactccagggtttgccgtttgcttgacgatcacacgtatcaaaaagggttctcaagtattattggttgatgctatgctccaagaattagaaaaggagattgatgatgtggatgcacaaattggaaatcgttggcaactgcttgataaggaccatgatggcaaagtgacccctgaagaggtggcggcggcgacagcttatctcaaggacaccatagggaaagaaggcgtgcaagagctcatcagcaacctttctaaagacacagaaggaaaaaatccttgttgaagatattgtgaagctagcatcccaaatagagaacaatgaagaggaagaggaagcacggtagatgggagagtatatggaaacatcacactcgttcagcagtcaaaactcatgtattgaaaggcaatacatccatttcttgtgtctcttgactgactttgatagtgacttccaattagcaaggtagattttctgtagaaaggctcatgctgacatgcatttagttagccgtcgtgttgtgatttggtaggtaaattgcaaccaaaatttagaccggttgcatggacgtggataatacagatcaattgtatttgttatgctactatgcaatcccgaaatattggatctgtttcaaattctcaagtaatcattgatggatgctatttattgaccat

SEQ ID NO: 18063 - DNA, 691 bp, Zea mays
  Clone ID: LIB3078-017-H7_FLI
ctggcaacagttcggcaaccgctgctgcatatgttcaaggatcaaatgagccacttggtgttgaagtgactgaaacagatagtgcaccagctgtgactgaaacaggcaatgcaccaactgtgactggaacagacaacaatgcaccgaaacccacgtgtagtgtgccaagtgaacaattcggtggtgacgacggaacgcactcatcaggcaacaatggcgcagaagagtcttcagatactaagcagccaccaccgtcgaagaagcagagggtatacactgacgatgacttggttgtgataatgagtcggagcctcggcgagcttgcttcggctataaaaaggctttccgaacaacccgaccttcctgttccgaaggggttgtacgaagagctgaagagcatcccagggttcgaggaggcacatcttgagcactactatgcttacctgtgcgagaatcctccgcttgcgagggcattctatgcgctgcctcagctttctagcaaagttacgtgggttgctaggtacgtcaagaatcacagctccgaactgatgtagctactctgatgatgtggtggtattttggtctagtcactagggatgaaaaaaaaaaactctttttgttgtatgacagacagcatggaacgtgactatagtagggatcttttaatataacataacgtagattagtggcg

SEQ ID NO: 18064 - DNA, 897 bp, Zea mays
  Clone ID: LIB3078-018-B1_FLI
ctccggccatggtgcacagcgcgtacgatgctgtcgagctggtggctgacgtgccgggccacatcgaggccgtcgcctcccacgctgggaagctcctcgtcgcggtttccgacaccgaaggcttcctctggggctccgactgctccttgcgcatctactccgctccttccccctccgacggcggcggcgagatccggtgggacgggccctacgcgctcgagcggcaggagccgcggttctggcggcgcccgcccttagccatggaggtcagcgccagccgcgacctcctgatctcgctctccgagtggatcgcgctccaccgcctccccgggctcgagaccgtcgctgtcgtctctagcaagacaaagggggccaacgtctttgcttgggacgagcggcggggcttccttgccgtcggtcgacagaagcgactcaccgtcttccgcctcgacagtgggcgagaatttgttgaagtgaaggaatttggagtgccagatattctgaaatcaatggcctggtgtggtgataacatatgtcttggaatcaggcgggaatatatgataataaatagcatgaccggggcactaacagaagtgttttcttctgggaggatcgctcctcctttagttgtgcctctccttactggggaactgatccttggcaaggtataatacttcaataattcaatgttcgtgatgctgtgtccaattcctgttccatttcataaatctgttagatgggtgatcctttttggttcaagggttcaagtgacatcattctatgctttatgagaagattggcagatgttctaacaatgtacttattaccattttctaatttaaggacagtggaacattatcttgtgaaattttgaaatgtttatgtcaaagttgatgt

SEQ ID NO: 18065 - DNA, 282 bp, Zea mays
  Clone ID: LIB3078-018-B6_FLI
gcttcgcacacgtgcaccgcacacgaatcctagtgctacataataaagtgcaagcaggcaggaggcgtacgacgtgtgcgagtgagtgctgctgctgcggcgaccgtgtgaccgtagtcgttatctgtgtgtacggaataaagtggtgagcgctgagacgtgcgtgtcagcctagtaataactaaaataatggccgtgttcacgtaacgtactcgccgtatgtaccatcgtgtgtacaagccgagtgtaataatacagtactatactactatgtgtattatt

SEQ ID NO: 18066 - DNA, 1021 bp, Zea mays
  Clone ID: LIB3078-018-E3_FLI
ccggaccttttgattctttcaagtctgcctactctgctgccgcggaggaattcaaggacaaggaaatcaagttccttattggtgacatcgaagccagccagggtgccttccagtactttggcctgaaagaggaccagacaccccttatcctcatccaggatggtgactccaagaagttcttgaaggttcacgttgaggctgaccagatcgtcgcttggttgaaggagtactttgatggcaaattgacgccgttcaggaagtctgagcctattcctgaggtcaacaatgagcctgttaaggtggttgtcgctgacaacgtccacgacttcgtcttcaaatctggcaaaaatgtccttattgaattctatgccccctggtgcggacactgcaagaagctggcgcccatcttggacgaggcagccaccactctccagagcgacgaggaagtcgtgattgctaagatggacgcgactgccaatgacgttcccagtgagtttgacgtccaaggctacccgaccttgtacttcgtgaccccgagcgggaaggtgacatcctacgacagcggcaggacggcggacgacatcgtcgacttcatcaagaagagcaaggagaccgcaggcgccgccaccaccaccaccacccaggcgccaccggcatccgagaaggcagccgccgccgagcccgtcaaggacgagctgtgagcatccaaggtgtggacggctgtggctgcgtaagcatgggaggaaaacctggcgctaacgtgcctccaacgcctagtttttgcgggaccagagggagagagagagagggacggagttagagagagaggggatctgcgacgtgttttgctctgcggcggcatgtctgtgtatcccattgaggttatgtacacaattacaccgcggtcggtgggtgttttttagttaattatcacaagtgacagtagaaaggaacagattgtgatgaggttgaatggatgaataaatcgctagtccgccccgcctcgttggatgcgtcaatg

SEQ ID NO: 18067 - DNA, 493 bp, Zea mays
  Clone ID: LIB3078-018-F10_FLI
gcaatcaaaaaccgagctagggttttagggggagacagagaagcagagggaggctccatggacaaccccgagatgcagcgattcattcagaaagagcagcagaaggcgatgatgaacgagatggtcggcaagctaacgagcgcgtgctgggacaaatgcatcaccagcgctcccgggagcaagttcagctccggggaatcgacctgcctgaccaactgcgcccagaggttcctcgacatgagcgtgctgattgccaaacgcttcgagatgcagtgaggcgttgtcactcgaagctgttgcctggtcaatcgccctaagcttttcctttgatttgaggttccattgaggacttcggacgattcaacacaagagtttagtgtattttttttatgtcttacccactgccctgtttaggcaacgtgttaaagtgtgtttgagcctattgaaattggattttgtacacctcctgctcttaaacaagatctctcatggc

SEQ ID NO: 18068 - DNA, 643 bp, Zea mays
  Clone ID: LIB3078-018-F12_FLI
gtgggcggccgtccccggcgggcaggccacgtacctgggcgccccggtgccgtggggcacgctgccgaccatcctggtgatcgagttcgtggccatcgccttcgccgagcaccagcgcaccatggagaaggaccccgagaagaagaagtaccccggcggcgccttcgacccgctcggcttctccaaggaccccgccaagttcgaggagtacaagctcaaggagatcaagaacggccgcctcgccatgctggccttcgtcggcttctgcgtccagcagtcggcgtaccccggcaccggcccgctggagaacctcgcctcccacctcgccgacccgtggcacaacaacatcggcgacatcatcatccccagatcaatctccccttgagctcagctcagctgctggttgctgtttcctgtgtacgactaggccctgcctgtacaacgagcgacgacggtgacttcccgcccggaaattaaaccctcgtaatgtaaagcttatgttattaagtagcggctactcttgtagtcttgtctgtatcaaatataaactggtttgttagctgaatcccaaggttatttctgagcctaaccaggggaaatttagctcaaaacggagaaaatacatacgagacctttgataact

SEQ ID NO: 18069 - DNA, 627 bp, Zea mays
  Clone ID: LIB3078-018-G4_FLI
tctggaacggtagcaccatgtgtgctctatggtagcaatgttgagaggcttgctgctggacaaggcacatttgcaaacagctgtttgccttacactgggctgtatttgcttgggaactctctctttgggtggaactgccttgccccatggttctctcatcccactcgtactgctattcgacaacgctacaatcttgagggtagctttgaggctttcaccaggcaatgtgggtgctgcggcgatctggtcgaggacgaggagaggcgtgagcacctagaggccgcctgtgaccttgcaacccactacctctgccacccctgcgccctctgccaggagggtcgcgagctgcgccgcagggttccccaccctggattcaacaatgggcactccgtctttgtcatgatgccgcccatggagcagaccatggggcgtggcatgtgagctattccaccaccttccctgccctagttttatctgtgcttcccgtggtttatcatctgctgctgttggccttgatgtgtgatgtgtcgtttgttcgtcagtaaatacgagtttgtgatatgaggtcgtgctgggaactttggattgtttgcttcttatcgactgcagtttggattctgaacagtc

SEQ ID NO: 18070 - DNA, 282 bp, Zea mays
  Clone ID: LIB3078-018-H10_FLI
gagaacctcgctgaccacatcgctgacccagtcaacaacaacgcatgggcctacgccaccaacttcgtccccggcaactaagctcaacggctatgctatgcaacttcattgtctttcggatcggagagggtgtacgtacgtggattgattgatgctgcgagatgcatgtgtgtcttttgtttcacgttgcattgcataggcaagtcgagatgatgagttggcgttgtacactaagatgaaccatgtttgtgcaatagtggtggtttttgtttcctgctggtt

SEQ ID NO: 18071 - DNA, 701 bp, Zea mays
  Clone ID: LIB3078-018-H4_FLI
ctcatgtgagcactagggttgcaggaacaataggatacctggctcctgaatacgctgtgagggggcaagtgacgaagaaatcggatatctatagtttcggcgttttgctactggaaattgttgctggtagatgtaactacaacagtagattgcctcagggagaccagtttctgcttgagaagacatgggcatactacgtgcagggaaagctagagaaggtcatagacgccgaagcaggggaggacctgaacgtcgaggaggcatgccgtttcttgaaggttggcctactatgcgcccaagacgcgatgaagctgcgtccgaacatggccagcgtcgtcctgatgctgataggagagaagggaatctccgtggacaggatcaccaagccagccgtgatcggtgacccgtacctcgaccggaggccaagcaacgcagactctaccacgatgaagtccttcgccacgaccgaagctttaacgtcatcagaggcaaacacggagtggtctctgtgatggggggaaaaaacgtcatcatcgatggagatttgtttttgtggatgctgcagttgccaaacaaataccgcatcgcttctgttgattatgtttgtttgttatttttgtgtgtgtgtatatatacttgaaatggaaccacgggagtgaaacgaggattgaatatgctttacccatctttggtacaagtag

SEQ ID NO: 18072 - DNA, 646 bp, Zea mays
  Clone ID: LIB3078-019-A2_FLI
cttcgcccactcgctccagccgcttcaccgcgccgccaccgccaccgcgaggatgccgttcaagaggttcgtggagatcgggcgcgtggccctggtgaactacggggaggactatggccgtctcgttgtcatcgtcgatgtggtcgaccagaacagggcacttgtggatgcccctgatatggtcaggtgccaggtgaacttcaagcggctctcacttactgacatcaagattgacatcaaacgtgtccccaagaagacagccctgatcaaggcgatggaggaagctgatgtgaagaccaagtgggagaacagctcatggggcaagaagctgattgtccagaagaggagagcatcgctcaatgactttgataggttcaaagtcatgctggcgaagattaagaggggcggtgctatcaggcaagagctcgccaagctgaagaaggcgtccacggcttaaggagtctctttccgtgaatgtcatgttagagtttttggttatgagttggatcagcaattcgattgagcgttgtcaaagccagaattaccaatatgttccctgtaaacccatttcaaactttatcaagcacgggcgtgctcaggatacttttgccatgaatgatatggaatatctatggtagcttgtggc

SEQ ID NO: 18073 - DNA, 629 bp, Zea mays
  Clone ID: LIB3078-019-C9_FLI
aagttgtcagactgtgctcatggcacatctgctctaccttgttagggccatttccccgattatgcctcacctagctgaggatgtctggcagaacctaccctttcaatacaccttgcaggatggatcccttgcaaactttgtttttgatctgaaatggccagaaaagaatgaagaatggctctcggccccgaaggatgatgttgatttcctgggtgttatcctggagttgaggtcagaggtcaacaaaattttggagaatgctcgcactggaaagttgattggttctagcttagatgcaaaggtttatctccataccgaaagttcagatacggtattaaagctaaaggagctatcttctgcatccaatgatgcagacgctctgcatcgcctgtttatcacatctcaggtcgatattcttccaatcctaaatgaagagattacatcatctgtaccatacacaggaaagttcagtaacccacgcactggagtcatatggattggtgtgactcgtgcggatggtgcaaaatgtgagaggtgttggaattacacacaggacgttggatctttccatgaccatcctactctctgcgttcggtgctatggtgtcattgagttgcagacacaaacgt

SEQ ID NO: 18074 - DNA, 471 bp, Zea mays
  Clone ID: LIB3078-019-F1_FLI
gatctacgggtaccccagggacaagaagagcaagaacggcaagctgcggcttctctacgagtgcgcccccatgagcttcatcgtcgagcaggccggtggcaagggctctgacggccaccagagaattcttgacatcacacctacagagatccaccaaagagtgcctctgtacattgggagcgtggaggaagtggacaaggtggagaaattcctggcttgaatgtccctgcttcatgccagagctctctcatcagatggactccccaagacatcaagtttagggagggaatatgtactctctctttcccaccccaaataagtcttcttcgtctcatatttcgataaatcaaacaatctcaattttgatctaatatatacacacaacattaatatttatagtattagataaaaatattactagattgatcatatcatatctttttatagtaaaatagatacagatataaatat

SEQ ID NO: 18075 - DNA, 661 bp, Zea mays
  Clone ID: LIB3078-019-F4_FLI
actgtgaggctcgtcgcctccaccctccccagcgggttcagctgcgcggccaacgttagcaaggacctcatctccgacctcaactacccgtcgatcgccgtgacggggctcctcggcaataaatcggctgcggcgggccgaagccggaccgtgacccgcaccgtcaccaacgtgggggcgcaagaggcggcctcctacacggtcgccgtcagcgcgccgcccggcctggacgtgaaggtcacgcccagtaagctcgagttcaccagaggcgtcaagaagctggccttccaggtgagcttctcccgtagcgggaacgacgacgacgcggcggcggccaagggcgccctttcgggctccataacatggtcagacggaaagcacatggtccgcagcccgtttgtggtcaccagctgaaacatcatggcaatacctgacgcgcaggcacgtcaagaaatgctgtgatctcagatataaagtataggatacgatgttgaaagccactgctagtggcaaactcagaatcatcgaagattctgaaactgggccttccaaaacgccttggtcagaaatgacggttaaacattctaatataatgtcgaaaccttaggctcatgtacaatgggaaatagtaagcatcatgacagctggaagtattcagtgg

SEQ ID NO: 18076 - DNA, 721 bp, Zea mays
  Clone ID: LIB3078-019-G6_FLI
cgatcagcttcagccggcggagaaggagatacctgcgcgtcgtcgcggaggcggccacggcggggacggccaaggtcacgccggcctcgtctggcggcgtcagcctcagcgacgtgctctggccttctgccggagcattcctggccatggcggtactggggaaaatggaccagatggtggcgttcaagggagtatccttgacgattgcgccccttggagcagtctgctgcgtgcttttcagcgctccagactcgcctgcggccaagaaatacaatatgttcgtcgcgcagattgcttgcgcggcctttggcgtattagccctctcgttgtttgggcctggctggttagcgagaggcgccgctctttcagcctgcatagcattcatgaccatcacgggtacctcgcatcctccagctgcgagcttgcccctcttgtttatcgatggccccaagtttcacagtttgcagctttggtacgcgcttttccctggagctgcaggctgcatcgtcctttgcttgattcaagaggtggtggtttacctgaagaagaacttcaaattttgactcaagcagcttgacgctatggatttttgtggaagtggtccgattaattattcaatcatgtaacataaattacattgcctgcatttgcgataaagttgtgaaaatgaaggtttactgtcccctgtcttggttaaagaagaaagaagactttccttgat

SEQ ID NO: 18077 - DNA, 1153 bp, Zea mays
  Clone ID: LIB3078-020-A4_FLI
tgtgacccagacaagcctgtagtgcttgaacgtatggaatttcctgatcctgtcattaaggttgctattgaacccaagaccaaagctgatgccgacaaaatggctactgggttaatcaagcttgctcaagaagacccgtcattccacttctctagagacgaggaaaccaaccagactgttattgaaggaatgggagaactgcatcttgatatcattgtagacagactaaagagggagttcaaggttgaagcaaacgttggagctccacaagtcaactaccgtgaaagtatttccaaagttgcggaaatacaatatgtccacaaaaagcaatctggtggatctgggcagtttgcagacattattgtgcgttttgaacctttggaagctggaagtgggtatgagttcaagagtgaaatcaagggaggggcagtgcccaaagaatatgtaccaggggtgatgaaaggattggaagaaagcttacccaatggtgtcctagccggttacccagttgtggacttccgggctgtgctggttgatggctcatatcacgatgtcgattcaagtgtcttagcattccaaattgcagccagaggagcattccgtgagggaatgaggaaagctggtccaaggcttctagagcctataatgaaagttgaagtgataactcctgaagagcatctgggtgatgttattggtgatttgaactctagaagaggacaggtcaacagcttcggggataagcctggtggactcaaggtggttgattcttttgtgccacttgctgagatgttccaatacgtcagcaccctccggggcatgaccaaggggcgagcgtcctacacgatgcagctcgccaagtttgacgtcgtcccacagcacatccagaaccagatctccgtggcaaaaacagaggaagctgctgcttagttttggttttccgtagatatatccatacagcaacaggagagcaggttgataggaaggacatcaaggtgtatgtagctttgtagtgtaaatctcttaaggcttgttcggatgattggaggggattgatatggattgagagagattttaatttactatggattgaaacttcctcaattcatatggattggactagaaccgaacatggtctaagggagcattatttgcc

SEQ ID NO: 18078 - DNA, 650 bp, Zea mays
  Clone ID: LIB3078-020-B10_FLI
ccgcgcttcgccctctcgctccagccgcttcacagcgccgccgctcgcctctccgaccgccgcgagaatgccgttcaagaggttcgtggagatcgggcgcgtggccctggtgaactacggcaaagactatggccgcctcgtcgtcatcgtcgatgtggtcgaccagaacagggcacttgtggacgcccctgatatggtcaggtgccagattaacttcaaacggctctcacttactgacatcaagattgacatcaaacgcgttcccaagaagtcaaccctgatcaaggctatggaggaagctgatgtgaagacgaagtgggaaaacagctcatggggcaagaagctgattgtccagaagaggagggctgcgctcagtgactttgacaggttcaaggtcatgctggcaaggatcaagaggggtggtgctatcaggcaagagctcgccaagctgaagaaggcgtccacggcttaagtcccttttggtggatggcatgttagtttttggtttcatgttgcatcagcattttgttttgagtgttgtcaaagccagaattagtaatatgtttcatgtgtacccttttcaaacttcatcaagaatgggtgtgctctggatattttgtcgggaatgatatgaaatacttaagttagct

SEQ ID NO: 18079 - DNA, 618 bp, Zea mays
  Clone ID: LIB3078-020-C9_FLI
gggcgacgatgttccgtgactcttcgatgggcggtccgttgggggaggttctggccaagaacggcaacgtggaagcgagaaattacctgtcggcgcctctgaaccttctcaccgactactgggattcaagccacgggatggagtcctcccctgtgggcgttctgcagaagacgaccgccttcggatcggtctccagcagtacagggagcagccctagggttgagaaccacggcgcctacgacggtttcggcaacctgcgggatgatctcggctcaattgtagtgcgccatccaagcatccgcctcgtgtgagctttctgagtttctgaccatggaaaactgcaacaagacggcggcccgcagccatagaagtgggcatatgggctactatgctaatcctcaaagcgtgaggggggcatttacctcctagtttgtcatttgagactgatctcctgtttttgtcacttcagttcttcttttgcttcccttttaacttggctttgtacctttcaccttccttggatcgtgaaaagcgctgtggtgtgtgactgtgtggatggatttggtgcgccgctgatgcatatcatgtgatagaagaagccagtatccgtcgaggatt

SEQ ID NO: 18080 - DNA, 815 bp, Zea mays
  Clone ID: LIB3078-020-D11_FLI
cggtgcccacccagcgtgcaacctaggcgagaaccgcctccccctccgctccttccagctcgctctgtaatctgcatcagcctcgcccgccgccgtcgccgccatggggaggggaaagttcaaggggaagcccacaggccgccgcaacttctccacacccgaggagatcgctgctggtacttcaggtcggccacgcacctttaagaagaaggaggaagaggaagatgaggaagaggtagaaagagaagagtctgaggaagaatctgaagaggattctgatgaaaagactaaacataaaggcactgagggtattattcagattgaaaatccaaacttggtgaaagccaagaatataaaggccaaggaagttgattttggcaagacaactgaactctcaaggcgtgaaagagaggagcttgagaaacaaaaagctcatgaacgttatatgaagcttcaggagcaaggaaaaacagaacaagcacgaaaagatttggaacgtcttgctttaataagacaacaaagggctgatgcggcgaagaaacgcgaagaggagaaagctgccaaggagcagaggaagtccgaagcacggaagtaactgcaacagtcatggaccaagagtccacgaagtgacgaaggcacgatctgcgtcgattggatatttgtttctaatgcaccagctaccttttcatagacccggcctctattctgtattcccataaaaatatgcattgacagttgacaccagtctcgtggtcgtggtttcctgtaaacttgagcttgacaaaactgaaaagtagtaaagatcagcttgcaag

SEQ ID NO: 18081 - DNA, 490 bp, Zea mays
  Clone ID: LIB3078-020-H1_FLI
aacagattatactatggagagggaaggttcgccaagagcgttctgtttcagcagagtgcagttccagcccacaatgatgcacgcatctgccggtgattcacaggagttattattgcgctgcgatattgatgatggttcgggcggattgctgtctgtggaccgtggtgggggcgaggggcgaggccggccaccagtgattcagtgaagaagaaaacaaaccaacacatttgtgtaatcaactttgatgaaacttcaattgaggcgcggcacaaaaatggtgaatatggcacttagatgcattgtttcgatgaatccagggtttgtgaatttagaccgtttgagaaagtttttgtagaataaagctcagcctgttcatttgtttttaatctttatcggctgtttttacgttgttttgtttctatcaattgtagcagctacaataattcgaacaattgactttaatatgaagcgaacaactctactgtttttt

SEQ ID NO: 18082 - DNA, 653 bp, Zea mays
  Clone ID: LIB3078-021-E12_FLI
cccttttgctgcaaatctttctctgaattgtgggtctccgacaatggcggcgctagctccatccaagattctgggcacccagctcaacttcgcgggctcctcccgctacgccaccgcagcgcccaccgcgggggctcagaagattgtctcccttttcagcaagaagcctgcccagaagcccaagcccgctgcggtatcgtcctcttctccagacatcagcgacgagctcgccaagtggtatggtcctgacaggaggatctacctgccggatgggctgttggaccggtcggaggtgccggagtacctcaccggagaggtccctggagactatggctacgacccttttggcctgggcaagaagccagaggacttcgccaagtaccaggcctacgagctgatccatgccagatgggccatgctcggtgccgctggcgctgtcatcccagaggcctgcaacaagttcggcgctaactgtggccctgaggctgtctggttcaagaccggcgcgctgctcctggacggcaacaccctcaactacttcggcaacagcatccccaccaagaagcttgtataaagagactgtatttatagctagctggtcgactgtatcggagcagcatccattatgtatttatgtacgtatgctaatgacg

SEQ ID NO: 18083 - DNA, 872 bp, Zea mays
  Clone ID: LIB3078-022-B10_FLI
gccattcaagatgttgtttccttgctccggtgcacaaggcagagcctaggagtcatggcatcaagcagaggggcactcattgggcgccttgtgttgcatgaaccggacggggagcagattgactgctccattcttggagcttcaggacatgcaattacgggggacctgaacctgttgagcaaattaaatttgtcttcgggctctcggtacatcattgtggtggagaaggatgccgtatttcagaggctggctgaagaccgcctgtataatcagctcccttgtattctgatcactgcaaaaggatatcctgatattgccacaaggttcatcttgcatcgactgagccagacatttccgaatatgccgattttcgcattagtggattggaacccagcagggcttgctatactgtgcacttacaaatacggaagcatatcaatgggcctagagtcatacagatatgcttgcaacgtgaaatggctcggggtgagaggaggtgatctgcatcttatccccgagggcgcgtttcaagagctgaagccacgtgatctgcagattgccaaaggcttgatgtcgtcaaagttcctgcaggagagtcacagagctgagctggcgctgatggtggagaggggcaagcgtgcagacatcgaagccctctactcccacgggttcggtttcttggggaagtacatcgcgagaaagatcgtgcagggcgattacatctgacgattggccgctggaatgttagcatggttgcacggaacaatgagctgcatggactgtagtacagtagctatatatgtccaaccgcctgtagactgaaacgatggtctgtatgggaatgtatataaatacagcaagagattagcttc

SEQ ID NO: 18084 - DNA, 814 bp, Zea mays
  Clone ID: LIB3078-022-D12_FLI
gaccacgcacgccggcagagaaaaaccagaattctccaagcaatcctatcgccaacccggccacggatcggggctgccgtctgtttccgccggcgctggcgccgacgccgatgggctccgccgatcgcagtaagctgcagatcgacgggatcgtggtgacggagaaaggcgccaggagctgcgtcgaatgccgcgccaccaccacgcccatgtggcgcagtggcccgaccgggcccaggtcactttgcaacgcttgcgggattcggtaccgaaagaagaggaggcaagagcttggcctagagcacaacaagcagcagcaacaacaacaaaataatggcgaggcgaagactggagtaaaagacagctctagcaacagcagtagcagcgggagcagcaactttcacgtggtgcagaaacggaggctcctaatggaagtggaggaggctgctctgctgctgatgaccctatcttcttcgcccgcatccacattgctacatggctaggaaccctgcaacaccaaatcaacgatgtacatacacacacaggcttccccaccccacaccttgcacagtcaccatccaacgattccagtccaaatcgtacatgtttctcacaccagtctgagatagggaaggagggggcctatctcgggattgtgtgatcttctgataggggtggatgattagtgccaacctaatcactccattgatcgtcttgttctctgtttccgtcctacctgtagaccttgatgtatctgctatgtgagttgtggtaggctccataacaagaggtcctgttgatctcacttccccac

SEQ ID NO: 18085 - DNA, 834 bp, Zea mays
  Clone ID: LIB3078-022-G5_FLI
gaagaattcctggatctcctgtgctggcggcacgatcagctccgcagccgacgttgttgtcgccggcgacgacgagcagccagtcttctgccgccccaccagatccgactccagatcgctgagctcgccgccgtgcgcccggctcgacgatggcgtcgtctctctcctctcgcggtccgggacgctccccgagttgctcgcggtgacgacatccgggacgtgatccccgtcaacctccgcaggcgcagcgtcggagcggcaggcgtggctcccgctcgcgggctgctggcccccgacgtccaccgacgacgccgtgctggagcaacgcgagaggccagccgcgagcgccaccaccccgccctgctgtgccgcaccagcagcctccaccggcgtcagagccgccgacggttgctgctgaggtgctgccatgaacagcatgcggctccgcaggtggatgtagcagcagcttccgccgtccccaccaccagcgcccacggcaccaggctcccccgacgccgtctcgttcgcggcgggcagcagcgccttcttcctcctcggcggagcgaccttcgcgacaccgccgccggtcgccgccgcggacctggacctcgtccggacgccgacgacctgcgagacctcgactgcggccaccccctcgcccgcggcccccctgcgcttgcgcatgtacttccccatcttacggaacgccgccgcagcactgccttcttctcgcttgcttctcttggcccgttcctctttttcactcccactcccactcggccactcccacgcctgcgcggcgctgcctgcaggctgcagccgcttgcgctttgg

SEQ ID NO: 18086 - DNA, 610 bp, Zea mays
  Clone ID: LIB3078-023-C11_FLI
cacgcgttcgcgtcgctccaggtcttctgcaagcagcaatcggagcgttctctacagtctttcctgactaccaggagaggattgctaggcatgaagctgctcatttcctagtcgcctatttgattggcctccctatccttggatattctttggacatcggaaaggagcatgttaatttgatagatgagcaattacaaaagctaatatacagtgggcagcttgatggaaaggaactagacaggttagctgtagtttcaatggcaggactggctgctgaaggtctagaatatgacaaagttgtaggtcaatcagcagaccttttcacccttcagaggttcataaacagaactaagccgcaactaagcaaagatcagcaacaaaaccttaccagatgggcagtcctgtttgctgcatcacttctgaagaacaacaaagcagcccatgaggcgcttatgtcagcgatgtcccaaaaggcaagcgtgttggggtgcattgaagcaattgagaatgcatcctgatcaaaatgtaacctgagtagtgtactagcatcactggactcgatattgtttcaccgcttctgattactgctgctgttggttcgttgagcctg

SEQ ID NO: 18087 - DNA, 847 bp, Zea mays
  Clone ID: LIB3078-023-C7_FLI
tttcactgctccagcgaaggcacagccgccaccgtttcttgatctcccatcttcatcttcttcgtagcgccggcgctccatcttccgctccctcccttagtcgcgctcggcacgcgggtgacggcggcagtggcggcactcaggatcgggctctcagcgacggcatcagcggtttcccctcccgcttctctccagtcgcctcgcgccctcgcctccggtcctccgcacaccagccggtgaccctccatatagggtgtgagactaccaaaactcgaaaatgaacaagggaaagatttttaagctagccaagggattcagaggaagggcgaaaaattgcataaggatagcaagagagagggtggagaaggcgctgcaatattcatatagggatcgacgcaacaagaagagagacatgcggtctctttggattgagcgcatcaatgctggtacacgcctccatggggtgaactacggcaatttcatgcatgggttaatgaaggagaacatccaactcaacaggaaggtgctctcggagctgtcaatgcacgagccatacagcttcaaggctcttgtcgatgtgtctcggaatgcatttcctggcaacaggcctgttcctgccaaggaggggctagcgagcattctgtaaacgttttcttcccaataattaaacttgatggtttacatctacatctgaaagtgacctgtctgcttgtaacgtgacgaggaggtccgaaattgtcacgggcattgcacgtgttattcctctatttttttcccacctatctaattgcatgctttgtacctcatgcttataagttttctgaagaacgtgttccattcggtcttc

SEQ ID NO: 18088 - DNA, 668 bp, Zea mays
  Clone ID: LIB3078-023-E1_FLI
tcgccttatccacccgtcctgttcctgaacaccgtgacacacagacacaggtactagtactaccatatcatgtgacgtgcatgcggctgtgatgcacaccaacccagccatggccaaggcagctcctcctctcctcgccgccggcagccgcactgccatcacagcgcagcagccatcgtcgaggaaaggcgccgctggcgcaggtttgttctgcagtcgcgtcatcgtcagcaagcgcgccagggtaacagcgaagctcggagacggagagctgaagcctgcaggcaagcggaagttcatcaccaaggaagaggagccagaacagtactggcagaccgcgggggagagggagggcgagaaccccatgatgacacccctgccctacatcatcatcttcggcatgtccacccccttcgtcatcctcgccatcgccttcgccaatggctggatcaaggtccctgtgcgatgaccgtaacgcgaaagccagtctggatcatagatgctgactcgtcagcctgcatctcatccagcgtgtgtcctgcgagtttgtaccttcatatatagagacaggagttcttgcttgtgagcataattgcatgatcgtgtggtgtatgtaacccgaaactgtttaaattttcgcaaaaacttcagtcttcaggcattgttcc

SEQ ID NO: 18089 - DNA, 829 bp, Zea mays
  Clone ID: LIB3078-023-E6_FLI
gttgaaatcttctcgatcgaaggattccaaatgggttcggtttcgggtcaaacccgaattgctacgatgaacctctccctctcctcatcagagaagagctctaataatcgctcctcctcgcttctcaatcctaagaacgcagtttcagatagttacggggtctcttccaaatgcagcacattcctcaggggccagttccaaagaatacaactctcttatactcgccacactcgacctttgccaaaacgtgcaggccacgttgtgtctccgagctgcgtcatgccgttgacggaagagaatgtggagagagtgctcgacgaagtacgccccgcgttgatggcagacggaggaaacgtggcgctgcatgagatcgacggactcgtggtggttcttaagctacaaggagcttgtggttcgtgtcccagctcgtcgatgacgttaaagatgggaatcgagagtcgtctccgcgacaagattccggagatcatgtccgtcgagcagtttcttgaagcggagactggagggttggagctcaacgaggaaaacatcgaaaaggttctcgctgagctacggccttacctatcgggaacaggaggtggagggcttgagcttgttgagatcgatggttatatagttaagattcggctcactggaccagctgctggagtcatgacggttcgtgtcgcgttgactcagaaactgagggaaaacattccttcaataggtgcagtccagcttctagagtgaccactttttgtattgttcatctacgagagcctatatttcgattatatgtacatcattttcaaatctaacatccataccattc

SEQ ID NO: 18090 - DNA, 695 bp, Zea mays
  Clone ID: LIB3078-023-F5_FLI
gggtcagaggtgggttggcttctcctcccccaccggttcgtgttcaggttctggttcgtgggcgagagggaagagatggcggcgtcggacgttgagtaccgttgcttcgttggcggcctcgcctgggccaccgacgaccactccctcaacaacgccttcagcacctacggcgaggtcctcgagtcgaagatcatcctggatcgggagacgcagaggtcccgcggcttcggcttcgtcaccttctccacggaggacgcgatgcgcagcgccatcgagggcatgaacggcaaggagctcgacggccgcaacatcaccgttaacgaggcccagtcccgcggcggccgtggaggcggcggtggcggatacggtggcgggcgccgtgatggaggcggctacggcggtggcggtggaggctacggcggtggtcgtggaggctacggcggcggtgggggatacggtggtgcaaaccgcggcggcggctacggcaacaacgacgggaactggaggaactgagcggtggggtccgctgaggcctagttatcttgttcgcttctgctaccgtgttcaccctagtctagagggggtttatcttcgtctgtggtcgtctcgtgtccgtatgtttcgtttcgtgttcgttgttgttgttgcccatctgtgtttttgaccgcaagctcgctcctctgatgttgttagtg

SEQ ID NO: 18091 - DNA, 468 bp, Zea mays
  Clone ID: LIB3078-023-H10_FLI
gggcagggcgccgcggagaagaggaggcccagcgctctacgtccgccatggcgggctcttccgaccccgacaagctcatgaacaaagccgacaaactgtaattaggcttgcacggaagctaccaacaggtgatctgcaggccatcaagaaagctgacgatggcgaggaatccttggacgagaatgacctgacttaaaacgatctcccgagccaaaaggtgcagagaacaaacgtcatagtttgccatcggtgggggaacatctgtaaaaagaagttatgcgagttacgtactaaaaacttgtgggcaacattcccatatctataaacatgaaatttgtagggcccaattatgttgtatccgtactggtggtttggtcatttggtgttaccgaaacagcgaaactttagtggtatgtttatggtgtcctgtgctacatgattcttgcaaatcgagcatggtgtaaaatt

SEQ ID NO: 18092 - DNA, 643 bp, Zea mays
  Clone ID: LIB3078-023-H6_FLI
gtcaagcttgcttagctagccgccatggcctccctcgccgccgtctccgtgaagcccgtggccatcaagggtctcgccggcagctccatctccggaaggaagctcgccgtcgccaggccgtcggcccgctccatccgcaggccccgcgcagccgccgtggtggccaagtacggcgacaagagcgtctactttgacctcgacgacatcggcaacaccaccggacagtgggacctctacggctctgacgcgccctcgccctacaacccgctacagagcaagttcttcgagacgttcgcggctccgttcaccaagagaggtctgctgctcaagttcctgctgctgggcggcggctcacttctggcctacgtcagcgcgtcggcgtcaccggacctcctgccgatcaagaagggacctcaggagccgccgcagccgggcccgcgcggcaagatctaagctcagcttctccatttgcatggtctagtagcttgctttgtactgctagcgccggtcgatccgtcgcaatcgtcatggatcatctctctatcttgttgttacgctgttcataatttggtatatttgccattccgctattgtgtactctttggcatacatacaataattaaaatggcgttgcgtggctctc

SEQ ID NO: 18093 - DNA, 528 bp, Zea mays
  Clone ID: LIB3078-023-H7_FLI
gcgctgccgtccacgtcctcggcctcgtcgacgacaaccgtgagctccacggcgtcctccggcgcgccgccgaccaaccgcctggactggatgctgttctgacgggcgggcgagtgcagggcagcccggcgccggccggccaccggcgcgaaagcagtcaagccggatgtgggggaaagcggaaggcggagtgcagaactgcagatgcgatgcttgtgtgccaagaattgcaccccctgcagaaatctggtggcctccatgattgggcacgggctacctagcttggccacaaactgcattgctctgcatggtaccgtaccagccaactcgattcatcaaccatgtcttcttctttcattccttttgagattctttcctttttcctcatcttcttgttcatgaaacgtttgaggttctttttgtgtgcatactattcagatagacagagagaaagagagagagggttggttacttggtttagggcaaatcaaatgtattcagattgggaataaacacactactggagtc

SEQ ID NO: 18094 - DNA, 567 bp, Zea mays
  Clone ID: LIB3078-023-H8_FLI
gggctttagcacaggagacacagcggtccgggaaagccatcaatacacttgagtcttggataaaaaaatcaaatagttccagagactgagtgaagttgagtagcaatagatggatttctgcaataagacatgaggaatggtagcaaataagggctccgctgagtccatccatcatccgtgtatgattggctttcttctcgtgttttgttcatgatttgtgtcagaaacctaggtggcatctagtctggtttatgtattgccagtgctgttgtgtagaaaaatctccgtcgatattctaagctttttggttagaaaggtgcgctcttcattgtccttgacggaactcggggtagatgaacataggccatctgttgtgatcttgtgatgctgcattacgtttgcaatggatcatatattatgcaatggcatgggaagattatacccatttgtaatgggggagaatcagggcttaaacatttctacaataacgtgcgaagagttgtccccattggtaacgcatgtcctgaaatatgaataaagctgcaggcagttgatattttgcaactg

SEQ ID NO: 18095 - DNA, 689 bp, Zea mays
  Clone ID: LIB3078-024-B11_FLI
gcatcatctttattgatgaaattgatgccattggaacaaagcgttttgacagtgaagttagtggcgatagagaagtgcaaaggacaatgttggaattgctgaatcagcttgatggatttagcagcgatgagaggataaaggtgatagctgcaacaaatcgtgctgatattcttgatcctgctctgatgagatctggtcgtctggaccgtaagattgagttccctcatccatcagaggaagcaagagctagaatcctgcagatccactcgaggaaaatgaatgtgaatccagatgtcaactttgaagagttggcgcgttcaaccgatgatttcaatggcgctcagctaaaggctgtttgcgtagaggctggcatgctcgctctacgccgagatgctacagaggttacccacgaggatttcaacgaggggatcatccaagtgcaggcaaagaagaagtccagcttgaattactacgcgtaagggggggaacgcccggtacttggtgatcattcagttgtttgtgacactgccattgtctgggcaggctaacttactatttgtactataagcaagctgttgcttttgtgtcttactccgtatgagagtatcatttatgaaatattaaccaagtctgcctgccgtattgctttctttctcctcacggagaggagctcggccttccacgactgc

SEQ ID NO: 18096 - DNA, 487 bp, Zea mays
  Clone ID: LIB3078-024-B12_FLI
ggagggccgggggccgacgctagctcgacgcctcaagaagtccgacacctgggacacccgtcccgggcgccgcccgtccggcggtggcagcagcggggaggtcgatccagcggccgtggcaccggcgggggcgatgcggaaggccgagactttcaacgacggtggcgccggaaggagcaggcctgctcccgctgcgctggtgcggcgggagccgtcgctggggcaggacgagctgaaccgccgcgtggaggcgttcatccacaagttcaacatggagatgcggctgcagcggcaggagtcgctcaagcgctacaacgacatgattggcaggggcaggggcagccgttagtgggaataactgcggctcgcaagaaggattctgctttttttgttccgtgatatttctcgattttggttcttggtctctgtaagatatggttttgtgtaaatggttttatcaagtaacgaggacaagttcgatcgtact

SEQ ID NO: 18097 - DNA, 526 bp, Zea mays
  Clone ID: LIB3078-024-B2_FLI
acgaggccaccaagggcgcccacggggtgtgcatcctgaccgagtgggacgagttcaagaccctggactaccagaagatcttcgacaacatgcagaagcccgccttcgtcttcgacggccgcaacatcgtcgacccggagaagctgagggagatcggcttcatcgtctactccatcggcaagccgctcgacgcctggcttaaggacatgcccgcggtcgcttaattcgtctgaggtgctccattggattggatccggggaaggaagaggaactggttgaccattcttcattacagtttgttttttgcaggattcttaaaagttggacggcgctgctagtattccatgtttcgtgttttcatattggaggacgtctgtagatgtaaaaaatcctcgggcgcttgtgctcggcttgaggaaatatgcttgtacggttgtaccctggacccgctatagctggttggttcttcaagttgtgttcctatagaagccaaagttactacacgatcgatatgttctttttgtat

SEQ ID NO: 18098 - DNA, 1610 bp, Zea mays
  Clone ID: LIB3078-024-B9_FLI
ctcaaccttcagaggagccccctaagaggttaattgagcaacacagatggccagccatgatagctgggcaggcgccgaagaatctcatgtcaagaagcattgacctttcggacaaagctaatataccagtcccaccatcaaatacatcaagaggtctttcaccaaggaagacgccttctgtcagacctgttgcatcatcaaatacatcaagaggcctttcaccaaggaagaccccttctgtcggaccagtcccatcatcaaatacatcaagatgcccttcaccaatgaagaccccttctgttgaagcttcagtgaaactgtcaaatcagtcattggatgaagtggcaaggagtttggctattcaatcaagcagaagagatgataaggtagattcacagacaatagagagatccaaatctttgagccgaccaaacagaacagttacttttcctgttccaattctacaacgctcatcatcaccaagcagaacattgccagctacgtcctcaacttccagggcctttcagagcccatctcggacaaggccatcaacaccctgtcagtcccaaagtgctggagctacccaatcaagtgttccatcttctcttattaactacatggttgatgcgcgaaaaggaaagaagaatgccagtcaaatcgaaaatatccaccaaatgcgtttattgcacaatagacatttacagtggctctttataaatgcttatgcagaagatgctttatcttttcaaaaggctactgttgagaataccatgtataatgtttggaggaatactgtaaacctgcgggattctgttaatatgaaaagaataatggtgcaacacttccaacaagaactcaggctttacaacattctgaaagagcagattgcttaccttgaacaatggccaacgctagaaagggagaatagtatctctttactaggggcaactgaggctctgaaagcaagcaccctgcgcctgccagttacattgggagcaaaggctaacacaattgctctcaagaacgctgtaagctcagctgttgatgtcatgcaagttttgggctcatctgtttgctgcattcattcaaagatcacggacagcacatccttggtttcagaactctctgtcatagcaggacaagagaagatcatgcttgatgaatgccgagaactcttagctacagctgcaaaactgcaggtgcaggaatcgagcctacggacacatcttgtgcaacagagacaaaggcttcaggattgaaatggcaacctgaacaagatgcagaagccccaggccatgccattgaacaggtaaactgtgcaagttgaactgcaaacaggaaaggaatctgtagaatctaaacaataggaacaaaacaaatgttaaacatcccctggagattcatggtgtgatgcgacaactaactacccgcagtgcatagatatgacaggtttactgaaaaaacctcatcatatgtaaatggttttcaccatataatgcactcccagccttttctagtatttttttgttccttcgtatagagtggatccctcctctttgccattgtattttttgacattttgaaagaaatacatagataatggatgagct

SEQ ID NO: 18099 - DNA, 910 bp, Zea mays
  Clone ID: LIB3078-024-D11_FLI
gcagcatgtacgtgttcatgcaatggaagcagtgatgggttgctgggagcttgaacaatctttacaaagcctaacaggggcatctcctggtgaaggcactggagcgaccatgtctgatgatgaagacaaccaggtggatagcgaagccaacatgtttgatggaaatgatggatcagatggtatgggctttggccccttaatgctgacagagggtgaacgatccttagttgagcgtgtacggcaggagctaaagaacgagcttaagcagggttacaaagaaaagcttgttgatatcagggaagagattatgcgcaagcgcagagctgggaaacttcctggagatactgcatctgtgctgaaagcttggtggcaagctcattccaagtggccatacccaactgaagacgacaaggcacgactggtgcaggaaacgggattgcagctaaagcagattaacaactggttcatcaaccaacgcaaacggaactggcacagcaacccaacatcctcgggtgaaaagactaagaagaaaaggtgatattgatccagagcaatcttgacgatgctaaacgtccactgtgtactttatggcgaagtacattaccctccctccgtagccaggagcggagatgtgcatcttgggtggcccagtggtcacttaatgccccaagtttgaccacgttgtgggactggtgctagtagtgacctctgcagtatagtaatattcactaatgttgtgggaatcatgtggtgtataaccggcgaacgggagggagtaatttatgttttattgtaattgtctatctttaccttgtaatgatattttagggagaatcccaagatctcagaatggccgttcactgtattgtcggtggtaaaagtggtgggcaatcatcgtgttcagattacc

SEQ ID NO: 18100 - DNA, 977 bp, Zea mays
  Clone ID: LIB3078-024-E8_FLI
atcacccaggtcatagctacatcggttatcttaggtttactgtggtggcactctgatcccagcacactaaaaggtctagaggatcaggctggcctgctgtttttcatcgctgtgttttggggcttctttccagtgtttactgcaatctttacattccctcaagagagggcaatgctgaacaaagagcgcgcagtcgatatgtacaagctcagtgcatacttcttggccaggacgacgagtgatctaccacttgaccttttcctcccaatcatattcatggtgatcgtgtacttcatggcaggcctcaaagcaactgccacacatttctttctcagcatgttgaccgtctttctcagcataattgctgctcagggactcggattggcaattggagctactctgttggacatcaagaaggcgacaactctagcttcagttacagtcatgacattcatgctagcaggaggcttctttgtaaagagcgttccaccattcatctcctggctgcgctacctgtccttcaactaccacacgtacaggctcctgctgaaggtgcagtacgaccccgtgccggacatcctgaccaccacgaggcacatggacagcggtggcaccgaggtggcagctctcgtcgccatggtcatcgggtaccgggtgctggcctacctgtccctgagaagggcgaaggccctgggcagctagcgcatcccttcaccgcagtgactgaagcctgagctcgtggagcgggttgggtcattgggtgtgtagggaagtttgtgctatattgcgctgtgaaaagatggaagtctttttttttaacttttctgtctttttcaactaagttctgagcaagtaccaacactgaagaacaaggatctgtagcgagtgtaccagagacaagctgtgctgtaatttttccttcacaacgattgcgtggttaaagtgattgagtataagcgtgagtttagattgccggc

SEQ ID NO: 18101 - DNA, 652 bp, Zea mays
  Clone ID: LIB3078-024-F8_FLI
gcagatagagaatgatggagatgttctttgggaaccagatgtgagagaaacaaatgaggctgtcgcattgaggggtatgaagtttatggactggttgtggacaagagaagagaaagagatagctattgtcagtcacagtggtttcttgtttcacaccttaagcatgtacagcaaggagtgccatccaaccataagagacgaagttagcaagcactttgcaaactgcgagctacggtcgatggtgttggttgacagaagcatgcttgggtcatattcgtcaagattcaactatgctggcaagaatccaaccgggctagatgtgcctaatgatattgcagataagaagcaggttgatgaagctcagaagaactgaggcaaccttgaaagcataccgtagatgacttggattatcaaaaagccactctgacctttgcgaagcttgcttgcttgctttgaagagggcatctactacagatagagtttacacataccattgtgttagtcgagatgaactacgcagcaatgtataagcatgtctgctcttttgtctcagcctacattgagattcagggcattggactaagatcgcctatttatgataataataataataataaccggatcaccccacattcaccaggtgatgcacgtc

SEQ ID NO: 18102 - DNA, 682 bp, Zea mays
  Clone ID: LIB3078-025-C7_FLI
aagctacccgcagccagcctcgcattcccggcgaaatccttcttcggcgcgccgctggccgccaccgcggcctccgtcgcgtcgccgctcccgcgcaagccggccacctccaccacctcgctcgaggtcgtcgcggcggggaagaagggctacaagatgaagacgcacaaggcgtcggcgaagcggttccgggtgacggggaggggcaagatcgtgcggcggtgcgccgggaagcagcacttgctcgccaagaagaacaccaagcgcaagaagaggctctcgaagatggtgcaagtcaacaagagtgactacgacaatgttacgggtgcactgccctacctcaaagtgaataggaaagcaaactgagagctacgtggtcttcaaaaaatcattaagtttcgttccaccaaattgtaattttgtgtatcttccactgtatttccttctcaaaaatactgaggcatcatttcaaagcaagcaaaaaacaactcctggtatcaacagtatagcgatatttcagaatgaggtgcactgcttgctatagttgttatttagtcgcaaatatgtgcaagtaagagtggcacttgagccattagctcctcttaggatatggccagcagatcgtgtatatggctgtgcaagacactgttttgcaccattttatatatagactgcattgttt

SEQ ID NO: 18103 - DNA, 369 bp, Zea mays
  Clone ID: LIB3078-025-E11_FLI
gtcgtcggggtggacagggactacctgtcctacgacgagccaaagacggtgttcccgggcgaggcgtgcgatgaccttggcggcgagttctgcgaggcgccgtaccaggacggcgtctccaaggagctggcgcacgcctgaagaccctgatccatccatttctgtccaccacgctatgtacgtatgtgtagcagatggtttacatctacgtgttagagcccggagagctggagaagctagctagcgtgcttacagaataacagcagccaagcaaagccaagggtgtgtatataataggcatgccttgggttgtgtcagctgcgactgtatgtatagtttaaaccaagatgaaatggtactgatggtgat

SEQ ID NO: 18104 - DNA, 1448 bp, Zea mays
  Clone ID: LIB3078-025-F11_FLI
tgagaattgaaaatggaagaggcaccgagaacagtctggaggttctggaaggaatgcaatttgaacgcggttacctctctccttactttgttaccgatcgtggtaacatgacggtggagttcactgactgtcagatactattggttgacaagaaaattacggatgctagtgagattataaggatactggacagtgctgtcaaagaaaactatccgttgttaataatcgccgaggatgtggaagaacaggcaatggctgatttgataaaaaacaagctgaaagggacaattaaggttgcagccgttaaggccttctcttttggggaacaaaagactcaatgcttggatgacattgcaatcatgacaggaggtacactagtgagggatgacatggggcatatactggaaaaggcaggaaaagaggttcttggttccgcttctaaggtggtaatcacgaaagattcaacactaattgttactgacggaagcaatcgtcgagcagttgaggaaagggttgctatgataaaaggccaaattgagaattctaaggaaagttacaacaagaagatattgggtgagaggatagcaaggttatgtggtgcaattgcagtgatccaggttggtgctcaaacaatcattgagatgaaagataagaagctgaggattgaagatgcacttaacacaacaagggcagctattgaggaaggtgttgtagttggtggtggatgtagcctactaagactgtcagagaagattgacgcaatcaaggaatcatcgttggataatatagagcaggaggttggtgctgacatcttcaaacaagccttgagttaccctacctcactaatagcaaaaaatgcaggggtgaatggcgactttgtcattaaaaaggtgttactgaatgatgatgcaaattatggttacaatgctgccaagaactgctatgaggacttgatggctgctggaatactggacgcaacaaaggttgtgaggtgttgcattgagcatgctgctgtagttgctaagtcctttctcacctctgatgtggtgattgttgaggcaaaagaaggcaaacctattcgaataagacccccaatgcctcctaggcacttaattcccccaatgcctgcttcaatttcaggtattcgagtgtagcaggcgtcctttccaccaagaatcagcctcaacacaacaagactacgggcccggtacccccaagtttctaagataataaagcaaagaaaacatagtgaaattttgacgtcaaacgtggctttgtatgattgctccaagaagctctatgcacgctatcgcatcatcggagcagcagcaagggtggatgatatgtgttatatagggaatacaaaggtgaacaattcaattttgatgttcaaatgctccttaccgtcataaatatacttctgtttttttaggaacatatactttaat

SEQ ID NO: 18105 - DNA, 782 bp, Zea mays
  Clone ID: LIB3078-025-G4_FLI
acctggaatcgttccgactaaggccttgttcgtttgtgtcggattggtgggtcggaacgattccgagccggattgcttctataatttatataaactttgattagccggaataattccgggtccaatccgatgtaaacgaacagggcctaatcaaaatttatataaattaggaatcgttgcgcccaccaatcgcgaagatgctaatcttcgccggtcgccactcgcccgtctcgaagctactgccgctggccaatcatttcacctgttgcggctctcgcccctccatcgaaatcgccatgccgcatggtcacgccgcagccgtggtggaccggctgctgcgcaggctgggttccgccgcttgccggctggaggtgcccccgaatatagacggggacctagcgcatgtgtggacaactctggcgaggttgcaagatatgctggttagcctggagatccgtccggagctgcaagaatggatgggggatatcaagcaggtcgcgtacgatgttgaggatctggtcgatgaattggaagaccacaatagcatggaatctcagatgagcggctgcgttgcagttggagaggtttggttcatagatccttaaaattattgccgatgcaagtccttcttccattattttagaattgatatttatataaattttttagtgcgaattacttgagcttgtttgattgtcgagcccctccaatccctccattttccttgctgccacaagcccttaccgtacctccctccttccgtcgagccgcacaacagtatt

SEQ ID NO: 18106 - DNA, 1012 bp, Zea mays
  Clone ID: LIB3078-026-A11_FLI
acgagctccagctgtcggacgccgagaaaggcccggatataccacttctacatccccgtcttcctctggtgcgaggacgaggtcatggtgcacagagccaggtacaacgacggcgatgacatcccgccattggtgatcggggtcagcgctccccaaggaagtgggaagacgactcttgtgttcgcacttgattatctttttcgggttgctggtaggaattctgccacattgtctatagacgacttctatctgacagcaaaagaacagaatgaattgagggacagaaatcctgcaaatgctcttttagagttccgcgggaatgctggaagccacgatctccaactctcagtggaaacactcgagtcactgatcaagctaacgaaggaaggtatgaagatgaaggttccacggtatgacaagtctgcgtttgggggaaggggtgaccgggctgatccttctgtatggccagaggttgaagggcccttagaggttgttctgttcgaaggatggatgcttggatttaaacctcttccaaatgaagttgtgaaagaagtggatccacagctggaggtggttaacaagaaccttgaagcatactctgatgcttgggacaggttcatccagtcatggattgttattaaaataagagaacccggtagcgtttaccagtggagactgcaggcagaggtcgctatgagagcagatggaaagcctggaatgtctgatgaggaggttatggattttgtatcacgctacctaccggcataccatgcatatctgccaacactgtacaaagaggggccgaatggttcgaatccagatcatctgctggtcatcgacatagacgaaaataggaaccctatctgtggtggatcatgggacatctcatgtttgtgaaactacttttatgatgggccgtcaaacaccactggcctcttgttgccctacactctggtagtgtaaatctgtgaattccatgtaaatatgaatttcgcttcttaaggcacttttt

SEQ ID NO: 18107 - DNA, 364 bp, Zea mays
  Clone ID: LIB3078-026-B10_FLI
tgggcttgcaagagcatggccggatctgcagagaactgctcaagctcaaccatacttaaaaggaactggagcttgtcttgtaaactatggagcatgctgcttgcaccacgaacatgaacgcatggctggttaactaggtagatatgggtgtggatgggagagagagagaaaaaacaaggtatgtagtccacgtctctgatcttggatggagaggcatgagatcttgggatgctcatgcatgggtcatgggtgtggctgagatctggaacttttgtagccatcaacttgtttcccagaaaccatgtaataagggtgacctgtgtatagctatgagacatcaacatatcttgctgctttgtgtgtc

SEQ ID NO: 18108 - DNA, 791 bp, Zea mays
  Clone ID: LIB3078-026-C11_FLI
ggtgatttagacaggaggagatctctttcaggttatgtttttactattggagattgtgctgtgagttggaaagctcgtttacaggatactgttgctttgtctaccacagaagctgagtatatggcaattgcagaagttactaaggaagccttatggttgaaaggtatatattcagaactatgtggaattaagtcttgcattaccatctattgtgatagccagagtgccattcatctcaccaaagatcagatgattactgagaaatccaaacatattgatattcgctatcacttcattcgtgatatcattgaaaaagggttggtaaaggtatgcaagatcagtactgataataatccagctgatatgatgacgaagcatgtttctgttgctaagtttgagctatgctcaaacttagttggtattataaattagcccttagtggctgttggcgccggcaagatgatgatgcatttgtttaaggtggagtttgttattatgatgctacaaggaatttgtctcaaggtggagtttgttgagtttgtgatccaaattctgaagaaggcggccaagttggcgagcgaagcggaggcccgtcgccgggaggcttgggccggagcgcagcggtacggatcgttttagggtttcacctctataaatatctttgtaagccgcaggagatagctgtctcaattgtaaatctcctgcgatctgtaaccacccgaaaatagtgagaagttgccggtcggcgcccgttgttttttccccttcacttcagaggggttttccacgtt

SEQ ID NO: 18109 - DNA, 518 bp, Zea mays
  Clone ID: LIB3078-026-D9_FLI
ggagaagtctctgaagcgcgcgtaccaggcccgcaaggcggagctcaaggaggagatccggcagaacaaggttgcgaagcggaaggcccgcgaggagcgggagaagcggaagcaggagaacgtgctccgcacgggcaccaagctgcagcgggtcaccaacccgaagacgatccagaagatcgccaagtccaagaagcgcaagcagctcaaggtcgtccccgacgagttcttcggcggcaagaagtcggaggccagccggcgcatgcaggtgcctggacttgagaattgaatctcaattctcaatctctgtttctggggtcgcgttgagttcatagtggttaattcgacgacgattttctacttgcttatggtagtttgaagtatgatcagattaagtgattacaatggtacgcaagttatcaagttctgatatgagatttttactgccgtgtacccaattttgcttgtattccgggctctccatataaagttttctatgcatctattattcagttgcc

SEQ ID NO: 18110 - DNA, 858 bp, Zea mays
  Clone ID: LIB3078-026-E2_FLI
caactcttgagcaggggaaacgagagatccttggagtcagcaatggagtctaccgcgctaatgaccgcgagactaccactgctgacctctggctcccgttccaaacccctcccctttgcttccttcaccacggcggcttgccgtctcgcctccgccccctgctccggcagcggcagcgtcgtcctgctgtcgcgccggagccgcgattatgctggcgttggttccttggtctccgccgcggcggctcctggggatacggcggacgccggatccgagtccatcctgctcagcgtccaggggatgatgtgcgacgggtgcgccgcgagcgtgaagcggatcctggagagccaacccgaggttacttctgctaccgttgattttaaggaagcaagcgcagtcgtgtggacaacagatgaggccaaggggacacaaggttggcagaagcagtatggagagaagcttgctaaacaccttggcacttgcggatttgagtctcgcctacaaggtaagaccgactagcagagtaaggtgaagccgaaccgatattgaagttcagatgttcaccttaatgatcaatttgtaccagcatatatgttaaatattttgtctctgtggattgcagttaggagtagtctcggtgctagtctggtggcataatactacatacctacctttcacatgatctttagctaggttgtttcgaataggatgatgtttgtcctaaaattgtaggagtaggccactgttgcgagtgaggagtttgcggctgggctattgttaaatccggtcttcccgttgcttcgaagatataaagtgatactacctctataactcaaaataaatcgattttttaaactc

SEQ ID NO: 18111 - DNA, 543 bp, Zea mays
  Clone ID: LIB3078-026-F7_FLI
tggatgctctacattctcgctatcgcgtcgttaattgccgttggaaaggaaggtttcaggttttggagctgatgaagtaagcgaagctcgaacgacgctctctaggtgtccgtcggatttccgatgccagacgtcgtcctctctgttccgtgtctccctgcatcttcatcgatgtagcatcggtcgtcaacctcgccgtggcagctctcaaactaggagtgttggtgcaaaaccgtcgtcaccccgtcattgcaggtcgctgcgctatcgtttgcttatgtttcatcatctacgccatggcacttgttattgtccctagtttaattctatgtgtggttaatggtcgaagtgtagattgcaaatgccaattttaatgaagggtatgtgtaggcatatatgtgatgagctgtcgaattaatgatatgtaagataggtctagtgtttctatcggctagttgtcatattcgactagaattatgtgagccaattatatggatacaatgatgacttgctttagaaattgtcgtgtcgatgttcagcatc

SEQ ID NO: 18112 - DNA, 928 bp, Zea mays
  Clone ID: LIB3078-027-A6_FLI
tcttgataatattaatgtggtgcctttaacaacagagtcagaagtaggccacaatgagcattcaaatgaagcacctacaaaaacttttgcagaagagacagccaaactacctaatacttttaagacaccagaggccaacaatgaaagcacacatagaaatatggaagtgcttgtagacaagcctgaggagaaagttgttgtcaatgcgtctaatcttggtaattttgttgggaagcctgtgttccaagcagagcgcatatacaatcagactcctgtcggagtggtcatgggtttagcttggaatgctatgggtggttcgaccttgtacattgagacagcaaaagtagaggaaagcaaaggcaagggaacactttttgtgacaggccagcttggcgatgtcatgaaagagagcgcccaaatcgcacatacagtttgtagagctgtattactagagaaagaaccaaataatcccttttttgcaaagtcaaagctgcatttgcatgttcctgctggagccacaccaaaggatgggccaagcgctgggtgcaccatggtaacatcgatgttgtccttagccatagggaaatctgtgaagaaagacttggcaatgactggtgaagtaactctaacaggacgaattcttccaatcggtggggtgaaggagaaaaccatcgctgcaaggagaagcggggtaaagacgatcatattcccatcagcaaaccgaagggattttgatgagcttgcttctaatgtaaaagaaggtcttgaagttcactttgttgacaaatacagcgaaatatatgatttagtttttacaagtgacaccaagacgcaggaaagctagtgattaactgctcgaattcatttcccatttcaattgttggcaacaacatattcaaagcaatcgagtttcatcaaatatgatgat

SEQ ID NO: 18113 - DNA, 588 bp, Zea mays
  Clone ID: LIB3078-027-A7_FLI
gcctcaccgcctctctcaatctgataccgcagatccgtcgtccggtgagtggaagccgcacgaacccatggcctccggcgagcttgcctgcacctacgccgctctcatcctcagcgacgatggcatcgccatcaccgccgagaagatcgccacgatcgtgaaggcggccaacatcaaggtcgagtcctactggccggccctctttgccaagctcctggagaagcgcaacgtcgaggacctcatcctctccgttggatctggtggcggagctgctccagttgctgctgccgcacctgctggtggtgctgcggctgctgctgccccggctgtcgaggagaagaaggaagaggccaaggaggagtctgatgacgacatgggcttcagcctgttcgactgaggagaccccctcacccagccattagcaaatttcacttgtgctgtcaaagactatcttgtcttatgttatgtctctaggcttttgttacaactacccaagttttgagtttttgagatgtggctatggcatgaactcaaaccatcttatgagggtgaaacctgtttctaatttctatattgttgctgttcatt

SEQ ID NO: 18114 - DNA, 390 bp, Zea mays
  Clone ID: LIB3078-027-B1_FLI
gaaggacccggagcacgcgcaccgccacaagatcgaggaggaggtcgcggcggcggcggccgtcggctccggcggcttcgccttccacgagcaccacgagaagaagaaggaccacaaggaggccgaggaggccggcggcgagaagaagcaccacttcttcggctgattgatcctcccgtatcgtcgtccctccccgtgtgctacgcgtgcgtgtgagagtgatatcgagcgcccgccgtgttgtgcgcgcgtacgtatgtatgcgctcgtgtgatgcacgaataagcgtggctacgtaatctatcgtatgtatacgtgtgtgtatgcatgtgcttgtgtatgatcgtggtacgaggaccgaaaaaatgtatgcaactctgatttacttac

SEQ ID NO: 18115 - DNA, 1191 bp, Zea mays
  Clone ID: LIB3078-027-H11_FLI
gttggtccgctacgcacgccggatttttgcatcgagcacggagatctacaacaaaaacatggagctacgacgcgattcccaaggtacaatcgtaattatgttcaaacaatttttaagtcgtcctgcgctccttctattacgagcaacgttttatattctgtgcttgcataataaatcgaagaaatcctgacaccaatcgaactgaagatcctgaaacgcacgttaataccgttgacgtccgcttcacccagctcgattttcagtcttgtaataataattgagaactccaatgaactgagagttactaatcgctccatgagtctgaagcgtgcaaaaatttaggtcgcagctacacaaatttacacgctgttctatattctatattctataatatatttaggtcgcagctacccgtgaatctcctattttgaaaaggtcactgcttttttatttcattctatattctatattatatttttgtaatattcagtctcgtttaattgctttcagacttaatgttagataattgtttacattttctacaattcagtctggactaattgctttgggactaatgttggagatatccatatgtatctgcgtctaagcatttttcatttgtatttatcatgttttgtcaatagggatacttgtttcttgtaagtctgttagcatgtttgaaccatagcaattggcggacgtgtgtaaaactgcagtatgatggattccactattcatcaaccgaaattatggcgcgcttcaatcgtggctacgctgatggggacctgatccgttatggtgtgcttgaatcgtggctgtggagatgtgtggaactcattggttaaagtgtgctttattaataatggtgatgctgatggaactgattttgctcccgttggacggcctgattggttactttgccctgttgactgtttgagaacgtaccgcccaggtttacttatacttactgctttttgacggtactgtacatacagttcgacaatttatttattggcagttcaattcatccatttagctaggggcacgagagcatgagttcccctggagatcaatttcatgttgcttttttttgcgaagttccattttctattttcaatttgattagggctagtttgggaacttattcttccaaggtttcctaaggaaaattagttcatttttttttttggg

SEQ ID NO: 18116 - DNA, 785 bp, Zea mays
  Clone ID: LIB3078-028-B6_FLI
ggccaatcaacagaagtgacgcgagcacgagcacacatcccctcccttcttcggttattcctcgccgcgtgccctcgccgcagacctctgccatggcggaccagctcaccgacgagcagatcgcggagttcaaggaggccttcagcctcttcgataaggatggcgacggctgcatcactaccaaggagcttggaacggtgatgcgctcccttggccagaaccctaccgaggcagagctgcaggacatgatcaacgaggtcgatgcggatggcaatgggaccatcgacttcccggagttcctgaacctgatggcgaggaagatgaaggacacggactcagaggaggagctcaaggaggccttccgcgtcttcgacaaggaccagaacggtttcatctcggctgccgagctccgccatgtcatgaccaaccttggcgagaagctgaccgacgaggaggtcgacgagatgatccgtgaggccgacgtcgacggcgacggccagatcaactacgaggagttcgtcaaggttatgatggccaagtgaggagcggtccccgtgaaataagtatctatggattgaagcgaattatcaggcacacaagctgtattttgtcatgtccctttgagtacgcatcagtgtcatgcaggtggtaatgtcttgtagtggtccgtttaggcggtgtagtcatgggaacgcgacatcagatacctggtttctttttattgtgatgttatcttgcattattgcacctgtaggatttgttgaagctcatattttccagggttt

SEQ ID NO: 18117 - DNA, 799 bp, Zea mays
  Clone ID: LIB3078-029-B2_FLI
gcaaggagaagatctacgtctcgtactgaagaaagccctcaacggatgtttcatggtatgttttgggagagagatggctacagggggataaacatggaaggaattgcacaggcgttgctagcattggataggattgaacatgatgttgaattgacttatgagcaactgcttctgctagaaactaatctgctcttaagtggccttgatttgcacgatcaacatgaagatatgagattggatatcgacaatatgtcttatgaggaactgcttgctttggaagagcatattggctcagtgactactgcccttactgaagagcaatttaccaagtgtgtaaaccaaagtgtgtatgaagcaagaaattcttatagagatgtaagcaagatcgcagcagatgatgtgaaatgtagcgtatgtcaggaggaatacgttgatggtgaagagattggtacaatgcaatgtgaacatcagtaccatgtgcgctgcattcacgaatggcttaagcagaagaattggtgtccaatatgcaaagcttcagctataccttcagagatgaccaagggagacgcatgaatcttggcccaaacttgtaaatagcgtggatttattattagacattgtagatgctgacgcagttcaccccaatatgtggatacgatagtctctcccgaacggtcgaacgcctggaaccttttgttactgcatcttttatcttcttagcacacccttgctgcttgacagcagtacgggtcagaaactcgaaaataaccgtggttctcaagaaatttttccagattct

SEQ ID NO: 18118 - DNA, 452 bp, Zea mays
  Clone ID: LIB3078-029-B4_FLI
cgattattagggctggaagattgacagacgggccctacacttcgtatgatcttaatacacttcttaaagctacagctggagagcgacgagcagtagtcataggcaaaggtgacaagcttgtgggggaagttagcagacttgtggtagcagaagcttgtatccaagctttagatattgaatccactgaaggacaaatatatgagattaactcagttaagggtgaagggcccggaactgacccagagaaatgggaggagctattcagatctgctcggtcagactagtggcattctgcaaagcgtagtaacgtaatgtaggaatatgcatcgtaatacaatgtaatccatagagtgcagccctaattcaatagtcactgaacagtagcgatcatgtagagaatatttggtttgtgtacatagtatgagcattcatatatgacgattatacctcct

SEQ ID NO: 18119 - DNA, 417 bp, Zea mays
  Clone ID: LIB3078-029-C11_FLI
atgaaccccgccgtgtccttcggccccgccctcgtcagctgggagtggggctaccagtgggtgtactgggtcggccccctcatcggcggcggcctcgccggcgtcatctacgagctgctcttcatctcccacacccacgagcagctcccctccaccgactactaaaagccgaagccgaccgacccaggggtgcgcagcgcagcgcagctagcatccagcgctctctccccgctcgccgccgtttagtttctctcgtgcacgtgcatgcatcgtagactgtctcaggccgccgatgcgccggcgccgctcgcatcgtttgcttccttggaccagcagtcgtcgccgtcaggctgaactgcttgtaaccgtgaattccggacccgtttgcttctgtaagatttgtgcatttgcctgagt

SEQ ID NO: 18120 - DNA, 561 bp, Zea mays
  Clone ID: LIB3078-029-E7_FLI
gccggcagcgtcttcaacccgctcaacttcgcgcccacgctcgaggccaaggagaaggagctcgccaacgggaggctggccatgctggcgttcctggccttcctgatccagcacaacgtcaccggcaaggggcccttcgacaacctgctgcagcacctgtccgacccatggcacaacaccatcatccagaccctgtcgggttgagtcgacggtccatcaggtcatgtggtccgagctgaaaggccgagactcgaagacagttcgtgtgatgcgttcttaatcgactgagggctaaggaatgtgacgtactggtatatgtacattagttgaagcggaggctataaagggtgtagagattgtttcatcagtgtatatcatctgtcccgatgggttttgttttgtgcttttcacgattcattgtggaagcacatgtattattagtacaagaactgctagtagatatataggcttataattaagcacgacttctaaaacctcaacgtacgtatgtgaaagccccatatgatggtaaacaaaaggaaaatacaacattacatttgt

SEQ ID NO: 18121 - DNA, 2147 bp, Zea mays
  Clone ID: LIB3078-029-F9_FLI
gcaaaaactcttaatccgtgttggagtgcctacaatattgcagacaggagagctcctccagtctatgttaatctttttactggtcaagcaacaacacaatttccaagtatgactgagactgtaagaggagggatactagcagacgcaatgggtcttggcaaaactgtgatgaccattgctctgatactttccaatcctaggggggagttctctaactgtataaaaggagacacaaggtatctaggagatcgtgcgaccagaggatacacttcaacatcctctgttagaggaggtacccttgttgtttgccctatgtcattattgggccaatggaaggatgagttggaggcacattcggcacaaggagctctttctgtgtttgtgcattatgctggtgataaaactagtagcctcatgctgatggctcaacatgatgtcgttttaacaacctatggtgtcctctcagctgcatgcaaaacagaatgcaacagcatttttcacaggatggattggtataggattgtgcttgatgaagctcacacaatcaaatctcctaaaactaaaagtgcccaagcagcttatagattaaagtcggaatgcagatggtgccttacaggcacaccattgcaaaataatttggaggacctctacagtcttctctgcttcctacatgttgagccatggtgcaatgcaaaatggtggcagaggcttattcagaaaccttatgagaatggtgatgatagagggttgaaacttgttagagctattcttaggccactaatgctaaggaggaccaaggaaacaaaagacaagattggaaatcccatactggttctacctccagctcgtattgaagttgtagaatgcgaacaaactgaccatgaacgtgatttctatgaagcacttttcaggagatcaaaggttcaatttgacaaatttgtagcacaaggcagtgttctgaacaattacgctaatattctcgagctacttctccggctaagacaatgctgcgatcacccttttctggttatcagccgagctgaccctaaaaagtatgctgacctcaaccagcttgcacagcaattccttgaaggggtgcagcagagttcgtctggaagacagaacgtagtgccttcactggcttatgtagaaggggtcgtcgaggaaattcgccagggtgccactatggagtgccctatctgtctcgagtcagcttcagatgatccagtgctcacgccttgcgcacaccggatgtgtggcgaatgccttgtttctagctggaggactccagaaggagggccatgcccactctgtagacgtcacatcagcaagtctgacctgatcgtactgcctgctcagagtcgtttccaggtggatgccaagaacaactggaaggactcgtgcaaagtgaaaacgctcgtaacgatgctggagagccttcagaggaagcaggagaagagcatcgtgttcagccagtttacttccttcttcgatcttctggagatccgcttcacccagaagggtatcaagttcttgaggtttgatggcaagctgagccagaagcacaaagagaaagttctgaaggagttcagtgagagccaggacaagctggtgctaatgatgtcgctcaaggctggaggtgtagggctaaatctaactgctgcctccaatgtttttatgatggatccatggtggaatccggctgtggaagagcaggctatcatgagaattcaccgcattgggcagaaaagagaggtccgagtccgacgcttcatcgtcaagggtactgtcgaggagcggatgcagcaggtccagatgcgaaagcagaggatggtttctggggcgctcaccgacgaggagattcgtggcgctcgcattgagcatctcaagatgttgtttaaataaatgatcattgccgatgtgtatagctgacgctacgccgttgatactttggtagtgtcaagtaggttgttgagggcatgtttggtaggagtaagatctgggtttagaccattgtagatggggatggccggatgggagtgggtggaaccttgcccttccgatatgacggtcttcctttctaacgtgaatcagactgagaatgagcattttggaaaacatgactacgataaatcacttttctcttg

SEQ ID NO: 18122 - DNA, 610 bp, Zea mays
  Clone ID: LIB3078-029-H6_FLI
aagaagaaaaattctaatgtcccagctgggcttttctttcagcatgctggtcataggtttgttgtctgtgtcagatgcaaaaactaacccttcacactcatgcttctatttttaccatgcatttcataattcatgttgtacatcttggcagggataagatcgtagacttccactggaattcgtcagatccttggacaattgtcagtgtctcagatgatggtgagagcactggtggaggtggaacactgcagatatggcgaatgagtgatttgatctaccgcccagaggatgaagttcttacagagctggagaatttcaaggctcacctggccagttgcgctccgaggaattgagtcatgtgaaaactctgagtaggttatgtagtttcctggccataagtatggccccaattgacattggatctgtcttctcatgctcctagagctgtacccttcgaggtgcttgtgcctttgtgagcttgtgttgaaccatgttgtatgactaaatagtccgcaaacgagtcagctggatggctaatctgtaggccaactattgggatattgttggatattatcaacaaccggttcagattcgtgattagattgtccgc

SEQ ID NO: 18123 - DNA, 1645 bp, Zea mays
  Clone ID: LIB3078-030-E10_FLI
tccaatgtttgtaagttaccagacatcaaaaagtgaagtaatatatttatctgaagaatcaactgaccctagtaaataccttgatggtactcgggtgtatgtgcaaggatcaatgtgggatggttttgcgaatggtaaaggggacttcactgatggtccatatgagattcagtatccagagagttttttcaaggacagcttctacaaatatgggttcaaccctgaagttgggtctgtaggggttccagttgccgcaacaattagggccacaatgcctccagtaggatggagcattccgattttaaagaaaagaattgatgggtacatcgaagaagtaccaaatccaatatgggactaccacaagtatattccatactcaaaaccagggaaggtccatgatcagattgaactatatggagccccaaaagacctggatgatttttgtgaaaaggcacagctggtgaactatgttcagtacagagcacttttggaaggatggacttccttcatgtggacaaagtttacaggtgtcctaatttggaagacgcagaatccttggactggactaaggggccaattctatgatcacctccaagaccaaacggctgggttttatggttgccggtgtgctgctcaacctattcatgtccaactgaatttggttacctattttgtagaggtggtaaacactacagctgatgaactcaaagacatggctgtcgagatttcagtgtgggatctagatggtgcatgcccctattacaaagttaccgagaaaatagttataccgccaaagaaagtgaagcaaattatcgagatgaaatacccaaagatgaaagatgccaagcctgtgtattttctgctcctcaagctcttcaggctgtcagacaatggaacaatctccagaaacttctactggttacaccttcctgggcaggactacaaatcgctggagcagtatcagcagaaaaagattccattaaaaattgattctgatgtttcagtctcaggcacgaggcacaaagtaagaatgacagtagagaacatctcaaagaagtccgtagtagacagcacacgttcagtatcagcaatggatctaggtgatgcaagtggttcccacagcactcgcaaagaaactactcggaagggaaacgggagcgacggactgtggaggaaaatacgcagtggcctcggggtcgcaagaccaagcgacaaccgaagaacactggaggtcagcgggaccgattcaggggttgccttcttcctccatttctcagtgcacacctccgaatcatccacggacggggaggaatacaatgacacaagaatcctcccggtccactactcggacaactacttttcgctgacgccgggggagaacatggccgtcgacatctcgttcgaggctccccagggatccagtcccagagttgtcctcagaggctggaaccatcatctggaccacgccgtgatgatctgagatccgtgtaataaaataagcacgtaccgaataaagtgcagacatcagatcgtgttcgtgcctgttgttggattataattaggcttgtcctaattttattttattttattaaataaatcgtacgacctaaattgaattctaggttaaatggcttcaaggtactct

SEQ ID NO: 18124 - DNA, 817 bp, Zea mays
  Clone ID: LIB3078-030-F11_FLI
gtcgttcgagaagagtaggattgagaaactccaaaaggaaattgagagcgataactcggctgttgtgcaacttcagtatgagcttgaagtggagaggaaggcgttatctatggcaagggcttgggcagaggaggaagccaaaaaggcccgggagcatgcacgcgcccttgaggaggcccggaaccaatgggagcgtcaaggaatcagagttgttgtcgaaggagaactgaaggatgacgcctcagctggggtgacatgggctaacgctggcaaagaaaacgcagtcgacgagtctatcaaccaggcagaagctctgctggagaagctcaagacaatgtctggtgagatggaggtgaggtctcggggtgcggtggagagagtgatgcagcatgtgaggtccttcatcgcaatcctaaagcagcaagctgcagatgcaaggcagtggtgtaccgagtttggggcttgtgctgcttccagggcaaacgaggtatcagcacaagtgaagggaagcgtatctgcgtttggtgcaacccttggagacaagtcgaagagggcaatggaagagtgcaaggacggcctggagaggatttcacacagattcaagacagactagataccaattttgttgtttgcttgttttttggggatgatgttgttgcagagttgtttactatagcatgctggaacgaacagtaagtagttcccgaccgtggccttgtggaataagtaagtgcaacgaagcacttgtggccttctggaataagtgtaattaataccaacagtaattaataatagttcccgtttattatattatatc

SEQ ID NO: 18125 - DNA, 448 bp, Zea mays
  Clone ID: LIB3078-030-F12_FLI
ctgcaccaatggcagtaactgcaggagctgctggagttggagtcggttctgctattaacaaactcaacgacgttgtggcaatgatcgctgaggtgagaagcattgcgcaagcaatggagcttgcgccaagaatcgtgtccgaaaccctgagaacaattagttactagtggctaggaatacccttgccatttctgagcaaacttgagcagtcaataagaaagcaaaagagaggcatcgactctgcattttattctctctacgctgtcttttgcctgtggcagtgaatagcgcattagcatcatagaagtattagcttgatcaatggaagttgttcatgcgcttcttcatcgctgcaagtgttgtcatcttgtcgaactcacaataagcttagataagtgctgggtttgtgggaacatcgtttgtgcaatataaatgagatcttgcacct

SEQ ID NO: 18126 - DNA, 658 bp, Zea mays
  Clone ID: LIB3078-031-B5_FLI
cgcggctgcgcccaccatggacgaggatgagtttcggcgcatgctcgacctcttcccggtcgtccgctcccgagactactgctgctccgatcttggaacatccagcagaggaaccagacagcgatcacgagttcaggaggcaactaagggcgataataaggactcgtccggtggacgagatatgtttatgcagaaattgaagatggctgcggagaataagattggagcgacaaaggcagagttcttctgcaagacattcgaagaagttcatgagaaacttgttcacagagagctgaatttggatgctgctaagaagttcctgagcgcatatgagagctgatgatgaacaataggtagatgctgcttaagggtcggtagttgccaatgatctggaaagttgttgatgctgttgagattttgatcacaggcaaacttttaacaacaggtagatgctgttgagcgcatactgataccgcctgattggttcaccgatcgcccgtagccagctcgtatgcagccaggctgtccagagactgttatttgggccgtagaagtggatgcactcaaaataaatgttgcgtttactcgtgcagcctcacgtcttttacgtgcatgcaattaaacatatgctcaataaaatcaatgcatgtgatggttt

SEQ ID NO: 18127 - DNA, 513 bp, Zea mays
  Clone ID: LIB3078-031-D12_FLI
gaaagacgatggcggcggcggcttgtcccgagaggatctggaacgcctggtcgggagtgacgaagatgccaagttcaatgggttggatcttgcaaacctcatcaggaagaagtacggtagatcgtacgatgtgacgctgataaagaaagagttcatggggaggaatctgctggccatgaatgtgatgtggaagtacagggagcaaagatcgttcccgctgagcgaggaggagtacctgctgcggctggacgatgtcgccaacacgctcaagtgctggggagccgtggcgcacgtgcgcaacacgctggagaagctcaaggagaggccgcgcatcggcaaggccgtcagcatcttcatcgacatggaccagaccggaggccgctccaacgaatggatttacaagtagcttcccactccatcgatcatgtatatgcatccatcgcccccatgaacaaacacattcatcaggtgtatggagaatgaatgtgggtaccaatttcatctccaacaatc

SEQ ID NO: 18128 - DNA, 788 bp, Zea mays
  Clone ID: LIB3078-031-D2_FLI
ctgcctgtccactgttggcttggtgacttcctccgctccgctcccctccgctcccgaacggtcgatctttgcatggcagcagcagctggctccaaggggcgggcgatcgctggaagcttcgtcagccgcgtcctcgccggcaaggccgcctcgccgaggagggccgtgcacgcctcggcgtacgacaagaacctggaggaccaggtgcgcccggcgttcgtgccggacgatgtgatcggcagcgccgggagcccggacaagtactggagcccccaccccaagaccggcgtgttcggcccggcggcggtggaccccaagctggccgctggtggcgcgccggacgccggcgcggatgctgcaggaggcacggtgctggaccagaaggtgtggttccgcccgctcgaggacgtcgagaagccgccccccgccgcgtgagccgcgcggcgctgctaggccagcccacactgctgctcgctcataaaaagggcggcgggagagcctggcagtggcaggcaccctgctcgtgctcggctgggctgggctccctgcttatatcactacaatattatactactagtagtggtgcttgatagcagtgtgtggctgtgctaataccagtataatactggttctactataatacagtcgtatcaggcatggcgtgcatcaggactggttgtgatagtagcaacgtgatgctcgtgcctgtaataagaacaagcaggcgatgtgtgcctgtgatgtaccggtgtcgtcagtgttataagtacttgggtcaatgttttgtt

SEQ ID NO: 18129 - DNA, 573 bp, Zea mays
  Clone ID: LIB3078-032-A2_FLI
gaagaaggtgcctcctacccgtgccaaatcgccaaagtttacaagttcaaggagaaggagctgcagtgatacaccattgacacctggcggggaaaataccaacgcaacatctacccggccacatcgtcacagcatcgggagtcctagagacgctaacagagtacaacaatgctcgccaaagagcggtgtggcaaccaaaacaagatctgtcaaggctgagctgaaggccctctgaagagcatggagcagccgagtgatgtgtttctctgtacaaaccgaattgtctaaccgtttccatttccatgcatttttgcttctattttatacccaacatctccagcaaaagaaggctgtagggccaatgacgttgttcagcgccgctggaccttatccattttcttacattcgccttgtactcgtaagaactcttggtggcaccatgtgacattccatgtaaattacttgaggatccttgtagggagttcgtccggtgttttgctcctgttaagcccttggccttaactaatctgtgagctgaaaagactatcggaatggcactgttccgtttgatgc

SEQ ID NO: 18130 - DNA, 713 bp, Zea mays
  Clone ID: LIB3078-032-D1_FLI
cgccggcctcactggccggaagatcatcatcgacacctacggtggctggggagcccacggcgggggcgccttctccggcaaggacccgaccaaggtggaccgcagcggggcctacgtcgcgaggcaggctgccaagagcatcgtcgccgccggcctcgcccgccgcgccatcgtccaggtctcctacgccatcggcgtgcccgagcccctatcggtgttcgtggacacgtacggcaccggcgcgatccccgacaaggagatcctgaagatcgtgaaggagaacttcgacttcaggcccggcatgatcatcatcaacctcgacctcaagaaaggcggcaacgggcgctacctcaagacggcggcctacgggcactttgggagggacgaccccgacttcacctgggaggtggtgaagcccctcaaggcggagaagccgtcttctgcatgaggcgcctcctctgtttcggaagaagcttttggtctggtctgcctgcgctctatcatgcttttttatggctcctacgtgttgtgattcttgatctgccccttgcttatcatttgtactgtactgtcactgtcctaataagtggtacgtgtgcggggtcgtattgtgtctgcttattcacctagaggattatttctggttttgctgcttatgtaatgcttttgaaacgatgaaggaagctacatgctctacagctgctttgagaagt

SEQ ID NO: 18131 - DNA, 1232 bp, Zea mays
  Clone ID: LIB3078-032-F3_FLI
tctggttccctaaaaggatttcctagtgattgcaaagcagcttcaaagctgaatcttgtgtgccgaaagaacctggtaattgataagagcatccacactgcatatgtccgagcaatcagatctgcacaacatttcatttatattgagaaccagtactttcttggttcttcatatgcttggccatcctatgtgaattcaggtgctgataatctggtaccaatagaattggccctcaaaattgcaagtaagattaaagcgggagaacgctttgcagtgtatgtagtgataccaatgtggccggaaggagtccctactgcagcatctgtgcaagaaatccttttctttcaggcccagacaatggagatgatgtataaaataattgcagatgagctcaaggcaacggacaataaggatatgcaccctgaagattacttgaacttcttttgtcttggaaatcgggaagaaccaccatctaatggtagtccagaatcagagaaatctacagataaaagtgcagcggccttagcttcgaaatatcgacggttcatgatctatgttcacgcaaaagggatgattgtggatgatgaatatgtcattctgggttcagcaaacatcaaccagagatccctggctggttctagagatactgagatcgcaatgggtgcataccagcctcattatgcatggtctacaaagaatggacatcctcacggccaggtatatgggtacagaacgtctctgtgggcagagcaccttggaacggttgatgatcgcttcaaggatccttcgagtttggagtgtgtaaggtttgtgaatcaaatagctgtagagaactggcaaaggtttacagcagaagaaatgagtacgttacaagggcacctcctcaagtacccagttaaggtggaggctgatggtaagatcagcccactgtcagaccaggagtgctttcctgatgttgggggcaagattctgggagctccaacttcacttcctgattcactgactatgtagtgttattacataaaaaaacttctttcagagttgaactttgtaattgtctaaaattggcgggtttatcgcagaacttgtactatatctgtaatcatcgatagttggcgcagggaaagttcaagatgttagtggtgctaagttttcccagcgtttgtaaatgaaccatatgataggatcctagacaatgcttccatttccattatgattatacaacagttttc

SEQ ID NO: 18132 - DNA, 675 bp, Zea mays
  Clone ID: LIB3078-032-G3_FLI
ctcatccacgacctgggcaaggtgctgctgcacccaagcttcggggagctccctcagtgggctgtcgtcggtgacaccttccccgtcggctgcgcatacgacgagtgcaacgtccacttcaagtacttcaaggagaaccccgactaccacaacccgaagctcaacaccaagttgggggtctactcggagggctgcggcctcaacaaggtgctcatgtcatggggccacgacgactacatgtacctggtggccaaggagaacaagtgcacccttccttccgcggggctgttcatcatcagataccactcgttctaccccctgcacaagcatggagcctacacacacctgatggacgatgaggacaaggagaacctcaagtggctgcatgtgttcaacaagtatgacctgtacagcaagagcaacagcaggatcgacgtggaggaggtgaagccctactacatgtccctaatcgacaagtacttcccggccaagctaagatggtgagaaggggcggcctggcctggacctggatggatggaaccccaaggccccaccaagagctgtcgttccaagtgtccatgtaccatatacatatatatagactacgaatacagtatgtgtgccatgtacggtcattttttttacagagttgagaggagtacccatgccgtttcg

SEQ ID NO: 18133 - DNA, 510 bp, Zea mays
  Clone ID: LIB3078-033-B1_FLI
gcgaggcatacacatccacgggccacgcccaccggcatctcacggcggaagcagccaagcagccggccgggcgcctcccgtgccgccgctgagcatggccgctgctcccgtgggcgctcagaatcgctgcgtcttcgttggcaacataccatacgatgcgacagaggagcagctcgtgcagatttgcgaagaggttggcccagtcgtatccttcaggttggtgattgacaaagagactggcaagccaaaaggttatggcttttgcgagtacaaggacgaggaaactgctctaagtgcacggcggaaccttcagggttacgagatcaatggtcgtcagttacgggttgattttgctgaaaatgggaggaacactgacagaaatagagaaaaggtcgacgatcctcaaatttttactgtagaagagcctttcctaccacctttggagttctctgttaatctgagaagttgtattgtcttcgttctgtgaatgataatagttgcgccttctcc

SEQ ID NO: 18134 - DNA, 376 bp, Zea mays
  Clone ID: LIB3078-033-B10_FLI
gctgatggccccttcccgtgagctgctgagcaccgggatatctggcaagacactcatcactgtatccactccactgggtcctgcggaggcaaacagctcgagattgtatatctgctgctagctgccgcccttcgttatgcataagcctactcttgccgttttactcctgtcgctccgtgattctagtgtaataatgtcatatttactgttgcttcaagtatggcccgtacggctgcggttgaacggcggcggcggctgctgagccacagtaccttgctgttgctgagactgcacccagccacagtgcgccgccgccgccgcagcttgtagctggacttgatttatgaaggtgccggaagagttcttggttgcgggt

SEQ ID NO: 18135 - DNA, 1282 bp, Zea mays
  Clone ID: LIB3078-033-B5_FLI
caagatatggcaataaaaggatagaaccatcaggtgagattcagtttttcccttctccctgcgtcattgggcaagggcatgttaatggcaagaacccagttttccaacccgatggggtgttgctgcctcccaatgaacataatacaggtgagagtacaaggcaagctcgaatttctctggacagtaggacagagggtgctgccatcctgtgttccactagtgccagggaagatgctggtgcaaatagttcttcccatagaaaggacagtatgagccatccctcatatgggtttatacctgttccaattcctgttggtgccacgatgccgtaccattatggtgcgattctgcagcccgtatactacccacagagtcctcttatgcactgtgattcagctggaatcaacaaggcagcaatccagcatgcctctgggcaacctaattaccatgaagctcccggtaaaccatctcatgttcttattgaacacaaacagttagaggaaaaccaccagttgcatcattcaagacaaattcttcgggaatcaggagaaccaattgacatggcgagagctcacgtggatcgtgctaaccagactgcaagctgcagccaaggtatctgtaaaggaagtggatgcacatgtagtggtgaagccgatatcaacgcaaacacaatggttgccctagagagtggcaacgagagtggaatccaaaatggtgacaggtctcgccgtgaagctgcgttgatgaagtttcgcatgaaaaggaaagatagatgcttcgagaaaaaagttaggtatcatagcaggaagaagctcgcagagcaaaggccaagagttaagggacaatttgtaagccaaaagctgaactcagctacaacaacagacgcagaagctgactcgtgaccggcgtcaagtcatcactgtaacttattcttcccttcccaccaggtgtgggcaatcggacttgtaagactgaaggctggcagaagttttttcccttccatggttagcctttctgcacaacgggtgaactcttgtgtcgggtgtttggtgccgttgtggccttatttttgtaaagtgcatcaaattgacaaatgttcagaggggaatgggttgggggtttaggaaaacggtgcagctgccagatttcgcctatgtacttagatgtttgtgggggtgagaaagcagagcatgtacagcttattcacccattttgttgccattacactagtagtgacttgtactatgacaacagtagacattgttgtacagccttaccagtc

SEQ ID NO: 18136 - DNA, 1159 bp, Zea mays
  Clone ID: LIB3078-034-D12_FLI
aagacattgtctttgtctcagggggaaattgttttcaacattgggaagagtgtagttgagaacaaatctgatgctcttgcattcaaacggcctggattacagaaagaaggatcaaaggttgtctatggtgttccaaaacatggaaagaagaagtttatggaagtaagcaaacattattacgcaggccagtttgacaagatttctgagggtaatgcatctaacagatttgtgaaacatctggtgacgcaattgccaagggaacgtgaaaatgattccaaagttgatcctattagaggaaggagagtgggtgagacgaggtctagattacctaaacctacgaagtctcagagcgttcgagctagcagtgctcctggaaatgattccttccccatgcatgttcagaatacttgtgtttctcaaaggagttttggttttgcgggaagttcgacaagcacttccaacaatgaaaagtccacttcagaaaaaaataatcctgcgcttggtgtgggctttagaactgaagttccttctgtttctgaactgcaaactgcatctactgttcctactaatcgagctaaaaagaaatacattcccactgttagcaacataaacagaagtatactcaatacctctgaaaaggcaaattctgattctggtgaaccccgaaggactacttctgattctaccgaacccagacggtctaacaggcgaattcaaccaacttcaaggttgctagagggattgcaaagttccctcataatctctaaagttcctggcgagaaggttcctaggagcaattacaaaagtgcatcgtcaagagggagagctcaatctcatggttgagtgaaggcaccacatagctaccttttgtgggatacctctcgttgtacatagctgcagccttctagtacggaagcaggataggattggagtaggaagtcttcattggagcacaaggattcggatgtattataaactagcttaagtgaattctgttaaccttttcttttacttgcctgaatcagacttttccgtgttgtagaatagtcattaatatcgtagaaacctccttttagtatgtgtgggtacaccgggaaagaaattgggtgtggtttaaatttatccgataatttaacatgtgctgtagcctgtgaaagac

SEQ ID NO: 18137 - DNA, 972 bp, Zea mays
  Clone ID: LIB3078-034-G10_FLI
cacataaccgtgctctagttgaggagcgtgaactgttaagcagggaaatacaagctggaaaagatgaggtccgccacttgaatgtgatcattgctgacattaacactgagaaagaagcttatatcagtaagcttatggacaagaggaggaagcttgaagctgaacttggagcaagtgagcacttgtgtgatgaggtcaggcatcttcgtggtgaaattgacaagctcgttaccgctcggaaagaactatctgcagaggctgcatctctcgtggaagagctgaacagggagcaatctgttaaacagcagctacctgtgctgaaaacagaaattgatggtctgcaacaggaacttgttcacgtgaggactgcttgcgggttagagcagaaggggaatttggaattgctggaacaaaggaaggcaatggagaagaatatgctttctatggcacaagagatcgagcagatgcgaggcgaattagctaattttgaagttagaccaaggggcccaggtggagcatatgggatgcagattgggagttcggaagtgaccttcactaagaacccatatgaagatggttataatgcttatgtgggggttcctgagaaagatcctttgcatcctcctgaatatgcttcgtgggggacatatgacaggagtcgccttcagtaccgctaagaccagaacttagtcattggagaaagaattgccttctaggttttaatggccatgtcttgtcgtttacagtaccgaagctttatgcctgctgcttggttttccattaagagttgtccttttcaatgcttctaatcataactttttccattacaaactggctagattattaaactattggtaccaagatgtccagcaatgtgcggaaagcaccttacatacatgtggttttgcgtgtctgttgacttcaccttctaccataacgtggatgaggatgtgcatagcttccttgtatccc

SEQ ID NO: 18138 - DNA, 780 bp, Zea mays
  Clone ID: LIB3078-034-G11_FLI
ggcgaccattccttcttcgctccttcgccgccgctatggttaagtactcgcaggagccgggcaaccctaccaaatcggccaaggccatgggaagggacctgagggtccacttcaagaacacaagggagacagcttttgcgcttcgcaagctgcctttgaccaaggctaagcgataccttgaggatgttattgctcacaagcaggcaattcccttccggagatactgtggaggtgttggtcgcaccgcacaagcaaagtctcgccactccaatgggcagggtcgctggcctgttaagtcagccaggttcatattggatttgctgaagaatgctgagagtaacgctgatgtgaaaggcttggacgtggacaacctctatgtttcacacatccaggtgaaccaagcccagaagcagaggcgccgcacctaccgtgctcacggacgcattaacccttacatgtcctccccttgccacattgagctgattctgtcagagaaggaagagcctgtgaagaaagaggctgacaacattgtcgcggcaaggaagcagtgaagtatgttagcctgctgataatggcatcctttcgaagcattatagccgtagctcttttatgtaccttttcaggctggtaccgataccgtggatctggatttgctatgttttgtactgtgctcgagtgtaaggtcagttcgtaatacaatcaatctgcgtggaacaatttgatatccttgaatatgttagtgagatcatttcgacaatgaaagttgagaacagaagttac

SEQ ID NO: 18139 - DNA, 773 bp, Zea mays
  Clone ID: LIB3078-035-A12_FLI
cggcctcctctcttaccttcccacaccccttctcgaccgtacgtagcctagttgtgcttggtagccagccagaaggtcgtcggccgatgatgggaggaagaacagtggccccgccgctcgtcctcgcgctggtgaccatcatcgccatcgcggcggccgagggggacgaggtgaagtgtggcgggtgctctccgtgcggcggcgccgactgcccggtgctgtacccgtcgccgcccccgccgccgtactactactacagccctcccccacccgcgacctaccccggggagtcctcgtcatactaccagccgccgccgccgggcgcgtacatccagatcgggagcgcgccgccgggcaagggcccgctgtacccgcaggacccagggttcatcccggccggcgcgccgggccgcgccgcgccgctcgcggtcgtcgctgcgctcgcgccggcgttggcgtgcgcatgggccttattgtgatctctatgtgcttgacttgacaagcgcaggcgagctgcttattcgtcggtaagtaacgcggcggatcgtgccggcgttccacgtacgtacgggttaattcccccagtgtatctacgcatgctccttgtgatatatataataatcttcattggccgtcatttgggctaagctgcagtagttcttggaatgtatgaatgtttttcattggccgtcatctgctagtgtaatagtgatatttttctatgtgtaatctctcaggaaacataaagaaaagtacgtaaggttcttcttctc

SEQ ID NO: 18140 - DNA, 693 bp, Zea mays
  Clone ID: LIB3078-035-C8_FLI
ggaaaaggctgattcagtcgcgaggtcgctcgttcatattttcaactgctttgccagtgccagttgttgcttctgtgcatgcggcactctatgtctcgagtaaggagacatggcggagatcagtgatctggaggcatgtgcagtatttcgcctctttgaccaagctcgagataactagtcccataatttccattgtggttggaagtgaagcaggagcgctcagggctagcaggtatttgctaagatctggatttcatgttacaccaatcagaccacccacggtgccacccaactcatgcaggctgagaatcactcttagtgcttcccattcctcggacgacatcaaaaggctggttgatgcactcacaccatggctccctgtcaaatatggtaatgggagctatgctacagcttcaaaactctaacccatcggaggagagtctggtatcctgcggaaagaggcggcatgctagtgggtggttgacgcgtacgcatttatatattctgtggcgtgacgcctacgtccttccccatttataagcaaatattactgttttgttagatatcaatgttgaaataggcttattattattattattagcaagacaccgtcgtgacaccataaatatttaggttgcatctagttttggaacgattttctctattttctataatgggatgatctcacgaagc

SEQ ID NO: 18141 - DNA, 499 bp, Zea mays
  Clone ID: LIB3078-035-H11_FLI
aagaagaccatcgccgactacggctctcccgaggagttcctctcccaggtcgactacctgctcggcaggcaggcctacggcggcaagaccgactccgagggcgggttcgagaccggcgccgtggccaccgccaacgtcctggagagctccacccccgtgatcgacggcaagcagtactacgccgtgtccgtgctcaccaggacggcggacggcgacgagggcggcaagcaccagctcatcgcggccaccgtctccgacggcaagctctacatctgcaaggcgcaggccggcgacaagaggtggttcaagggcgccaggaagggagtcgagaaggccgcctcctccttcagcgtcgcatgatgatgtaattttatttcttcgatgggatgggatgcacgcactacgtagagagcttggctaggccaggcctggctgagcacgcttgtgtgttccttcgactgtacatgagaacaaagactaaggagagctccattcccgt

SEQ ID NO: 18142 - DNA, 1111 bp, Zea mays
  Clone ID: LIB3078-035-H5_FLI
ccctgctttctccgctaggccgctcggcttctcgcttcgtctcaagccgtcgcctgccatggccgccgccggcgtcggcggcaacggcccccctaccgcacatggagactcaataggatcttctaggattggagaggttaagagggtgaccaaagagacaaatgtgcacgtgaagatcaaccttgatggcactggtgtcgccgagtgtagcacagggataccgttcttggatcacatgctcgatcagttggcatcacatggactctttgatgtctacgttaaagcaacaggcgacacccatattgatgatcatcactcaaatgaggacattgctctggcaattggaacggcactacttgaagcacttggtgatcgaaagggaattaaccgatttggtcattttacagcaccgcttgatgaggcagcggttgaggttatactggatctgtctggtcgccctcatttaagctgtggcttagatattcctactcaaagagttggcacatacgatacacagctggttgagcacttcttccaatctgtggtgaacacatctgggatgactcttcacatccgtcagcttgctgggaaaaactcacaccatatcatcgaggcatctttcaaagcgtttgctcgggcccttcgacaggcaacagagtatgacctgcgccgtcaaggcactgtccccagctccaaaggtgtcttgtcgagatcatagcatcgcagtttggacgaacgcatatcttccactgcagcgcacatcaatgagaggaaaacctgcagagtagacagcttggtttttgctgctcacgttgggagcctgcgttagcctctgaacattgctaatgggataatcaagaaccatctagcaactagcaagcaccacttattatctgccttgtgacagtggcatagcgcgtctgctcgctactgcaactctattatctgctcgctggagttacaggatatctgaagattgaaggtctagacatgctgtgactttgtaagctacaccggtcaggaataatgctgcgtctggatcatccgcagaaacataggggtatgtaaattgtttggacattgaagggaatgcattgatctttgcgcgttc

SEQ ID NO: 18143 - DNA, 487 bp, Zea mays
  Clone ID: LIB3078-036-D10_FLI
gattcagaacagtaaaaagatggaaattaagaaaaggttccgtcactacacggagaagaggtttgacctctatactaggtggaaataggatggaaggaagaggggtggtaaacagtacaggctactctacctatacagccacagagacgtctctctctgatgttgcggtagcgcgcggcgccgcctcccccccaaactactcgctgcccacggcggccggcggcgtccgggccgcgccgaccagctcgcctctcacatgacgctgcaggagttggggttctcgtcgtcgaagatgcggtacgggtcgtgcatcggcgacgcgtgcgtcccgggcgggctgtagtagtcctgctgctggtagtaaggctccggcgccgcctgcgcgtgcgggtacggcatgtacaggtacgacggcgaccactgcttcgccggctgctgcggctgcagctcctgcgcggagtagtacaccggcggtgtcggctgcacc

SEQ ID NO: 18144 - DNA, 534 bp, Zea mays
  Clone ID: LIB3078-036-D12_FLI
ctccgcctggcgccgtctcccggccgggcgcgcgtgtcgttccgcgcggcgccggcgccggcgcggcggtccgtggcggcgcgcgcggagctgagctcggcgctggtgatcagcctgagcacgggcgtgtcgctcttcctgggccgcttcgtcttcttcaacttccagcgggagaacgtggcgaagcaggtgcccgcgcagaacggcaagacgcacttcgacgccggcgacgagcgcgccaaggagttcgcggccctgctcaagtccaacgaccccgtgggcttcaacctcgtcgacgtcctcgcctggggctcgctcggccacatcgtcgcctactacatcctcgccacctccagcaacggatacgaccccaacttcttctgagcggtcgtcgaggatgtattctacagacagccgtgtgcgtgcgtgtgtgcttgtcatgtatccgatcaaagtttggttaatttggacaagtagtgcaactgcagaataattggtatttgtatagtgcaccatgccaacatgaatttgatc

SEQ ID NO: 18145 - DNA, 370 bp, Zea mays
  Clone ID: LIB3078-036-G5_FLI
acttctacgtcgtccttgagcgtgctgggtaccgtgtcgcccgtcgccgcaggtgcaagtcccgtgttgggatccagcacagggtcactaaggaagacgccatgaagtggttccaggtcaagtacgagggtgtgatcctcaacaaggcccaagccaacacctcctaagcctaagcgtcaccataagatattagaccctcttggtctcttctagtgcttcgagttaatggagtatatctggcggtgggatttgtattagaagaaaatcagatgcattatcatttttgcctgtactggtcctactggagttagttggatccatgtttttgtgtgtgtcgaatacattgatgttactactgttctacctcgac

SEQ ID NO: 18146 - DNA, 886 bp, Zea mays
  Clone ID: LIB3078-037-C7_FLI
ttactagtcagatttatgtacatagcaagttaatgatagttgatgaccgcatcacattgattggctcagctaatattaatgatagaagcttgcttggatcaagagactccgagattgctgtggtcatcgaagataaagaggttgttaattcaaaaatggatggaagaccttgggaagctgggaagtcctctttaagcctacgcctctcgctgtgggtggaacaccttggccttcatccaggagaggttagccatatcatggatcctatagatgattcaacattcaaaaatatctggatggccactgccaagacaaataccatgatataccaagatgtcttcgggtgtgtacccaacgatctcattcactcaagggttcaatttcggcaaagctttgctcacttgagggacaaaattggccacactacaattgatttgggtgttgcccaagagaagctagaagcttaccaagagggtgatctcaaaagtatcaaccctatggacagactacagttagtcaggggccaccttgtttcgtttccgttggatttcatgtgccaagaggacttgagaccatatttcagtgaaagtgagtactacacatcaccacaggttttccattagcctctctgtctgcctcgtaaagttactcaaccggctgtacatgttgcaaagatcaccttgtagatgctctacacatgttgtcaaataggaaacaaaaaaaaattaatatattatcataccattagagtattagaattgtttcctagaaagaaaatagtatatcagtatagttcattcgttccaacaacttttagtttcgggaaagaaacaatcaaattcattgtttataagtgcaaataataggagtttccttagttcaacac

SEQ ID NO: 18147 - DNA, 713 bp, Zea mays
  Clone ID: LIB3078-037-E6_FLI
gctagtcatcactagtcacgttcgtccaccagagacaacaatggccatggagacgtgcttcagagcgtgggcgctgcacgcccccgctggcagcaaggacaggctcctcgtcggcaacctggtgctgccgtcgaagcgggcgctcgcgccgctgtccgtgggccgcgtcgccacgcgccggccgcggcacgtctgccagtccaagaacgcagtggacgaagttgtggtggcggacgagaagaactgggacgggttggtgatggcgtgcgagacgccggtgctggtggagttctgggcgccgtggtgcgggccgtgccggatgatcgcgccggtgatcgacgagctggccaaggactacgccggcaagatcacgtgctgcaaggtgaacacggacgacagccccaacgtggcgtctacctacggcatccgcagcatccccaccgtgctcatcttcaagggcggcgagaagaaggagagcgtcatcggcgccgtcccgaagtccacgctcaccaccctcatcgacaagtacatcggtagttcatgagcatgccatgccatgccatgcatacatgcatcgacgactaaacacatatgtgtatctctagtagcctttgcatacgggatatgatcaattcaagcagccagccgtctgctactgctgtgttatatataccatacctccatgtcgaatccagagtacattaattagtttc

SEQ ID NO: 18148 - DNA, 1128 bp, Zea mays
  Clone ID: LIB3078-037-F6_FLI
agtggtgacaatggcagtgacttccagggaggttatggtggcggaggctatggggatggtgctgtaactggtggatctgaaggagaaagggagagagacactcgtcccccgtaccgtggcggaggcagacgtggtggttacaggaatgttgagtttgctgatgactctgagaggccaccacggagaaactatgagcgccacagcgggactggccatggctatgagatgaagcgtgatggcgcagggcgtgggaactggggcactgccactgatgaacttattgcccaggatgcagaggactccccgaagatggaggaggctgctcctgttgctgagaaacaaggtgagcagaatgatgccccagcagcagatgagaacaaagataacaaggatgctactgcaaatgaggaggaagaaaaggaagaggacaaggagatgactctggaggaatttgagaaaataagagaggagaagaggaaagcactacttgcattgaaggctgaggagaggaaagttgaagttgacaaggatttgcagtctctgcagccactttcaaacaagaaagaaaatgatgaagttttcattaagctgggttctgacaaggataagaagaaggaaaatgctgagcgtgatgagcgtgccaagaagtcggtgagcatcaacgagttcctgaaacctgctgaaggagaaaggtactacggcggccgtggccgtggaaggggccgtggggatcgtggtggttttagaggcggatacggagggggatacagtcgtggcccagctgctgctgctccatccattgaagatcaagctcagttcccaagcctcggtgggaagtgaagggcgcccagctgctgctgtcaccgagcgttgtgttgtctgctgttgtcatatttaaattttgtccgacgttaaatttctgtgccacggtttaaacggaacaaataatgatgttgcatgtggctatctttagttatgtggtacttgacgttgaataccggagttgttgtttatcagaattaacctccaatttttgtaggccagcttttaccattttgttgtcttagcatgcttgcttgtttggctgtcctgtaaagctgcagcgaacttgtcattcttgcttgcctt

SEQ ID NO: 18149 - DNA, 1142 bp, Zea mays
  Clone ID: LIB3078-037-G4_FLI
gcgaggccgccgacgcccgacggcagggtgcccaggccttcttcggtcccatcgcgaggccatagttgcatcattcgcctgagacgactgcccaccgccaggactgatctcctcactaggcgcgtagaggtgaagagaataacttgacaatgagcagcataggcacaggttacgatctgtctgtcaccaccttctccccagatggtcgtgtcttccaggtcgaatatgctaccaaggccgtcgacaacagcgggactgttgttgggatcaagtgcaaagatggcattgtcctgggtgttgagaagctggtaacctcaaagatgatgctggaagggtcaaaccggaggatccattcagtgcaccggcactctggcttggttgttgctggtttagcagcagatggcaggcaaattgtttcaaggacgaagtcagaagctgccagttatgaaaaggtctatggagaacccattcctgttaaggaattggctgatcgtgtggcagttatgttcatctttgcacgctgtactggtggctcaggcccttttggctgcggtgttattcttggaggttatgatagggatgggccacagctctacatgatagaaccctcaggagtttcttataaatactttggtgctgcattagggaaggggagacaggctgcaaaaactgagatagaaaagttgaaactttcagagcttacgtgccgggaaggcattgttgaagttgcaaagataatttatggagtgcatgacgaagcgaaggataaagctttcgagttggagttgagctggatctgcgatgaatcgaaccaccagcatcagaaggttccaaatgaactgttggagcatgccaaagctgctgcccaggctgctcttgaggagatggatgccgactaagagacacgatgatttgcccaaacttggtgttttcggtggtgttgatatctctgatcccttggggggggggggacccactaggggtaggcacatttcaaccgaaaaccgagccgaactggaatcaaggttttttcggtttttcgattcggtgtcggttttcctttcttacgaaccgaaaagatcggctcggcttcggtttctatttgctggacaccgatacaaccgaacttactgcagtctaac

SEQ ID NO: 18150 - DNA, 773 bp, Zea mays
  Clone ID: LIB3078-037-H3_FLI
tccgaacctagtgaagctcttgggctactgctgggaggacagagaacttcttctcgtgtatgaattcatggccaaagggagcttggaaaaccatctattcaggagaggatgcgccccgttgtcttgggaactgaggctgaagatagccatcggcgcagctcgaggactcgcattcttgcatgcatcagaaaagcaagtgatctaccgtgacttcaaggcgtccaacatacttttagatgcgaactataacgctaagctctctgattttggccttgctaaacttgggccgactggtagcaagtcacatatcacaaccagggtgatgggaacgtatggctatgcagctccagagtacgtagcaaccggccatttgtacgtgaagagcgacgtgtacggcttcggcgtggtgatgctggagatgctgtccgggcagcgcgcgctggacccgaaccggccgaacgggcagctgagcctggccgactgggcgaagccgttcctggccgaccgccggaggctggcccggctcatggacccgcggttcgaggggcagtacaactcgaagcaggcgttccaggcagcgcagctgacgctcaactgcctggccggcgagccccgcagccggccgtcgatgaaggaggtggtggagacgctggagcagatcgagtcggtgaagagcagggcgcgggaggcgcgcggcggctcgtcgcgggaccggcaccacggccgcgccggcgcggcgcaccagcggtcgccgcgcgccggtggcgagccgc

SEQ ID NO: 18151 - DNA, 985 bp, Zea mays
  Clone ID: LIB3078-038-A5_FLI
tcgtcgcccgtggcctggggcctgctgctgctaagccggccttggatgaacgagacggtgccggagaggtcgctgggttctggggctacctgctccagatcatctaccaggcaaatgcaggcgcggtgatgctcacggactgcgtgttctggttcatcatcttcccgttcctcaccgagaaggactacagcctcaacttcctgttgatcgggatgcattcggtgaacgcagtcttcctgctgggcgaggccgccctgaatagcttgaggttcccgtggttccgggtcgcctacttcttcctctggaccgcgctctacgtcgtcttccagtggatcgtccacgcagctacgccgatgtggtggccttacccgttcctcgacctgacatcgaacctggcacctctgtggtacctcgcggtggcggcgctgcagctgccgtgctacgtggtgttctggctgctgatcaaggtgaagcaccacctgctggccaggtgcttcccggtctcgtacgtacgctagctaggggctagggcacaagcaggcaggcccgtcttctccgccgccaacggtgagagcaacgcaagctagctagagaataatatatggcgggtccgggctgtttataatttggtggtggtggtggtggactggtgatggggagtgaggggacgagcgtttcgtgtgcagggccctccccgatcaagcgaagaacagaggggagtggcgcgtggtggaagggaaggagatgcgtgcagtttttttacagggggtataaaaactataaaatagtttggtgtacattggaaggaagctaagcatggtggtagtctttatttgagaatttttttgtattttttttgccgtggtggagtggaagtgaacaggagagaggttcagggcagcagggaatggctgtgtatagctttgactgattggatgagattgaaatgaaatgaaatggagaagatactgttccttgacatctt

SEQ ID NO: 18152 - DNA, 317 bp, Zea mays
  Clone ID: LIB3078-038-F5_FLI
ggaagataaatttacctcgcagcatcaactcatgaacggtttcgaattggttcataaacgcgagggttcgtctgtggaagccgttgatcgaggagatgtaccaggaccttaagaggagctcgggtgcaggaggaggagggcacggtccggcgatggagccgcagcagcacttgagcaaacgttgaatttgcgagctggaagatggtggccagtgaaccatccagctccatagttgcctgctgtcgatttaccattggcccttgtagtttccgtgtgctatgtttttgtacatatcattgccaactccagcatttaac

SEQ ID NO: 18153 - DNA, 475 bp, Zea mays
  Clone ID: LIB3078-038-G11_FLI
aggaggaagacgaggaggggatggaagtggacggggaggcggaagatgagccggggtggccgtgtggggcgccggaggcggggcccggcgagacgaggccggcagcgatcctcgtggcggacgcggcggaggtcgacttccccgtcatctacgtcaacgccgccttcgaggccgccacggggtaccgcgcgcacgaggtgctcgggcggaactgttgatgctgaagctgtttctattgcgttccagaagagaggttattttgatgatacaaagtcgtgctccagttccaagtctaatgattccttagagttggttgacattcaaatttaggatcctagtggtgtttgggaaacagttctatggatttagagtcaaggggagatttgttgtaatatgcctctaattccttttatatatttggaatatgccttgtaatatgcttttctgtacgcctataaatataagtcctctctgt

SEQ ID NO: 18154 - DNA, 802 bp, Zea mays
  Clone ID: LIB3078-039-A2_FLI
ggacagagaagcccagcccagaatcggagtacatagctatcagggctccgctgtctccagttattcttccggaggctgagagatctgatgacctggggagctcatatgaggtggtgactgagtgtctaaaggatgaacctgaggagccaaccttgggcgccgtggagaaaccttaccaggccccctttgctagggtgacatcgctggagaatgcatcagacaacagtccattacctgaatcacttgcgcatgcaaatagcattaaggctcgagtgcctgagcctgtgtacacagtttcagttgagggccatgtggtaagtgaaaagcctcgaagcaaagagccaaaaggcttgaggaaacttttgaaatttggcaggaaaagccatgctgagggcgcaatggattcatcagttgacgaagcctcagcaggagatggttcgatgctgaagaatctcatttctcaagatgactctggtgcgtcttcttcaaaagcttctcggtccttctccctactgtcaccgttccgcagcaagcacaaggtgattgttctgtgagcacaaggtaatcaatttgggaggagaggaatataatggcgcagcacagtacatacttttggtttttcccttctagtatatatttacacacacgtatacataaatacatacatactatatgatggacttgtcattagacagcctatgtgaaggctgtgtgtggcgatggatggttgtttgcccttgtggttttgtaccctaactatttgtgttgatatatatggtgatactttttgttccagatttac

SEQ ID NO: 18155 - DNA, 624 bp, Zea mays
  Clone ID: LIB3078-039-D7_FLI
gtcgaagcgaggcaggggaggttcggcggggaacaagttccgcatgtcgctgggtctgccagtggccgcgacggtgaactgcgcggacaacaccggcgccaagaacctctacatcatctccgtcaagggcatcaagggccgcctcaatcgcctcccgtccgcctgcgttggcgacatggtcatggccaccgtcaagaaggggaagcccgacctcaggaagaaggtgatgcccgccgtcatcgtccgccagcgcaagccgtggcgccgcaaggacggggtctacatgtacttcgaagataatgctggagtgattgtgaatcccaagggtgagatgaaaggttccgctatcactggacctatcggcaaggagtgtgctgatctttggcctaggattgctagcgcagcaaacgccattgtttgagagcttgttggaatatgttcagacttctatatgatcatcttattatcagttgctagactgcaattgggcttatgtttgttcactcaattttgtagtaaacagaatttggtataccaaggggatctatataacaatgtatgccataaattttctgtctaccatttctcatgaaatgcttatattgtttatattgctttggtgac

SEQ ID NO: 18156 - DNA, 380 bp, Zea mays
  Clone ID: LIB3078-039-E2_FLI
cctcgctcagctcatctacaaggaccctgaggtcaaggagcatttccatctactaaagtgggtaactgtgtcagatgattttagtgttcttaatcttgccaacaagatatgtaatgcctcagagagagtcctcgaggatgcagtgaagaagcttcaggaacatcttaaaggaaagaggtattgctggagcttattagctattactaactctactttcttgcatgcctcctatgatgtttgtaagttattgtctactaaatcctcaatacgtcgtgtcatatcgtgtgttcctaatggacttgtttgctaatatttagtacaagtccatgtgtgtgagctgtaaaattaaagtagaacataattaaaagcgccttgtttgt

SEQ ID NO: 18157 - DNA, 526 bp, Zea mays
  Clone ID: LIB3078-039-F9_FLI
gctgaaggagataagggcagccctgagaaaatgctttgatcacaagttaccagaacattgagcaaagtaagttagcataaatataggctaaatagtaccatagtccagttccagtagcagaaaagggaatgaactggatgcccccctggcacatactgaagaatccccaacggcagttaaatccatggagagttttctgaagcaacggcaccagcggtttctgaagggtgaaaacactaatgctggagcacagcggtttttcaggcgtcgtttgtaacacgggttctccagtgaaatttctgcgaaaattgaatttgttgtcgtccacagctgccgtttgtaggtgacagtacaacgtatgtgaatagattagtttgagttatgtcggcgctgtcattgtatcattcgtctccaatctgcgcagatttgcagtgtagcattcatctcttgtctgcacagatgcacgatgcggcatttgtcttctgtggtttcagtcctgtgtactacaagaaatacactttgatgg

SEQ ID NO: 18158 - DNA, 872 bp, Zea mays
  Clone ID: LIB3078-040-A9_FLI
ggcgcacagggcgagcctcaggtaccggtccctcctccaggactaccaggagctcatcaaggaaacccaagcaaagaaggagaggctgtacatggagaggctcaggaagaagaggcttttggctgaagtcaaattcttgcgtaagagataccaatctatggctaagaacccctctcagacaattgcttgtagagtgaagaatccagcactgtcgtctgcatcctggagggctgcttcggtaagtgacgcccagcaccagttggttcgtgctgtcgggagctccagtagaaaccagctggtgcagccaaggcgcggtggttctccaagggtgtatccggcgattgacctcaatgaggcctgtgagccgggttatgagatggaaatcgtcgaagagcgccatggcaacagggcccctcttggcatcaacaagtcaaagaggtatccaatggaaagtgatgctgctgccggcaacaactcaaagaggtatcctatggagatgggaagtgatgttgttgccggcccaacccaggggaggatgcctgtgttctgggatgtccagaacccagcagggcgatctgggaagaggaagatctcatgtcaggatcaacgttagtccttagagtataggtaaacgacaatgttagctctggtacagcagtagtgccctagtaggatcagtatgtgccgttgctagcctggtagatgtaaagggatggctgggacaatcttgacggttatctgctcatgtttattgatgatgaaaacatatgctgttgcatgatgaagtaggtgggcatgtgtgtctgtcattgttttaaagactaccgacccaaaaaaatcctaggcgcggctaggcgtcgccttaccgcttt

SEQ ID NO: 18159 - DNA, 818 bp, Zea mays
  Clone ID: LIB3078-040-E10_FLI
gggtgagaaactcggctacacctgcaaaatggatatggcaatggcttccttcgtcgccgctacgcaccaccacggcagtcacctggccgccggcttcccctactccgcgcgagcaggcaggagcgttggccgcagcggcgtcaccatctccattagagcccagaagaagagtaatagcgactctgggagtagtagcggaggtggggacgtgcggaccagcagcgggaggcgagtgtggcgtcgtcggaaactgaccaaagaagatgacatgttgcgttacaagttggatcgtatccctttcttagaagagaaggtgagaaaggtaagggagaatgggaagatcatatgcctggatattaatcagctgatgttatctcaagagaatagatttgcgttcaccatggaggtggctgaagaagctaatgcctatcttgagaagaacaggcatgaatatgggttaaagaagcctatactgcatgttctcagtgatcgcatgaatgaatctgggttttctcggcctgagggttacctttatccttatcctatcaagcctggcccttatttcattaaagaggaaggaaactgagtaaatcacatgctacttggatcgtaatgcacaagctgggaggcagcctcttttcagaaggaactcaaggaagtagtcctgtagagcttagtcgtgttgtatacactattcactctacaattgggaggaacaaaaaattctctgaaatatattgcgtaatcaaatgctcgaagaacttgaaatcatggtggcaggcgtcagaaatgttgcaataatatcttagtattaatgc

SEQ ID NO: 18160 - DNA, 1354 bp, Zea mays
  Clone ID: LIB3078-040-F8_FLI
gaatgtaaagagcagcccgtttgttattcgtagcagcgaccgtgaggtgaaatgtcatagtctaattattgcaactggagctacggctaagcgcctccgtctgcctcgtgaagatgaattttggagtagaggcatcagcgcatgtgcaatatgtgatggagcttcaccacttttcaagggccaggttcttgcagttgttgggggtggtgatgtagctacagaggaagcagtatatttgacaaaatatgctcgacatgttcatttactagttagaaaggatcagctacgggcttccaaagctatgcaggacagagtactcaacaaccccaacataacagtacatttcaatacagaagccatggatgttgttagcaatgacaaagggcagatgtctggcgttcatctgaagagaagagatacaggagaagaatcagttcttactgtgaaaggtttattttatggcataggacatactccaaacagtcagctgttgcagggccaaatcgaacttgatagtgctggctatattttagttaaagagggctcagccaaaacttcagttgatggtgtattcgctgctggtgatgttcaggatcatgaatggagacaagctattactgcagctggatctggatgcatagctgctttgtcagttgaaagatacttagttgccaatgatcttcttgtcgaatttcaccagcctgttcaagaagaaacaaagaaggatattacagataaagatgttcaaatgggctttgacatttctcacagaaaacacaagggacagtatgcactccgcaaactgtaccatgagagtccacgactcatttgtgttctatacacttctcccacatgtggtccttgcagaaccttaaaaccaattttgagcaaggtcatagacgagtacggcgagtttgttcatcttgttgaaattgacatcgaggaggatcctgaaatagcagaagctgcaggcatcatgggaacaccttgtgttcaattttttaagaacaaagaaatgctcaggactgtatcgggtgtgaaaaggaagaaggaatatcgggagtttatcgaggcgaacaaatgagttgagcacgcagtggaccccctcaaggttttttgaagtcagtagttcttttggcgctattttgacgccaccccgtcccccggtggccaatttttcatcagattttaagacgagcctggtctagtgccatgccaaaggaaactagccgatccctcatattggattatacagctcaaaatatattctttgctgtgtgtgtacaacatacatggagttgaccccccaccccctgctgatcaatcatcattgcggcattgccttgacactgcc

SEQ ID NO: 18161 - DNA, 424 bp, Zea mays
  Clone ID: LIB3078-040-H12_FLI
gtctggaagcatcaaatttcactattgcacgataaacaaaaggttaggagccagcccttcagatcttcggagtttcgatattgataaccatatagccgtgtgaggttgaaaggttctaaaccttttgcgattgaggagaatggttttggcatacaacaggcgcgcgcgcacacaccattggaacagatttaaagtaggtgctggaactgtaaatgattcggtatcaaaaaggctggtttagccattttaggagattatgcgtttcgatttcatgggagttgggaggacagaattgtatcatagtgcagtaactcttggttgtaggattgagttatcctgcatgccatggttgtggcgcttcgtcagcgaccgaatgctgtaatgtggttacgattctctgagctccttttcaaccattaattcc

SEQ ID NO: 18162 - DNA, 439 bp, Zea mays
  Clone ID: LIB3078-046-C7_FLI
tgagtatcagctgattgatatttctgaggatggatttgtgagccttcttacttcagatggcaacactaaggatgatcttagactcccaactgatgagactcttgtggcccagattaaggaagggttcgaaagcgggaaggatcttgttgtgactgtccagtctgcgatgggggaggagcagatctgcgcgttgaaggatgttggccccaagtaacttccttggctttggagacggaaccctactgtatctcaacttaaatcggaaaagaagtgtatcaccaaaggattgctaccgagacattcacctggcttgagctggcttttgctatagcgtgcaaggggttgctgggtgtcgtacctacctgacttatcattatctgtggttacattctggaccctgtattttctatgctttcatgtctctctactttctagtatt

SEQ ID NO: 18163 - DNA, 311 bp, Zea mays
  Clone ID: LIB3078-046-C9_FLI
tacagctctagtggaggaggaggaggcccttcttgaaacggtacttggtgaaaggtgatggatgccagggagtacttgtacaggaagaggaagagagactcgtctgattgtagtagaatagaatggaatggaatggaatggagtgcatttgcaactgtaagcagctgcaacctgcaatacttggagtggagtgatggacaacgcagttgataagcaactgctgctgctaatctttgtctagtgtaggatagatagctcaatgggacgatcaaagctatttatgatgtgctcatgtgtttgaattaattaat

SEQ ID NO: 18164 - DNA, 654 bp, Zea mays
  Clone ID: LIB3078-046-D11_FLI
ctgcaatgaagcaactgaagttggagctgagtgcccataaatctcacatcgacatgttaggtagcaggttggagcaggttactaatgacgtgcattcgcagtataaaaatgagatccaggatttgagggatgtggtttctgttgaacaagaggagaaaaaggacattcacaggaagcttcagaatgtggaaaacgagttgaggatcacgaggatgaagcaggcggagcagcaaagggattctgtctcggtccagcacgtggagacgctgaagcagaaggtcatgaggctccggaaggagaacgagtccctgaagaggaggctggcgagctctgaagtctgaactggagtgcacatgaaaactgcaactgctttccttcacgccgtagttttatctcatactgtaggatgtagaaaaatccactgctccaaaaacacatatcacttccagatgctttaaaactagcaatgataggtatgttttcactgaaagttattatcaccaatcgacacactcataaccttttcatatgaaattatataaagataaactctatgtccaagatatagagttcaaagaactttttagttgacaacattttcatataagacaatttggatgttcgaatattcaatataaagatcacatgcctatt

SEQ ID NO: 18165 - DNA, 712 bp, Zea mays
  Clone ID: LIB3078-046-D2_FLI
aacaaacctgcagatcccccatggcaggctccacctccctcgttccccttcccgtccccgcccctccatctcgccaccgcttccacacgtccacgtccgcatccccccgccacctgcgcccctcccctgctacacgcctccgcgctgcccggcgtcggcatcccgacgccgtcgttgtcgtcccagatgcccgcccctgggtcggcgatctatcgggcgccgccgcgtcctaccgggacggaagtgaggaggacgaagacgacgcagatgaagatgaggacgaagacgaggaccgcagcctggacctactggcccggttcctgcactccgtattcaggaaggcctcacgccgcgcgcgccgcgctgccaggtccgtgctgccgccttccgtccccgccgagctggtgaagttttcggtcaatggcgtgcttgtcctgacgttcttatggatcctgaagggtcttctcgaggtggtctgcacatttggaagcatggtgtttgcaagcatccttcttgttcgtggtatatggtctggggtgacatacatcagagaaaaccgttacagctatattcaccggatcgacaacgatgagaaccgatggagcagagtccagactgctggttaatattttgctttccttatctatgaacagacacactctgcgttgacaggctgtatagtacaaaaagaaaagatatggtcagcaagtgc

SEQ ID NO: 18166 - DNA, 652 bp, Zea mays
  Clone ID: LIB3078-046-D6_FLI
gcagcccatcaacggcgacccgttcatcggcagcctggagacgcccgtcacctccagcccgctcatcgcgtggtacctctccaacctgccggcctaccgcaccgccgtgagcccgctgctgcggggcgtcgaggtcggcctcgcccacggctacctcctcgtcgggcccttcgcgctcaccggcccgctccgcaacacgcccgtgcacggccaggcgggcgcgctcggcgccgccggcctcgtcgccatcctcagcgtctgcctcaccatgtacggcgtcgcctccttcaacgagggcgacccgtccacggcgcccacgctcacgctcaccggccggaagaaggaggccgacaagctgcagaccgccgacggctgggccaagttcaccggagggttcttcttcggtggtatctccggcgtgctctgggcatacttcctcctctacgtgctcgacctcccctactacttcaagtagaatacaaattcataaagatgcatatatataatatagctccgcctccgatcctcctctctgcgtgcaaaggtatgccatttcagcagtgacgagcatcgtggatacatgcaattcctctgcacatggatggattgggatgtaacttggaactgttaatttttttttactttgatttgg

SEQ ID NO: 18167 - DNA, 599 bp, Zea mays
  Clone ID: LIB3078-046-E10_FLI
cgcagctgctgctgatggggtgggtggagtcgaagcggtgggtggacttcttcaacccggactcccaggccgtggagtgggccacgccctggtcccgcactgccgagaacttcgctaacttcaccggcgagcagggctacccgggcggcaagttcttcgacccgctcggcctcgccggcaccgtcaaggacggcgtctacatccccgacgtcgacaagctcgagcggctcaagctggccgagatcaagcacgcccgcatcgccatgcttgccatgctcgccttctacttcgaggccgggcagggcaagacgccgctcggcgcgctcggcctatgatttgcatgctgccggcgaacgagtcagttctcgattgcgtggggtgggtgagctcctagggacgtacggctgcagcggatcagacgccttgcctcgcagattggaggcgaaagaagagcgtagcagcaatctactgtctgtgttggtggtttcttctgggtaacgtgcgtgaaccagatggggtgttcctctctgttttttttctttcttttctgtgtatgtatgtaccatgtaatgtatagtatggatcgatttcattgcatt

SEQ ID NO: 18168 - DNA, 1167 bp, Zea mays
  Clone ID: LIB3078-046-E5_FLI
acggtcaagcccttcgttaacggcggggcctctgggatgctcgcgacctgcgtcatccagcctatcgacatggtcaaggtgaggatccagttgggtgagggctctgctggtcaggtcacaaggaacatgcttgcaaatgagggtgtccgttctttctacaagggtttgtccgccggattgctgaggcaagcgacgtacacgactgctcgtcttggatcctttagggttctaactaacaaagcagttgaaaagaatgaagggaagccattgcctctatttcagaaagcttttattggtctgactgctggtgcaattggtgcttgtgttggtagtcctgctgatctggcactcattagaatgcaagccgattcgaccctgccagttgcacaacgacgcaactataagaatgctttccatgcactctaccgtatcagtggtgatgagggagtccttgcgctttggaagggtgcaggtccaactgtggtgagagctatggcactcaatatgggtatgcttgcttcctatgaccagagtgtcgagctatttagggacaaatttggcgcaggagaaatttctactgttgttggagccagcgctgtttctggattctttgcctcagcatgcagtttgccctttgactatgtgaagacacagattcagaagatgcaacctgatgcgaatggcaagtacccatacacagggtctttggactgtgctgtgaagaccttcaagagcggtggcccattcaagttctacactggtttcccggtgtactgcgtcaggattgcaccccatgtcatgatgacctggatattcttgaatcagatccagaagtttgagaagaagatcggcatataggattcccatcggacggatacagggttgacagttctatgctattactgcttgactctgtaataacattccagctgctttcgcaccatggtagttggttttggtagagacaagtctgttacaattttttaccttagctttccaattattgtgttgcaataatcgaattaattgttgctgggggatttttttggggggttgggagggtggcatgcttttgttggctgggatgtagccataaggagagggggatactgcctagttatgtcattgaatggaattggaccatattttatacagatttttaccttc

SEQ ID NO: 18169 - DNA, 639 bp, Zea mays
  Clone ID: LIB3078-046-E6_FLI
atcttttcaaggacatgcattgcagcaagaagaaaggtttttctgaaaatgtaaagaaagcatattgttgacatggaagcaagggtgacaacaccagttgaggatggacaacaacaaaagtctcctatagaagttgtttctgaagtgctatggggctccagtttatttctacagaatgttggtctgcaagataactccaagaaaagctccacaacaactgtttttgctaaggttcaagaacttcataatcaattggagtctgagaggctagaaaaagatgggcttcaagaagaagtagaaaccttaaaggctcaggcacaggcctcaaaggagaccatggacaatatgaagagatcgatggaagaaaataacagtctcctccgtcaactgttgagcttcaatcgaagccaaacgtccccatcttaagtctgctatagtatcatgttatattagttctggattcaggttttataaatttggaatatgtttaaaactttcatactttgagttgaagttataggatttcctttgtattttaagttacatgatctacaatcatatgatttgaagttataaaagtatctcttgtatgaattgtgtgaatgttgaactaaataattcaatgttttggttattagc

SEQ ID NO: 18170 - DNA, 1130 bp, Zea mays
  Clone ID: LIB3078-046-F5_FLI
gtctatcagaacctacctctgggtctatttgcattcagaagtatgatgatactgggaatcctattggcttgcctgaactgctaacttctcaacgagttggaattgtatttcagtttcctgagaggtatttcttagcggatactgtacttgaagaagttacttttggatggcctaggcaaaaggcagacctcctattaaaagaacagctcgctttaaatcttcaaaatgcttttaactcggttggtctgacaaccatctcattagatgaaaatccgcaagctctaagtggtggatttaagaggcgacttgctttggcaattcaactggttcaaattcctgatctgttgctgcttgatgagccacttgctggtctagattggaaggctcgagctgatgttgtgaatctcctaaaggacctgaagaaacatcatactatactggttgtaagtcacgatctaagggaactatatccactagtggatcgctcatggcgaatggaaatggggggaagtttgaaggaggaagctttgcctgtctaaacatgtgcttgtcagtatagctgtcagacagcatgtacatattggtcatccaaatctagtcacatcaactacttttacaaacttagattatgtcggctgggaaatttcttcaagatacaatggagtcagagatggttgtgaacagtcatttggtaatgcgtggtaacttccgagcacgaaaaaatgctagaaaaaatcagcagagatcgtgaatgttagcacggagctttgactattgctggaacggggaacagtctgacgcagacattgtcgagctaccatgaacgttgaacattccattgaagtttaggttcaggaatcaggatccagcgatagctccttgttgcaaacatgaggattgcagaaggcctgtacactttgaaaggtgtggggtcaagtttcaaaatggtgtggatgatggtttggaaatggtttcctttgttgaagtttcccactggagagattcagagaacatcatttacttgcactgtcgatagtctgcatcattcacaatttgttgtttcttacaaactcatttgtctggattctggaagaatatgttgcgcacatgagtagattctcatttcctcc

SEQ ID NO: 18171 - DNA, 1053 bp, Zea mays
  Clone ID: LIB3078-046-F6_FLI
ctcttccttcctcttcctctgcaagaagccaaatacaatttagaagcgcccttcctcctctcccccatccgtacccaatctaatcgacacccggccgagatgggccgcaagttcttcgttggtggcaactggaaatgcaatggaaccacagatcaggttgagaagattgtcaaaaccctgaatgaaggaaatgttccctcttcagatgttgttgaggtcgttgtcagtcctccttatgtgttcctcccggtggtcaagagccagctgcgccaagagttccaagttgctgctcagaactgctgggtgaagaagggaggtgcattcaccggtgaaattagtgctgagatgctcgtcaaccttggcgttccctgggtcattcttggacactctgaaaggagagctctgctgggagaatcaaatgagtttgttggagacaaggttgcttttgctctgtctcagggactaaaggtcattgcatgtgttggtgagacccttgaggagagggaggctggttcaaccatggatgttgttgctgcacaaacaaaagcaattgctgagaagatcaaggactggagcaacgttgttcttgcctatgaaccagtctgggctattggaactggcaaagtcgccaccccagctcaggctcaggaagtgcacgcctccctgagggattgggtaaagatcaatgtcagccctgaggtctctgaatctacaaggatcatctatggaggttcagtaactgctgcgaactgcaaagagctggcagcacagcctgatgtcgatggtttccttgtgggcggtgcttctttgaagcccgagttcatcgacatcatcaacgccgccgccgtgtgaagtccgctgaagatgttccaacccttcaccctgttgcggtgatgtgctgaagacagatcagactatttttttgtttaaccgtgcagtgctatgtaagctactaactttgcgctggtgcggatgctgatttccctccccctagctttttgtgaggctactctacagcttgattcagcttgctaataatgtttgcctctggac

SEQ ID NO: 18172 - DNA, 586 bp, Zea mays
  Clone ID: LIB3078-046-G8_FLI
acaaatacgtggagacacagcagcttctcctccagatcgctgggcacaaggatattcttgaaggcgatccattcctgaagcaggggctggtgctgcgcaacccctacatcaccaccctgaacgtgttccaggcctacacgctgaagcggataagggaccccaacttcaaggtgacgccccagccgccgctgtccaaggagttcgccgacgagaacaagcccgccggactggtcaagctgaacccggcgagcgagtacccgcccggcctggaagacacgctcatcctcaccatgaagggcatcgccgccggcatgcagaacactggctaggcggcttctcttcactcacctgcagagtgcaccgcaataatcagcttccggatggtggcgttttgtcagttttggatggaaatgccgaactggcagcgtctgttttccctatgcatatgtaatttcctgcctctttatattcactcttgttgtcaagtccaagtggaaaatcttggcatattatacatattgtaataataaacatcgtacaatctgcatgctgttttgtaataattaattaatatcccagcccattg

SEQ ID NO: 18173 - DNA, 652 bp, Zea mays
  Clone ID: LIB3078-046-G9_FLI
gtcagcagttccttcagccccaactccagatgttgctgaagcacaggccccagttgctgaggaggacgacgacgatgatgttgacctttttggtgaggagaccgaagatgagaagaaggctgctgaagagcgtgctgcagctgccaaggcttctggcaagaagaaagaatctgggaagtcatcagttttacttgatgtgaagccatgggacgatgagactgacatggccaagctcgaggaagctgttaggagtgtccagatggaagggttgctctggggcgcatccaagcttgtcccagttggatatggtatcaagaagctgcaaatcatgatgaccatcgtcgacgaccttgtctctgtcgacactctcattgaggactatctgtgcgctgagccagttaacgagtacgtacagagttgcgacatagttgccttcaacaagatctaggcgtgactttcgatcagtccttcccctggggtgctggcgatggtggtggctgggcaatgcaccagcctaatttatccatagctatatgtctgctttgtgtggccagtgatattgccgtgagtatttttggatcctattcgagtcgaatgtaccagtaccagagttaatttgctttaattcgaaacaccgttccagttggaattc

SEQ ID NO: 18174 - DNA, 412 bp, Zea mays
  Clone ID: LIB3078-046-H3_FLI
gccgacctcgccaaggtgcagcgtgccgtgtgcatgatctccaactccaccagcgtcgtcgaggtgttctcccgcatcaacagcaagttcgacctcatgtacgccaagcgcgcgttcgtgcactggtacgtcggcgagggcatggaggagggggagttctccgaggcacgcgaggacctggccgccctggagaaggactacgaggaggtcgccgcagagggcggcagtgatgacggcgacgaggaggaggaatactgatctgcttgcatgaatctgtttggctgtcgagccaggttgtggtgttgaaaaacctttgtttgtgtcctgggtaatgtttgggtgtttccttccatcatcacttgctgaactgctctagtatttgcatttgtaattgaagtctgtcgctttaagc

SEQ ID NO: 18175 - DNA, 987 bp, Zea mays
  Clone ID: LIB3078-047-C12_FLI
tttgcacggaggcatccgtcaaaatacacgaagggcaacgaggcgaggcctagtatagaggaaaacgagtgagaggggggaaatgctgcgccacgccgcccgccgtctcgtctcccgcaccgccgcggcgcccaccgcccgccgggcgctcgtcacggcagaggtgcctgcggaggccgccgaggactccacgtttgtggaggcgtggaagaaggtcgcccccaacatcgagcccccaacgacgcccctcttcctcatgcagccgcgcccgcccacgccggctaccatccccactaagctcaccgtcaacttcgtcctcccctacaagtccgagatcgccaacaaggaggtggacatggtaattgtaccagctacaactggtcagatgggcgttttgccaggccatgttgccacgattgcagagctcaagcctggtgttctctcagtacatgaggggaacgatgtgaccaagtactttgtgagcagtggatttgctttcgtccatgcaaactccattgctgatattgtggctgttgaggctgtccctgtggatcagatcgacccagcttttgttcagaagggtctcgctgaattcactgccaagcttggttcggcctctactgacctggagaaggctgaggctcagatcggtgtcgatgttcacagtgcgctcaatgctgcattgaccggttaattggtgtcatcttaaattgtctgtcttttagattgagtttaactttgcaaatcctaaataaattatagtccatctaaaacatggacatatgtttcttgttacctgaatcctgcatggatttatttttgtactcgtgaatattttaactctggagctcaaaacccggagttgctttctttttccgttgagttgcggccttggatcagatgaaatcgatgttcctccatagctccagtaaattgttaaatattgttaagtctattttaagagaaatataaaccacatttgattac

SEQ ID NO: 18176 - DNA, 1425 bp, Zea mays
  Clone ID: LIB3078-047-F4_FLI
cccaacgctccgtccccgcggcccaccaaccgccgccgccgccgcagccatgcacggccgccggcacctcgcggcgtcccttacccgggccctgatccaggcgccatcccgctccatctcttccaccccgtctctcctccaaaccctcgacccctcagtgccgtcgcctcccgccgcgggagcagggcggctcgcggagctgcggcggcggctgcaggcggacgcgccgtcgctgggtgacttcacgtactcagtggaggtggggacgcggcagcgcccgctgcccaagcccaagtggatgaaggagaccgtgcctggcggcgccaagtacgcggccatcaaggccaagctgcgggagctgaagctgcacacggtctgcgaggaggcccggtgccccaacctcggcgagtgctggtccggcggcgagactggcaccgccaccgccacaattatgatccttggggacacctgcacgcgcggatgcagattctgtaacgtcaagacatctcgaacaccccctccaccggatcctgatgagccttccaatgttgctcaagctattgcctcatggggccttgaatatatagtaatcacgagtgttgaccgggatgatctacctgatcagggcagtggtcactttgctgaaacagtacagaagctaaaggctttgaagccagaaatgcttattgaagcacttgtacctgatttccgtggagatccgagctgcgtagagaaggttgcgacttctggattgcatgtttttgcgcacaacattgaaactgtggaagagcttcaaaggaatgtcagagactaccgtgcaaatttcaagcaatctatagatgttctggaaatggcgaaagagtatgctcctccgggtacccttacaaagacatcgataatgctgggatgcggggagactccagatcaggttattaggaccatggaaaaagtgagggctgctgatgttgatgtcataacatttggccagtacatgaggccatcaaaacgtcacatgcctgtttctgagtatgttacgcctgaagcttttgagaagtatcgggcccttggtgtcgaaatggggtttcgctacgttgcgtctgggccaatggtccggtcttcgtacaaggcaggtgaattctacatcaaggctatgatcgaagcggagcgagccaagggaaccgctgcagactcaagtgcataaccgagatagcaccttccggccccacccaccccttgacttggttgtgctgcaaataagctcttcactgcttttgtagtcagagagacatgtcgattttttacgtcataattgtaaccacacattcacttctttttttttgtcaattgaacagttccggcgccttcgtgccttgtttcatcctccctctcaagttcaaaaaacaagagggcatttcttgtagcagt

SEQ ID NO: 18177 - DNA, 608 bp, Zea mays
  Clone ID: LIB3078-047-F6_FLI
ttccactccttccatcctgtcgccactattctgagctacctcagcaaggctcctcttgtacctcctggcacaccagtggtgaatgctctagccaagcagagggccatgctggaaaacatcttgcgggcctgcattggccttgcccctgagaacaacatgatgcttgagcacaagtgaagagtttcacgtcccttaattaactaccgcaagataggatgaatggaaaaggagggatcaagcgaaggtgtgggaataatcagtgactcctctgagcccaacgaagaaatgtcaggaggctacaggaaggagaagtgtaaggagagaagaccaggcatggatatatcctcttttcgaaggctatctatctattctttttttgtagatttgactcgttttttgtactcatgggacgagattgtgtactggctatatgtccactgtatgcagcatgaaacctttatttgttctgttgtgtgatagaggttatatatagaagtgtccagcctagtttttgaaactcctagtttaatattttcactaggtggttgatgaacacatttgatatgctctagagacgtcaatggagctttgatcgctgattcagggcc

SEQ ID NO: 18178 - DNA, 449 bp, Zea mays
  Clone ID: LIB3078-047-G12_FLI
cgacgtcgggtaccctggtggcctgtggtttgacccgctcggctggggctccggctcgccggagaagatcaaggagctgcgcaccaaggagatcaagaacggacgcctcgccatgctcgccgtcatgggcgcttggttccaggccgagtacaccggcaccggccccatcgacaacctcttcgcccacctcgccgaccctggccacgccaccatcttccaggccttcacccccaaatgaggagctctgatgaacttggcagttcgaggagtgctaccacacatgcatgcattgttaggtttgatggccgatatggaactttttctttttgttgggggcggactactgggtagactgtcaacgatgatgatgatgatgatgaaatgttcgtggtgcgatgcatggtgtacttgtactatgttgtaactaatgtaaaaatgcgatggtcgtt

SEQ ID NO: 18179 - DNA, 1676 bp, Zea mays
  Clone ID: LIB3078-048-C4_FLI
tgatcctgttttaaggaatgttgctcacctcggaagttggcaggttataagcccggttgaagtatcaggttatgtggttgtggttgatgagttacttgctgtccagaacaaatcttatgataaaccaaccatccttgtggcaaagagtgtcaagggagaggaagaaataccagatggagtagttggtgtaattacacctgatatgccagatgttctgtctcatgtgtcagtccgagcaaggaatagcaaggtactgtttgcgacctgttttgaccacaccactctatctgaacttgaaggatatgatcagaaactgttttccttcaagcctacttctgcagatataacctatagggagatcacagagagtgaacttcagcaatcaagttctccaaatgcagaagttggccatgcagtaccatctatttcattggccaagaagaaatttcttggaaaatatgcaatatcagccgaagaattctctgaggaaatggttggggccaagtctcggaatatagcatacctcaaaggaaaagtaccttcatgggtcggtgtcccaacgtcagttgcgataccatttggcacttttgagaaggttttgtcagatgggcttaataaggaagtagcacagagcatagagaagcttaagatcagacttgcccaagaagattttagtgctctaggtgaaataagaaaagtcgtccttaatcttactgctcctatgcaattggttaatgagctgaaggagaggatgctaggctctggaatgccctggcctggtgatgaaggagacaagcgttgggagcaagcatggatggctattaaaaaggtttgggcatcaaaatggaacgaaagagcatattttagcacacgcaaggtgaaacttgatcatgagtacctttcgatggctgttctcgtgcaagaagttgtgaatgcagattatgcttttgtcattcataccacaaacccatcgtctggagattcttctgagatatatgctgaagtggtgaaagggcttggcgagaccctcgtgggagcctatcctggtcgtgctatgagctttgtttgcaaaaaagatgaccttgactctcccaagttacttggttacccaagcaagccaattggtctcttcataaggcaatcaatcatcttccgttccgactccaacggtgaggacctggaaggttatgctggagcaggattatatgatagcgtaccgatggatgaggaggatgaggttgtacttgattacacaactgaccctcttatagtagaccgtggattccgaagctcaatcctctcaagcatagcacgggctggccatgccatcgaggagctatacggttctcctcaggacgtcgagggagtagtgaaggatggaaaaatctatgtagtccagacaagaccacagatgtagtatgtatgcatctattagacagctcaataagcactgttgtacgcttggatggttgggacatatgggcgttatggcatgtatagttgtatgcctagatgtacaacacgtgtactcgtatatatatataaatgctgaaacaagcattggtcctgtactgtagtttctacatttcattgtcaccaataattaagtgtactcctatggctgggagtctatgaaaatggacctgttgacttattgggtaatatataatttatat

SEQ ID NO: 18180 - DNA, 988 bp, Zea mays
  Clone ID: LIB3078-048-C6_FLI
catggggccccatgctcctcgccgggggagcagccgcggtaggtgctgccgccgtgatcgccgccttccacatactcggatcttgtttcttctgcagcttgcaatgattctttggtgctatttgatggctgttttcactgatcctggtgctgtacctgaaaactggagacatgatgctgaagatagcgggaacccttcattttcctcttcagatgagcaagaaagtgctcctagatattgttctcgctgtcaaaatggcaaacctccccgatgtcatcattgttctgtttgtaacagatgtgtgcttaaaatggaccatcactgcatttgggtagttaattgtgttggagcaaggaactacaagtattttctcctttttctggtgtatacatttatcgagactgtgctggataccttggtactacttccaaacttcattgaattttttcaagatgaacataggcgttccagctctcctggggatattgctattctatttcttgcttttgttctcaatttagcatttgcgctgagcctcctctgtttcattggtatgcacgcgtctcttgttacacgtaacacgacttctatagaggtctacgaaaggaagaagtcggtttcatggaaatacgacctaggatggaaacgaaacttggagcaggtctttggtaccaaaaagttgctctggtttgttcccttatactccacagaggatctgcacaacatccccgcgcttcgaggcatggagttccctactcgctccgacgcaatcgtctaattgcatgtgatgcctagcagagtgttctatgccatagggtttgtctcacgtttacactataggatttctatacggagatctgttaattcttttctgtacagaaatgcacacgcagttctttcgtgtaccagctgtaaggaccagacatgtatttacacaattctgttaattctttggttggtttatattttagacaaattattttcctcc

SEQ ID NO: 18181 - DNA, 523 bp, Zea mays
  Clone ID: LIB3078-048-D9_FLI
aaaccctctcctctcgagaagcagagcggcggagatccggagagaagccatcggcagccgggaagcccgtcgcgtgcctttcttcctcgacgtgccatgattaacggaatatttgagcactgggacctggagcgacagtgaagtgtgacccaggagagttctggtgccatgtttcacaggctattccattattcccaaaagcagatgatttccagtgatggggatgaatgtgagaggtcaaatgaagaagatgaagactccaaaggacttctactcgaaagtgaagtagcattcatggactatgttagggaagttcgttattaggcaactgaattgtgggtttgcgtttactgctacaaacgggctctaaggcagcatcacaatgtccgatgcgtatttgattattgtgggttgttggaaagttgctgttttttctgctcaacagaatgtgtaattgagattttcttgaattagaaagttgttgttttgcaacgggtattgacatataatccctcatttcctt

SEQ ID NO: 18182 - DNA, 633 bp, Zea mays
  Clone ID: LIB3078-048-E3_FLI
tatagcaatgcctcactgaacagccttttcacctcatacaatccttccatgctgttgtctactgcatattatcgaatggatctttatgaacgtcccttaaatgaggtgcctgtgacaaatttttttggatcagtcatgaagactctccacactgattcagcctacacaggtttcttggctgcgcatgacaatgaaactccaatgtccacgggagataaccttgatgatcatttcatgttaaagggcagggctatcgcacgaagatcaaccatagaaaaggaggcacaattaacaccgcatggatggactgaagttctggctgaacagctggagggaaagaatactgatactgttgtgatgtatggtctgggagctatgggtatactgttggcactttcaacctggttatcaatgtaggcaccaaaaaagtgtggttcgtagtctcttacgctatccatctctggtccgcgtgcgagagagagaaaagagataatatgtttgggaggtcttttagattttttctcttggtttttaaattcattaacgatgattagagttctttagaaaatgctgtatgtagttctttagggattactgtgttatcgttttatttatttaacatgatcttttggg

SEQ ID NO: 18183 - DNA, 482 bp, Zea mays
  Clone ID: LIB3078-048-E4_FLI
caacgtatatcttagatagtttaattttgataatgggtccaagatatatcaccctatgcatcttcctagtacttgtcttacatggagatacaactttggcagaaacttgcaggcagtttgttaaatgggatccattctgctttagtgcaatgtgcaaggcaagttgttttatagagggaaaatcctccgatggttcctatgtaaaggggcacagatgtgaatcaaatggatatcacgctgtgtgtgtttgttttctgtgtaaaaatttggtatctaatgacatgcggatctatcttcttttgttcctctctgtcatctaggagtgtttgtctaaataattatatggtaaaatagttaactagtatgtttactattagagttatgtagcactagttaactagtcgttatttcttcaatttcttatatctagaaacatgtttttagttgtcaagcacttcaataatatatgtttgttttccttt

SEQ ID NO: 18184 - DNA, 767 bp, Zea mays
  Clone ID: LIB3078-048-G2_FLI
gtttagtctactcaagccatggtgttgaaacttgaccatacttgtctcaatgagactttggagtgaaccaaatgagcttatgttcctatatgactactagctagaagttagagcctagatgatggctgcttctgttggcgtgaaagctcgagtgctcctaaatggtcgtcgtattagctgatacgacatcgacccgatgcaatagataatattgtttacacgtgcgagtccaaaattgttggctttgggtcggagcagttaacgcgagaagtgtattttatcacttctgagtgcaacctttttattattatttttccgagcttctgcctcttgcatatgttgtagattctcgccgagaagggagtagtagtattacctgatatctatgctaattcaggtggtgtggtcattagctactttaattgagtgggttcaggtaaaatgcttgttcgtcgctgcttcattgctcgattggttccttgctctaatctgctttcttgtgccatgttgattgatcgtgcagaacattcaaggtttcatgtgggccgaggagaaagtggacgatgaactagaaaaggacatgagcagtgcttttcaacacatgaaggccatgtgcaaatctttggtgctgccgaagtgtgccgtgacattggaattgcgggtctagaaaaacaagctcattagatttctgaaaaaacattaggagttattagattggtagcatttttttaagatttaaaattttatagaagtcatcattttcgttt

SEQ ID NO: 18185 - DNA, 629 bp, Zea mays
  Clone ID: LIB3078-049-A7_FLI
cgcgctagctgaggacggtacagcggcacagaggtgcgacgtacgacgacgacgacgcaggcgccacacatggcatcccagctctccgccgccgtgccccggttccacggcctccggggctacgccgcgcccaggtccgcggtggcagcgctgccgtccgtgagggtgggcaggaagaggtcgtcgtcgcagggcatccgctgcgactacatcggctccgccaccaacctgatcatggtgacgacgacgacgctgatgctgttcgcggggcggttcgggctggcgccgtccgcgaaccgcaaggcgacggcggggctgaagctggaggcgcgcgactccggcctgcagacgggtgaccccgccgggttcaccctcgccgacacgctggcctgcggcgccgtcggccacatcctcggcgtcggcatcgtgctcgggctcaagaacaccggcgccctcgaccagatcatcggctagatccctacgtcgccgttgttaagatcagactcagcagcctcgatcgcgccgccggccggcaggtgcaggtggtgactttgtaacgtgtgtgcgtgcgtacgtgtacattgcatccatcttggttccaatggacatatagctcctgttgctcctct

SEQ ID NO: 18186 - DNA, 818 bp, Zea mays
  Clone ID: LIB3078-049-B1_FLI
cggacgtggtcattctgtcttccgatggggagaagcttaattctatgaatctgttgttgtacatggctccaatcgctgttatcttcttgcttcctgcaactatctttatggaggataatgttgtcggcgttacaattgagcttgcaaagaaggatttcacgattgtttggttgcttttgttcaattcttgcttgtcgtattttgtcaatttgaccaatttcttggtgaccaagcatactagtgcactgactctacaggttctcggaaatgcaaagggtgcggtggcagttgtcgtctcgattatgatattcaggaatcccgtgtccataacaggaatgctcggttatactctcacagtttttggcgtcattctttacagtgaatcgaaaaagcgcagcaacaagccatgaataccctaggagacagtaaatatgggaaatcatttctttgtcctgtcagtgcctagagctaatatatgatgagaaatcacatcggtggcgaccacaacaaatcctatgccatactgcctcagcaattggacatcaaggatagaagtccaataactaccttggcatatgggaggcattttgttttatggcgttgatggatagaatataaatatttttttgtgtgtgttagagaactatggctcacactgccagcattggttgatacgtttagctcttgggaaattgcctcttgtattcatcttctgctgctgcagtttccattttgttttgttgtgaagaccacctataccacactttgatccaggttccgggacctaattaatatattgtgacactgaattgatgctc

SEQ ID NO: 18187 - DNA, 569 bp, Zea mays
  Clone ID: LIB3078-049-D9_FLI
gggagccggtaccgaagcccgccccctcggcagccgcggaggaggtggcggagcggttcaggtcgctcgtcgaccccgatgatgtcgcctccatcaggcagacgcagcacctcataatggggcgattgcaagatagcaatgcagttctcacacattttaatgagtattccgaacgatgctttgtagaagtgtctggtgattttgctagtaaaactcgccttctcaagtctatgaaggctgatctcgaccatattttcacaaagctaagagagatgaaagctaggctagcagctacctatccagacgctttccctaatggtgcaatgtcaaagacgatggaccagagaccagaccttgaaagtcctttagattagtgcgtctaacatcaaaattccgcatattagtgacgacatttgttgtcataccaaagatttatttaattcctcattaggcttgaagcgacatatatctgttgccaaaaaaaaaaaaacgagtgacctgtgcttccgcatctctgtgtattagaactgggcttaaatgcttaatatatcatcatctttgttgtgttg

SEQ ID NO: 18188 - DNA, 994 bp, Zea mays
  Clone ID: LIB3078-049-E9_FLI
gcagagcagctgcagggaggccgccattatcgcagcacgccgccgcgtcatctaatcgaggcgagggggagacagagaggaggaggaggaaaaacgggaaataaatcttcatcaagcaacaggtagcgggagcggacgcggggtgaaccactagctggccagtgccggccgaggctagggttccggggatcgcgggcgcgggctcgggctcgactttcgtagcctagccgccgccgccggccgcgcgggggaaccggatgctatgctgctgagctgcgggtcgctctcctcctgggtgcgccgcttcgtcgcctgcgttggagcagaggttgttttggttgtgcccagcctactccaataatagctgttgacaagcctacaaaaggtttaagaattcaaggacgctcagtaaaaaggcgcaacgtatcagacgacttttggagctcgagcccacacgaaatggagaatagtgccttgcaatcccggcacagtatgtcctcaatcagcacagcagcacagcctaatgatcagcatgtttctggaactagcagctccccaaatgagtttgtaaatcaaggtcttctactatggcaccagactagacagcagtggattggaaaccgaaggcttaattctcagggtcaacaaagtcaagaaccaaaaataagttgtaatgctacatacgaaagcctgctcggaagctcgaagccgttcccacaaccgacccctcttggtgaaatggtggattttctcgtggtcagctgggagcaggaaggcttgtacggttagagctggttattggaaggtgccgttggttagagctggttattggaaggtgccgtttgtaatcacgttattattcgctgaaatgtacgcagcttgagtaggctgcagaagtctgtgtcgtgttgaatgtggattgcctcggagacaggaacaggatgacaccccttttaagcaaatgtataaaatattcgttgtttttattactagt

SEQ ID NO: 18189 - DNA, 533 bp, Zea mays
  Clone ID: LIB3078-049-F2_FLI
ccccattccaagcgagggttttgctgctgctccagccggacccaggacgagaagaagcggcgcgatggcggtgggcgacctggcgttcaaggcgctgacggctgggctgggcgtcgccacgctctacctcgccgccaccttctctgtcaacgtctaccgcggcctctcgtggcactccgagcagtccaagctagaaaaggcgaaaaccgaagattgaaaaagaccagcaagcagttttagagagcagatgaaaggcgggcatttttgttgatgtcttatctttcgtgtcaattgtgtttttgcttgtcccgtagacctttcaggatatctggagtgtatcttcaagtatgtgatatatatatacgattcaagaacctgtctgggatgattattcatctttcgggacacgtcctgtttggatcattatataacaacatcgcaaatgtcttgtgtatgtaacattttttactctggaactgctaatgctcagttaagaagtggggacacgtgtgtgtttttcctcctttgcagcc

SEQ ID NO: 18190 - DNA, 766 bp, Zea mays
  Clone ID: LIB3078-049-H3_FLI
agcaatcagcatataatcaagctatgcaacaaaatatttgtgatgggaaaattcaccctcttacatccattcactgtacgtctacatacaactcctctctatgcaaactaatggagtattgtttgagtccagctgttattacgcttcaggaccgcctgaaggaaaatgaacttcggctatctatgttaaaagaggagtgtaagcaactggaggctgatacccaaggcatgagaaatggttctcctcgtcgcctcatgaatcacggagctggtggcagcggttcacctatggctcagagcaggcatcctttctccagccaagggagccctagaagcccgagcggcggcagccggaggagggcttgatgatgatcttgctccgcctgatgcgttgatgaactgtccgttgtggcttaaccagatgcttcctgaaaacccagatatttgacggacgaagtgcccagacaacagacactgtacctgtacataccccattgccgttcagcgctgtgctattgtggaactccaacggtctcattgtgctttttttgtagtattgggggggttcctttccatggttcatggctggcatgagcttttatagactgtagactctgtgctagaggttttccagaaaggctgaactgccgctgctgggatgtgttggttcccgggcataagcaaagatgaaggctgtctttgcttttgtaattgaaaaaaaaaaaccccgacttcggtagcaatacattttcttgaaatgctataac

SEQ ID NO: 18191 - DNA, 627 bp, Zea mays
  Clone ID: LIB3078-050-A8_FLI
cgctagctgaggacggtacagcggcacagaggtgcgacgtacgacgacgacgacgcaggcgccacacatggcatcccagctctccgccgccgtgccccggttccacggcctccggggctacgccgcgcccaggtccgcggtggcagcgctgccgtccgtgagggtgggcaggaagaggtcgtcgtcgcagggcatccgctgcgactacatcggctccgccaccaacctgatcatggtgacgacgacgacgctgatgctgttcgcggggcggttcgggctggcgccgtccgcgaaccgcaaggcgacggcggggctgaagctggaggcgcgcgactccggcctgcagacgggtgaccccgccgggttcaccctcgccgacacgctggcctgcggcgccgtcggccacatcctcggcgtcggcatcgtgctcgggctcaagaacaccggcgccctcgaccagatcatcggctagatccctacgtcgccgttgttaagatcagactcagcagcctcgatcgcgccgccggccggcaggtgcaggtggtgactttgtaacgtgtgtgcgtgcgtacgtgtacattgcatccatcttggttccaatggacatatagctcctgttgctcctct

SEQ ID NO: 18192 - DNA, 984 bp, Zea mays
  Clone ID: LIB3078-050-C7_FLI
aagaagcgcaaaagaaccaactttattaaagctaatctgaaaccagtccaaaccaaatggcaaaacatcctctagaacatcacggagaatgctctgtcatggagccttgaaccttcatcaccattcaccacggccgagcacacacaggctcagcacaacacagcacagcctccgtatcgttgtggcggcccgtcacctgcttgacgtacttcttccgccccacctggtccatccgcttgccggagttggagagcaccagtaccagcgcagcggcagccgcggcggtcggcgacagcgacggatgcgagctgtcaagctgattgctggagcctgacatgaccagcattggcgccttcactggcgccggcgacgacgccgaggaggactggtccagccggttgctggagcgggacatgacgagcaccgggtgcgcgggcgactggtcgaggcggttgctggagtgggacatgaccagcaccgggcgcgacagatccgggcgtcctggggcgggttgcactgggagcgccagatccgggcgtcggcgtcgccgcggcggcggtcggcgcctggggcgcccgcggggctgtccgtgctcgtcacgggcaccgcgggcttcgtgggcgcgcactgctcgctggcgctccgcaaacgcggcgacggcgtcgtcggcatcgacagcttcaactcctactacgacccctcgctcaagaaggcgcagcgcgcgctgctgggcagccacgacgagtttcgtcgtggagggcgacatcaacgacggccgcctcctggccaagctcttcgacgtcgtgcccttcacccacgtgctccacctcgcggcgcaggccgacgtgcgctatgccatggagaacccggcggcgtacgtccactccaacgtcgccggcctcgtctccctcctcgaggcctgcaaggacgccgacccgcagtcggccgtcgtctgggcctcctcctcctccgtctacggcctca

SEQ ID NO: 18193 - DNA, 780 bp, Zea mays
  Clone ID: LIB3078-050-F11_FLI
gagagactgcagatcgagggtctggcagcgggccgtggcagttgggtgattacgacgaagagagatgggcctcctcgacaagctgtgggacgacaccgtcgcaggcccgcgcccggacaccgggctcggccgcctccgcaagcagcctgtgcgtcccgccgccgtcaagatcagtgatccggccggggacgctgcggcgttcgtgccgccctcgccggcttcgggtagcgaggagacgccggtgaaggtgacgcgcagcatcatgatcaagcgccccgcggggtacccgtcgtcgccgaggagcgcggcaagcacgccgccggcctcgccactggggactaccccgcccatctcgccgtttgccggcgccggtggtcggttcagaaggaaatcattgtccgacgcatacgagagggcgaccccaccagggacgaccagccaccctcctcccttcgacgtgtgaactgaccgcaccctcgcacttgtttttgctccttcacaagcatcatctacggtagacagggaggaccggagaagacatcaagaggggaacggggatgatctagtcgcgggttgtcttacctctactgtgatatattatattgccgctatatctgtatggtaccgtgctttgccacagcttggatcacgccgtgggccgtgtcgtgtgtttcctctgctctgtttctatgtatgtcatcactgatggtgtgtggaggttgggttcatatgcttgtaatgttagctggtttgtggtggactacgagagtagttttgttc

SEQ ID NO: 18194 - DNA, 873 bp, Zea mays
  Clone ID: LIB3078-050-H5_FLI
agaacctggtcaagctgatcagagtgctcggcgacgcccaggtcggtggtgacgatatcacagaggagctgaagagcgtgctgaacagcgctgcccctgaagtacgccgtccttactgcaactgtctgatcgatgtatgccgcaaccacggcttccctccacagagggcaagggaagtcttccaccttgcccagacctatggtttgtactccaagcttcagagcaggaaggacgaggagtggtcgctggacctgcggtcgctctcggttggtgcagccaagacagcgtttgatgactggatgcagactgtctcggagcgctgggcgcagcagaaggacttgccagagtccttcagcgtgtacaccggatccagcacccacaagtttgcgcaggggctggcaagtgctttcgccgctcatctggaccaaatggcggtgccattccatgcgagcgaatctcaagccggcagcttcatcagttcaagagatgatctggtctcttggttgcagatgagcaggtcgtccgcagtcgttgccggatgaggcgcagtggttgtggctgcataatgctccaaattccaaaggaaagaagggctcagtgagcaaactgggtgatcatgcatttgttggcctgcagtttgtatgaagagaattggaagtctgaaacgcgtagattagacggtagcaccaagccgctcttcaaacattggctgattgtcagacttacactgctggttctgtttctgaaattcaaatgccacttcttaaattccattatatcctggtggaagaattgtatagtttttcctccctgcacacaatgtgccgatttggctactactagtataatactaccgccttggaagttggaatt

SEQ ID NO: 18195 - DNA, 665 bp, Zea mays
  Clone ID: LIB3078-051-B6_FLI
cgcaacgctctatctctttcgccgagctcctcgaaaccctaggagcgtgcttgaccggcggcggcgaggtgatggcgatggaccctgacgcggtagcgaaggccttcgtggagcattactaccgaacgttcgacaccaaccgcgcggcgctggttgggctgtaccaggagacctccatgctcaccttcgagggccagaagttccagggcccctccgccattgccggcaagctcggatctctccctttccaggcctgcgagcatcagatcgtcaccgtagactgccagccatcgggtccccagggaggcatgctcgtcttcgtctccggttccatacgcaccggccccgaggagcaccccatcaagttctcccaggcattccatttgctgccggccgctgggtccttcttcgtgcagaatgacatgttccgcctgaactatggctaaagacacccgatactcttgtgatgaaggaattgattaagggtttcatgttgaaacgatgaatacttaatgttgccgctactctggtctcttttgtatcttctttgttggctgcttcactgtattacaagaaattgctagacttggattatttcagttgttttgaatcatgtactggttgcaccatttctttgtggaatgtgaattgaaacggtcgtagct

SEQ ID NO: 18196 - DNA, 663 bp, Zea mays
  Clone ID: LIB3078-051-C6_FLI
tctgattcctctcttaacagttcaaaaagggaatgtgcaggcagtgctgcaaacaacttgctgaagttatccccagctattccagccacacctgatgaacttgatgagctgatatcctatcaaactaatcagaaagatgtaaatgctgaaaataacttggagatcggttctgaaaataacttggaacaaatatgcagtctgaggccccaagaatctaataataatctgaagcgtaaagccaatcaagagctcgagccacttgagcttgccgtcccatccactggtgctgcgccgcaatcgacaggaactgccccaagaaaaccactcaggttgaggttaacgactttggggaaaccgaagccagctgaaggaacttcctgaatggaattgcccaggagccaacatacctagagcttgtttttccttgtattgaagcaaggatatgtggaagcgctcggcacatagcctgctttggcactgcgagttgaaacgaaatggaaaacggaggccgcctgacgtaaatgagtgcgattgtaataaattgtatgtagttcatagctgggttggtatcagagttcaccatttcgtttttgctgtagcgaatttcgtttttttaaccaaagtttgactcttatattttttgaatttggaaccaaaatccat

SEQ ID NO: 18197 - DNA, 800 bp, Zea mays
  Clone ID: LIB3078-051-F1_FLI
gcgccgccttcaagttcgccatcgacaaggacgtcaggaacttccaggtcctcaaagagatgtacaacgagtggccattcttcagggtcaccctggacctgctggagatggttttcgccaagggagaccccggcattgccggcttgtatgacgagctgcttgtggcggaagaactcaagccctttgggaagcagctcagggacaaatacgtggagacacagcagcttctcctccagatcgctgggcacaaggatattcttgaaggcgatccattcctgaagcaggggctggtgctgcgcaacccctacatcaccaccctgaacgtgttccaggcctacacgctgaagcggataagggaccccaacttcaaggtgacgccccagccgccgctgtccaaggagttcgccgacgagaacaagcccgccggactggtcaagctgaacccggcgagcgagtacccgcccggcctggaagacacgctcatcctcaccatgaagggcatcgccgccggcatgcagaacactggctaggcggcttctcttcactcacctgcagagtgcaccgcaataatcagcttccggatggtggcgttttgtcagttttggatggaaatgccgaactggcagcgtctgttttccctatgcatatgtaatttcctgcctctttatattcactcttgttgtcaagtccaagtggaaaatcttggcatattatacatattgtaataataagcatcgtacaatctgcatgctgttttgtaataattaattaatatcccagcccattggatggacttgttt

SEQ ID NO: 18198 - DNA, 1177 bp, Zea mays
  Clone ID: LIB3078-051-F7_FLI
cgagatgtatgcaagagataatactggtgattatgtccttcgacttggtgctgaccagtcatctgagaacttaacattgctggaaactggtgagcctatctattccccgacactgcaggaaggccccatcatgacagcagagcttataaaagaaacagaggagctagtgttacggacaggaagtcttggtgctggatgctctcaacttctatcagatatgcaggctttcaaggcagcaaatcctggttgtgtcctggaagactttgttagatggcactctccacccgattggtctgaggattgtgctgcaaacagtaccacagttggggaaggctcatctagacgtgggcggttaagtgataggatgcaaacaaaagaaggtaacttgtggaaggaactgtgggaggctgcaaaacctatacctgctgttgaacagactcctatatatgatgaagatttagctgtggagagcatctttgatgcgttggaggttattgagccatcaaaactgtttgagcagctacttggcgtcattctttctgtatgctttgtggcagctgaatcagttttagcagcagatagcaatctgtcaaaattattctacgattgcaaggactacataattggcgtttaccacaatgacatgtcaaaagatgagctagatgagatgtacaaggtgtacgagacgatggaagccatagtaacccaccctgaagaagctctccagatcatggagcaacctgatgagaagtctgttgacaataaaaaccgcttcacgctgaagctcaactttatggccaaagatcgcccgccgctctggaagcgcacgacaaaggatgacaagatttctcaaaaggtcgagaagaatacgtcagaggaaaagaacacgaagatattctccaacctttttgacaagaaggtcagcatattttcaaagaagaatgtgagatcgtcggaggtgccaccggcatccacttcatcttcttcgccagggccatttgacgagagtgagtggacgattttgtagttggaactcctgtattgtttcttttgtacaacatgtagagggggggtgccccggagatgtcgggaataatcttaagctgtacatattcagtctaattcattgaacattttgaaataaattgaaaatataaaaattccatgtggtctgagc

SEQ ID NO: 18199 - DNA, 1562 bp, Zea mays
  Clone ID: LIB3078-051-G4_FLI
tagaaaaaacacggtatgatagagggacataactaatcagaagtctagactttatgttgtgcatcctgtaatagtaaaaatttccccattgttgtgatgtccattgctgatgttttgctacatattgcttatgcgtcaattccttgctgctgctgagggctgcaaactttcaaaactaggctgcaaggtggtgtctatattgttaagctgaggaggctgaaatgatttcaatcgttgattatgcatttcagcgaggaacacaacgtcagaaaaggcaattgttagttgaactgtactcccctgaacttcagctattcaaggatctgactgtgcaaagttcctcctgatacaatttccaagcttgggttgcagatatcatctgtcctgcttcatatgactattgtgattgataaaatcttggagaaaggtaccgttgagtacttaatagtgcacacggccatattggactactttacaattgcagataagacctcagcctcggatgctatttgtcaacttatcccccttcttactcaaggggcattaatcatagatggagatgaacctacaaacgctccagaactaccaaagaaagcaaaagctaagaagaaaaggtcgaaagagccacttattgttcggatcatgcagacaagggaaggattaaaactaggaattagttgcctcaagtatggcagtgcaaagattagctttggaagatacacgattggccaagcttgagcatggatgaaaattcctagatgatcgcaaagattgttgtggtttgtaatgatgcaatcattggccactctgagcatcaatatgttgctacagggatgcccacaaaagctgctctgaaggacaatgcttccaccagcgcggccgtagaggcggaagcaaggggttgggcttctgtcggtgctggacagcgtgatgccaaacgtgccagccactcttgctgtcgtccgcctccctcttccacgataggttcgcccgcaccgagcctagacgcagatagctctcgaccgtccgctacagtgctgtcgaagagacggtaatggaggaggcctcgcccgagacggtggaggagccactgctggtgagcgcaatcagagggaaaaaggttgagagggcaccaatctggctcatgaggcaagccgagagtgcctcaagattctgaaggtttccgtcaacctgacatgcaccacggaatggaggttcgccttggtttgtccaagggacctatctgccctagcttcagttgaggcagtgaatgtagttctgcggttttgtcgcacgttgatgcaccttagtacagtacactcgggtcaataaaagaccacattaggatggtgaaacggtgaaaactgatggtttgcatatgttcagagtgttatgttgtaatgaacgcatattgcgaagcatcgcagttgagctttaggatctctgcagctgcaggtggcttctttcgtactcgaattagagttagctgtgaattacaatccttttgttatttttctctaacttgtacgaggaaagcaatccataggaatttttaaatatgc

SEQ ID NO: 18200 - DNA, 870 bp, Zea mays
  Clone ID: LIB3078-052-C2_FLI
ggcaccagaaaggatgctcctcggcgtctgtgccgtgctgatggtggtcggcgtcacgaacgcggcggagggccaggtggcgtcggtcgtcgtgggcctggcgaggtgcgccgacagcacgaggaagaacatgaaggctgaggccggtttcaagggtcttcaggtggcgatcaagtgcaagaacagcaacggcgagtacgagacaaaggccgtgagtgagatccaaagctccggagccttcagcgtcccactcgccgccgacctccacggcgccgactgccacgcgcagctccacagcgccgccaataacgcgccttgccctgggcaggagccgtccaggatcgcgcccatgtcaggcggcaccttcgtcgccgtgcctggcaagatgcactacccgtccgcggagtgcgcgtccgcgtttctctgctccccgatcaagaagcacttgttagatcacttccacaaggcacccctgccggtgccggagtaccacccggtgcctgaccacagcaagccgccggtgccggagtaccacccggtgcctgagcacagcaagccggcgccggagtaccaccctcccactccagtgtacgggcagccaaagccaactccgatctaccatcctcccgctgagcactgagttcgatcaacaacgaacgccagagctagaagaacggcaggcttctgttagttattaattcagtactgcacgtgttactagtgcgcctcatgcatggagaataaaatggtgtgaaatatagctgggagcttgtactttattagttatcgattgttgtttatctttaacttgcttaccgaaatcgtgttgtgcatcttgtctttttgtcaatgtaagcagagcctgttctc

SEQ ID NO: 18201 - DNA, 474 bp, Zea mays
  Clone ID: LIB3078-052-C9_FLI
ggtcagaaagtttagtcacatgggctactccaaggttaagtgaagacaaggtgaagcaatgtgtagatcccaggttgaagggagaatatcctccaaagggagtcgctaagcttgctgcagtggcagctctatgtgcacagtacgaagcagagttcaggcccaacatgagcatcgttgttaaggcgctttcgcctctccttcaacaaagacctgcaccaaccaccgaagagccagctccacaacctgggagctgaaaccagtcacatgtgatgggacccctaggcataagccatctccgcaaccattcaatcagcacattctataaatcattgagagtattttgggtatttgttctgtagcgttctcagttgggtatagcatacatgaacttgcccctgctgtttgtggccacctagttcgtggcttgatgttggcgccgcacaatggtatatgcagttggttcgaagttttttt

SEQ ID NO: 18202 - DNA, 680 bp, Zea mays
  Clone ID: LIB3078-052-F7_FLI
ctgacatgatgaagaagaagatctcaatgcctgcccacctgatgtttgacggtcaggacgacaagctgtttgagcacttctccatggtcgcgcagaggcttggcgtttacactgccagggactacgccgacattcttgagttccttgttgacaggtggaaggtggcggacctgactggtctgtcgggtgaggggaacaaggcgcaggactacctctgcacccttgcttcaaggatccggaggctagacgagagggcccagagcagagccaagaaagcaggcacgctgcctttcagctgggtatatggtagggaagtccaactgtgaaatcggaaacccattgcgactgcttgagttggagcatagtctatcatgcaccctaagacgcatcgcgacgacaagacctggtgtgtcgcgtgacatagttgttcaggttttgaccaaatggtctgggagcatttgttttgccttgtgccgtctcatagagcgttaggatagtgtacgtctgtgttctagctttgttttgtctgctgctttgatgtacaacttgtggccatgaggctggacatggagtgaacatgttgtacattgtcgctggcggtatgtttcgtatgttatttcagttgttgagatctgttaaattttttgtgagctatggaggtcgttctgttttgttcgtgg

SEQ ID NO: 18203 - DNA, 818 bp, Zea mays; identical to SEQ ID NO: 18159
  Clone ID: LIB3078-052-F9_FLI

SEQ ID NO: 18204 - DNA, 980 bp, Zea mays
  Clone ID: LIB3078-052-G1_FLI
gttctgtctgtcttcacttatccgaggttccgtgcagcagtggaaaagagcagattttagcagagcagcgagggtcggagaagcctccccaagcttcgaatcgctatgcagcccgtcaaggtgtacgccgaccggcggtcgcaaccctcccgagctgtcatcatcttctgcagggtgaaccagatcgatttcgaggaggtcacggtggatctgttcaagtctcagcacctcacacccgaattcaaaaaaataaacccaatgggacaggtacctgcaattgttgatggaagattcaaactatttgaaagtcatgcgattttgaggtatcttgcatcggttttccctggagtagctgaccactggtatccttctgacttgttcaccagagccaaaattgagtcaatcttggattggcatcactcaaatttgcggcgtggtgcagcaacccttgtaatgcacactgcattggctcccttccttggtcttacgacaagtcatgaggctgtgaaacaagcagagaagcttgtgatgcagtcactgggggtgatcgaatccgtatggctgaaaggcgatgccaagttcttgctaggtatcccccagccatcgattgcagatctgagccttgtctgtgagataatgcagttggagatccttggcgatgaggtccgtgaccgattcctgggagctcatgagaggatccttgtctggatggacaaggtgaagaaagccacgagccctcattttgaggaagcccacgagctccttttccaagtgaagaaggcacgcatggtgcaaggcagcagcagcaaggcttttgagtcgagcacaaagctcaaaacagcatcaaagctctgacgaccaaaggcagaataagcgacagacagatccatcttgtgatataatataataaacgggaactattattaattactgttggtattaattacacttattccagaaggccacaagtgcttcgttgc

SEQ ID NO: 18205 - DNA, 633 bp, Zea mays
  Clone ID: LIB3078-052-H1_FLI
gcgccgccactcaccagcaaattcccaagccgccccttcccccatctctttcgcgccccatttgatcgattcctgatggcgcccaaggccgagaagaagcccgcggagaagaagccggcggaggagaaggccgagaagaagccaagggcggagaagcgcgtgccgagcaaggagggcggcgagaagaagggaaagaagaaggcgaagaagagcgtcgagacgtacaagatctacatcttcaaggtgctcaagcaggtgcacccggacattggcatctcgtccaaggccatgtccatcatgaactccttcatcaacgacatcttcgagaagctcgccgccgaggcagccaagctcgcccgctacaacaagaagcccaccatcacctcccgggagatccagacctcggtgcgcctcgtcctccccggcgagctcgccaagcacgccgtctccgaagggaccaaggcggttaccaagtttacatcctcttagggtgccgccgccgccgcacgttgctaaattttctcatatttaggactgtgctaggttgttcgtgcaacaatgtagaatttgttataattgctgaatgaatcagttacccctgttgaagttttctaatatattaatcttgctagt

SEQ ID NO: 18206 - DNA, 844 bp, Zea mays
  Clone ID: LIB3078-053-A2_FLI
cgccgctccgtggcagaacggagagcgcaaggtcgacggaggagggcccggctccaacagccggcaggtcgcgccggacgacaccggcatcgtcggaagcgtcggcgacggtagtagcagagacgagactttctatgaagccaccgcctggttggaattagactgcgaagatgatttctacagcgtcaacggaggtaaactgaatccccaaccaaaagatctgacgcctgcgagatcgttcgcatcccgaaccagtggccggaacactccgccacctagaccccgcgatctaccgacgctggcggcgatcctcaaggccgaacccctgaagccgccgccgacgccgacgccgacggcggccccgcaaaggaggctgggcgacctcctgcgggaggcgcaagacgacgacgacgacgacaatgacaccgccgtcgacggcctctctagagacgactccttgcgcatgggcgcggaggccaaccggtgctgcgtgccgcggctcgcgcgggccattagctgcaacgggaggacgcagcgcaagtgaagtgttgttaatccgtgccttgttcaacagacaggaaaagatttgccgcccaaatgtgtttgtacatagaccaaatgactgcaccggaacagtaaaaagaaaatgatttgatgcctgtatcacgtagattaaaggatttgatgcctgcttccagccggacagatgctacagggaaactcacccggatgaaaagaacattatttggatgtttgagcacgggaatatgaaaaaagaacacagaaaaaggggaaggaatagggtgacaaaccagatgattgaagaacacagaaaagtaataag

SEQ ID NO: 18207 - DNA, 993 bp, Zea mays; identical to SEQ ID NO: 17891
  Clone ID: LIB3078-053-C1_FLI

SEQ ID NO: 18208 - DNA, 500 bp, Zea mays
  Clone ID: LIB3078-053-D8_FLI
ctcgaatggtcgaacagtagtttgctcgctattatccatggcgacttctacggctgctgccactgcactgctccgccccaggccggcagttccagccaagttggcgcagaggaggtgcctccatgcggttgctgggtggacgacgatgaggaggaggggagctgcaggggtcgtgcgagctttcttcaaccctctcggggatgagcgcatcctccgagaagccatcaaggagccagtagcattcatgggtggtgtgtttgctggcctcttgaggcttgacctgaatgaggatcctctcaaggaatggataagtcggacagtggaggcttctggaatagctgaggaaaacagctctgaagaatcaagtgaggcagatcaaaatgatgcacctcagcaaattgagattgagtgaggtgcattgtctacttttgtccacttgtcacttttcccttgtaacttatcctgaatatatgtgacacctgattcatcacgtgcttgtc

SEQ ID NO: 18209 - DNA, 559 bp, Zea mays
  Clone ID: LIB3078-053-H12_FLI
ccaatctatattggtggaagaacaaagcatcttttgcagcgtgcaatctggaatgacacggcttttctcacttcggtgaatgtcatggactattctctacttgtgggagtggacaaagagaagcatgaacttgtgtttggcatcattgattatctgaggcaatatacttgggacaaacaactggagacatgggtgaagacttctctggtagtacccaaaaatgttttaccaactgtaatttcccccaaggaatacaaaaaaaggtttaggaagttcatggcgaagtactttctgtcagttccagacacatggagtcctgataatccgtctaagccatgcaaatcccttggtcagagcaatcgcaagttggcggaagtccagaatggtgataacctgtcagagcacccaaatgaagttgaggggtgtgcctaatcatgtgcaggatttcctggcagttttgttgaatcctatcatgttgttgtttggctatatttcactttgtaaaatggtgtacatagaaggacctcactgttgatttatccaaaagtttgcggttttt

SEQ ID NO: 18210 - DNA, 773 bp, Zea mays
  Clone ID: LIB3078-054-A1_FLI
tgggatcggggacggcgacggtggcagcaaccgcgccgccacggacgcccactaccggcagatgatcgaggcggacccgggcaactcgctgctcctggtcaactacgccaggttcctcaaggaggtggccggggacgcggcaagggcgcaggagtactgcgagcgcgccatcctcgccagccccggcgacgccgaggcgctgtcgctctacgcgggcctcgtttgggagaccagccgcgacgctggccgcgccgaggactactacagccgcgccgtccaggccgcgcccgacgactgctacgtcctgggctcttacgccgggttcctgtgggacgccgaggaagacgaggaagagaactccgagcccttgccaccgccttcgctgttccagggggcagctcagcgtccttccatcacagcggcctcttagatgatcgtgaactcgatctagatctcaccaccgcctgtgaacgaagctgaatctggaaccctggagagtggagagtgactgggtgataaccgtgcagaaacccccgacgagtgactcacatcgccggcaggctcctcgccgcttgtgaactgaatcacggcacatgtaaaactgaatctggcagagcacacacgcgcctaagcctattagcgtctatagactttgcagggctatgtatagtagatatgtagattgagaccctgctgaacttgtacgtgcagtatgttcctagtcacttgtgtatcattactagtaatgcagtatccctcgtgaaataaacgtc

SEQ ID NO: 18211 - DNA, 535 bp, Zea mays
  Clone ID: LIB3078-054-B1_FLI
gtcgacatctttgccatctgcatacactagccctgatgtcccaggttttatcctagcaacaggatttggtgcatcactgtatttcctggcaaagaaaaatatgaacttaggtaaggctgcattgatcactgtcgggggacttgcagctggtgcaactgtcggatctgcagtggaaaatttcctgcaggttgatatcgtgccctttctaggcatccactcccccgccgtcgttgtcagtgaatttattctgttctcccagttgttggtatcactgtttgttaggtaggatctgaaatcaagctgtcatcctgatcatggcatgtaagtaactgaaatggttcgtgttcaaacttcaaagggtcagggaaatgcttattttccgctcaaggtgcaagcagctgtgtatagcaaacaatacatggacatctctgtcccttataaagatcacttgtatctagttctctcaaccccaatcccaatctttcagaagaaagtttgtatcgattgcagaatgtggaatgagaattcttggatt

SEQ ID NO: 18212 - DNA, 1061 bp, Zea mays
  Clone ID: LIB3078-054-B6_FLI
gcagaccaaagagcacattctcctcgccaagcaggtcggcgttcccaagatcgttgtcttcctcaacaagaaggacatggtcgacgacgaggagctgctcgagctcgtcgagctggaagtccgcgagctgctcagcaactatgagtacgacggcgacgaggtgccaatcgtcgctggctccgccctcaaggcgctcgaggccctcatgggcaaccctaccctgaagcgcggcgacgatgagtgggtggactgcatcttcaagctggttgattctgtggattcctacattccagtgccacagcggcagaccgacctcccgttcttactcgctgttgaagatgtcttctccatcaccggtcgtggtacagttgccactggccgtatcgagcgtggcaccgtcaagattggtgacacagtcgatatcgttggaatccgggacacccggaactgcaccgtgactggcgttgagatgttccagaagaccatggacgatgccatggctggagacaatgtcggactgctgctccgtggtatgcagaaggatgacattgagagaggcatggtgctggcaaagcccggctctatcacaccgcacaccaagtttgaggctgttgtgtatgtgcttaagaaggaagagggtggccggcactcacctttcttccctggttaccgcccgcagttctacatgaggacaaccgatgtgacagggaatgtgactgtgattatgaatgacaaagatgaggaggcgaagatgtgcatgcctggtgaccgtatcaagatggttgttcagctcatccagcctgttgcttgtgagcagggtatgaggtttgctatccgtgagggtggtaagactgttggtgctggtgtcatcaacaaaatcattgagtaaactggatatatcacatccaccacgagaattttccttgtttactcaaagcgaaatgctctgtagttgttattatgtgttgagttttaggggttgttcatgtgaaattgtagtatgacactctttcgccaagtgaatttgcataatttatgacattcacgacaaagatacactt

SEQ ID NO: 18213 - DNA, 535 bp, Zea mays
  Clone ID: LIB3078-054-E10_FLI
atggtgaagggacgcacgggacagcgcgtcaggctctacgtccggggcaccatccttggatacaagaggtccaagtcgaaccagtacgagaccacgtctctcgtgcagatcgagggggtgaacaccaaggaggatgtcgcgtggtacgctggcaagcgcatggcgtacatctacaaggccaagaccaagagcaatgagacccgctacaggtgcatctggggcaaggtcacccgtccgcacggaaactcgggcgtcgtccgtgccaagttcaagtccaacctcccgcctgagtccatggggcgcaaggtcagagtgttcatgtacccgagcagcatctaaggttttgttggagtaaagatggactagaaatggccatgtgtttatttctcacttttctctgaacttaaaatgccttgtgttggtaacttagattgttcaagtgctgaacctgtggaagttgtgccaaaatttgttgtcgaacggatgaactattgtcgtaatgttatgccagcagcagatcttaatttgccccgtt

SEQ ID NO: 18214 - DNA, 699 bp, Zea mays; identical to SEQ ID NO: 17908
  Clone ID: LIB3078-054-E12_FLI

SEQ ID NO: 18215 - DNA, 1585 bp, Zea mays
  Clone ID: LIB3078-054-E3_FLI
atcatgacatgggggaggaaggctaactctttgcccagtcccacctgattggcgccagcagtgtgatttatactttttgcagagagagaagatatggagtcgacaggaaagattttgatggagcggtatgaggtggggaggctactggggaaaggcacatttggcaaggtgcactacgcaaagaatcttgagtccaacgagagtgttgccattaagatgatggacaaggacaaagtgctcaaggccgggctttcggagcagataaggcgggagatcacaacgatgcggttggtggctcataagaacattgttgagcttcatgaggtcatggcgacgcggaacaacatctactttgtcatggagtatgtgaaaggcggagagctctttgacaagattggcaagagtggcaagctcacagaggccgctgcacacaagtacttccagcagctcattggtgcggtggattactgccacagccgaggtgtgtatcaccgggacttgaagcctgagaaccttctgttggatgagaatgagaacctcaaggtctcagattttggactgagtgcactttcagaatccaaggggcaagatggcttactccacaccacctgtgggactccagcatatgtagctccagaggtgatcagcaagacaggctatgatggggcaaagtcagacatctggtcctgtggtgttgttctatttgtactagttgctggttatcttcctttccgggccccaaacatgatggagatgtatcgcaagatacagaatggtgatttcaggtgccctagttggttttcacacaaactcaagaagctcttgtacaagatcctcgaccccagcccagacacaagaatttcagtgcagaagataaaagagtctacctggtttcgaaaaggccctgtggagacccgtacagtaaaggagaaaattctgagtgagaatgacaccacaaatgctgctccagccgttgctatgaggcgcaagaagaatgttcatgaagacgtgaagcccccgactgtcacaagcttaaacgcctttgaaattatatctttctccacaggattggacctctctggcctatttatcagaaaggagtgtaagaaggagacgcggttcacttctgataagggtgccgtgtccatcatctcgaagcttgaagatgttgcaaaagcactgaatctcagggtaaggaagaaggacaatggtgttgtcaagattcaggggaggaaggtggggaggaagggtgtcctggagttcgacactgaaatatttgagatcacggcatcctaccacctcatcgagatgaaacaaacgggcggtgattcacttgagtacaagaaactgttggaagaggacatccggccagcactgaaggacatagtctgggcctggcatggagatgaccagcaacaaaagtagtagctttggatctctcttttttgttccataaaattgttagatctttcacttcagattgattttgttcgacatgtgcgtgttcttcttactagttacattctttctgtttctgtggaccattggactgtattctgtcgtgcaataattgttgggaggcctg

SEQ ID NO: 18216 - DNA, 717 bp, Zea mays
  Clone ID: LIB3078-054-F9_FLI
acgaggcaaagatctcggacttcgggctcgccaagctgctgcagcaggaccaggacctgcacaccaccaccagggtgctgggcacgttcggctacttcgaccccgaatacgcgctgacagggaagctgacgctgcagagcgacgtgtacgcgttcggcgtggtgctgctggagctgctgacggggcggcgggccatcgacctgagccaggggccgcaggagcagaacctcatcgtcggcatccaccaggcggtgggcgaccgcaagaagctgcgcaaggtggtggaccgggacatgcccaggggctcctacacgctggagtcggtgtccatgttcgccgcgctcgccgcgcgctgcgtctgctttgacagcgccggccgcccgcccatgcaggactgcgtcaaggagctccagttcatcatgtacgctaacatgaagatatgatcactctcgcgggtgcaaaccgcgcgtgggttttctttacttttgagacggggggcggggcatgcggatgcggctgctggattgcaattgcaggtccgcagcttttgtttggttgatgaaacgaattgtctaaaagggctttatacagttacatagtagtgctcgtttggtagagcttgtagctctagccaaaccagttctactagtgatttctcccatgaagtagatctgtgtgactctgatttatccagttagaaaaaacgttcgttagaat

SEQ ID NO: 18217 - DNA, 386 bp, Zea mays
  Clone ID: LIB3078-054-H6_FLI
gtatcgtgcggcggtggagggcaacgatctcgtgatgaacctgggattctcccaccctgttcggatggccattcctgaaggcctggcggtcaaggtggaggagaacacaaggatcaccgtgagcggctatgacaagagcgcgatcggtcagtttgctgctaccataaagaagtggaggccacctgagccatacaagggaaagggtatcagatatatggatgaagttgtccgaaggaaggaaggaaaagccgggaagaagaaatagaaagtgttttttttttgcctttcccttacttcatttcatttttcccactgtaatgatcttcgtctgctaaggctgaacctaagaaaaatattgttctgtgctgatcatggcatatagatgt

SEQ ID NO: 18218 - DNA, 451 bp, Zea mays
  Clone ID: LIB3078-055-B9_FLI
ccaggagggctgttgagctcctatacgaggctgctttaatctcgagtggatatactccggagagtccagcggagttgggtggcaagatctatgagatgatggcgattgccctcggcgggagatggggaaggtccgacatggaggaggccgaagcgtcgacgggtgaggccagcgcagaggcagactcatctgaagtcaccgtagcagaggtgattgagccctcggaagttagacccgagagcgatccgtggagggaccagtgagttctcccacgggcatccttaactccatatttagcagtgccggggataaaaactaagccatgggcaagaacatattgccgtggcaatttttttgtaggcttagactttgccggccaccagaatcttattgaggaggtagtggccttagaaaagaataataaagcatgaagactgatgattacatagcg

SEQ ID NO: 18219 - DNA, 1103 bp, Zea mays
  Clone ID: LIB3078-055-D7_FLI
gtgatgatttccttgcaatgttggaagaaagcaaggagcttacatcatcaacaagatggagcaaagcaatacttatgtttgaagatgatgaaagattcaaagcagttgagcgtccaagggagcgtgaagatttatttgagaactatcttgtggaactgcataagaaggaaaaagccaaggctgctgaagaacacaaaagatatgtagcagagtacagagcttttctagaatcatgtgacttcatcaaggcaagcactcagtggagaaaagttcaggaacgcctggaggacgatgaacgttattcccgacttgagaagtttgatcggttggatatttttcaagagtacattcgacacctagagaaagaagaggaagagcagaagcgggtacaaaaggatcaagtgagaagacaagagaggaaaaaccgtgatgggtttcgtaaaatgttggaagaacatgttgctgatggcacacttaatgcaagaactcggtggcgtgattactgtgcacagataaaagattcacagtcctacttggctgtagcatcaaacacatctggctctacaccgaaagagttatttgatgacgtgatcgaggaacttggcaaacagtatcaagaagacaagatccaaattaaagaagtggtgaaatctggaaagattcctatgacaacttcatggacattagaggaattccaaactgctactctggaggatgatgctcttaaaggaatatcaaccatcaacatcaagcttgtatatgacgatcagcttgaaaggctcaaggaaaaagagcaaaaggacgctaagaagcgccagcgcttgggtgaaaatttttcagatcttttgtattccatcaaggaaatatcagcttcttcaacatgggatgattctaaacagcttttcgaggatagccaagagttcagggccttggacagtgagacttatgctagagagctttttgaagagtgcgttgtccacctgaaagaaaggttaaaagagaaagaacgtttgagggaggaagaaaaggcaaaaagagagaaagagcgtgaggagaaagagaagaagaaagagaaagagaaagaaaggaaggagaaagaacgc

SEQ ID NO: 18220 - DNA, 580 bp, Zea mays
  Clone ID: LIB3078-055-G12_FLI
gagatatcacagggacctctttaggcttcaaggcagatccgcagcagatggaggcgaagagcaggctgccggaggtgaccatcgtcccggcggcacggccgttggctggcgacggcacagtcgacgcggcaaaggcggcggcaggcaaggagcccgtaagcccgggcactccgtcctcggtggccgccggccgcagcagctgtgaggagaggcgcgcggtggacggcgtcgccctgcctgggtggaagctcgacgccctctgccaggagtcctgcccgtcgccggccatgagggcgcgcttcccctactacttctgaagcttcccgttgcagtcctgcgtgatcgagttcttgagcggcgacatctggtgcatgctcttgacgactgatggcgttcttgggtgttttccttgctcagggtttccctttcgtgcacgttcatgtatgtatgttagtatgtattgtgtgtataaagatctgcgagctttgtgtataacgcaaatgatgaaccttcgggcaactgcgtgtatggttgtatctgtctatctgacataatttgagcacactgtatgtatcgttct

SEQ ID NO: 18221 - DNA, 977 bp, Zea mays
  Clone ID: LIB3078-055-G9_FLI
tagaaggaaccgctgtgtcacacacacacacaccacacggcggccggagcggcggagccaccataaattggtgctctctccgtccgaagtgctctctgaaattccccccaaatatcccagccactgccgtcgtgcagtcaaagtgtcaaaccatgccggcagtagcgttcgcgtcggctcctgccatattcgcctccgcctccgcgcgtccctgccgcagcgcggctccgggcatcctttcctccgactccgggcggccccgccgcggcgcgcgtggcgccgtccagtgtgaggtcgcctcctcctcggcaccgtcggcggctggaccccaggccgcccggtgggcccagaggaccgtggtcatcccgccacagcgccgcgggtgccacctcatcaccaacaagatcgtaaatgagatagggaatgacctggccgacttcaagtgtggcatggcgcatctgttcttgcagcacacaagtgcgtcgttgactattaatgagaactacgactctgatgtccaggttgacactgaaacatttcttagtcgcattgttccagagggtccatctgctccatggaggcacaccatagaaggacctgatgacatgccagcacatatcaaatcatcaatgtttggttgttccctgatgattcctatcaccaatggacgtctcaacatgggaacttggcagggtatttggctctgtgaacatcgagattatgctactcctcgacagattgtgatcacgctgaatgggatctagcctaaggtgatctatgttaagagctggaaatgcaatgcagcgacttcgacatgtttaaatcagatgcactgaaactgaaactgtctttggcccagttgtgataggcgttccagtggagaatgttatttgtaatatgatgctagcatgaggggaacaaaatctcttaacgagcttcttctcatgttgagcttgtttagttatctttggtggttt

SEQ ID NO: 18222 - DNA, 403 bp, Zea mays
  Clone ID: LIB3078-056-A5_FLI
ctagctcgtggtaataagggaagcttgatcatctttccttatggcggtgatgaagagcagcacaatcgtcgcgcttctgttggctgttgccattctgtcctcactgtctccatgctacgaagccggcggctgcatcgggaaacccaagaagtcaccgccgccaccgagaaggccatacttctcgtcctattccgaggaccaccagaactgccgcttgatctgtagctcgaagggtttcaaggacggtggctggtgtgacgaaagcgtggagcacaaagtgtgctgctgctcccattagaaatataatagcgtatgttatgttgatgcatatatatatgcatcatccatctacctgtgtggtgcaaaattctgaataaaacctgaataaaacctgattgagcac

SEQ ID NO: 18223 - DNA, 759 bp, Zea mays
  Clone ID: LIB3078-056-C9_FLI
gtgtttatatctgcctgcgcaattgctcccagcagttgaggagtgcctctttggtccttttcgcatggcttggcaagattacactagagacttatatctctcagatccatatttggcttaggtctagcatgccaaatggacagccaaaatggcttctttgtttcataccagattatcctatgcttaacttcatgcttactacggcgatctatcttcttctatcataccgtgtgtttgagatcacgaatgtcttgaagtcggcttttatccccagtagggataatagccgtctgtaccaaaatttcgttgctgggatcgccatctcagtgtgcctgtatctctgctcacttattcttctgaagattcctgttgtatagggatgaacatacaccaagcaatcttgatagtagaaggtttcttgtaaagtgtttgcttgataggatgtttccagctctggcctggattcccttttgcttggtaggattcgaacatatacggggaactgagagattcaattgccagaggctgcatatacagaaatccgatttttgatctctttgttggttcaaaacactctgctgtatgtatacaacaagtaggcaatcagcgcattcttttggaagctgtagcaactactactcgccagcctcgtgtaagagttatcctgtagaaccgcaccgtgtcgtgttgtaccataggtagtttggtgctgtacaaaaaacgacgggcttttcctcttccttgaaaagaagaatatat

SEQ ID NO: 18224 - DNA, 706 bp, Zea mays; identical to SEQ ID NO: 17930
  Clone ID: LIB3078-056-D10_FLI

SEQ ID NO: 18225 - DNA, 776 bp, Zea mays
  Clone ID: LIB3078-056-F6_FLI
gaccgcgccctgctccgccgcggcgccgccgagcgcgtcgaggacgtcatgctgccgcgctcccccgagcggatgcggcgcctgatgcagctcgcctaccaccgcccgcgccgcttcacgccgggcttcgtgctccgggatctcgcccagtatctgtacagcgacaaagtagaagagaagaaggagctaatcaaggggataacgctgggcaacaaagacaagttccagcttactcctctcccccaggaagtccttgtgttgtggggagagcacgaccagatattccccgtcgagaaggcatttcaagtggcaaggaaacttggagcgaatgctaggctggaggtcctcaaggacaccggccacatgcctcaagaagaggatccaaagcggttcaacgaggcaatcctcaacttcttgcttccagctccaaagtcgtccttgtaacgcgatatatatcccatagttattcacttattattcaggcccaaggatcaccggagagttcacgatttcgatatgcacattctgcccgatcagtgcagtctttgtcgctttggtatcacctcaccttcaagattgatcatggaggaattggaaagtatgttatggaaactattgctatttatctgccaatatatatctgttggatcttttatgggcttgacctatttattgaataaactatagggtgtgtaatggtggagaataccaatagtaccacattggaagtccaagtatcttttgcattgacttatatggtgtgatttattccactt

SEQ ID NO: 18226 - DNA, 1166 bp, Zea mays
  Clone ID: LIB3078-057-B3_FLI
cgctgggccgccggcgccggcggcgaagcggaaggagggagggaaggcggtgaacctgttcacggccgtcaaccaggcgctccacatcgccctcgacaccgacccccgcgcctacgtcttcggagaggacgtcgggttcggcggcgtcttccgctgcacgacaggcctcgccgatcggttcggcaagagcagagtgttcaacacgccgttgtgtgagcagggtattgctggatttgccatcggcctagcagcgatgggcaatcgagctatcgcagaaatccagtttgcggactacatatttccagcctttgatcagattgtcaatgaagcagctaagttcagatatcggagtggaaatgaatttaactgtggaggcttaacgattcgaactccctatggtgctgttgggcatggtggtcattaccattcacagtcaccagaggctttcttctgtcacgttcctggactcaaggttgtcataccacggagtccacgcgaggctaaggggttgctgttggccagcatccgagatccaaacccagttgtattttttgagccaaagtggctgtatcgcttggctgttgaagaagttcccgaggaggattacatgctgccattatccgaggcagaagtgattagggaaggaagtgatataacacttgttggatggggagctcagcttgcggtgctgaaagaagcctgtgaagatgctgcaaaggatggggtgtcttgcgaactcatcgatctgaaaacactcgtaccatgggacaaggaaacggtagaggcctcggtgaagaagaccgggaagctcctcgttagccacgaggctccagtcaccgggggcttcggcgcggagatcgccgcgtccattgccgagcgctgcttccagaggttagaagcacccgtggcgagagtctgcggtctcgacacccctttccctctcgtgtacgagccattttacatgcccaccaagaacaaggtcctggacgcgataaaagccactgtagatttctgaaacatgttgcttgatcgatacagagtactctagtagtctagttagatgtgcacggtttgtgctggtctgggtctgtagcctgaggatgagcgatccacaaaccggcttatttgtattcaacaatacagcgataaataaagccgcaaggtgc

SEQ ID NO: 18227 - DNA, 1052 bp, Zea mays
  Clone ID: LIB3078-057-D7_FLI
tttttgaatacggttgtcaccgatatccttcatctgcatggtagaaaactacatgcttacaaaggtgactatgacacatttgagaggacaagggaagagcaccttaagaatcagcagaaagcctttgaaacaaatgagaaggccagacagcacatgcagacattcattgacaagtttcggtacaatgcaaagagagcatcacttgttcaatcaagaatcaaggcattggagcgaatggaacatgttgatgcagttgtcagcgatccagactataaatttgaatttccaaccccagatgaccgccctgggccaccaatcatcagcttcagtgatgcctcatttggttaccctggagggcctaccttgtttaaaaatttgaattttggtatcgacctggacagccgcatagcaatggttggtcctaatggcattggcaagtccactatactgaaactaatttctgggggatctgcagccaacttctggaacagtatttcgctctcccaaggttcgcatgggctgtattcaatcagcatcatgttgatggccttgatttgacggtgaatccccttttgtacatgatgaagtgctatccgggtgtgccggagcagaagttgagggcacatctgggttcgtttggtgtttcgggaagccttgccctccaatctatgtacactttatcaggtggtcagaagagtagggttgcattcgcgaaaataaccttcaagaagccgcacatcattctccttgacgagccttctaaccatcttgatctggacgctgttgaggcgctcatccagggtttactcatttttcagggaggggtgctgatggtgagtcacgatgagcatcttatcactggaagcgtggacgagctttgggtggtgtcggaaggcagggtgaccccgttctcgggcactttcaaggactacaagaagatgctcaagtaacaaaaacatgtattatcgaccatagcctatatatctatatgcttgctattatgttgtattaccgtataaattttgggagtaaagcatcgaaattattataac

SEQ ID NO: 18228 - DNA, 1218 bp, Zea mays
  Clone ID: LIB3079-001-D10_FLI
gttcccagttcccaccgtgtagatggttctggtataaaatgtattgccatatttgtaacacagattactatatacaggttcgtgatcaaactttgagcagaataaagagcaatattgaactcatagtagcgacaaatggtggaaatagggtggtggtgatcccacactccatgggggtcctctattttctgcattttacgaaatgggtcgaagcacctcctcccgtggggggcagtggtggtccgaactggtgtgagaaccatattaaagctgtaatgaatattggaggatctttcttaggagttcctaaggctgttgctgggcttttctcatctgaagccaaagatgttgccgttgctaggtataaggtaattgattcatttatttaaagcaaaagggaatagcaaaagaatggaatattattggatgctcgacaagcttggcggagcttttgctcccaagccatcttctggacctcacaagtccagggagtgcctgcctctgatcctcatcatcaggaacaggctcaagtatgcaccgacgtaccgtgaggtcatttctatcctgatgcaacaccatgtacttgttgatggcaaggtcaggactgacaagacctaccctgctgggttcatggatgtcatttccatccctaagacaaacgagaactacaggctgctttcgtcttcacccaatcagggatgaggatgccaagttcaagctctacaaggtgaggtctgttcagtttggccagaaagacatcccctatctgaacacctacgacgaccgcaccatccgctaccccgacccgctcatcaaggccaacgacaccatcaagatcgatctggagaccaacaagatcatggacttcatcatgtttgacgtcggcaacgtggtcatggtgatcggcaggaggaataccgggcgtgtaggagtgatcaagataagggagaagcataagggcaacttcgagaccatccacgtgctgcttggagctttttgctatgtctagttttctcctatttgttgtacaggaaaacatagaatgaaattcaaatttggtggccacaaaagtgtggagacttgatttcatataaagttaggcttaacattagtgcaaacagttgtattttagtttagatttagagtacactatgtatgcgttgtttgacaatgcttatttatgatatattgaatggtacttatttatattaattaatt

SEQ ID NO: 18229 - DNA, 626 bp, Zea mays
  Clone ID: LIB3079-001-F12_FLI
atggagtcttgcattcagctgaaggaagttcaggacgatggggacaatgacgatgatgatgatggtgctgaagatgttgatgacaacgatgaagaggaagacaccgaagatgatgatgaggattcggacgacgacgacgatgcgagagaagaaacagaagaggaatttctggaaagatatgcactagcggcggctgcgggcgagtcagtcgaggaaggagacattgatgaagagacccaagacatcgaattgggctctctggatgacgtggacatacagcaggtggttattcccctgatgcagaaacttcctgctctgcagcccgccggagcgtttccggacagcctggttgaaagaattgcagaaacattcccggaatacgaacagtttttgcaagcccttcgacgagcttagagtataggaaacatgtgcagatttttctctttttgttatatgtttatatttttttgtgtcatttttggtttgcttctaccttgagcgttgttccgagatgtgtttctttttgtcagatatggtgtttattttcccttgatgtgggtggcaagatatgggtgatgatgtacgtacgatggttacaagtatgttgtgagcataattgttatggc

SEQ ID NO: 18230 - DNA, 1547 bp, Zea mays
  Clone ID: LIB3079-001-F5_FLI
cgagccgtgccactgcgagggaaggagggagagaaaaaggggagcccgatccaatcccaatcccctcccgccgcgtcacatcgccgccgtcctcgtgccccgttacctctaaaaccctagcggggagccgccgagccggggatgaagatccagtgcaacgcgtgcggggccgcggaggcgcgggtgctgtgctgcgcggacgaggccgcgctctgcgtcgcctgcgacgaggaggtgcacgccgccaacaagctcgccgggaagcaccagcgggtgccgctcctgacggacgccgccgccgctgccgccgcagcggcgccggccgtgcccaagtgcgacatctgtcaggaggcttctggatacttcttctgcctagaggaccgtgcactactttgtagagactgtgatgttgctatacacacagtgaattcctttgtttcagtacatcagagattcctgctaactggagttcaggtgggtcttgatcctgctgatccagttccacctattgctgaaaagcatgttaatgctgttggtggatcagtgaatcaaccagtgagacatcagccaaggagaagcccgacagttcaattttcagttgaagggagtgcttctgttcctaccaaaaatgtaacaaatggagattgttcaaggcagaattttgtcccaacagccagggcagaagtggttgattggactatgaataatagtacaattcgatcagtagaatctccgcctaagtacatttcagaggaaagccccacacttctgcaatctagccagaccacaacagtcttctccaaccaaattaatggcaatagtgatggggcctaccacttgtcattctcaggtggtaatgtgacagacagcctaccagattggcccgtggatgagttcttcagtaactcagaatatggtccaaactttggcttctccgagaatggttcttctaagggtgataccgctaagctggggggcgctggtggatctccacaatgccgtttggctgaaggctcagttgctgaggaactattagggcaggtgcctggattgatcaccgatgaatatatgggccgagtacctgagaattcatggacagtgcctgaggttccctctccaccaacagcctcggggctcaactggcatgggaatttgtgtttccctgcgtatgacagcaccatgtttgttcctgaaattacctccctccagaactcccaaagtcacttcaccgtaccttccagtttcaagcgccggagaagagagtactaagaggcgacaagaagatcactagacaccactgtccggtctaggccatcttgagaaaggcttcttggtgggccaaatgacgaaagaaaatatccaggactgagtggtcattcaaacatcaactgagctatccagtagccaggttttaagtgtgttgtaatgcttcaatgtgtttcattttctaaagacctgagcttcgcttgtgatttgttccgagctgtacggtgtcgattttgtgtatataatataatataccgaaataaagggtacccattatgagt

SEQ ID NO: 18231 - DNA, 434 bp, Zea mays
  Clone ID: LIB3079-001-H6_FLI
gccgcggcaacccgacctgcgtcaatcgccatgactacctcaaggcgtcttgccgataggaagatagcacgatttgagaagaatatcacaaagaggggctctgttcctgagacagtcaagaaggcaaatgattatcctgttggacctattcttcttgggttctttgtcttcgttgttgttggatcatctctctttcagatcatcaagacagcatcaaacgctggtttattctgaggacaattggtcacttacttttagtcactctaaagtcgaggaacagggttgacatatgcagtttgtcacttaaaaactatacaagtgtatggcgtagctggtactctacaatgtcgcctttctaatgctgtaccatggagagttttaagttataatgtatagtccatatatatatatatatgcaatggaagtgctaattt

SEQ ID NO: 18232 - DNA, 729 bp, Zea mays
  Clone ID: LIB3079-002-A4_FLI
atccaggtggagtgggccgagaagcggccgcctgatcgagccgaaccaacggccgacgcggcgcacgccatggtagcagctggcaatccacctccaaaaccgtgggaacgtgcaggaaattcatctggcccagtgccttttaagccgccctctggtggtagcaccagtgatgttgttgaagcttctgggacagcaaaacatggagaagttgtttctgcttctggaaacaatgttgcctccaatgtaaacagcacaatttcaatgcctgtgcccccaaggccttggcagcagcaaggctatgaaaactcttatgggggttatggctccagtatgtatagctcttacggtggatatagtggaccctatggaaataacatgtactcaggttatggaggaggttatggcggtatgtatggaggttctggaatgtatggtggaccaatgtatagcggtggaatgggaggaccctatggtggttatggtatgggcatgagtccttataatcagggaccgagttcatttgggccacctaccccaccccctggtttctgggtgtccttcctacgagtgatgcatggtgttgtgaatttctgtgggagggttagcttccttgttagccagaacactcaggcatttcacatgttcattactgcacttttgcagttatgtgatcgggctggaatgctttatggtgagcttgcaagatttgttctacgtttgctggggatc

SEQ ID NO: 18233 - DNA, 788 bp, Zea mays
  Clone ID: LIB3079-002-C1_FLI
cggaccagcagcggctgatcttcgccggcaagcagctggaggatggtcgcaccttggctgactacaacatccagaaggagagcaccctccacttggtgctccgcctcaggggtggcatgcagatctttgtgaagacattgactggcaagaccatcaccttggaggtggagtcgtctgacacaatcgataatgtcaaagccaagatccaggacaaggagggcattccaccggaccagcagcgcctgatctttgctggcaagcagctggaggatggccgtaccctcgccgactacaacatccagaaggagagcaccctccacctggtgctccgcttgcgaggtggtatgcagatctttgtgaagaccttgactggcaagaccataaccctggaggttgagagctccgacaccatcgacaacgtgaaggcgaagatccaggacaaagagggcatccccccagaccagcagcgtctgatcttcgccggcaagcagctggaggatggccgcaccctagcagactacaacatccagaaggagagcactctccacctggtgctccgcctccgcggtggtcagtaagccatggttcatttaagctgctgctgtacctgggtatctgcgtcgtctggtgccctctggtgtacctctatatggatgtcgtcgtctaataaacatctgtggtttgtgtgtcatgaatcgtggttgtggcttcgttggtttaatggacctgttgtgtcctctgtgttgtacccaaaactcttctgcagcagtatggcttgaatccttatg

SEQ ID NO: 18234 - DNA, 1149 bp, Zea mays
  Clone ID: LIB3079-002-C4_FLI
gctggagcaggatcagcaactctttcaatggcctatgcagctgccaaatttgcagatgcttgcctgagaggattgcgtggtgatgctgggataatagagtgctcttatgtggcttctcaggtcacagagttgcctttctttgcatccaaagtgcggctagggcgatgtggcattgaggagatcctaccacttggaccattaaatgagttcgagaggtctgtattccatactcgaacttacaactactcaggttcttgttgtgaattgaaagtcgcatgctctgcattattcaacggccatttcacacatgctttccgtcgagttatatatctcagcaaattagtttgttcagctacttttcgtctacaacaacaggttcatcttgcccactcatctgacccaccatgatttggatccgccaggttgtagtagttattaggctatggtcaacataccttgcatatggctgtgcaaaataatattctgcactgtagactgtactgttcacgtggtgaagtttgaaataagagatcggatgagtaacgttgctagagatagccttactgacgataagtcattcttatgtcttgttttcttctgcgcaaggacgtattggccagaaatgtttcatagaccgggaatacagtttacaggagaaagcatgaatgcgttatgcagccatgcgccgttctcctgactagtggactgaaaccgaatgagttttcagtggcatagaaataccagggccatattattcatcacagcctgttagtactgatgtaggccgccgaagatgaatcatcaaacacgcagggtgataggagtgcgcattgttaaatgccattattttacattatttatctattatgacctgcatcacttccgttttcttcccacatcactgtcatgcagatctggtctggagaaggcaaagaaagagctggcggagagtatccagaagggcgtctctttcatcaagtgaggccggcgacggccagcccaacatagaaatagatgtggcgtgtttctgcttcttgagaactcatcttgttatctctctgtaagactgagtgcatgacacgaataatccacgtacacggctgtactaaaaagatgatgaatctgtggtggctaaaaaaagggaaatag

SEQ ID NO: 18235 - DNA, 1118 bp, Zea mays
  Clone ID: LIB3079-002-D3_FLI
gtcagccgtttcatctcctgatcagcctgctagcttagtgaggaatgcttctatgcgtgggatgcccataaacggttctttcaggaaagacaactctacagaaagcttcgatttggaatgtcaagagaaacatctggacattgttccgactagctcatcccctgaaaggaagttttcttttagttcttgctcatcaaatgggctccttttgtccaaagagagctctaaacagcaaactagcatccacaaccttgacaagtgtaatggagggcatttgcatgtatcagatgaaacattttctgaagctgctcctaagacacataaatcagcagaggaccatgatgatagatccaaacctccacttataagaggtcgatttagagttatacctgggcatgttgactcaaaggctcaaccacctggcctacagaagtgtcacagcatgcagacaatttctcgccttccatcattaagtataccctcttccgcagaagttgcatcaaccattattggtggctccttctacatgcagctatatagtattctacagacaaatatgcttcagagggaccaaatacttaacgcgatgaagcaggtgagtggttgtgctatggcttcaccaggcgtaccttctatggcttcaccgtgtatcccttccacaagtcgctcgacatctccatcaggtgtaccatcagttgacagatccatgctggaagctgcacaagaaagggagaaagagctgctgaatgaggtcttggagctgcaatggcggttattgtgcacacaagatgaggttcagaagcttaaagcaaatgcagcgcagatctgatgctgaagctgttaagggagcattaagggcgcgtcatgataagatgatctgttcatgcggttttcaaatggctatttagcataggagagagatacaaaattaaggattggtgtatatttaaaaaggtgctagtgatgctcgagtgtccaatcctgtctaagcaggacattaatttcgtacaatctgtgtgtttgtgtttatgggtggcatggcgctgtgtttttgttggagcgcaattcccaggttgggacttgggaaagatagcttaacatgcctatgggttttaatc

SEQ ID NO: 18236 - DNA, 1755 bp, Zea mays
  Clone ID: LIB3079-002-G12_FLI
gttggggtacaagtcatgtcaatgagagtatggtaactggtgaatctgtaccaatctccaaggaagtatccagtctagtcattggaggcacaatgaacttgcatggtgttcttcatatacaagcgacgaaagtaggatctggaacagttttgagccagataatttctctcgtggaaaccgcccagatgtctaaggcccctattcagaagtttgctgattatgtagccagcatttttgttcctattgtcatcaccctgtccttcttgacattccttgcatggtttctatgtggatggttgggagcatatccaaactcatggtctgctgaaagtagcaattgctttgttttctccctaatgttctccatatctgttgttgtgattgcttgtccatgtgctcttggtctggcaacaccaactgctgttatggtagcaactggagtcggggctagtcatggagtacttgtaaagggcggagatgccctggagagagctcagaatgtgaagtatgttatttttgacaagaccggaacactgacccaaggaaaggctactgtaactgcaacaaagattttttcaggaatggatctgggtgactttctcacgttggtagcgtctgcagaggcaagcagtgagcatccactggcaaaagctatcttggattatgcattccatttccatttcttcggcaatcttccctcaggaaaagacagcatcaagagaagaaaagaagagatactttctcagtggcttctggaagtcgtggactttgctgccttgcctggcaaagggattcaatgttggatcaatgggaagaaagttttggtagggaatcgtgctttgataactgaaaatggggtaaacattcctgaagaagctgaacgtttcctggtagacatggagctgaatgcaaagactggtattctcgtagcgtatgatggtgacttcattggcttagttgggataaccgatcctttgaaaagggaggctgctgtggtcatacaaggtctaaaaaagatgggtgttcatccagttatggtcactggggataactggaggactgcacgagcagttgcaaaggaggttggcatcgatgatgtcagagccgaggttatgccggctggaaaagccgatgtaatccactccctgcaaaaggatggcagtgttgtcgcgatggtcggagatggcatcaacgactcgcccgcccttgctgccgccgatgtcggcatggccatcggcgcaggcactgacatcgctatcgaggcggctgactatgtgctcgtccggaacaacctggaggatgtgatcacggctattgacctctcacggaagacgttcatccggatccggtggaactacttctttgccatggcctacaacgtgatcgccatccccgtagctgctggcgcgttgtttcccttcaccggggtccagatgccgccttggttagccggcgcgtgcatggcgttctcgtccgtcagcgtggtgtcgtcgtcgctgctgctgaggaggtataggaaacccagactcaccaccgtgcttcagataacagtggaataagttccttttttttttggcaatttgttgtatctcactttatcggagagaaatagatacaaacgtgaatgttggtgtggacgtgcggtgcagtactgagagtcaaacacagaaacacttgtacatatcgaacagtttgcaattgcaaccgagttatacatgttaactatgtgagggatcaagagacatgcgacaagac

SEQ ID NO: 18237 - DNA, 595 bp, Zea mays
  Clone ID: LIB3079-002-G3_FLI
ggtcgttcatggtctactcctctctcgacaagcagctggtggagacaattacgaacccgggtgacagccaggcgatgagcagcatcaacctcttccccgccggcttctccctcgtccccctcaccaacccggacccggcgccgcaagagggctccggcagcatcgcacagcctggggcgaccgtgatgactgccgggttccagattctgatgaagatggcccgtgggaccggcctttgccctcgctcggtgtcgtccgcggtcaagatcatgtcagacaacatcaccaacatcaaagacgctctgttgaaaagccaccctgttttctacaagagcattcagtctgtcgactgaatagcggcaagggagaaagggaggtcgtccaatgcttgtggaggctgctgtttaaatcaaggatactgaaacggaaccccatcagctttggtcgccgcctgcgtttctcccggcaatatatacccgttccgtctactgtgtggaactgctcttggctgccaagagcctgtaatgatgttagtggaaccgaagttgtgctatgtggacccgtcacctgataatgtatgccatgttaaatcctt

SEQ ID NO: 18238 - DNA, 805 bp, Zea mays
  Clone ID: LIB3079-002-G5_FLI
ccccccttgtcgtcgcttcggttcaagcgaggaagagagagagagcgagagttgtacaaggggcgccggcggccgcattgtagagtacgtcgagcttgttcactgccgtcgcggcctcaaagcaagccacatcatcgatggcggacgcagctcacgtcttcctgctggtagcggtggccgccgcgctcgccggccgctcagacggcgcgtggtgcgtgtgccgcccggagctggcggacagcgcgctgcagaaggcgctggactacgcgtgcggcgccggcgccgactgcaagcccatcctgcagagcggcgcctgcttcgccccggacaccgtcaaggcccactgctcctacgccgtcaacagcttctaccagcgcaacagccagaacccgcaggcctgcgtcttctccggcaccgccacgctcagcaacagcgacccgagcggcaatggctgcacgtaccctgcgaccccaagtgctgctgcgacgacaagcaatagttcgcccggcgtgtacagccctcccacgatgggtccgacagccctcaacgacaacagcgctgctgccagcgtcctcccggtggctggactcaccaccgtgcggctgctgatcctggcctcctgctcgctcgtcgctctctgcatcggcgcgtgactcatgaggacgagacgcccctcggctgctgctgttttgggtgtgtcttgtttgttccttgccccttttcttctagtggcaggcagatggaaccttccggtggtggagcgcgagaaccccgaggcctcacaaatgccattctcgttgctgcg

SEQ ID NO: 18239 - DNA, 1609 bp, Zea mays
  Clone ID: LIB3079-002-H1_FLI
ccccaccagctctgctcagccaccaccatcctcctcttcctcgaacggtcgaaccgccgaaagcacgcaccccgccgccgcgtaccctcccctcacccgctcaccatcgccggccgccgttcggcgcgacgcggattcgaatccggaaagcgggcgatgggggcgaagcgcgcggtgctggtgggcatcaattaccagggcaccaaagcggagctcaagggctgccacaacgacgtcgctcgcatgcgccggtgcctcgtcgaccgcttcggattcgacgagtccggcatccgcgtcctcatagatgacggctccgcgccgcagcccacgggggccaacatccggcgggaactcgcgcgcctcgtcggggacgcgcggcccggggacctcctcttcttccactacagcgggcacggcatacggctgcccgccgagaccgggaaggacgacgacaccggctacgacgagtgcatcgtgccctgcgacatgaaccttatcacagaccaagatttcacggagcttgcgcaaaaagtccccagtggctgtctctttaccatagtttctgattcgtgccacagtggagggctacttgacaagaccaaggagcagattgggcacagcaccaagcagaagcagaagcagacccagacccagacccagagccgggaacttgaggaacggtctccttctggcaccagcttccgggaattcctcaaaggtactgttcgggaagcgtttgagtctcaaggaattcacctgccccaccgtagccgtagccaccagcaagggagcggtcacggcgacgacggtgaccaagagtcgcgctacatcaacacagccgatgcccacgtcaaaaaccggtcgctacctctctcgacattgatcgagatgctgaaggagaagactgggaaggacgacattgatgtagggtcaatccggctaacgctttttaacctcttcaaagacgatgccagcccgaagataaagaagttcatgaaggtcatgctgaacaagttacagcaggggcagcacggaggcattgtgggcttcatgggcgctctggcacaggaggtcctgaaagccaagctcgatggcaaggaagaagaagagttcgacccggcaatgaaacagcacgtgcacagcgatcaagaggtgtacgccgggacgacggcaagggtgccgagcaacggtgtcctgatcagtgggtgccagaccgaccagacgtctgccgacgcgaccacgccgaagggggtgtcctacggtgcgctcagcaatgccatccaggccatcctcgcggagcgtgggacggtaacgaacaaggagctcgtgctgaaagcgcgcaagatgctgtcgaaacagggctacacccaacagcctgggctctactgcagcgatgagaatgccagtgcggcttttatatgctgatgatgattcattgggtttgtcctgtggattgcaatatttgtattttgtctctaagtgcatgtgagttggactggtggttatgttttttcgctgagatttgggaatgtatcgtttctttcgcaggatgacattctttgaggatattagtcatttaaacataaaataaattttattttaataaagc

SEQ ID NO: 18240 - DNA, 477 bp, Zea mays
  Clone ID: LIB3079-003-C3_FLI
gcacagagacaccaagcgttgaactcgcctaagcagctatcaaccaaccctagaaagctagacaccgtacccatggctcgcgctagcgtcgtctttgtcattgccgctctcctcttcgtcgccatggtcgtagcaccgatggccgaggcaaagtccgccgatgcccctgtggctgacgcgccagccgatggacctagcgggccggctgctgcacctggcccccagggtgtcgaaggcctgtcaggcaatgaggatgacgatgatgactccaccaattgaggccacacacgtcggcccggttaaatttggaacaagacatggaagaaaaatgagagcaatgtctttaaaaccatgataatgtgtggtcatccactcatccatggatacatccttgctctccctctttttctttctgtttgattttcaatgtgttatcatgttgttagttaactgtatcgactcatggtatcaagatct

SEQ ID NO: 18241 - DNA, 1270 bp, Zea mays
  Clone ID: LIB3079-003-D6_FLI
atcacgggttgctcctcctgatctcgatgaattcaagacaagagcaattgctgaaaggggacctggtatttctagtcaacctggtaatatcatccaccgaagggagcctagtgggaagttgtataattatgctgcagcttctaaaggggccaaggttctggatttcaataaggaggctaagggtgcttccaacatcttagataaagacaaagacaagtacctccgcaatccttgctcagcagaggggaagtttgtcatcatagagctttctgaagaaaccttagtagatacaatcgcaattgcaaattttgagcattattcttctaatccaaaagaatttgaactgctgagcagtctgacatatcccacagaaaactgggaaactcttggaagattcactgccgcgaatgcaaaacttgctcaaaatttcacttttcttgaaccaaagtgggctagatatttgaaactgaacttggtaagccattatggttctgagttctactgtactctcagtgtgcttgaagtgtatggaatggatgctgtagaaaagatgcttgaaaacttgattccagttgagaataagaaaacggaacctgatgacaagactaaggaacccattgagaaaatttatttgaaagatcctgctggaggaaaagaattctcacaggaaacccttgatgaagatgaatttgaactagaagatgataaaccaaacggtgattcattgaagaatggtgctaatgatccagtttcagaggcaaggacacttcaggctggcaggattcctggagatacagttcttaaggtgctaatgcagaaagttcaatctcttgatgtgagcttctctgttttggagaggtacctagtggagttgaacagcagatatgggcaaatctttaaggatttcgatgccgatattgatagcaaagatgtcttgttagagaagatccaatcagagctgaagaatcttgagagcagcaaagataacattatgaatgaagttgatggattcctctcatggaagttagttgcttcctcgcaactaaaccagctggtcctggataatgctctactcagattggaatttgaaatatttcggcaaaaacagactgacatggagaacaggagtcttgctgttatatttctcagttttgttttcgcttgcttagctcttgctaagctgtctataggcatcatgtccagattttgtagattctataactttgaaaagttccataatgtaagatccgggtggcttgtgttgctgctt

SEQ ID NO: 18242 - DNA, 1016 bp, Zea mays
  Clone ID: LIB3079-003-E1_FLI
aaatataaaaccctttttaagggacgatggccgaaaccaaactggtgctttttaccgtttcctttgttgcaaacgctaaatttctcacgaattcttccgtcgtcggcggcgcagattgaatgccaaaaccctagctcgccctccccaattccccatttcggccacaccctccttgcctccacggctccacccctgcttcaggttacctgtgccagcgacgccggtagaagccatggacagctctctcgcgagcgcggcggcgatagccgatcagcgccagaagatcgagcagtaccgccacattctcgcctacgtcctctcgtcttccccaccggacatctctcaggccaagcgcttcctcgaccacatggtttcggacgaagttccgctcgtggtgtcgcgtcaattgctccagacgttcgcgcaggacctagggaagctggagtcggacgcgcagaaggaggttgcccactacgcgctcacgcagatccagccgcgtgtggtctccttcgaggagcaggtggtagtgattagagagaagcttgcagagctatatgagtctgaacaacaatggtcaaaagcagcacaaatgcttagtgggattgacttggattcaggaatcaggatgcttgatgacaccaacaaattatccaagtgtgttcaaattgcacgactctatttagaggatgatgatgcagtgaatgctgaggcttttataaacaaggcttcatttttggtcaccaacagccatcaggaggttctaaacttacagtacaaggtctgttatgcaaggattttggatctgaaaagaagatttctggaagctgcacttcgatattatgacatttctcaaattgaacaacgcaagattggagacgaagagattgatgaaaatgcactagaacaagctcttagtgctgctgtgacatgcacaatattggctggtgctggtccacacgctcccgtgttcttgctactctgtacaaggatgaaagatgctcgaagttgaaaatata

SEQ ID NO: 18243 - DNA, 1157 bp, Zea mays
  Clone ID: LIB3079-004-A2_FLI
tacatactatcaggctagaccggtagagtatattaattctaaacagctcgtgtgatgtttcacccagtcatcgccgtcgacagcgcgaggaaggcgatggagttcctcggcctcaaggacggcggcgaggagcaggccgtcgacatggtgctcacggactactgcatgcccgagatgaccggctacgacctcctcaaggccatcaaggcactgaaccccctggagccgatcccggtcgtcgtcatgtcgtcagaagacgagccccagaggatcagccggtgagccagccggctctgttctttcctctttttgagcaccgtttcctttggtccctatcccgtcccctgtgaatgcatgctgaatcatcccgtgagatagaatagcagacggggccaaaagccctggcccgtgtgtactgacggggtaacatttattcattcatccactcgacccgtgtgtactgacggcctcgttattctccggagcagatgcctgagcgccggcgccgaggacttcatcgtgaagcccctgcagagcaaggacgtgcagcgcctccggaactgctccgccgccgcgaggcccagcaagggcgccgcgccgtgcgaggccgccgtcgtggccaagaggaatcaaaagccgccgcatcctgccggcgccgcgtcgccgtctggacggcgagcgagcctcgccggagtcgccatggtgctgcactcgtcgggcgtggagtacctgccgctcctgctcaagctcgtcgtgctggcgtacgcggcgctgtgcctgggagagctcctgcacaggtgggcgtcgtcggacggccgctgctcgctctccccgtggtgcgcctgagcagcggtgcgtgtcctgggcaccagcaggagactggtgatgcaaatgcagagtttttcagctgctgaaccaaaaaaaaaaacctccaacagccgtggaggtctagcttagcctttaatttaggcactgtagaagattgactgctttgggattgggtacgctcgcgtctgccgtctgcgtggcgtttgtttcttgatttgagggagacgtatgtatgtacgtacgatacgaggccacggggggtacgctcccctgtatcctctcctctgtatagaatccactgaatcagaatgcaacgcgtgacccgagcc

SEQ ID NO: 18244 - DNA, 1005 bp, Zea mays
  Clone ID: LIB3079-004-C12_FLI
ggcaaactggacattcttgtcaatggtgctgccggcaacttccttgcctccccggaggatttgaagcccaagggattccggactgttcttgacattgacactgtgggtacatacacaatgtgttatgaagccctcaagtatctcaaaaagggtggaccagggagaggtccttcctctggtggcctcatcattaacataagcgcaacgctgcaatacactgccgcttggtaccaaattcatgtctctgctgccaaggtacttggaccttctctgaaccgctctgcaagagaaaatcgatgaagtgtgtagatttctgctgattgatcggcttctataggctggcgttgacggtatcacaagatcattggctctggaatggggaacagattacgacattagagtaaatggaattgcacctggaccaattcaagacactccaggaatgaggaaacttgcacctgaagaaatgggcaataaggggaaacgagaaacgatgccattatttaagcttggggagaaatgggacatagcaatggccgcactctatctagcttctgatgcaggaaaatatgtaaatggggctataattattgttgacggaggtctttggttgagtcgccctcgccatattcccaaggaggaagtgaaggcactctctaaagttgtcgagaagaaggttagggcatctggtgttggggtgccatccagcaaattgtgatgacatctttgactacgtagctcttcgatgtgttctgtacaacatatgtctatattgttgtcccactaatgttgtcagtttggctatgccaccagtccatgcagatgacttgttagggcttgttcgcttatttttaatccatatggattggaggggattgatatggattgggggagattttcacttactagggattaaaaccctctcaatccatatggattggggtagaaccgaacatggccttaagcggctgagcagtccatttagttgaagaaattcaaatattt

SEQ ID NO: 18245 - DNA, 686 bp, Zea mays
  Clone ID: LIB3079-005-A11_FLI
cagcgcaccaacaggtgagcttccgcgggcttatcatggagaccaaggacacgtgtctgcaccttacgtcgctccgtgggctcagccgcagtcccagaccgcaggaagtcagcaaccgacacgcactcaggcacaggtatcttacagctcgtatgcttacccaccgccgccatgggcgtcacaggacagcaccgaatcgaacccttttgtagcggcagcatcgtcatctcagcaataccagtccacttcgagaacccctaccatgccaccgaacttgaggcctctactacagcagtcgcattcttttggagtaccacttccaaccgcgagtctggactcgccaataaatgggaacctgaagcaaccgctgtctgctggggctcgcaggccatcttatgtttcttccaacaagttcttcgacgacttgtttgagaggaactcggatggtagcctgaaagtaggcagcacaaggcacagtgatgtctatggaaaataaatgtcgttctcttgtcctgcctgcgtttgatgttatcagctgcctgcatattagaacgatttagttgatgcttctggcgaacttgcttgcctttccataaataattttgccaaaccaaactatgtggaagcttcagcctatgagctgtccactgtccagacattttgaatggcaaaaggcgattcttcct

SEQ ID NO: 18246 - DNA, 1040 bp, Zea mays
  Clone ID: LIB3079-005-B3_FLI
ctaagaaatacgatttggaagcatggttccctgcatcaaagaccttccgagagttagtatcctgttcaaattgcactgactttcagtcaaggagacttggaattgggtatggccagaaaaagaatgacgagcagtccaagcagtttgttcatatgctgaactctaccttgactgccactgagaggaccctctgttgcatcctggagaatttccagaaggaggacggcgtcgaggtgccaaaggcgctgcagccttatatgggtggaatagagttccttcctttcaagcaacctttggatgccaaacaagctgctgactccaaatcaaacaagtccaaatcaaagggaaatgctgcttgagttggacgaggaacagactggaatgcaaatgcacgtgcaggttgcaaattcttatttatgttaatttttggggcctatcagtacacagtactcatagcatgacaaatggcgttgcaggttttggtttttacccgttttggtttcctggttgccgcattctctgacgacccacttggcacacttgtattgcaatagcatttcttgaaatccggaatgcttggccaccaccgccagctcaaccgggctgtgtttatcgcgttgccacagaacgcctgcttgtctgtctccgaaaccaccaggtgttctttgtagcaagcacattagaaacggcttgctggcggattggttttttatccttttttttttccaatgacggtggattggtgtacttctgatcggtaatgaaaaaaaaggcatcttgtgttagtggaatctagtgctgttgtggctggaacctggaaatcctcagtcctcacaagcatgttcttggattctcgcatcgcatgcattgtatggaaacaccggtacctacagcgatggtcaggttctggtggattctgtttggctctgctttccagccttttcactgctcaacgtgactgtagccttttataacatccatcgaattggatctcatcttctattttaaaattccatttataaacgctgttacatagtgtc

SEQ ID NO: 18247 - DNA, 1180 bp, Zea mays
  Clone ID: LIB3079-005-C3_FLI
gccagagccagacgccgtcggccgtcctccaccgccctccaggtacgccgccggccccctcctccctcctccctccaccgccacccccaaagccgccaccgccgccagctactgcctctcccgtaccgccgccgccatcgtacgagcaggccgtaggggtgggtggtggccgaagggaggaggatgacgacgagggcgccggggcggtgatacgggcacacctgctctctgacttcaaggccgcggtgcgtgcaggaaaagtactggtgtccgacccgtcgtctggaaagttgaagggcaagctttgaaaatgtcatccactgtgccgaagtcatcaaatatcttctggcatgattgcctagttggcaagactgatcgccagaagctactcaaccagaaaggctgtgttgtctggatcacaggccttagtggctcaggtaaaagtaccttggcatgtacattaggccgggagctccacacaagagggaagcttgcatatgttcttgacggtgataacttaagacatggtctgaacaaggatcttggctttaaagctgaagatcgtgctgaaaatataaggagagttggtgaagtagcaaagttattttcagacgctggccttgtatgtattgcaagtttgatatctccatataggagagaccgtgaatcttgccgtgcactgttgtcggatggtagctttattgaagttttcttgaatatgtccttggaattatgtgaagcaagggacccaaagggcctctataagcttgctcgtgctgggaaaataaagggttttacaggaatagatgacccttatgaagcaccactgaattgtgagattgagatcaaggaaatagatggtgtatgcccttcgccttctgacatggcggggcaagtggttacttaccttgaggagaaaggcttcctgcacgagtaggctgacgctgaatcgaagctacatccggggaaggtttcaatcagacaagcgcagaataagtcaaaagcgctgccagttaccgtatggttacatagattgatctggatgcctagtatttttctttccgcgcttgctctaccacaagttccattcagtttcattcagatgagcctagatggttcctaatttctttgacctctggaatagattacctgtaatgcaattctgataacagcttggggc

SEQ ID NO: 18248 - DNA, 696 bp, Zea mays
  Clone ID: LIB3079-005-F10_FLI
tcactcgagacatgctgttttgtcatgcagttcgtaatcctggccttattattgacattgtacaagatatacgtctgatgaatggggaagccatccatgcaacaccaaggaagacagggattatagttcttggtggaggccttccaaagcatcatatatgcaatgccaatatgttccgcaatggtgcagattatgctgtgtatattaacacggctcaagagtttgatggtagcgattctggagcacaccccgatgaagcagtctcatggggcaagattaagggttcagcaaaacctgtaaaggtgcattgcgatgcaagtatcgctttcccgcttcttgttgcagcaacatttgcacgtaaggttcataactccaaatgaacagactgaatgggattcggtggagtgaatgggcaacagaattttgttgaactctccaaatgaccttttggagcacgaggtctacttcacttgcacagggatcatgtgcaaattttttcggtgactcgcggcaaccacatgccatcattcttcgatgttcacttgatgctgtactagctggttgatagcatttttgttacaacagataatttattgaaatacagacatacgattgtccatccgagtcgtctgcttacgatttttttgtagacgaaacatctgcttacgaaatcgacaaatggcctgttttatgaac

SEQ ID NO: 18249 - DNA, 1175 bp, Zea mays
  Clone ID: LIB3079-005-F4_FLI
ttcggctccacaagagccttcagccacaagaaccccctcaagtcagactggtgcctcggaaagctgagagccgcactggaagacatgggataccgagacggagacaccatgttcggagccccctacgacttccgctacgcgccgccgtcccccggccagacgtccgaggtgtactcccgctacttcaaggagctgatggagctggtcgaggccgcgagcgagaggacccggaagaaggccgtcatcctcggccacagcttcggcggcatggtcgcgctcgagttcgtccggaacactccgccggcgtggcggcgcgagcacatcgagcgcctcgtcctggtcgcgccgacgctccccggcgggttcctggagccggtgcgcaacttcgcgtccgggacggacatcctctacgtgccagcgacgacgccgctggccacgcgagccatgtggaggagcttcgagagcgccatcgtgaacttcccgtcgccggccgtgttcgggcgcctgcaggcgccgctcgtggtcaccagggagcggaactactccgcgtccgcgcacgacatggagcgcttcctcgccgccgtcggctccggcgaggccgcggagcccttcaggagacgggccgtccccaagatgggcagcttcgcggcgccgatggtgcccatgacgtacatcagcggggtcggcaacaggacgccgctgcggctggtgtctggggcgaagacttcgacgcggccccggaggtggcggcgtacggggacggagatggcaagatcaatttgatcagcgtcttggcgtttgagaaggagatgcgtcggcagccggagcagaagaagcagttcaaatccatcaagatcaataaggcccagcattctacgatcgtcacggatgattttgccctgcacagggtcattcaagaaattgttgaggccaataatcagaagattccatcctaaattattcatgtcatgtatgcattaccgagctgtgggggccaatagtgggttgggaagtgatggtttagacatcggtcgtggtgtggtcgcaattcaatcgattagttatttgttaacgtcaattgcttgcctcatgaacttgctgtgataaggaaagaccacaattattttccgcttgtcgtgtgcgttgtaccgtataatgttaataaaaacaagagt

SEQ ID NO: 18250 - DNA, 1054 bp, Zea mays
  Clone ID: LIB3079-005-F5_FLI
gagagagcaagggacggggcgactattagctagtactagtagcgaaaaattaaggccaaacgacaacgacgcacggcggcatggcggccggccaccacgggcagccgccggacggggacgacgggcggccgtcggtcgtcggcggggagcaggaccggctgctgcccatcgccaacgtcggccgcatcatgaagcaaatcctgccgcccaacgccaagatctccaaggaggccaaggagacgatgcaggagtgcgtgtccgagttcatcggcttcgtcaccggcgaggcctccgacaagtgccacaaggagaagcgcaagaccgtcaacggcgacgacctctgctgggccttcggcgccctgggcttcgacgactacgtcgaccccatgcgcggctacctccacaagtaccgggaggtcgagggggaccgcgctgccgcagccgcgtcctcctcccgcggcggcggagaccaccaccccgcgtccgcgtccacgtccacctcgccccccgccgcagccccacccgccggtcatttcatgttcggcgccgcagccatcgaccgccccgacaacaacacctcatccgccaggcccttttgatccaacttctacttcgccagctgctctttaatttgcttgttattcgtcagatcaacaacaaaagctacgcgcttatcttattattttttactactgctcattttttgagaggtgaatcgtcataccaaatccaaattactagctatctctatctatctatctatgttccacagttccacacacataaatagcttatttgccttattccttattagtgctagctagccacaacaaaagctatgagcatgcatgtacccagtagtagctagctagaggaggtggactagagttcttgctgctaccgattcatctctggggtacgtatcatcggtgaataaggacttggggttgggacgatggtggatgaagacgaagaccctgccgcctactataccgcgagtcgatgtaactacttcgagtgcccatcatcgatgaatttgattcgattttttatt

SEQ ID NO: 18251 - DNA, 1509 bp, Zea mays
  Clone ID: LIB3079-005-H8_FLI
taaaatatggatgagtgatacaacatgtgtgaacatgcttagacttggtaggtctagtttctttcgcttttgtaagggctttagagactgaggtttacttgaagatacaatacacatgtgtgttgaggaacaagtggccatgtttttgaacacagtgggacagaaccttaggaataggttggtgggaacaaattatggtagatctggtgagactgttagtcgctacttcaacaaagtgcttcgtgctattggagagctacgagctgaacttattaggccaccatcattagagactccatccaaaatagcaggaaatccaagatgggatccctactttaaggtgtgatattcagctattcaatattctccttcaagaattttcactatttaaacccataagacccttaattgtattttggcttgtattggataaacataggattgcattggagctattgatggcacacatataagagcttcggtttccatagatatggaaccttcatttcgtggtagaaagtcttatgcccctcaaaatgtaatggcggtcgttgattttgatcttcgattcacatatgtcttggctagttgggagggttcagcacatgatgctttagtactaagagatgctttagagcgagagaatggccttcgtgtaccacaaggtaaatataggaggttctaaagttgtacttgtcaataatatttgttgttttgtggaattgtgaccaacttgtatataatatattaggaaaattctatctagtggacgctggatatggagccaaacctggatttttgcccccttttcgtgttgtccggtatcacttgaatgaatggggaaataatccggtacaaaatgagaaggagttgttcaaccttaggcactcgtctcttcgtgtcaccgtagagcgtgcatttggttcactgaagagaagatttaaaatacttgatgatgccacaccattctttccattttctagtatgaaacatagattgatgagggagatgttaatgctgttcctagtcctatagatgatattggggcttcatcctcagctcctagacctaggaagaaggcaaaggttactagtaatgaagaggcagggctgattggagcattcaaagatggtgctgaaaggcttgcaatggctattgagaaggctagttcagatgacctaccacctgacttgcttcaaacattgcaaagtattccaggttttgatgacacacacaaggccttttactttgcatatctagtgaaaaatcctggattagcaaggcagttccctactctcccattgacatatcagataagttttcttgctcggttcgttagtgagacctttccttagattatgaggaccgggaattaggactatgctggaggttaagtggaaattagaactatgttgttcttttgttatgtaaaccatgaccaatactttgttttcaagtactggtattgaaataatggctttgctatgtcgaaatactcggtttgttatg

SEQ ID NO: 18252 - DNA, 881 bp, Zea mays
  Clone ID: LIB3079-006-B1_FLI
catggatctgtcaaatatttcaatccagtggttccgtatacatccaaaagaaagcaacaaagagattatttcaggtgccacaagaccagtatatgctctagagccacatgacgtaggacgctatttgcaagctgaaatcgacgtaggcggcgaaatcgcagtagcaaagactgctgggccagtagaccctgatgctgggttggttgattatgtggagacgctcgtaaggaaacctgaaactgaattcaatgttgttgtgcttcaatccaatggcgtcgatcagccaaaagagtcggttcatgtactaaatgtcgggaggctgcggatgaggcttactaaagggaagtcggtagtcgccaaggaattctattcctcatcgatgcagttatgtggtgtgagaggcggaggcgaagcagcctcgcaggcgatgttttggcgacccagaaacgacctcagcttggtgctagccttcgagagcactcgagaacgcaacgcagccatcatgctcgctcggcgtttcgctgtagattgcaacgtatgcgccttcaccaagcgctatatcatccttgctgggccaggcgacaaaactccctggtgaacgaagatggcacctgtgctctgccgataccagataccacccagcacccaccactcctgactgtcctgctcttcctcgcgtcgtaggttcctgaaagaaggcgccgtccgcaccattttaaccgcctgggcgccgcctttctatgtccctgtgctatgttttcccagtccgcgagggttgtaatctgttgttgctgggagatgcgacagcaatgtaagctacaagtctaactgtgtttgacatatgtttaggcctcgttcggttggcctggaacggccctatt

SEQ ID NO: 18253 - DNA, 491 bp, Zea mays
  Clone ID: LIB3079-006-B9_FLI
cttccacaagcacctgctatagttgtgtggtgcaaacaccaaaatgttgcctgccaaagtgtcatttgttttcctgatagtgtactgcgcagtaacattttcgctaggtcagatagctgttggcgaggcatgcacagtggatcagagggacaagatcacaacggactgcagagagttcatcaagctgaaaggccccgtcacagccccgtcgtacaccgacgactgctgcgtcgccataagagcggtgcccaatctcgacatggagtgcatcattcgcctgctctccaataaacagaagaagaagtacgacgtggacaagatccggcggctcggcagcgtcctctgcaatccacatccggtgatgacgtaaaatggggtgtggcagtagtttctgatggagtgcatcgcgtcaacaatatggagcttgaactatacaaaccctactgataatgtgtcaccatttcatatgtatatgtactccattcattaac

SEQ ID NO: 18254 - DNA, 572 bp, Zea mays
  Clone ID: LIB3079-006-G4_FLI
cggcttcggcttcgtcaccttctccacggaggaggcgatgcggaacgccatcgagggcatgaacggcaaggagctggacggccgcaacatcaccgtcaacgaggcccagtcccgcggcggccgtggaggcggcggcggtgggtacggtggtggccgtggaggcggcggctacggcggtggcgggcgccgtgatggcggcggcggctacggcggtggcggcggctacggtggcggcggcggctacggtggtggtggcggcggctacggcggtggcaaccgtggcggcggctacggcaactccgacgggaactggaggaactgagcggtggggcccgcgcggccaagttatcctgttcgctgccgtgatgtttaccctagtccagagggtttatcttcgttcgtctcgtgtttgttgttgcccatctgtgtttttgattgcaaggtcgctctgtgtcagttgttagtgctgtgttcatcctcggctccagcagacccatgcatcaaacagcatggactgcggatcgatggatgctgttacccccgtcaggctttattctaagttaatcttaagg

SEQ ID NO: 18255 - DNA, 406 bp, Zea mays
  Clone ID: LIB3079-007-D10_FLI
ttaatggcaggcatgcatatataccatttcatagggtaacatctacaaggaacaaggtgaggataactgacaggatgtgggcgaggctgctgtcttcaaccaaccaaccgagtttcctgagccagaaggacatcgacgcggccagagaagccgacaaggcggccaaccgcatgaagagcagagaggacgcgaagaagcaatctacaccagtgttggcaaatggtgagaaatagtgtgcttttgacggttctttgttgtatgcagtagctgctgcaagctggctgagatcagtaggccaaaactgcgaggtcgatgagttttacttccatttgcatgcgaacagaattcacgtaataaaagcttcatagtgtgtatttgcgttagtaaacatatactggtgcgctgc

SEQ ID NO: 18256 - DNA, 1078 bp, Zea mays
  Clone ID: LIB3079-007-G2_FLI
gtccaattgagctctccattgtctgctatccgagagcatgtggtacaaactcgaccatcggcaccagtgaatgaattgcaacctgtgcaaattgagtgcttgcctgaggtgtccgtaagcacagctggaactgcagctgagaacattcagcaagtccagcaaagttcgaaagatattcaaagcaagtcccagggcgcttcaacaaggagctgtacaaaggttcataagcaaggagttgcgcttggccggtccgtggacctctctaaattcaccgactacggtgagctcaaagcggaactagacaagatgtttgagttcgagggcgaattggtatctgctaaccggaactggcagatcgtttataccgacaacgagggtgatatgatgcttgtcggagatgacccgtgggaggagttctgcaacatagtgcgcaagatctacatctacacgaaggaggaggtccagaagatgaactcgaaatcatccgtgccgaggaaggaggaacccccagcagcaggcgaaggctgcgccgccgccgccgcaaacgagtaggatgtctgcctgcactgcagcaagcagttttagatgactaggtcgtgtggaggaagccgacgatgatgcatgcgtgatgaacccgttccttgtgcaggaggtggtgccagcccgggtcccagggaagtaaaaactcctgagatcttttgcttgtccgttgcagccccatcccccgtccgtttgggttttagttgggaacgtagaaactactgtctccgcctgcttctccgaagctcgctgttggtagcaagttttattgctagtattattgttattgctgatttgctcccctctgcctttgcgatgtaaatatttgtgtacccagccccagccccagccccagccccagcttgtagtgagcagtaacaagcagtagcggtaccttcggtattaaccggcagctagctatttcgcggcattttaatccctgtaagcgtagctctgtggcgtgagatagatgacaaacactgggtatatgtatgtctgatctttctcactgaatgtaccataagagagtttgtagagt

SEQ ID NO: 18257 - DNA, 721 bp, Zea mays
  Clone ID: LIB3079-008-A4_FLI
ccacgatcccgacaattggattcaacgttgagacggtgcagtacaacaacatcaagttccaagtatgggatcttggtggtcaaacaagcatcaggccatactggcggtgctactttccaaacacccaggctatcatatatgttgttgattcaagcgatacagataggcttgtaacagcaaaagaagaattccatgccatccttgaggaggatgaacttaaaggtgcagttgtccttgtgtatgcaaataagcaggatcttccaggtgcactcgatgatgctgccattacagagtcattagaactacacaaaattaagagccgccaatgggcgattttcaaaacatctgcaataaagggagaggggctcttcgaaggtttggactggctcagtaacacgctcaaatctggaagcagctaaggagcctccgcctcgtcatgaatcatttgctggatggtaaagaatagccgatgcttgcaagtcagcgcgcaaatcccattctctttgttttaactccagaagttctacaccgccatcaattatctgtaaagtgcgtgttaaattttttggatactacattagatgtacccccaggttgagatcaagaataggtctgtggaaaatgacgagcaaactgtgctactgtctttacccgtaaatctcatggatcatgacaagtttttttttgtaccccaatatgattaaacttactccacatttct

SEQ ID NO: 18258 - DNA, 984 bp, Zea mays
  Clone ID: LIB3079-008-C5_FLI
cgagaacgccaaacgagaaaagaaacccaagccttcgccatcaaaaaaaaaagaaaaaaagaaaaaaaagagcagaaaaagtagagtagactacgacagcgtccggcgaggaggcggaggcgaagatgaggaagaagctcggcacccggttccccgcggctcgaatcaaaaagataatgcaagcagatgaggatgttggaaagattgcactagcagttcctgttttagtttcgaggtctcttgaattgtttttacaagatttaattgaccgtacttatgaaattactcttcaaagtggagcaaagacactgaattccttccacctgaagcaatgtgtgaagaggtacagttcttttgatttcctaactgaagttgtcagcaaggtaccagatcttggtggcgctgattcctgtggagatgaaagaggattacctagaagaagaaagtcaaatggcagtgacccagagaatgatgaatcaagatctagtaaaatggccataagaaatgcaaacatcagccccagaggacgtgggaggggtcgaggcagaggacgaggtcggccaccaaccaagagaaaggaggttggttatgtacaatttgaagatgagagcagcatgtttgctgaacaaggtgagcccttgccaggagaggaaacagttcaagagatcaatggcaacgagaccatgcctcaaagcacgcaacctccagtagaggctccgccaacagcccttgcacaagctacaacaagttctaaggcggaagaagcgaacagtgatcatcagtcagattggcctatgccagatgccattggaagcatcggtgtcgtgccatctggttttggacatctgacagtgcaggttgaagatgaggactacgacaatgaggattagtcagggtcatcttctcattgtatgcactaacaggactgttctggtgttgtaaaatgtaaatatagtttgaaatagttgccgcagtttacctgtg

SEQ ID NO: 18259 - DNA, 991 bp, Zea mays
  Clone ID: LIB3079-008-F4_FLI
ctccgcagtgcagacgcagcgcatgcaggtagcaatggcgggggagacgaagaagggcctggtgctgctggacttctgggtgagcccgttcgggcagcgctgccgcatcgcgctggcggagaagggcatcgcctacgagtactcggagcaggagctgctgggcggcgccaagagcgacatcctcctccgctccaacccggtgcacaagaagatccccgtgctcctccacgacggccgccccgtctgcgagtccctcgtcatcctcgagtacctcgaggaggccttcccggaggcctcccccaggctgctccccgacgccgcctacgcgcgcgcgcaggcccgcttctgggcggcctactccgacaaggtctacgaggccggcacgcggctgtggaagctcaggggcgacgcgcgggcgcaggcgcgcgccgagatcgtgcaggtggtccggaacctcgacggcgagctaggggacaaggccttcttcggcggcgaggcgttcgggttcgtggacgtggcgctcgtgcccttcgtgccgtggctccccagctacgagcggtacggggacttcagcgtggcggagatcgcgcccaggctggcggcgtgggcgcgccggtgcgcgcagcgggagagcgtggccaggacccttcacccgccggaaaaggtggacgagttcatcaacctgctcaagaagacctacggcatcgagtagtagagcggactactactagcagaggagatggtaccggccgtacgtacgtggctgccatgcagtttttgtttcggtttgtttaaacgggactccatgaatggatggaactcttcttgggctccgtgtgctacatacacatctgtaaaggtgaactaaaatcacggtaaaaactcggaaattagtttgtaaagggtccagcccccctcctttataaatagagaggtatacggctgatttgtaatcatcaatcgaatcaatacaacatctatttcgcatttt

SEQ ID NO: 18260 - DNA, 1374 bp, Zea mays
  Clone ID: LIB3079-008-F9_FLI
ctgggaagagctcgtgagccgtgcattgaaggcaatggccgctgttcgtagatgctgcctgctggccgcggtgctgctgtggtcggcgctcgcttcagcggccacggccgcgccggcgcctgtggtggccgggccggtgtccagggtggaggacgccaccatgttccggatatactacggtcagagcttcaaggtcatcaagaactccggcgatggcaagagctaccttctcatgcagaacacgtccaagatggcatccaagacgaagtactgcacggggaggattaagtcgttcgtcatccccctcgccagcttctccgtcgacaccacgacctctccagtgtcattctttgagctgcttggagtgctagagagcttgaaaggaataacatcgaaccaagtcgcttctcagtgcgtgctccagtcatatacaagtggaaatgcccagcttgtgaatagaactgatgtgcagacactctcgcagtttactgcgcatttcataagcgatacagatgaagacagaggttgcaactttgcagcatatgtacccttagaagagggcacaccattgcagatggctgagtggatcaagtacctgggaactttcacaaactctgaaaacagggctaatgctgtctacgatgcagtaaagacaaactacctgtgcttaagcaaagtagctgcaaaccttggcacaagattcaagcctgtagtagcgtggattgaattcacacagggaatgtggacatttgttaaagaaagttacatcttacagtatgtcacagatgcaggagcagaaattgttgatgcaactattacggataagagatttaatagttcagatccagaggatatggataacttccatgctattctgtgtacagtggacgtggtcatagatcagacatatgctttggagcctgcagagtacaaactatccacctttttggagaatattaatgttagccacgactcctgttacagttttgtatcaaatcgcagcatatggagatttgacaaaaggataggagcttctgggacacttgattggtccgatggagctatctcacagcctcagttggttcttggagatctcatagaaattttcttcccaacggggaactacataacaatttacttcaggaatcttgcaaaggatgaaggggtcacagagattggtcctgaaatgtgcactaggagcatatccacacccatggatcctataatcctgtcatgtgaatgatgaacccagatgaacacgaagagttgtcaagctactgtactaacagacagtggcaactagttgacagaagcatttaagttactgacaaactgatctggacagaagcatttgcaacaaagattagattacac

SEQ ID NO: 18261 - DNA, 1065 bp, Zea mays
  Clone ID: LIB3079-008-G2_FLI
gctaaacccccacgccgccgcggcgacctcctccgccggcgggatggacagcctcaggggagtcaagttgccgggcgtgccgaagggcgggagtgcgctcgtgaaggtggcgctgctcggcggcgcggggctctacgccgtcctcaacagcttctacaacgtcgagggcggacaccgcgccatcgtcttcaaccgcctcgaggggatcaaggacaaggtgtaccccgaaggaactcacctgatgatcccgtggatcgaaaggccgatcatctacgacgtccgcgcccgacccaacctcgtcgagagcacgtccggaagccgcgacctccagatggtgagaattggtcttcgtgtccttactcgacccatgccagaccagctacctaaaatctacaggaacctgggggagaacttcaatgagagagttctgccttcaatcattcatgaaacactcaaagctgtggttgctcaatacaatgccagccagctgatcacccagagagaggctgtgagcagggagattaggaagattctgactgagagggccaacaacttcaatattgctctggatgatgtgtccatcacaagcctcagctttggaaaagagtttactcatgccattgaagccaagcaggttgctgcacaagaagctgagcgtgccaagttcattgttgagaaggctgagcaggacaagcgcagtgcagttatcagggcacagggtgaggctaagagcgctgagttgattggccaagccattgccaacaaccccgccttcctggctctgagacagattgaagctgccagggagatctcccacaccatggcggcctccagcaacaaggtgttccttgattccagggaccttttgcttggtcttcagcagctgaacgtggggggcaagcaaaagaagtgaagcggtcgtccccaggccatcgcggatgagagtagtttcaggcgatggttttatctgttacagaatgcgcatgcgcgggaatgaacaaagtggcaccatgttgcagtctgtatgtactgacaagtttgtctatcgatctttgattctctgct

SEQ ID NO: 18262 - DNA, 2288 bp, Zea mays
  Clone ID: LIB3079-008-H3_FLI
gtcggacataaaaaccagaaaaggggcgtcgaacctagggtttcgtctgtctcccgacgccgccgctaggctttgcgcctttgcctgcatcactcgctcattcggagcccctctcttcgccggcgtcgtaagaagagatggcagagcgtttgacccgtatcgccatagttagcgaggacaagtgcaagcccaagaagtgccgccaggagtgcaagaagagctgccccgtcgtcaagactgggaagctttgcattgaagtgacttcggcgtcgaaactcgctttcatttctgaggaactgtgcatcggttgtggtatctgtgtaaagaaatgcccatttgatgccattgaaatcatcaaccttccaaaagacttggaaaaggataccactcaccggtatgggcctaataccttcaagctgcacaggttgcctgtcccgagacctggtcaggttttgggccttgttggaacaaatggaattggaaagtcgacagctcttaaagtgttggctggcaagctgaaacctaacttggggcgcttcaaaaacccgcctgattggcaggaaattcttacatacttccgtgggtctgaacttcagaactacttcacacgcatattggaagataacttgaaggcaatcatcaaaccgcagtatgttgaccacatcccaaaggctgttcaagggaatgtaggacaagtgcttgaacagaaggacgagagggatatgaaagctgaactgtgtgttgatcttgaattaaaccaagttattgaccgaaatgtaggagatctttctggcggtgagctccagagatttgcaatagcagttgttgcagtgcaaaatgcggaaatctacatgttcgatgagccatcaagttaccttgatgtgaagcagaggctgaaagctgcacaagtcatcaggtccttgcttaggcccaacagctatgtcatcgttgtggaacatgacttgagtgtcttggattacttgtccgacttcatttgttgtttatatggcaagccaggtgcttatggtgtggttaccttgccattctcggtccgagagggtatcaatattttcttggctggatttgttccaacagaaaatcttcggttccgagacgaatctcttacatttaagattgcagagactcaagaaagtgctgaggagattgagacatatcagcggtataagtaccctactatgagcaaaacacaggggaatttcaagcttactgttgttgagggtgaatttaccgattctcagattgttgttatgcttggtgaaaacgggacagggaaaactaccttcattagaatgctggctgggttgttgaagccagacacagtggaaggaactgatattgaaattcctgaattcaatgtgtcttacaagccccaaaagattagcccgaaattcaagaacaccgtgaggcatttgctacaccagaaaattcgggattcctatatgcaccctcagtttgtgtctgatgtaatgaagccactgcaaattgaacaactcatggaccaggaggttgttaatttatctggtggagagctccaaagagttgctatatgcctctgccttggaaagcctgcagatatctatctgattgatgaaccaagtgcttatcttgattcggagcagcgtattgtggcctcaaaggttatcaagagattcattcttcacgctaagaaaactgcatttattgttgagcatgatttcatcatggcaacatacttggctgacaaggtcattgtttatgaggggcgaccttctattgactgttctgccaatgcaccacagtctttagtatccgggatgaataaattcttatcgcatcttgacattacttttagaagagacccgaccaactataggccacgtataaacaagttggactctacaaaggacagggaacagaagtcggccgggtcctactactacctcgatgactaatgaggaagcacagattcttcttggagagccatatggcgcatagtctttcgagggcgcggagagtgcggaaacgagaagctactatgaagctaccacactacatggcatgagacttggttgcaggagtagagtgcgccggttataacttataaagcagagcatgctgtgttgatactggttttttttccctttttggcttgacctatatgaagaaaaggattggcgttaaaatggtattgtgaagggagaggtttttaagcaaaaatgttgtaccgtcgttttgccatcgagtatatttgaccctcgattatatagatcacattaaatttttggagc

SEQ ID NO: 18263 - DNA, 711 bp, Zea mays
  Clone ID: LIB3079-010-C9_FLI
gcttggacagggtgacaacagtgtgaagcccgctaaagagagtggttgcaaaaatctctactccgacccccacctaaggcaccgactcgccggggacagagagagaccgacgcgccggcagatcccaagctcaccggagagggggaagagggcgaccgaaggcggcgatgggtttcatcatggacttcgcggagaatatgatcctccgtctgatggaggacccggacaagcgcgaccaggttcggcgggagcatgtctacaagatgaaggagcggtgcgagcgcactaaggcggcgtggagcctccctctgcgcccctacggcttctggaccttcgaccgcttcaactcgcagctctcctgggatccccagatcagccaggccgccggccgtcgggacccctacgatgacctcatcgcccgccactctggctcgccgccgtcttcctgaacacccgttccgatctttgcccagaaggtctacttgggcatcaataagaaactctttcccctcaaactgattgtggttccatcctcttctgtctggaaaatgttgtcaccaaactaccctatttcctgttccagtttggcatggaagtataagttgtgtacttctattctcaagttgttgtctttgtattatgaaatgtttccaataatcagcagtttttgatgtatggtcgtggatccaaaggtggttctgtgctcggttt

SEQ ID NO: 18264 - DNA, 655 bp, Zea mays
  Clone ID: LIB3079-010-D5_FLI
gatgcttgctagcaatacctcatcagccagttctgacgtcaaaacatggcaggctttccctgatacacagactcaggcccgaccaaaggtcgatcatggaactaacggaagccaaaacataaccaagaacacaacatcaggtgcttcccccgacgcgtggggttttggtactgatagtttcagaacatcgtcagcaccagtaaaggctgctacacagatcaacagggctgcccaagggagctcatcccaaagatttaattctggtgtggccaagaaggtagagcaaccatctggatgggctggtttttaactccacatcgacatgcgttaaccatcattctggtcaaaatttgcaatctgcgttacgcaacagttgccgacggagttgtgatccttggccggcccctgggcgtcaaaatcggttatcttgagcgtgttcatcattttggttgaaccaacttagacattggttcatgggatcactttacccgttaataagtaaatgtgtattgacagtattgtgagtgtttctgtgtatggtgattatgaacatgaacggatgaatgtaatgtctaaatgccaagatataccgtctcataacaaagacttgagccttctgagctcaaaacagagagctagtcatatttgtcttttt

SEQ ID NO: 18265 - DNA, 1169 bp, Zea mays
  Clone ID: LIB3079-010-E5_FLI
gaacttctaaagcagagtctgatggtatgaagaaggggatgaaaataccgaaagtagaacctgatgttatggactggaaaactcccaaagcaggatctgatgttacgaagaagggcttgagatctccaaaggcagaatgttgccagcctgtgattgagagcgttaaactaaagctggcagagattttgaatactatatcaactcaagatgactgcaaaatgttgcaacaccaacttgatacccagaggaaaagagctagatataagaagatgattcgccggcatatggacttccgaatgcttcactctaagatcaagagtggcgcaatctctggcaccaaggagcttttgagagatatacttattttcatcaataatgtaataaccttctatccgaagactacattagagcacatggctgcggttgagcttcgtgactttgcatgcaaaactgtgaagcagagtgcaagcttgttcttgaaaagccatcgagagaccagaacagctggtgcccctgtaataaagaagaatgctcgagccctgcatttttcaagaacaagcttgcactctggggatgcaagggcaagcaaggtttcttcaagggatgctgctgccaaggaaggggatggcaagagaccttgcagtgatgagctggctaatcaaaagactacaaagagaaatgagccagccaagaagaggggtgtgggtcggcctccaaagagtgggcagaggattgctggggcacaggaaaatagccccatcaaaggcaggaaaagtagcgctggggcacaggtagatagccccagcaaaggcaggaagaggagtgtggaagcacatgatgatagctccagcaaagggggcaagaggagccggcggtgaagctaccatcagctcaatgccggtgaaactgtgtacagcttaaccatatatcataggctgttcccttccggtttgtttacctgacaaaaaaaagttattgtcccagtattcaaactgatgtaacaggaagggttagttgtttctgatgttgttttgtaaggagtaaggacaattagaagggaaccctcatttttatattgagattatccgagttaggctatacatatctgaccatgtaatgcttatagtagtttaagttgttataccatgtgaactgatgcttgaacaccg

SEQ ID NO: 18266 - DNA, 1313 bp, Zea mays
  Clone ID: LIB3079-011-G7_FLI
cacttcttagttaccatctccagcgaccttcctcgggggtgctagccggatccgcgatcgtcgaaatcccaagctcctccacaggcccgagggtcggtcgtcctcatggcggggatcctggcgtgggcggctgacgtggtcggcggggccggcggcagcgacgacgaggcggacgacgacgcgcgcgccgcggcgtcggccgccatgaccccggcccagcggctccgcgccgccgacctggacgcgcgggcggcctcgctgcgccgcgccatccaggacctccgcctccgggtgcccccgccgcacgtcgcgcagcgcctgccccacctccacgccgactcactcgcgtcgtccgccgcgctcgcgctccagctcaacgcgcactcctccaccaaggagcagacccaacaaagagaagtaactctccaagaagaaaatgcagcctatgagaaagctatatcagagtgtaaacagaaaattcaggaaaagcagatggaggccactcagcttctgagtaatctggaggaaatggaagtaacagagcataatttaaagacacagcttgaaaatgctctgaaggagctagaggctgctcaacataaagcatcaacagcaacctctggaacagctgaaaatgctctactggaagctaagtcagtgactgaccttaaatctaaagatttggaggagaagaaaagggagcttgaactattggataacaaggtgcaaacattagagaaagagtggtctgtggttgaagaagaatctttaaagaaacccactcctgcacaaagggagaaggtcctggagaggcaactgcatagcctcatcgagcagttgacagctaagcaagctcaagctgaaattctggccactgatgtgcattccaaagaaaaggagctggaacggctgaaccatctgcatagaaacctctacggcggtgccaacgaaactggcgcaccccggagccgcctcagcagaggcctcttgagcggccctgaagattactattacgaccctaaagcgggccggaaaccgtaccaggctggcgctagaacagaaggccagaaccggctgatgatccttaggtccgcaattgtactgtatgttctgctgctccatgtcatcgttttcataaagatatcagtctgaaagcagttgagctagcgcttcataagttcatatagggaaacagatacttgcttttgtgttccaaaccatgcaaacgtttcttgttgtaaataactttgtatgtgagtatgtatctcgtttgatggatctataggagagttatatgaaatacctgttgtcat

SEQ ID NO: 18267 - DNA, 1395 bp, Zea mays
  Clone ID: LIB3079-012-A1_FLI
cgcaccttctgttggctcctcctccgtcctcccccaagcgccccctctcggccggtcgaatttccggggagggggattggggggatttgatatatatcgagagagtagtgtttgtcccccgattcctcatgcgtggcgcccaaaacctagagatccttttttgcgcccgaaaccttcctgagctggtccgattcggtgccgttagaggggatctgtgtacctcgccgccggccggcgctgtcgatctggttgtcttccacggttggtttccagacggggactccgccggcgcggcgcggcgcggcgctcacccgcatccgccgccgcttttctaccgcccgcggggctgggtccggctctgacggttgagtctggtggcgcaggcggaactgcaccccatggaaatggaatcgagagaacttacacgctgcttcgcaaccgtattatgcagttattactgaaaagataatacagtacctatggcttctctggacgccgtgcgaggagacctcgccctgctgattctgtacctgaacaaggccgaggcgcgggacaagatctgccgagcgatccagtacgggtccaagttcatcagcaacggggagccagggcctgcgcagaacgtcgacaagtccaccagcctggcccggaaagtgttccggctctgtaagttcgtcaacgacctgcacgctttgatcagccctcctgccaaggggactccgctcccgctgatcctactcgggaagtccaagaacgcgatgctgtcgactttcctcttcctggaccagatcgtgtgggcggggaggacaggaatatacaagaacaaggagcgggcggagtttctcgggaggatagcgttctactgcttcctcggctccaacacctgcacggccatcatcgagctagccgagctgcaacggctgtccacgtcgatgaagaagctggagaaggagctgaagcaccaagagctgtacaagaacgagcagtaccgcatgaagctgcacaagtcgaacgagcggctgctggcgctcgtcaagtcgagcctggacatcgtggtggccgtggggctcctgcagctggccccgaagaaggtgaccccccgcgtcacgggcgcgtttggcttcgccagctccctcatcgcttgctaccagctgcttccaagcccaccagcaaagcagagcaagtgaggactcccactccaagcactgtttaccaggaaaataatcccccccggataggtttgatttggttgccacatccccttgtatggcagactagactaatatatgtaatcatcatcataataattgataaaccatcccactatggataggtttggtcactccaaacactgttttttttattcatcgctaggagcaactccaaaagtgtgct

SEQ ID NO: 18268 - DNA, 603 bp, Zea mays
  Clone ID: LIB3079-012-B1_FLI
gccttgagaagaaaacatccaaggtcaccctgtttgcattgccgctctgcttcctgtggcttgtcattgcatttcacttgggccggctgcagactaatcttgccaggcttcaggctgcttctgctccgtcctactcctgaacaggaagctgctgcgagtgtctttggagatgtgcttccagaatgtttgaacaggcatggcgagaagtggttgtcatcaatagttagttacttagtttacacgtcttgcaggaatttcaggttttattgatggagaaaccttcagaatacagtagcaaccattactacactacagaagagtttagcatacacaaggggggagaaatagtacaccatagacatagactagcacactatatacaaattcaatatcccatttcgatgtgcactgcaggaaactgtagcatgcaatctgtgagtttattataaatgatgtagtagtagggccggatttgttgggcactgctctgcctttggaactactgctgtcctgacagacactgcatcattctgcatttcacctaccccagttcccagactaaatggctgtaaagacagattcataaaaatgtctgctttatgg

SEQ ID NO: 18269 - DNA, 1407 bp, Zea mays
  Clone ID: LIB3079-012-B5_FLI
gcggtctcttccgtctcggaggtgggagagagcgatcagcggcgtcgccgggtggatccaaagcgcgcgagaaaatgcagggcggatccagcggcatcgtgtatggtggcctcaagtaccaggcgcggtgtatcgccgacatacgcgcggacgccggctcgaccaccttcctcgccggcaccctcagcctcaaggaggagaacgaggtgcacctgatccggttttcgccggcggagagcgagctggtgtgcgatggcctcttctaccaccccaacgagatttgggacctcaaatcatgccccttcgatcacagggttttctccacagtctacacgtctggtgagggctatggtgcatcagtttggaagatcccggagctcaatgggcaatcaaactcaccacaacttgagcagctctttgagcttagtgggcatacgggcaagattagacgtgtgatctggtggccacttggaaagcatgataaactaattagcattgatgaccgaaatatttttctttggaacatagacacgtcaaaaaaaatagctaaggtgatctcacagggatcaactgacatgcttccaaatttacgtggtggagcttgggatccacacaatcataatttagttgctgcaatatctgattcatcacttcagctgtgggatctacgttctatggaaaaatcaactgcaattgaacatgcacatatacgggatgtggattataaccccaagaagcaaaacattgttgcaacagcagaagaggaatttggaattcgcttgtgggatctcagaatgcttaagtatcctctaaaagatctccctgggcactcacattggacatgggctgttcggcacaatcctgcgtatgatgagctccttctgagtgctggaacagattcaactgtaaatttatggttggctaaagttagcagtgacgatcctgaatctgatagcccttctgctttatccaataggcaagaagtaccattactcaactcatatactgactatgaagacagcatctatggtattgcatggagctcccatgatccatcattattcgcttctttgtcatatgatggaagggttgtcttggaatcagtcaagccctacttgcagagaaaatgaaccttgtctagttttctaaattgtaaggtgcaaaatatggtttcttgtttcctttatcttgtccttattattactgaagttacctcatgtcctaataaactgttctcttcctgctacatgtgggcttgtttgttcatattggaagctgagtagctttgccttgccattctgtagcctcttaacaagcatttatgtgatgattcggtttactgttgtagcaatggcagaaaaatggataacaagattgttacagaaatcaatttttaggatgttgtat

SEQ ID NO: 18270 - DNA, 807 bp, Zea mays
  Clone ID: LIB3079-012-B6_FLI
ttgaggttttgcaaaggcttgtgaactgtcttgatcactgtgcctcaagaacaggatcactgcctgttcaaactgttggccttttaccgttacactgcagcagattttcgctgagctgtttgcagatgatgttttctttatgcagttgcatagggaacgcaaccttgtgtgctgcagcatcagaaaccagcaaagtttcaatttccattctaatgaagcgatgtgaggttatattgggtcaatttttggccgatgaaaatgatctaggagaacatcctttgcctagtgtgagggttgaagaaacgatctgtgttcttcaagagcttgctagactaattatagacattgatgcagcgaatactctcaacatacctccatatctgaagcaagctttgggggaaaacaaatcccatggacgggctcatttattgtctttgcttcccactttttctgagcttgttgtctcaagagaagctagggtacgggagcttgtacaagtgctgctcagactcatttcctcggagctgggactacatcagctgacgtaacaactaatgatgaaactctgttttctattctcttgctggaggaaaatcatataaccttgtcagtattgtccccttctcttacaaaattgattttgtatatccatcgtgacaggcaaattaggtgcttgtcacatgtatctaagaacagagctgtgtatgtaacattttgttgggaaaatatggtggctgtttctggagtcactaggtgtacaacccattctttcaacgttttcttacgcaagaaatccattctgccact

SEQ ID NO: 18271 - DNA, 435 bp, Zea mays
  Clone ID: LIB3079-012-D1_FLI
ccggtcgggtcagttgccaccggccctgccacgacgagaccaccacggcactgatgtgatcgatatccatacgtccgctagtgaatactagtgtgctagggaacgaatagaagacgcaatgaaaccagtaaaagaaaagcttgtgttgtcctgtcgtggcagggccggtggcggtgagcgggcccggacctccctgctttctggggccggccggtcgggtcagttgccggaaatgcccccgtggtagactagtagactgtagaccggagcagagttttggacttgacgatggcgtggaagaacaccaagaaatcaaccccacatctgctgtcgtgtcgggtcgggtcggttccatctgcggctactacctgcgtccagctatgcatatgtacgtgtacaggtttatttatttacatacaacagttttggcagtat

SEQ ID NO: 18272 - DNA, 553 bp, Zea mays
  Clone ID: LIB3079-012-G4_FLI
aacattctcatcaagcttatggcggttgaatcccttgtcttcgcccccttcttcgccgcccatggtggcattatcttcaaatggctctaaagatagcgacaacgttagttagtcgcaagagaaaggccgcagttctgcggctgcgaggggaatagagcagtatgtcagctatacaacatctatggcatgtgctttgctcctccacttgattatagcccccgttgtgtgtttcggtttctgttttcctggagtttttggttccaggcttccgaccatgttttgatcccataaattctcctccagccttcgagcaactgagtccatcttcgtaagtcatcagccctagccagacattgaagcatcggaaaactttaagggcttgttcgttttggtgataatccacatgtattgggtgggattgagccggtttaaatccataacaagtcaaaatacatctcaatctcacccaatacacttcaatacacatgtaatatcaataaccgaacaagccctaatagtttttagagatatggtgatgattatgatgatgatt

SEQ ID NO: 18273 - DNA, 419 bp, Zea mays
  Clone ID: LIB3079-013-A12_FLI
gtcaaaggaaagttttttccatggtccatgttatcaaaaatatttacaccaaatgagggcctcaaaggcagaactaattgatcctttacagcaccgtgtagtatagccaatagaaatcaacagacaaaaggaaagcgagaaacacaccgtggatcactggtcaacctacagtatctactactagctgcctcaagcgcaggctagtgggtgggcggccatggcgggcagtaggctgaaacccctgagaaaaatggagccaataatcagactcgggtggtaacgtggagggcgtgcggcggcggcggcgggggcagaggcggcggcacgaaggggaggctccgcagcatgaggaagcgcatccggcgcgggaacggcgcgtcgttgagcagctgctccagcacccgcgccaccagcgcccc

SEQ ID NO: 18274 - DNA, 1380 bp, Zea mays
  Clone ID: LIB3079-013-B9_FLI
gctgagaaaagcaagttacaaaggaacgaatggtttggtgttctccttagaataaggaacaatgctatcattgtgctggctatcatctgtcttcagttgccatttgagttggcctatgctcatctatatgagattacagaaactgaggctatgaagtatttgttgactgcagtatatcttgttgcaattcaatattacaccagaattggtggcaaggtgtctgtcaatttgataaagtatgaaaacaaccaaggagaagaatcgagttccgctagtttagtttataaggtctttggtctttactttatgcagtcatatattgggttattttaccatgcttcattgtatcgtgatatactggccctccgccaagtcctcatccagcgtctcattgtgtcccaggtattggaaaatctgattgagaattccattccttaccttaagtacagctacaaaaagtacatagctgttcacaagaaaaagcatgagaaagaatcaccagtgggtaggtcagtgcggttatcaacaagagtggagaaagagtatttaaaaccctcttatactgcgagcattggagcagaacttgaagacggtttatttgatgactttctggagctggctcttcagtttggcatgatcatgatgtttgcctgtgcatttccattgatattctgctttgcagctctgaacaatgttactgaaatcagagcagatgcattaaagttgctagtcatgttgaaaagacctgagccgcgtgctgcagctacaattggagcatggttgaacatattccaggtttactagctgaactttttaatttcactacttgtgagttgtgggaatatgcatgtcctgattcactctgaagtttgttttcagttcttggttgtgatggcaatatgcaccaactgcttgcttctcgtttgtctgtatgacgaggaggggaaatggaggattgagccaggactagcagcaatcctcataatggagcatgctctcctcttaatcaagtttggtttctcacactttgtgcctgaggagcctgcgtgggtgaaagcaaatcgtgtgcgatatgtagctcaggcacaaaacgtctgctccaaacaacttttgaggagcatttcaaaatttgacggaaaactggattgagaaacatcatgcacagtttagcggttatcgctggttttgtagtttaggtagagcggttttgtatagtacaaagatgtacaaatctaggggtgtaatatcttgatgcatatgaccgttaagtgtagatattaggtgatcgccacctatcttaccagcaaatggtgaagaatgcccacaagtgtaagtcagtttttcccctctttcattttaatggtctgttgaattgaacgg

SEQ ID NO: 18275 - DNA, 486 bp, Zea mays
  Clone ID: LIB3079-013-E1_FLI
aaaatgttgtatgaggaattcgttcaacgcttggaattcaacaagaagaaggtggcaggagaggttaagtgccacaagtacagccggcgcaagccagacaatggatggagctacatggtcgaaaagcttggtcctcagggaaagcgtggtggaggagggggctggaagttcatcagcttgcctgatggatcaagccgtccactaaatgatatggagaagatgtatgttaagcgggagactccaaaacggcggcggaggataattgcaccatacaagtgacatggacaacttcagtttgctgaaatgcaaattttctcaactgtcttttgacattgtccagcgaggctgaagcaagaaactgtgaagtagtttggaaccgccagaacagctcctgtttttttcacagcacagtagatggtttgatgtgttttgtaacaaggattatttccccacattttggcagccgaataattatcttttaaactt

SEQ ID NO: 18276 - DNA, 860 bp, Zea mays
  Clone ID: LIB3079-013-H2_FLI
agccggcgccagccatttcttctacattctcaatctcaacggtgcggctctcgttctttctttctttcttcctttctgtttgctgcatcgatgtagggaggaggaggaggaggaggaagcaagtatccatctgacagcagggtgccccccaatggcgacaagatcgacatctacgatttcggcgtgatcctgctcgaggtcgtgaccgggaggcccatcacgtccatacacgaggtggaggtcatgaaggagcagctgcagtcggcgctgacgtcggagagcccggggcggcggagggcgctggtggaccaggcggtgagccgggcgtgctccgacgagtcggcgcggacggtgatggagatctgcctgcgctgcctggccaaggaggcggagcagcggccgtcggtggaggacgtgctgtggaacctgcagttcgcggcgcaggtgcaggacgactggcgcggggactcgcggagcagcgccagcgaggagtcgccgctgtcgccgtcgcagatcccgccgcggagggacagggagaccagcgcctggtaataagccaagcccgctctaggtgactgttgttgggcgatccgattaggcggcgaggcaggcatgcatcaagtgagatttcgttggtaaacaagtgtacagcagctgcaggctgcagctgaagctggaaacccaccacaggatgtgtacagctctttgcttcggcctactagtactagcactgctttattttatttttttcaatgcgtctttgccacctcattgattcacctactatatggatcgtttgactatgtgtaagcacaactgtatttggcgtcaatcttaccagaggtctcagttgtaggacc

SEQ ID NO: 18277 - DNA, 1105 bp, Zea mays
  Clone ID: LIB3079-013-H8_FLI
gccaattcccaagcagggagtggttcatcaattaatgagcggacgaattctgggttttctcgcggttcatcagaggctgggttagatgaagatcagtcctcaaccggtaagagtggggactcatcattttttgctggtttcttgaagaagggtttcaaggacctttctttattaaataagtccatggatagcgttaaggtttcaattaatggtcatccaatctctgaaagagcccttaagaaggcagagaagaaagctggtcctgttgacccaggttcatattggtacgactaccgtgctggtttttggggtgtcatgggacgagaatgtatcggcattgtccctccatttattagagaatttaattatccgatggccagaaattgtgccggtggggattctggtgtttttgtcaatggcagagaactgcatcaaagagatttagatctacttgtaggaagaggactaccacggacatctggaaaatcatactctcttgagatgtcaggaaatgtaattgatgaagacactggaaaaaaactacgcagtcttggaaaacttgctcctacgattgagaagttgaagcgtggttttggcatgcacgtccctgaagagtttagatagctggttctagtacaggatcttggttttgctaataatacactcttcaaagctgacaatggggtggcaaacgtgtggcttctgcgggacggtggtatcaaatctcagatttcttggactggagctctggaagcagcagtacttaagatccttggtgtgcggcgaaggttgtctggcactcaagaaaccaagataatctggtctaatgacttgactaccaatagtacccctcctgctaatttcaattgcttcaatggaagcgacgtgtgctgctagtgactctagattatcaggcagttcttaacttcactgctctgcctgtacgtgctattccttgaatgtgttatcattatcggtacattgccccatcacaggcatagaagtgttgtcagatgtaccatgagcaattgtcggcttgtaatatattggtagagatatgcttcccctaatatttatatgtatatatatgtgatcttgattcttg

SEQ ID NO: 18278 - DNA, 147 bp, Zea mays
  Clone ID: LIB3079-014-F11_FLI
gttttttgtgtactccctggactacgcgagaacaaggttggctaatgacgcgaaggctgccaagggaggaggtgaaaggcagttcaatgggcttgtcgatgtctaccgcaagacactcaagtctgatggtattgctgctgggattac

SEQ ID NO: 18279 - DNA, 1089 bp, Zea mays
  Clone ID: LIB3079-015-A10_FLI
cggcggtgctgctgctgcagcacgggggagccgcgagcgccggcggcaacttctaccaggacgtggacatcacctggggcgacggccgcggcaagatcctcgacaacggccagctcctgacgctgtccatggacaggtcctccggctcgggcttccagtccaaggcccagtacctctacggccgcttcgacatgcagctcaagctcgtcccgggggactccgccggcaccgtcgccaccttctatctttcgtcgcagggttcgcagcacgacgagatcgacttcgagttcctggggaacgcgagcggggagccgtacacggtgcacacgaacgtgtacagccaggggaagggcgggcgggagcagcagttccggatgtggttcgaccccacggcggccttccacgcctactccgtgctgtggaaccccgcccacgtcgtcttctacgtggacggcgtccccatccgggagttccggcgccgcggcgacgggaccgtgccgttcccgacgtcgcagccgatgcgggtgtacgccagcgtgtgggacgcggaggagtgggccacgcagggggggcgcgtccggaccgactggtccaaggcgcccttcgtcgcgtcgtaccgcgggtacgccgccgccgggtgcaccgcgccggacgccgccgcctgcgcgcgctccaacggcgcatggatgtcgcaggagctcgacagcgccggccaggagcagctccgccgggcgcaggccagctacatgatctacaactactgcaccgataagtaccggttcccgcagggcccgccgcccgagtgctcgtcgccggccaagtagtagatgagtagaattgatcggatacagagagcaatcaattaattaaatcgacccgtcgcttggtttttggtttacacattgtactacggcataagttcggcggatatatgtatacgtagacggctagacgccatgcatgtgtcttggcatgtatcgtattcgtatatatcgtaattcgtatgtacctcagtatacctgcatcgtacatttacatgcatatatatctccctatatataaatatatatggttttattacacgggaag

SEQ ID NO: 18280 - DNA, 1711 bp, Zea mays
  Clone ID: LIB3079-015-A8_FLI
agcagcggctagctccaatccgcccggccgcctccgcctgttgccactagctaggtgatcgatcgaatggactgcggtggcgcgctgcagctcccgcctgggttccgcttccaccccaccgatgacgagctggtgatgtactatctcctccgcaagtgcggcggcctgccgctcgccgcgccggtcatcgccgaggtggatctctacaagttcgacccatggcagctcccagagaaggcgttcggtggggagaaggagtggtacttcttctcgccgcgcgaccgcaagtacccgaatggctccaggcctaaccgggcggccgggacagggtactggaaggccaccggcgccgacaagccggtagggtcgccgcgccccgtggccatcaagaaggcgctcgtcttctacgccgggaagccgcccaagggcgtcaagaccaactggatcatgcacgagtaccgcctcgcggacgtcgaccgctcggccgccgcacgcaagaagaccaacaacgcgctcaggctggatgactgggtgctgtgccggatctacaacaagaagggtgttatcgagcggtacgacacagtggacgacgacgacggcgacggcgccgtggccgaagacgtcaagccggtgccggcgccggcggcgtcgaagaacccgcgtgccagtgcccgcgtaggggcagcagcggcggcgccgatgaaggtggagctccccgagtacggcggcggctactacgactacgacgacctggagacgccgtcggcggggatgctgtgcttcgaccgcccgtcggccccggcgcccgcggaccgcgactcaaacaactccgtgccgtggacgacgcaccacacgcacacggacaactccagcagcggctccgagcgcgtgctctcgccgtcgccggacctgcccgaccgcgaccacgccgagagccagcccgccgccgccgccgccgccgccgggtggtggcctgtcggaggcgactggggcagcgccgccgaggacgggttcatggtcgacgtcgacgtcgacgacgggagctcgctgttcgggccgctgtccccggggctgttcgcgcgcgtcgacgccgccgcgttcggcttcggcgacatgctcgcgtcgtacctgcacaaaccgttctgatgcaacgcgacgcgacgcgagcgcggccaccccgcgcctgcgtgctcctctaggccactgaccactgacatggacattctggtcgtcgtgtagctcagttcttcattcattcaggtcgacgtgcaactggtaattgtacaagatcttgggcagctgccgtatggagatcgatgagtgccgagttagcatggaggacgactggtggtcatggttggtacagagctagctagccgtccgatcgggtatcggattaatctgattgccagttttgtttttttttggtcgcgtcaagtagctgacatcttaagaatgaagcctactggattcagaggcctgttgatggtaatggtatggtgtatgtatatcgtctagtttagtctagcctagctgtacttagaattggttcaggttggtggcaagcagagcgctgtaatttttgttgagtgtttatgcactataattgcaacgtcatgtattagagtcgctctcagcggtcgctttctcgtgatcgaaaattttgcgatgcaaattatcctaataaagttgttgtaagatgtaattacgt

SEQ ID NO: 18281 - DNA, 329 bp, Zea mays
  Clone ID: LIB3079-015-B11_FLI
aggaagcggatgccatggaggagaaggcgggagtgcttgatgagtaagacgggcttctggggtcgatttgcttctgagttgtttattttatatcgtcgcaatttcgtggttgtcgtttggttattctgtgaagcagccaagccaggctattgttatgaaaatttgtcgtctgtaagcatgtgaacttccgatgttgccacatgctggatcagtctgaataagtaagtatgcagctctaggtggtcagctgcgtctaccacaatgagcatgaacgtatggagaaatatctgtgaacccattttgtttatgaataagatttgtttttttcg

SEQ ID NO: 18282 - DNA, 663 bp, Zea mays
  Clone ID: LIB3079-015-F8_FLI
aaaggccaaagcgggacgggagccacagagatagctagcaagaaaccacagatggcggcgatagcggcggccacccaggcggcggcgacggtgctactgctcgcggcgctggtgctggcggcgggaccgggcggggcgcgggcgcagtcggcgtcgccgtcgagccagtgcacgtcggcgctggtgagcctgtcgccgtgcctcagctacatctccgggaacgtgtcggcggcgccgccgtcgtgctgcgcgcagctgggcaaggtggtgcagtcggacccgcagtgcctgtgcgtggcgctcagcgcggacccggcgtcgctgggcctcaccgtcaaccgcacccgcgcgctgggcctccccgacgcatgcaaggtcacgacgcccgacgtcagcagctgcaagggcggcgccgccgccgcggggggagcgcctgtggcgacgcccgcggggcagacggcgccggccacggggtccaagacgacgcccgccacgtcgtccgtgcccggtgccgccgcgtcgccgccgggctcggctgcccgtctcgtcgccggcttcttcgtcgccgcggccgtcgtcgctggcttcgccgcgtgatccgaagctagcttcggtaccgtttgtgcgcgtaggaatcgcagcggagtttgtgttgtttgtttc

SEQ ID NO: 18283 - DNA, 546 bp, Zea mays
  Clone ID: LIB3079-015-H10_FLI
gggccgtggcattgagagagtggatgtatcagctgatgggggtaagacctgggtcgaggctcgtagataccagaaagacaatgtggcgtatgtgtcagatggacctcaaagtgataagtgggcttgggttctctttgaggccacattagacgtaccagcgaatcctgagatcgtagttaaggcggtggactcagctgcaaacgttcagcccgagaaggtagaagacatatggaatctgaggggaatcctcaacacgtcttggcatcggatcaaaatccagagatcttcgtgcgttgaaagatctaagctgtgaaattaagtacgcagctgaccacttggagaaagcacactcactttaccattgtccctgaataataattagtcacttcaactttatgcgtctgtggagtaaggttgtacgagtgttgtggctgtgtcattatgggatttgagctcacttggtttctgtgtaaatgtcagctgctgcggtttttttttggttggtcaggtttgatatcgagaaatatccattgcattctgcgtttg

SEQ ID NO: 18284 - DNA, 696 bp, Zea mays
  Clone ID: LIB3079-016-A7_FLI
cttttctacttgggaccatgttcttctaccagactgaagtgctaagactagactcctcggttatcggcttatcgaaggtgtttgggcaagtggctctattggcttggagcatgtcatacaacaagtacttcaagacaatgtccgcccggaagctcctgtcagttctgcagttcgtcacagcgctcgtaatgttgtcagatgtgttgttcgttcagggagtatacaggaaggtgggaattccagactccatatacacgattgtcttctccgggctgctcgagggccttatgtttttcaaggtcctgcccttcagtgttcatgttgcaaaactttgccctgctggctgtgagggatcagtgatggcctttgtcatgtctgcgcttgcccttgcgactatcgtcagtggctaccttggagttgctcttgctgccttcatgggagtgtctggagatgatttctcagcactgccagcttgcctgttgattgaggctgcgtgcacaatgttgccactatgttgctcgtccttgatcaaagagagaagagaaaaggagaaaaaacaagagtagattacatatatattatctgaagatgatgtaaagctcattgttgttaccctcgtcctcatggtgtcatttcagtttgttatgtgatcatagcttgcagaaacaaaataggagatgattacacatttacact

SEQ ID NO: 18285 - DNA, 1410 bp, Zea mays
  Clone ID: LIB3079-016-D4_FLI
caaaatcatggatccagagactaagactacaacacctccagcaaccattacaagctttggtgttgctacccctgtttcaattaccacatcgaccaccccttctggtgctgcaaggagcacacctctgagacctgtgaggatgtctcctggctcccatcagaaatacagcacgccaccaaaaaagggtgagggtgaacttccaactccaatgtccttagagcaagcagtggaggcctttgagaacttgggtgtatatcctgagattgagcagtggcgagatagtctcaggcagtggttttcttcagttgtgatgaacccacttgtacaaaaaatcaaaacaagccatactcaggttaagcaaacaacagctactgttggggcttcagttactgttagccaagttggaagtgatctgccaagcacaacaccaccagttgccttgtctcctcttggtgggactaaagattggcaaccgactgtcacggtagatgaggatgggatccttaaccaattgcactctgcactcctacattctcgagatgcccctgttgcgcaaacttttggcagtctacaacagccacaacggaacccccaccttccagctattcaagcatgtattgatgcaatcacagagcatcagaggctcaacactctgatgaagggagagctgataaaaggcttgttgccacagagtagtgtccgtgctgattacactgtccagagagttcaagaactcgctgaaggaacatgcttgaagaattatgattacatgggtcatggaaatgactatggtaaatcagaaaagaaatggaccaccgagctacctactgactcacaccttcttctgtatctgtttgctgctttccttgaacatccaaaatggatgcttcatgttgaccctacctcgtactctggttcccagtccagcaaaaatcccttatttctgggagttcttccaccaaaagagaggttcccagaaaagtatgttgctctgatatcaggtgttccagcaattattcacccaggggctcttatactggctgtgagcaagcagaatcctccaatttttgctctatactgggacaagaagcagcaattttctcttcagggaagaacagctctgtgggatgccattctacttttatgtcaccaaataaacgttgggtatggcggtgtggttagaggaatccatatcggttcgtctgccttgaatctcctgtcagttatagattcagattcagaaagctgaaagttagtttggtagtcttgaggggatgaattatgtcaagctagtttactggtgttaatgttgtaatttacactagcatgtttggaattgacatagctttatctagctgtaatatgccctgtggtaccttggatttgtgactatattattattgttctttg

SEQ ID NO: 18286 - DNA, 1689 bp, Zea mays
  Clone ID: LIB3079-016-D7_FLI
cagaaaaaccagcggcgcagtgacaaaagcccacagcttcttctccctactcctccagtcctccgtcatccgtttcgctctctgccgccgccaccgcacaagaagctagctcctgcctgtaccgccccgtcatggcgatgctatcccgcgcagcctcctccgcggcccggcgcccgctgctgccgccgcctaggcttctggcggtgagggcgatggcgtcgtcgctcttcggccacgtcgagccggcgcccaaggaccccatcctcggcgtcaccgaggctttcctcgccgacccctcgtccgacaaagtgaacgtcggcgtcggcgcctaccgggacgacaacggccagcccgtcgtgctcagctgcgtgcgcgaggccgagcgccggatcgcgggcaacctcaacatggagtaccttccgatgggaggcagcgtcaagatgattgaagagtcactgaagctggcgtacggagaagattctgacttcatcaaagataagaggatagcagcggtgcaggcgctttcaggcactggtgcctgccggctctttgctgatttccaaaagcgttttttgccggattcgcagatctacataccaacaccaacgtggtccaaccatcacaatatttggagggatgctcaagtgccacagaagacattcacatactaccatccagagtcaagagggcttgatttctcaggattgatgaatgaaatcaagaatgctccagatggttcattctttttgcttcatgcatgtgctcataatcccaccggtgtagatcctacggaggaacaatggagagaaatatcccatcagttcaaggtgaaaaaacattttccattctttgacatggcataccaagggtttgccagtggtgatccagagagagatgccaaggcaatccgaattttccttgaagatggacaccaaattggatgtgctcagtcatacgcaaagaacatgggactttatggacaaagagcaggatgcctgagtattttgtgtgaggatgagatgcaagcagttgctgtcaagagccaactgcaacagatcgcaagaccaatgtacagcaacccacctgttcatggtgcactggttgtttctataatcctcagtgatccagaattgaagagtttgtggttaaaagaagtcaagggtatggctgatcgtatcattggaatgcggaaggcacttaaggaaaatcttgaaaagctaggttcacctttgtcatgggatcatatcactaatcagattggaatgttctgctacagtgggatgacacctgaacaagttgaccgtttaacaaatgaataccacatttacatgacccgcaatgggaggataagcatggctggtgttacgacaggaaatgttggttacctagcaaatgcaattcatgaggttaccaaaccaaattgagttagggtcctaccttctttggtcgatggaagctgatggaatgagactgtgaagcggcgtttccccccctctgttcctgacagaaataagtttagcctgctgctaccatatacatggacacagactcagatgtagacactcaagttttgagagctgtgatcctgtttcatttaatcaaaaacaattttgtttttttttcatcttgtcatggcaaatgttacaccagctgcaaaataattacaataattgatcttgatccagcgtc

SEQ ID NO: 18287 - DNA, 758 bp, Zea mays
  Clone ID: LIB3079-016-E6_FLI
ctcgtcttcttatccatacaaaaattgctaaaaaatttaatgagaggatggttgcatgggccaaaaatattaaggtttcggatccacttgaagagggttgcaggcttgggccagttgttagtgaaggacagtatgagaagattaagaagttcatatcgaatgccaaaagccaaggtgctactattctgactggaggtgttagacctgcgcatcttgagaaggggttctttattgaaccaactattattactgatatcaccacatcaatggaaatctggagggaggaagtctttggtccagtcctgtgcgttaaagaatttagcactgaagatgaagccatcgaacttgccaacgatacacagtatggtttggctggtgctgtaatttctggtgatcgggagcgctgccagaggttatctgaggagattgacgctggatgcatctgggtaaactgctcgcaaccctgcttctgccaagctccctggggcgggaacaagcgcagtggatttggacgtgagcttggagaagggggcattgataactacctgagcgtcaagcaagtcacggagtacatctctgatgagccgtggggatggtaccaatccccctccaagctgtaaactggcaagacgaaaatttgtctgtttcggtagaataaatatatctcgatgctatacagaacgaacccgtgtatcacattgaatgacatggtgaaaaaggcacatctgcaggataaaggcgagagttgagttgaaacc

SEQ ID NO: 18288 - DNA, 1199 bp, Zea mays
  Clone ID: LIB3079-016-G6_FLI
acagtatgcatatattggacttctgaattcggagctgtcatcaaactgcacagcttctcctgcattgcccttccaggaatacccacctggaataacacttgtacctatgaagagtaggacactagcgccattccgtacaactaatcttgtggtagtaagatcaaccaatggtgctggtggatctacatgttctgatttttttgcttcgggggaagctctgcttatagatcccggatgcagctctcaggttcatgcagagcttgcagatctcattgattcccttccaaaaaggttattagttcttgttacacattatcatcaggatcacattgagggtctttcagtcgttcagagatgcaatcctaatgctgttcttctgacacaccaaagtacaatggatcgcattgggaaaggaacttggcagattgactacacttcagtaactggtggtgaaaagatatgcataggtgaccaagaactacaagttgtttttgcacctggtcatacagatggtcatatggggcttctccatgtaaataccaatacattggttgttggagatcattgtgtagggcatggaagtgcaaccttggacagtagaaatggtggcaacatgaaggattactttgaaactacatacaaattcttggagttgtcaccacatgtattaattccaatgcatggaaggattaatctatggcccaagtatatgctttgtggatacctcaggaatcgaagggctagagaagcgtccattctgcactctatagagaatggggcccaaactctttttgatatagtttcgaagacttacagtgatgttgacaggaagttgtggattcctgcttctttcaatgttcgccttcatgttgatcatctgaactccctacataaattgcccaaggatttctctttggaaatgttcagtcgaagttgtgatgattttatctctagagtttgatggcaagtacgagaaaaggatcttctaattcactgcgttgtgatttcatttaagctggcccgttcaccatttgttgttttattatgtgcatgacactgaacaattcaatgatggggaacgaagtcttgtaataaccgataaatatgtagactggacaccaaggctaccattcacacttccgaaaatttgtaagatttaacaactcgaatatatgcaggacttctcattggagaacttt

SEQ ID NO: 18289 - DNA, 1024 bp, Zea mays
  Clone ID: LIB3079-016-H6_FLI
atcctaaaccctcctagtcctctccatccccatcccctccaatggcggcgactgccacgtccttcgccactctcgccgtcgcgcgctcggcagggcagcggttcctccttgcctccaaggccgccccctcgccgctcctctccctccgcggcgcccgcctcccttcgcagggcgtctccttatctgggggcctcgcggcgtcgccctctcatagccgcgcgcgcttcgccacatcagccagcgccgaacccaaggaagcagaacttcagtctaaaatcacaaacaaggtgtactttgacataagcattgggaaccctgtgggcaagaatgttgggaggatcgtcatcggcttgtacggggatgatgttccacagacaacagagaacttccgtgctctttgcactggagagaaagggtttggatacaagggatccagtttccatcgtgtcatcagcgactttatgattcagggtggagattttgacaagggcaatggtaccggtgggaagagcatatatggacgcaccttcaaagatgagaacttcaaattggttcacactggacctggagtggtcagcatggctaatgctgggccgaacaccaatggcagccagttctttatttgcactgtcaagacaccttggttggacggaaggcatgtcgtgtttggccaggtcctggaagggatggatgtcgtaagtctgatcgagtcgcaggagaccgacagaggtgaccgcccgaagaagaaagtagtcatcagcgagtgtggggagcttccagtggtctaagtgttactcatctgttgtcggtcttacctaacctcggatggatggcgatatttcccccacctgaacttgtcgtgctaccctccccccccccccccccccacccccaccctgctagttatagagaatatttcgaattgaagtaaggtcccaaatctgagggcatactgttgcttctctgctggaataaatgtgctccttgttcatggaacaaaaatattctgttgcattgcatatgc

SEQ ID NO: 18290 - DNA, 735 bp, Zea mays
  Clone ID: LIB3079-017-A5_FLI
aagatggccaagtacagtagctgcgagtggctagcagttatggcatttcttctttttgtggcatcgtggatacttcttcggctcgttatgttccctttctggatcctaagaagcacaagctatgaagtgctgctgaccttggatagggagaagcatcgattttatggccccatatactactatgttttcaactgtcttctgttctcactcctagttcttcacatatattggtgggtactgatatggcggatgctagttaaacagattcaatcgaaagggcgtgttggtgatgatgttcgatccgattctgaaggcgaagatgagcatgaagattaactttttaggttgaatgattaactgaagaactacattgtgtgatacctgcagcaaggcacaccttctgaaccttttttttttcttttacagaagatatccagatattgtaattcattaggtcatatcattcgttcagcatagaagatgacaaccatcatttgggagttgtcaatgaagccgcctatcggatgctttttatcaaaacagaagtgcattgtatttatttcactaaaccatcatttataagagatacagaatgatcccttgttcatccattcttgtagctagacagttgatttgctttcaaatcatgtaatttgctacagaagcttagttgatttcttggtgtatcattcattgtgatggaaatggaaatcttgggaagaagttcccaacaag

SEQ ID NO: 18291 - DNA, 330 bp, Zea mays
  Clone ID: LIB3079-017-B10_FLI
cgacaatggcaagggccaaggaagacgagcagatcatgggaattgacctagaatcttgcaatctagcaaaacgatcattttatgatgccatgcaacatgacattctagaaatatgggtggctaccacgaagtgagtgtagcattatgtattatgttctcatttgttcatcagttgcaacaactatttgctaaactctttgaattttgtaataattggaatgtggtcgcatggtcagactatgtttgctttctaaaacactcatgtcttagtttataggtcgtgtacacttatttaagttattggttgattaagatctgggcttcaagtgc

SEQ ID NO: 18292 - DNA, 829 bp, Zea mays
  Clone ID: LIB3079-017-B11_FLI
tctacgagtacgccaacaacagtgtgaagtccaccattgagaggtacaagaaggccaacagtgactcctccaactctggcacagttgcagaagtcaatgcccagtactaccagcaggagtcctccaagctgcgacagatgatccacagcttgcaaaacgcaaacactaggaacatagtgggagattccatccacaccatgggcctcagggatcttaaacaaatggagggcaagctggagaaagccataatcaagattagagctagaaagaatgagctgctatacgctgaagttgactatatgcaaaaaagggagatggatctgcagactgacaacatgtacctgaggagcaagatcgctgagagtaatgaaacggggcagccggcgatgcacatgacgatgggagcgccgccgacgagcgagtacgaccacatggcccctttcgactcgagaaactttctgcaagtgagcatgcctcagcactactcccatcagctgcaacctacaaccctccagctcggatgatgaaatcagcgctatacctggcggcgcccggcccccaatcgagatagatcacgcatgcagttatatcatgtgccaaatcgagatctcaagtaactctacgtacgtttgcttaattattaataattgtgattagtgcaactgttagggtatatatatttgtgagtgccaccactgtgtgcgtgcatttgtacgtgtgaatttagctgttgcatctactactattgtaccctccggccaggccatatcatcagaaacgcgggtttatataaagcacacaaatcatatatatataagtatgcgtaaat

SEQ ID NO: 18293 - DNA, 698 bp, Zea mays
  Clone ID: LIB3079-017-C12_FLI
cacagacacacgatgcatggaaccatggagcgagatgcaaaccgcaggatcaagtatggacattcataccaggagagggcacatagaacttgcccaggttgtaagctgtgtggtcaaaattacaattaccccaatggtgaggaattttctgcaatcagcggttgtcaggaggcatactaccagacagaccatgatctgattccttcaacttctcaagtagcatctcattgcgagggttcttgctgcaagggccagcagttgaaaccgaaaagttattctgtgatgcgtgattatgactatatcaatcaagagtcaacacctagttcaagtgaccatgccagaacaagatctaatcttccagcgccgcctcatcattggcatgttaaacattctaatgagcatcggaggcatgttactgatgcacattctgcttttgaggtcagggaaagccgaagctggtatctatcttccaaagatgctccaagtactcactccaggaagcaccataggccagcaagataagctgtaactgcaagatagagaaaatctagtagcagctcgcttctgatactgatggatagcatttgttaccggggccctgcttacgtggctgacaccctgttgcggggaggaatctgttccaaggacagcagtataccgtcccaatttataaccaaatactttgccttttctcggtt

SEQ ID NO: 18294 - DNA, 1091 bp, Zea mays
  Clone ID: LIB3079-017-C8_FLI
cgacaggaaccgagacatcgctgatgcactgaaaattcttccagcgaactctttatcctgtaagaaagttgagaggcgatcatgcatttccttggaggagttcatatgtaattactttttgcgcgacacccccgtcataattagtggcaccatcgaccattggcctgcaaggacaaaatggaaggacattgagtacctcaagaagattgctggagatcgtactgttcctgttgaagttggaaagaattacgtgtgtagtgagtggaagcaggagcttatcacattttctcagttcctggatagaatgtcgtcaactgtctgtccatcaaacttgacatatctggctcagcatccattgtttgagcagataaaagagctcagtgaagacataattgttcccgaatactgttacgctggtggaggtgcactccaatcacttaatgcttggtttggtccagaggggacagtgacaccattgcaccatgatccacatcacaatatcttagctcaggtattgggcaggaagtatattagactctatcctgctttcatagctgaggacttgtatccacacacagagactatgctaagcaataccagtcaggtagatcttgacaacattgatttgaaggagtttccaagggttgaaaacctggaattcattgactgcatattggaggagggcgacctgctttacatccctccaaaatggtggcactacgtcagatctctctccaccagtttctcggttagcttttggtggcgtgcagcagttcaaccttcaggaggctcatagcgtcaatttcatgtctcccatattatcaaaaccagattgcagaaaaccaaagtaacctgacaggaccctttgtttcaggtgactccgcttttgaatggatgtacacacgtcatcaccaatgtccattgttagttttacttttaccacagtgattaaaatgttgaaattgcttatatgccgaccatcatgctatcatgtgattcttgaaagcagaggttgaaggatgtcttcactgctacaatgtcaaattcttgaaattgtaaaggtggacttactagctccgagaatttaattt

SEQ ID NO: 18295 - DNA, 994 bp, Zea mays
  Clone ID: LIB3079-017-D10_FLI
ctcccccatccgtacccaatctaatcgacacccggccgagatgggccgcaagttcttcgttggtggcaactggaaatgcaatggaaccacagatcaggttgagaagattgtcaaaaccctgaatgaaggaaatgttccctcttcagatgttgttgaggtcgttgtcagtcctccttatgtgttcctcccggtggtcaagagccagctgcgccaagagttccaagttgctgctcagaactgctgggtgaagaagggaggtgcattcaccggtgaaattagtgctgagatgctcgtcaaccttggcgttccctgggtcattcttggacactctgaaaggagagctctgctgggagaatcaaatgagtttgttggagacaaggttgcttttgctctgtctcagggactaaaggtcattgcatgtgttggtgagacccttgaggagagggaggctggttcaaccatggatgttgttgctgcacaaacaaaagcaattgctgagaagatcaaggactggagcaacgttgttcttgcctatgaaccagtctgggctattggaactggcaaagtcgccaccccagctcaggctcaggaagtgcacgcctccctgagggattgggtaaagatcaatgtcagccctgaggtctctgaatctacaaggatcatctatggaggttcagtaactgctgcgaactgcaaagagctggcagcacagcctgatgtcgatggtttccttgtgggcggtgcttctttgaagcccgagttcatcgacatcatcaacgccgccgccgtgtgaagtccgctgaagatgttccaacccttcaccctgttgcggtgatgtgctgaagacagatcagactatttttttgtttaaccgtgcagtgctatgtaagctactaactttgcgctggtgcggatgctgatttccctccccctagctttttgtgaggctactctacagcttgattcagcttgctaataatgtttgcctctggac

SEQ ID NO: 18296 - DNA, 835 bp, Zea mays
  Clone ID: LIB3079-017-D8_FLI
gctggggaagagatgggtctctcctttgggaagctgttcagccgcctcttcgccaagaaggagatgaggattctcatggtcgggctcgatgccgccggtaagaccaccatcctctacaagctcaagctcggcgagatcgtcaccaccatccccactatcggattcaatgttgaaactgttgagtataagaacattagcttcactgtttgggatgttggtggccaggacaagatcaggcccctgtggaggcactactttcagaacacacagggacttatttttgttgtagacagcaacgacagggaacgtgttgttgaggctagagatgagctccacaggatgctgaatgaggatgagctgcgtgacgctgtgctgcttgtatttgcaaacaaacaagatcttcccaatgctatgaatgctgctgaaattactgacaagcttggtctgcattccctgcgacagcggcactggtacatccagagcacttgtgctacatctggtgaagggttgtatgaggggcttgactggctttccagcaacatctccagcaagtcttgaagcttttcggcagggctcctagcgagaggatgtctgaacaacttatggctgcttttttttacatattattactaagacacaagctacagcagatatagtacttgtgaaaaaaagaaacttctgagctcttttgagggattgatactagattggattgtgtttttgtttttgggtcgataccatcgcctgttcggttccacaaaattgactgtcaactatatttacctatgttcggagattgtatggtaaattaaattgacatgctttagcgtaggtc

SEQ ID NO: 18297 - DNA, 892 bp, Zea mays
  Clone ID: LIB3079-017-E8_FLI
cacaggagtttactctccaaaggctgtggacaacaagcagttaccttcacacccatctctgctgcatgcatcgcttgggatgccctcccctggccggatgtctccacgatgtgtcgaatcaggctccccgatgaactcccacctagctgctgctcttgcccagcgtgagaagcaacagcagacgatgagaagcctcagttctcgtgaccttgggcccagtgcggcacgagcttcagctctcggctcccctctaagcacatcatggtctaagtggggatctccttcaggggtaccagattggggcgtagatggtgaagaattgggtaagctccgccgctcatcgtcgttcgagctcaggtctggcggcgatgaccctgatctctcctgggtgcatacactggtcaaggaatctccgccagagaagcaagttactacgtccgaatcaattaattccgttggaccctcaccactaatgcctcccagcatgaacaacggcggcgaaggttctggcctgaacacccagctggatgggcgtgaccaagccgcggttttaggggcactgcttgaacagatgcagcttgatcagcagattggtagtctagcaacataggcgtgcaacgagcctggaaggtgtgagggtactatattcttatctactgaattccaagttcttttccccctgtcaattatggtattcaacaaagatggatagctgaaggtggtggctcagagattggtttttctttaattttggaggtaaatcatacgcattattgaggtcccagtaggttaaaagaatgaagttcctcgtctggggttgttccaaggccaacccaggtagaactgcaccccggcagcatcggtctcattgattgaagttctctgttttgtt

SEQ ID NO: 18298 - DNA, 1410 bp, Zea mays
  Clone ID: LIB3079-017-G5_FLI
ccgaatcgtcgtccttgcgagcctcgccgatcccccactcccctcccctcgcttcaagatgcagatctttgtgaagaccctcaccggcaagactatcaccctcgaggtggagtcttctgacaccattgacaatgtcaaggctaagatccaggacaaggagggcatccctcctgaccagcagcggcttatcttcgccggcaagcagcttgaggacggacgcacacttgctgactacaacatccagaaggagtcaaccctccacttggtgctgcgccttaggggaggcatgcagatctttgtcaagaccttgactggcaagacaatcacccttgaggtggagtcctcagacaccattgacaatgtcaaggcaaagatccaggacaaggagggcatcccacctgaccagcaacgtctcatctttgccggcaagcagttggaggatgggaggacccttgctgactacaacatccagaaggagagcaccctccacttggtgctgcgtcttaggggtggtatgcagatctttgtgaaaacccttactggcaagaccatcactcttgaggtggagtcttcagataccattgacaatgtcaaggccaagatccaggacaaggagggcatcccgccggaccagcagcgtcttatctttgccggcaagcagctggaggatggacgcacccttgcggattacaacattcagaaggagagcaccctccacctggtgctgcgcctcaggggaggaatgcagatcttcgtgaagacattgactggcaagaccatcaccttggaggttgagagctccgacaccattgataatgtgaaggccaagatccaggacaaggagggtatccccccggaccagcagcggctgatcttcgccggcaagcagctggaggatggtcgcaccttggctgactacaacatccagaaggagagcaccctccatctggtgctccgcctgaggggcggtatgcagatctttgtgaagaccttgactggcaagaccataaccctggaggttgagagctctgacaccatcgacaacgtgaaggctaagatccaggacaaggaggggattcccccagaccagcagcgtctgatcttcgccggcaagcagctggaggatggtcgcacccttgcagactacaatatccagaaggagagcaccctccacctggtgctccgtcttcgcggtggttattaagccatcagtcgttgaagctgctgctgtatctgggttatctagtgtctctgccattgcccatggatggtgctgtctttcaaagtatttgtatggtttgtgtcgtgagtcgtgactgagctggtttcatggaccagttgtgttctcgttacccaaaactatcgtgcgaccgcatatggcttaatcatgaataaatgttgtttgaattt

SEQ ID NO: 18299 - DNA, 646 bp, Zea mays
  Clone ID: LIB3079-018-C5_FLI
gtcattccacttccaccaatctgtctcccaatctttcttgctgctccaattcgctctctttactcggccagcggaaggggagaggagggcgagatgacggtggagaaggtggacgcggggctttccgacttcgacgcccacttcgatcgcctcttcgcttccccggacgccgcctccgacggcaaggtgaagctgctgctcttcctggccgaccgcaagcctggctcctccctctcctggtgccccgactgcaacgtggcggagccggtgatctacgagcggctggaggcactggagggcaaggacgcggtgctcctgcgcgcctacgtcggggacaagcccacttggcgcgacccggcgcacccgtggagggtggaccccaggttcgggctcaagggcgtgccaacgctgatccgctgggaggatggcgccgccgccgcccgcctcggggacgacgaggcgcacctcaaggacaaggttgacgccctcctctgcgctggcggcaactgagtactgacagatctggtttcccgttcgggttccatctgcgtagagtggccataataacatgtactgtaattcagttcatctacatgccggaccagaagctggggaatcgtgtgaagcttaataattcagtttatct

SEQ ID NO: 18300 - DNA, 450 bp, Zea mays
  Clone ID: LIB3079-018-F10_FLI
ccgttccaggttctgatggtgataggcatgctttacctgcttcgacatccccggttccgcagcaggatgccctccgtgcctttcaacttctacagaagactgcctgccaggtccgatatgctcctttgagatcacagtattcggcgtgagagaatcgggtgcaagtctttacttatttatgtctgttctgctcggttccttctgattagtatcagatcagatgtgaatataccagatgagttcgtatattagaggtcatttagtgtcccaggaataaggtgttggtttaatggttcatttccttttgagtttttgggatagtgaggggaggtttttgggtgcagaaatgtaatgttaactccgggctattagcatagaactaaaggcaggaacaatattatcccccgtgtattatgtttgtactatttgtgtcaattttgtttgtgtttc

SEQ ID NO: 18301 - DNA, 1416 bp, Zea mays
  Clone ID: LIB3079-018-F11_FLI
aggtccccgtcgcctccgctcaactgccgccgcagggcccgctgcaggcttccatgtgtggtagggcccggtgtaccctcagcccggccgaggttgccagggccttcggcttccccaccacctccgccaacgcgggcggcggtggagacggccccgctgtgccgacgctccatcttaaccgtttccggccgtcgtacaatgtgttgcctggggcgtacctgcctgtgggcgccatgcgggcactaccaggttgcgcccacggaggaggaggttcggatggggaggggccggtgatccagtgcatgaagtgggggctggtgcccagcttcaccggcaaggccgagaaacccgactatttcaggatgttcaatgccagatcagagtccgtaaaagaaaaggtttcattccgtcgactaattcaaaaaaataggtgccttgttgcagtagaagggttttatgagtggaaaaagaatggatcaaaaaaacagccatactacatacatttccaagatcataggcctcttgtctttgcagccttgtatgatgcatggacaaattcagaaggagagatcacccatacattcactattttgactacacatgcctcaacttctctaaattggcttcatgatagaatgcctgttatcttaggcagtaaggactatgttgatgcttggttaaatgatgtttctgtaaaacttgaagaaattactgcaccttacgaaggagctgatctggtttggtatccagtgacatccgcattgggtaaagcatcatttgatggacctgagtgcatcaaagaggtacatatcggagctactgataagcctatttcaaaattcttcaccaagaaatcgactgcctacgatctatcagggaagtatgagaatatgtcacgggagcttgctcatgcttacaaagcagcgaaagtggaatgcgatggatcagtagaaaatcaaggaggggacggcaaccaacaccagtcccgagagaagcaaactactaattgtactataaaggatgaacctgtcaccttggaaccacaagttttcgagacaccgtggagcatcgagcatgaagatactatgactctggctggtgccactttggaaacacaacgtgatttgggattcaagagaaagatcgaggacactcaagtcgaagctagcatgaaaccctctcagcttaccaggaaggaaaaagctgtaaaagcagcttcggatgggcaggcatcgttgctttcatatttcgcaaggaagcagggtcgctcgatgaagtagtttgcggtagccgtgccatgtattcctgtgtaactcaaactttaccagtacctgtcctccgtgttcgggacaaactatttcggttttaattttgttttggctaccactaaaatgaaccagctagatttctgcggtc

SEQ ID NO: 18302 - DNA, 623 bp, Zea mays
  Clone ID: LIB3079-018-G10_FLI
cacaaacccatcgcagggcattctcgagcatagcttctctgcctctctctcccctcctctcctctcgtccactcctttgtccaaagcttcgagatggctcagcagcagaaggtggtggtcagggttccaaccatgacagatgacaagatcaagcagaaggccatcgaagctgttgcggacatttacggtattgactccatagcagcggatctgaaggagaacaagatgaccatcataggcgagatggatgcagtagcgattgccaagaagttaaagaagattggaaagattgacattgtgtctgttggacctgcaaaagaagaaaagaaggaagaaaagaaagaggagaaaaaggaggaaaagaaagaagagaagaaagaggagaagaaagaagagaagaaagaagagaagaaagaagaaaagaagtgataaacctataaaacatatatatcatcgcatggcctcacttatcttcagttgcattgactttgcactgttgttgctatgtggagttactatgtaatacttatactacagagtacatattagttaataataaaagtgcaatttgtgcatttcttttagcatctatgctccctgctaagcaacttatgttcataagt

SEQ ID NO: 18303 - DNA, 469 bp, Zea mays
  Clone ID: LIB3079-019-D2_FLI
ggcgctggtgatgtgactgaagatcgtccagaaaaagaagcccaagctgttgggaccagcgacactggtttcgtgtttgaacctggttctgtgcttgtggagtttttgcgggaggaggctgcttgcatggccgcacattccttacatgggcgtcgcttcgggaacagaactgtgcatgctggatatgctccgtatgatctctacttgcagaaataccccaggtgattctgcgtttgcgactgcatgagttgcgatacgagctttgcctatgtgccagtatttcacagaaacttcagacttgtagttttggcttttgagcctttggatggttcttccggtccagatagtggtaccattagttgaacgaaatatttggaaatgttgttccacagtagatatcggatggacaataggatataagtactggatagagacacaagttgtcgttaacatcgttctttacttcgct

SEQ ID NO: 18304 - DNA, 404 bp, Zea mays
  Clone ID: LIB3079-019-F3_FLI
cacctcgtcccgtggctccactaagacccttggcaacttcgtcaaggcaaccttcgactgcctgatgaagacctacggcttcctcactcctgaattctggagccagaccaagttctccatggccccgttccagcagtacaccgacctgctggcaaagcccaccaagggccttgtgctcgaggccccaactgagacagtagaggcttaggatggtttgagtggagagctctactcgtcgggtgcttgtctaaatgcggtatctatattatagctaagaactgccggagtcgattttgggttctgttttgtcctggatgctgttctgtactgtcaagttttggattatgctatggcactttttatcgatgaatgctacataatgatctcatgatagtgtttttttc

SEQ ID NO: 18305 - DNA, 883 bp, Zea mays
  Clone ID: LIB3079-021-A1_FLI
aagagagttgtgaaacactggaagtcatgtcttgatgtgtcttctgtggtcgtagcctacttaatattttgaatctggggttagtaacaagctcttgttgtttcattggattcctgaaaagttcagttgatctagttttctctgcaaagaacatgtgcatacctgtttcaggctaacaagttctttcgtcttctttggtaggttctccttgagctggcccgtagccggaacagaatgccgctgcccaaatcaatcgctcctcctggctcgattcccctcccacctgagcaggacacactgttggcccagaactaccaactcctgcctccgttgaagccgccacctcaatatgaggaaatagaggatgagactgaagaaccaaacccaagtaacccggcgaattctaatccatcctattcgcaggatcagagtagtaaggagcagcaacagcagcacactcctcagcatggtcagagggtttccttccaacttaatgctgtggcagctgcagctgcagctgcaaagcgtcctcggatggccattgaccagctgaacatgggctaaccgtttcgtcggttagactgtagtatctttccccccaccctctagtctggtgaatcatgttttgaagagatagtgctgtagtggtatatgctcttactgactaccacccacatatttaaccacgagatgtgcagtccaacagcaccagcagcataagtttctgcctgcaagaacgttgctggagggaaggaaggaaagtgactgttctacagttctagtagtgtattttgtacttgcacactaaaaggttaatatctgctagtgtaattttatccgggtcttctacatgttcttgacaaaaatggcatcaccattcatc

SEQ ID NO: 18306 - DNA, 762 bp, Zea mays
  Clone ID: LIB3079-021-A2_FLI
ccgagagtgcaaaccttccttccaccttccaattccagtagtcccacgcacaaactttccccagctgcctgcgcccgcccaactaccccgcgcgcggcagccggcagcaggtcgtgccatggacgacgacgccacggtcggatcgcggcagcgccagcagcagccggcctcgccggcggcggctgattccagggccatgatggcggagctggacgcgccgctgcacgccctcgggttcgagatggaggagctctccccgtcgcggctcaccggccgcctccccatcactcccatctgctgccagccgttcaaggtgctgcacggcggcgtgtcggcgctggtggcggaggcgctggcgagcatgggcgcgcacatggcgtcggggtaccgccgcgtcgccggcgtgcagctcagcatcaaccacttccgcagcgccgccctcggcgacaccgtcctcgcgcaggccgtccccgtccacgtcggacgctccacacaggtttgggaggtgaagctctggaagatggatccgtccacaggagcgaagggacctcagatcgccgaatccagagtcacgctgctgtctaacctgccgttgccggaggagcacaagagggcaggagacgctctgaagaaatattcatcaaaactgtagagaagaaacttcatgctcatgaaagcccttgcatcttgcaggtttcacggatctgatggatgttgtaattaaaaagcattgcctataataaatatttcttatttaccacc

SEQ ID NO: 18307 - DNA, 741 bp, Zea mays
  Clone ID: LIB3079-021-C5_FLI
gacagcccgtcagcccctctcgtttttcatccgccttcgcctccaaccgcgtgcgctccacgcctcctccaggaaagcgagagcttctgcataagaacaacaaatcaaaagcttgatcagctcggtgcctacaaaacctcaacaaccaagtttcatgtctgatctcgacgtccagcttccatctgcctttgatccgtttgctgaggcaaatgctgaggactctggtgctggtcctggaacgaaggattatgtgcatgtgcgcatccagcagcgcaacggcagaaagagtctgactacagtccagggtctgaagaaagagttcagctataacaagatcctcaaggatctgaagaaggaattctgctgcaatggtactgtagttcaggacccagagctaggccaggtcattcagctccaaggtgaccagcgcaagaatgttgctactttcctagttcaggctgggattgcgaagaaagagaacatcaagattcacgggttctaagggacctgtaaatgcttgtgccctatattgtgtgcctccacatattggggagcttgaagcatcgacagttactagtcattgcttacttatataagaacataagtagtatttgctattgtcaagtgtgccttgcttgatgcaagttgtgttttcgtatcattattattatgcacggccatcgtacgtgtatggcttgtatgggttattgccaacttaataaaagcacactctgtttgcct

SEQ ID NO: 18308 - DNA, 1423 bp, Zea mays
  Clone ID: LIB3079-021-D5_FLI
ccggccccgtcgagcgcctcttcttcttccgccacccggagccggcctccactctcccgctcctccgctcctcgctctccctcgcgctccgccgcttctacccactcgccggcaccatcaggccccacgcgcccttcctctgctcctacacccatggtaccgatgccctcaccatggtcgtcgccgagtcgaacagccccgacgatttcgacagcctcgtagccaggtcacgcagggacctggacaggatccgccccctcgttccgcagttgccgccgccgggggaagacggagcgttcgcgctcgccgccgtgcaggccactgtcttccgaggccgtggcctctgcctcggcgtctccgtccaccacgctgcctgcgacgatgcctccaccatgcatttcgtccgcacctgggccgctacctgccgcctaggactcgagaacgacgacggatccgaggacgccgtgctaccgccacggccggtgctggaccgctccgtcgtcgccgaccccgacgacctgcgcgggaagacgctcgccgggatggcgcgcctcgcccctcctccttctccgccgccgccgcagcaggaggagaagacgccgatggtgatggcgtcgttcctgctggggcgcgagcagatcgaccggatcaaggagggcgcggcagcaaaggcatcgtctttcgtggcggcgtcggccttggcgtgggtgtgcctcctcaagtgcggttccgttggcgtcgcgggcgcccggcgcagccacatgctcttctccgccgagtgccggtccaggctgacgccaccgctgccggccgaatacttcggcaactgcctgcgcccctgcttcgtggaagccgccacggcggaccttctctctggggaaactgaggacggggtggctgcggcggcgtcggcgatcgggagcgcgatccaggagatggagcagggcgtgctggaaggcgcggaggggtggttgggcagggtgctgtcggtgcttcccgagcggcccatgtccgtgggcgggtcccccaggcacggcgtgtacgaaaccacggacttcgggtggggccggccggcgagggtggagatggtgtcggtggagaagacgcccgggacggtagcgctggcagacagcccggagggagacggaggcatcgagctcggggtggtgttgccgccggacgccatggatgcatttgcttcgtgctttgcgcatgccgtcggcgccaacgtctgattggcattccgatccgaggtgcagctgctgcgccaaaagattcgattgaagcagcgtattatttgtgcttgattaattgatttactttactgtcttgagagtgagctcgttcttgctgcggatgtgcgaagtcaaggaataaacaaccggattgttccgaaatcaatcaagcgtcactatgatttatg

SEQ ID NO: 18309 - DNA, 677 bp, Zea mays
  Clone ID: LIB3079-021-D7_FLI
tcaggaatattgggaagaacagcccagttctttcctcagtgaatatgctcattttagtggaaattctttcactgaatccactcctcctgttagtgctgcgtcacctgatatcttccagctctccaagatttctcctgcacaaagcccttcaatgggctctggcgagcaggcgttagagcctaaacatgagtcggcagcttcacctcgtcctgaaaacttgaggcctgatgcattattctctgggaacacagccgatccatccattttcaataatgccatagccatgctcctgggcaatggcattgatgccgagtacaaacctgttcttggtgatggaattgtgctcgattcttcgtcatggaacaacatgcaacatgcttttcagatggcgggattcaaatgagttccatgcacttgtttgtgatgctgaagggcttcttgttgcttgttttggggtcagtatcagcgaaggccgcattgattgtgacgctgcattcctgacagagggcgtgcaggtgcagcagctaccatatgtgatcttcatgctaatagtccttttgtctaataaagtgcatgaagataaaccggatatttttttttttgctttgtattagagaaccgtttttgtcaaccctgtcaggattctgttggaaatgtgtcatgatttttgtttgaac

SEQ ID NO: 18310 - DNA, 1549 bp, Zea mays
  Clone ID: LIB3079-021-F3_FLI
gccgggcctgctgtccaccctcgtcacggcagccggccggcgctctgaactcccgagccggctctccatcagccacgtcgcgcgccgcccaggagaaggagctctttaatctgtgctagcagcggtcccagagaatgcggcagatctcgtcgctgctgcagggcctggcccggtcactctcggtggggagggacagggacagggacagggaccggaaagggaacggcgcaggcgaccgcaagaccgccgtgccggcggtgctgcggacgtcgggcaccctgtggggcgacggctcggacacgttcgccgccgtctgctcgcggcgcggcgagaaaggcatcaaccaggactgctccatcgtctgggagggattcgggtgccaggagggcaccatcttctgcggcatcttcgacggccacggccagtggggccactacgtggccaaggcggtgcgcgactcgctgccgccgtcgctgctgtgccactggcaggaggcgctcgctctcgcgtcactcatcgacgacggcgagaagaagctcggcgactgccagttcgatctctggaaacggtcctacgtggccgcatgcgccgccgtggacgatgagctgcggcgcagccgccgcttggacgcggtccaaagtggctgcaccgcgctatccatcgtcaagcagggggacctcatgatcgtcgccaacgtcggcgactcccgggccgtgttgggcaccacgtccgacgatggcgccattgcggctgtccagctcaccgtcgacctaaagcctaacctgccacaggagaaggagcgcatccggcggtgcaatggtcaagtgtactgcctcgccgatgagcccggggtgcaccgcgtgtggcagcctagccgagagtcgccggggctcgctatgtcgcgcgcgttcggcgactactgcgtcaaggactgcggtgtcatctctacgccggaggtgacgcagaagaggatcagcagcagtgaccaatttatcatcctcgctaccgacggggtatgggacgtgctctccaacgacgaggcggtacatatcgtggcggggacgccggaccgggcgaaggcggccaagcggctggtggagtgcgccgttcgcgcgtggaggcgcaagcggcgcgacatcgccgtcgatgactgctcggcgatctgcctcttcttccacccgccgccgccgtcgtagacacgaaaacctgtaacgtgccgaagtccacgccaaggaggagggggcaacgaaatgcacatctcaagacagactacgattattgtgcccgtggcgttcgtagagtgcactgccgccgtccaccgttcagaaacgtgcagtttgtcacgtgagagcgacactccacgattaggaactgcagccggtgcacggccaaacaaaaagatctccggctttcacacgttaccagtcaagatgtacgagaacatcagagaaaaagggtaggaaagacgcattttgtcctcatttttgggtgtctggctctgaatttctcagtcgcaattatagatgcacgtcaatcacaatttggtcac

SEQ ID NO: 18311 - DNA, 1208 bp, Zea mays
  Clone ID: LIB3079-021-H12_FLI
ggaagggttggagaagaaggcaaaagccagtggtgcatgtcagcttgttgtgaaggacctcaaagaagaatttgttagtgaatatatatacccctgcctgcgtgcaggtgcagtttatgaaagaaagtatctgcttgggacttcgatggctaggcctgttattgctaaggcaatggttgatgttgccaaggaagttggtgcggatgcagttgcccatggttgcactggaaaaggcaatgatcaggttcgctttgagcttacattctatgctttaaatcctgaacttaaagtggtggcaccttggagggagtgggatatcacaggacgtgaagatgctattgaatatgcaaagaaacataatgtacctgttccagtttcaaagaaatcaatatacagccgagaccgaaacttgtggcaccttagccatgagggtgacatcctggaggacccagcaaatgagccaaaggaagatatgtatatgatgtcgattgctccagaaaatgcgccctcgaaacctgagtatttggagattggtatcattgctggtgttcctgtttcaatcaatggccgagacctctcaccagcatccctcctcgcggagctcaatgaaatcggtggaaagcatgggattgggcgtatcgacatggtggaaaacaggctggtcggcatgaagtcacgtggggtctatgagacccccggtggcaccatcatggcagccgcggtacgcgagttggagtccctgaccctggacagggagaccatgcagtggaaggacatcattgccctcaagtacgccgagctggtctatgctggccgctggtttgacccgctccggcagtcctttgatgccttcatggagaaggttaccgcgacgaccactggttcagtgaccctgaagctgtacaagggttccgtgaacgtcgcgtcccggaagagcccctacagcctgtacagggaagatatctcctcgtttgagaacggggagatctacaaccaagctgacgccgaggggttcatcaggctgtacggcctaccgacacgggtccgggcgatgctggagaagggtatctgagtagttgcctgcttgatttagaaataaaaacatctgtttcccagtgattgcagacagatgggtgtttggtggggagttcaccatgctgttttaccatccgtttacattgtccaaaccaaaatattatcattgctac

SEQ ID NO: 18312 - DNA, 810 bp, Zea mays
  Clone ID: LIB3079-021-H8_FLI
cttgccatcagtatgttcagtgtgagatatgtggagaaaagcacctgaagaagaacatcaagcggcatctgcaatcacatgacaaggtgccctctgatggaaggatgaaatgcacttttgatggttgtgaacacttcttttccaacaaatcaaatctgaccaagcatgtcaaggcatgccatgaccagctgaaacctttcaagtgcggaatcgttgggtgtggcaaggcgttcacctacaagcatgtcagggataaccatgagacatctggtgctcatgtatacatggaagtgagttgtgctacctgatctatgttaattccgagtttgtgttttttggcctattaggtcaaactatcagctcctgattttcgtacgtatctctaatttaaacgtatgttcacatctgctttgtgatcaaaccgtgtgaacctgtggataacaaaaatctgcttcatgcagggagactttgaagagttggatgagcagttgcgtgcccggccaagaggtggtcggaagaggaaagcattgacggtggaaacactgacacgcaagagggtgaccatctccggcgaggcttcatccttggatgatggagtggagtatcttcgctggttgctatctggtggggatgattcaattgattgtcagtagccggcgtctttttgctatcaccgctgctttgtacatgggttagattatgtaatgtaagttgtttggtagactacgatggtgttcatgacgcgtttgatatattgtcagcagtatggtagtgcagggctctcatagtaaagcttgccatttttgttgt

SEQ ID NO: 18313 - DNA, 674 bp, Zea mays
  Clone ID: LIB3079-021-H9_FLI
tgttcatgcaacaacagctacccagaagaccgtcgatggtccttcgatgaaggattggagaggaggacgtggtgctgcccaaaacataattcccagctccactggtgcagcaaaggctgttggaaaagtcctgcctgagctgaatggaaaactcactggtatggccttccgagttccaacaccaaatgtctctgttgtggatttgacatgccggattgagaaaagcgcctcctatgatgatgtgaaagcagccatcaagacggcatcagagggtgcactcaaaggtattcttggctacacagacgaggatgttgtttccaatgattttgttggtgattcaaggtcaagcatctttgatgccaaggctggtattggactgagctcttccttcatgaagctcgtgtcttggtatgacaacgagtggggctacagcaaccgggttctggatctgatcgctcacatggctcttgtgagcgccaagcactgatgttcgtactcgttcctccagtaccagtagtagcctagataagaggctgcagttttgacggccattttcttttagctgttgtttggaataaaagaccaaatgttggaacacttggaactcgcgcaaaactggaatccgattcatgacctgtgttttagttgtagagggggcaaatttgcatcgtact

SEQ ID NO: 18314 - DNA, 654 bp, Zea mays
  Clone ID: LIB3079-022-B2_FLI
agaccccagtccttgagaaagcctccaaggcagtttgggagctgattctagacaatggtggattagggaaagagataactgaaacggttgagaaagtcttctgccggctcagtggaatcgacatgatgccacctccgccttcgggcgctggtgctcatcgagagaaagatgacatgtccttcgatgaaaaatttgtgaagagcaaggaggtggatgcctttgaaccatcctcatcaaggaagagacctttcagcgacgtcaaccgaaaaggtgcaggtgctttacctaatggcagtgctacagaccagcatgatgagtccgaggatagtgatcagaagatatgatgctctgctctctgctctaatttttagctcaggctgaagtagctttgctgcttgaatgataacaagtcgaattgtgatccctgcatattctatggctgtatggtatattggcaagttagactttttctgtttatacaagttctgtgagcaactgctataggatatttgagttttcaaatctgctgctgtctattttcttcttaatataggataaatttgttgactattactcgacagttttgtggtatgtttaacttgtaatcattctagagtgttgtaaccatcaagagttataagttagatgcttctt

SEQ ID NO: 18315 - DNA, 608 bp, Zea mays
  Clone ID: LIB3079-022-C1_FLI
ccactcaaagtccccatgttctcgttgtggatcattcccgtgttgattgccttgttgcatcgattgtcctcaatagtttcaacattcgagtaactgttgcgggaggtgccatggaagcattggaattcttagatgcgaacaacagtcatgtggaccttattttgactgactactgcatgcctgatatgactggctatgatttgcttagggaagtgaaggaatcgccaagactaaagcacattccagtggtgattacatgcactgatgtcataccagaaagaatcattgagtgctttgaaggaggagcagaggaatacatgataaagcctctcaaggtttctgacgtgcctcgtattcttagctacatgtgatgcacttgagggagaaaacgaataaaaaggaaatgcaagcataaacagtctttgggttatagttctctatcaatcatgcttaagtgtgaccatatatggtctttttattatgtcacctgttgttttgaataatttgtagccaatgcaagcctaatcagtatttggcttatagttctctatcaatcatgcttatgtgtggccatctatggtacttttaatgtcatccattattttttt

SEQ ID NO: 18316 - DNA, 572 bp, Zea mays
  Clone ID: LIB3079-022-E11_FLI
gcaacaaggcagcagcacaagcaagaaccacacctcctcccttcgcctgtgatcatgtcgtcttgctgcggcggcaagtgcgggtgcggctccagctgctcctgcggcagcggatgcaacggctgcggtatgtaccctgacgtggagaccgccgccaccagcagcgtcaagaccacggtcctcgccgcgccgaccaccaaggccagcgccggcggcttcgaggcggccaccgagggcggcggctgcgactgcaacacctgcaagtgcggcaccagctgcggctgctcctgctgcagctgcaactgagctggcccggcccggcgatggcgcacgagagtcgagaggaggaggacgacgacgaggcgtataaatataatagcggcgtccagtaaataagatcctgtcaactgcacccgccattatccatggtcgctcgctcctcgcctgcgtctcctggtcctggggttcgtctgaacgtcctcgcggcttcacgacggcgatgccgcctccgtcgatcctgtccgtctcgtgccggatttaatattagatctatatgcgtgtttttctgcgtt

SEQ ID NO: 18317 - DNA, 1052 bp, Zea mays
  Clone ID: LIB3079-023-A6_FLI
gcagcacatcaagaacctcctcagcccatccaccccgttcttcttcaacaccctgtacgacccctaccgtgagggtgctgactttgtgcgtggataccccttcagcctcagggagggtgctcacaccgccgtctcccacggcctgtggctgaacatccctgactatgatgctcccacacagctggtcaagcccaaggagaggaatgagaggtattgcattttgttctcgtcttttatctgacattctagcaactgccctgctgctgcatgaagggttgggtctaactcccttttttttcaggtatgttgatgctgtcatgacaatccccaagggaaccttgttccccatgtgtggcatgaaccttgccttcgacagggatctcattggccctgctatgtactttggtctcatgggtgatggccagcccatcggtcgctacgacgacatgtgggcaggatggtgtgtgaaggtcatctgcgaccacctgagcctgggagtcaagactggcctgccatacatctggcacagcaaggctagcaaccccttcgttaacttgaagaaggaatacaagggcatcttctggcaggaggacatcatccccttcttccagaacgtgaccatccccaaggactgcgacaccgtccaaaagtgctacatctacctctctggacaagtgaaggagaagctgggcacgattgacccctactttgtcaagctcggtgacgccatggtcacctggatcgaggcctgggatgagctgaacccgtcgacccctgccgccgcaaatggcaaggccaagtagatgtgccatcacttcggcactggagtgaaaaagaaagtatgattgggtcctgcctaggccccatagatatagctcttttttgagaaggaagagagattaattcagcagcagcttttataaattctttgttgtcatgaagcaggtggttcttttgtagttgatgaaagggatttgtcgtcgctatcgtttacataattcagacaataattttatattgtgtaattctgagaatcaaagcactgtttgtgt

SEQ ID NO: 18318 - DNA, 520 bp, Zea mays
  Clone ID: LIB3079-023-E12_FLI
ccaataccctaggcctatgaaattgccatcaaaatggacattcagctcttacactatcctaaagactgctgaacaggcaccaagaaccccatcgtttgcagatcagttaatagaagctgacaatggtcttggcgaagtaatgaaaccacctgagaaatctttctgggctaaatattggatgtacatcattccgcttggtcttattgtcatgaatgctgttacggcagctgccaacataccagaggaagctgcagggcagggccaacctggagcacaacgggcacctgctgctgttgctgggaggaggagatgatggctgccttccataccgtagttaactatcttcacattgttttctgttttttttggggtattgtatcaatcttaccttgactgcatcatctatggcactgcatgatgatgccatcttttgcttgtgttgaaacacgtagcctatccaagacaatgtggttcctatacatctgtagccaattttggccactagcatgccattggacac

SEQ ID NO: 18319 - DNA, 642 bp, Zea mays
  Clone ID: LIB3079-023-E9_FLI
tggctccaacaatccaccggcaccaacccagcgcggcgccaccggcgacccgtaccccctcccccggagagcgatggcgacggagctgacggcggcgcagctgcgcgcgtacgacggcaccgacccgtccaagcccatctacgtctccgtccggggcaaggtctacgacgtcacctccggccgcggcttctacggccccggcggcgcctacgccgtcttcgcgggccgcgaggccagccgcgccctcggcaagatgtccaaggacgaggccgacgtctccggggacctctccgggctcaccgacaaggagctcggcgtcctcgccgactgggagatcaagttccaggccaagtaccccgtcgtcgcccgactcgccgccgacgcctgaactcgtcagtctcggtctaaatttactctgtcctgcctcttgcggtgttcagtgctgtgcttgcttgcttgttgctagttgctttgctacccaataatctgaatggaaggacgtatgtgatgtgcctgctgaatagttcctagtccttgcatacactgctgtgctaccacatgacatgatgtactcgtgtgtgtgctttggttgttgtgtaattccatgaccatgatcagtaatctgaataaaaaatattggag

SEQ ID NO: 18320 - DNA, 423 bp, Zea mays
  Clone ID: LIB3079-023-G1_FLI
tcagttggcctgtctacgggccaaatcaagacgggagctccttgccggtctgagcgcctggccaaatacaaccagctgctcaggatcgaggaagagctcggtgatgccgcggtctacgccggagcaaagttcagggcaccagtggagccctactaagaaaggaagaggatggggatgttttcttgtggagctatactagctcgctgctgccttttgttacaatgtttgtacggtcgcaataaatgtatggtcgtgtttgctcgagagctactcaggtgattttgtcgtgggagcaccaaaagcagaaaagaactgtttttttcttctctctctctagattctgacgagtggtggtctgcactcgtcgtaatgtcgtttgcctaaactgattttgatggaacaggaaatcttgctggtcttgcc

SEQ ID NO: 18321 - DNA, 1118 bp, Zea mays
  Clone ID: LIB3079-023-G5_FLI
aggcgcgtgctctgctccactccacctccccccccccccccccctgcgccactgacgccgctcgttcgcgcagttttggtcttctggccagcagggcagggggggaacccgcgggagcgaggcgcgcgagcgagcgagcggagggaggaggaggatgatgcacgccaagtcggagtcggacgtgacgagcctggcggcgtcgtcgccgccgcggtcgccgaagcggggcgttgccgcggccggcaccggcggcggcggcggcggctactacgtgcagagcccgtcgcgggagtcgcacgacggcggcggcggcgggcgcaaggtgctcaacgacaagggctggcccgagtgcagcgtcatcgaggaggaagggccctacgagggcctcggcgccggggacagcggcctctcccgccgctgccagatcgtgctcggcttcctcaccttcgtcctcctcttcaccgtcttctgcctcgtcatctggggcgccgcccgcccgtacgagcccgaggtcgtcgtcaagagcctggtgatggacgacttctacgctggtgaaggcacagaccacagcggcgttccgaccaaattggtcacgacgaactgttcgctgcacgtatcggtgtacaaccctgccacaatgtttgggatccatgtcacctccggccccatccgtctgatctattcagagatctcaatagcagtcggccaggtccgcaggtactaccagccgaggaagagccaccggacggtgacggcggtgatccacggcgagaaggtgccgctgtacggcgccgggggcggcctgacgctgtccacgagcgcgggcgggggggcggtgcccctgacgctggacttcgacctcacctcccggggctacgtgatcggcaggctcgtgcgggtgacgcacagggcgcacgtgacgtgccccgtcgtcgtggacgccaggaggaccaagcctgtcaggttctccaagaaggcgtgcgccgtgtacaaggcctgagcttgagagctcgtgaaacctgtgatcgaccgagcgttagcaatgcgtgttcttgcaaagatgtagctattgtgttgatggtgaagaacaataagcgcacacgtatggtcttgtcgat

SEQ ID NO: 18322 - DNA, 702 bp, Zea mays
  Clone ID: LIB3079-023-H8_FLI
gtgcaacccctgccatgcatccgtccttcgcgcatccatgggctggcactgtccggctgtggccatatgaccagtccgggcgcccaccaccgccgccagcgttcaacgcccttccacaatacaacagcttcggcagcacacccagtgcctatggaggcttctacggtgctcctccccctccgtatggcatgccctacgggggagctgcaccccctggtttccaggcgcccgcaccagcataccaagcgacgccctggaaccccactcacggtggtgcatggcatcaggacgcccttgcacactccttcaacactatgacgctcaatccaccgaacgctacttccgagtggtatgccgactccggtgcaggatcacacatgacctcggacgctggatttgcaaaccaggaacgtgatcgccaggtgcaatagctccggtgacctctacccgttccatgcaccctacaccagcacctctgcattactcgctgtacccacctccctgtggcatcgtcgtctcggtcaccttgggcatcaagccttgtccaaactcattacctccagtgtcatttcctgcaataaagatgatgtcaaccacatatgtcatgcgtgccaacttggtcgtcatacacgtttgccgttcaattcatctagctctcgagcttctcacaattttgatttaatacactgtgatttatggacc

SEQ ID NO: 18323 - DNA, 1292 bp, Zea mays
  Clone ID: LIB3079-024-D6_FLI
gcttcctcgcaccggctccggtcctcctcccatcaccatcaccaccgtcgttcctctcacgagtcccgacacacgcaaaccgcacgaaccctggctggcggcgggatgacgcggcggtgctcgcactgcagccacaacgggcacaactcgcggacgtgccccaaccgcggggtcaagatcttcggggtgcgcctcaccgatggctcggccatccgcaagagcgcaagcatggggaacctctccctcctctccgcggggtcaaccagcggcggcgcgtcgcccgccgacgggcccgacctcgccgacggcggcgggggctacgcctccgacgacttcgtccaggggtcgtcctccgccagccgcgagcgtaagaaaggtgttccttggactgaagaagaacaccggaggtttttgctgggattacaaaagcttgggaaaggtgattggcgagggatttctcgtaatttcgtggtctcaagaacacctactcaagtagcaagtcatgctcaaaaatattttatacgtcaatcaaatatgagcagaaggaagagaaggtctagcctttttgacatggtgcctgatgagtccatggaccttccaccccttcctggaagtcaagagccagagacctcagtgttaaatcaaccaccactgcctccccctgtggaggaggaggaggaggtggaatcgatggagtcagatacttctgctgttgcggagagttctgcagcttcagctcttatgcccgagagtttacagcctacctatccgatgattgttccagcttatttctcaccgttcttgcaattctcagttcctttctggccaaatcaggaagatggaggtgatctgcctcaagaaacgcacgagattgtcaagcctgttgcagttcattccaagaatccaattaatgttgatgaacttgtgagcatgtcaaagctaagcataggggagcctggtcaggaaacggtgtctacttctctgtcgttaaatctgctggtgggtcaaaataggcagtcggccttccatgcaaatcctcaaacgagggctcaagcttgatcccgcttccgcacagaaactgcattaagaaggattccctctctttttttttctatatgtaagattgaccgtgctctgtagcttgtatcatgttgtaagttatgctatgtatgaatgtacctgttgtttgtctggcacgcatgacatgccactcatgataacaaactcataatgttagtgctgatctttatggttgtaatgttgtaaacttttctgagagaaaaaaacgtact

SEQ ID NO: 18324 - DNA, 946 bp, Zea mays
  Clone ID: LIB3079-024-E1_FLI
gcgctccctgtttctctacagatccttctctcctcctctcgtccttcgtcgtcgtcgtcgtcgtcgcgtgatctcggcctcctgcgacctccatggctggcaaagctgctgcagacactgggagcaacgaccgagtcgttgaggttgaggggtcctcctcctcctccatggcggacgtgtacaaaggcgagctcacgccgctgcagaggcacgtctccttcttcgaccgcaacaaggacggcgtcatctacccctccgagacataccaagggttccgagctatcgggtgtggcgtcgccctgtctgctgctgctgccgtcttcgtcaacggtggacttggacccaagaccgtactggagaacgagaagcctgcgcctttcaagttccccatctacgtgaagaacatccacaggggcaagcacggcagcgattcgggcgtctacgattccaacggaagatttgtacctgaaaagtttgaggagattttcaagaagtatgcccacacgaggcctgatgcccttacaggcaaagagctacaggagatgatgaaagcaaacagagaacccaaggacttgaaaggatggctgggtggcttcacagagtggaaggtgctgtactccctgtgcaaagacaaggacgggtttctccacaaagacactgtcagggcggtctacgatggcagcctgtttgaaaggttggagcaagagaggaactcaaagaaagagtcgagtaagaagaaatgatgagaaatccagacgctcttatgtggacgagtttgcaagtcacgctgtgcgtgtggttgggtactatcataatttgatttattctatatgtttgtcgattcatataacgatattgcaagtatttgtcgaacgtgtttgaattagcaagacatatagctgtgagctttgatagcctcccatatttttttcagttcatattttac

SEQ ID NO: 18325 - DNA, 586 bp, Zea mays
  Clone ID: LIB3079-024-E4_FLI
agtcaaaatagctgatggtatagcccagggactcctgtaccttcacaacctctcctgaatacgcatcgtccatagggtcttgaaagcaagtaaaatcctgttagatttctgatctaaaccctaagatttctgatgttgggatggcaaggatatttccatcggatgccactcaagcaacagccagcagacttgtgggcacatagtaaggtggatacatggctaatgaattgcatctgatggccttctctcgatcaagtcagatgttttcagtttagtattaatggtgtatctgtatggtgttctacattatttccttccataaaacctgggaactgtggaaagacaggagatggaataagttcaatgatcaatcatttggtgatgactacgaactggaagagctgatgaaataccttgctgagttgctgtggtattgttgtgtgttatgagaaaaaaaacaatagatcatcctacaatgcctgatgttgttgcaactcttagcagtgatggcatcacattgccagaaccaaagcagccagcttactcctatgcgaaattaaatgtgtcagtcactgtattgagtagc

SEQ ID NO: 18326 - DNA, 1358 bp, Zea mays
  Clone ID: LIB3079-024-E7_FLI
attttctctcactccatctcaagtcaggcacggtgacttgacgaggcccatctaagcacactacagcaccgggcgaggcggctaggccccctcaccgtccaccggcgactgggccggccgtcgctgccgccctgcctctccaccgtcgccggcgacgagcaccactaggtgtttttgagtctgttgcgagtgttgtggccatgtccatgttcaataggatcttcgggaagcccaaggagcaggccaactccaatgctttggccactctggacaagttaaatgagacacttgatatgctggagaagaaagaaaaggtgctggagaaaaaagcaaacgctgagcttgagagagccaaggagttctcgaaagcaaagaataaaagagcggctatccaatccttgaagaggaaaaaactttatgagcaacaaattgagcagcttggaaattttcagttgagaatccatgatcagatgatcatgttagaagcagctaaagctacaacagagactgttgatgcattgagaactggagctgcagctatgaaagcaatgcaaaaagcaacaaacattgatgatgtcgacaagaccatggatgaaattaacgaacagactgaaaacatgaaacaaattcaggatgctttgtcagctcctcttggagcttttgctgatttcgacgaggatgaactggaagctgaacttgaagaactggagggagcagagttggaatctcagcttcttgagcctgttgcagctcctccggtgcatccagtgcatgtcccagccaacaagcaaccagctcgccctgccccacagaaagttacagctgaagatgatgaacttgctgcactgcaagcggaaatggcattgtgatcaggttctcatggagaggtgaaacatgtaaatgaagatgaaagctgagtcagctatactatatatttgccatgcgtgtacaaacttggccggatatttggcaaccgcagcagaaaaaagaggctgctccagcccagtgcttgtttcagtgactttggaatctgttgtcgatcgatgacagttcttctgttaatgtcgctcggttagctctacgctaattattcagatcacccaacgtgcattgtttcagtgttttgcttaattggcccatactgtctggagccgtgcatgtaaaagtgttgcagggttcacgtttgatgtggctgttcgcagcgctttcaacctcaggcaagatatgtttccttttatcagtactagagcaagactaataatacagtaggctactggctaaggatctttgtagtctctctcaacttactcgtatagcagttagctattcactgttaatatatggtctatttgtctctt

SEQ ID NO: 18327 - DNA, 810 bp, Zea mays
  Clone ID: LIB3079-024-H1_FLI
gtgccacagtatccttcaaactaccagcctcacactgcaaaccaggcatatgctccacagaccagcaactatgtggcaccttgggcccagaccggagcatatccacctcagcctccggcatatgcatctggctatgcctaccctgcaccgccatgggtggcgcctacacatcctgttgattctaacccttttctttcggtcaattaccaagatccacgccctgctgccacttctgttgctcaaacagcaacatatgcacctcccccagcttcatatcccccttcaatatcttatgcacagtttgcaaccccccagtcaattcagcatagcaattctgtggcttcaccgagcaatggtcagattgcaaatcaagcacaaatgaatgtgaatcaacaaccaaaagattcttcggcagcatctagcagaccatactacatacctgataatctattcagtgatttgatcgatgcaaaaagttttggcggtggaaacaagatgggcgggcccactacaatgggtagctcaaatggtggccagcctatgattggtggaaagaaatagggttatttgtctatatatatacagctgatggtgatcggtagctgccttgttatttattatgattactttgtctggtgtacatttgtacttgtatatcgccattcccccttttgacagatttggctgcattggttgattcgtgggtgcaactgttaagtttaacagagatatggacaattgctcatgtacataaatgattagcatttgctccactgaggtggatggttgtgatgaaatctgttggtattg

SEQ ID NO: 18328 - DNA, 762 bp, Zea mays
  Clone ID: LIB3079-024-H4_FLI
ccacgctgtccgaaggaattgggaacggaccccgcaagggggaagatgtgtgctccagaagagtgcaaagcatgctggtagtgctactggcagtgattcattacccactcctaacaaggtcttgcatcatgcactccattatcgagttgctggccatcagtctagcattcatcagtttgtgcccattattcgatggccacgaatcattccttctggttttggctatggattatcgcttgggattccatcagttgctcctcaccttggcaagggaatactgggcaagccaccaatcattccttctggttttggctacggattgtcgcttgagattccatcagttgctcctcaccttggtaacggaatactgggcaagccaccaagtaatataacacccttagatcaacggagctcaactcaactagtgcacgtacggaatccacaccagcatacatgtcagcaatcatgtggcggagctatggagccgagcagctccggcgtggcttaatgataaggtccggtgatgagcagctctagtagcggttaggagtttgaggttagatttagggtgtgtttggtttgacttttggctttggcttttgccccctaaaagttaaaagccaaccaaagggctggatacaggaagcagcttttttctaaaagccgactttctcgtagtgtaaatctgaaagcacccctgaacctgcttttagtggcttttcggatggaactatgaaaacatatatcgaagaatttttaacg

SEQ ID NO: 18329 - DNA, 1125 bp, Zea mays
  Clone ID: LIB3079-025-A5_FLI
gtccctcgggccatccctagcttcatcccaattcttgttcgtgcagctgctcgtggcagcctgagaccaggcgcgaggatgctggcggtgttcagcggcgaggtggtggaggtgccggcggagctggtggcggcggggagccggacgccgtcgcccaagacgaaggcgtccgagctcgtcgcgcgcttcctggggaccagctgccccgccgccgtgtccgtgcgcctcgccgacctcggccacctcgcctactcccacgccaaccaggccctcctccgcccaaggtcgttcgcggcgaaggacgaggtgttctgcctgttcgagggggtgctggacaacctggggcggctgagccagcagtacgggctgtccaagggcgccaacgaggtgctcctggtcatcgaggcctacaaggcgctgcgggaccgggcgccgtacccggccagcctcatgctcgcgcagctcgccggcgcctacgccttcgtgctcttcgacgcgtccaccaactcgctcctcgtcgcgtcgggcggcgacgtgcccctcttctggggcgtcaccgccgacggctgcgtcgccttctccgacgacatcgacgtgctcaaaggctcctgcggcaagtccctcgcgcctttcccgcaaggttgcttctactctaatgcccttggaggattgaagtgctacgagaatcccaagaacaaagtgactgccgttcctgcaaacgaggaggaaatctgcggcgcaaccttccaggtggaaggggctacggtgctcacagcgctgcattaggagatgaggtgtcttcctccgtctccaggcctggactgggggcaactgtacatggtgcctggtggtgtaatgtaacataacggcaatggcatatgcagctgatcctggtctgcctgtatcatctcctcccacccgtaaagagaagttctttctgccgccatcgccatggtcagtcagagcttctctgctatagctgctggatgtgttgtgtgttgcgtctgtatcgtctctagtttgttcgacttacgtggaaacctgagatcagaccgggtatcgagcggctgcttgcatggatggaatgctgtaatcatctgtagtgacaactccattttccttgtc

SEQ ID NO: 18330 - DNA, 1136 bp, Zea mays
  Clone ID: LIB3079-025-B12_FLI
cgcactcctgccagagaccaaactattcgtatcgtgcgtaggtgttgcttgctgttgcaacggaccatccatctagtgcttgcattgctgtcgcactcgctcagctatctccaccgctattggttgttgtttggttacccacgccctgctctctgataccagttgatagcagcagcagctagctataggttgtcagcaggatcgaccagatagatagcgcggatcggaattaacagcgctgcaggaggatggtgaagagcacgacgacgatgggggcggcgagctgcggcggcggcgtgctgccgctggcgtcgctgaaccacatcagcatcgtgtgccggtcggtggaggcgtcgctgcgcttctacacggacgtgctcggcttcgtccctatccgccgccccggctctttcgacttcggcggcgcctggctgttcaactacgggatcggcatccacctgctgcagtcggaggaccccggcagcctcccgccggagaagggagagatcaaccccaaggacaaccatatctccttccagtgcgagagcatggtggcggtggagcggcggctgaaggagatcggcatcccgtacgtgcagcgctgcgtggaggagggcggcatcaacgtggaccagatcttcttccacgaccccgacggcttcatgatcgagatctgcaactgcgacaacctccccgtcgtcccgctcgccggcgaccagcagcgcgcgccggccgcttgcaggcgggctccggcggcggtcaataccgtcaagcagcagcagcagggcagcgtggtgcctgcttcttccgctccggtcacgacggcggcggcgcagtgcatgccgtcggcggccacggcggcgcaagccatccgcgtcgccgaggagtcgtcgtcgcacatttcgtgcgcgtgattaattactagcttgttgacgacgacgccagtgcatggattcggcgcggacggtgacgaagcaggcacgatggatcgacgagcgccgagtcacgaccacaagaggcgtctctgtacatgcgcgtgcgtgcgtgcgtgggtgtaggtgctgtatgtgcagtgcactcaaactgcctagcttttttttagtaaagaataaacccatggtacggtgggagtgaag

SEQ ID NO: 18331 - DNA, 1155 bp, Zea mays
  Clone ID: LIB3079-025-C8_FLI
gcagccgtctccaacggccgatccatgcccgtctggcgtcttcctcagtcgcatcccctcgttgaggtcgacagcgacggccatggcggcggcctcttctgcggcgccggcgaggcacagctgcgcaaagctctcggtcccagtggaggaccccaaagcagtgacggcgggcggtggcaccgtcttcgtcaaagccacgtggctgccgtcccgcttctccctcgccgtgaccgatggtgccggcgcctgggtcgccgacgcctctgaccacgaggtgcgcctccgcgccgagcagtgggatcagcccgtcgccgattacatcgcccttgccgagcgctacctcgctttccaacagcctggttccacgtattccttccatgacgccggcaaaggccaacgcaggctcgcttggacatttgaaagacaaggtaccaagttggaatggcggtggaagctgcagccttcaccaaacacgcagcagactatatctgagatcctggattttcttatggatgcaaatatacgcttaagtgaagaggttgtgaggaaaacacaatcctttgacaagttgaaacaagaagctgagaagtgcttgcaacaaagtgaaagatttaacaatgagaaagctgagttcgaacaagccgccttttcaaagtttgtggccgtgttgaattcgaagaaggccaagctcagacaactcagagataaagttgtggagctcgaacccgctgtcaagcctccaaaggaggaggcaggtcaggagcaggaggaggaggaggagaactcaacggaccggacagagctcttcgagggagagaatgacaaagaagcaagcgccaaggatgaacactccggcgagacaggcagcggcaacgttcctagttctcctggggaatcggcagctacctccagaggaagaggacgagggagaggtcgtaagaaggcaagaagataggctgcctagactgacaatagcaggtcctactcggaaattcgctaatcgtcgtggtgcgtctttagccggctagtctcatttccaagagcacgtgtctttcatgtacctttgtgttcgcgtgctgttggcaggcagagtattgcctgtgaaactgattgtccgtctgcttcgtctcatcagtggaaaatattttccatttc

SEQ ID NO: 18332 - DNA, 596 bp, Zea mays
  Clone ID: LIB3079-025-E12_FLI
agaattctccaccgccggcacctgccaacttcgtcagccccttgaaacggcctctctcttccatggctccgaccgtggttgtcaaggacgggaagctggtggctgcagtcggtgccagtggtggcggcatgatccccgccggaacgatcgaggtgttcatcaaccatttcgtcaagaacatggacccgttggcttcggtcatggcgccaagggtgtatcaccagctgatcccaaacgaggtcaggtacgagaactggacgacggtgaccggcgaccacttcgagctcgacgccgccacgagggccgacctgcacaggagaggccacgtcctgacgccgatagctggagggaccataagccagcttgtggtgcacaacgtcgggcgccaaggcgacctcaccgccgttagcgaccccagaaaaggcggtgtcccggccggttactgagcaggatcggaattccaagcacggttcattagtcccctgctgatccgtgtgtgatgtgcggcgaagccaggaattatatggaatggaatatacaagagacaattcattatttgacactggtaaagtttttggtttattttcttgagcctc

SEQ ID NO: 18333 - DNA, 458 bp, Zea mays
  Clone ID: LIB3079-025-F12_FLI
gaagaagcttggggcattcatcaagcaccagatcgaaacggattcttccgaggcatacggaggtggttttagagctggctatccggctgttgagcgctatggcttgaaaagaacccttgatcatatgaagttgacagggtctttcccatattaaagcaacagaagtaaaggagggggctttcttccagttgtgaggatacactccacattggaggttttggtttgggttatacataactgatatgcataccaaacgaggggaattgtctgtaaatcaggagaaccctctgctgcgcggaaacttattgcaaactgtctttttataggaaaacgatacatgcaagttttcagacagggaacttgagaggatcatatgtaatttttgggcacttgtttttgactcctttggttatcaaaaacaaggcaacataataagattgaaatttatcttcatcttt

SEQ ID NO: 18334 - DNA, 1398 bp, Zea mays
  Clone ID: LIB3079-026-A12_FLI
cgaggaccgcccctttgcgccacactacttcggccgagggaaaaagaagcgcgtttaggtaccaccaccagatccttgttgctggattctttctttgctactagctaggtgtcccttctcctatcagacagactataagggcaggcccgccctcaccgttccgccgccgcctcgaactggaggagcgagcatgtatcccgcaccgaaacacacacgcaaacggcaccaccaccaccaccaccgtccggcgaggtagggaggcagcggcgccatgggttgctatcctcccctggccaagatcgtgtctagagcgctcggaaaatgcaacggcgggcgcgagagatggcgggaagggaggctggagctggactttgatcacgccttgggctgtcagcccacggagacccactacatgcggccggtggcgcgcacggtgaccttcgccagcaacaactccatctacgtgaccccaccgtcgccgtcgccacaaccgcagcagcagagcgcaccaccagagccacagcgaccccaaacgccgccccggcacgagcccgagcagcacgacggtgcacccgaatcccaaccccaagccgagcaacccgaggcacccgcgcaaacggaagacgcgccgccacaggccgccggcgccgagccgaagccaccaaagggcccaaacccaaagcgaggcaagagcaagaaggggcagccgggccgcgtccggttcggccccgagcctccctctccgcagcaggaggaacggcaaaagcaggagcacgcgcaggggcaggggccaggcaacagcagcgagagcgagaaagcgccgccgccgccgggtcaggagcctcatcatcacggcgcggcgcccgcgcccgcgcaggggcaggcgcagggatacctgatccggtacacgccgtcgccgctgccgaggtgggaggcgacgccgcggcggcacgagtacttctccggggagtaccggagctactacccgacgccggtgcgcgagggcatctaccgcatcgccaccgacgccaacaggctcaccaccatcttcagcgaggagaatcccaacgcctgcaccatcgtctgagactgagagcgacggccaggaaggaataacccgttgttccgttcgggcaacggctcgtcttccttttggttcttggttgattggtgatggaatcattagccaagaatccggttcttcttgtagggagtgttgtagataagaaaaaagcaggaaactttcggttcggccggtatgatgagatgtaaacttccttgtgctgctctgctgctcgccttggattgtcaatttgtcgttgtcctcttacgtttaaagcagctacttccttccaataataaataaactagaattagcagcgccctatagggcgctat

SEQ ID NO: 18335 - DNA, 1218 bp, Zea mays
  Clone ID: LIB3079-026-A2_FLI
cgaggcgacaccgtggatgaggaggacagcgacgatgagtttaagggtttcgacgagaatggcgacctgtgtctgccattcgtcgtctcctgggatccgccaccagtactagtttgcacggcaggagcaagttttacgatggaggaagcagaagaaatagttgactctgtcaatgaaaggaacgatgacctgctctcagcatggtgtgaaatggttaacaacaaagtgactcctttgcctgcaacgcctctacatattcttccagccataaccacattctgtgtttctggatatgagtgctaccacctgcgatattggactgaaattacttctgaaactgatccagatcatccatatttcaaaccctgtgagatgatgcaagtgttctccttgggattatcaagccctctcactcatcctgttaatatttatgggtatttttctgttcgtgataactgggaaccactccgcaattatctatttaagcgctcaagagctgatccagccatgatttctcagggttgctctttcctgccactctgcagcccatgtcgtggaatatatgtgttgcaatttttcttagtagacattgagctttggataaaagaggaaggagaagcatctgctgacaaactgttgtttagtggttatgttgaaatcgacacttcttgggctggatttgaaagaatgctgagaggaaggtttcagggcgattatcttggcttgaacatggagtttgctttcctgggtcacagcattgagactcttatagaggtagaggcggaagccaaacaaccaaccgatgtgagaatcagtgccttaaccagtgggtttgatgaggagatttcactatatgatggcaaattttgtggaagtgggtcaatgttcaagcattttgtggctgtgaagaagcaagaggagttgcacgttgttttaaaaatggatggctcgccatataaatggactttcaaggctggagctggagttgctgcagcacctgagcatccagttccgggctttactcagtattttgtcatgaatgtgtcctttagaacaaggggcaaaacagcatcaacttggcaatggagttgcatctccaacaacgtctgtatatcggaaatagatccgtaagctagcagggtgcgataaggtgcagaaaacgtagctttctgtgggaactttacaggtggaaataacaaagatctctaaatttcggtg

SEQ ID NO: 18336 - DNA, 1165 bp, Zea mays
  Clone ID: LIB3079-026-B1_FLI
ctatctgcatccatctcttggccacacccactgaccgcgccacaccacacctgtggctctccgcctcgagatgctttacacggtgtagctggcaagaagccaggaaccttccctgttccctcccgggcgcaaaggggctcacttttaatttcctcgagaggggactgcctcctttctccggcggcaagccttctcctgccttgttgcctgccactcgggctgtcctccttcttgattcttggcaccgtcggtttaatttcgcgaaatggcggcaggggtgtcgctcaagatggccggcttctgcgtcgtctgggcgctattctggctcgccggcggccagcggaggagggcacaggcagcagctaacatccctcactctcggtacctgacctgaccacgagagcaacatgggcggaggacacgacatgcacgggcagcactacggccacaacggcggcgtgaagggcttcgtgtccaacctcgtccacggcggcggcggccatggccatggaagcggctacggccatggccatggaaacggctacggccatgggaatggcggctacggcggcggccacgggtaccctcctcccgccgccgccggcgcgtaccctcatccgcacggcgcgtaccctcacccgcacggcggccacgggtaccctcctcccgccacctaccccgcgcactcggcgcactacgggcacacggggtcgtaccacaccagccacaacagctacggcggcggcggcggccaccacggcatctacggcggcggcaagcacggcgcgttcggcggcggcaaccgcaagagcggcggcggcaagttcaacaagtggaagtgaagcgaccgaaacgaatcaaaacaacaccctcagtctcgcttcgcacacgtgcacccgcacacgaatcctagtgctacataataaagtgcaagcaggcaggaggcgtacgtgtgcgagtgagtgctgctgctgcggcgaccgtgtgaccgtagtcgttatttgtgtgtacggaataaagtggtgagcgctgagacgtgcgtgtcagcctagtaataactaaaataatggccgtgttcacgtaacgtgctcgccgtatgtaccatcgtgtgtaccggccgtacgtatgtacaagccgagtgcaataatacagtactatgtgtatt

SEQ ID NO: 18337 - DNA, 677 bp, Zea mays
  Clone ID: LIB3079-026-E7_FLI
agtcgtagcgtgacgatgagggttctctctgttgcggtcgctctggtcgtggtggtggccgcggcctgcctcgccgcgccgcggggcgcggacggcgcgggcgagtgcggtgcgacgccgccggacacggtggcgctgaggctggcgccgtgcgcgtcggcggcggaggaccccggctccgcgccgtccggctcctgctgcagcgcggtgcacgccatcgggaagcagagccccaggtgcctctgcgccgtcatgctgtccaacaccgccaggagcgccgggatcaaggccgaggtcgccatcaccatccccaaacgctgcaacctcgccgaccgccccgttggctacaagtgcggagattacactctgccatgagcggcggtgaggtctccaggccggatttgctgcatggcatgcccgagtatcaccgaagcgcgagctcttgtgtcgagcgagtccgtgtctgtcagtcagtctctatgtgttgcccataataaacaaagacatgcgagtaccagacatgtgcaactctagtagcatggtgcgtgtatcactaggtacgcgtactcgtatagttgtgttcagttcagggtctatagagatgtagccctgcattgtcgaaataaatactgtgtccactcgttcgtgaaatgaaaaaaaaggcttgatgctcgact

SEQ ID NO: 18338 - DNA, 1480 bp, Zea mays
  Clone ID: LIB3079-026-F3_FLI
atcaagacagccccgtgctagctcacccgccggggctcgccacgatgagaggcctcctcgcgtgcgccaccctcgcccgccgcgccgccgcctcctccgcgcccgcgcgcgtccgccacctggcgggcgccgcggaggcggcggaggccgagctcaagaggacggcgctctacgacttccacgtcgcccacggcggcaagatggtgccgttcgccggctggagcatgcccatccagtacagggactccatcatggactccaccgtcaactgccgcgccaacggcagcctcttcgacgtcgcccacatgtgcggcctcagcctcaagggccgcggggccatccccttcctcgagtccctcgtcgtcgccgacgtcgccgcgctcagggacggcaccggcaccctcaccgtcttcaccaacgagcagggcggcgccatcgacgactccgtcatcgccaaggtcaccgaccaccacatctacctcgtcgtcaacgccggatgcagggacaaggacctcgcccacatcgaggcgcacatggaggccttcaacaagaagggcggggacgtcaagtggcacatccacgacgaccgatcgctgctcgcattgcagggtcctcttgctgcacctactctgcagttgctgacgaaagaagatttgagcaaaatgtacttcagtgacttcaagatgattgacatcaatggatatgcatgctttctgacgagaactggctacaccggcgaagatggttttgagatctctgttccgtcagagaatgcagtggatcttgcagaggccatcctagagagatcggaaggcaaggtgcggctgaccggcttgggcgcccgtgacagtctccgactggaggcaggcctgtgcctgtacggcaacgacatggagcagcacatcacgccggtggaagccggcctctcatgggcgatcggcaagaggaggagggcagagggcggtttcctgggcgcagacgtgatcctgaagcagctccaggaagggccaaagatcaggcgcgtgggcatggtcacgcaggggccgcccgcgcggagccacagcgagctggtgagcggctcgggggagaggatcggcgaggtgaccagcggagggttcagcccgtgcctgaagaagaacatcgctatgggctacgtgaagtcgggaatgcacaaggctgggacggagttgaaggtggtcgttcgcgggaagtcctacgacgccgtggtcaccaagatgccgttcgtgcccaccaagtactacaagccctcgtagattatattcttgtacagagggacgccttgcgtttctcttttgtcgttgcggcttgttcttggcagattggttaagcattgcaactgtaacttctgtgagattgtcttacggttcacatttcatgtatgcctgcctaataagccttcttttcccaaatacaaagcatgcatgtgcctatgtgaagaatcgaatcttgctggttggac

SEQ ID NO: 18339 - DNA, 908 bp, Zea mays
  Clone ID: LIB3079-026-G3_FLI
cacactcttgcaccgagctagcagccaagatggcgaccaaacacctggctctttgcctccttgttctctttagcataggcatgggcatggccaccgctgctgcaaaccgcaaactgggttatggccccgggggaggaggtggcggtggtggtagcggtggcggtggaggcggtggttacggaggaccaggctatgggtccggatcagggtatggtgagggcggtggcagcggaggtgctgctggagggtatggacatggtggtggcggcggcggcggtggtggtgagggtgcgggagctggtggctctgggtatgggtccgggcaaggatctggctacggagctggcagcggtgctgccggtggatatgggagtggcggaggtggtggaggtggcggtggccagggtggtggttccggatatggccatggaggtggtgaaggatacggctctgggtctggctttggtggtggtgctgccggcggcggcggtggacatggtggcggtggtggtggtggccaaggtgggtctggctatggctctggttcaggatatggatcaggtgaaggatacggacaaggtggtgctcatggaggaggctatggaagcggtggtggcggtggtggcggcggtggtcaaggtggtggtggctctggctatggatctggatccggctccggttatggaggcggcaacgacaacggacattattaggctctttttaagagctagatacatgttatacaaatatgtcaccagacatgagtctgtcttgttgcatgggatgctagctgtgtccatcgtgtgtgtaacaccgcaaggcttgtgatttgtcctgtaaactgcttgccgctttacattactggcaacaactaagtgataaataaaaatcatctatggaattatagt

SEQ ID NO: 18340 - DNA, 318 bp, Zea mays
  Clone ID: LIB3079-027-D6_FLI
cacacatgtttcaaactatgtcagcaaagcagagcaaaccccggactctctggatcctatcattgttgcaaagctgaaagcagctgcaggcttggccaacatggaaacaaagaaatacaaacttgctgcacgcaaggttagtcattaattcactacacctttaaagcacgggtttcttcatgcgtctcctccacctgaaatagcgagtggtttctaccactacaacgtgtctttttatgttgtattaagaagagatattgtgtatgtgtgtgtatatatacacactaataattggaaaacaaaaaatcgtgtttgaat

SEQ ID NO: 18341 - DNA, 807 bp, Zea mays
  Clone ID: LIB3079-027-E5_FLI
cttctacgaccacgtcgccacgcccaccgccggcgtgcccagccccgacggcatccggggcccgccgcccttcttcttcaagttcgaccgcctcggcgtcagggtgcccaccatcatggtctcgccgtggatcaagaagggcaccgtcgtcggccgcgccctcgggcccacggacacctccgagttcgaacactcctccattccggccaccatcaagaagatcttcaacctctcgtccgatttcctcaccaagagagacgcgtgggccggtaccttcgaccacatcttcaccgagctcgaccaaccaagaacagattgcccagagacattaccggaggtgccatttgagagaccaactccacccaaagaacacggctggctctcagatttccagcgggagctcgtcgagctcgcgagcttcctaaacggcgactacatgctgacgagccttgcgcaggagaaccgtaagaagaagatgacagtcaaacaggccgatgcgtacgtgcggcgagccatcacgagctttctgcaggcgagcaagcaggcggtgcggttggccgcaaacgaatctgccattgtgacaatgaggtcgtctctgacaagcaagagcacacgctcatcaagcccttgagttgattcagtctgctaatacatatagctagtgaacagatggatttgagtccacggtctaatgtatattgcctctgaaatgtttatagctgaatagggagctagcagagcctttttaaatataacttttgtttctcttgtcacatattaccaatgtagtataagagttttctgttg

SEQ ID NO: 18342 - DNA, 125 bp, Zea mays
  Clone ID: LIB3079-028-C4_FLI
cagtatttgtgctgtaatactgctgatgtatagtaactaaatatacaagattgggctttcctatacatcagcagtatttgtgctgtaatactttttcgaattgctgaaatatgtgtttttctgct

SEQ ID NO: 18343 - DNA, 743 bp, Zea mays
  Clone ID: LIB3079-028-D1_FLI
gtcctccacccaagccaaagcccctcggatcggatccggtctcctccgtgtcccattcgccacgcagcggcgccacaggagacggagacggagatgaagctgtccatccagtcgctcgccaggaagctgtccctgccgtccccgaagcggggcggcggcggcatcgtcgaggacgggaagaagaagaagaagcgctcgctgtcgcgcggcgaggcgccgtcgttcgcgtcctcttcttcctcctcctcctcctcctccgccaccacgacgccgcggtccgtgctggcggcggcgccggcgccggcgctggagatcccgcggcgggagctggaggccgtgctgcggcgcctgggccacgcggagccgtccgacgccgagctcgacgccgtggccgcgctcgccgcgcagcccccgccgtgcgacgccgacgccgacgccgacggcgacctcatggaggcgttccgcgtgttcgacgcggacggcgacggccgcatcaccgccgaggagctccgcgccgtcctggacgccgtcctcggcggcgggtgcagcctcgacgactgccgccgcatgatcggcggcgtcgacgctgacggcgacggcttcgtcggcttccaggacttcgcgcgcatgatgatggccagcgccggcacggccgacgcacgggccttctagtttagtgatccgccaagcatcgccgccatagccctgatgcgcgccggggaagggatcatttaaaatctact

SEQ ID NO: 18344 - DNA, 1021 bp, Zea mays
  Clone ID: LIB3079-028-G6_FLI
cttttcagagagttagctgatgacaatagcaagtttgggaagttgacattagcccggctattgcttgcttgtgctgctataaaatcccgtggaagatctctaattgaaaggaagggatactgtgaagaggcactggggctcttcactgacttgattcacctggatccatctcataagcagtactatgaggatgaacggagcttagccctgatggataagttaacatgtgacatggagactttcacgaagcattgttctgttcaggttcaaccaaattcagctcccctgcatcatgtgcagtttcgcagattgtctgtaacacgcatcggatttgctgagcgcctgttgtgggttcaaatgctggacctaagccataatagtcttagatcagtcgaaggtttggaggctttgcagcgccttgtgttcttgaacatcagcaacaaccagatcagtagtttcacagcacttgaaccccttacgaagataatctcactgaaagttctggatttgtcgttcaacgagattggagctcactcaattgacacagcacggtatatctgcccgtctccgttctcacacaaaactgaagcaagtgaagcttttgaagagtaccaggaggtaaataatatcaacgtgacggaatactgggacgccatattgttcttcagatctttgaagctggcacagcttgatatcagaggaaatgcagttgccagcaaggacggcttcagaactcttgtcgtgacgctcattccttgtctaaaatggtttgatggtgaaggtgtcagttaatcggtggagttccacttaggagttgggcaatcttggtagtgtcaaggctcactatgtgaactattttttgctagaagccattgatttgcttcatatgcagtgctgtatttgtttatgcgaatctgagacatgatcatgatgttacagagttctgaattttcaggattgaactgtcataggtcatacaagaaagaagatgttatctaattgcaagttgttctactttcag

SEQ ID NO: 18345 - DNA, 367 bp, Zea mays
  Clone ID: LIB3079-029-D2_FLI
ctagccaggtccagggaggcgccgccgctaagaaggacgacgacgagtaggcctcgccgcctcggctcgcccgcccggtcccgtcgatcgccagcaagaaccaacaagcccttctgtctgtttaattccagtatcagttcgattctcatgttgaataatcatgatcatgtgggtttaggtgtcgtgctcacgagtatgtagtgtagctcctgctagcacagagcacagcacagagccactgggcgatcgacgggccgtgcatggcctgtagataccatctcatatgttcaccactgctactttgctcatgttgggggcctctcctgaactgggttcctggatgaactgattttctattagtttccgg

SEQ ID NO: 18346 - DNA, 583 bp, Zea mays
  Clone ID: LIB3079-029-D7_FLI
gcgatgcacgcggacgtgatgcgcaacgtgctgccgcaggtggagtcgctgctgcggagcacggcccgcgtgctgctgtaccagggcgtccgcgacctccgggacggcgtcgtgtccaccgaggcgtggctgggcggggtgcgctgggacggcctgcgcgcgttcctggacgcggagcgcgccgtgtggcggacggccgcggagggcggggagctcgcgggctacgtgcagcggtcgggctcgctgacgcacgtggtggtgtacgccgcggggcacctagtgccggcggacaacgggcgcgcggcgcaggagatgatcgagggatgggtgctggggacagggatgttcggccgcggttgtggtgatcgcgtccgcgacggcgtcaggagcgccgccacatgatggctgcccgagcaccccgacagcacgggcggaatgtgtcccagctatcttactgcgcgatatggattcttgttgctcggatttgaatgggttcgattcgattctatgtttaccgagtgatgaaacagatcggaatgcaaaaaaaacagagatacttttaactgtttgttacaggatgttg

SEQ ID NO: 18347 - DNA, 1091 bp, Zea mays
  Clone ID: LIB3079-029-F1_FLI
gcttctgcttgctctggggggaaggagagagagagagcgagagagagatctagtagagaggctagctaggtggtcctcgaacgaagatgttggcggtgttcagcgggcaggtggtggaggtgccggcggagctggtggcggcgggcagccggacgccgtcgcccaagacgaaggcgtcgcagctggtggggcgcttcctggccgcctccgagccggccgtgtccgtgcagctcggcgaccacggccacctcgcctactcccacaccaaccaggcgctcctccgccccaggtcgttcgcggccaaggacgaggtgttctgcctgttcgagggggtgctggacaacctgggtcgtctgagccagcagcacgggctgtcaagcaagggcgccaacgaggtgctcctcgtcatcgaggcctacaagacgctgcgcgaccgcgcgccctacccggccagcttcatgctcgcccagctcaccggctcctacgccttcgtcctcttcgacaagtccaccaactccctgctagtcgcatccgaccccgagggcagggtgccgctcttctgggggatcaccgccgacggctgcgtcgccttctccgacgacatcgacatgctcaaaggctcatgcggcaagtcgctcgcgccgttcccgcaaggctgcttctactccaacgccctcggagggctcaagtgctacgagaaccccaagcacaaggtcaccgctgtccccgccgacgaagaagagatctgcggtgccactttcaaggtggtggaaggctctactgtcctgacggcgctgcactgatcggtcatcagctggcggaggcgatgcgatgatgatgcagaactttgtacatgcgttggtggatggtggtgtaacatagtggctgccaacaagtcatgctcatgcaaaccgatgaatctatctctgtatcatcgatctcggttgcttgctagtccagactccagacatggctatatatatatagctggtgctaataaataggagtataatcgtcatatcgatcggttgcgtgtggaatgccaatcatgtgtgtaatctgttggcaaataacaaacctctgttcctccc

SEQ ID NO: 18348 - DNA, 486 bp, Zea mays
  Clone ID: LIB3079-029-F12_FLI
aactaacaacagctcaggctgaaacagcgatgacgacgacgacgacaacgctgccgacggggcgcgccgtggccctgctgctgctcctgctggccacgacggcgacggaggccgcgaacccgtgcaacccggcgcagctgacgccgtgcgcggggccggcgctgttcggcggcgcggtgccgccggcgtgctgcgcgcagctgcgggcgcagcaggggtgcctgtgcgggtacgcgcgcagccccaactacgggagctacatccgcagccccaacgcggcgaggctcttcgccatctgcaacctgcccatgccgcgctgccgttattagcgggcagtagtatatatactagctagctattccaatacaatcatgctcagtcgttggtatatcgtacgtactcatgtgaagcatgcggtgcacaccatggatcatgtaggacgttctgttacatgaataaaatccaggacgtctgagtttgtgcggc

SEQ ID NO: 18349 - DNA, 755 bp, Zea mays
  Clone ID: LIB3079-029-H5_FLI
ccagccctgcccagcgcaccaccaacacctggcaccgtcctcctccgccgtcgtcactcgctcgatcgctcctccatccatggcgcccaagaacgctctccccgccgccagcggcatgacgctggagccgaggtaccgcggcgtccggaagcgcccctggggacgctacgcggcggagatccgggacccggccaggaaggcccgcgtgtggctcggcaccttcgacaccgccgaggccgcggcgcgcgcctacgacgccgccgcgctccacttccgcgggcccaaggccaagaccaacttccccgtcgcgttcgccacggccacggccacggacacgcgcgcgctcccgctcccgctccggctcccgctgccgccgccgccgccgcccaagaagctggccgtgagccccagcggcagcaccgtggagtcgtcgtcccgggactcgcccgccgcgccggcccccgcgccgtcgctcgacctgagcctcggcatgccgcccatggtggccgcccagccgttcctgttcctggacccgaggctcgcggtgaccgtggccgtggcggcgcccgtgcctcgccggccgaccgctgctgccgcgggcgcgggcgccagcaagcaggcagcatactcctgctgccgtgaagacgagcagagcgacaccgggtcgtcgtcatccgtggtggacgcctccccggcggtcggcgtggggttcgacctcaacatgccgccgccgggcgaggtggcgtagctggacc

SEQ ID NO: 18350 - DNA, 948 bp, Zea mays
  Clone ID: LIB3079-030-A7_FLI
gggcaggtgtagctcttttcttttctgtgcaactcaactttgctgtccctggtataattcatgttacttggtcatactcaagtaactcaactctccattttgattggaaacaggtttcttatttttatagttgaatataatactttggtctgttcttaaacaatagtcttattacaggtagaccccctaggcaaggttgaccctgaagtggaggatttacttctagaaatcgccgatgacttcattgactcggtgactgcatttgcgtgtaccttggcaaagcacaggaaatcatcagttgtcgaagccaaggatgtgttgctgcacttagaaagaaattggcatttatctgttcctggtttctcaagggaggataagaatccccaaagaaattctgtaaagccattggtagatccccaacaatcagaaagtgacgttactggtattagaggtacaagcaataaactaggtgctaataactcagttggcaaccatcaaatacgacctccaatggcagaaacttcggctgtgccaacagtgggctctctatcgaaagcccctcgcttctaagggctatgctgctcttccctattgaaggaaaaattcctgtttcaggacaatctacgtcgaaaacagcccataggctctaactcaaggattgctagcaagtggaagcaaaataaacccacgagcgtctgtggcaaactgcagatgcttgtgtcttacaggaaagcagttgctgacttaccaatcgtctctggcagatcctctctacctggggtcgtatgtaactgtattttctttttgtgcccgtaaatgcccccatccgttgtatataaatgtttttgcaatgggggcattatcgtctccagttttgatgttgctatgtaggcgaacaaatactaaagtggaagttaatgaagtgtaagattgatgtcgttttccgtt

SEQ ID NO: 18351 - DNA, 2205 bp, Zea mays
  Clone ID: LIB3079-030-A8_FLI
tctccagtctccactgcatctaaaaaaaaacgtaaaacccccaccacgccgtagcggagagaagagaagagaggagcgcgcgatcgatgtcgggctccggcgatcgtcgcggcggcggtcctccgggttcccatagtggctgggaaaccatggggaagaagtcgaagaaacccgggcaagccggggggagacagtgggcaccatggagttccacaaatgtgacacctaacacagcaaggccagcatggggtggcagtggttcctcgcacccttctggaaccagctgggctcaagctccagatcatggtgctgctaccagaggcaatcctagaccgccatcacaaacatcgcgccctgttctggctccacctctggcaaatggttggcagtggcaatccaggcctcgcccatctggatctgaagtcaagaaggatgatgctcctccatctggttctgtccctgaggtggagaatgttgatggcaacaatacatcagatgatgatgatgatgatgacgatgatttgagtgatgatatcagtgatgactatgattctgacgcaagtgagaaaagttttgagactcgaaaaacgaacaagtggttcaaagagttctttgaagtattgaatacattgagtttggaacaaattaatgaacaaactcggcaatggcattgcccggcatgcaaaaatggacctggggcgattgactggtacaaagggctgcagcctttagtgagtcatgctagaacaaagggttctacaagggttaaacttcacagggaattggctgcattgctggaagaggagctttctcgcaggggaacttcagtgttaccagcgggtgaacaatttgggaaatggaaaggactgcaagaaagcactgatcgtgagatagtgtggccaccaatggttattgttatgaataccttcttggaaaaagatgaagatgataagtggaagggcatgggaaaccaagagctccttgattattttggagaatatgaagcaagtaaagcacgtcatgcctatggtccctctgggcaccgtggtatgagcgtgttaatatttgaaagctcagctgtgggctacatggaagctgaacgtctgcataaacactttgttaatcaaggtacagacaggaattcatggcacctacgcaaggttcgatttgtgcctggtgggaaaaggcaactatatggtttcttagcaaacaaagaggatatggaggcatttaacaagcattgccatggtaaaagccgtctgaagtatgagatgaggtcttacaatgagatggtggtgattcaaatgaaacagatgagtgaagacaaccaacaactgaattacctgaagaacaagatggttaagacagagcagcgatctaaagcagtagaagaatcattgggtgttgttacccagaagctacgtgagactattgaagaaaatatatttgttaggagtaaagcaaaagagaagcacatggagtacgaggaagagatgaagtcccaggaggaaatttttcatggtctaattgaggatattcacaaggccacagaggataaagaaaagcagtttgagaagttgttgcaggaagagcgctcaaaggccagacgctttgatgttgattctggaactatgaaagatcgtcagctaaggaaggaatatgtgcagaagttcattgattgccaagtcaaggatgtggcagagtttgaagttgagcgagatgagctgatcaaagtccacgaggacaagaagttgaagctcaagaaagaatacatggatctggagctggagctggagaaggagtttgacgcagccctgacgggcctgatggagaagcataagccagataccttcgaggcctccagctcgtaagggggcttcagcggctaagcgctttccttaggccccagctaagcttggagcagtctcgtacatgctcctgcttgcttatccatgaaataatgcctggacagtctgtagatgttgcgaaaacatggtgccccctgtggttgccgcgtgtgtagtaagtatctctcagtcgtagtgtggttgaagcatctgaactcttgagcggtttgcctgtgatggcatatgggtcaaactacaactggagtgtgatatctagtttatatggtccagcgctcttgttgactgcgggtggtggtttgccccggataatttactgattatgtctgctccgatcgtc

SEQ ID NO: 18352 - DNA, 782 bp, Zea mays
  Clone ID: LIB3079-030-D3_FLI
agacctcctgttttgtgtattattacagaattcatgcatggaggcagtatttttgacttcctttacaatagacgaggaaattttcaactcccggatgtgattagaattgcatctgatgtgtccaagggaatgaattacttgcatcagattaatattgttcatagggatttgaagactgcaaatcttcttatggatgatcaggttgtcaaggttgcagactttggggttgcaagggttaaagaccagtcaggagttatgactgcagaaacaggaacctacagatggatggcccctgaggtcattgagcatttgccgtatgatcatagagcagatgttttcagttttgggatagttctttgggagctgctgaccggaaagcttccatatgaagacatgacacctcttcaggcagcagttgctgttgttcaaaaggatctgaggcctactattgctgttgatactcatcctatgctcgctgagctactccagagatgctggcagaaagatcctgctctaagaccaacatttgcagagattgtggatatattgaactctataaaggaggcggttcggagttctgtgcatcacaaaaggcattcatgtcgatctcactccgggagaagacgaggctgttgatgtgccagttttatgtggtgccgcacgcccttttcattttatttttgtagtcgagcgataacttcagaatacggccagaagagcttactgtgttcattccgagaggttttggtaactttattttttttaatttggacttatgcttc

SEQ ID NO: 18353 - DNA, 403 bp, Zea mays
  Clone ID: LIB3079-030-E7_FLI
gaacatcaaaaccatctatgcgttgttattttgaagctggagaaaaactaatcctgaacattaggcagtttaattaggagggcgaaggggggagtgcaagaaaaacgcaacattcgctcacagttttagtaattacaaggggtgttaattggacatccccaattctgttctgcgacttcctgcctccttagtccttcctgcagatcgttatatgtttctttgttcctctccccgtcctagattttcttttcatctaaggtttggtgatgttgaaggcagaactggccttttctctaccatctcatagtggagaacaaagttgtccttgcgtattgtgtcccaggattctgggtcaaagcaatagtaagatccacgttcatagaggtgagtttttactagaggt

SEQ ID NO: 18354 - DNA, 952 bp, Zea mays
  Clone ID: LIB3079-030-F3_FLI
ccatcgcccgcgcccacgcccgcctcggcaaccgctgggccgccatcgcgcgcctgctccccggccgcaccgacaacgccgtcaagaaccactggaactgctccctcaagcgcaagctcggcgccgccgccgccgcgtccggttcggcggtttccgctgacgactccgccgccgccgccgagaccgaggcgcgccggggcaagatgatgatgatgagcatctcgccgcccgacagcccctcggggtcggggtcggggtccgaccgtagcgacctcagcagccacggcgccgggtccgggtccgggtccgggtccggccagatttaccgccccgtggccgcgcgctccggcgggttcgagccggcggactgcgccatgagccgtccgcaggaggaggacccgctcaccgccctcagcctctcgcttcccggcacggaccagcggtttcaccaccacagcgccgccgccgacagccacttccaggagctcccgccgtcgccctcctcacccgcgccctcggcctacccgttcagccccgagttcgcggcggcgatgcagcagctgatccgcaccgaggtgcagcggtacatggcgagcgcgggcctgcgcgccggctgcggcgccgttggcgcgaccgacctctgcatgccgcagctggtggacggcgtcatgcgcgctgccgccgaacaggtcggccggatgcagtagccccgcgcccccggcgggggcatcaaaccgtcagtgctcccaaatcgtcgtctagctagggcgaccgcaacgcaacggttgttggagtagcaaacttggttttaaggtggagggaaaaattggctgggctgaaagcagaaagccttgtaatgtacatgaaagaaacggaacggatggcgcgctacaatctgagctcgccattgccgcatatatctgctttaagagagcattgcgctgccttgcct

SEQ ID NO: 18355 - DNA, 434 bp, Zea mays
  Clone ID: LIB3079-030-G3_FLI
acgacatccactctcctaggattccctccacagaggagatcgcagaccgcgtcgagaagatgctcgccgtgctcgacaccaacatcctctgggtgaaccctgactgtggtctcaagacacgcaagtacacggaggtcaagcccgccctgaccaacatggtctcggccaccaagctcatccgcacccagcttgccagcgcgaaatgaggtcgtttgatagctccatggtctgatagcgcggaatgagccagttgttttgaataatttgggtgttaccccctgttccatggtgttagtgttaggttagcctctcattggtgagatacgccgtttcaagatgtgttctaagtttggagtgtgtgttttcctttgggctatgtttctgggggtatgtgtgtgctttggttataaacagaaatgaaatatgcagtcttc

SEQ ID NO: 18356 - DNA, 824 bp, Zea mays
  Clone ID: LIB3079-031-C7_FLI
accgcaccctttcatcagcctgcctgtccactgttggcttggtgacttcctccgctccgctccgctcccctccgctcccgaacggtcgatctttgcatggcagcagcagctggctccaaggggcgggcgatcgctggaagcttcgtcagccgcgtcctcgccggcaaggccgcctcgccgaggagggccgtgcacgcctcggcgtacgacaagaacctggaggaccaggtgcgcccggcgttcgtgccggacgatgtgatcggcagcgccgggagccccgacaagtactggagcccccaccccaagaccggcgtcttcggcccggcggcggtggaccccaagctggccgctggtggcgcgccggacgccggcgcggatgctgcaggaggcacggtgctggaccagaaggtgtggttccgcccgctcgaggacgtcgagaagccgccccccgccgcgtgagccgcgcggcgctgctaggccagcccacactgctgctcgctcataaaaagggcggcgggagagcctggcagtggcaggcactctgctcgtgctcggccgggctgggctccctgcttatatcactgcaatattatactactagtagtggtgcttgatagcagtgtgtggctgtgctaataccagtataatactggttctactataatacagtcgtatcaggcatggcgtgcatcaggactggttgtgatagtagcaacgtgatgctcgtgcctgtaataagaacaagcaggcgatgtgtgcctgtgatgtaccggtgtcgtcagtgttataagtacttgggtcaatggtttctgcatgtgtttgtt

SEQ ID NO: 18357 - DNA, 325 bp, Zea mays
  Clone ID: LIB3079-031-F6_FLI
gcgaccgaaacgaatcaaaacaacaccctcagtctcgcttcgcacacgtgcacccgcacacgaatcctagtgctacataataaagtgcaagcaggcaggaggcgtacgtgtgcgagtgagtgctgctgctgcggcgaccgtgtgaccgtagtcgttatttgtgtgtacggaataaagtggtgagcgctgagacgtgcgtgtcagcctagtaataactaaaataatggccgtgttcacgtaacgtgctcgccgtatgtaccatcgtgtgtaccggccgtacgtatgtacaagccgagtgcaataatacagtactatgtgtattatt

SEQ ID NO: 18358 - DNA, 1267 bp, Zea mays
  Clone ID: LIB3079-031-G10_FLI
aaccctcaaaaaactaactagctagcttagctaaccccggccgatggacatggacccaaggttcaacgtcgactggagtgccaacgagatcgagatggtgagatctctcatcgcttgtcacggcgccagcaacagcacgaacgacgacattgtggatgagctccaggcaatgttcccagggaaggataagcgccaggtaactgacttgtacgttgagcttgtggtggagatgataaacagtggggcagagctgagcagcaaccagctcctgctcaactctggtggggtgcacagcaggacgatggatgggtatttagcagacgagatgaaggcgaagaggatgctgctggaggaacagcgccgtaggaaattagttgctgttcctcgacaggataaccaacaacgtgcaaggaggttttggactctggaggagcacaggaatttcctgcgtggcctgcgtgtgtacgggcgcggcaattggaagaacatctccaaggacttcgtcaccactaagacgccggtgcaggtctccagccatgcacagaagtacttccggaggcaggagagcaccacaaggaagcagcgctacagcatcaacgacgtcggcctctacgatgctgagccatgggaggagcagcagcagcagcagcagaacagctcactgccggctttcactagcaccaacaataatgcttattacaacccatactgctatgcctttggtggtggccagcagcagctcgcatcatcccccttccagtgccatgccagtcaggcgagcagcagcagccagacagcagtcacctgggctgcaggaggtcagcagccaccgatttgctcttctgcagctccacccatgatggaggggggtggggctgaaatgtcatggaccacttattattagctagctactagcttggagattttgttcctaagctgttaaatctcgttgttgaagacaacatgtatggtagtttaaggccccgtttcaatctcacgggataaactttagcttccggctaaactttagctatatgaattgaagtgctaaagtttagtttcaattatcaccattaactctcatgtttagattacaaatggctaaaagtggctaaaaaaaagctgctaaagtttatctcacgggattgaaacagggcctaagtagtagtttcttcatttcaatgaactagtaacaattaatgtgttcccgttatatatttgtatgtatgtgttctatggtctctgctaattgtacccttgtttgtcc

SEQ ID NO: 18359 - DNA, 651 bp, Zea mays
  Clone ID: LIB3079-031-G5_FLI
aacttctcttttcagtgtcagtgtgaattgccagaatcgtatgaagcgtacagaaagcagcagcaccggtggcactcaggtcccatgcaattgtttaggctctgctttgtggatataatcaaatctaagatcggtttctggaagaagttcaacctcatattcctcttcttcctgctccggaagctgatactacccttctactccttcaccctcttctgcgtgatcctccccatgacgatgttcgtccccgaagccgagctccccgcgtgggtggtgtgctacatcccggcgacgatgtccatcctcaacatcctcccgtccccgaaatcgttcccgttcatcgtcccgtacctgctgttcgagaacaccatgtcggtgaccaagttcaacgccatggtctccggcctgttccagctggggagcgcctacgagtgggtcgtcaccaagaagtcggggcgctcctccgagggcgacctcgtggccctcgtggagaagcactccaagcagcagagggtaggctcggcgcccaacctcgacgcgctgaccaaggagtcgaagggcaccgaggaggagaagaataagaagaagaggaagaagaagcacaacaggatctacaggaaggagctcgcgctgtccttcctcctgctgacc

SEQ ID NO: 18360 - DNA, 685 bp, Zea mays
  Clone ID: LIB3079-031-H3_FLI
gaggaggagcacaggttgttcctcctaggcctgaagaaatacggcaagggggactggaggaacatatcgcgcaactttgtccagaccagaacgcctactcaggtggccagccacgcgcagaagtacttcatcaggctcaactccggcggcaaggacaagaggaggtccagcatccacgacatcaccacggtcaacctgacggacgaccagccgccctcgccgtcccagtcctccctgatcaccagccagtcgaacgcaccagctccatctccagctccggctccagccgcggggatatgccaggtcccattggcggccgacgtcaagcgacacggtgccggaactctgcccttcagctcaccgaaccggacctctgcggtaccggcctacaggatggagtttcatgaccaacaaggcctgcagtgtggccctctgcatgatcagttgctcgccagccagagcgtcctgttctaggcgcggtggcagcccaccctgcgccatggatcgaccaggtgcctattgtataatacttgtggtatcgctgtagcttcagcgcctgtattgaagggattagcctttcgggagcataacagaaaggagatcttcatttcatggtggtccataatttgttggagaatgtaacaaaaagaacgccgagaattcgatgccatggtattttcagact

SEQ ID NO: 18361 - DNA, 567 bp, Zea mays
  Clone ID: LIB3079-032-A6_FLI
ccgcagttcgcgcttgtggggctcgccgaggcgttcggcgtcatcggggagatcgagttcttgtacaccgagctgcccaagagcatggccagcttcagcatgtcgctgctgtacatggccttcggagtgggcaacctggccggcgccctcatcgtgaaggtggtgcaggtggcgagcgggcaaggggtgggaacgggctggctcgtcgacaacttgaacgtcggccgctacgactattactactggctgctcacgggctacggcgtggcgaacttcgtgtacttcgcttggtgctgctggttgtatggcgaggaggggaagaacgtggagtgggaagaggaggacaacacggagcagccctagtcctgtatggctgggactcctgtgagccctgtagggctgaaacaatgaacttctggaggttgaatgttcaatgcatgtggtagtataaaacatctagttaactttactagcctattagttactgttgtttagacttgtcagggtcaccagcagaggaggtttattagtcttcctacaagtcaatgcataacatcgatactgcgc

SEQ ID NO: 18362 - DNA, 1103 bp, Zea mays
  Clone ID: LIB3079-032-C8_FLI
gccaaacacacgcgaaaagaaggagttcgagtacaggttacagagaggcagagagcaaagatgtgtggtggtgcgatcctcgccgagctcatcccgaccacgccggcgcgccgcggcggcgcggcgtggcccgccggcaagtgcaagcggcggaaggcgaacgacttcgaggccgcgttccgggagttcgacgaggactccgaggaggaggaggaggacgagggggtggtggagagcaagcccgccttcgtcgtccgcgcctcgtccgcggcgacgcagcccagggcgcgccaggagcagcggagccggcgccgggcgcccgaccagcagcagtacaggggcgtccggcgccgcccgtggggcaagtgggccgccgagatccgcgaccccgtcaagggcgtccgcgtctggctcggcaccttcccctccgccgaggccgccgcgcgcgcctacgaccacgccgcgcgcggcatccgcgggcccagggccaagctcaacttcccctcctcctcctcctccgccgccggggcccccgccagccgcaagcgcgcccgcaccgccgacgccgacgccgtcatcgacctcgaggaacaagagcagcgcccggccgcggcggccctgaagcacgaggccgccgagtgctccggatccgacgcgctcccggacttctcgtggcagggcgtgtcggcggcctacgacgagccccccgcgccgcgcccggccttcgacttcgaggcgcggccggagagcgccgcggacgaggcgtcgccccgggcctccgactccgagtcggacgcgctgttcgactcgctcctcttcggcgaccagttcgccttcttcgacgccggcgcgtacgagtcgctggacagcctgttcagcgccgacgccgtgcagagcaacgccgccgccgcggcggaccaggacatgccgctgtggagcttcgacgacggctgcctcgtcgaggacaacctctcgttttaagcttcggcgactgttgttgtgtcttgagttttgtaaattacgacctgttttttttttggagtttctgctcatgtatatctgtatcgatggtgagctgaatgaaatcatccttctcaggaagt

SEQ ID NO: 18363 - DNA, 1377 bp, Zea mays
  Clone ID: LIB3079-033-C1_FLI
ccgtcgcggccgggtcggcggtccccagttctcctccgcttcttcctccacgctcccgtccccgccgcgcgaggaacttcccacttccaggcccagcttgtctggttaggattagggtcgtcgcttcgcacgtgtccggtgtgccgccgtcggagatgtcgcggacgctggtgcagccggtggggcagaaacacctcaccagcgtggccgcgcacctatcggccgcgagctaaacgaggatcctaaccttaaccctgggcagactgatactctactcctggatgacaatactaaactacttcggcaacaacattcccatcaacggatctatgtctggctgtcatcgcgaagatcatcctcgtcatcggtgccccagtgggccctttaacatcctaggcctggccaacgacccctaccaaactgccatcctcaaggtgaaggagatcaagaacggccgactgaccatgttctccatgttcgccttcttcatctaagcctatgtcaccgacgaaggcccccgtgtagaacctcgccaagcagaaggttcttcttgagggtgttgagacgtacaacaagttgcaaaacgaccatattacagcaaaagaacgactttagtaagtttgatccatttatatattatgagttagcttcgatcgacaaaattgtgtgcttatatttgcaggtaagagcatggtactaatatggcatgttgtgtttagtggaaacctccctatcttgaggtttcttcttgatcatggtgatgatctccatgaagaaggcagcctggaaggtcatgacaggttcaccgttctacatatagctacagagaaagatataatgtagactcatattttctattatttatgttgcttattctgttaatcaataaactgcatgcaattttttgtttataactatttttagaaaaaaacatacttcatgtgcaaaacattgcctggcgaattttcatgctttacttgtatatttgtggatcatactatgttcttgtaactacagtttaatgtcagtggaacacaaacacatgaagttgttctgataacgataatccttcttgaataattcctatatgtaagttagcatagcatgtgtgtgggtgtttgttttcttagtagtggcaatggtttattcttttttttgccatcctgttagtattttgtagttcattatcaagtatcaacctatctctttgctttgtctaatccgagatcaaggacttccttctgaccgtgaggaggaaggatgcccgatcagtgaaggtcaagaggatcaaggatgttgttaaattcaaggtatgttgatccaagtacttgtacaccctctacgtctttgatgctgagaaagcaaacaagttgaagc

SEQ ID NO: 18364 - DNA, 389 bp, Zea mays
  Clone ID: LIB3079-033-E12_FLI
gcgctagcagcctcagaccctgacagatcacaacctgacagatcacagagtgctgagtggaagcaacatatgaagctgacacggaaaaggaaaatggatgatctccttggttatgtttccctgtcttgtgcatgctgcatttcctgctaccgtgaagaccggggtccaggagagtaggagactgaaagcactgtcgagaagactgaaattatcacattgacatgaagaccaaagccatctcttacctacttatctttgtagcttacgtttctattttattctgtcatgaaaactaaagtcttatgtatggtcattatgtactattttggttctgaaaatatttgtttatgttatgaaaactattggttgaaagaatggtgattacggtt

SEQ ID NO: 18365 - DNA, 1586 bp, Zea mays
  Clone ID: LIB3079-033-G8_FLI
cggcgtataccacgagcgcaccaaccaccaccaccatcctcatccttcgcgaggagatcccttcgtcggggaagagaacccgccaggagacctacccttcctcaatcctccgaccctccatggcctcctcctccctggccctccctccaatctctctcctcctcgcgctgctgctcctctccgccccctcgccgtccgcctgcgcctcgctttccttcctcaccgcctcctccaacggctccgcctccacctccgccgacccggagctggaggacctggccccggagcccaccttcctcgaggaggtcatcgacgccgtctcggagaagtacgactgggatccggacgccgaggtcagggtctggccgctcgacgccggcgccgtccgcgtcggctccgtgcagcggtacgagttccgggcgcgggcgggcgggtcggcggcgctggcgcggttctccgacgaggccgtggagtggagactcccctccgcgccggccgtcgaggaggtggatgggccggacggggtcgacgtcgtccccgccgaaggcgcgttcgggttcgacaccggcgtcagggacgtggagctggttgggccggtggagctcaagcttgctggcaaccaggacggtagcctcgtcgagctccagttaccttcggggaatgccacatacacaaggcttaagaggatatttgttgcggatggcattgcattaaaggtcattggtgcacagaaagtttctgtaacccaccctcacagtataggtcttctatcaaatggaagtttgttggctagtaacaacgacctaagccaaatatggcctttgagctactcaacctgtgccccattacttcaagtgggtattgtaggatcagtcgtaattgttgtgcatcaaacaagtgtatctggaggccatgtgaagactttcttaaggtcacatgacactatagagttattgtcagacaagtataaagtccatatatcaaatcggttgatctcagaatttttgttctcctcaattagcccaagactgataaagcttgaaaagatcttgaagacttggtttagcaaaagaaaccaggagaatagttcagtgcacttcattgaagctaaagtgacatcgatacctctggtgaaattccgtttggagtttgaaagggatgtcactgaggatgatcccatctgggaagatgttccagagtggaaaacgagacccatggtccagcgagttccagttgacattatagctagagtggaagatgacgataggctgaaggctatttcggtgaagaaggttaggaggcaatttccagtagtggacaccactacttggggcagcctgacttcaaatatttccttcacaaagtttctgtcattcattttgccaccagaaccgctgtcgctggatgtaaagtggtaatagattctgctgtcatctacttctcgtagggctgataggaaattacacatatacatcgatttcatgtatacttaggctggaagtgtgcctgaacgtgaaatgggttgtaacataatgttcaaattttgtattgcatctagcaatgcaggggtacaatcttacattgtt

SEQ ID NO: 18366 - DNA, 1080 bp, Zea mays
  Clone ID: LIB3079-034-B9_FLI
tcctctacctggcgtacgcgccgcggcgggcgcgcctgcggactctggcctacttcttcctgctggacgtggcggccttcgcgctcgtcgtcgccgtcacgctcttcgccgtccgcgagccccaccgcgtcaagttcctcggcagcgtctgcctcgccttctccatggccgtcttcgtcgcgccgctcagcatcatcgtcaaggtggtcaagaccaagagcgtcgagttcctgcccatcagcctctccttctgcctcacgctcagcgccgtcgcctggttctgctacggcctcttcaccaaggacccctttgtcatgtaccccaacgtcggcggcttcttcttcagctgcgtccagatgggcctctacttctggtaccgcaagccccgcccggcggccaagaacaacgccgtgctgccgacgaccacggacggcgccaacgcggtgcaggtgcaggggcaggtcatcgagctggcgcccaacacggtggccatcctgtcggtgagccccatccccatcgtgggcgtgcacaagatcgaggtggtggagcagcagcacaaggaggccgccgtggccgccgagacccgccggatggccgccgcaaacccggacggcgccatgccggaggtcatcgagatcgtccccgccgccgccgcggtgtgacccaacgccaatcaccatgcaccgtacacaccctgctagcttcttattagctagctcggatgacgtacgacagtttggtggcaagtggctggcagctcaagcatgcagatgcaggcatcgtcgtctgctagttgatcgtttagttggttaattgttggattattattgcgtgtctctctcgtgtgcgtagtcttgtcagttcagttcagttcagtgtcgaatcaagtagtagtagctgttgtttgcattggatctgacaatgcatgctaataattatggtggtgtgatggtcttggtcggtacgtgcgtagtcgtctacgtacgccgtgtcaacgtcgtagatctctacgggaagatgataagactgtaacatgcagggcatgcatctatttatacttaacatattctttgtgtgctt

SEQ ID NO: 18367 - DNA, 679 bp, Zea mays
  Clone ID: LIB3079-034-E6_FLI
cgagtttttttttcggccctacttctgtctccacggctgccgacgagccgcgcaaccgaactcactgcaggaggactcgcacagatcggtgagcgagcaagcgagagatggctgggaggctaaccgcggcagggtcccgcatcctgggcggcggcggcgcacgcgccgcggcttccgccctccgacaccgcgccggcatgggcctccccgtcggccgccacatcgtccccgacaagcccctccccgtgaacgacgagttggtatgggataacggcacgcccttcccggaaccctgcatcgaccgccttgccccgcacatcggcaagtacgaggcgttggcgtggctgtgcggagggctagggttcttcgctgccctcggtatggctgctgttgtgaacgacaaggcctccaatataccatatactcccaaagtctacccgtacgacaacttgagagctgagcttggtgatagaccatagaaggttttttgtctgtttgacaaggcactttgatgaatatgatctgagatctatatctcctttccatcagagagaagcagggggaaacttatttaccatggtttttttgtgactgccttgttgtaaaccaccgttatgtgatttgctgaatattgtgaagcatgggtttgccctacaataatgcaaccagctctgaacct

SEQ ID NO: 18368 - DNA, 425 bp, Zea mays
  Clone ID: LIB3079-034-E8_FLI
aaaggccaatctctagtggatgctgcttaccgaaaggcaaaatcattgaaggcagccagcaaacgggcccctggtgcaaggaaaggaaagaaagagaagaatgaaaggcaacattctgagaaggctccgaacaggcatgaagagatgcgtgacctgttccaaaatgatatgagtgaatggaaacagggacgctcctcaaagaaaaataacaaatttgcgcccaaaaaatcaaggaactcttttaagagcaaagcaaggtacaagcggaagtagaagactcggccatctccgggtttatattacattcccttgtttcaattttgactgactgatcctgaagaaatatctgggatccagatgtttgcagttaattcaagtttgctttaaacatattctcatatcatgtattgaaactcaccgttttc

SEQ ID NO: 18369 - DNA, 787 bp, Zea mays
  Clone ID: LIB3079-035-B9_FLI
cctcccgcgtcagaagtcagaactagcctagcctaagccgaaagccgaaaggactcggtgcttgcgtgcggcggatggcgacttcgtcgtcgttctctggccccggcgggtccccggcccacgcgtctccgggaggcggaggcggcggcggcggcggcggtggcgtggggtcgtaccaccaccaccggtcgcggttcggcgacacgacgctgaccaaggtgttcgttggcgggctggcgtgggagacgccgtccgaggggctgcgccagcacttcgacgtctacggagagatactcgaggcggtcgtcatcaccgatcgcgagaccggccgctccaagggctacggtttcgtgattttccgggacccggacgcggcggcgcgggcggtgcagaacccgaacccggtgatcgccggccggcgcgccaactgcaacattgcggcgttcggcccgccgcgggccgcgcagccgagagggagaggaggaggaggaggaggccgagggccgcacgtgcccgatcagccgccccaggggtcgccgtcgccctacagggtgccatcgcagatgaccccgcctcatcaggccgccacgttgttctacaacccccagttcgggtgagtgcttttgtcgtctatacgttttcagctgttcctcctcaaaacctctggatccaggaccaggccgtagaaatacgtgctgcagatccctgtacggctcagctcagccgagctgagatcacgatgatgcgccggtgacgagcattgccggatatgattgcctacccggct

SEQ ID NO: 18370 - DNA, 1589 bp, Zea mays
  Clone ID: LIB3079-035-D9_FLI
cttcaagcagctaacataattaactcatgggtgcatagagatatgccgccgacgacccatcatatctatggttacttattattgggcatggagcacgtcatctcaatggaggagatcctcgggcccttctgggagctgctaccaccgccagcgccagagccagagccagagcgagagcagcctccggtaaccggcatcgtcgtcggcagtgtcatagacgttgctgctgctggtcacggtcatggtggcggcgacatgatggatcagcagcacgccacagagtggacctttgagaggttactggaagaggaggctctgacgacaagcacaccgccgccggtggtggtggtgccgaactcttgttgctcaggcgccctaaatgttgaccggccgccggtgatggaagaggcggtaatgatggcgcctgcggcggtgagtagtgccgtagtaggggaccccatggagtacaatgccatactgaggaggaagctggaggaggacctcgaggccttcaaaatgtggagggcggcctccagtgttgtgacctcagatcaacgttctcaaggctcaaacaatcacactggaggtagcagcatcaggaataatccagtgcagaacaagctgatgaacggcgaagatccaatcaacaataaccacgctcaaaccgcaggccttggcgtgaggcttgctactagctcttcctcgagagatccttcaccatcagacgaagacatggacggagaagtagagattctggggttcaagatgcctaccgaggaaagagtgaggaaaagaaaggaatccaatagagaatcagccagacgctcgagatacaggaaagccgctcacctgaaagaactggaggaccaggtagcacagctaaaagccgagaattcttgcctgctgaggcgcattgccgctctgaaccagaagtacaacgacgctaacgtcgacaacagggtgctgagagcggacatggagaccctaagagctaaggtgaagatgggagaggactccctgaagcgggtgatagagatgagctcatcagtgccgtcgtccatgcccatctcggcgccgacccccagctccgacgctccagtgccgccgccgcctatccgagacagcatcgtcggctacttctccgccacagccgcagacgacgatgcttcggtcggcaacggtttcttgcgactgcaagctcatcaagagcctgcatccatggtcgtcggtggaactctgagcgccacagagatgaaccgagtagcagcagccacgcattgcgcgggggccatggagctcatccagacggcgatgggatccatgccgccgacctccgcctccggatctacaccgccgccgcaggattatgagctgctgggtccaaatggggccatacacatggacatgtattaggcactgcgggtttcgtgatcgctgggaacattttatttgcaggcgtcgctgaataaggctggttgtctcgatctcccttgacatgaaatccaaataactcacaattaaccatgagtgttccgtttggtcccagtttcgaaggtattgttaatcataatagtgttgttctgtacttc

SEQ ID NO: 18371 - DNA, 831 bp, Zea mays
  Clone ID: LIB3079-035-F4_FLI
tgacaatgagagcttggctcctatatttactcccgcgcgatcagttgctgaagctgatgttgatgcaagcttgccccagcaggtgttcgaggacgtccatgttcatacatatactgctgaagaaacaaaagaagcatttgatgtagctcgtaacagcgtagaacttctttcaactgttctttcctcttctcctgagcaggatgctttgcaggatgacttgacaaccactcttgtgcaacaatgctaccaatctcagcacactatccagatgattattgagaccgttggagacaatgaagctgtgctctttgaggccttgagcgtgaacgatgagatccagaaagtattatcgaagtacgaggagatgaagcagcccagggcctccgagcatgcagaacatgtaccagttgtcataccgattgctgcggagcatgaagatttgaatgctgttggcaatgaagacgcccttgtcagaaaaccagctgccgcgagagcaacgtcaggtggagatgatgacatccttgatgatctcgacgagatgatatttggcaagaagggaggtagcagctcccaggaaggtccgaaaaagccagatccgaagaaggatgacctgatcagcttttaattacctttccataatcgcagccagtacttgctattgtctggtgctgtacccactcggtagattgaagatttttattcgcatacgattcataccggtttgttcagttaagtcgctacactttgtcaatcttgtttcatggctgggtcccatgaccatgaatgtattgtattggatggtggattatgcgagacggcgggaaagtgtcc

SEQ ID NO: 18372 - DNA, 647 bp, Zea mays
  Clone ID: LIB3079-035-G10_FLI
tacaccacaatctgaagcaagtagctccaatcatcagtcacaaaaagaccaagaaatgcagtcccgaaacagcagcgatggtttagtgcctctgcctcttaatgcagatggtgctgttggttcaggaacaagcacaagggaccttgaaaattcacttcagaaggcacaagaaaactttattaagagccagattgagatgttacagatccaactgcaaatggtgcagcgtggcgctgctgggccgcccagtaacgagaatactgagcacacagaagaatgactgaatctgtgaacagacacttctgcatcgtggtgtaataataaggagaatactgatgagcacacagctgaatctgtaaataggcggcgatgaggatgggacaaaagaaagccaaggattggcgatacctggggctgggggaaactgttacatgatgtcttgcctggatttttggcaggcctgttaatttatgcttcactattagtgccttgttgccagcaccagatgtttctctctctctgtgtgtgtgtggtggtttctgtacatgaaagccttttgacgggagaaccaaccatggctagtttaattatgaagttcacttgttgtacccgagggaaaatagaaatgactcttgtttttgcctatc

SEQ ID NO: 18373 - DNA, 1177 bp, Zea mays
  Clone ID: LIB3079-035-G4_FLI
ctgcaagctccaccgacttttatggcagtgagacctcctatttccgtctctcctcctggtgcaactccaccgcaaggtcccattgcattgacaccaccaaatatgcccaccatgtaccgcggccagcatccaccagtaccaaatttcactggttcagcgccattggtttccaggcctcctggtggtggggctcagtcttttcctacagctgcgcctcaaggcccttcctcagtagcatttcccggtggaccatcgctgcggccaccttaccctccggcgcctgatcaagcgagggggccacctccagctttctctccagttggatcaactcctggcatggtgcctccacctattgcatcttccggcctgcctgccccgcgtcctgcgaacacgagctgcatccagacacaagtagtagcccctttgagacctccgctcccagccgcgggcgattttactttccggcctgccataccaccggcgcatgctccagagttcgcagcaccaggcagtcaaatgggagcaatacatggcagaactcaccaccctggaccattctcctcccatcctggtgaccagaagaaccccagccaaggtttccaagggccgtttgatggcagcaggcccatgtacacgacgaatcaggctcggatgcacgctccacctcctccacacttccacggagccttccccaggaacgcatctcctcttgagttcccagcggggttccggggagcctggccgtccgtgcaggcacctccgatgccggcaccgtcacatccatcgtctttcccgccgtttcagttgaggccaccgccaccgccgcagcaggatatgtctggcgcaggcggcaccaggtggcccggtggcaatcaaatctacaacccttttgcaccaacggctgcggcggcggctcagagagcggaggctgaccctgagtacgaggatctcatggcatcagttggcatgaagtagcgaagactgctggctggcccctgatctgtctgtggcacaaacacagaggcttcttcctattgcttgccaagatgtgcgggttactaatctcctccaatgtatctctagatggtactgaattccgttccatcatagacaggtgccatgcttgaacgaaaaacaaaaataaaaaataaactagtggaccttgtttgagacatgc

SEQ ID NO: 18374 - DNA, 748 bp, Zea mays
  Clone ID: LIB3079-035-G7_FLI
ttcccgagtctccagccaaccgcatccagtccacccccatccccctcgaccccgacaaacccgacccgatggcgcccaaggccgagaagaagccagcggagaagaagccggcggccgaggagaaggcggagaagacgaccgcaggtaagaagcccaagtccgagaagcgcctgccggcctcgaagtcctccggcaaggagggcggcgagaagaaggggaagaagaaggccaagaagagcgtggagacctacaaaatctacatcttcaaggtcctgaagcaggtgcaccccgacatcggcatctcctccaaggccatgtccatcatgaactccttcatcaacgacatattcgagaagctcgccggcgaggccgccaagctcgcgcggtacaacaagaagcccaccatcacctcccgcgagatccagacctccgtgcgcctcgtcctcccaggagagctcgccaaacatgccgtctccgagggaaccaaggccgtcaccaagttcaccagcaattgagcagcctgcagcgtccacggatttgttaggtctccccttcttacaagggttcttcgtcgtgtcctctacccctccccgcctatgtatgtgctgtgaaatcgttgatgttctcgtcgggtgaacaaaggccagtagctagcttgcctgcttcataaatcgtgccggattgtaatgggcctcttagatttgacgcccctattttggaatatagttgtatcggtgccttccctgct

SEQ ID NO: 18375 - DNA, 1263 bp, Zea mays
  Clone ID: LIB3079-036-A2_FLI
gcgagcagtctgacagctacacacacaggcagacgccgttccgcgggggaaaggtgcggacgcctgaatcctctccaactccggcaccgcattcgcacgcccgcgaagccccgaatcggagaggacagaggagtcatggacgcggcggcggcggcggctgcggctgcgagccccacgagcaagaggatcgcgctggtgacgggagggaacaagggcatcgggctcgagacgtgccggcagctggcgtccaggggcgtcagggtcgtcctgacggcgaggaacgaggcgaggggtttggaagcggtcgagcgcgtcaggtgcgcccgcggcgacgccgaggtttacttccaccagctcgacgtcaccgacccctgcagcgccgcccggctcgcggatttcgtcagggatcagttcggtaggctggacatcctgatcaacaatgcaggaatttcaggcgttcaccgtgatccagttttgtctgctgcggtcaaggataaggtcgatggcatggatgtaaatcagagagtcgaatggatgaaagaaaattcgaaagaaacatacgaggaggctgtacaatgtatgaaaacaaactattatggtgccaaacttgtcacagaggcactacttcctcttcttcagttatcctcctctggaagaattgtcaacgtttcgtcaggctttggactactgagaaatttcaacagcgaagaccttaggaaggagtttgaagacatcgacaatcttactgaaagtagactggaggaactgatggataagtttctagaggattttaaggccaacttagtagaggcgcatgggtggccgacaggtggatcttcagcctacaaagtcgtcaaagcggcgctcaatgcgtacacgaggattcttgccaagaagtatcctacgctgcgtatcaattgtttgacgcctggttatgtcaagaccgacatgtctatgcacatgggggtactgacacttgaggaaggcgctcgcaaccccgtgaaggttgctctcttgcctgacgacggaccgactggtgcttattttgatctgaatggcgaggcgtcctttgtgtgatggtatttctcccttttcagcttcagaataaaagaaagagctatgaagtagttagtgccaatcagtattgtagttcgacttgaatacttaaactagcacgttgagcaaaccgtagagctcaacaccagggatttcctcgtcttctgtataatatctctggtgatgattgtatatttgcaatgaacc

SEQ ID NO: 18376 - DNA, 520 bp, Zea mays
  Clone ID: LIB3079-036-C4_FLI
ctttgcttgacaacccactacattgatgcaaactttatcttgaaaaaagaagactattgcattcaaagttgtaaaatatcaccctctcgcatacaagcttttaatgagattgctgagaggtctggatttccttcaaaggctggattaattcttgatgttccaaattgttgcaattcgacacacaacatgattatggaggccattgagtacaaagttgtcttgaagagatatgctgaggaacaacttgagccttcaccagatgatgaagagtggacaaattctgaggcgattggagagtttcttgggggcatttgaggaagctacaaaagtattctcaacacatagaagtccaacatctcatttgtttttgcataatgtgttatgtattgtatccatcaagctctaagaaataaaaattggcaaatcaattgtgtgcttgaggatctagcactagcgatgtatccaggtgttggtgctcactggagtaatggagtcgaatgcttttggcgcgcttttttcc

SEQ ID NO: 18377 - DNA, 594 bp, Zea mays
  Clone ID: LIB3079-036-D4_FLI
caaactcagagagggacccgatggcacccaaggcggagaagaagccggcggcgaagaagcccgcagaggaggagcccgcggccccggcggagaaggcccccgctgggaagaagccgaaggcggagaagcggctcccggcgggaaaatccgccggcaaggaaggcggtgttgacaagaaggggcggaagaaggccaagaagagcgtggagacgtacaagatctacatcttcaaggtgctgaagcaggtgcacccggacatcggcatctcctccaaggccatgtccatcatgaactccttcatcaacgacatcttcgagaagctcgccggcgaggcggccaagctcgcccgctacaacaagaagcccaccatcacctcccgggagatccagacctccgtccgcctcgttctacccggcgagctcgccaagcacgccgtctcggagggcaccaaggccgtcaccaagttcacctcgtcctaagctccttttctagtaggtccttaagcgccgtggcgccttttgactgtatggaatgtttgtcatctgaaagttgatctgagcagtgcaatatataattctggcatactattctcgc

SEQ ID NO: 18378 - DNA, 521 bp, Zea mays
  Clone ID: LIB3079-036-E5_FLI
cgggaacacaagctactacagatccagactctttttctcaggcgatgagcaagctccgtcagcggtatgatgaactgaaagagcgctatggggtttctgatattactgtttcagtacaaaatgtggcttctcagcgggggtacagtagcattgacttggtgacgcttgaggacatggtccttgaaatcgtgaggcaaatcgagaagctgatccgtgcaaaggagatgatggaagctgcagggaagccattctaaacaagatacacatacacaatagttctgctccggcatacctattttctggccagttaccagacctccgatgcttcgctgttcaagaaaccgattgcagttgcctacggctcaaagcacaagcgcgtgaaatctaaggaactgaatctggttgttccactcgaatatgcttatattgtattgcaagatcacttgccaattgatagtgcaaaaaatgcattttgtagtttggattctctagtattgactttaatccatatgtattgaagt

SEQ ID NO: 18379 - DNA, 985 bp, Zea mays
  Clone ID: LIB3079-036-F9_FLI
gcaagccagcaagctgctgtacagtaataaattaagacgattaaactccatctaagatgcatgagacaaattacacagtaagcggattgatctatcggggtcaagataacctctgaataagtaaagtagtactaaataataactacgctcctgctagctccagagaaaagcaaggcatttggacgagatgaatggtggtggttagcttaggctatataaagctgcttaattgtttggtttttctcttctccgttatgtttgttggggggggcatcttttctctttctagcttcaccttgcaccggacgcacgctcgcttcagatgctgaccaccggcgcccactcgaaccggccgccggcgtcgaggggcacgccacggacgaagtcgaagttgtacttggaagcaaagcgcttggcctgggccgcctcggcggcggcgaagaactcctggatctcgtgtgctggcggcacgatcagctccgcagccggcgttgccgccggtagcgacgggccagtcttgtgccccgccagatccgactccagatcgctgagctcgccgtgcgcccggctcgatggcgtcgtctctcgcctctcgcggtctgggccgctcccggagttgctcgccgccgagacatccaccaggacgtgatccccgccagcctctgcagcgtcgtcggagcggcaggtgtggctcccgcgctgaccccccacgtgcaccgacgacgccgtgctggagcaacgcgagagcccggccgcgagcgccgcgccctgctgtcctgcagcgccatcagcagcctccgccggggtcggaaccgacggcggctgcggctgaggcggtgccatgaacagcatgcggctacgcaggtggatgtagcagcttccgccgtccccaccagcgcccacggaggcagcaggctcccccgccggcgccctcttcctcctcggggcgacgaccttcgcgacaccgccggtcgccgccgcggac

SEQ ID NO: 18380 - DNA, 368 bp, Zea mays
  Clone ID: LIB3079-036-H11_FLI
catttctagagtaagtaatactctgggggcatctcccgctcgcttagctgtgcccgccaggccatggagcgtgaggacgccgacggcgctctcgattcgtgggctcaattctgcactctttccaacgagcttctcgccggagacggtgatctcgccgtcggcccacgcctagctcccgtcgttggtgacctctgcacacgcggcctcgccacgctcgtccgcgactactattacgccctttgcttgcattgcatcccgtgttagacttgtgctcatgcgcttcactgcatcctgttgtatctggatggatttgaccaaatgcaaattgccaacatttttattaattaaaattgctactgcaatgtctc

SEQ ID NO: 18381 - DNA, 602 bp, Zea mays
  Clone ID: LIB3079-036-H3_FLI
cacggttttcttcttgtggcaactcagcattgcctactcagaagagccttgttcctcaaacaaagcctctcgcagaccctcagcaattagcagcaagcaggcctaaccagtcacaaggaacaaaaactgatagagcaagtgcacaagcatctgcaattaaaaatgaaggttcacgatccagatgcaataaagctaccattccccattcgagaaacaaaggcagcaagaagacgcaacagcaacctaatggacgtgttcatgcgatcaagttcccagtagagtagcccattcgtaggtaatttattggttaagtggaagtgtctcttctggtgaacagtctcttcttttctcctttccaaatgaaattggttattgtcaggattgttctaatttggactgtcccgatccgaggttttggttcgccggccattggtactagaagctaacagcactagttgtagcactgacgatgaacttacctgtaaatatggccacagaggccttggcttcttcctgccgaaggtcgtggacctgatgaacattttgaatgtagccttcatcttttgggcattgagttctagttgattgatgttttgtgtttg

SEQ ID NO: 18382 - DNA, 700 bp, Zea mays
  Clone ID: LIB3079-037-B8_FLI
cttccttttgtggaccgtgcgtgtgtgtgttgtgcagggtcgaggcggcgtggcggtcgcggccgggagcgatgatgggctggcggtgacggagcagcaggtggcgaagctgatggaggaggacatgggcaccgccatgcagtacctgcaagggaagggcctgtgcctcatgccggtctccctcgcctccgccatatcctccgcgacgtgccacatgcgacctccggtgggaggaccgggcctcggggtcgccgccgccgccgcgcaccacatggccgctatgcggttgccgccccacgccatgaacggcggcgccggagccggagccgacgccgtgccggcctcacccagcatgtccgtgctcacggcgcagtcggccatggcgcccaacggcgccgggggtgggactgatggcgagggctcgcactcgcagcagcagcagcggcatcatcccaaggacgccgcgtccgtgtcgaagccgtgatccgctcgtgaacgtgaaggcaacggccgccgtgacactaacggcgcaaccatgacatgacactcggagctgacaaagtgggctctttggcgggcccacccacgggctctcggcactgcagctggccctccgaccttcccccttttcgcattttattcccagtgtaaccattgtttttttttccttgtttaatattaatcccatgtattatcgatt

SEQ ID NO: 18383 - DNA, 895 bp, Zea mays
  Clone ID: LIB3079-037-D6_FLI
cgcttgctaccccgggtccccaccacacgcacgcgagcccgcggccaccacctcgatgccactgacgggctggaatccgctggcgcccgtcctccagaccgtcgccgctttctcccgccacatcctcatcgcccccgacgccgggctcgacgaccaccgcctccgcccccttctagcgctctccctctccccgccttcgccggcaccaccgcaaccggaggtccggaaggagaagaaggatgccaaggaggcgccactgacgaaggaggaggtcggccgggccacgtggatgctgcttcacaccatcgcagcgcagttccctgacgaacctacgaggcaacaaagacgggatgcaaaggagttgatgcatataatctcgagactatatccttgcaaagaatgtgctgatcacttcaaggaagttttgaaagcaaatcctgtgcaggcaggatctcaggctgatttctcccagtggttatgttatgtccataacgtggttaatcgaagccttgggaagccaatatttccctgccaaagagtaactgcacgttggggtaaactggattgtcctgagcgctcgtgtgatctagaaggcagcatcgacatcatgccaaaccgatgacatggccaagaaatcgcttgaactttctacccgtagatgatttcatttcaataccactcattgatgagcacttgagcaataccagggagataagaaagagaattcaggactccgtgctgacatagcagggcgtccatatgcttctgtatctttggcgttggaccgttgtagtaaaagatatgaatgtctcgtgatatttgtacttgtctatgcctagtctgatgtctgacgactcttccataacccataccagtccgtgcagattttcatttt

SEQ ID NO: 18384 - DNA, 571 bp, Zea mays
  Clone ID: LIB3079-037-F7_FLI
aattttgccagcaattgatcttatcagcgtgaatgctttggttggggtaagctgagcacctttttgtttgataaatgagatatatagctttgaaagtattgataaattatcttcatctagtatccttgatgcgaaatataattctctgatttgtttagtaactgagtaatccatacgagtgttctgcagatattctactttgttggatttggattgttttgtctggaatcgttgctcagcatctgggtcatccagcaagtgtacatgtacttccgtggaagtggaaaggctgcagagatgaagcgtgatgcgacaaggggtgcaatgagagccgcattttaagtggtatttttgtgatgatagtccaaagtcccaatcgcatacttccggtggataggttgtgccaacaaacagaggctggcatatgtttcttccttggttgctgactgtgactaaactgccagtataggttatcgtgatgttacaagtccctgttttaactaaaatacatagggaacgtgcagcttgtacttcatcgttttatttttggtagttgaaatatggacttatg

SEQ ID NO: 18385 - DNA, 1163 bp, Zea mays
  Clone ID: LIB3079-037-F8_FLI
agcaggaataccccaagttccgctcgccgaaatcgttcgtgcgcctgctggtgttgacactggaggtggccgtggcgtgcatgtcccggtccgtggaccagctcgtcctcctcttcgatgcaagctttttccgatcggcgtcggctttcctcaacctgctcatgggcacgctcaagatcgtcgccgactactaccccggccgcctccaccgcgccttcgtcatcgacgcgccctccctcttctccgtcctctggaagggagtgaggccgttcgtggagctggcgccggcgacggcggtggtgtgctccctggacttcgaggactcactggaggacgcctccttcacggcgtacccgcggaccgcgtccctgcggttcgagccgccgccggcggcggtcacggggaaggccggcgtggggtcagcctcgtcgcggttctccgtcacccccaccgacaaccccgtcaagccgtggtacctctgcaccatccccgcctcggtgggctcccgctccgtggtacccacctccagcagcagcccgtcgctggtcggcgcgtccccgctctccgcgcgctccttctccttcgcctcgcccgccgcgctgcgctcgacgccgttcccgcgcggcgggggcgcccccccgacgccttcctccgccgtcacgggccacaagatcccgccgccgccgcagttcccgcggacgccgcggccgtcgttcctgcagtcgccgtcgacgctgttcgcgttccggaaggacgggcagcagaccagccgcgtggagcgcgagcgcgggtccttcctcccgtacctccgcttctaccgccgcccctacgacgagatttcctaccgcgccatgatgcgcccgccgctcggcggcctgatacccatcgtcgagaagttcaagcacaagccggtgcagcagacgctgcgtcgacacgctgggctccaccagcatcagcagcagcagcaccaccattaccaacagcagcagaggatctgagtctcgtctctcagtcggtactgcatggcgacccgagaattttctccatacagcataaaggcgatgctatattatgctaagttaatcttttgccaagtatgatattcttaaaggcatgtataataacatcccaaaaaaatgtgagtaaaatggactcctttctgc

SEQ ID NO: 18386 - DNA, 1085 bp, Zea mays
  Clone ID: LIB3079-037-G8_FLI
cagcttcagcctggccggccggcctgctattaaaccactttgcttgcaagtccaagaaactgctagagaggaacaagctgagatctccagcatggggaggggaaggattgagatcaagaggatcgagaacaacacgagccggcaggtcaccttctgcaagcgccgcaatgggctcctcaagaaggcgtacgagctctccgtcctctgcgacgccgaggtggcgctcgtcgtcttctccagccgcggacgcctctacgagtacgccaacaacagtgtgaaggctacgatcgagaggtacaagaaggcacacgccgttggctcttcctctggccccccactcttagagcacaatgcccagcaattctaccagcaagaatccgcaaaactgcgcaaccagatccaaatgctgcaaaacactaacaggcacttggttggtgactctgtgggaaacttgtcactcaaagagctgaagcagctggagagccgccttgagaaaggcatctctaagatcagggccaggaagagtgagctgttggctgccgagatcaattacatggccaaaagggagactgagcttcagaatgaccacatgaacctcaggaccaagattgaggagggagagcaacagctgcagcaggtgactgtggcccagtctgtcgcagcagcagcggccaccgacgtggagctgaatccgttcttggagatggataccaaatgcttcttccctggcggccccttcgcgacactggacatgaagtgcttcttccccggcagcttgcagatgctggaggcacagcagcgccagatgcttgccaccgagctgaacctcggctaccaactggcgccgcctgacactgacgttgccaacaataaccctcagcagttctaaactggatccatgagaaagccaactgtgaccgatggaagctggctgttgcctctagatgatattggcttccataacctagcttattatggtgtgtattgttgccttttgtgtgtgattctccttactactgatggagaataaacctaatcgattgggcataatgatcaaatgctacagcacccgtgaggctgtgatc

SEQ ID NO: 18387 - DNA, 569 bp, Zea mays
  Clone ID: LIB3079-037-G9_FLI
ggggatctagcacgctagcgagcgagagagacgcacatctatctgtcaagcgacgccgcggcctcgatcagagtcggaggcgaacacccccatggcggcggctggcggcggcgcaggagggaaggtatccttcaagatcatcctcacctccgaccccaagctccctttcaaagtgttcagcgtgcccgaggcggcgccctttaccgcggtgctcaagtacgccgcggaggagttcaaggtcccgccccagaccagcgccatcatcaccaacgatggaattggcatcaacccccagcaaagtgcaggcaacgtgtttctgaaacatggttcggagctgcgtctcatccctcgcgatagagttggagctgtagtcatgtcttccggttagaggatatatacagtccaatgcataatgagcaaaacttgagagaaataaagctttgatgttggccttgcttggctgtaggatgttgttacaaggataataagcgaaccttaccgtacatgtctcaagttgtatgctctctgtttgtatgtggagagatttctgaaagtgaatccagtatctg

SEQ ID NO: 18388 - DNA, 573 bp, Zea mays
  Clone ID: LIB3079-037-H5_FLI
cggaggtcgactcgtcccgcaccgtccaggaggtcccgccggcgaactcgccctgcgccgcgtcggaggctgccgtgcacaagccggtgatcagcgtcaacatcgagcaggaggtgaaggtggacgggaaccaaatcatggacatgtacatgaagagtatgcagcaattcacggattccctggccaaaatgaagcttccagccttggacatagacaacggtagcagcgggaagagcagtcccgcagcagccacacccagcgcagactccactggtgccgactcgaccgcggtgaagaagccgaccgccgccgggcagcaggagaagccctctcccaaggtgttctacggcagccgggcgttcttctgatctccggttcgctgatcagcggtagcacaccgctccagccgccgagtaacgaagcaaagagacggcatttgcagtcgtctcagctgaatcttactagcgcagaggaataacaccttctcaggctcttgttctaggtttgtcagatcggggatgagttactgtctttaatgtatccgtcagtacttatgaaaaatggtttggtttc

SEQ ID NO: 18389 - DNA, 1654 bp, Zea mays
  Clone ID: LIB3079-038-B11_FLI
cacgcacgcgcggcaccacatctagtagagcctgcctaccgccccactgtcgtcgtcattaattcaccaggctagagctagctagctggctctaccgccgttccccgatcgagcgtccgtcatggagattgatgagatggagagcggtgtcgtcaatggaagcggcggcggcgggtcgttccggcgggcgaggtgctgggagctgctgtgctcggcggcgggcatgctctggggcaaggtcgtcgggttcgcccgcaagctgggcaggatcgcgagggacgacccccggcgggtggcgcactccatcaaggtcggcctggcgctcacgctcgtgtccgtgctctactacgtcaggccgctcttcaacaactggggggtgtccaccatgtgggccgtgctcaccgtcgtcgtcgtcatggagtacaccgtcggtggcacgctgagcaaaggcctgaacagagcgtgcgggacgctggccgccggcttcatcgccgtcggggctcacaaggtggcctacctgtgcggcgacaaggccgagcccgtgctgctcgccgtcttcgtcttcttgctctcgtcggcggcgacgttctcgcggttcatcccggaggtgaaggcgcggtacgactacggcgtgaccatcttcatcctcaccttcagcctggtggccgtgtccagctaccgcgtcgacgagctcatccgcctcgcccaccagcgcttctccaccatcgtcgtcggcgtcggcacatgcctctgcaccaccgtcttcgtcttcccggtctgggccggggaggacctccacaggctcgccatcggaaacctcaacaagctggccgagttctttgaaggactcgagtctgaatgcttcagagagaacgccacgttcgagaatttggaagcaaaacccttcctccaagtgtacaagagcgtcctcaattccaaggccaccgaagactctttgtgcaattttgccaagtgggagccctgccatggcaagttcaagttccggcacccatggagccagtaccagaagctcggcgctctctctcgccagtgcgcttcctcaatggaggctctcgcttcctacgtcatcaccctcacaagaaccgagtaccctgaagcgcggcccgagctacgctcggaggttcgaacagcgtgccgccagatgagcctgcactcggccaaggcgctccgcgagctctcggcggcgatgcggacgatggccgtgccgccgtccccggccaacgctcacatgtccgcggcagccaaagcggccaaggacctcagggacgagctagaggacgcggacctggcgcaggcgatgcacgtcgctgttgtcgcgtctctgctctcggacctggtgaccaaggcgaagcagatcacggaatctgtcggtacccttgcgcgacttgcccgcttcgtcaagaacaacgaccatgagaacaacgctgacgacaaggatattgcggctatcgatgctgtgagctgagaaagctagcagacggtcctgtggcggcaaaaatatatcctaattaaccgtgcatccagacgttcatagctatctaattcgcacatatcgaagatcggatggctctgaacgtctagatgcatggctgcacaagttaatatggatgcacaatatatatgcgttgccggc

SEQ ID NO: 18390 - DNA, 716 bp, Zea mays
  Clone ID: LIB3079-038-B9_FLI
gagcgagcgagccaccgcccgagagagagagagagagagagagagagagagggagagtgagagtggggattcaagtttcaaactcactatcgaggggggataggaaggtggtcactcatcggtccacagctagctcgtcgccccccatggctgactggggccccgtggtgatcgcgacggtgctgttcgtgctgctcacgccgggcctgctgttccagctgccggcgcacggccgcatcgtcggattcggcaccatgcacaccagcggcgtcgccatcctcgtccacgccgtcctctacttcgcgctcatcaccatcttcctcatcgccatcggcgtccacatctacgccggctagctagggccgggtgtcttctagtccacacccccttcgtctcttcctctcatcatcggcccctgctagcttcctagtcatgtactactactagtcttcgtttggcggatgatgcgcgcatgctagcttagctgcggcgaacaattaatccggacgccggataccccgcagtatgttggtatttattatgggattgttatggtgttttatattgttccagctccttccgtcgtcttaacgcttggttgcgcatccatttcactgaagatggtccggccgggctcttgattcagtctgaacagttgtgtgtgtgtgtatgtgtttatacaagactcagaatgaacacttactggctgttggttt

SEQ ID NO: 18391 - DNA, 320 bp, Zea mays
  Clone ID: LIB3079-038-C7_FLI
cgccgagaaggacgacctcagggacaggggcgtctggtactacgagagcctcaaggccagcggctaccctggcgaggtggagctgctcgagtccatgggcgagggccacgtcttctactgcatgaacccgcgctgcgacagggcgcgggagatggaggagcgcgtcctcggcttcctgcgcaagtgagcgagcgacggagcgcgcgccttgctacgcgattgagatggaataatttcaccgtttccagatgtggaggcgtttgagcatgaggccatgagggtcttatttgtttgcttaagatcaattgattgaagtttcg

SEQ ID NO: 18392 - DNA, 1093 bp, Zea mays
  Clone ID: LIB3079-038-D3_FLI
cgaagtcactttgtcaaagcgcttgaggttgctctcctcctgatcgtttacattgcatatggatacacaaaaggcggttcatcttcatttattctgattactatcagtagttggttcctcgttatgtcctggcttttcgcgccttacattttcaacccttctggtttcgagtggcaaaagactgttgaggactttgatgactggacaaactggttactttataaaggtggagttggtgtaaagggcgacaacagttgggaatcttggtgggatgaggagcaggcgcatatccagacattcagaggacgtattcttgagacaatcctcagccttagatttctcatgtttcagtatggcattgtgtacaagcttaaaattacagatcataatacttctcttgcagtttacggcttctcatggattgtactctttgttatggttcttcttttcaagctttttactgcaactcctaggaagtcgacagccttgccgacttttgttaggtttctgcagggcgtccttgctattgggataattgcaggaattgcccttcttatcgtgctcacatcattcactgttgctgatttatttgcaagtgcacttgcttttatagcaaccggctggtgtgtcttgtgtctggccgtaacatggaagagggtagtgaaagtccttgggctatgggattcagtccgtgagattgcaaggatgtacgatgcaggaatgggagccatcatctttgtgcccatcgtcgtcttctcatggttccccttcgtgtcaacattccagtcacgtttcctcttcaatcaagcgtttagtcgaggtctggagatctccctcatccttgcagggaacaaggcgaatcagcagatttgaaaggccctgccgcatccatcgtatttttctgttgtatattctgggaattactgagagctgcttagttagtttgaacaatttaatgagctcgatttgaatgacaaccttctacataattgcccctgtaatttgtacactaattatgcggagaggcagctacggcagtagagatgagctgatgtatgtcgatttgatcttaaccaaacctctctttaaggct

SEQ ID NO: 18393 - DNA, 552 bp, Zea mays
  Clone ID: LIB3079-039-A3_FLI
gtttgagctgttgtaccttcacccaatccacatatagcactacaaaatggtcactgggaaagtagcagtcgtcctcctagcctgctggacgctagttctctaccaaccagtgcttggccgtttaccgtgtaacaatgatcagaagagagagatcctgcgcgagtgtgatccactgaactcaacacctgactatactccatcccggcacggtgcgtgctgcgtggcggtgagaaaggtgccaggaaccaacatgctttgcattgcctccatactctcacttgctgacaaggccaaatacagtgtaaggaagattctaggatttagagatgcatgcgccccttcacatccacaccatcaggtagttaatactcgttctatcacttgacagtccttagactacagtggagtgtccttgtaataagctaacaagtattaatcttgttttgtgaggcaggtcatggcctaaaagagtgtagctgccagcctgccatcgcttatggaatcatcgtccaaacatgatgttgaaatgagatgtatctccggctggttaat

SEQ ID NO: 18394 - DNA, 1858 bp, Zea mays
  Clone ID: LIB3079-039-B4_FLI
ggagcgcacacacacacaaccagatctcccccaaatccacccgtcggcacctccgcttcaagatgcagatctttgtgaaaaccctgactggcaagactatcaccctcgaggtggagtcgtctgacaccattgacaacgttaaggccaagatccaggacaaggagggcatccccccagaccagcagcggctcatctttgctggcaaacagcttgaggacgggcgcacgcttgctgactacaacatccagaaggagagcaccctccaccttgtgctccgtctcaggggaggcatgcagatctttgtgaaaaccctgaccggcaagactatcaccctcgaggtggagtcctctgacaccattgacaacgtcaaggccaagatccaggacaaggagggcatccctccagaccagcagcggctcatctttgctgggaagcagcttgaggacgggcgcacgcttgccgactacaacatccagaaggagagcaccctccacttggtgctgcgcctcaggggaggcatgcagatcttcgtgaagaccctgaccggcaagactatcaccctcgaggtggagtcttcagacaccatcgacaacgtcaaggccaagatccaggacaaggagggcattcccccagaccagcagcggctcatctttgctggaaagcagcttgaggacgggcgcacgcttgccgactacaacatccagaaggagagcaccctccacttggtgctgcgcctcaggggaggcatgcagatcttcgtgaagaccctgaccggcaagactatcaccctcgaggtggagtcttcagacaccatcgacaatgtcaaggccaagatccaggacaaggagggcatcccaccggaccagcagcgtttgatcttcgctggcaagcagctggaggatggccgcacccttgcggattacaacatccagaaggagagcaccctccacctggtgctccgtctcaggggtggtatgcagatctttgtgaagacactcactggcaagacaatcacccttgaggtggagtcttcggataccattgacaatgtcaaggccaagatccaggacaaggagggcatcccacccgaccagcagcgcctcatcttcgccggcaagcagctggaggatggccgcaccctggcggattacaacatccagaaggagagcactctccacctggtgctccgcctcaggggtggcatgcagatttttgtgaagacattgactggcaagaccatcaccttggaggtggagagctctgacaccattgacaatgtgaaggccaagatccaggacaaggagggcattcccccagaccagcagcgtctgatctttgcgggcaagcagctggaggatggccgcactctcgcggactacaacatccagaaggagagcacccttcaccttgttctccgcctcagaggtggtatgcagatctttgtaaagaccctgactggaaaaaccataaccctggaggttgagagctcggacaccatcgacaatgtgaaggcgaagatccaggacaaggagggcatccccccggaccagcagcgtctgatcttcgccggcaaacagctggaggatggccgcaccctagcagactacaacatccaaaaggagagcaccctccaccttgtgctccgtctccgtggtggtcagtaagtcatgggtcgtttaagctgccgatgtgcctgcgtcgtctggtgccctctctccatatggaggttgtcaaagtatctgctgttcgtgtcatgagtcgtgtcagtgttggtttaataatggaccggttgtgttgtgtgtgcgtactacccagaactatgacaaatcatgaataagtttgatgtttgaaattaaaa

SEQ ID NO: 18395 - DNA, 1042 bp, Zea mays
  Clone ID: LIB3079-039-C9_FLI
tcgtcgtgatggcccggttcgacgtcgacgccgtgctggccgccatcgagcggcaccgcgtcacgtacctcttctgcgccccgccggcgatgatcgcgctcgccaagcacagcaggggcggcaggtacgacctcagctcgctcagatgcatcggctctggcgccgcgccgctcggcaaggacgtcatggtggctatggctgacaggttccccggtgtcgacattatccagggttatggtatgactgaaacctgcgggataatatccctggagtacgtacagaagggttgtgcccgtcagtttggttcgactggagcacttgtcacaggagttgaagcaaagatcgttaatgcaaagacaatgaagcatcttcctccgagccaactaggagaaatctgtgttcgaggaccgaacataatggaaggctatttcaacaatgtgcaagcgactgagtctacaatcaagaatggatggttgcataccggtgatcttggatacttcgatgaaagaggccagcttcatgttgtcgatagacttaaagaactgattaagtacaaaggcttccagattgctcctgctgagcttgaaggactgcttttgtctcatccagaaatccttgatgccgctgttatcccgtatcctgatgctgaagcgggggaagttcctatcgcctacgttgtactatcaccgaagagttcactggccgaagctgatgtccagaaatttatcgagaaacaggtcgcgcactacaagaggctgaggaaggtaacgttcgtgggcagcgtaccgaaatctgctgcggggaagattttgaggagagagctcatcgcccaagtcagactgtccaagctgtagcagatttaatctcgatttcactgcagcccttgtcgtctgggttctgctggacacagaagtgcagaatctctgctgagcactgtacaagatttgtctatcaagtcactgtcaggaaccacacatttcagtctagacatgccagacactgatttcttttttttgttaaggaataaagcattctggcctct

SEQ ID NO: 18396 - DNA, 599 bp, Zea mays
  Clone ID: LIB3079-039-G2_FLI
gtaaacacgcaaagaggtggagacgtgctcatcttcctcgttggaaataaaactgaccttgtcgacaagaggaaagtgtccaccgacgaaggagaagccaaagcacaggagcatggtgctatgttcatggagaccagtgcaaaagctgggttcaacgtcaagcccctgttccgcaagatcgctggatcccttccaggactggacgcactttcgtcaggaaagcaggaagacatggtcgacataaacctcagacctgccagcggttcgtcggcttcaggtgcagccgcgcagctggagcagaaatcaggcggttgctcctgttgagacttcgacagttttgtgttcagagaagctacagcagtactgcaacatcgagttaagtactttcagagagattatgacgaagagtgtgttttcgcccagacgtccagtagtgatatactgacatccatagcgagaagccaatttctgtgtacagatttgtttagcaagttatcatatactaggatataactttttgagacacaagggacaaaatctgtggaggtaagggcatctcactttttttgatgaaacattagcaggagctctgccatatc

SEQ ID NO: 18397 - DNA, 500 bp, Zea mays
  Clone ID: LIB3079-040-A2_FLI
aagaaaaggagccagatcagagaagaagtggtggcgatgccgccgagggcagtgccgtcgtcgtctcccttgcctcttgcactcgccgccgtcgccatagtcgtcgtagcacttgccgtttcctcctgttccgcgaccaccgatgctccaggcctgggagtgggagcgagagagatggtggcacgggacgaccccaagtgcgaggagatggtgccctgcaccttcaggcgctgcatccagtactgcgtcagcatcgggctgcagcccaaggggttctgcaactccaagcccaacatgcaggtctactgctgctgcgtcatcccctagcatcatagctcctcgtcaacacacctaaatctgcagccctgctagagaagatacgatctctatgcagattagctgcagcgatatatatagatggatgaatcgtgcaagcggttgaactatggtgctggaatctgtaatatatataagcggatcatccaaagtgcaaaacatat

SEQ ID NO: 18398 - DNA, 882 bp, Zea mays
  Clone ID: LIB3079-040-A6_FLI
gttcggccagggatagcataacaccgccgaggaagcagcaagcagcaaggtcgacatgtcgtctccgccgccggtgaagctgatcggcttcttcggcagcccgtacgcgttccgcgcggaggcggcgctgtgcctgaaaggcgtgccgtacgagctgatcctggaggacctgttcggcagcaagagcgagctcctgctccaccacaaccccgtgcacaagaaggtgcccgtgctcctccacggcgacggccgggccatctccgagtccctcgtcatcgccgagtacgtcgacgaggccttcgacgggccgccgctgctccccgccgacccctacgcgcgcgccgcggcccgcttctgggccgacttcatcgagaccaggctcaccaagcccttcttcatggcgatctgggtggaggagcgcgaagcgcgcctgcggttcgaggaggaggccaaggagctcgtggcgctgctggaggcgcagctcgagggaaagaggttcttcgccggcgacaggccggggtacctcgacgtggccgcgtccgcgctcgggccctggcgcagcgtcatcgaggagctcaacggtgtggcgctgctcagcgaggatgaccaccccaacctgtgccggtggaccagggactactgcgccttcgaggctctcaagccgtgcatgccggatcgggagaagctcctcgcctacttcactaagaacttcgacaggtacaaggcggccgtcaatgcgacgctatcgcagtcgcagcagtaataactgcccaactgggtacgcctctgcccggccgtatggcgggcgtttctttttttctttcttcagaataacgtagctgtgcccagtactcatgttttcaattctgcaaagtgcaaacc

SEQ ID NO: 18399 - DNA, 1409 bp, Zea mays
  Clone ID: LIB3079-040-B1_FLI
ggattatccagcgagggacgccggtttgttgctcgtcctcctccctggttgcccgaggcggcggtggcggggcgaccatgtacagatcggcgggggtcgcgatggcgtggaacgtgttccggttctgcacggctctgcgtgggctaggttccatcatgatcctgctcgtcctcgcgatcgtcggcgtcacctactacgctgtcgtcctctgcaactacggccccgccctgttcaccggcggcggcaccactctcgccgcgctcgccgtcctgctctccttccacttcctgcttgctatgcttttatggagttatttttctgtcgtgttcacggaccctggttctgttccaccaaattggaatcttgattttgatgtggagatgggagaaactgctcctcttgctagctcagagctctgtagccagatgaactcacagcaatctgtggctcttggcaatatgacaaatccaagggttaggtactgtaggaagtgcaaccagttgaagccacctcggtgccaccattgctctgtttgtggaagatgtgttcttaagatggatcatcattgtgtgtgggttgttaattgtgttggggcgctgaactacaaatactttcttctcttcctgttttacaccttcctcgagacaactcttgtcactctctctctattgcctcacttcattgccttcttcagtgatgccgagatcccaggaagtcctgcagcacttgcaaccacatttctcacctttgtgttgaatctggccttttctttgagcgttcttggttttatgattatgcatatttcacttgtttctgctaatacaacaacaattgaggcatatgagaagaagacaactccacattggatatatgatcttggccggaagaggaattttgctcaggtttttggaaatgacagaaaatattggttcatccctgcatactcagaagaggatttgagaagaactccagctctacagggtctggattatcctgtgagaccagattttgatggtcaggaactgtaacacagcaatttttgccagtgtcctcgtcagatacctcagtgttggacatctactgatacaactgacagcattgctgattgcgctatgcaaggcatcaaatgaaatgttcacaagattttagtaaccatgagtaattcatctgttgcacgtcatgtatgtgacgaagtgaaatttctcctagctgggccagaggaagtttgttgggatgtaaattagttttatcgacaacgtggattggtttcattccatccaaactggtagtgtgcttcaaatagtgctgtactttagtttagttattattatgtgatataaatatcatttctgataattgtgcctctgttatacactatcaatagtaaatggataagcgctgtgtaattc

SEQ ID NO: 18400 - DNA, 1367 bp, Zea mays
  Clone ID: LIB3079-040-C4_FLI
ccgtccaagttcctggtggtctgtctcaacgctatccgggatgcggtggcgcccgaggaaggcggtggcagcatccacggcgccggcgactggggcgtggagctctggcggtgctgctccgcccaggcgccgtccgacgtgctcgacgctagcggcgcgtgcgccacggtggcgcagaccgcgtggctcgtctccaccgcctgcgacatcgtcgctaggaaagagaggcatgggatggtcgtgtcttgccccttcctgctgtacctcgtctcgtcgcaggataaggccgcgcaggtgcgatcgatatgcaaacccctgaagcctcttgggattcattcagtgagcttgcatcctggcgcatccattgaacaccagatctctggactgaaaacttgtgagccggagtttcttattgctacccccgagaggcttcttgaacttgtttcgttaaaggcgattgacatatcaggtgtatcaatgttggtcattgatggactgaaatgtttcgtagaccacaatgttagtgacaaaatattttctattagagacgccatatcaaacaatcttcagattactatcttcaccgatccatctgataaaaatattgcaacaatggctaaaaatctactccgtggaagaattacaaagctttctatcaatgattctgtttcttcacgaagtgcatttatagcccagcatgtacacttctgtccatcggaggagctgaaaacaacaaaggttaaggaaattcttgagcagatattgcaagatcatcctaaaaagacatcaaaggtgcttctagtagctgcaagcgataaaaaagcacggctcatgtcactgtcgctgaagctggaaaattgcacagtgattgatgactcatgtggcaactcctttacaatatgcagcagtgtggggctgatgaatgtcattgtgaaagaccgggagaacatgtcagtgacagatgtagaggcattcgaaaccgtgctggtggtggatctgcctccttcagtcgacgaatacattgagatcctcactggggctgctcttcatgtgattggaggcgaagtgcatagcatattctgtaacactgatgcttctgttgcaaaacctctggctcagcttcttgcagactgcggtcaggtggtgcctgaattcctcaaaagcctgaagtcttcatagcagagacttgtgtacgcaatcagagtagtcagatcacaccgtggcgattcagatcatatcggagcagtgtgtgttctacatgttattctcatttatcagcacagcattggtattcaggcctcgtccttggtatgtactattatgtcgtgcattgtgaaatgtgaatgccttgaggcccttttcctggg

SEQ ID NO: 18401 - DNA, 1192 bp, Zea mays
  Clone ID: LIB3079-040-E12_FLI
tgtagaagccctttggaatcccttcttcaagttattggtatcttcaattatgactgggtatactctgcgaaatgctgaatacaggctttcttttgaaagaaatctagaactgcctgaagaaggtgtagaatgcctaaaaagtgatgtcactgaagataatcatcataacatcaatttgggaagacctgtcactatttttagattatccgaagaagacatgcctcaggaccctggaaaaaccgatgaagcatcatcttatgaaaatatgggagaagagcttggtgacttaacaccacaggcagaggagtatattattcagatgcaatctcatttgaatgccatgaaaaaggagttacatgatctcaggagaaagaattctgccttacagatgcagcagtttgttggggaggaaaaaaacgacttgctggactatttgaggtcattaacaccagagaaggttgctgaactatcagaatcgacgtctcccggtgtgcaagaaactattcattctgtggttcatggtttgcttgctactctttcccccaaggtacattcaaaggcccctccaccgctagataacatttctggtggtgttctaaaccttgggggcgaggatgatgatcgtgcagaacttgtggagaatgcttccctcccatttcagcccctaatatctgttccccgtgattatcttgcacgtttgctgttctggtgcatgctgctgggtcactacattcggggtctggagtaccggttagagcttgctcggcttctgcgaatatccagcgtgggttctttctctggtggagatgatcatgttttgagggtaccacgtctactgatattcctcaccgggaagaatggaaaggaaagccctggtcaagaaatgggccatatggcagagctgcagaggtgtccgttacactgctgagctatatagttgtagttcctgtatattcagaaaacagtcactcggttgtaaagctagtgttacatatgcacgtgaaccattttctttttcttcctttgatgttgtgccgtataaaaagaatttggtggttcgttggtgtttatctcgtggtagcataataggcatccttgtattctagttgtatgtttctggtggttgtgactgctgtccagtgtccatttagcttttttgtctattcttgattcgagtaaagcttaacttctc

SEQ ID NO: 18402 - DNA, 593 bp, Zea mays
  Clone ID: LIB3079-040-F6_FLI
aaggacgggtgggcttcatatacaaggccaacaacagaacattcagtttggccgttctattcggatcaccctcttactggtgctgagtatctttctgattgtgccatttctcgcctcggcatgacaaggcatgtattgcttcaccggtgaggaacattggggcagcttaccatggtcctgctcgtactacatacagatcatgactggtggtgttctctcgccggcaaatgcagcaaaccaaccatgtctttcctgtgtggtgtggctgctgcatatgtgacaggaaaagaagcacggcggtgaaggtttcaactgtgcaatgcgtgatgctccgataccatgaactcctcaccgggcgcataaccatgctaagatttatcagggttatgataaatttgtgatggctgattgctgccaaaggaggtggctgttctcatctcactactctatatcccacgagtgaaagcaattgtaaaaagttctagagccactctatatcccacgaacgaaagcaactgtaaaaagttctagagctggtaggataagtcctgaatactgttattgataataatacatttaatactgtatttgcc

SEQ ID NO: 18403 - DNA, 713 bp, Zea mays
  Clone ID: LIB3079-041-B8_FLI
ctgcagtggcctatcgaggaggtggaggcgctgagagaaaagtcggtcactctcaagaacaggttaatcaaggcaggacatcacgtcgaggtgaccgggatacaaacggcacaggctgacgtggaggtgagcttcgaggtgtcgccggcggccctggccggtgccgagacgctggacccggcgctggcctacgacgcggagaagctgtgcggcgtgaagcgcgcggacgtgaggggcggcgtggggccgttcgggctgtgggtgctggcctccgccaaccgcaaggagagaaccgccgtgttcttcagggtgttcaagcccgccgccggcagcgacaagcccgtggtgctcatgtgcaccgaccctaccaagtcgtccctgaacccgaacctgtaccgcccgacatttgcaggatttgtcgacacggacatctcgaacggcaagatatccctgagaagcctgatcgaccggtcggtcgttgagagcttcggagccgggggcaagacctgcatcctctccagggtctacccgtcgctggccatcggcaaggacgctcgcctctacgtgttcaacaacgggagggcgcacgtcaaggtgtcccgtctcaccgcgtgggagatgaagaagccggtcatgaacggggcctgaagatcttgaataaatatatcacccatgcatgacatagtggcgcctgaggaatctttccttttttt

SEQ ID NO: 18404 - DNA, 1168 bp, Zea mays
  Clone ID: LIB3079-041-C2_FLI
ttcacctccaacaaaacacatcctaatcgactcgcgaccccgtttcccggagagccgcgacggtgcgacgccgaactccctaaccctaagtccctaagcgtaggcggcggggggcggcggtgcgaggcaagctgcacagcaacacgggccacgggcgcggcctccgcctccgcctccacgcttctgctgctaggctgcaagggcggcggcgcggcgcggtgggcggcggacagctggccaggtccagcccagtagtccaggtgacgaggtccgcactccgcaacggttctggcgttctgcagctgaggatagacgagagaggaagtgaggatttatattagtgatttacaaggcaacttgaaagacagcagggttgcatcccacaatgtcagctcccaacagtgatagcaacatgcagcagctagtccctatagcaccaccaggaaaggcttctggtggtgacagtgggaaggagctggttgtggcagatcctgcaggtaagagatcaggaggtgtaaaactgcgagaggatgaggaagacctggaggtgaagctcaggcgcatcatggagaatgtccctgtgcgtgtcagtaacacatcagggtcatctgctggctctggctctggtgatttccaccagtatcggcaaatgaggaggagagagcaggaccgtctagcacgaatggatgcggactaccagaagagaaaagagatagctgagttcgaactgcggagggaggagaggatgaaagcagctgaggagcggacagccaagaagcgcctgaaacggcaaaagaagaaacagcgtaagaaagagaagcgagctaaaactggtgataatggtggtgaagaacctaacagagtggagtcgtctgacgatgacgaaggctcagatgacgatgacaagtccaagcaatgacacgtcaatttcgcacctgaagatgatttcggactctctggttgtctgggcaatgaaacaaacgtctgtacggttgttgtaacaggttacagggcgaatctggtgctgtttctgtaagaggatatgatattctgagcagagatggatagcactagataatttgctgttagtgttcatcattcagagaagtgacctgcgtcagtaccttttgttcaggtctatattatatcagctgccttttttggctcc

SEQ ID NO: 18405 - DNA, 809 bp, Zea mays
  Clone ID: LIB3079-041-D1_FLI
agaaggaaaaatatccccaaaccctagctcccgatctcgatggcgaaccctcgcgtcttcttcgacatgaccgtcggcggcgccccggcgggccggatcgtgatggagctgtacgccaacgaggtgcccaagaccgcggagaacttccgcgcgctgtgcacgggcgagaagggcgtgggcaagtccgggaagccgctccactacaagggctccaccttccaccgcgtcatccccgagttcatgtgccagggcggcgacttcacccgcggcaacggcaccggcggcgagtccatctacggcgagaagttccccgacgagaagttcgtgcgcaagcacaccgcccccggtgtgctctccatggccaacgccgggcccaacaccaacggctcccagttcttcatctgcaccgtcgcgaccccttggctcgacggcaagcacgtcgtcttcggccaggtcgtcgagggcatggacgtcgtcaaggccatcgagaaggtgggcacccgcaacggctccacctccaaggtggtcaaggtcgctgactgcggacagctctcctagatctctctgatctggtctgttcggccgccctccctccgtcatcgtcgactccccctgcgtccgttcctttggatctgaataagatggtggtgatctgagtggtggtcttagtttatcatgtatcgctcgcagtttaatttagcggtttaggtgtggatctgtgaaccccatggcgcctctgcttgattcgtgtttcacctgttatgttctgagattcatgataatgctatgagaactgaaattcccgtttc

SEQ ID NO: 18406 - DNA, 1463 bp, Zea mays
  Clone ID: LIB3079-042-A9_FLI
cctagccagagcgcggcgcgcgagagggagaacgaccaggaggggaggagatcgatcgatcgatcgatcgagatagatggctttcctcaacatggagcagcagacctgggccttcaccttcggtatcctaggtaacataatctcgctgatggtgttcctttcgccgctgccgacgttctaccgcgtgtaccgcaagaagtcgacggaggggttccagtcgaccccgtacgtggtgacgctgttcagctgcatgctgtggatcttctacgcgctgctcaagtccggcgccgagctgctggtgaccatcaacggcgtcgggtgcgtgatcgaggcggcgtacctggccgcgtacctggtgtacgcgcccaaggccgccagggcgctgacggccaagatgctgctggggctcaacgtcggcgtctttggactcgccgcgctcgccaccatggtggtctccagcgccggcctccgcgtgcgcgtgctcggctggatctgcgtcagcgtcgcgctcagcgtattcgccgcgccgctcagcatcatgcggcaggtggtccggaccaagagcgtggagttcatgcccatctcgctctccttcttcctggtgctgagcgccgtgatctggttcgcgtacggcgcgctgaagagggacgtgttcgtggcgttccccaacgtgctgggcttcgtcttcggcgtcgcgcagatagcgctgtacatggcgtacaggaacaaggagcccgcggcggtgacggtggaggaggcgaagctgccggagcacgccaaggaggtggtggtggccgcggcggcggccgaggccagggcgagctgcggtgctgaggtgcaccccatcgacatcgacatcgaagctacgccgacgccggtggaggaggtgcacgagccgcaggtggtcgtggtcgtcgacgtggacgtggagcctgtcacctgcgccggcgccgccgaggcagctgcgggagcaggggcagatgcgtccggcgtggccgacggcggcgtccctggacccatggcgccgccggagcagctggcgatcaagcccgacatggccatttccgtggaggcgtaggttggttaaagtgtaatagcagagtgagtcgatatcgatcagtagtagatttgtcgagtcaaggaaggggcctgctgctgctgctacgcgacagcagcggccagatgtactgcctgcatgcatgcagtccctcccgttgactcgacccgtagagaagggatgggatggaagtagccgggtccttgggcgagtagcggcgccttggcacccacgggccagccgtactggcctgtgtgatgaaccggcgagagagatgagataatgtgcgagcgagagagggttggttgggttgtggtagttgaagaagacggctagctagctgctgctgctgggctctctatctgtctctagatctgtgtatgtctgtgtaatcgaggattccctc

SEQ ID NO: 18407 - DNA, 647 bp, Zea mays
  Clone ID: LIB3079-042-C1_FLI
gacgggccgctcgatctccacctctgaagtggctgcttgtgatctagatctgaaagctgcagtggttgacagctgagtgtgaaactgtgaatcgaagatgagcgtggtgggcttcgacctcggcaatgagagctgcatcgtggcggtcgcgcggcagcgcggcatcgacgtggacgaactgctggaagtcgcgaagatctacggcgtccatgtgatgccgaccttctgcttcatcaggaacggcgagacgctcgagagctttgctaccgtcgacgaggacgagctccgggacgccgtcaggaagtacgccgccgctggcactacgacggctcctgcctcggcgtccgcctaattcaggagatgtgatgtgtagcaaatagcgcgcgcgcaccagtcgtcaataaataaataaataaataaataaataaataaataaaggccaacgtacgacgacaaattagtggcgcgcgcggtagtagctagcagagtatgcgccgccactgtgtcgatctgcagtttggtcgtttaaaagtgattgtagtgtgtactatgttcagctcgatgatctcggagtcgctatatacgctcgctcccgtgctggacgggttatcgatctgatgaacaagaatacaataatatgtatggat

SEQ ID NO: 18408 - DNA, 496 bp, Zea mays
  Clone ID: LIB3079-042-G11_FLI
caacagctgcagcaggtgaccgtggcacggtcagttgcagcagcagcagcagctgccaccaacttggagctgaacccattcttagagatggataccaaatgcttcttcactggcggccccttcgcaacgctggacatgaagtgctttctccccggcagcttgcagcagatgctggaggcacagcagcgccagatgctcgccaccgagctgaacctcggctaccaactggcgccgcctggttctgacgctgccgacaataaccctcatcatcagttctaaactggatgcatgcacgagaagcttttcaagcgaactgtgaacgatggaagctggctgttgcctctagatgttcttggcttccatgacctagcttattatggtgtgtattgttgttgccttttgtgtgtgattctccttgctactctactgatggagaactaaacctaatcgattggacataatgatcaaatgctacagatcctgtgatgctgtgatc

SEQ ID NO: 18409 - DNA, 697 bp, Zea mays
  Clone ID: LIB3079-042-G3_FLI
cgataatccgccggcgttgagatgttggtttatcaggatctcctatctggcgacgagctcctgtcggattcattcacctacaaggagctcgagaacggcgtcctgtgggaggtcgagggaaagtgggtcacccaaggtcctgttgatgtggacattggtgccaatccatccgccgagggtggtgaggacgaaagcgttgatgacacagctgtgaaggtggttgatattgttgacacattccgtctacaggagcaacctccttttgacaagaaatcatttgtgtcttacatcaaaaaatacatcaagaatctcactgctgtgttggagccagagaaagcggatgagttcaaaaagggtgtcgagggtgcaaccaagtttctccttagcaagctgaaggacctccaattttttgttggtgagtccatgaaggatgatgcgtctgtggtattcgcctattacaaggatggtgccactaatccgacattcctctatttctctcatggtcttaaggagatcaagtgctaggcgtgcggcgaaattagttacccatgttgggtactatctatgtactattattatatccaaaactatagttgtcctggctgaattgaactcaaaagggtttgtttgagaaaaaattgtcccaagattggattgcttgttaaagctcaatattgttattgaagtgttattgctt

SEQ ID NO: 18410 - DNA, 1088 bp, Zea mays
  Clone ID: LIB3079-042-H4_FLI
cgtcgccgttgttgctgggactgcagcgttggcgggccttgtagcgaggagggggtgcggaggcgccgcgactgttcgcgggatgagcttcggcggcagcagctccctcgcatcaggtgcgaagaggccgttcgagtacgggagaacgcatgtggtgaggcccaagggcacgcacaaggccaccattgtctggctccatggacttggggacaatggagccagctggtctcaactactggaaactcttccccttcctaatataaaatggatatgccccactgcaccttcaagacccgtgtcagtgtttggcgggttcccctccacagcatggtttgatgttgctgatctttctgaggatgctcctgatgacattgagggaatcgatgcctcagcagcacatgttgcgaatttgttgtcaactgaacctgctgacatcaaacttggtgttggcggctttagtatgggtgctgctactgctctgtactctgcaacttgctttgcccatggaaaatatgggaatggcaaaccattccctgtgaacctaagtcttgccgttggtcttagtggctggcttccatgtgccaggaccttgaagaacagaattgaagcctcaccagagtgtgcacaaaaggcttcatcaatacctcttttgctctgtcatggaaaagctgatgatgtagttgcctacaagcacggggagagatctgctggtgccttgaaggcaaatggcttttccaatgtgctcttcaaggcatacaatagtcttgggcactacactgttccagaggagatggatgaagtttgcaaatggatcacagcaaatttggggcttggcactaagtcatcttgattggaatttgatgcgagaaagactcgcagggacggtgtccaaataataccggtatcttttccaggaggtatatggtttaatagcaaatttgggcttgggtatacggccatgttctagcttttcttaacgcagacgtgtctgcgaatgatgtatgcttataatatctatattttggtctacgtcgatttggttgtggcacggataatgtttgtttcaaatattctgctctgcgaattgg

SEQ ID NO: 18411 - DNA, 557 bp, Zea mays
  Clone ID: LIB3079-043-A12_FLI
gggaagcttccgactccataccccgcacacgagcgctccctgcagatgacctcggctctggtggagcgcgtaaccaacgacgaccggagcgtagcctcgttgcttgatccaacgctgggtggagaccacagggaagacgagctagcggtcatcggcgaggtgatccgggcctgcatgcagagcgacccgaggcgaaggccgagcatgagggaggtcgccgccaggctgagggaggccgtgggtatctcgccggtcgctgcgacgccgaggctgtctccgctctggtgggccgagctggaggtcctttccgccgcggaagcaagctaataatagtgggcgagaggacaggacaggaacagggcaggatgatgtcgcgcaatctgaccagtttgttctcaagaaaaaaaagccttgcagccctttgtgcatgctgtaaatgtgaatgtgaagctgcagggaaggaatagtaatccgtgaatgtaaatctgaaactctgaaggtgctagatgtacgtagctagtgtcttagctaaggtatcagtaattcagaatcaagtc

SEQ ID NO: 18412 - DNA, 1420 bp, Zea mays
  Clone ID: LIB3079-043-A9_FLI
cgccttcctggcttcttcctccccagcacgcacacgcacacgcacacacccagccttttggctgccctgccggccgtcagagagagaaaccgagctctaactaactgaagtggcggccacatagctagctactcttctgatcctgagcgcgcacgcgccatggctcaggaggacgtgcacctggacgacgcaggcctcgcgctgggcctgtccctcggcagcggcagcggcggcgcctctggtgcggcgcgccacggtggtatcagccgccggctgagcagggaggtgcggctgccgtcgccgcacccgctggagccgtcgctgacgctgagcttgccggacgaagcgaccgcgaccgggtccggcgggggcggggccgcgcacagcgtgtcgtcgctgtcagtggcgggcgtgaagagggagcgcgtggatgacgccgagggagagcgggcgtcgtctacggccgcgttgccgcgggcctgcgccggcgccgaggacgacgacgacgacgggagcacgcggaagaagctgaggctgaccaaggagcagtccgcgctcctggaggaccgcttcaaggagcacagcaccctgaacccgaagcagaaagtcgcgttggcgaagcaactgaagctgaggccacggcaggtggaggtgtggttccaaaacaggcgagcaaggacgaagctgaagcagacggaggtggactgcgagctgctgaagcgctgctgcgagtcgctgacggaggagaaccggcggctgcagcgggagctgcaggagctccgcgcgctcaagttcgccccacacccacaggcgccgccgtcgtccgcgacgcaggccggcgcggcggcgggcgtcgttccggcgccgccgccgccgttgtacatgcagatgcagatgccggccgccgccacgctgagcctgtgcccgtcctgcgaccgcctggccgggcccggcgccgccgccaaggccgagcccaggcccaaggcagccgccacccaccacttcttcaaccccttcacccactccgccgcctgctgatgatgagggcagggcagcacgcagccacgcaacgcagcggcagtaaacagagcaccgccccgtgcagataataccacgtctgtacgtgtcacaagtaattaacaaacgtatggtcctcctctctatctattttcttgatccggagggctaagttagttgttttcgtgtcgatcccaaatgcatcagctaatccatcaatcataggcttgatagagtagtcgaaaaaaatagccgtagctttcctagcactccctccgccccccccccccccccccatccatgtatatttctgttgtaattctgtccctctctcgcggtctacttgctcccttttcgattggagtacgtagctcctttgcctttttgtttttggttttttgtt

SEQ ID NO: 18413 - DNA, 766 bp, Zea mays
  Clone ID: LIB3079-043-C9_FLI
ccatgacaggattatcatgcagagtttctttgataggaaaaaaccaaaaatgaatctcaagaaaaaatttagggaacttagtcagtcacgtgcagtgaaggctattcaaggcagatttcaaacaccacgtagcaaagtcatttggcagacagctattgcttttgtcttgcttggagtgcttacccttgctttccctaccgaagaagggccaaccctccaggtggccatctcttgtgcagcaaatatctatttcatttatcagagggtcaaaagtggatggcgagcattcttttatgggtttggttctttctttgcttcctggttccttggcaccttcttgatggtatctgtaattccccctatactccccggtccaagaaacttggaagtgagcaccgcgtgtgttacttatgtgctccttttcatatcgtcgaccttcttgaagtaagagatctttgtgtttccatgttagcgcaaagtcttgcaggagttataaacatggtatcatgcttcaaatagcttgtacaatccatcggctttttctttgcttgtttcacgtttatggagctggaaatgctagttctttagtgagttgatagtagttttcaggttgcaatgtgagatgtagaacgtttttttgcctaggcccgtgatatcttgagcagggtctaacacctcttgtgggtattttcagttgatgtattaaatacagttgtgttcgaatagatcatatgagataatatctcatcagtcttcttttggatgg

SEQ ID NO: 18414 - DNA, 130 bp, Zea mays
  Clone ID: LIB3079-043-D5_FLI
ccggcccgctagctattcaccagcgctagctactacacctctcctatcctatgttctcagttaactttctgtcagacagtagttttgttttccttcgtgtaatcgcctagatatatatatttccatttct

SEQ ID NO: 18415 - DNA, 609 bp, Zea mays
  Clone ID: LIB3079-043-F6_FLI
gcatagatctcgtgctcgccactattattctgcacagcaacgcatcagccttctggaaccatctcgccgccgccacaccacaatccacaacccgtcgaagcgaagcaagcaatggccggagtcggatcgaaggccctcgccgttgccgccgttctggcggccgtctccttctcggtggccgccgcggccgaggcgcccgcgcccagccccgtctccgccgccgtcgcggcgtcgtcgcccttcgccgcggctctcgtcgcctccgccgccgccttcctcttcgccgccgtccgccactgagccgatggggcctcgtgcctgcaggctacctagcagtacttcccccgccgccgccgccgccgcctagatctatttattggagtgctatccagtagtactagtagtagtgagatttgttcggtgctgtcgtgtcgtcgtcgcattttggtcggatctggtttccttggtgcagggagggtttctataccatgtcgcggtgtcggttgtgtgatctcatcccccccttgtagatagtactctgctatctcgtcgtgatcgtgagtggtgattctgtctggttgatatttgctactgatattggtcccattt

SEQ ID NO: 18416 - DNA, 1092 bp, Zea mays
  Clone ID: LIB3079-043-G3_FLI
ctccccagtcccactcccacccgcaggccgcgccgccccagcaaatctcacgcacagaaacaccaaagccccaaaggcccaaactcaccacctcccaatggagaacggcgacgaaaccctcgcctcccccacggccgccgccgagacggacgcgctcaacggcggcgtcgcggaggaggagcaggtccccatcacccaccccgcaaagtcctacgtcacgctcgccgacgacaaccccgctcctaacggcggcgtcgtgaaagaggaggagggcggtgcccacaccaccgcgaagtcctacgcagctgtcgccgcccaagccgagatcgaggacctccgcgccgccaagctcgacctggaggagaagctcgctgaggcccgccgtgagaacaagtccctcgccgaggagacgcaccgcagcgaggggatcttcacgcaggcccgggaggaggtcaccatcgccgagttcgccgccacctctgccgagaaggaggtcgcctcgctccgcgcggaggtcgaacgcctcgatgctgttctcaggatcgagaagggcgagcacgagctggacaagcagagacacgagaaggtcgccaaggaggtggatgccgtgcgccaggagaagctcaagctagaggaggagatcagagccctgaaggcttccgccaccgccgccgccaccaccaaggagagggaagctgcgccggcttctgaggccccgaaggaaggggaagtcgcgtggctggggatggcggtggctgcggctgccggcgccgccggcacggctgccatcatgctagtttatctccgccttaagaggtaggtgttctggtgctcggttgcgtagcagtaaagggagttttcgtcgtgatgctgctattactgaactgggaggtatgcgacttctatgagtagttgcttattagcctacagaaaatatagggatctggagactggttatgtttcatggctgttcttctttcaccggtaccattttatgacgaacgttgtatgactgattatcttcttgtttacgttactgctacggcatggcctcatgacccttttttgatctaataatggtccgtgttctgc

SEQ ID NO: 18417 - DNA, 1271 bp, Zea mays
  Clone ID: LIB3079-043-G7_FLI
ctcggcccaggtttaggtaagttccccttcttttttattattttttgctgttttcaatttcaagttttgatttcaaattttaaatctgtgtttaagctctcaaattcaaacaaatgcagcaaacaaaaatataccagcatgagatgcaaatacctaatgttattagttaatttactatcctattttaagcaaatgcctttacacatgcaactcctacactaaaaaataggcatttttgagaaaaatgatctctagtatattaaaatccctaagagagagcttataaacatataattcaacaaacggatgactggactttatgtagagatcattttattttaatctgtattaggaacatgtttattttgggaaatgtagcttcagaggtatggagattctttttagggtattattaattcaaaacctctggagaatttaaccaattcgaaaaataaaattttgaggtgttacattgagcttcttcttaatgtactaccgtgggacggtgggagcggtctttcccctaccgtccgagtgtttttaataaaatgaattgaacaactaaacaagttgtagaacaccatgttctgagctgggcgcctggctcttgcttcaacctgctgcacgctctaggaatcaatgactctgtcatccctgtgggagattgttccaaaggacctctgtgccctgctcatgaatccgtttctcatctgccttttgattatttgtttatttgctcttttctccttttgtagttttcacaagcatgataatcagaacatgttttatgtgcatagatggagaggagctattttggaaaacaagttggttcctctcttcaaacaaaggatgctatatgacaaaggaaattcctcattttgcatccttcaccatcttgtgttaggattgttatttgttgctgtagccggcttctttcctatacatcaaggtcatggatgattccaggaatggtggagggaggctgagagcagggcgccaaaactccagaaaaagggcttcaattcaattgtgatccttgtggcttggtgactgtggaaacacattgatggtgcctctccaaacagcaaccttgtcctgcaacatatccatcaagatgctcatatgtggggaatggctggggcagcagacattaggagactttggccttagtcctgggagtgcttgtttgctgctggttgtagtagtgtggtttttcatggacatttatgtgtatgcatgtgtttggccgccgtcaggaggccattttttgt

SEQ ID NO: 18418 - DNA, 633 bp, Zea mays
  Clone ID: LIB3079-043-G8_FLI
cccaagtgcgcttcacgcaaatgtcgatctgggttcttgaggactatgatacagaagcatggatcctaaagcacaatgtgagctcttcgcagttctttgaattactgagtcacccaatcaaagacttccatattgtggccattcatccagatcacaattcgttcatccttgttcagcactggaaccagaaactggtatcatataacatggatactcaggaactgcatggtctctgcactcttggaaagggctatgtgattattaccccatatgttccctgtttcttggagtcatcggttcttgccaccaaacactgaggttgttgtttctggggacttctctgcatgttcaacaagagcctgatcatccaagtgtggggcaaggtgatctagtctgatggtgctttaatgtccttttgtaatgctttgagaaagctgtttacaggacaacatggttagttctatgatatatcagtgagaaagctgtttacaggacagtattgttagttctatgatatatcaaattagatcacacttaattgctggccaatataggtattagcttcggttttttgttgtgattattcaatattgaatgcgcacctgcgcacctatggtattgccctgtgtgttc

SEQ ID NO: 18419 - DNA, 1225 bp, Zea mays
  Clone ID: LIB3079-043-H2_FLI
ctcctgcgcgcggtgtggtcgcgccagccgccgtggcaccggcgcgtgcggggggccggcggcggcggcttaacaggcaggcgggacgagccgtcgtccgtcgtccgcggcgacgggcggcggggcctgggcctgccgctcatccgcatgctccccgtcgtcaagttcactgccgcctcctgcgacgccggcgccggcgctggtggcgtggcgccgaggatatccgtgtcggagtgcgccgtgtgcctgagcgagttcgtggagcgcgagcgcgtccggctgttgcccaactgctcccacgccttccacatcgactgcatcgacacgtggctgcagggcagcgcgcggtgccccttctgccggagcgacgtcacgctgccggcgatcccgtcggcgcggcgcgccccggcggcggcggcggcggtccttcccaccagcaggcgccgggacgacgcgctcgccagcgaaagcattgtgatcgaggtgcgaggggagcgcgagaggtggttcagcagcagccacgggacgacgacgacgacgccccggcgccagccgccgaagcagccggcgccgcggtgcagcaaggcggcggagagcgtcggcgacgaggccatcgacacgaggaagacggacgcggagttcgcggtgcagcccttgcggcggtccgtctccctggactcctcctgcggcaagcacctctacgtgtccatccaggagctcctcgccacgcaaaggtgggacgacggcgacgtcggtcgaccgtgagcccggccggccggccgaccgccagctgcgcatcattccaggacggacgcccactaccactacgtacaagacgaagcagcgatttgttttgcgcgccagatcaggcagccatcaacgacgctggtgttgggtgacccaacccccagtcccagtgcacgcggattggacatttccggggcgaaaaaggtcgctcgctgcatgcgcgccgagagcttacgacgggcgcgctggggcctctcagcctagatcggggccacagagccgtaggccagcgcggcgagcatgcaggtgtcgcgcggcagccccctccccctgggcgtgtgcgcgcgagtggccacgcaccgccgactgctgggggcgagggccggcgcgcgcgcgccaccggccacgcacgtaccggccatgtgcgcgcttcgctttgcgggtacgtaagccgaagtggacgtgccctggatgcacc

SEQ ID NO: 18420 - DNA, 658 bp, Zea mays
  Clone ID: LIB3079-043-H8_FLI
cttcgtagcgccggcgctccatcttccgctccctcccttagtcgcgctcggcacgcgggtgacggcggcagtggcggcactcaggatcgggctctcagcgacggcatcagcggtttcccctcccgcttctctccagtcgcctcgcgccctcgcctccggtcctccgcacaccagccggtgaccctccatatagggtgtgagactaccaaaactcgaaaatgaacaagggaaagatttttaagctagccaagggattcagaggaagggcgaaaaattgcataaggatagcaagagagagggtggagaaggcgctgcaatattcatatagggatcgacgcaacaagaagagagacatgcggtctctttggattgagcgcatcaatgctggtacacgcctccatggggtgaactacggcaatttcatgcatgggttaatgaaggagaacatccaactcaacaggaaggtgctctcggagctgtcaatgcacgagccatacagcttcaaggctcttgtcgatgtgtctcggaatgcatttcctggcaacaggcctgttcctgccaaggaggggctagcgagcattctgtaaacgttttcttcccaataattaaacttgatggtttacatctacatctgaaagtgacctgtctgcttgtaacg

SEQ ID NO: 18421 - DNA, 495 bp, Zea mays
  Clone ID: LIB3079-045-A11_FLI
cacccggttccgcgtgcctttccccacctactctcgcggctctcgccagccagtctagggtttcggtcccggcgtgcttatccgcccccgccggccatgtcgaagcaaggagggaaggccaagccgctgaaggcgcccaaggccgacaagaaggagtacgacgagacggatcttgcatatctgcagaagaagaaagatgaggaaaaagcactgaaggagcttaaggccaaggcacagaagggcgcgattgggggctcgggtctgaagaaaagtggaaagaaatgagactggtcacccgtctccaatacctagaggatgataaggcagctgtctatctgtgttgcgcttcactaagtgtgattgtaacagtggtacctcttgtgttctgtgttccgcgatgttgcagttggttgcttgatcgaaagatgtttcaacctcccatctgctagctatgatacagatggtcccctgataataatgatgacatattctgtg

SEQ ID NO: 18422 - DNA, 905 bp, Zea mays
  Clone ID: LIB3079-045-E8_FLI
gcattgtggatgcaaataattgggttttcagttaggtttttgtcttcattcttatggattcaaatgtatagattaggggcttcttccagcacgccaacatattttgaaaccaaccatgaagcaagaattagtttcttaagccctagatctgattcagttagacggagtcctacggcagatgatatattgggaggttcgatctatgatccttcttactactcgtcactgttcgaggatgtccgaaacaatgcatgcaatcatcagggtgataaacaaagtggtagtaatgacagtggttcaacatctgcaggccagacaccacgacttaaatcttttgctaatgatgtggaaggtggactaaaaagaccgttgaactcctagggataaaacaacgggctcatcttgggaacctaaatcctgtagccaccgttctctttgaagcatagaggtttgcacaccgcagcagtttatttctcagaccagcgggaagggggtgtccaacgaaaggagcttggcaaatactgtaacggcgactgcctgtgttgccgagcatccacagcagcatcggtgccattttggagcaccgttcgtactcagcgagcttgagccggatgtttctgcaaatagctgtccaatgttggtgttgcatatcgacctatgccatgcgatatgtttactgcccatcatgtcccatttttcagacctctcttcctgtttcttttaactaccaaggaaaatgaagcaagtagttcgttagttctttagtcacttagttattttctagctgtaggctggcagttgcttctcttctagcattttggtcattgttcatagcatttgtgttgacaaggaacagatctctagatcagtgaaaggaaacaaatgtaagtttcattctgttctag

SEQ ID NO: 18423 - DNA, 1127 bp, Zea mays
  Clone ID: LIB3079-045-F3_FLI
ctcgctccacaaccacaactatccatccactaccggctccctccctcctcctgaaaaccccgaccgcgggcgaaccaaaccctagcgagcgaggcgatcagcgtccggcgaccggcgacagagcgcaatggagacgcgcccggcgccttgcgacctcgaggcggccgtgcccgcgggctccggggctgcaacggcggcggcggcgcagcaggaggcacccgcggcgaagaaagtggcggaggaggaggatccgcgcctgcgctgggccttcgtgcggaaggtgtacgccattctctccctccagttcgcgctcaccgcggccgtcgcggccaccgcgtgcctcgtccgcccgatcccgcgcttcttcgcctccggcccccccgccgccgtctggtccacgtacatcgcgatcctcctgtccccgctcatcgtcatgttccccatgctcaagtacagggagaagcaccccaggaacctcgtcctgctcgccgtattcactctctgctgcagtctcagcatcgccgtctccgcctccaccaccctcggcacagtggtcctgcaagctaccatcctcacagctgctgctgtcctggggctcaccctcttcaccttctggggcgtcaagaggggctacgacttcaccttcacgttccccttcctgttcgcctgcctcgtcgtgctgctggtgtacatcatcatccaggtctgcttcccgctgggaagggtagccatgaccatctacggcgtcctggccaccgtggtgttctcgggcttcatcgtctatgacaccaacaagctgctgaagcgccacgcctacaaccagtacgtggtggcagccatctccctctacctggacgtcatcaacctcttcatggcccagatggccatctccttccagtgatggattgcgggtctcacctgtacggctgtaccccatgcatgacggcgcctcgcccgtctggtacatggtggatcacacatccacatagcttcgcaagtcgagctgtctttcattatccttatcctaatactggtagtaccaatagcattacagtcctacagatctgtaattggctggccacccttcagctgagacagtatatatatcgtatatggcacctcaccat

SEQ ID NO: 18424 - DNA, 512 bp, Zea mays
  Clone ID: LIB3079-046-A10_FLI
ggttgctggtcacaaggacgtccttgaaggtgatccttatctgaagcagcgtctgcggctgcgtgagtcctacatcaccactctgaacgtgtgccaggcctacaccctgaagcggatacgcgacccgagcttccaggtgagcccgcagccgcccctgtccaaggagttcaccgacgagagtcagccggcggagctggtgcagctgaaccagcagagcgagtacgctccaggcctggaggacaccctcatcctgaccatgaagggcatcgccgccggcatgcagaacaccggctaggccaagatcttcggtgtgcaaataacctgtctcccatgagacggtggacgatatgtgtaggcctgtgagcagttagtacaccggcgccagtgtgttctggaggatttttcatgtcagagcctttctcttgtgtgcttgctgtagatgccaaggggagcttattggctgttgaagcctgatgcaaaataaagtacgaaactatgttttttgtttaact

SEQ ID NO: 18425 - DNA, 1060 bp, Zea mays
  Clone ID: LIB3079-050-D4_FLI
caccgacgagacccccgagctgatgccgctgagccacgtgctggccaccaagctgggcgcgcgcctcaccgaggtgcgcaagaacggcacctgcgcctggctgaggcccgacggcaagacccaggtgacggtggagtacgtgaacgagggcggcgccatggtgcccgtccgcgtgcacaccgtgctcatctccacccagcacgacgagaccgtcaccaacgacgagatcgccgccgacctcaaggagcacgtcatcaagcccgtgatccctgagaagtacctcgacgagaagaccatcttccacctcaacccgtccgggcgcttcgtcatcggcgggccccacggtgacgccggcctcaccggccgcaagatcatcatcgacacgtacggcggctggggagcccacggcggtggcgccttctccggcaaggaccccaccaaggtggaccgcagcggcgcctacgtggccaggcaggccgccaagagcatcgtggccagcggcctcgcccgccgctgcctcgtgcaggtgtcgtacgccatcggcgtgccggagcccctgtccgtgttcgtcaactcgtacggcaccggcacgatccccgacaaggagatcctcaagatcgtgaaggagaacttcgacttcaggcccgggatgatcagcatcaacctcgacctgaagaagggcggcaacaggttcatcaagaccgccgcctacggccacttcggccgtgacgacgccgacttcacctgggaggtggtgaagcccctcaagttcgacaaggcatcggcttaaggttgggagtgtcactgtggacatgaggactaccttcctctggctctgctgttacctgcaagcattgctgctgctggatgtgtgtgtttgatcagtgactggctgctgctccatagaagatgaacggagagaaggatgatgaagggctttggcaatcgccgctgcaactgcaacccatgccatgccggcttagtgattgggtataatttggcttggcagcagccagcattattatgtgctgatctgttatcttttactagtttggtcgtc

SEQ ID NO: 18426 - DNA, 443 bp, Zea mays
  Clone ID: LIB3079-050-E10_FLI
caccccagcgggtgctaccagatgtgcctcacggactggaacctcagcaacctgcccacgggggacgtggtcgaccgcctgctcaacgagtggcggacgctgcaggcggccggccagaccgacgcgcacggcgcctacagcttcaccggctacctgggggagtacgtcctcactgtcagctacaacaacaggacgacgcaatccaccttctcgctgtcgccgggagacgagaccaggcacatcaacgttcagatgtgatgcgccaacattatatttagggctcctcggatcggactacttattactagctgatgtagtgattgttgtggaagaagattgcacagtcaatctatgtttcttacttgtcctgtgtcaaatttagtgtaagaactggcgtccttgacagctggtatgtaaaatagtatgaccaccactattactat

SEQ ID NO: 18427 - DNA, 1329 bp, Zea mays
  Clone ID: LIB3079-050-F6_FLI
ctttgatcaacgagcatgggatacccgtaccatggagtcaatatgccgatcttgcaaatttgctgtaaggacatgtggaagggtcatgggaatgacgattggtgcaatgcttgaagaaatccaaactctctaccaacaacacaaacagtcttgttttctttacttgtccagtgaagttatcaagatttttggatctgatccatcttgtgcgggctatcttactaacttgatacaaatacttttcagccatacagtgcaacttctcagaacgattcaagattttactgccagaccagatatagctgatgattgctatttgttagcatcaagatgtatccgttactgtcctgatctatttatacctacagaaatgtttcaaagattggttgactgtgcaatggctggtataactatacaacacagggaagcctgtaaatcgatattgtcttttctatctgatgtcattgaccttccaaactcatctgacgggggacagtaccgtaaagttattaacacaatcatacttcaccgtggcgcaacccttactagaataatgattgctgccttaacaggggcgctaccatctggtcgtctggaggaggtttcttatgttctgctgtcacttagcagagtctttggtgagaacatgctgaactgggcaagggaaagcattaatcttataccgccacaagccctaacagatgcagaacgtttgcgcttcttcaacaccatatctgatgctgcttctgggtccagtctccataccataacagatagatttggtgaaatctcagatgtctgtagacgaaacaaaacagtgcaggacctagttcagagtgccttgcggcctcacgatttgaccttcacagtggttccacaacagatgtgacaactggatgtctctgcaaggcaagtttagagagccagttcatgcatagtttcaagttgagaaaagccaccgagtcggtgttgatgcaaggctagctcactgtcatcttcggaattttttctctctcagttcatacaggtttgagttgcggcggcatacagttcagatttgttcagagcatagataggtcagtaagcatcgtaattctttcgtgtttctcctttgtacatgtgccgtaaattgtgtatttggggagggagataagttgtgttgtattatctcaacaacaaagtgtgatacgctggcagatcacgcggaatggtgatctaccatgggcctgattttgcgttggccggtcagcttgtttttgtaaagtgaggtggccatcgattttatcatataagcttataccggctgttgaaggaagatcaagtttgtgt

SEQ ID NO: 18428 - DNA, 517 bp, Zea mays
  Clone ID: LIB3079-051-B12_FLI
caaggaagagtgttgctccaggtccaagtttcaatgtctccagaaattttgattcgggatgcaatggaagtcgcgaagcaagccgaagaggagatactcagggctgatgccagcataagccaaatcagcttgcagctaagattgggccaacaaatcaagcaacttcagctagcatcgcaagaacgtcgctgatctacatgcaggagatcactgatccatttgctggctgcttcatgagtctactcgggagtatttccttttgctaatttttctgacatacatgagcttggtctgctgatgaggcagtaggctataggattctaggaaccgactgtgtacattgtaatcagagtgttcggagacgtgaagctgagtttgtaataatacacaagcagccttgctcagaaatgtactgggcaacaaattgtctgccacatactgtcaatgtaaaatgtatgaacaagttcctcactggccccgctataataacaacgaaccatggctactgatgcaaaat

SEQ ID NO: 18429 - DNA, 631 bp, Zea mays
  Clone ID: LIB3079-051-E9_FLI
gaaaagaggacttggcctcgccttcccttgcgtgtttaccgacgccaccggccgcctgtatatcctcacccaactccgtccctctctcccggcccagatagatctttcccccgtcctccctcgccttcgccttcgccggcaggagatttccaccaccaccgccgaaccgccccgaccctcctcccctctcgcgctatggcccagactgttgtgctcaaggttggcatgtcctgtgagggctgtgttggagctgtcaagcgggtcctcggcaagatggaaggcgtcgagtcctacgacgtagacatcatggaacagaaggtcaccgtgaagggcaatgtgacacctgacgccgtcctgcaaactgtttccaagactggcaagaagacttcgttctgggaggctgaggccgtgacaagtgaatccgccacacctgccggtgccaccgcctgacaggttcgatgatctggaagtgcccggcaaggcggcaaagaaaaaaaatgtgaatgtatttagcttggatctgttacaaataattgcaaactgctagctcggtctgtacattttacagttgctattcgtgtactgtgatgttctcgtaagtttggggagatgataaaccaatatttgtatg

SEQ ID NO: 18430 - DNA, 872 bp, Zea mays
  Clone ID: LIB3079-051-G1_FLI
cccttgataaagtttgcgtccttagctgtggtatttctaccggtcttggtgcatcaattaatgttgcaaaacctccgaagggttcgacagtggctgttttcggtttaggagccgttggtcttgccgctgcagaaggtgcaaggattgctggagcgtcaaggatcattggtgtcgacctgaaccccagcagattcgaagaagctaggaagttcggttgcactgaatttgtgaacccaaaagaccacaacaagccagtgcaggaggtacttgctgagatgaccaacggaggggtcgaccgcagtgtggaatgcactggcaacattaatgctatgatccaagctttcgaatgtgttcatgatggctggggtgttgctgtgctggtgggtgtgccacataaggacgctgagttcaagacccacccgatgaacttcctgaacgaaaggaccctgaaggggaccttctttggcaactataagccacgcactgatctgccaaatgtggtggagctgtacatgaaaaaggagctggaggtggagaagttcatcacgcacagcgtcccgttcgccgagatcaacaaggcgttcgacctgatggccaagggggagggcatccgctgcatcatccgcatggagaactagatttcgctgtctagtttgtgatctggcctgggcttggggttaataaaagaggcaatgctagcctgccctttcgatgaggaggtacatacacgctggcgatggaccgcgcttgtgtgtcgcgttcagtttggcttttgccaagcagtagggtagcttcccgtgtcggtaattatatggtatgaaccatcaccttttggctctacatggtatgaacgtaagatacaaattccaact

SEQ ID NO: 18431 - DNA, 1513 bp, Zea mays
  Clone ID: LIB3079-058-D5_FLI
ggatattgctacggaaaatgagtttgaaaagaggcttcttgcagatgttatccctccacatgaaatcggtgttacctttgaggacattggagctttagaaagtgtcaaagatactctgaaggagttagtgatgcttcctttgcaaagacctgaactttttaaccgaggacaacttatgaagccgtgtaaaggaattttactttttggcccacctggtactggaaagacaatgcttgctaaggctgtggcaactgaggctggtgctaatttcataaacatatcgatgtcaagcatctcttcaaagtggcttggtgaaggagaaaaattcgtgaaagctgttttttcactggcaagtaaaattgctccaagtgtaatttttgtggacgaggttgatggcatgctgggaaggcgggagaaccctggagaacatgaagccatgcgtaagatgaaaaatgagtttatggtgaactgggatggtctgagaacaaaggagaaagaacgtgtattagtacttgctgcaactaacaggccatttgatcttgatgaggctgttattaggcggcttccaaggaggttgatggtgaatttgccagatgcatcaaataggagaaagattcttagtgtaatactagccaaggaagatttggcagacgatgttgatctagaagctatagctaacttgacagaagggtactcgggtagtgatctcaagaatctttgtgttactgctgctcatcgtcctattagggagattcttgaaaaggagaagaaggagagagcttcagcagaaacagaaaataggccattgcctctgtcgcacactagcaatgatgtccgtgcattaagaataagtgatttcatacatgcgcatgaacaggtctgtgcaagtgtttcctcagattccagtaacatgaacgagcttgtgcaatggaatgatctctatggagaaggcgggtcaaggaaaaagacaacgctaagctacttcatgtagctgatgttgcaagtatatcgggagaagtgccctggcacaaagcagaaatggttggaggcagttgggggtgtgtatcgggtgcagttggaaaagagctaggttcacctgccatccatccattgagagaattgatggctcaggtggagcggaatggagtagtatacacattggttgctgcctccactctgggccatgtatcatgcatctggacatgacggatggtctggcttgcagttgtcctaacaacagttttgagtgcaacatatcactgtctgggaaagaaaagaaaagaaaatataccatttgtgttgttcccactccacaggaagcacggcgacgacatcgcccaacaacccttttccatcgtttcttaaaaaataattcattatttaggttgtaaacatttagagcctgtgcaagtgtacagtatgagcatcaggagtattaacctagtgttgatgtctatacctaatctaatttattgattagaatcatttaacatgaaatacatgattattttgt

SEQ ID NO: 18432 - DNA, 1114 bp, Homo sapiens
  Clone ID: LIB3082-005-G5_FLI
gaggctttaaggtagctttaaattcgtgttgtcctgggagctcgcccttttcggctggagtcgggctttacggcgccggatggctctggacgtgaagtctcgggcaaagcgttatgagaagctggacttccttggggagggacagtttgccaccgtttacaaggccagagataagaacaccaaccaaattgtcgccattaagaaagttataataaaggataatagtcttgtgctgacaccatcacacatcaaagcctacatgttgatgactcttcaaggattagaatatttacatcaacattggatcctacatagggatctgaaaccaaacaacttgttgctagatgaaaatggagttctaaaactggcagattttggcctggccaaatcttttgggagccccaatagagcttatacacatcaggttgtaaccaggtggtatcgggcccccgagttactatttggagctaggatgtatggtgtaggtgtggacatgtgggctgttggctgtatattagcagagttacttctaagggttccttttttgccaggagattcagaccttgatcagctaacaagaatatttgaaactttgggcacaccaactgaggaacagtggccggacatgtgtagtcttccagattatgtgacatttaagagtttccctggaatacctttgcatcacatcttcagtgcagcaggagacgacttactagatctcatacaaggcttattcttatttaatccatgtgctcgaattacggccacacaggcactgaaaatgaagtatttcagtaatcggccagggccaacacctggatgtcagctgccaagaccaaactgtccagtggaaaccttaaaggagcaatcaaatccagctttggcaataaaaaggaaaagaacagaggccttagaacaaggaggattgcccaagaaactaattttttaaagagaacactggacaacattttactactgagggaaatagccaaaaaggcaaataatggaaaaatagtaaacattaagtaaatgctgtagaagtgagtttgtaaatattctacacatgtaaaatatgtaaaactatgggttatttttattaaatgtattttaaaat

SEQ ID NO: 18433 - DNA, 2082 bp, Homo sapiens
  Clone ID: LIB3082-008-C10_FLI
ctgctaggacccgggcagggctggagctgggctgggatcccgagctcggcagcagcgcagcgggccggcccacctgctggtgccctggaggctctgagccccggcggcgcccgggcccacgcggaacgacggggcgagatgcgagccacccctctggctgctcctgcgggttccctgtccaggaagaagcggttggagttggatgacaacttagataccgagcgtcccgtccagaaacgagctcgaagtgggccccagcccagactgcccccctgcctgttgcccctgagcccacctactgctccagatcgtgcaactgctgtggccactgcctcccgtcttgggccctatgtcctcctggagcccgaggagggcgggcgggcctaccgggccctgcactgccctacaggcactgagtatacctgcaaggtgtaccccgtccaggaagccctggccgtgctggagccctacgcgcggctgcccccgcacaagcatgtggctcggcccactgaggtcctggctggtacccagctcctctacgcctttttcactcggacccatggggacatgcacagcctggtgcgaagccgccaccgtatccctgagcctgaggctgccgtgctcttccgccagatggccaccgccctggcgcactgtcaccagcacggtctggtcctgcgtgatctcaagctgtgtcgctttgtcttcgctgaccgtgagaggaagaagctggtgctggagaacctggaggactcctgcgtgctgactgggccagatgattccctgtgggacaagcacgcgtgcccagcctacgtgggacctgagatactcagctcacgggcctcatactcgggcaaggcagccgatgtctggagcctgggcgtggcgctcttcaccatgctggccggccactaccccttccaggactcggagcctgtcctgctcttcggcaagatccgccgcggggcctacgccttgcctgcaggcctctcggcccctgcccgctgtctggttcgctgcctccttcgtcgggagccagctgaacggctcacagccacaggcatcctcctgcacccctggctgcgacaggacccgatgcccttagctccaacccgatcccatctctgggaggctgcccaggtggtccctgatggactggggctggacgaagccagggaagaggagggagacagagaagtggttctgtatggctaggaccaccctactacacgctcagctgccaacagtggattgagtttgggggtagctccaagccttctcctgcctctgaactgagccaaaccttcagtgccttccagaagggagaaaggcagaagcctgtgtggagtgtgctgtgtacacatctgctttgttccacacacatgcagttcctgcttgggtgcttatcaggtgccaagccctgttctaggtgctgggagtacagcagtgagcaaaggagacaatattccctgctcacagagatgacaaactggcatccttgagctgacaacacttttccatgaccataggtcactgtctacactgggtacactttgtaccagtgtcggcctccactgatgctggtgctcaggcacctctgtccaaggacaatccctttcacaaacaaaccagctgcctttgtatcttgtaccttttcagagaaagggaggtatccctgtgccaaaggctccaggcctctcccctgcaactcaggacccaagcccagctcactctgggaactgtgttcccagcatctctgtcctcttgattaagagattctccttccaggcctaagcctgggatttgggccagagataagaatccaaactatgaggctagttcttgtctaactcaagactgttctggaatgagggtccaggcctgtcaaccatggggcttctgacctgagcaccaaggttgagggacaggattaggcagggtctgtcctgtggccacctggaaagtcccaggtgggactcttctggggacacttggggtccacaatcccaggtccatactctaggttttggataccatgagtatgtatgtttacctgtgcctaataaaggagaattatgaaat

SEQ ID NO: 18434 - DNA, 2440 bp, Glycine max
  Clone ID: LIB3106-009-C11_FLI
gaatttagaatgcttagaataaatgaatgaataaagttgagttccctctaacagttattttagagtttagttgagttatcatgaataatcatcagtgacactgtaggagcatggatcctctatgtgagttttgtcgggtggtgagagctgtggtttactgtaagtcagattctgctcgtctctgcttgcattgcgatggctgtgtacactctgcaaattctttgtctcgcaggcattcgcgttccctcctatgcgataagtgcaattcccagccggcaatgatccgctgcatgaatcataagttgtcattatgtcaaggttgtgactggaatccaaatgactgttctgcattgggacataggcgccttgcattgaattgctacactggttgcccctctttggctgagttttctaggctctggtcttttgtgtttgatgctaattcctcacttggtggttgggaatcggttggtactttgccaaaaagtgagagctgcactagccagtgtttggagcaaactgatcataatggtggttattttggtttggtgagtgacaagttggatgaaattgaatcttgtgtcagatatcaacctcggatggatcagtctcaaatcattccatcaaatccaaattacacaccgtactgcaaagacgaagcatttttctttcctcaagactcaaaccagccaaagctgcaggaatgtcctaatctaggaattcatgatgggaatgaactttgtgaaggtttcaatgtggataacgttcaattaaactttgaaattgctgatgaaatattttactgttcacaagttgccacaagataccaccttgaagatggaggaatggactgtttattgatggataaaaacatagcagttacagaatctagttcacttattgagagtgccatggaggcatcatcatctatccaacaagattgtgtggcttttcaatcatcgagggctggtgggtcagctagtgtgatgcaggttatcaacagcaataccaattgtgcacttatgaatcctagctgcactaaaaacatcagtctgggatttcctcagggcctagttcattcaaacatgccacttcaatttcccaacatagttggtgaaaataattctactgaatatcaagactgcgggttatcgcgagtgggtgaatccccctgggaatcaaatttggagggtacatgcccacaagcaagggataaagctaaaatgagatacaatgagaaaaagaaaactcgaacctttggtaagcaaataagatatgcttctcgcaaagcaagggccgatacaagaaaacgtgtgaaaggtagatttgttaaagcaggtgaagcatatgattatgaccctcttgggacaagggacatctaagcatattatctacaataactatcttttccatgaaagatattcttctgactggtaaggtggtccctggaccttgtgagtacattgctttgttgccaattcttcatcaacagacgttttgtttatcttgtgaaagtgggagagttataatgcagctagatatttattcaaaacttgactgcttaggtgattgatacagatctattagagattttaacatatttagaagataacaaagatatgaaggtgttgcaattgggaattgcagaggaagggattggatgtatgccaagataatgcgtttaattatacataggaagtgtgagaggtaacaggcatgggacatagaggagcagaacatttgaacagatttcaaacagcatcacagtcattgtcaattcagacaaaaacagagggcctggatattcctccttgcatttagaggagatgtgcagagtgatccatcctgaatttcaaatgtgatattgtgagtctctgagcctatgtgttctatataaataaacactgcctagtgtaatgaataaaagagaaactggtgtttggcaagcaacaatagccaacctcacactttctgctttcagtttggtccttccgtcctcatggggatccttcacacgaccttattctgtcatcttaagccattgttcaaggacagcaacaccatattttggaacctcttcatttattccattttcatcagattagtgagcacgatcgactgttgattgagatactattgttcttgacttgctggaagccagttttacctgccgcaactattggcatctttgacattgcctcaactatttcatttgttgtattcctctatatttgctttgaggatggcacctatttcttcaataattgtacaaacattgtgtacaaactttcctgatttcaagggacgtttgtttctcctatgaaataggagatattaatgactgttttattgttttgtaatttgcacaaatctgttattattcattaaatttctgtagaatgttgataagaaagaaactacagtctttactgttccgagt

SEQ ID NO: 18435 - DNA, 1269 bp, Glycine max
  Clone ID: LIB3106-015-B6_FLI
agcaggtagaagatgatgatgactcttgggaggtcagagcttttgcagaagacacaaggaacatcatgggcaccacatggcctcctaggtcctacacctgcaccttctgcagaagggagtttcgctccgcccaagccctcggcggccacatgaacgtccaccgccgcgaccgcgctcgcctccaccaagctccagtaccctcctcctcctccaaccccatgacctcttctcttcccacttcacccttcatcaatatccctcctcaagaccttgttgcaaatgctggcttgtgcctcctctaccacttgcccaaaagccctagtagtactgcaccacccttcccaccttcccccactactccttctccttccactcttctctctatctcttcttatcctacaaccaactttctgatgcaaacttcctttaattttcccggtgcacccgcaactgggatcaatactactactactactactgtttcctctttgtgctataactctagcaaagtggaacaatccgcaacttcctcctctattgatcataatggccacctcgaagagcttgatctagagctccgcctaggccacaaaccaacaccaacctcataaagcttgcctgaggagctcatcagaaatatatcaaatatatattatatagtgtgaaccatatatatatatatatatatatatatatagtactgctggtagtagcttctgagaaaaattaaagtccgacaatattattgttttgctctctttttaactgcagcgatgtgtggaagacaggaagagatatggagagtgttgttatttgtagatgtttgttataccattaccatgtccaccttttggtatagctgataggcttgtgggttttgttttgggtttaattttgttatttttcttggtggattgatttttatctgtgtgaatgttttgtgactgaaggtgcacatggagatggagggaggagcaagcagggggtggggataggaaagaaggagagaggtaccacatgtaaatttttcaaacaaaaagaaaaatcaattgtaagttggtattaatttttggagaaatatattatcagtaattatggggggagattagggtttggatttagacactgaaaaaggttgcagtgaagtgtcattttctattttagagttgtctaagtacatacatgtctgtctgggcatacatttccgtggggattattttcctcccttcactaagtaaacctagtaatatattattatcttcaccgttc

SEQ ID NO: 18436 - DNA, 1498 bp, Glycine max
  Clone ID: LIB3106-019-B7_FLI
tccgaagcaggcccaatttccctctgcagctgttagagaaaaaggacgttgatgacgtcaccgaacaaccttgttccaccaccagcgtggtaactactgctgctgctactattacttctggtaacaacgacctccacgtggcggagcagtcgaagaagcctccgccaaagcggagttccacgaaagaccgccacacgaaggtcgatgggcgaggccgccggattcgcatgccagcggcctgcgccgcaagagtgttccaactcacgcgtgagctgggacataagtctgatggtgagaccatcgagtggctcctccagcaggcggagccggcggtcatcgctgccacaggcaccggcaccattcccgccaacttcacctcccttaacatctccctccgcagctccggctccaccatgtcggcgccttctcactacttccgcggaaactacttcaaccctagcacgttctccacctcagccgccgctgcttccgcggcggcggtggcacagctaaggagccgcgcggagtgggaccggaacatgagcatggtgatggaggattctcgtaggagcatgctggagaacacttcttccatctccgcaattttgaatttcaaccctatgggtaacgtcaatgtaattcaacaagcgaaacaagagcttcgagaagaatccgccgccgccggtggcggcggcagtcttgattcggtggcttcggattccgatggaagcttagggagaaagagaaggccagagcaagagctatcacaaatgggaagctacttgatacaatcaagcacagggtcgcttccgtcgagccacgcttccaatacggcggcgttttggatggtggccggtcacggcaaccaagccatgagtggtggtggtggcagcgatggtagcagcgataatcccatttgggcaattccctctgttgggaatagcggtgtgtatagaggagctatgtctgccccaggtggcattcatttcatgaattttgcttctccgatgaaccttatccccggagctcaactaggttccgccatggttgggggcggaagtggtggcggcaacagtggttctcaacttctaagtgaaagtaacttaggcatgcttgcagcccttaatgcctacaggcagattccggctaacggcgtctcggagtctccggccagcgccgggcaacctcacggcggagacgatggacgtgattcctccggtcaacattcctgagggtaaaaataatcacaagtgtatgatctgatgctagcttcttaatttttcttttaattactagtatattattactagtgctactattactactattagttctacaactaattagtggtttctataatatatatatatatatatatatatatatatatatatatatatatatatatatatataaatatattaaatacgtaattatatatgttatgtccatttgcaaaaacatgcaagaagcgcaagtttgattgcttattgagttc

SEQ ID NO: 18437 - DNA, 1173 bp, Glycine max
  Clone ID: LIB3106-021-C9_FLI
caccaacactaaccttgttttcttcgtctttactcttctcttcacagaagcgtaaaaacaaaaggcttgactagagaaagagagagagagagcttcgaatcgaaactcagaagtagaaagaaacacaaatcacaatcgctatggctaggtacgaccgagcaatcaccgtgttctcccctgacggccatctcttccaggtcgagtacgccctcgaagccgtccgcaagggcaacgccgccgtcggcgtccgcggcaccgacaatgttgtcctcggcgtcgagaagaaatccaccgccaaactccaagactccaggtcggtgaggaagatagtgaatctggacgaccacattgcgctggcctgcgcggggctgaaggccgacgcacgcgtgctcataaacagggcacgtgtggagtgccagagtcacaggctcaccgtggaggatcccgtcacggttgagtacataacgcggtacattgcggggctccagcagaagtacacgcagagcggcggcgtgaggccctttgggctttcgactctgattgtcgggtttgatccctacactcactcgccctccctctaccagacggatccctctggcacgttctcggcgtggaaggcgaacgccaccgggaggaactcgaattcgattcgggagttcctggagaagaactataaggacacttctggccaggagactgtcaagttggctattcgcgcattgcttgaagttgttgagagtggagggaagaacatagaagttgcggtgatgactaaggagcagggtctgcgtcaactggaggaagccgaaattgatgccatcgttgctgagatcgaagcggagaaggcagctgcagaggctgctaagaaagcccctcctaaggagacataattttctgttttgtgttatgcgagcattgttcttgctaggtattggctgtactcactgaagctaaaaattgatgccattgtgtctgagattgatgcaaagaaaacggctgctgaggctgcaaagaataccctttctaaggagacatgattttatgttacttttatttagctcgtgaattgttcttgctagatgttggcctaacttaaaatgactgctttattgtttttgggtactgccattagtgttggtcatatttaattgcatgtcattattattgaagttc

SEQ ID NO: 18438 - DNA, 602 bp, Glycine max
  Clone ID: LIB3106-112-F10_FLI
ggcgagtgagaaatgccagaaggagaagagaaagacaatcaatggagacgatttgctatgggccatggccactttaggatttgaagactacatagagccgcttaaggtgtacctggctaggtacagagaggcggagggtgacactaaaggatctgctagaagtggtgatggatctgctacaccagatcaagttggccttgcaggtcaaaattctcagcttgttcatcagggttcgctgaactatattggtttgcaggtgcaaccacaacatctggttatgccttcaatgcaaagccatgaatagtttagatgcttctacgcatcttatttatttccctttaatgcttgtacgcatggcatgggtggaaacaattgtctggtgatttaatatttaggttctcgtgtagaagggtgtcagaattttgttacggtactaatgtagatttttattaatacatgtcttatttagctttgtaatacctactcaagggagagatgtgtttagggttatgctagtgattcgccatgtagcttgtcagggtgagaagcacttgcttttagagttttctttagattattatataatatataattttgcagac

SEQ ID NO: 18439 - DNA, 553 bp, Glycine max
  Clone ID: LIB3106-115-D4_FLI
gctctgtatgcctcactcagtttgaacccgaatcagagataaaccgcttatcgtgcggtcatctcttccacaaagtgtgcttggagaagtggctggactactggaacattacatgcccactttgccggactcccttgatgcccgaagatgacacaccttgctttcagtaagcaaaacaagtgagcatgccaataagagagagtttcatgtacagtgtagtgtacatattcttgagggtttttgatgttcatgcatctgagttctgccacctttttaagttttaacctttttgccttttatggtctagagtttgtggagggttttgctttcccttcttctgtctgtgctctttagcacaaatgaggggtatactttttgcttgcatgttatgtttgttcacaatgcccaccttgtttggacctcagagccttaattctatatttgggcattttgatcctaatttggaagcatggattgcagaatccatttgttttgcctttcaaactctcctcaccatgtatatattgtgtgtaaatagctttggttgccacat

SEQ ID NO: 18440 - DNA, 1102 bp, Glycine max
  Clone ID: LIB3106-116-A5_FLI
tggacccatggctgggtttgatatcctgagcgagccatagaaagagttgaattaatagagatacagataacgtgaaactgaaaggaaaatggcactctcagtctcctcaccctcatgcgtacgcgttccttcatgtttttggaaaccaaatggcaagagttgcaaagagcgtactaaggtttcatgtgcagctcacaatgataataagaatccgttggttggaatcggtattggggttgtaacgtcttgtgtgatgggtttaactgcattggatgcggacgccacgagaatcgaatactacgcaacagtggcagagcctttgtgtgagtacaactatgttaagtctggcctcggctactgcgatattgctgagggcttcggtgacgaagctccactgggtgagcttatcaatgttcactatactgcgagattcgctgatgggatagtattcgatagcagctataaacgtgctagacctctcaccatgcgcattggtgtgggcaaggtaatcaagggactggatcaggggattttagggggtgaaggagtacctccaatgcggataggtgggaaacgcaaactgcagattcctccgcacttagcatatggccctgaacctgcagggtgcttctcaggtgactgcaatatacccgccaatgccactcttctgtatgatattaattttgttgaggtttattcggggaacagatcaaagtgaagtcagtcaaaactggtcagatacatatatacatatgaaccacagatggatgggtttagagcaatgaaatggacattttgctagagaatatggatcaacttgtttggcagaatcttcttcctgattacaactacctcaagttactgttcctggttagtggagttgtacatgattgacctggatatcccttttgagagtaatgagcaatccttcctggtgatatatattaagataattcatgtgtatctctgcacatgacatgcgaacagtttgtgcatctttagtgtaaatgtaattttcaatactgctctgaatgataaaaaattgttaattcttcatttgataaatgcctgtctctaatacgtgatatgctttacccttttc

SEQ ID NO: 18441 - DNA, 2166 bp, Glycine max
  Clone ID: LIB3109-028-G5_FLI
ggtacaccacaagaaaaagccacttgacaccatatccacttcaaggccatatcaacccattgttcaaattagcaaagctgcttcatctgagaggctttctcataaccttcatctgagatgagtaactctacagagagaaagccacatgcactgttgacaccatatccacttcaaggccatatcaacccattgttcagattagcaaagctgcttcatctgagaggctttcacataacctttgtccacactgaatacaacattaaacgcttgctcaactcaaggggtcctaaagcccttgatggccttcaagactttcattttgagaccataccagatagtcttccccccacatatggtgatggtgatgtcactgaagacgcagtgtctcttgctaaatcagtgagagagaagatgctcgtaccctttcgcgatcttcttgctcgtcttcaggattcttccactgctggccttgtacctccagttacttgcttggtttctgattgttccatgctttttactatacaagctgctgaagaactttcacttcctattgctctattttcaccggtcagtgcttgtgccttaatgtctattttgcactaccgttctctttttgataagggtctcataccactcaaaggtatccatttaatctctccctctctataattaagtatatgtgaaataagtaatcatatataatccataacgatgaatcgatattatatgttaatgcataacaacttatgcgtgtgttggaatattgaccattgattttcccatcacagactaagctttacctaatttatagaaatcaaatccaagaaattctaccgtgaatcacagtatccattaggtaagagcaatcgaatgcttaatatacatcgaaataataattgaaggcatcaaagtccttgttaatgttattttgatgttttcgatcttaatgttatatctagttgttgttaccaatggatacatggtaatgcagaaattgctggtttgtatattacgtatgtgtatgatatatggaacttaattggagcaattgtattttgtaattatgactgcagataagagttatttgacaaatgggtatttggacacaaaagtggactggataccaggaatgaaaaactttaaactgaaggacctgcctacctttataaggaccacagatccaaatgacttcttgttaaaatttctcattgaagaaggagataatatgcaaagaagttctgctattattttaaatacttttgctgaacttgagagtgatgtactgaatgctctcacctctatgttcccttctctttaccccattggccctctcccttcatttttaaaccaaagtccacagaatcacttggcttctctaggttccaatctttggaaggaagatactgagtatcttgaatggcttaaatccaaggaaccaaagtctgttgtttatgtgaactttggtagcatcacagttatgtctccagagcaacttttggagtttgcttggggtttggccaacagcaagagaccctttttgtggatcattaggcctgaccttgtcgtgggtggctcaatgattttatcatctgagtttgtcaatgaaactttagatagaggcctaatagcaagctggtgtccacaagaggaagtgctgaaccacccttcaattggtggattcttgactcattgtggatggaactcaacaattgaaggcatttgtgctggtgtgccaatgctgtgttggccactttttgctgatcagccaactaactgtagacacatttgcaaagaatggggcattgggattgaaattaacaccaatgcgaagagagaggaggtggagaaacaggtcaatgaattgatggagggagagaaaggaaagaagatgaggcaaaaggtcatggagttgaagaagaaggcagaggagggcaccaaactaggtggtctttcacacattaacttggacaaagtgatttgggaagtgctgcttaaaaaaaattagattaaagtgctatttttcccccgccaagaagtactgtgatagttcattgattttcttctcttgaatttgttgctttgttaagcaaaaaatatgtttctgttggaagtggttgttatattttaaacatatataagttatctattgcattgtgtttatgttcg

SEQ ID NO: 18442 - DNA, 973 bp, Zea mays
  Clone ID: LIB3116-032-E10_FLI
gatgggaggacccttgctgactacaacatccagaaggagagcaccctccacttggtgctgcgtcttaggggtggtatgcagatctttgtgaaaacccttactggcaagaccatcactcttgaggtggagtcttcagataccattgacaatgtcaaggccaagatccaggacaaggagggcatcccgccggaccagcagcgtcttatctttgccggcaagcagctggaggatggacgcacccttgcggattacaacattcagaaggagagcaccctccacctggtgctgcgcctcaggggaggaatgcagatcttcgtgaagacattgaccggcaagaccatcaccttggaggttgagagctccgacaccattgataatgtgaaggccaagatccaggacaaggagggtatccccccggaccagcagcggctgatcttcgccggcaagcagctggaggatggtcgcaccttggctgactacaacatccagaaggagagcaccctccatctggtgctccgcctgaggggcggtatgcagatctttgtgaagaccttgactggcaagaccataaccctggaggttgagagctctgacaccatcgacaacgtgaaggctaagatccaggacaaggaggggattcccccagaccagcagcgtctgatcttcgccggcaagcagctggaggatggtcgcacccttgcagactacaatatccagaaggagagcaccctccacctggtgctccgtcttcgcggtggttattaagccatcagtcgttgaagctgctgctgtatctgggttatctagtgtctctgccattgcccatggatggtactgtctttcaaagtatttgtatggtttgtgtcgtgagtcgtgactgagctggtttcatggaccagttgtgttctcgttacccaaaactatcgtgcgaccgcatatggcttaatcatgaataaatgttgtgtttgaattt

SEQ ID NO: 18443 - DNA, 544 bp, Zea mays
  Clone ID: LIB3079-046-C7_FLI
gcatttatagagagggtggaacctgaagctggacctgtggcccctgtggtacctcgtcatccaaaatcatatatggagatcatggaaatgatacaaaggggtgagcggccagacgatatacaggatattaacgatgaccctccaaatcctgatcaaccaatctcagaacctcgtatggcaccgaaaccaaagccatgggaaaagcaaggtcaagggagtttggcctgtgatttgaaatcgctgccaagggaatccgacgtgctgaggtcagaagttcagcacgacgacggcaccaaccaggttacggagtccgccgatggcgccaaccaagcggactcattgctgcaggcaggcgtagctgctggatctgaatctcctggggttccagatgacgccgcttcttcgcttgagtaaccaccgcgaaaataaatgaatgacgccgtaatcagacgcgaaaacaaacgacctcattaccacaacactgttctgatatttttgggtcctgagagagccacttgagttcacaataaatgtagtacccatc

SEQ ID NO: 18444 - DNA, 555 bp, Zea mays
  Clone ID: LIB3079-047-A4_FLI
aaggaagcaggcggccaccatggtgaagggacgcacgggacagcgcgtcaggctctacgtccggggcaccatcctcggatacaagaggtccaagtcgaaccagtacgagaccacgtcgctcattcagatcgagggggtgaacaccaaggaggacgtcgcgtggtacgctggcaagcgcatggcgtacatctacaaggctaagaccaagagcagcgagacccgctacaggtgcatctggggcaaggtcacccgcccgcacggcaactcgggcgtcgtccgcgccaagttcaagtccaacctcccgcctgagtccatggggcgcaaggtcagagtgttcatgtacccgagcagcatctaaggttaggtttttgttggagtaaaggtggactctaaatggccatgcttagttcttctctctgagcttaaaatgccatgtgttggcaacttagattgttcatgtactgaacctgttgaagttctaccaaaatttgttgtcgaacggctgaacagttgtcctaatgttatgctataaacagagcttatttccccccgtgc

SEQ ID NO: 18445 - DNA, 619 bp, Zea mays
  Clone ID: LIB3079-047-D10_FLI
ggcggcgcagcagcatcacaaccaccgcccgaagatggtgaagtttctcaagcccggcaaggccgtaatcctcctccagggcaggttcgccggccggaaggcggtgatcgtgcgcgtgttcgaggagggcacccgcgaccgtccctatgggcactgcctcgtcgccggcctggccaagtaccccaagaaggtgatccgcaaggactccgccaagaagacggccaagaagtcccgcgtcaagtgtttcatcaagctcgtcaatttcactcacctcatgcccacccgctacaccctcgacgtcgatttcaaagacgtcgcctcgggcgggcccgacgcgctctccacccgggacaagaaggtcgaagcctgcaaggccgccaaggcgcgcctcgaggagaggttcaagaccggcaagaacaggtggttctttaccaagctccgcttctaggcgccgggcaccccgcatagtgactactttagttgtcaatttgttgtatcggaaaccatttaagctatttctgttttggtattgcgcttgttatggatctcggagaagattttgttaaaaacatgtcgatgatgtgttaaatgatgcccaaaggaaacgtctcgttgaact

SEQ ID NO: 18446 - DNA, 370 bp, Zea mays
  Clone ID: LIB3079-047-G7_FLI
tgctcgggtgaacggaaatcagcggccaaaagaaactccagtggcagcagccagaccatattacatgccggacaatttgttcggagacctgatcgacgtgaagagttttggcgccggaagcaagatcagcaggtctaccagcatgccgagtccaaagggtggtggccagcctatgatcggtagaaacaaataggcctctgctgtttaagatagggatgagcatatatttagctggtagccactgtcgtttggtttgatgtaaatttgctgtcttttttcacgtgtcaatttgcggatttgttactttggtcaatttcggagttgctgcatgtttaactttactagagaattgtagagaagtcattgctcc

SEQ ID NO: 18447 - DNA, 746 bp, Zea mays
  Clone ID: LIB3079-048-C9_FLI
gccaggctctcagcgacgacgagaaggggtcgccgaggagcactctggtggtggtggggcacaccgatgccgcggagagcccgcgcgcgacgacggagaaggcgaagggcaggaggccgccgccggctcgtggccatggtggctcagcagctccccacttcatgtcctccacggtgtgcagccggcagagacggtgcgcgggaggctaccattctgtcggtaacggtaagccgaggctgacggcggtgtcggtgaacaggtacccgccgccggctgctgagctgagtgggagccagaacgcggcggccagggctagcaggtcggcgtcagtggcactctcgtccggtgtgcacaagttgaggtgcttgcgtgtcaacaagtccgatcaggtcaacgtaataagcaacagcagcgtcgactcgaccgctgcgtcggcaccgccgccgcggcggagggaaagctgcttcggctccaggccggttctacaaagagcggcagcgcccctgcatctgcacaggaggaggatgtctagcctgacatgaacaccgattgcacagttatgatttttcttaacttaattgtttttattagtggtgaaagggttctgaaagatgtttgtgtatgtatggttgttagcttcgtagttcttgactgctgtaactattggttggaggccccttgggcttttgttttttttttgggtttggcttggaaggggcaaaatgatgcgaggaataattgttgat

SEQ ID NO: 18448 - DNA, 469 bp, Zea mays
  Clone ID: LIB3079-049-B12_FLI
caattttttagccctcagtgttctttctatgctattttatttctcacaactaaaaaattattttggaaccttgctgttagtgccttttcttatcttgtcaatgtgtccttccatcttgtattagtttgctttcgtttttacattaactagaacacatgctctggttgtggtttcctctttttatgctacaggcttggttagctaccatatcactcgctatctacaaggttagtttgccgcatcgagaaatattatgtgatattgattgtcgagttcttttttctatttcaaaaaatttagtacttgtattcatagtaacatttgatgcattaatgtatacatttttattttcatatataggcttttgatcatctcggcatgttaaaaaagaagaaatgcttctagttgtaaaggaaaggaaggcaaatgtaatgctaatgagagtgatttagtaatttacgagatactg

SEQ ID NO: 18449 - DNA, 1467 bp, Zea mays
  Clone ID: LIB3079-049-B9_FLI
cgacggcagtatccgagctcgcactcgcgcacccgtccatcgcatcgcatctgtcctcccatcccctcagcgccaccgcaccgcaatcacacgcgcgccacccgcgatgacgccggcggcggcgatctccggctccagcagccacgtcgtcgtctcctccgcccgcctcaggcagccgttcacgctccctccgcgcaccgcttgcccaatcgccgccgccgcctcgcccgtgacccgccgcggggtcgcggtcgccgccgtgtcgagccccgttgtgtccgccgccgcggggaaggatgccaaacaggctcctaaggatttccttcaaatcattgattttgacaaggatacaataatgaagattcttaatcgagccatcgaggttaaggcattgataaagtctggagacaagagcttccaaccgttcaaagggaaaacaatggccatgatttttgccaagccatcaatgaggacccgtgtttcatttgagacgggattctttttacttggtgggcatgctatttatttgggtccagatgatatccagatgggcaaacgtgaggagactcgtgatgttgctagagtactttctggctataatgacatcattatggctagggtctttgctcaccaagatattctggacttggcaaaatatgcatctgtacctgtcataaatggtctcactgactataaccatccatgccagataatggctgatgcacttactatgcttgagcagattggtcgtattgaaaacactaaggttgtctatgttggagatgggaacaacattgtgcactcatggctgctattggctgctgtgcttccttttcactttgtatgtgcttgtcccaagggatttgagcctgacgcaaacacagtggagatcgccaggagtgctggaatcagtaagattgaaataacaaacagtcccagggaagcagttaagggagcagacattgtgtacacagatgtttgggccagtatgggacaaaaggaagaagctgattatagaaaacagaagttccagggattcacggtggatgaggccctgatggagattgctggcccacaggcctaccttatgcactgtttgcctgcagagagaggagtggaggtgactgacggcgccattgaggctcccaactcaatcgtgttcccccaggctgagaacagaatgcacgctcagaacgccatcatgcttcacgtgctcggtgcttaactctcctattgcacaccagtgacacgctcctcttagattattgggcattgctgtcttgctgaagcattgaggctgttttggctttagggcatatatgagagcttagttcagacgaactgtttagtaaggtgataacggttcttcagggtgggaatttgttgtgctgtaaaggtttggtaacctgaataaaaaataaacttatgtgctagtttcattcgcgaatcatgacagctttaacattg

SEQ ID NO: 18450 - DNA, 705 bp, Zea mays
  Clone ID: LIB3079-049-D7_FLI
ctcagtctataatatttagttgcaagtgagagttttatacttacgacatgctacattttgttatccttatagttggttagcctattgtagaaggtggttgaacttgtactttgagaccaaatatatattgcatacttgatattatactattatttgagcttgtcttattgtactcttatctgttcttatgaaggttagaggaatgtgtttggggtgagtaatttttttgtgttgtttcctctatccatggccatggaggagcaaaggaggccacctagctcgaagatagcgccagtgtccatgaaggcgtcctctgcaaatgcgacgcttcaaggcatgaagaacagaagccattttcgaagggacaggaaaactgcgctgcaacaagacgtggacaagctgaggaagaagttgtggcacgagaagaacgtccactaagctctaaagcaggcgttctcgaggccgctctgcctcgcctccctattgtctcaagtcaatgtccttctttgcttttcgatcaatttcacaagcaagaagcaacctaaccaataatctattgcccttccgaaggactcgatacactttctgatttctgcctcttctgaattgttcctagacattggagcttctggccccgttgtaagtggaaaatccttgtacttaaaggttgcaatgtagtggccccgttgtaacgcacgggcactc

SEQ ID NO: 18451 - DNA, 1217 bp, Zea mays
  Clone ID: LIB3079-049-G3_FLI
agcctcagcttgcggcgtcggcgtgcgcggccggggatagcgccgcctaccagaggtcctcctccttcggggacgatgtcatcactgcctacaggaccccaatatgcaaggccaagcgaggaggcttcaaggacacctacctagaggacctcctcactgttgttctcaaggttcccttcccttcaaggtcaaccgccagtgttcatctaggctacaggcagtagccgatgtcgtagctgctataaaggttggttactatgacataggtacatagtatctgaatatacatgctactttcgctcttgtgctttagtttggctgctgaatcgctgctctcccggcttgttcggttagctctcaatccatgtggattgagtgggattaattaggtttaaatcccaagtaagtcaaatttcttcacaattttttccaatcccgtccaatccataggtaacgggattaaccgaacaaggcctaaacagggattggtgctggtttggaatccatgtccataaattccattgctagggaaggacaagttaacccaaaaataagcacattctagaaagcacaggattgtcttctgcccccatgggaattacttctgaaaatgttgcccatcgatatggtgtaaccagacaagagcaagatcaggccacctctgagtctcataggagagctgctgcagccacgacctctggaaaattcaaggatgagatcgtccccgtgccaacaaaggcaattccagtcaagtgagtgatggtgctggagctgttcttctcatgaaaagatctgtggctctgaagaaagggctgcccattcttggtgttttcaggtgcccggcgcgtggctactcttctaaatgaaatgaagcgccggggcagagactgcagatttggtgttgtcaccatgtgtatcggatctagaatgggggcagcagctatgttcgagctgtgttcggcccggctggaggtatcgaccatcactcaacactgtaacccgatggtgatcggcgaccgtgagcttccatgttattgcgttctgatacttgagacttttattatgactatgtatgagatattgtctcttattagtactggatgatgagatgtgtcttattatgactatggatgagacttttgtgatgtaattgatgagacttttgtgatgtaattgatgagactatggatttaaatattgttatgtgattgtgtgtg

SEQ ID NO: 18452 - DNA, 1046 bp, Zea mays
  Clone ID: LIB3079-049-H5_FLI
acataggctctgggctctggcgctaatgttcgagcaaggcgctgctcctgttgctgtagaagggattttttgaccaaccctccaaccggtgcggcttcgatctttcctctcctatcacctgaatccctcgagtattcatcgccggcgcagcgcggtctcttcccttcgctggagaagggggaaggggacacgaacggagcagaaggccatggacacgatgcggggcgcgctggagcgggccaagatgctggtgggcatggaggtcgacgaggagtccgcgttgccaccgcccgaggagcagtccttcttcgacgacatcaatcggcactgcaccctcaacaccactcagaggctctatggtttcgcgatatgcttggctgccggactgacgtgcacattcttgtcaatgcttgtcttcttcaatccagtgaaatttggggtagcattcacccttggcaatttgatggcccttggaagtacagcatttctcataggccccaaaagacagtttgatatgatgcttgattctgtgcgaatatatgccactgctatatatattgcaagcatcataattgctctattctgtgctatctacgttcgcagcaagctgctgactctagtggccatcattttggaatttggtgcccttatttggtacagccttagctacatacctttcgcaaggtcgattgtgtcgaaggtgatgacatcgtgcttcgacactgatttctagaccaatcttcattgcctatgtctttcactgtggggcgagtagatattgtaatctagtgacaagtgaagaggaagtggcagtgaccttaaattacccctccaacaggctcttgttgtaatcatcgtgaatcgagctgtgcattttatgctaagactagaagatcgtgttgatattgcatgttctcttgatgcatgtacacttgcaatccacgcttcgctttccatctgcgaggagtgcccagcacagcgcagcacatgcatagaacaacaatattgttctgccatttgctgaatattgatgtagattccatggt

SEQ ID NO: 18453 - DNA, 914 bp, Zea mays
  Clone ID: LIB3079-050-C5_FLI
gcagtctcgctgaaagcagtaggcaacaagagccggatattgtgtcggcaaggagcagcagcagtggcagtggagcagcgagcgagcgaaagaagcgggcgtccgaggaaaggacgagcaccgtgaagaagtccaagcaagagggctctaaaccatctcctcccaagcagcaacaagtgcctaaagtgaagatcggagagaagatcacagcattgcaacagatcgtttcgccatttgggaagactgatacagcgtcagtgctgtttgaaacgatcaagtacatcaagttcctgcatgaacaagtacagctactcagcgagccgtacacgaactcgagcaggagcaagggtaataaccacttcccatggggagatcatcgtgctgctgcagagacgagcaagcagggagatgaggcagagcacgacctgagtgacagaggactctgcctggtccctgtctcgtggaccccgcaagtctaccgggacgggactgccatggactactggacgccggcgtacaggggctgcctgtaccgatgagatgacaactccctcgtctgactagttgctcaaacattccttactgtcagtgtctggtctgcctctgcctccaagttgcacaggacggcagcgcagttgatctgcttaactatgttgcatgtggtccctagctagtttgtagtgctggtttgtattattgtttcatttgcagtgtcgtgtttgctgatttgtgctagctaatgagtactgaaggaattatcttgataaaaccacctttagcctctcatatctgtaacgtacgagatgctgcaccacagcataagaatgtgtttgcctgtttaaatgagctgctagtgattattacagaacttatatggtgtcggtcatctggactaatatatacgtttgtgcatg

SEQ ID NO: 18454 - DNA, 443 bp, Zea mays
  Clone ID: LIB3079-052-B6_FLI
gcagaggcagcgggacaccgcgccggcgccgcaaccccagcagcagctgctgcagagccagctggcggagggcgggaatggtggcggtgctattatcgcgtgccaccaccgggagtcgaagccgttgttcaatgtcaagtccaggaagctgggcaggacgctgagctctctgtggaagaacaggggcttctcgctgtaccagtgctaggatgcatgctagagtagtatgtgtttttgagttgatcagtgggttgtgtacatcgtcttctgccttgttttccgcttggtccttttcctcttctctggggtattgttctgtttcggggtaagaaagaggagagtgaaaacattggtgttcttcccccacctcctcggtggggtgatgtagggcattttccagtttggctttggccttgtcaagagctgtgtacagttgtttcttc

SEQ ID NO: 18455 - DNA, 498 bp, Zea mays
  Clone ID: LIB3079-052-C7_FLI
cctatatctctatagccaacacacacacaaatactctccattccattccatctcaaaggatagaataatgggcggtctctccaccaagcttttcgtggtcctcctcctgctcgtttgttacaccgggacgcaaggcgggccggtgactatggtgtcggcgaggaagtgcgagtcgcagagcttccgcttcaagggaccttgctcgagggacgccaactgcgcaaacgtctgcctgaccgaaggtttcaccggcggcgtgtgcaagggcctacgccaccgctgcttctgcaccagggactgctagtactgcctcgtctcgcctcgcctcggctcgtgtcctgcgtgtgcatagccgcagcggatcagtaaaacatgcatgcatgcgttaccgaatatttggcagtaccagcaagttaatggattaaataatatgtaatggaacaaagcctgttttgaacgtggaactgctgagtgctagcagcgctcgtgtttattggc

SEQ ID NO: 18456 - DNA, 509 bp, Zea mays
  Clone ID: LIB3079-052-D2_FLI
ttggaccccgcctgagggtgctggacagtttcatggtgtacccttggatgttaaggttgttcatttcaaaggttccagaaagcgattgatgcttgaggcatggaatttctacagctcaacctctaagctgtctgatatgctatgcctaatcttgagaagtggccggacgaaatatgacttctgaacttttgggttaaaactgacacatgttgatactgttcaaagctgttgtatgttcaagtatagtacaaaaaaatgctgaccatgaggctgtcattgcaagaattcagatcagcataaaaaattgctagtagcattcagtatgtaacaaaaacatgtgagaacccatacgagaaccacgcagggtgaccatcgccttgtgttcttttggtttatccctacctgttaaatatgtaatgtggttccccaccaatgtgcgctatgtaggcaatttcgccgtcagatgtcgtcagcagtattaaatagagctggcgctgtttcaatgtgtc

SEQ ID NO: 18457 - DNA, 757 bp, Zea mays
  Clone ID: LIB3079-052-E12_FLI
ccacaacaagaatatccacagcattctccccaaaacaaccgtttggaccaactcgtactgggatgagtttgtgagcctgccagctattgttccacggggccctgttgcactactaggtttgggtgctgggacatcagcacatctgatgctaaagttttggccttggttacaacttattggctgggagatcgaccctatgataattgaattgtcaagggattattttggtatgtctgatttagagaaggccacagaatcaggtggttcacttttggtgcgcattggtgacgcactttctccatcagcaacagtcgaaggaggatttgctggaattgttgtagatttgttttgtgatggaaaggtcatacctcagctacaagaagccaaaacttggttgcaaattgcaaaaaggctaatgccagacggtcgaatcatggtaaattgtggtggatcagacactgaagaatctctctcatcgccttgggttcaaaaccctacagttaaagcactttgttccgcatttcctggacaggtaagctggaagagactatcggagaaagagagtgtaaactatgttgccctgactggacctctcccagacctggacgggtggtcggcgtcggttcctagtgagctaagcacgaatagggccggccctaagcctatgctagagaggcgacggccgggggcctaaaattcttaggggcccaatatttagtatatataacactatataatatatcaatttacactttac

SEQ ID NO: 18458 - DNA, 1286 bp, Zea mays
  Clone ID: LIB3079-053-D7_FLI
catctaccgaggtgtaaccagacatcaccagcatggacggtggcaggcgaggatcggaagggtggccggtaacaaggacctctaccttgggacgttcagcaccgaggaggaagctgcagaggcctacgacatagcggccatcaagttcagaggcctgaacgccgtcacaaacttcgagatcagccggtacaacgtggagaccataatgagcagcaaccttccagtcgcgagcatgtcgtcgtcggcggcggcggcggcgggtggccggagcagcaaggcgctggagtcccctccgtccggctcgcttgacggcggcggcggcatgccagtcgtcgaagccagcacggcaccgccgctgttcattccggtgaagtacgaccagcagcagcaggagtacctgtcgatgctcgcgttgcagcagcaccaccagcagcaacaagcagggaacctgttgcaggggccgctagtagggttcggcggcctctactcctccggggtgaacctggatttcgccaactcccacggcacggcggctccgtcgtcgatggcccaccactgctacgccaatggcaccgcctccgcctcgcatgagcaccagcaccagatgcagcagggcggcgagaacgagacgcagccgcagccgcagcagagctccagcagctgctcctccctgccattcgccaccccggtcgctttcaatgggtcctatgaaagctccatcacggcggcaggcccctttggatactcctacccaaatgtggcagcctttcagacgccgatctatggaatggaatgattcgggccgcccggtcgtggctgctggtcggcctccgctcgccgctggcgtctcgcatgtgcgaaaagggtggggagaagccatgagaacacgagactgacatgggcgctctcgcacaaaagacataaagcggggggactgaaagatcagaggtaccagtagacagtagtagtatgatggaagagacagtaagcagcgagtagtgtgctgcaggatacactgaccatcgatctgctaacaacaaaatgatcgttgcagctagctatagcatatttgcctttgcccttttgtagctttggtctggtctctctctctctctctctcttttttcagctttgttgctccccagcgtcctgcactgcatgccagctgctttgaagctttctctttctactgacatggttctgcaagtgccatcatagctttagtcagccctgtacaatggatgcaggaacgtcgtctttgaattggatctctgtagctcatctct

SEQ ID NO: 18459 - DNA, 783 bp, Zea mays
  Clone ID: LIB3079-054-B6_FLI
caactaatcacgcccaatcagaacagactcggtcgcttcaccactccactcgccgcaggccgccgggcgccgccgaggggatcggagcaagatgttcttccacatcgtgctggagcggaacatgcagctgcacccacgacacttcgggccgcacctccgcgacaagctcgtttccaagctcatcaaggacgtcgagggcacctgcagcgggcggcacgggttcgttgtggcgatcacgggtgtggaggacatcggcaaggggctcatccgggaaggcacgggatacgtcaccttccccgtcaagtaccagtgcgttgtctttagacccttcaagggcgagatcctcgaagctgtcgtcaccatggtgaacaagatgggcttctttgcggaggctgggccggtgcagatcttcgtgtccaaccatttgattccagacgatatggagttccaatcaggagatgtgccgaactacacaacttctgatggatcggtgaaaattcaaaaagagagtgaggtgcggctgaagattattggtactcgtgtcgatgctacagaaattttttgcattggcacaataaaggatgattttctgggtgttatcagcgatcctggtgcggcagtgtaaatggtctaagaagcgagattgtactccattgttctgacttctgagtactatcgcagacgtgtgtaatcgctggtccgttaaaactgcaatggctgtactgactgcggaacttgttgagaatgatgtgactaggaccttgtttagggcctgtttggttc

SEQ ID NO: 18460 - DNA, 868 bp, Zea mays
  Clone ID: LIB3079-054-D4_FLI
ctttctttgatttgctgattgtcaccactggtttttagggctcaatatgactttgtttcacattgtaacatcctcaacaatgattttacttcttacaacaaacactactacggatgtcctgatgataagacattccagcacatggcatctgtgtatagtcggtctcactataacatgtctttgagcaaagaatttgaaggagggataacaaatggagcattctggtacccaatatatggtggtatgcaagactggaactatatacatggaggctgctttgagttaactctggagattagtgacacaaagtggccaaaagcagatgagcttcctatcatctgggaacacagtaggatgagtatgctcaatcttctagcaagcctaataaaggccattgagcgacgaggaacgccgtgtcacttgcaatgaccagagacgggaggtcttcgttgcccaggacatcgctaacaaggaaattgaccgcaccgttgcattcgacaaggtatcttcgaactcaagtcggcatcacagtagaccagaataatacgaaggttggtacagcgccgaaggtgtgagcaggaaagcttcggcgtagcagcaaaaagtgaaaccgacttaaagatgaaaaggctatttagacctcgacagattactatagaattattatcaagtgtaaagggcatgaatgtaattttgtatgggttgtgtcccgcgcctataaataggtgaacagtacccccgtactgttcacgctgacttggcattcgctttttgcgtcacgcttgtactatcatctccttccagttaaaggtacacttgtaattcaacgatatttctgtctatgcctgataataatacataattgttt

SEQ ID NO: 18461 - DNA, 1502 bp, Zea mays
  Clone ID: LIB3079-054-D6_FLI
tacaatttatattcaatattaaaaacatcttagcatgatgttctactggttagacagcttcacccagtgtctttcgtccttcttccatcaggacatgggttcgaaccccacgcgtgcgtctagcctgtgccggtcgccgtttggccatctatatagacgtgcagcagattaatttgaaatagctgaggggttattttaaaaagatgacgcatgatgaccgttgaaattggtgctttaagtatagtatagaattcttggaaggttttgctattctacttatttgtgatacataaacttgcccattttttcttggtatctactatgaacttaactgatgcatttgataatataatgatttcttttgagcctgttcattagatgtaaattaacacagtatccatttacaaccaattcttttgcatttttacaattgaccttttcattttcatataaaatattggcatattcacaatatactgaattgtgaacttgtcaaggattcaagggcatgcaattcttgaacgttttagtggaatatgaaagtctcatctggtcatacaatatgtgagtctgagatgattcatattttatgccactttttacattttcaaatgtctctgttgtgttgattggtcacctatatcctgctgattttgcacacatcaggagttccaagtaggtatttacaccattcttcctactagtaagttttctataatctgacaaatttcgtggtgcctatgctaatggcttgagggttatcgaccaagccctggacagctggcaaatatgtatgtatttaatttcaattgaagcattaattttattcattgccaatttactgcatgcaaatatgggtttgtagcaaaactaggtggctgaggttctgccaatacggtagcatttattgtagcttaagtttggtcgagaatgtgacaagagtcttgctccaggtcagctttcatttggccagtgagcctgagatgctgctcgactcattgttttggaggcagcaaccatatctaacaccaagttttttatttcacaatttgtatgagcagatgaactctgttgacgcagcaattgatcgaagaatatcagaaagtcggctggcaggacgcatggccctatgaagaatctgggctttgctcggtagattatcccccttgcatttcaccgaaggactctgcctgcgcttgtatctcgctgtgcagcagtcggccctcttcatttagttagcgaatggagttgctgcagttaagaggaatgtgttgtttctgacttgtttgagtgtcgagcctttgttcttctatgtttccagcatcgacaagaaaatgaattagcagcacttaggagttattttggtccaactgtcgcctcattgggaatatattgatgaacacctcaatttctgcccgattgtaacctggtcatgtgctattgccaattgaacctaatgctgtgcattggctggaaagcaacttaaaaatgttacggatttt

SEQ ID NO: 18462 - DNA, 1008 bp, Zea mays
  Clone ID: LIB3079-054-E6_FLI
ctgttatcgaagaaagtgtgcaagaatctgcaaaaaagcttctctcaaagcttactgaatttagtgacacaacaatcgatccatctcttccgaaacctgcatttcaagttgctaggaaggctcagggctcagtggggaaggggagagaaacgactgcagttgaaatgaagaagggtgactggttgtgcactaactgtaacttcttaaattttgctcgcaatcgtcactgtctcgaatgcaaagcagatggaccaaagaagatagaagcggccgtggatgcaatgaaaatgggcgattggatctgcacacagtgtcagtttatgaacttctctcgcaacaagatatgttttaaatgtgaagaacctcacccgaagaggcaactcaatcctggagagtgggagtgcccctcatgcgactttgttaacttccgacgcaacgctatctgcaagaagtgcaatcaggaccgccccgaggatgatacccgagatagtcagcggggactgagaaaaaccagaggggctggcaagtttagaagattcgactatattgatcagaagagcgatgacgatgatgacaatgcctggttccagaagcgtggggcaagcatgaggtcgaaaccggaccagagaaccaccactgccaagagcagaggctctgacggtctggatgatattcttgttaccaccaagcgtagaagcaccaagcaagacgaggacgacgaggtcttgccgtacgagggtgcgcgcaagcatgttgtgagcagaagggcaacgccttcccagaggaggttcacggctgcccgtaaccagtaataatacccgagcttggagctttgatgactccgttctgtgaacaaatttcacagcgtcgctcgctctgctgctgtgatgcagacgaatagatgatggacataacacataagcgtgttcgatctgtagtgttattatacaaattattagggaacacacattgataaagctggtcctttacgatgatttttttgttgtc

SEQ ID NO: 18463 - DNA, 570 bp, Zea mays
  Clone ID: LIB3079-054-H3_FLI
tgaaaatctcgtctgcatctgccagcgccgccacggtgaccaagacgctgctcgacaaggcgccgctctccgtctacctcatcgacgcggtgctcctgccaaggcagcagtctaacgacgaccagggacacactgcgcccgcccctgcgccggcctcctcgcctgcacatgcacctacacctgcccttgcgccggtctcgccgtcgcctgcccctgtaccggtctcgccgtcgccgtcgccgtcgcctgcacatgcacccacacccccacttgcccctgctccggtgactgcacctgcgcccaggcgtcgcccagcgccatcgccagagcacactaccccagctccttcgccagacgcggacggccaaccgcctgcagatcagaagaacaacgcagcaagggacacggcatcttggactatcggcgcggcgctggcgatcgtgtgcctcttgtcgtgaagggtttaaggctttaagcttagatatattgacgccgattgggatccgtcatctcgccgccaataccagtgtacactgaagacaatgtttatgggcatgcattggccaaaat

SEQ ID NO: 18464 - DNA, 1137 bp, Zea mays
  Clone ID: LIB3079-054-H8_FLI
ctcgtcacgactcacgaccatgatttggtaaagaaagcaggaggaagccggcggtgtaggcgacccatggctccacagacgaggagagagaggttggcgggggaggcgcggccgagctcgtcggggctaacaccggcgaagccgggggcggtcgaggtgcagcgccgacgggtgggcagcggttggacgagccgtcggatctccatctacgcctcccgagtctacttcctcctcatcatgctccagatcccgctcttcagggtcccttgtagagctggcacatgcacaactcctattcaagtaacatcatctcagttggtctcaaatgatatattcccagcagctgttgtgaaggccatgctctaccctggagctaccgtgagcagcctaactaaaagcaagacatttccgagttggaatgacctgtttgacatgtacaacctgacagaagcaaaaaatgcttctgcagtagttgatctccagcgtctagagatacttgccggaagctacttctgtgttgctggagcgctcattggcatcataaatcctgggaggatgactttgtttggtacccttttgattatctggggtatggtgaaagaagcactatttgggaagccagtgaacagtgatctgactcaatcaactcatgtctacccaaccattttgattgcacttatctgtgcattcatgtcaataacttacaacgtaaagaagacagcaagaagtagtactcctgtttctatcgctaagccactgataagttctgccaagtcaaaactgaagtagacttacaagtttaatcctcgtaactcttttgagatatttatttatgtgaaaaaaaacaggtttgaggatgacctgaggatgcttttggtgtatatctgactctttcaatactgtaacattcagtttcctttattgtattaacaattcgcaagggcacaccgtctgtaatgtttacaaaaaaaaccagctaaatcttggttttcccccaatgtttctgctatctaggcaggtttaattcagtttcatattgtatccaataagattgtagtctattttaccacaaggatggaaagttgtaattcctgacaggttctgggtcagttgttattcttctgtgtttggattttc

SEQ ID NO: 18465 - DNA, 790 bp, Zea mays
  Clone ID: LIB3079-055-A11_FLI
ccgcagctaggtaactgcccccctccgttccagttgggctggggtccgtcttattcgaagatggttggcatgctccaatctgtgtgcgtgtggtgcaatagcccattccagcatttcggcaccgtcgctgagcagcaggcagattcacttggttacatttgcccgtcgtgcaagggaaagttttctggtcatcttggcatcaacggtccatctatttgaaatcagtttcttgtaacctgaactggtgctgctgccccaccatcaatttatagtctagttgatatgaatcgttttgtacttgtagtatgtatcctttaactcgtggctagtggtggaaacaggtttattcgaatcttacatttttggttattaaaactcaaccatcaagcagttgttgcgaacaaggaagctaagttgttggatacatacaagactgtgctctcaagagatactggtgggtactctgctgaagaaaagaccaattggcctgaagactaaattgtccatcttcaattgcaccaagagaaaggatctccattgcactggtggctggtgcatgtttgaggcttggatgatggcagaagtgtcatgtttttttatgttgaaccttgtttctaaatagtaagtctagacaattgttctgtttgaaatctgaatgaattgtggctggttgttggtggactggattacaggcaaaagtgtcatgttttttctatctttaaccttgtgtataatatagtaaaggacggatgattgctctatttgaaatatggagtaatggttgctagtt

SEQ ID NO: 18466 - DNA, 597 bp, Zea mays
  Clone ID: LIB3079-055-A7_FLI
gctgaagtcagtgctaacatgacatatgatgctttgagcaaagatgtccatcatgttcagccagtgacagacaagatgttacttgatccgatttcttgtgagataattcaggactctggaaaaccagaaggctgtctacaaggatttccatggccgaacaccattgcatcattgtgtccaaaagaaaaatgatgagctcaccaagcatctgctgaagaggggtgcgagaacgacaattaaagatggcggaggtctgactgctctggagagaagaatggaacttggagcgataactgatgaagacttattcatactatttgtgaggtgatgttgcaaacttgcaatacaggcctttggcaactagctgtttgtacctgatagcattgtattgtacccacctaatttagcttctggaaagaacatgatttctacacctgaagacaaatgccttttactgtaccacgatataacttatgggactgctgcgcttggctgtgttttaaaattccactggtcgacatgaccacatcgttggtttgtacaacaattataggcaatcacagtattcgattctttgagtatggttattgaggtatg

SEQ ID NO: 18467 - DNA, 1359 bp, Zea mays
  Clone ID: LIB3079-055-B1_FLI
ggattgtgaggcggattcttgtaaagaggcagaaagtgattcctgcacaagcgatatggctttgtgtccaggaagtagcactgatctgtttgacattgcacgatctccttttgttgattttcaccatcaagaaagatgcaggcaagtgaagatggcaaaggggccatgcagccttcttgattttgttctaatctcaaaggcagttgataactcttccaagcctactccagacttcgaactactttctcatcacacatgtcattgcagtgctctaagccagaaccctatatggtggcttatggaagggcctcggacaattagtcatgatttctcaaagtcttattgtgaggctaacctccaattggtcattcacaattcagaagctcataagattttggtgagagtggtcacttttgatgtaattccagagaaaaccgtccatcctcatgactcaaccagtgctcagggtggatggtatgatgtatcactggaaagtgacgtaaaggccatctctagttccaagagtacacatcaagagaagcgatcttcgaagagcattccaccatatgtttggtgttcattgagttgtgctcaaatcgagctccaacctgacagttgtgctagagttcctctaaaagtgtgcatatttgcaccgggcacatacaatttttccaattatgagctgcaatggaaagtgcatctatctgagggaccacatgtgggtgaaaatgagaaccggttatctggcggtggtctaggctatcctttctatgtcactgtccttcaaggtgtctaagtaattatcaggattcaagaagtaccttcttgagcgtcaatatagaccagtgcaaaactcaggaactacacccaattgcaacgggctgatgataataggtgccagccagtccagtttgtgcaaagatctgccccggaagttccctgactgaatatacttggatacgctcatggttctgcttcggtaccgatatatttacacgtcattttgaaggatgagttctggtgagtacatgtatacaattgtcgctgggaacaaaaactaacggtaattgctggtggatttttggcagacagaatataccgatagaagttttgcttgtctaattgttgatggtggctagtaggagcatatactattcctgtacatcctgtttaacttgtcgctgctagacgatttcgcaaatgtagtatgtagtggtagatggatccgataaattttctgtaattttgacgaggtaatcaggcaatcgtctcgagattgttgttgtatgggcgacagtattttttcattgtttgtacaatccttttaaaaatcatcgtctggccttgagcctttatgcc

SEQ ID NO: 18468 - DNA, 699 bp, Zea mays
  Clone ID: LIB3079-055-B10_FLI
cacgaccgcagaggagtagcaagagcccgggggagaaatgagcgcggcggcgggcggactgcggcggctgctggcggcggcggcgacggcgggagccgcggaggtgcgggcgtccatcttcggccacgcgctgaaccctacggggaggcgcgcggcgacgaagctcctgcggaagaagatggtgggcgaccaggtggcgcagtggtacccctacgacatcaagcgcgacgacccgctcgtcatggcgcgcgaggagaaggagcgtctggctaaactggaaatgctgaagcgtcgtggcaagggcccgccgaagaagggtcagggaaggcgtgccgtcaagaggagcaagtagtcgagctgtgctaccctatcaatgctcatctctgtttctggagcttgccttgttcttacattgctgtaacgtactaccagtgatttgtcgggtgagtgggcgacgacagatgcaaaaaaaaacccaccttttctatcaagtttagcttacagatgtttttttttttcatcaaattgcaatgaaaccgccttctatgttggatggctgatgtgcttacagtagagttcatgatgctgacacctaattaagtaccggctacagtgtttcggtgataatttccaggatggaccaggtgcctttcggtccgtcaagattaggatgaaataaattcgggatctgaattaatc

SEQ ID NO: 18469 - DNA, 777 bp, Zea mays
  Clone ID: LIB3079-055-G8_FLI
tctcccgcaggactggtcactcggcacgcaggcagaggcagcacagcagcagccagctccatccatcctctttcccctcctcgcttcgcttcctcggcggattcctcctccctcggccgtccccgtcccctttttcggcgcgcgagctcgcccgagatggcaaacgcgagatcgggtgtcgctgtgaatgacgagtgcatgctcaagttcggcgagctgcagtcgaagaggctgcaccgcttcctaactttcaagatggacgacaagttcaaggagatcgttgtggaccaggtcggggatcgcgctaccagctacgaggacttcacaaacagcctccccgagaatgactgccgatacgcgatctatgatttcgactttgtcactgcagaagatgtccagaagagcaggatcttctatatcctatggtccccatcctccgccaaggtgaagagcaagatgctttatgcaagctcaaaccaaaaattcaagagtgggctcaatggcattcaggtggaactgcaggctactgatgcaagtgaaatcagccttgatgagatcaaggatcgggctcgctaggcatcatgatcatgcatcatggactcggcctactactgtggatttgtatgccattatagacttggtgctgtgaaagactgcttgatgatttgcgggtttgttgctgtgtaaaaaaaggtcccatggctcccagaagaccatgaaggttcggatctatcatgtaattccttgttatctgccaattatgtatggactatggac

SEQ ID NO: 18470 - DNA, 448 bp, Zea mays
  Clone ID: LIB3079-056-C9_FLI
atttgctcttaacgaggcacagaaatcccttctgtcggatcacaaatccctagaaactaaactgaggcacgccgagaacagggcgatgatgctggaggagatggtggataaactagagtcgcaatgcaaggcgctgtctgagacttcagaagttctgaagctgcaggccggagctagcagggcctctttgttctgctcgatccagtttgtgctgctgtgcatagccattgggaccctcctcgttcgcttcctgtcctcttctccggagattgtacctacttgaggttagagaattatgccagtcagcctttatgtaggcgttgttgaacggttgtttactgtaacttattagggcatcaatcgccttacagattttcgttttttgtaccatcaactcgattttgctagtaatttctttatgaatacgagtttactccacttctgggtt

SEQ ID NO: 18471 - DNA, 767 bp, Zea mays
  Clone ID: LIB3079-056-E12_FLI
aactacactggcagcgttaggaagagaagcaactgcagctatggaggctgtagaggctcagcaacagcaagttacgtacgaacgtctccttgcaatggttgatgctgagaggacatatcatcaaaatgctgctgatattctgaataaactccatgatgagatgctctatgcaaagcatcataatgagtcagcaaaccactacgatgaacagtcttcagagcctgaatcagatgcaggcccagcacaagtgcactcacgtagcacatctgaagatccagtattgactaaacctagcgaatccacagggaacagtcaggaggtgcaatttctgggggaggttattcatccattcgatgctcaggctgatggtgagctcagtctcgcggtgggtgaatacgttgtggtccgccaggtggctgcaaatggttggtctgaaggtgaatgcaagggaaaggctggctggttcccatctgcctacgtagagcagagggacagagccccggcaagcaaggtgatagagcctggacttctgactacctgatccatcccgtagttatggctgctgacttgctgtcatggtccttttttttctacattattgtacatgacatgccccatgagtgattagcgtatggcagaaccttcaccttttctgtgcagattattgttcttctagccttttcgttggtcggtaactgtatgtaaaatgtagttctgtctgttaggatttccttccggtattataacattgtacagagctattggtg

SEQ ID NO: 18472 - DNA, 1106 bp, Zea mays
  Clone ID: LIB3079-058-D6_FLI
tttacacgggcactgcaaatcaacagtatccttctggaccatctgcttcttatccaagcggacctccaacaacatttcatcagcctgtatcacctgttcaataccagcctgttgctccaccagtatcttcttttggtccgagcgctcctgtaccagcaacagtccctaaccagatgtttccccattctgctgctgctaactcaacttcaaggttcatgccatcgaacaatcaaagctttgctccgaggccaggtctaagtcccgcacagcccttaagtccaacacaggtgcaggcacagccagctcctcctgcaccgcccccgactgtgcagacagctgatacgacaaaagtgtctgctgagttgagacctgttattggtacactaactagactattcgatgagacgtccaaagctctgggaggatcacaagctactcaagcaaaaaagcgtgaaattgaggacaattcaaggaaaataggggcattgttttcaaaactaaatagtgatgacatatctccaaacgttgcatcaaaactcaggcagttgtgcagtgcaattgatgctagcgattttgccactgcgatgcacctccaggtactcttaacaacaagtgactgggacgagtgcaacttctggctcgcggcattgaagcggatgatcaagacaaggcagaatttcagaatgtaaaccttgtggcctttttctgcagccagttctgtacacaccttttttctgctgcttgccagaaatgatagctgtagcagttcagagagtttgcctgcacaggggtgttatcatgctgctttgttctcggcccttgattctgcctaagcgctttggtacctcagtgctgttatacattttgataatagttttttgttttcgacatctgctataaggtgacctgcggctgggttgttcgttatgaatgttaattgtaagaggacacttagtctgttatagctggtggatcacctgtttcaattcttcctcttagatttcgtcagtttggacattccaagaactctagatggttaatacaagtgacagtggcttgtttttttttttttttggtaatgccaacagaaatcaataaacttctgg

SEQ ID NO: 18473 - DNA, 1241 bp, Zea mays
  Clone ID: LIB3079-059-B2_FLI
caccttgcctctccccactaagcttgtttaccacgcttgtagataagacatgggtcaagcactcggcttgattcaagtggatcaatcgacagtagccatcaaggaaacttttgggaagtttgacgaggtcctagagcctggatgccacttcttgccatggtgcatagggaagcaaattgctgggtatctgtcactgcgtgtgcagcagcttgatgtccgctgcgaaacaaagacaaaggataatgtcttcgtcaatgttgtggcatctgtgcaatatcgtgcccttgccgataaggcatctgatgcattttacaggcttagtaacaccagggagcaaatccagtcatatgtttttgatgtcatcagggcaagtgttccgaagatgaacttggatgatgcctttgagcagaagaatgaaatcgccaaagctgtagaaaatgaacttgaaaaggcaatgtctatgtatggatacgagattgtgcagactctgattgttgatattgagcctgatgagcatgtgaagagagctatgaatgagatcaatgcagctgctaggctgaggttggctgccagcgagaaagctgaggcagagaagatactgcagatcaagagagccgaaggtgatgcagaatccaagtacttggcgggtctgggtatcgcaagacagcgccaggctatagtggatgggctcagagacagtgttcttgctttctctgagaatgtgcctgggacctctgcaaaggatgtcatggacatggttctggttacccagtacttcgacaccatgaaggagattggggcctcgtccaagtcctcgtcggttttcatccctcatggaccaggtgctgtcagagacatcgcagcgcagataagggatggtcagctccaggccagtctgctgtgagcacgttggaaaaggcatgcttttgacattcccatcagtaaagaagtacatatacatcatgaggagtaaaaaaaaacttactagcgataatgtgagtacagcttgttcgttctatctatatggtgcatgtgattattattatggagattaatgttaaataggttcgcatgtattgtgccagaacaaggctaaggaccagtttgcgtaaaaaaatgtatgtttggaacttatctaagttttggagcctgaggaaacccctccatcctgtgcaaactattttgtggtaccctgcttctctgttatcgtgaatgagaatctcatgttcattttctgtgcc

SEQ ID NO: 18474 - DNA, 878 bp, Zea mays
  Clone ID: LIB3079-059-D1_FLI
ggtgaagcagcctgtgcatctgttcatggtgcgaataggctaggcgcaaattcgcttcttgacatagttgtttttggcagagcttgtgcaaacagggtagcagatatttctaaaccaggtgagaagcagaaacctctggaaaaagatgctggagaaaagaccatagcctggttggacaagctgaggaatgcgaatgggtcattgccaacttccaagatccgtctcaacatgcagcgtgttatgcaaaataatgctgctgtattccgtacacaagaaacacttgaagaaggttgtgagctgattagcaaaacatgggaaagtttccatgatgtgaagctcagtgaccagagtctcatttggaactctgacctgatagagacccttgagctggaaaatcttttgataaatgcatgcataaccatgtattcggcagaggctcggaaggaaagcagaggagctcatgctcgtgaggatttcacgacaagagatgacgagaagtggatgaagcactcactggggtactgggaaaacgagaaggttcgattggcatacaggccagtgcacatgaacacattagacgatgaagtagagtccttcccgccgaaagcccgtgtctattgatcgattcgagcctcacaccctcgggaattccgtgtaaggtgttaataaagcagatgggcgttcctggctgagaacatgatctgaactcgtgacccccctttttctgtggttctgtattttgtctgatttgctagaaataaaaggaacacatgctaatgcctgacagacgtttgtgtacatgaaattttgcatgggtttgttacttgttgatgctgtacctgctgttttgagctcgcatgattcatgaacgttgcctg

SEQ ID NO: 18475 - DNA, 812 bp, Zea mays
  Clone ID: LIB3079-059-G3_FLI
gtcactgttcagccactcacattttgttattccagaaatcttcaagtatctaaacaaggtggttgtgttggatgacgatgtagttgttcaacgtgatctgtctttcttgtggcatattgatatgggagacaaggtaaatggcgctgccgagttttgcgatctgaaacttggtgaaatgaaaaatgtcttgggtaaaacagcatatgatcccgagtcgtgtgtatggatgtcgggggtgaatttgattaatttggataaatggagggagcataatgtcacagagaactatctgttgctcatgcaaaagttcgaattcaaggatgagctgtccctgcgagcagcagcatttcctctgagcttgctatccttccaacatctaatatatcccctagatgaaaaattgaccctggctggacttggatacgattatggaatcgatgaagaggttgcgcggagatctgcatcattgcactacaatggcaacatgaaaccttggcttgaattaggtataccggactacaagaagtactggaagaggtttcttgaccgaggagatcgatttatggacgagtgcaacgtaaatccgtgatgcagatggacccaagatgagaacaattgagtaaatctgggacgcagagctggacctgaaatcagaacaacatcagcaagccttaccgaagcttgtgtcgacgagaacgaatactagtggtgaagccaggattttttgagttggatattcccaacctgaaagtagtgtacacaagagtatatacggtagcataaatttgagtaaatgctggggactacgatcc

SEQ ID NO: 18476 - DNA, 1605 bp, Zea mays
  Clone ID: LIB3079-059-H1_FLI
ccaagacgcaggacgagctcatcgaggcggaggtcgccgagctgctccgcgccgcccccaccgtgcaggacctgctccgcgccgccagtgtcgccactgcgcggctgcacgatctcgacatcttcgacgccgtcaagatcacgctcgacgccgggccgcccgagctgcctggcaccaccaacgtcgtcatcgaggtcgtcgaggtggccaaccccctcactggcaccgccggcgtctattcgaagcccgaagcaagatcttggtcgctggaagggtcacttaagttgaagaacttgtttggctatggtgacatctgggatgcatcaggatcctttggttgggaccaaacaacagaggttggtgttggagtctgcctaccgaggtttaaatcaataccaacaccattgatggctcgggcatctttgtcatcacaagattggctgaagttttcatcatacaaggagcgcctacttggcctttcatttggtttgctgtcaacaaggaaccatgacttgtcatacaaccttgcgtggcgtaccttaactgatccatcacgtgtctcatcaaaggccataaggaggcagttagggcataaccttctttctgcattgaagtacacatacaagattgataagagggattcacatcttaggccaacgaaaggatatgcgtttcagtcaacttctcaagttggtggtctatggaatagcaaaggattgagatatttccggcaggagttcgatgtacgtggtgctgtgcctttgggattttatagtgctgctctcaacgttggtgtaggagcgggtgtcattttaccgcttgcagggggattcatgaattcgacttcatcagtgccagagaggttttatcttggaggtaattcttctccagtgtgcagcttgggcggaccgtcatctctgctgggtttcagattaaggggagttggcccaacagaggcgcggaggcatgtccttaataactcggagagtggctcggctgaccctggaagggattacttgggaggtgatctggccgtgtctgccttcgctgacctttcttttgatctgcccctcaagatattcagagacgctggaatccatggccacgcattccttactgctggaaaccttgcgaaactgtcggagggtgagtacaagaacttttcggcttctgaatttcggcaaacgttccggagctctgctggcgttgggattattttgcctaccaaacttttccgggtagaggtgaactattgccgcatcctaaagcaagctgagcatgacagcgcgaagactggaatccagttcagcttttcctcgcccatgtaggaacttgccatggcagccgaaacagctgcactttcctctgtagacttgcatttcttcccgttcttttcatgctgaagcaattgaagaggttatttacgtgctcccttttcttgtgacgcttgttcattgacacgaggagctgctccttttttttggtgtcttcaggagatgggtttattatttgctgtttttgacctcacgagggatttgtcctcgcacaactcaaataccgatgctgtggctacacaatggtggatagaataatattttggcccat

SEQ ID NO: 18477 - DNA, 4208 bp, Homo sapiens
  Clone ID: LIB3080-033-H2_FLI
cggctccgggtcggtggccccaggacagggaagagcgggcgctatggggagccggacgccagagtcccctctccacgccgtgcagctgcgctggggcccccggcgccgacccccgctgctgccgctgctgttgctgctgctgccgccgccacccagggtcgggggcttcaacttagacgcggaggccccagcagtactctcggggcccccgggctccttcttcggattctcagtggagttttaccggccgggaacagacggggtcagtgtgctggtgggagcacccaaggctaataccagccagccaggagtgctgcagggtggtgctgtctacctctgtccttggggtgccagccccacacagtgcacccccattgaatttgacagcaaaggctctcggctcctggagtcctcactgtccagctcagagggagaggagcctgtggagtacaagtccttgcagtggttcggggcaacagttcgagcccatggctcctccatcttggcatgcgctccactgtacagctggcgcacagagaaggagccactgagcgaccccgtgggcacctgctacctctccacagataacttcacccgaattctggagtatgcaccctgccgctcagatttcagctgggcagcaggacagggttactgccaaggaggcttcagtgccgagttcaccaagactggccgtgtggttttaggtggaccaggaagctatttctggcaaggccagatcctgtctgccactcaggagcagattgcagaatcttattaccccgagtacctgatcaacctggttcaggggcagctgcagactcgccaggccagttccatctatgatgacagctacctaggatactctgtggctgttggtgaattcagtggtgatgacacagaagactttgttgctggtgtgcccaaagggaacctcacttacggctatgtcaccatccttaatggctcagacattcgatccctctacaacttctcaggggaacagatggcctcctactttggctatgcagtggccgccacagacgtcaatggggacgggctggatgacttgctggtgggggcacccctgctcatggatcggacccctgacgggcggcctcaggaggtgggcagggtctacgtctacctgcagcacccagccggcatagagcccacgcccacccttaccctcactggccatgatgagtttggccgatttggcagctccttgacccccctgggggacctggaccaggatggctacaatgatgtggccatcggggctccctttggtggggagacccagcagggagtagtgtttgtatttcctgggggcccaggagggctgggctctaagccttcccaggttctgcagcccctgtgggcagccagccacaccccagacttctttggctctgcccttcgaggaggccgagacctggatggcaatggatatcctgatctgattgtggggtcctttggtgtggacaaggctgtggtatacaggggccgccccatcgtgtccgctagtgcctccctcaccatcttccccgccatgttcaacccagaggagcggagctgcagcttagaggggaaccctgtggcctgcatcaaccttagcttctgcctcaatgcttctggaaaacacgttgctgactccattggtttcacagtggaacttcagctggactggcagaagcagaagggaggggtacggcgggcactgttcctggcctccaggcaggcaaccctgacccagaccctgctcatccagaatggggctcgagaggattgcagagagatgaagatctacctcaggaacgagtcagaatttcgagacaaactctcgccgattcacatcgctctcaacttctccttggacccccaagccccagtggacagccacggcctcaggccagccctacattatcagagcaagagccggatagaggacaaggctcagatcttgctggactgtggagaagacaacatctgtgtgcctgacctgcagctggaagtgtttggggagcagaaccatgtgtacctgggtgacaagaatgccctgaacctcactttccatgcccagaatgtgggtgagggtggcgcctatgaggctgagcttcgggtcaccgcccctccagaggctgagtactcaggactcgtcagacacccagggaacttctccagcctgagctgtgactactttgccgtgaaccagagccgcctgctggtgtgtgacctgggcaaccccatgaaggcaggagccagtctgtggggtggccttcggtttacagtccctcatctccgggacactaagaaaaccatccagtttgacttccagatcctcagcaagaatctcaacaactcgcaaagcgacgtggtttcctttcggctctccgtggaggctcaggcccaggtcaccctgaacggtgtctccaagcctgaggcagtgctattcccagtaagcgactggcatccccgagaccagcctcagaaggaggaggacctgggacctgctgtccaccatgtctatgagctcatcaaccaaggccccagctccattagccagggtgtgctggaactcagctgtccccaggctctggaaggtcagcagctcctatatgtgaccagagttacgggactcaactgcaccaccaatcaccccattaacccaaagggcctggagttggatcccgagggttccctgcaccaccagcaaaaacgggaagctccaagccgcagctctgcttcctcgggacctcagatcctgaaatgcccggaggctgagtgtttcaggctgcgctgtgagctcgggcccctgcaccaacaagagagccaaagtctgcagttgcatttccgagtctgggccaagactttcttgcagcgggagcaccagccatttagcctgcagtgtgaggctgtgtacaaagccctgaagatgccctaccgaatcctgcctcggcagctgccccaaaaagagcgtcaggtggccacagctgtgcaatggaccaaggcagaaggcagctatggcgtcccactgtggatcatcatcctagccatcctgtttggcctcctgctcctaggtctactcatctacatcctctacaagcttggattcttcaaacgctccctcccatatggcaccgccatggaaaaagctcagctcaagcctccagccacctctgatgcctgagtcctcccaatttcagactcccattcctgaagaaccagtccccccaccctcattctactgaaaaggaggggtctgggtacttcttgaaggtgctgacggccagggagaagctcctctccccagcccagagacatacttgaagggccagagccaggggggtgaggagctggggatccctcccccccatgcactgtgaaggacccttgtttacacataccctcttcatggatgggggaactcagatccagggacagaggccccagcctccctgaagcctttgcattttggagagtttcctgaaacaacttggaaagataactaggaaatccattcacagttctttgggccagacatgccacaaggacttcctgtccagctccaacctgcaaagatctgtcctcagccttgccagagatccaaaagaagcccccagctaagaacctggaacttggggagttaagacctggcagctctggacagccccaccctggtgggccaacaaagaacactaactatgcatggtgccccaggaccagctcaggacagatgccacacaaggatagatgctggcccagggcccagagcccagctccaaggggaatcagaactcaaatggggccagatccagcctggggtctggagttgatctggaacccagactcagacattggcacctaatccaggcagatccaggactatatttgggcctgctccagacctgatcctggaggcccagttcaccctgatttaggagaagccaggaatttcccaggaccctgaaggggccatgatggcaacagatctggaacctcagcctggccagacacaggccctccctgttccccagagaaaggggagcccactgtcctgggcctgcagaatttgggttctgcctgccagctgcactgatgctgcccctcatctctctgcccaacccttccctcaccttggcaccagacacccaggacttatttaaactctgttgcaagtgcaataaatctgacccagtgccccc

SEQ ID NO: 18478 - DNA, 3400 bp, Homo sapiens
  Clone ID: LIB3080-053-D5_FLI
aaaactttgctctgtttaagctggaagagagagagaagaaagtctatccgaaggctgtggaaaggtcaagtacttttgaaaacaaagcgtctatgcaggaggcgccaccgctgggcagcctgctgaaggatgctcttcacaagcaggccagcgtgcgcgccagcgagggtgcgatgtcggatggcccggtgcctgcggagcaccgccagggtggcggggacttcagacgggcccccgctcctggcaccctccaggatggtctctgccactccctcgacaggggcatctctgggaagggggaaggcacggagaagtcctcccaggccaaggagcttctccgatgtgaaaagttagacagcaagctggccaacatcgattacctccgaaagaaaatgtcacttgaggacaaagaggacaacctctgccctgtgctgaagcccaagatgacagctggctcccacgaatgcctgccagggaacccagtccgacccacgggtgggcagcaggagcccccgccggcttctgagagccgagcttttgtcagcagcacccatgcagctcagatgagtgccgtctcttttgttcccctcaaggccttaacaggccgggtggacagtggaacggagaagcctggcttggttgctcctgagtcccctgttaggaagagcccctccgagtataagctggaaggtaggtctgtctcatgcctgaagccgatcgagggcactctggacattgctctcctgtccggacctcaggcctccaagacagaactgccttccccagagtctgcacagagccccagcccaagtggtgacgtgagggcctctgtgccaccagttctccccagcagcagtgggaaaaagaacgataccaccagtgcaagagagctttctccttccagcttaaagatgaataaatcctacctgctggagccttggttcctgccccccagccgaggtctccagaattcaccagcagtttccctgcctgacccagagttcaagagggacaggaaaggtccccatcctactgccaggagccctggaacagtcatggaaagcaatccccaacagagagagggcagctcccctaaacaccaagaccacaccactgaccccaagcttctgacctgcctggggcagaacctccacagccctgacctggccaggccacgctgcccgctcccacctgaagcttccccctcaagggagaagccaggcctgagggaatcgtctgaaagaggccctcccacagccagaagcgagcgctctgctgcgagggctgacacatgcagagagccctccatggaactgtgctttccagaaactgcgaaaaccagtgacaactccaaaaatctcctctctgtgggaaggacccacccagatttctatacacagacccaggccatggagaaagcatgggcgccgggtgggaaaacgaaccacaaagatggcccaggtgaggcgaggcccccgcccagagacaactcctctctgcactcagctggaattccctgtgagaaggagctgggcaaggtgaggcgtggcgtggaacccaagcccgaagcgcttcttgccaggcggtctctgcagccacctggaattgagagtgagaagagtgaaaagctctccagtttcccatctttgcagaaagatggtgccaaggaacctgaaaggaaggagcagcctctacaaaggcatcccagcagcatccctccgccccctctgacggccaaagacctgtccagcccggctgccaggcagcattgcagttccccaagccacgcttctggcagagagccgggggccaagcccagcactgcagagcccagctcgagcccccaggaccctcccaagcctgttgctgcgcacagtgaaagcagcagccacaagccccggcctggccctgacccgggccctccaaagactaagcaccccgaccggtccctctcctctcagaaaccaagtgtcggggccacaaagggcaaagagcctgccactcagtccctcggtggctctagcagagaggggaagggccacagtaagagtgggccggatgtgtttcctgctaccccaggctcccagaacaaagccagcgatgggattggccagggagaaggtgggccctctgtcccactgcacactgacagggctcctctagacgccaagccacaacccaccagtggtgggcggcccctggaggtgctggagaagcctgtgcatttgccaaggccgggacacccagggcctagtgagccagcggaccagaaactgtccgctgttggtgaaaagcaaaccctgtctccaaagcaccccaaaccatccactgtgaaagattgccccaccctgtgcaaacagacagacaacagacagacagacaaaagcccgagtcagccggccgccaacaccgacagaagggcggaagggaagaaatgcactgaagcactttatgctccagcagagggcgacaagctcgaggccggcctttcctttgtgcatagcgagaaccggttgaaaggcgcggagcggccagccgcgggggtggggaagggcttccctgaggccagagggaaagggcccggtccccagaagccaccgacggaggcagacaagcccaatggcatgaaacggtccccctcagccactgggcagagttctttccgatccacggccctcccggaaaagtctctgagctgctcctccagcttccctgaaaccagggccggagttagagaggcctctgcagccagcagcgacacctcttctgccaaggccgccgggggcatgctggagcttccagcccccagcaacagggaccataggaaggctcagcctgccggggagggccgaacccacatgacaaagagtgactccctgccctccttccgggtctccaccctgcctctggagtcacaccaccccgacccaaacaccatgggcggggccagccaccgggacagggctctctcggtgactgccaccgtaggggaaaccaaagggaaggaccctgccccagcccagcctcccccagctaggaaacagaacgtgggcagagacgtgaccaagccatccccagccccaaacactgaccgccccatctctctttctaatgagaaggactttgtggtacggcagaggcgggggaaagagagtttgcgtagcagccctcacaaaaaggccttgtaacggggagggcccaggggcaggactgtggagacccgtcctgaacgggcgactgtgtcttgactacctttcaaaaccagcactgtgtgggaatgtccgccaggcagagctcggagcctcattgagacaggggagagagaaagacaaagaggggaccttcttccagatgccttcccagttgtaaccggtaaaactgttaccagatagtgtttgtc

SEQ ID NO: 18479 - DNA, 3678 bp, Homo sapiens
  Clone ID: LIB3080-056-E12_FLI
gccgcgcccgacacccgggaggccccgccagcccgcgggagaggcccagcgggagtcgcggaacagcaggcccgagcccaccgcgccgggccccggacgccgcgcggaaaagatgaatttacaaccaattttctggattggactgatcagttcagtttgctgtgtgtttgctcaaacagatgaaaatagatgtttaaaagcaaatgccaaatcatgtggagaatgtatacaagcagggccaaattgtgggtggtgcacaaattcaacatttttacaggaaggaatgcctacttctgcacgatgtgatgatttagaagccttaaaaaagaagggttgccctccagatgacatagaaaatcccagaggctccaaagatataaagaaaaataaaaatgtaaccaaccgtagcaaaggaacagcagagaagctcaagccagaggatattactcagatccaaccacagcagttggttttgcgattaagatcaggggagccacagacatttacattaaaattcaagagagctgaagactatcccattgacctctactaccttatggacctgtcttactcaatgaaagacgatttggagaatgtaaaaagtcttggaacagatctgatgaatgaaatgaggaggattacttcggacttcagaattggatttggctcatttgtggaaaagactgtgatgccttacattagcacaacaccagctaagctcaggaacccttgcacaagtgaacagaactgcaccagcccatttagctacaaaaatgtgctcagtcttactaataaaggagaagtatttaatgaacttgttggaaaacagcgcatatctggaaatttggattctccagaaggtggtttcgatgccatcatgcaagttgcagtttgtggatcactgattggctggaggaatgttacacggctgctggtgttttccacagatgccgggtttcactttgctggagatgggaaacttggtggcattgttttaccaaatgatggacaatgtcacctggaaaataatatgtacacaatgagccattattatgattatccttctattgctcaccttgtccagaaactgagtgaaaataatattcagacaatttttgcagttactgaagaatttcagcctgtttacaaggagctgaaaaacttgatccctaagtcagcagtaggaacattatctgcaaattctagcaatgtaattcagttgatcattgatgcatacaattccctttcctcagaagtcattttggaaaacggcaaattgtcagaaggagtaacaataagttacaaatcttactgcaagaacggggtgaatggaacaggggaaaatggaagaaaatgttccaatatttccattggagatgaggttcaatttgaaattagcataacttcaaataagtgtccaaaaaaggattctgacagctttaaaattaggcctctgggctttacggaggaagtagaggttattcttcagtacatctgtgaatgtgaatgccaaagcgaaggcatccctgaaagtcccaagtgtcatgaaggaaatgggacatttgagtgtggcgcgtgcaggtgcaatgaagggcgtgttggtagacattgtgaatgcagcacagatgaagttaacagtgaagacatggatgcttactgcaggaaagaaaacagttcagaaatctgcagtaacaatggagagtgcgtctgcggacagtgtgtttgtaggaagagggataatacaaatgaaatttattctggcaaattctgcgagtgtgataatttcaactgtgatagatccaatggcttaatttgtggaggaaatggtgtttgcaagtgtcgtgtgtgtgagtgcaaccccaactacactggcagtgcatgtgactgttctttggatactagtacttgtgaagccagcaacggacagatctgcaatggccggggcatctgcgagtgtggtgtctgtaagtgtacagatccgaagtttcaagggcaaacgtgtgagatgtgtcagacctgccttggtgtctgtgctgagcataaagaatgtgttcagtgcagagccttcaataaaggagaaaagaaagacacatgcacacaggaatgttcctattttaacattaccaaggtagaaagtcgggacaaattaccccagccggtccaacctgatcctgtgtcccattgtaaggagaaggatgttgacgactgttggttctattttacgtattcagtgaatgggaacaacgaggtcatggttcatgttgtggagaatccagagtgtcccactggtccagacatcattccaattgtagctggtgtggttgctggaattgttcttattggccttgcattactgctgatatggaagcttttaatgataattcatgacagaagggagtttgctaaatttgaaaaggagaaaatgaatgccaaatgggacacgggtgaaaatcctatttataagagtgccgtaacaactgtggtcaatccgaagtatgagggaaaatgagtactgcccgtgcaaatcccacaacactgaatgcaaagtagcaatttccatagtcacagttaggtagctttagggcaatattgccatggttttactcatgtgcaggttttgaaaatgtacaatatgtataatttttaaaatgttttattattttgaaaataatgttgtaattcatgccagggactgacaaaagacttgagacaggatggttattcttgtcagctaaggtcacattgtgcctttttgaccttttcttcctggactattgaaatcaagcttattggattaagtgatatttctatagcgattgaaagggcaatagttaaagtaatgagcatgatgagagtttctgttaatcatgtattaaaactgatttttagctttacaaatatgtcagtttgcagttatgcagaatccaaagtaaatgtcctgctagctagttaaggattgttttaaatctgttattttgctatttgcctgttagacatgactgatgacatatctgaaagacaagtatgttgagagttgctggtgtaaaatacgtttgaaatagttgatctacaaaggccatgggaaaaattcagagagttaggaaggaaaaaccaatagctttaaaacctgtgtgccattttaagagttacttaatgtttggtaacttttatgccttcactttacaaattcaagccttagataaaagaaccgagcaattttctgctaaaaagtccttgatttagcactatttacatacaggccatactttacaaagtatttgctgaatggggaccttttgagttgaatttattttattatttttattttgtttaatgtctggtgctttctatcacctcttctaatcttttaatgtatttgtttgcaattttggggtaagacttttttatgagtactttttctttgaagttttagcggtcaatttgcctttttaatgaacatgtgaagttatactgtggctatgcaacagctctcacctacgcgagtcttactttgagttagtgccataacagaccactgtatgtttacttctcaccatttgagttgcccatcttgtttcacactagtcacattcttgttttaagtgcctttagttttaacagttcactttttacagtgctatttactgaagttatttattaaatatgcctaaaatactt

SEQ ID NO: 18480 - DNA, 1742 bp, Homo sapiens
  Clone ID: LIB3081-101-B10_FLI
gggactgtcagtcagtgcgcggccaggtacgggccgacgggcccgcggggccggcgccgccatggcggccgtgtttgatttggatttggagacggaggaaggcagcgagggcgagggcgagccagagctcagccccgcggacgcatgtccccttgccgagttgagggcagctggcctagagcctgtgggacactatgaagaggtggagctgactgagaccagcgtgaacgttggcccagagcgcatcgggccccactgctttgagctgctgcgtgtgctgggcaaggggggctatggcaaggtgttccaggtgcgaaaggtgcaaggcaccaacttgggcaaaatatatgccatgaaagtcctaaggaaggccaaaattgtgcgcaatgccaaggacacagcacacacacgggctgagcggaacattctagagtcagtgaagcacccctttattgtggaactggcctatgccttccagactggtggcaaactctacctcatccttgagtgcctcagtggtggcgagctcttcacgcatctggagcgagagggcatcttcctggaagatacggcctgcttctacctggctgagatcacgctggccctgggccatctccactcccagggcatcatctaccgggacctcaagcccgagaacatcatgctcagcagccagggccacatcaaactgaccgactttggactctgcaaggagtctatccatgagggcgccgtcactcacaccttctgcggcaccattgagtacatggcccctgagattctggtgcgcagtggccacaaccgggctgtggactggtggagcctgggggccctgatgtacgacatgctcactggatcgccgcccttcaccgcagagaaccggaagaaaaccatggataagatcatcaggggcaagctggcactgcccccctacctcaccccagatgcccgggaccttgtcaaaaagtttctgaaacggaatcccagccagcggattgggggtggcccaggggatgctgctgatgtgcagagacatccctttttccggcacatgaattgggacgaccttctggcctggcgtgtggacccccctttcaggccctgtctgcagtcagaggaggacgtgagccagtttgatacccgcttcacacggcagacgccggtggacagtcctgatgacacagccctcagcgagagtgccaaccaggccttcctgggcttcacatacgtggcgccgtctgtcctggacagcatcaaggagggcttctccttccagcccaagctgcgctcacccaggcgcctcaacagtagcccccgggcccccgtcagccccctcaagttctccccttttgaggggtttcggcccagccccagcctgccggagcccacggagctacctctacctccactcctgccaccgccgccgccctcgaccaccgcccctctccccatccgtcccccctcagggaccaagaagtccaagaggggccgtgggcgtccagggcgctaggaagccgggtgggggtgagggtagcccttgagccctgtccctgcggctgtgagagcagcaggaccctgggccagttccagagacctgggggtgtgtctgggggtggggtgtgagtgcgtatgaaagtgtgtgtctgctggggcagctgtgcccctgaatcatgggcacggagggccgcccgccacgccccgcgctcaactgctcccgtggaagattaaagggctgaatcatg

SEQ ID NO: 18481 - DNA, 1041 bp, Homo sapiens
  Clone ID: LIB3081-112-D4_FLI
gagaataacttccagccttaccccctaccacatgtccggcacatggcctaccagctctgccacgcccttagatttctgcatgagaatcagctgacccatacagacttgaaaccagagaacatcctgtttgtgaattctgagtttgaaaccctttacaatgagcacaagagctgtgaggagaagtcagtgaagaacaccagcatccgagtggctgactttggcagtgccacatttgaccatgagcaccacaccaccattgtggccacccgtcactatcgcccgcctgaggtgatccttgagctgggctgggcacagccctgtgacgtctggagcattggctgcattctctttgagtactaccggggcttcacactcttccagacccacgaaaaccgagagcacctggtgatgatggagaagatcctagggcccatcccatcacacatgatccaccgtaccaggaagcagaaatatttctacaaagggggcctagtttgggatgagaacagctctgacggccggtatgtgaaggagaactgcaaacctctgaagagttacatgctccaagactccctggagcacgtgcagctgtttgacctgatgaggaggatgttagaatttgaccctgcccagcgcatcacactggccgaggccctgctgcaccccttctttgctggcctgacccctgaggagcggtccttccacaccagccgcaacccaagcagatgacaggcacaggccaccgcatgaggagatggagggcgggactgggccgcccagccccttgactccagcctcgaccgccaggccccaggccagagccacccaatgaacagtgcaatgtgaaggaaggcaggagcctgcaggggagcagacttggtgcccagctgccagaaagcacagatttgacccaagctatttatatgttataaagttataataaagtgtttcttactgtttgtaacccctggtaccagtgtgtccatctccaggctccttgccttccccttacctgaccttattaataaagtctttcttagc

SEQ ID NO: 18482 - DNA, 2567 bp, Homo sapiens
  Clone ID: LIB3082-005-D10_FLI
cggaaccgagctgacgggcgtgcggccgctgcgccgcaaactcgtgtgggacgcaccgctccagccgcccgcgggccagcgcaccggtcccccagcggcagccgagcccgcccgcgcgccgttcgtgccctcgtgaggctggcatgcaggatggcaggacagcccggccacatgccccatggagggagttccaacaacctctgccacaccctggggcctgtgcatcctcctgacccacagaggcatcccaacacgctgtcttttcgctgctcgctggcggacttccagatcgaaaagaagataggccgaggacagttcagcgaggtgtacaaggccacctgcctgctggacaggaagacagtggctctgaagaaggtgcagatctttgagatgatggacgccaaggcgaggcaggactgtgtcaaggagatcggcctcttgaagcaactgaaccacccaaatatcatcaagtatttggactcgtttatcgaagacaacgagctgaacattgtgctggagttggctgacgcaggggacctctcgcagatgatcaagtactttaagaagcagaagcggctcatcccggagaggacagtatggaagtactttgtgcagctgtgcagcgccgtggagcacatgcattcacgccgggtgatgcaccgagacatcaagcctgccaacgtgttcatcacagccacgggcgtcgtgaagctcggtgaccttggtctgggccgcttcttcagctctgagaccaccgcagcccactccctagtggggacgccctactacatgtcaccggagaggatccatgagaacggctacaacttcaagtccgacatctggtccttgggctgtctgctgtacgagatggcagccctccagagccccttctatggagataagatgaatctcttctccctgtgccagaagatcgagcagtgtgactaccccccactccccggggagcactactccgagaagttacgagaactggtcagcatgtgcatctgccctgacccccaccagagacctgacatcggatacgtgcaccaggtggccaagcagatgcacatctggatgtccagcacctgagcgtggatgcaccgtgccttatcaaagccagcaccactttgccttacttgagtcgtcttctcttcgagtggccacctggtagcctagaacagctaagaccacagggttcagcaggttccccaaaaggctgcccagccttacagcagatgctgaaggcagagcagctgagggaggggcgctggccacatgtcactgatggtcagattccaaagtcctttctttatactgttgtggacaatctcagctgggtcaataagggcaggtggttcagcgagccacggcagccccctgtatctggattgtaatgtgaatctttagggtaattcctccagtgacctgtcaaggcttatgctaacaggagacttgcaggagaccgtgtgatttgtgtagtgagcctttgaaaatggttagtaccgggttcagtttagttcttagtatcttttcaatcaagctgtgtgcttaatttactctgttgtaaagggataaagtggaaatcatttttttccgtggagtggtgattctgctaacatttttatctacgttttataacttggtgagtgacgatgagagccctgcacctggccagagtgtcacaggcaaaaggcatcgggaagcaggagcatcttcttggcagccaggctgggccatcttctcctggacacctgctgtgtaccaggaacttcgtcacctccttgaatgctggcggttcatttcatgatcagtgttaagcattttcctccatgggaaggaagcatgggatatagaaaagcgaagggctttcctttacaaattctggttctgcaacttcctagcgtgactttgggcttgggcaagtttcttagccgttctgagccttcatttcctcatctgtacaatgagattaatagtacctatcatctaccttcaggattgctgacagacagaatttgaaataaaatatgcaagttagctaatacaaaaagtagatgatccaaaaatggtagccactcacccttcacaaactgaagtccatggaccacggaagtcgagaattaatgtacacctgtatcatgtgtaggaaaccagaaatgtgttccttatttcttgttcccaaacaggattaactgtgaagactaatttataaatgtgaacctaagaaaactccacctctgaaggaaatcatttgaattttgtttttgtacgtaaagttaaccttccaattgtctgagctgtcgtcactgacttcatgacagtctggccctccagacaagagcagcgctggcatcgggcaggtgattcctgacacctgctgcctgcaggcattcactgaccaggcctttcctggaggaaacacccagggccgggcggctgctgtttccacacgtggactcggatctgctgtgacaccgtcagcccgacagtctctccatatgcagcctttcctctgtacttttctccatggttgaaataaaacagggtgactgggagttacttag

SEQ ID NO: 18483 - DNA, 1346 bp, Gossypium hirsutum
  Clone ID: LIB3083-009-H11_FLI
gaattcggcacgagctgaactgaaaggctgcataaacgatgtgaagagaatgtacaaatgccttacagaacgctatggattctctgaagaagacatcacggtattgatagacaccgataattcttatgatcaacccacagggaagaacatcagaagggctttgaatgatcttgtgagatcggctgagcctggggattttctgtttgtgcactacagtggccatgggactaggcttcctgctgagactggggacgatgatgatactggctacgatgagtgcatcgtcccctgcgatatgaatctcatcactgatgatgatttcagagagttggtggataaagtcccaaaaggtagccgcatttcaatcgtatcagattcatgccacagtgggggattgattgatgaggccaaagagcaaataggtgatagctctaagccccaagattcagaatcagaatcaggttcaggtgggtttaggagcttcttgcatcacactgtacaagatgcatttgaatctcgtggaattcatgttccttctagattacgccaccgcgaccaccaccatgataaggaagaggtggatgacaggggagtgaatgaagactatgatgacagtggctacgtcaaaagcagatctctgcccctctcaactctaattgaaatgctcaagcagaaaactggcaaagatgatattgatgttgggaagctaaggccaaccctttttgatatgttcggcgaagatgcaagccccaaagtgaagaagtttatgaacatcattatgaccaaactgcaggggagtggtgatgacggtgaagggggtggtttcatggggaaggttgggaatctggcactacagtttcttaaacaaaagctggatgatgacgaaggatacgggaaaccggcacttgagactgaagtgagtagcaagcaagaggcttatgcaggagctggtaagcactctcttcctgacagtggaattcttatcagcggctgccagaccgaccaaacttcagcggatgccagcccatcagggaatgcaagcaaagcttatggagcacttagcaatgctattcaaaccataattgccgactcagatggctcaattactaataaagagcttgttctgaaggccaggcagatgctcaaaaaacagggcttcactcagcaacccggcctttattgctgcgaccatcatgtcagagctccatttgtctgcgaatactaatcttttatctgcaagcttcagaaacaaataaagtctatgatttggtcagagaattgttgttgatgagattgtactgcttgtctcactttcgatttatccatatatttacagtatgtgtgct

SEQ ID NO: 18484 - DNA, 796 bp, Gossypium hirsutum
  Clone ID: LIB3083-062-G8_FLI
taaattccacattcatacgcaggacccatcttgttcaatctttctctgttgttttcctctactggttatattacgtttcataaagaaataatcatcttttttaacttatttatctttactactaagtttttttttttaattttatttgggtcctgctattatatatcataaataataactcctacaatggctacatcctcgggttcatcagcaacacaaatcaactcgggctcagaagaagcattaatggacgaaaggaaaaggaaacgaatgatatcgaacagggaatcagcaaggagatcaaggatgaggaaacaaaagcatttggatgatctaatgactcagttgactcagttgcagaaacaaaaccatgagatcatcacaaacataaacttcaccacacaacacctcttgaatgttgagtcagagaactcggtgcttagagctcaactcaatgaactcactcataggttacagtccttgaatgaaatcatcagcttcctgaatgatgttcatggcgatgacgacgacgacgatgataaaacaagcattgacttcactcagcctgctgtagctgataatatcttcctgattcctttccatctggcttacttgaatcagcctatcatggcctctgctgataacacgtttcagcattaattttctataatgccacaattttaatgggatttttaatctcagtttatatatatatatatagttgtataagcagtagtatgaaataaaatatgtgaaaatcataaagctatggtatggttaatggtagatttttttc

SEQ ID NO: 18485 - DNA, 708 bp, Glycine max
  Clone ID: LIB3087-001-E10_FLI
cgattctcgccatgccgaaagccaaatccgacgccaaagccgccgatagccggttgaagcgcaagggcgctggtgctggaaggaagcaatcgaagaaagctgctaaggatcctaacaagccaaagagacctccaagcgctttcttcgttttcatgtccgagttcagagagcagtttaagaaggagcatcctaacaacaaatccgtcgctgttgtcggtaaagctggtggtgacaaatggaaatcgctgtctgatgcttttgcgttcatttaatgtttcaggaaaaggcccccttcgttgccacggccgaaaagaagaaacaagagtatgagaaaactattttggcttacaataagaaattggaggggaagaattcagaggaagacgagtctgacaagtcaaagtctgaagtcaatgacgatgaggaagatgaggaggaggaggatgatgatgacgacgagtgaagatggtgatacaagatgaagcgtaggaggatgtgggaaaagaaaattgttttgcatagtagttgttgggtttagaatttcataggatggttcccaacccacatccctttatgataattagtttctgaatttttattttgtcctcccttactagggttagattagcgcacaatcgtaattagggttcagtatcatgatcatgtacttaaaagtcaatgctatgatacgtttcaattctattctcg

SEQ ID NO: 18486 - DNA, 630 bp, Glycine max
  Clone ID: LIB3087-002-B5_FLI
tttacagagaagctaagaggcgcagccgtagcaaaagctcgtggaattgctagcaatggcgaggatcaaggtttacgagctgaggcagaagacgaaggctgatctgctgaatcaactgaaggacctgaaggcggagcttgccttgcttcgtgttgctaaggtcaccggtggtgcccctaacaagctttccaagataaaggtggtgaggttgaacattgcccaggttttgacggtgatttctcagaagcagaaggctgcgttgagggatgcctacaagaataagaagtacttgcctctcgatctccgccctaagaagaccagggctattcgcaggaggcttactaagcaccaggcatcattgaagacagagagggagaagaagaaagagttatatttcccactaaggaaatatgctatcaaggtgtaactttagagcaatcttatcggttaattggacatttacctcctttatactcgacaagttttgatatatctcgttttgtagtttcatgtttattgcttattggctgtgttaaacttcatgtcttctttagacctggggtttcttgaagctaccaggatttatgggtatcgttagtttccgtttaatattgatgaatccgttgcatt

SEQ ID NO: 18487 - DNA, 1010 bp, Glycine max
  Clone ID: LIB3087-004-G10_FLI
aatccttcttaatagtactgttttagaattgctaagatgaagtcaagttttgaggaattgaagaagaagaagaagaagaagggagaaggagagcattggaagacatagagataaagaattgaagataatgcgaaccctttgcgacgtatgcgagagcgccgctgccattgtcttctgcgccgctgatgaggctgctctctgctccgcttgtgaccacaagatccatatgtgtaacaaacttgctagtagacacgttcgggttggccttgctgaccccactgatgttccacgctgtgacatatgtgaaaacgcacctggtactgaatgctttcttttactgtgagatagatggtagttcgctgtgtctgcaatgtgatatgattgtgcatgttggtggtaaaagaactcatggaagatatcttctattgaggcaaagagttcagtttccatgtgataaacctgcccaaatggaagaactagggctgcaacctatggatcaaaatgaatcaaggagggatgaaagtcagtcactcaagctaaaaataagagatagtcagcagaatcacagtgtctcacctgttccaagacaagaaaataatattgatggtcatggaaaaatggataaaaagttaattgatcttaatacgaggccactgcggttaaatggagcagcaccaaacaaccaggaacgaggtatggatattttaagaggcaataatcataaatctgcgagtgtgccaccagtagaatccttcaaacaagagtctgagaagtaataaagctacaacatatagggtgtggtcagaggctacagaaatattatgtttacgcaaatttctcttacactgctgaccttgtttatgtgaatcttgttttttgtctgcttaaaagtttagttgtttggctgcagaccaaattaatgagggaaaatagttgctttcatatggatgagctgcataaacaaggttactacagcttaaactcgagggtataacatgattgttgccagt

SEQ ID NO: 18488 - DNA, 1093 bp, Glycine max
  Clone ID: LIB3087-004-G4_FLI
ctgaaagcgaagaagaaacagagttagagaattgaatgtgaatggggaatcagaagcagaagtggacgcaggacgaagaagacgctctcatagccggcgttgaaaagcacggccccggaaagtggaagaacattctcaaggatccccaattcgccccttttctcacttcccgttccaacatcgacctcaaggataaatggcgcaatttgagcgtcagcaacggtgctcaaggctccaaagaaaaatctagggttcccaagcctaaagccttctctgctcctcctgctactaccgccaccaccgccactcctcagaacgcttctcctgctcctcaaagcgcatcgtctgatgctgctgttgcccctgacgcttctcagaatgaccaagatgccaaaaaccctccaaggtataatgcattgatttttgaagctctatcagcactgaaagatagtaatggatccgacatgaatgccattattaaattcatggagcaaaaaaatcatcaggtaaaccaaaattttaaaagggcattaagtacacggttgaggaggcttgttagtcaagggaaacttgaaaaggtaccaaatggttacaaggtgaaaaaggaagcctcctcggggacaaagtcaccttcaccaaaagcaaaggatgtccggcctccacaaccacaacggcaatctccagcttctctctttatgactaatgacacattaaaggaagctgcggatactgcagcctacagagttgctgatgctgaaagtaaatcatatctggctgcagaagcagtaaaggaggcagaaaaaatatcattgctggttgaacatagtgattcaatgttacagctagcaaaagatatatatgaacaatgttcccgtggtgaaattatcctcttggcttaagatggtcgaagtaaggtctataaatagattcgttctgatgttggtttctaaatgtaaaattttgttgatccaatgaaatactatttttacatatttttttgtattttatcagattcctttaacatttttattccttaaaagtgcatggaaagtcatgtttatagtaatatcatcggtccaccaaatctttccgg

SEQ ID NO: 18489 - DNA, 1132 bp, Glycine max
  Clone ID: LIB3087-005-D1_FLI
ctcatctgtatgcctatgcttgtttatcattttcttacttttctctcacgctctgccacaaaactccgtctccgcaataacggaataaaaaaacaagtttaattactattatggcgccgagggatcataagacaagcaacgctaaggctaacggtaacggtaacagcggggtgaaggaggtgcattttcgtggagtgagaaagaggccgtgggggagatacgccgcggagatcagagatcccggcaagaagagccgcgtctggctcggaaccttcgacacggcggaggaggcagcgcgtgcctacgacgccgcagcacgagagtttcgcggccctaaggccaagacaaacttccctctccctttggaaaatgttaagaactcgagccccagccagagcagcaccgtcgagtcctccagccgcgaccgcgacgtcgccgccgattcctcgcctctagacctcaacctcgcccccgccgccgtcgcatccgctcgattccccttccagcaccagttcccggtttttaccggcgcggtgcctgcggcaaatcaggttttgtacttcgacgctgtcctacgcgccggcatggccggtccacgtggctttgcgtttggctacaatcatcatcccgttgcggcgagtgagttccacgcgacgacgagcgactcggactcttcctctgttatcgatctgaaccataatgaaggcgaggttaaggggaacggttctagaatcttcgatctggaccttaaccatcctcctccgcatgagatcgcttgatccaaagtctgactcacccctttagttttttgtttttttttttttgtgtttcggattatgaatttctcgttagtttttttttatataagtagagaaagtagcagcctccgataagggaaaataacgagggaagggaagggaaagaaaagaaagtatgtgaatacgtaggcggtatgattgtctcaattttttgcgacatagaggaaccaccaccggtttcatcctgttgtttcttaaatcacgaaatggttatcgggtttttctttcgttttaattgattatgtactgcggtgtaatgtttttggtttgcagccataatttggttcaatgaaattaacacggaaagtttgcat

SEQ ID NO: 18490 - DNA, 2165 bp, Glycine max
  Clone ID: LIB3087-005-E9_FLI
actctgtctagaggaacttcacgtatttgtaagcttcttccagaagcatcgcttggtccgttttcttgtcccacggcatcagcttctggagacaccgtgttttctggcttagcttctgacgacgttggcgagccaggttgctctgcgggatcaccggaggtcattacgactccacgcgctgccacttctgctccggcgagtagaggggagggaggcggaggtgtatctcattaagggtatttttgactttcagaaagaaatgacaggtgcaagatacactataggtagtgtaggattcaaaacctcaagtttgaaggatccaaatccacccactataaaggttacttctcacccacccaattacattaattttataactaactaccaaaagattcattatgctcataataattatttttataatccataatttttgtccaaaatcacaattattctgacaagagattccaaagtttattgttaattttttttctttagattccttatattagactagtcaacctcagattaaaaattaaactcctaacaccacgagcatgattcctagtattagttaaatggcctggtacaacacattctttatagatggatgtgtgccatcccacctgctatttggtgttagataacaactcatggtctcacactagcttttccttatgtttatttttattatattacttttacttcaaggtgcaaccaagtgaagccaccctcctatgaaatgccttcaaacgaaaaagctaagcagtcagtttggcagtaccaatcataataggctcaaatagttgcaacattttccttaacaaaaatgtggtacccttaaagcatctaagtttagtttatattacattaatttcacaatccctccacttcattctgtgcctccaacttgtcattcaattccaccctgaagattgtgcttcaggtggttcaaagaagatgggctcactagaaagatcaaagaagaaagtccttctatggaagaaggccatgctccatttttctctatgttttgtgatggggggttttcacaggcttggctccaacaggtaaatcttctctcttttccaccacagttagtgtctcaaatagaacagaatttgcaccacaacccagtgaaatgttacacctcacaacaaatgtcaatagaagttggatagctccaaccccagattccatgcccgtgaagcctagaatccttgaaaatgaaaagaaaacaacaacaaaaaagttgcatgtaaaagcacagccccagttgaagcctagaagactcctaatcattgtaactccaacaagcacaaaactaccccaccaagcagtgtttttgagaaggttggcaaatactataaagctggttcctcaaccattgctgtggattgttgtggaagctaaaaccaattccaaagaactgccagagatactaaggaaaactggcatcatgtataggcatgtggttttcaaggaaaatttcacggaattagaagctgaactcaatcaccagaggaatcttgcgcttaagcacattgagcaccacaggctcaatggcattgtacactttgctggcctttccaatgtttatgatctccaattcttccatcagcttagagatattgaggtctttggaacatggccaacagctttgttagctgcacacaggaagaaagtgaaaatcgaaggacctgtatgtgattcatcacaagtcattggttggcatcttaagaatatgaacaatgaaactgatactatcactcccccaattcatatttcaagttttgcttttaatagctccatcctttgggactctgagagatggggtcgcacttcctctgttcaagacacttctcagaattcgatcaagttcgtgaaacaagtagttctagaggatgaggctaaattaaagggaattccaccagaggattgctccaaaatcttgctctggcgtttcaattttcgtgccagaactcattaatttctagattttagtccaaggcaaaggggaaagacataaaataacgagtgatgaagcaatatagaaattggcagtacagaaattactttcctactactatatagaatttattcattttttttttctctttttcaaatttatcctatgtttaattgtttatagttttattggttct

SEQ ID NO: 18491 - DNA, 1656 bp, Glycine max
  Clone ID: LIB3087-005-G2_FLI
gaggtgaagaacaataacataaaccattcttcacctctcctctctcccaccatagtaatgggtcagagcctaagttgcagtggcaactatgaccacggcctcttcaccgccgtgcagcacggtgaccttgaaattgtcacaactctcttggactccgacccctctctcttgcaccaaaccactctctacgatcgccactctcctcttcatattgccgctaccaatgaccagatcgagattctgtctaagctcttagatggatctctcaacccagatgttttaaatcgccacaaacagactccgcttatgctggcagcaatgcatgggaacatcgcgtgtgtggagaagcttcttcaagccggagctaatgttttgatgtttgatactagttacgggagaacctgcttacactatgccgcatactacggccattcttcttgccttaaggctattctttcttctgctcaatctagtccagtatctgcttcttggggggtttctcggtttgtgaatattagagatggaaaaggtgcaacgccattgcacttggcagctcgtcagaaacggtctgaatgtgtacatattctattagacagtggtgctcttgtttgtgcttcaactggtggatatggctgtcctgggagcactcctctacatctagcagctagagggggatctatagattgcattcgtgaattgttggcatggggtgctgatcgtcttcaacgcgatgcatctgggcggataccatatatggttgctctgaaacacaaacatggagcctgtgcatcattgctaaatcctacatctgcagaacctcttgtctggccgtctccattgaagttcatcagtgagcttaatcctgaagccaaagctttattagagcaggcattgatggatgcaaacagagaaagagagaaaaacatattgaaagggagttcttactctctgccatctccatcacattctgatggggtagctgataatatgtctgaggttagtgagtccgaattatgttgcatctgctttgagcaggtgtgcacaattgaagttcagaactgtggccaccagatgtgtgcacaatgcacactagccctgtgttgccacaacaagcccaaccctgccactgcctgtcttactccaccagtttgtccattttgtcggagcacgataacaagactcgttgttgtgaagacagaatgccacgatgaaactgatcaagacagtgctgatatcaactgttccaagctgagcaagtcatcaaggaaactcagacacttgaatgacagtggtagcagcagcttcaagggactatctagtgttagttcattcgggaagttgggtagccgcagctctggaaggattgctgctgagtggcttgataaacagtgatggcaaattacttgtggtaatcaatgattccatattggcaagatacggtaactacagaggtgcttaaccggcaaggcaaaaatcaaagttgaaaacaggtgaaggaatattatgtaattttgggaaataagcaaaagtgagttgaagtgaagtgaagttcgcggtaggtaccaagtgttgttgggaaaaagagaaggggatgtcatgttgttgtagtattattgttacttgagaatgaagaagcatcacctgcgtcgatcgatg

SEQ ID NO: 18492 - DNA, 755 bp, Glycine max
  Clone ID: LIB3087-005-H8_FLI
cctggtgttgggttgcttgcaaggaagagaacagagcagaaccatagatatgaacaccaacaccatgccacatgccgacaatcctatcaccttggagaatcatcattggaaccaccatggataccactcactgtcttagatgaaactgctctcaaggccagacaaaggcttcacaagaagcttggacacttcttttcctcatacaggtcaagtgagaatccaagaaaagaaggaaaagtaaaccaaagcagctacgagaagaaggatggaggaataggtcggaagttgttagagagttcatggttgttgcgtggcaacaagtttaagaaagatagaaaagtgtgtgctgtgtgcctagaagatttggggcaagagcaacaggttatgaacctttcatgctcccataagtaccattcagcatgccttcttccctggcttgcagcccatccccattgcccttattgtcgaaccccagttcagccctgacctcatattcaagggtcaagactcagtatatggtgccttgtagaaaggacaaaaatatcaaagttttatctagtattgcaatttgccgcacatttttcttgttactgattgcctaggaaatttgattgctcttctcaggtattggtggatatcccctattgtaatacaccatgctcttcaaaagattgaaattatacactatcccccaagaaggcaataactatcccttcttgcttgcatgaaaaaaaaggaccatgtttctaactcac

SEQ ID NO: 18493 - DNA, 986 bp, Glycine max
  Clone ID: LIB3087-006-C9_FLI
ctccgtctccgatctcgccgtggagaaccagaatctgaaaactgcgaagaggaaggagcgagagaagaaggttaaagcgtcgtcgaagaagagcaagagcgtcgccgccgccgacgagatttccggcgacggcgagaagcttccgtacgttcacgttcgagttcgtcgaggtcaagccactgatagccatagcttagcagaaagggctaggagagagaagataaatgctcggatgaagcttttacaagagctggtcccgggttgcaacaagatatcgggaacggcattggttctggataaaatcatcaaccatgtgcaatctctacagaatgaagtggagatattatcaatgaaactggcagcagttaacccagtaattgatttcaacctcgacagcttactggctactgaaggagtgactccaatggactgtaacttccctccgacagttgcacctgtcatgtggccagaaatcccacagaacggaaacagacaacaatatcagcaaccatggccgtttgatgcactccaccaacccctttgggggagggaagaagacaacactaatttcatgactccagaaaactcactcttgagttatgactcatcggcaaattcagtatctctgcattcaaatcagttgaagatggagctctaaagggaaactacaaaggtggtggtaccagtagcaattagcctattagtgtatataacaaatatagtattagcaattagtcatgatttgagcagcctcaacattcagcaggttttccctaactctattttgtcagagtcagttggaaacctggattttattcagccagcaaggaagaagaattggtatgctatttttatttaatatattactatcactatgtatactaactatagtaatcattcaatctttcaagtgattgattgatttagattgtaaaatcattgaacgaactattactgaactatcattgaagtttgttgctttgttc

SEQ ID NO: 18494 - DNA, 2204 bp, Glycine max
  Clone ID: LIB3087-010-D12_FLI
caaaaatggatgattctggaagtaaaactaaactgttgaatccatggatgctccacttccagaaactcgctctcgaactcaagtgccctctctgtttgagtttgttcaagaggccggtgttacttccatgcaaccacttgttctgcaattcatgtttggctgattgcataacggctgggcctggatgtgctgtttgtaaggcaacgtatgctcaaacagatgttaggcatgtgccttttgtggaaaacgtggtggcaatatatagaagcttggatgccactttttgtgctagtttgtttcagccatgttcttctggtgatgggagggttttggagccgtgccaagcaattcttaattcaacttctagtagtttaaaagctgccaagcttcctcggaatttaactaattcaatgaggttggggttggcaagaatttcaaatccaagagtgtggtgcatgacaaagcagaggagtttgagttgtctcgtgagagagggaagcccaatccaatgcaatcttcccatatggaacttggtggccgcgaagagtgtggagttatggaaatggatgtgaatcaagtgacacaatcagcaccagatagcccacccttttgtgataccaaaggttcagataatgacttcagtgatcaaggcagtgagcatccattacttcctggtagattggaaaattcttcactaaagagagctggcacaggaaatggaaatttgaaagaaagaatgggacagctcaggtctgaaagttcagcctctgaaactgagggtcttgcaagggatctcaagagacagaagaatctggactttaaacctggaaaggaacctggtgcaccattgcccaaaattgacatgtgtccaaccggaaggatctgttcattttgccaatcctctaaaatctcagaggctactggaccaatgctgcattatgcaaatggaaacttagttacaggagatgcagcaatgaaaccaaatgtcatacctgtgcatagaatttgcattgactgggcaccacaagtgtactttgttggtgaagttgttaagaatttgaaggcagaggtggcaaggggagcaaaacttaaatgcagtaaatgtaatctaaagggagctgctcttggttgctatgtcaaatcctgtagaagaacgtatcatgttccttgtgcaatggacatctcagattgccgttgggatcatgaggattttctcttgctctgtcctgtccattcaaatgtcaaatttccatgtgagaaaatcaggtccaagaaaaaggcaacacagaagcatcccactttttctcatctgccatctcatcactcaaatcgtcttgaagcttcccaggatgctagtaaaaaattggtattttgtggatctgctctatcaaatgaagaaaaggtatttttgatcaattatgcaagcaaggttggtgctactgtgaccaagttctggacctcaaatgtcacccatgtaattgcagcaactgatgcacatggagcatgctccaggacgttgaaagttctgatggcaattctaaatggacgatgggttctaaaaatggattggataaaagcatgcatgcaagagataaatcctgtagaggaagaaccgtatgaaattaatcttgacaatcaagggtgtcaaggtggcccaaaagctggcagacttagggcattggccaatgagcccaagctattcagtggcttaaagttttatttttctggagattacgtgtcaacttataaggaagatcttgaagaattaattgaagtggggggaggtactgttttgagaatcaaggaagaattggaagcacacagacatgaatgcaaaggggattcttcaaagttgctagttgtttacaaccttgatcccccacaaggatgcaagttgggggaggaagtttcaattctttggcaaaggctaaacgacgcagaggatttagctgcgaacactttacaagtcattggtcacacatggattcttgaatcaatcgctgcatgtaaattgcagccttttgtttactaaaatgcattaggtagctgatattttgtcgatcacttgatagggcgttctctgcaaaagttgatcaatcgtgtacaggatttagcttgaatttatttgaagtcttgttcgagtcactggatgttagggtgtaatgcttatgtaacattaagtagttatttacttagttttgtct

SEQ ID NO: 18495 - DNA, 1445 bp, Glycine max
  Clone ID: LIB3087-012-F3_FLI
gtctatttcttccattctcatttctctctctttctctgtttccacatgccatggttcgttcttccttgctctactactactctcaacgccgtcttgcaggctctttcaggggcttcttcttcattcccacaaccttagctctcttcacctctttcttcattctcttctacatttactccacttcaaacatcttcacccatcacaaccaccacccttccacttcacatttcaaaccacaccctcccttttccactaccccttttattgctaccactcctcacttcgtccctgtcttcaaccacaatgcttccgagtccacaaaatctcctccgactttccaattggggtatggcctcggaccgcaaagtcaacggggtctgcctctgccaccgcaattcagctcaaaggggaagacgatccttttgcaaatgtgcttttgcctgtggaatctgaacccggtggcaattataccagtgaaagttacttcaaaaaggtacttatgaagagccatttcattacaaaagacccaccagaagcagatcttttctttcttcccttttccatggcaagattgtggcacgatcgaagagttggtgtgggaggtatacaagacttcattagagactacattcataatatcagtcacaggtatccatattggaacaacacaggtggtgccgatcacttttatgttgcttgtcattcaattggaaggtctgccatggacaaagcacctgatgagaaattcaatgccattcaagttgtatgctcatctagttattttctaaccgggtactttgctcacaaggatgcatgtctaccacaaatttggccaagaaaaggaaatccccctaaccttgtttcatcaaagaggaaaaggctagctttctttgctggaggagtaaattccccagtacgtgtaaaacttcttgagacatggaaaaatgattcagaaatctttgtgcaccatggaagacttaaaacaccatatgcagatgaattgctaggtagcaagttctgccttcatgttaagggctttgaagtgaacacagctcgcattggagattctctatattatggttgcgttccagtgatcattgccaactactatgaccttccatttgctgatgtgctaaactggaagagcttttcagttgttgtcactaccttagatattcccttgctgaaaaagatcctcaaggatatcatcagttccaataaatatttgatgttacaaagcaatgttttgaaggtgaggaaacacttccaatggcattcacccccgcaagacttcgatgcattttatatggttatgtatgaattatggcttagacgaagttctataaaaaatacgtgggtagattctttcagagtttaatttatatgtatgccactgtaaaatattttcacacaagcatttaataagaatttactttatcatggtt

SEQ ID NO: 18496 - DNA, 344 bp, Zea mays
  Clone ID: LIB3088-001-A6_FLI
gatcgggaacgagacgttcgagaagctggggacgctaggcacgtcggcgaacctgctggtgtacctgacgcaggtgttccacatgcggagcgtggacgcggcgacgctactcaacgggctcaacggcaccaccagcctcgcccccatcatcggcgccttcctctccgacgcctacctcggccgctacctcgcgctcgccatcgcctccgtcgcctccctcatcgtaagcgcagcgatccatctccagtccacccctctcgctcgttacctgcttaatttgagggacaccggggtcggaatcagttcgggggtagatggaatggaattcggcatgctgttgctgc

SEQ ID NO: 18497 - DNA, 368 bp, Zea mays
  Clone ID: LIB3088-001-G12_FLI
aacgggaatatatgctcttctttactttatgtaaaatggctgactgtattcttgcttgaacagcttggctgccctctgctgctgctgcctcctggacgcctgcttctgacggaaccatccgtgccgggtccaacacggctgcaagtgaagcaaccagcttacggaagagctggaactgggccgtgctattctagctttgtcctgcgttatcgccctcttttcttttttttctctctctctctctctctgttatgagactactggtactctgtcgatgtcgattggattagactagggctggtgtgtattctgtggatgctccgtgtttctggtgggattcaagttcaaccctgggattattgtatttc

SEQ ID NO: 18498 - DNA, 920 bp, Zea mays
  Clone ID: LIB3088-001-G6_FLI
ccgcacctgagcggcatcgcggccatcatcaagagcctgcacccgagctggtcccccgcggcgatcaagtcggcgatcatgacgtcgtcgggcacggcggaccacgcgggcgtgccgatcaaggacgagcagtacaggcgggcgagcttctacagcatgggcgccgggtacgtgaacccgtcccgcgccgtcgacccggggctggtgtacgacctcggcgccggcgagtacatcgcctacctctgcgggctgggcatcggggacgacggcgtcaaggagataactgggcgccgcgtcgcctgcgccaagctgaaggccatcaccgaggcggagctcaactacccgtcgctggtggtgaagctgctgtcccatccgatcaccgtccgccgcaccgtgaccaacgtcgggaaggcgaactcggtgtacaaggccgtggtggacatgcccagggccgtgtccgtggtggtgcggcccccggtgctgcggttcgccagggcgaacgagaagcagagcttcaccgtgacggtgcggtggaacgggccgccggccgtcgccggcgccgaggggaacctgaagtgggtgtcgagcgagcacgtcgtccggagcccgatcgtgataccgccggccaaggccgccgcgtaggcgtagctcccaatccaatctgctagacggccggcaggaccgttctcgtgtcgtgtctccgaggaagaaggtcatcagtattcagtagcggtaggtaatcgtgagtgtgcccggtgtacgtatggcgaaggaagtaggcaggcgactgttgtataggctggtggaggcaggcagggtacccgatcatctgcgacgcagcaagctcagctgcaatggcaatggcgccgttcgttccgtatgtaaaaaaatggcggaaataattaatcgcatcgaaaatc

SEQ ID NO: 18499 - DNA, 822 bp, Zea mays
  Clone ID: LIB3088-001-H12_FLI
ccagagtcacatgcatcaacaaactataataataaatcactgacgcatgcatcactgccggaatccagactccagagctaaaagctgtatgcacaggcgctctatagcatggcggaatctaccgggccgggccgaccgatcggccggcgtcgctgctcccgctccaccagggcgcaacaacacacaccccgcccgcccccttgcgccactcccccggggggctcctaggcgggggccacggtctccccgccgctgccggactggtcggagccgctggcgccggacacggacggggcctccttcatggaggtcacggagcaggtctgctccatgcgctcgtcgaggtcgtcgtactcgatctgcttctcccggcactcctggctgcagaatgccacctcgcccctgtagatgaaggtgtcgtggccgggcccgaggtggcgtttgcagaggccgcacgccttcaggaaggccgccgtctccaccgccgcgaacgaggtgccacagtagtagtaaccccccggcacggccaccatcccggcgcaggcagccggcagtgagcaggacgacggcacgccggcgccccgctcctggcgcccctgcttcgccgccgacggcaccgtcaccatgctggccgtgcgcggcagcaccctgctcctcggacgcttccccagcgccgtcccggccgactcgatccgctcagccggctccatgccctcctctcccgtcgttcctgccggctggcgcgcccctgtggtcctagatgggctttctcgtcgcgagatttggagagcgaggaagactggtggtgggtggggactgggg

SEQ ID NO: 18500 - DNA, 559 bp, Zea mays
  Clone ID: LIB3088-002-B10_FLI
gtgctgcagcagtgacaggtatggccgaggtagtgtcgtcctctcggtaacacgcggtgatctaggtgcctgccgcctaggtgacctttaccgctacttggaggactcacaattttgcttttccgattgtcgtgatctgggttcttactgcttgggggcagcttggaggagaccactcgccattttgcgttttcgatcatcggttactactggatcatggttcgccatcgatgctatgcacaggccacgctagagctctctgcttgttgacgtgaatatgcttctctcccttcatgtttaagcctaagcagcttgctttgcttgtgccaaagactttttgagcactagcacaacaaaccaacgcctacaacgcgcttttgtgtacaacgatcatctgcttgttgcaccatacatgtatagtctacggggctgcaaactgttagagttacgtatttctgtactaaacatcctttcgcaactgcctgtacgctatcttttagaacccttgtgaaaccttatgcagtgcgttagtgccatatgtattatattgttgtatcgt

SEQ ID NO: 18501 - DNA, 524 bp, Zea mays
  Clone ID: LIB3088-002-C11_FLI
atctcctcgcatttcttcccatccgatccccccttcgcaaccaaaaccccaactcgccccgcatcgatggcgcccaaggccgagaagaaacccgcggcgaagaagccggcggaggaggagcccgcggccgagaaggcgcccgccgggaagaagccgaaggcggagaagcgggtccccgctggcaagtccgctgccaaggaaggcggcgagggcaagaggggcaagaagaagggcaagaagagcgtggagacctacaagatctacatcttcaaggtgctgaagcaggtgcacccggacattggcatctcctccaaggccatgtccatcatgaactccttcattaacgatatcttcgagaagctcgctgctgaggccgccaagctcgcgcgctataacaagaagcctaccatcacctcccgtgagatccagacctccgtgcgcctcgtccttcccggggagctcgccaagcacgccgtctccgagggcaccaaggccgtcaccaagttcacctcggcctaggctgc

SEQ ID NO: 18502 - DNA, 498 bp, Zea mays
  Clone ID: LIB3088-002-D11_FLI
agaaaatccacgattgtcaacatatgacagacggctcccctgctgtggctgtggaataggttggtcttgttttcttctaggtttcttgtgccctatcatttggtacgttgcagctcttctctattgctgcaagtactataatcgggatcctcgtgaacggactggactcgcagcttccgctgttctggcggttatcattacagctgtaactattgtaaccctgtctgttctgctgatatgttgtgtcaacaaacggttcttgaatagctgtgcagtttggcctaagtgatagcagcaagatatctattgcaaaacatcagcgttgaactactaactgaaatattctttagattctttagtcagtgcacttattgttggactgcaaaagggaaatcaacaaattatgtgtaacatgatccattatcacctgtgactgtacattacagattactggacctgtggaaattctgaagctatatgcagcaattccttctctcc

SEQ ID NO: 18503 - DNA, 191 bp, Zea mays
  Clone ID: LIB3088-002-E12_FLI
cttgcggtgcgtatgcttttcggtgttttgtgtcagagcgagcaatcacaaagcaatggagagcccagcttgtaggaaccacatcgatgtatagtagttgatacgcatgtactgactaatttgagcaagtaaaatgttactgctcacaattatagcacacggttcatctgtgaaaacaaatatgctcatct

SEQ ID NO: 18504 - DNA, 684 bp, Zea mays
  Clone ID: LIB3088-002-F12_FLI
aaactctagctgatgggctgcatattctctcaaaggaaaaaacgggggttgcagtcattgacaggaaaaccagccgtctaattggatcattacagtgcagtgatctctacctgtttctagatgacagcacccttttcagcaagcgaacgacaactactctggaagaattaatcagcctgaataacaagaccgacaggaaatgcagcaccgctgaaaattcatgtgcgcctggccgaaacatcctcgcgctcaggagcaggcagtcaggcatggtgggcctaccagccaccaacctggaatccgacaccctaaagcaagcgatggagaagctgacaactttaaggagcagctgcagcttcatcgtcgacgagcacgggcgcgtccaaggagtggtgaccacaagggacatcatctccgtgttctccccgctgtgcatggactcgaggattgacggggccacgttcttctcggctgcgctcgagcaggctggctgccgcgttgagaacgggcagatgtttcagaattagtttcagacaaaactggaatgcagggaggctttagtttgttgcagtgaggaagatgtacatggcacttaccggctatgttgccctgatacgagggatatggatacgggatacgtcgatactctgatacgctatttatcaaaaaatactctgatacgct

SEQ ID NO: 18505 - DNA, 307 bp, Zea mays
  Clone ID: LIB3088-002-F6_FLI
tacccccctgccatggttttattggtcctctgcttgtttctcgttttccttgggagtcagcttctctgttttatgtggtcgcacacggccttatttgtagtattacaccacagaagctggctgacccaaaaaccgacattttgggggcagcaacttaacgaaatgtttgcacgagagtttagagccctatggaacttgtttggataaatatgtttattacgttgtagtacttagctaggaacctgcttatgtaagatgatctttctttaagtaagattaagaactgtcagcggcctagttctgctgc

SEQ ID NO: 18506 - DNA, 426 bp, Zea mays
  Clone ID: LIB3088-003-A3_FLI
tgctgaagcaggtgcaccccgacatcggcatatcctccaaggccatgtccatcatgaactccttcatcaacgacatctttgagaagctggccggcgaggccgccaagctggcgcggtacaacaagaagcccaccatcacgtcccgcgagatccagacctccgtgcgcctagtcctccccggagagctcgccaagcacgccgtctccgagggaaccaaggccgtcaccaagttcaccagcaactgagcgcgctgcgggatccgcggatctgttagaagggttctttgctgtgtcctttccccagtcccccaccctacccgcctagtagctagcttgcctgctctataaatccggcgcgccggattgtaatggtcctcttagatttgatgtccctgttgtggaatatagttgtatctctccgcttgct

SEQ ID NO: 18507 - DNA, 402 bp, Zea mays
  Clone ID: LIB3088-003-A9_FLI
gcagtactatgaaatttctgccaagagcaactacaactttgagaaacctttcctgtacctcgcaaggaagctggctggtgatccgaaccttcactttgttgaagctgttgctcttaagcctccggaagttaccatcgacatggctatgcagcagcagcatgaagctgagcttgctgcagcagctgcacaacctcttcctgatgacgatgatgatctgattgagtagaaaggatcatgagtcttgaacttgagcaggagttgtgccttgcgtgttttaagttgttctagggtgaactcttgagttctcattgtctggatcatctttttctccttggatgtgttgcatcttttgagtgtggaaatggatggtactcctcgccatgaatttgctggctactttat

SEQ ID NO: 18508 - DNA, 144 bp, Zea mays
  Clone ID: LIB3088-003-C11_FLI
gttaacttacagcagaatcaccatggagaggaaactcttggaatttataatgctttgtagtgtcttgttgactactttctaagaaactggtacgtaccactggcataatactttcaatgggaataaggaatgatgtgttgtgct

SEQ ID NO: 18509 - DNA, 494 bp, Zea mays
  Clone ID: LIB3088-003-D9_FLI
gttcaaacacattccacacaaggacctaataagctagaaatgtgcaaacatcttaactttgctaggagaaggaaacatagcaatgagaaaattcaagctttatgagattagtggttagcggagactttgagcttgtttgttgctgctctttggtggcattgtcacacggcgcttcaacggatccatatgctgctgaagaatccggttgtgtagtggaaaattgtcgccgtcgggaacctcatctccttgccggcagctggattgggaagtttgctgggcatcttgcacccgagttagcagtagaagttgtcgaggagaccgcgctcgccggcaatgtccaagacgttgagaaacggaaagcagaataaaagtcgtggtaggaaaatgtgtacgtaattggcttcagagatctgcaccttgagcacatcctccttgctcatcttcgcctcgacttgaccacgcacctcagacagcgctctttgtcagccaaaatc

SEQ ID NO: 18510 - DNA, 696 bp, Zea mays
  Clone ID: LIB3088-004-A6_FLI
ccactgtctaccgcacagtcacctggtgcagctgcaaggaagagattggatactgttaatggtgctactaccaactcaaaggctaaaagtgtttctcagaaggcaatgggggcatcttcagccaggaaggagaaacataaggacccatcaatgcagattaagggaactgagtgcataaacaccaccacgtctatagaagagcacttgcacaaggagctccccgacccagttgatctgaaatccatggagatgactgtacctgatcagcatgagccatctttcaatgaaccagaacatgtactcaaagacgatgagaaatccgagggtcatttctctgaagagaaagtagatgcaggagctaatgagattcataatggagggcaagatgacaatggtggtgtcaagactatatatgaatgtgggattgttgagaagaaggctgaccggagtgtggataagacagtgccgaagactgaagtggctcaggtatggaggaaggatgatccaaagggcaatgacgtgattgaggaaaccaaaagcaagctcctgctggagaggaagagccgggtgaaggccttggtgggggcctttgaaactgtattgtcgttcaaggagtagtcctcaatcttgtcttctggtctcttgtgcccatctcaatattgagtaatatatatgatgacttccttggctcgttgt

SEQ ID NO: 18511 - DNA, 696 bp, Zea mays
  Clone ID: LIB3088-004-E10_FLI
cgcaacttcacagcgtatcatcgttttccatcgctcctactcctatcatccagaaaatctgagcggtattgatggcgcccaaggcggagaagaagccggcggcgaagaaggtggcggaggaggagccctcggagaaggcggctccggcggagaaggcccccgcggggaagaagcccaaggcggagaagcggctacctgcgggcaagtccgccggcaaggagggcggcgacaagaagggtaggaagaaggcgaagaagagcgtggagacctacaagatctacatcttcaaggtcctgaagcaggtgcaccccgacatcggcatctcctccaaggccatgtccatcatgaactccttcatcaacgacatcttcgagaagctcgccgcggaggccgccaagctcgcccggtacaacaagaagcccaccatcacctcccgcgagatccagacctccgtccgcctcgtcctccccggcgagctcgccaagcacgccgtctcggagggtaccaaggccgtcaccaagttcacctcgtcttagcccccttgtagtaggcgtcgttgttgtctgcttctcaagcaagcactgtgatgtgccgcttctcatggtagtagtggtggttggctggtgtgtgtaagtggtgcagtggcttttgcctgtgttatgaatttagtcatggtggtaatgcattgctatggtt

SEQ ID NO: 18512 - DNA, 405 bp, Zea mays
  Clone ID: LIB3088-004-F5_FLI
gatttggccaagaagtaccagtgcagcccagctcagctagctctagcctgggttctgcatcaaggggatgatgtggttcctataccagggacaacaaaaacgaagaacctagatgccaacgttgactccttgaaggtgaagctcacagctgaggacctgaaggaaattggcagccagatacgtgcagaagatgtggctggtggaagacaatacaattcctatgcacatacctcctggaagtatgcagatacaccaaaaaagtgaagctctggaaaccttgtagcaatcacaggcgtatgcaaatgttgaactatttccctgcatttgagccggaatcgtacgatgatgcatcttgtgaacatgcggcactaataaatcgagacgaagaataatgtattttccatc

SEQ ID NO: 18513 - DNA, 605 bp, Zea mays
  Clone ID: LIB3088-004-G4_FLI
ggaaaccctagccgccatatctcacgatccactcgagcaccaagccgagggaaggtgaggagcgatggcgcgcggcgtggtgtcggcgaagggcggcgcggtcgcgggcaagaagaaggggtcggtttccttcacgatcgactgcaccaagccagtggaggacaagatcatggaggtcgcctcgctcgagaagttcctgcaggagcgcatcaaggtcgccggcggcaaggctggcaacctcggcgactccgtcaccatctctcgcgagaagaccaaggtcaccgtcacctctgacggacccttctccaagaggtacctgaagtacttgaccaagaagtacttgaagaagcacaacgtgcgggattggctacgcgtggttgctgccaacaaggaccgaaacgtctatgagctccgctacttcaacattgctgagaacgagggcgaggaagaagattagattgcactacgcttatattttagtattgaactcgttgcattttgatacctgtacccgtagtttcgcaaatgtcccatgttatggtgtggtatggttaatttgaagaatccttatgtactgaatctctgcaaaaagctatgttgtggac

SEQ ID NO: 18514 - DNA, 354 bp, Zea mays
  Clone ID: LIB3088-005-C12_FLI
aatgctacttgatcagctctttgacctcaaaagcaaggaacaagaattgctggatctcaataaagacctaaggaagcagctgcaagaaacaaggccagagaacgcgctccgtgtctcctgggaggaaggtgggcacagtggcgcaagtgggaatgttcttgatccttatcaggggctccttcagcacctggacaacgatccttccctgcagttcgggtaccatcatcaagcctacatggatcagctgaacaacgaggacctggtggacccgaatgagcatggtcgatctggatggatatgaaatgctctgatgacccaaaataaagttgatgcacagcagggattcaccctgca

SEQ ID NO: 18515 - DNA, 580 bp, Zea mays
  Clone ID: LIB3088-006-D7_FLI
gggtgggaatccaacgatctacataacggagaacggaatggaccagcctggaaacttgacccgagaccagtacctgcgcgacgccacgagggtgcggttctacaggagctacatcggccagctgaagaaggccatagaccagggagcgaacgtggctggctacttcgcctggtctctcctcgacaacttcgagtggctggcagggtactcgtccaagttcggcatcgtctacgtggacttcaacacgctcgaacgccacccgaaggcgtcggcctactggttcagggacatgcttcagaagcattgagatctccagagccgagcctgagcacggaaggtaccattttgttcagcttcgcctagtgtttgggatggcccaatggttcaaatccggctcagtgcctggctaccaaaatgggaacaaaggacagctaccccgatcaattgtgatgttgtgtgtttgtgggtatgttctctctggagtttgagctgtggttattttatcgtgttggttgatcgtgtttgaaatgcttaattcaggactgtgacatctcgagttgttttaactaaatcttataag

SEQ ID NO: 18516 - DNA, 720 bp, Zea mays
  Clone ID: LIB3088-007-B4_FLI
atttcccccaaaacttctcctcttgaggaaggcagcccgagcgagcgcgctgcaatggcggactcgtcggcgccgacgagagtgatgatggcggtgaacgagtcgtcgctcaaggggtacccgcacccctccatcagctgtcgcaccgccttcgactggacgctctccaagctcgtccgctccaaccctgggggcttccacttcctcttcgtccacgttcatgtccccgacgaggacggatttgatgacatggatagcatctatgcttcgccggaggactttcaccaaatgaagcagagagacaagataagagggcttcatttgctcgagtactttgtaaaccaatgccatcagttagggataaaatgcgaggcatggatcagacatggagatccaaaggaggttatctgcagcgaagtgaagagagtccagcctgaccttctagttgtgggaagtaggggtcttgggccatttcagagggttttcgtgggcacggtgagcgagttctgcgttaagcatgccgaatgccccgtcatcaccataaaacggaacgctaccgaagctcctcaggaccctgtcgacgattgatgcttccaagccaagccatgccatgtcactggagaatgagatgttcttcttcactgcttttataatgggttgatgtacaaaatacgatatggaagtggtgcctggaactagttcgcggagggttccaactct

SEQ ID NO: 18517 - DNA, 780 bp, Zea mays
  Clone ID: LIB3088-007-C10_FLI
caggactcgcttcaagctcctcatctcgcgcagggggggtcgcctgagatcacagagacaatggtgaaggcagttgctgtcctcgccggcactgatgtcaagggcaccatcttcttttcacaggaaggggatggtccgaccaccgtgactggaagtatctctggcctcaagccaggcctccatgggttccatgtgcacgcgcttggcgacaccaccaacggctgcatgtcgactgggccacacttcaatcctgttggcaaggagcatggtgcaccggaagatgaggaccgccatgccggtgatctggggaatgtgacagcgggagaagatggtgttgttaatgtcaatattactgacagccagatacctcttgctggaccccactcgatcattggccgagctgttgttgtccatgctgatccggatgaccttggcaaaggtggacatgagcttagcaagagcaccggaaatgctggcggacgtgttgcctgtggtatcattgggctccaaggctaaagcggttaacctccgaggcaaacaccatagaagatcgaagcgagcacctcaggatgttgctgttccatttcccctgtattggcaacacaatttgagtacaccaaataagcgcctgatccatgatcaggaagcactattcatgccattttgtatatgaacaatgttgcgcacctgcttaagtgtctgttccaacaaatgcttaagaagacactactggaggtgtactatcgagtactaccagcagcatctgaacttgccgaaacc

SEQ ID NO: 18518 - DNA, 586 bp, Zea mays
  Clone ID: LIB3088-007-E5_FLI
gctttgcggccggtctctgctttcagattcatttctaaccagggttcctccagcccagccgccgccactgttgaggagctcacatcgcctcgacacaacacggtctctggtttcaacgtataataactgggctgcgagcactatatggatgatggcttcacgaggcaccagtgccgtgctttcaagggctgctcggatgaggcaaaaactgcagtctgccttggaggccagtgccctagatattgaagacgtttcttaccaacatgccgggcatgcagccgtcaaggacaatgcgaacgagacgcacttcaacatcaaggttgtttcaccaaaatttgaggggcagaaccttgtgaagcgtcacaggatggtgtatgatcttctgagggatgagcttagctcaggcctccatgctgtctccattgttgcgaaaaccccgaaagagttagggtcttgattgtataacaatgttgaataagcactgtcctatgtttcgaaataagtctgtcgtagcagccatgacactgattgccaaaacaatgtcaccggcatgctcttcttattaagatctggtactcttcttatt

SEQ ID NO: 18519 - DNA, 486 bp, Zea mays
  Clone ID: LIB3088-010-A4_FLI
ttctgaagtcgagtacatgcagagaagggaaatggagttgcagaatgacaacttgtacttaaggagccgggttgatgagaatgaaagggcacaacagacagcgaacatgatgggggcaccatcgacaagtgagtatcagcagcacggttttactccttatgatccaataaggagcttcctgcagttcaacatcgtgcagcagcctcagttctattctcagcaggaggaccggaaagacttcaacgaccaaggtggaagataaatattggacctctcaagcttcagtacttatccgtgatgatgcatgactgccagtgagaaactgagctacattactgtggaattatatgtaaagactagtactactgcttcatatatgtgcatgtgcgcacacgcgcacgtagtatgcacaatttcatcccactattatggcttggcaccaactatgtctccttaattatcataggagaaaaataagtcacgcac

SEQ ID NO: 18520 - DNA, 222 bp, Zea mays
  Clone ID: LIB3088-010-B1_FLI
catcccatatgatgtggtcaatgatctcaagggtggatactaggttgtttggtccatctacctgcagtacccagttctacatctgtgttactctagtgcgtgcaactttgctcactctgagcagtagtatgaacctgttgtgtgttcctgttgaaagatttcccattttaggtgcaaacctgagtttctccgaacgcgttataccatgaccttgcttctgag

SEQ ID NO: 18521 - DNA, 344 bp, Zea mays
  Clone ID: LIB3088-010-C2_FLI
ccgacttccttggtgacagcaggtcgagcatcttcgacgccaaggccgggatcgctctgaacgaccacttcgtcaagctcgtctcgtggtacgacaacgagtggggctacagcaaccgcgtcgtcgacctgatccgccacatgttcaagacccagtaggggtttttcccccctgcttctcatggatggttgctgcttgtgtatgccgagaataaatgtggatggcgcgtgcctctgggtcgccaggttcatgctgagtctggacatgttttgcacttttgtttcccttcctgctaccatctgtgacagatccgctcgctaatatgggacctgagattagctttt

SEQ ID NO: 18522 - DNA, 538 bp, Zea mays
  Clone ID: LIB3088-010-D8_FLI
catctctcgctgcacgactcaggtcttccccgggggctggacggcggtcctagtctcgctcgacaacgttggtgtctggaatctgcgcgccgaaaggctggatgactggtacagagggcaggaggtctatgtgaaggttgccgatccactgggctacaacatcaccgagatggtcgtcccggacaatgccctctactgtggtctactgaaggagaggcaaaagccacaggttcatgagtcgaacagcaagtcgtcggcgcaaggcgatgctggatggagcaaccgactcctcgcaaccatgatcctggtcgtcgcagctgtgatcttcagttgatcctctctctttttttttctccaaagttttttggtagatttttgcctagaggaaatagaacattgaaacgtctagcctacaagttcagcatagggtagttcgtggagataggatctggccgagctgtttgatagtgtagggcagcttggaatgatgtctgtggagaaggcaagaaacgtgatactggaatgagatttatcagtt

SEQ ID NO: 18523 - DNA, 632 bp, Zea mays
  Clone ID: LIB3088-010-E11_FLI
cttgcaaggtttgaagcacctttctttagaacacatgctaattattttttttgtttcattggtgtatgaaactaaatcttgatattcatgggaagcttcgagttctttttccttttggcttactgcgcaagaagggtaacgagaggacggcggcgatggcgaagaggctgctcccgtctctgaaccgggtgctggtcgagaagctggtgcagcccaagaagaccgccggcggcatcctcctcccggaaacatccaagcagctgaatgctgctaaagtggtggctgttggccctggtgagcgcgacaaggcaggcaatctgatcccagttgctctgaaggaaggtgacactgttctcctgccagagtatggtggaactgaagttaagcttgcagctgataaagagtacctcctcttcagagagcacgacattttgggcacacttgtggactgattcagagcatcagcaagcctgtcactagtcgttggttctagacttctagtgtgagatgcgtagtatcagattctgggatcaaaatccctgagaaagaactctgaactgtcgtgatgtcatagattttgtgatgaaacatcataattgcctgcttcttgttgcaagcgaacttttgcgttt

SEQ ID NO: 18524 - DNA, 509 bp, Zea mays
  Clone ID: LIB3088-011-C4_FLI
ggaaggtgaaacaactacaacggaaactacagagaaagatgctgttgcgaaagactcctcccctgtatgttccgcatcaggtatcacaaggaattccgataatatgaaacctccaaagctggagtccaagtgcaactgtataatcatgtaagtaacttcacgtccaaggtcgaaggagttgtgatattggttgggacgaaaatccatgctttctggtttcatgtcacatgcaacttgaagcatgcctacctgcttggttaacccgctgtcagcagcaacgatggagttcaaggcagtggatcttccactagattattttgcagaggtgcatttgctgtgttttttaggtgacagaatgcactgcgagctattcttttgtaaagtcttttcttctctgttgtggaaattttctgcttgtcgtgaggtctattgcggtttgtccaaagtgtgaaagactactagagttgtgctgatagcgtatttacttgcaatgcacgtggctacttgtg

SEQ ID NO: 18525 - DNA, 841 bp, Zea mays
  Clone ID: LIB3088-011-F5_FLI
ccagcaccagccttggactggtgtgtgcggtatgacatagccctcggcactgcccatgggttagcatatctacatgatgactgccgccctgcgatcattcatcgcgacatcaagccaagtaatatactgctggacaaggacatggtgccacatatttcagattttggcattgcaaagctcttggagcagccttctactgctcctcagaccactggtgtcgttggcaccattggatatatggccccagagttagcgttctccaccaagagcagcatggagtccgacgtgtacagctacggcgtggtgctgctggagctgctcacgaggagggcggcggtggatccctcgtttcccgacggcacggacatagtcagctgggcgtcgtccgccctgaacggcaccgacaaaatcgaggccgtctgcgacccggctctcatggaggaagtcttcggcacggtggagatggaggaggtgagtaaggtcctgtcagtggcgctgcggtgcgcggccagggaggcgagccaaaggccctccatgaccgccgtcgtgaaggagctgacggatgcacggcctgccactggcggcggccggtcgttgtccaagtcgaagcaggggaaaccaggatcgcaatccaacagcagcgcctaccggcagtaggatctctgactctgccgagctgtttggggacaccaactttactcaacttgtagtctctactctataggtaccctcgcttggtgtacatcctgattggttagttggcaaagattagttgtagttcaaatgaaacggagagatgctggactcgtgtcagtgcgagtgaagcaagctgcttgttctg

SEQ ID NO: 18526 - DNA, 358 bp, Zea mays
  Clone ID: LIB3088-011-G7_FLI
catcaccaagccggcgatccggaggctggctcggaggggcggcgtgaagcgcatctcggggctcatctacgaggagacccgcggcgtgctcaagatcttcctcgagaacgtcatacgcgacgccgtcacctacaccgagcacgcgcgccgcaagaccgtcaccgccatggatgtcgtctacgcgctcaagcgccagggccgcaccctctacggcttcggaggctaggcgcctcttcgtagctggggaatgcttagggtgatacgtctctgtcgctgtgggtcgtagtgttgctgcgttcctggatgtaatccatttttttttctgcaatgaagagatgctggcaagcatactacctgc

SEQ ID NO: 18527 - DNA, 555 bp, Zea mays
  Clone ID: LIB3088-012-A6_FLI
ggtttctgggatgcctgctgatgctcatggttctataggaaggtccacaaaccttgtaaatccatcacttttctcaccattgacgtcttcacagacaacaatggtgtgcactaattctgtagtagcaattgctccacctcaacatcctcagactgctcagcagccgcaaagtgctcccttgcttcagccttttctattacctacggcttcaccatctccaccatatgggactccattacttcaaccgtttccgccacctaatccatcgccatctcttgcgtctgcaccagtcttgagtccaacactgtctagagacaaagtccgagatgcattactgagacttgtggagaacgatgaattcatagatttagtctacggcgagatcatgaacagacagtaatggattttcaaggtacagtcctctccatcaggctagcttgtgcttggactctgtcattatctgttgtctaggctacttcaagttatcttgtaaattcattgatgaaatccttcggtttgtggagcttgtgctattaatgtacttttgatatttac

SEQ ID NO: 18528 - DNA, 617 bp, Zea mays
  Clone ID: LIB3088-013-C6_FLI
cacggtgtactacatggctccgctggccacgctgatcctgtcggtgccggccgtggcgctggagggcggcgccgtgctggggtggctgcggacgcacgagtccgtgggaccggcgctggcggtcgtcgtcacctccggggtgctggccttctgcctcaacttctccatcttctacgtcatccactccacgacggcagtcaccttcaacgtggccggcaacctcaaggtggccgtggcggtgctggcgtcctggatggtgttccggaaccccatctccgccatgaacgcactcggctgcggcgtcacgctcgtcggatgcaccttctacggctacgtcaggcaccgactctcgcagaaccaggcgcccagagcccgcttggagatgcagatgctgccgctcaccgtcgacaagcaaggcgacaagatataaaaagtcttttggaataaaccatctgattctttctgatccacctagcctaaccgccgatcgagaatgcatccaccatcagatatgacaggaaattattttttgttgccagccagattttgataatgagtcagttcagttgttgcttaaagagaaatgtcatcaggtctataaagtcttttggaatgat

SEQ ID NO: 18529 - DNA, 525 bp, Zea mays
  Clone ID: LIB3088-013-E1_FLI
tgaagcagcagcctctaacagtgaagcaaataagtatattatttcccaaataaaggaggcacaggaagtcaagcgtgcagccataaatgacatggcaactatggagaagcaaggaggtttttggaccaagcctctgatggtagagaaaggggcagcatattggaagttagatggttactgtgataactcagcaatattgcttcaagagtatggtggcgatgaattaatggcaaataaagacaagtggtttatgtttactgaagacgaggagaaaataattgaaaaacatttagccactaggtaatgagtttgtcttgccacgtttggatgtgtttctacctttccaatgatggtgaacttctcttttgttgcttgtatatcatgaaatttatctgttggaaaccctatctgtattttcttctgttgttgatcctccaactattgctatcaaaaaccattttatgtagtagcatcctaacaaatgtggcatacaattcattccagtatacctgaactattgtgatc

SEQ ID NO: 18530 - DNA, 967 bp, Zea mays
  Clone ID: LIB3088-013-F1_FLI
ctggccgcctggacgggcgtcgctggaccgaccggactcgccaaagacggccgtcggactcgcttcaacatcatctcagggacttcgatgtcatgccctcacatcagcggggtggcggcgctgatgaaggcggcacacccagactggagcccagccgccatcaagtcggcgctgatgaccaccgcctacaccgtggacaacacgaactcgtcgctccgggacgcggcggacggctccgtcgccaacgcgttctcgtacggcgccggccacgtggacccgcagagggcgctttcgccgggcctcgtgtacgacatctcgacgcacgactacgccgccttcctctgctccctcaactacagcgccccgcacgtccaagtgatcaccaaggcgtccaacgtctcgtgcggccccccgaacaagtcccgccccggggacctcaactacccgtccttctcggtggtgttcggcgcccagaagcggaagacgaagccggcggcggccctgcgtttcaggagggagctgaccaacgtcggccccgcggcgtcggtctacgacgtgaaggtggtcggccccgagtccgtcgccgtcacggtgacgccggcgaggctcacgttcaggcaggccggccagaagctcaggtactatgtcacctttgcgtccagggctcggcaaggccacgcgaagccggacttcgggtggatttcctgggtcaacgatgagcacgtcgtccgcagccccgtcgcgtatacgtggaagatgtgatgtgaggttccctgcctgcctaaagtctagctcgatgacgaaggaataggataggttggtgtagtttgctcaccgcttcgcaaagagaatcggcgtgaagctctctatctctctctctcggctgcagacctgtacttgtttcctatctttcttttcggacatcaagtaaccctgaatctgaatgacgaatccgccgtttggtgtt

SEQ ID NO: 18531 - DNA, 685 bp, Zea mays
  Clone ID: LIB3088-013-F4_FLI
ctgttggagttacaaagagagcagtaccggatggagcaggtctgaggttcctgtgctccttgtagaaagtgattcggttataggtggtgctcgacagacagtagtatcagtggataccaagtcatcgacgcgttggacgcttggaatcaacaaagatggaatcgatgacttcacagttcaagtggattcggagaagatagtcctacctggtgataagagcgagatagatgggtggcatacaatccagtttgcagggggcaagaactcgccgacgaagttccagctgacgctatactggtcgtctagcaaaccatctgagagagaagctaaacaagcagcggacgctcctttgctggtgaaactaagaacagatgtgaatagagtcacaccgcaggtggcaagggtggtggagaagctgccacggtggtgcacgcccttcggcaagtccacctctccgtacacgctagctttcttgacggccctccgtgtcgatatttagtcagtcagcagcatttgtttcccatacataggcgtccagtccagcacctttcgttttgaactgtattttagtttgatagtagcaagttataggcccatagaattgtacacaaaagctgccaagggcggtctggtgtaaacgtgctttgcacttgctctaatttgtcctgtatcaaagtttcagatt

SEQ ID NO: 18532 - DNA, 426 bp, Zea mays
  Clone ID: LIB3088-014-B3_FLI
caattcgactttcctggggccgcagccctacaagtaaacagtctaggggtgattatggccaccggcgcaacggcaatggcatgtactacgggacgccattctacggtggatatgggtacgcctcaccggtcgcccacccaaacatgtatgccgcggcctacggagcctacccgtactatggaaaccagcagctagtgagctgatgtggcgatgctctctgctcagtttcctccctcggatcggagggaggaaaccaagtttttggtcctgtaagatagtagctacaatgagatattataggcggccatacaaatgggcgagagagacgagaagggtatgtgatgataatgctacctgcagacttgtgctgctatagcagaacataaaagagcttgtagtagacaataaaaacctacttttgtcttg

SEQ ID NO: 18533 - DNA, 565 bp, Zea mays
  Clone ID: LIB3088-014-C8_FLI
cattcttctcttgcagacatgggcactctatgaggaagggcgtttagaagacatcatagatattgacatcggcgatgacctggatgttgatgaggcatgcaggttcatgaagattggcctgctatgcacacaagatgcaatggcgcgtcgtcccagcatgaccaatgtcgttcggatgctctcaggggagaagagaatcaacgtagaccagatcactaggcctgccatgatcactgattttgctgatctcaagatcagcaacaaggagcaaaaaccaggcgacacacgctctcccacgacaactcctacgacgaaatcattcaccaccaccgaaccattctcgtcgtcagagacgcccacgcagtcatccatgtgaaagtgtgggcgtaagaagcagtttttttttgttgttttcagtttgtatagtgtgtgaatgtggtagatgggccaggttacatgaattttttgaagagtttattgtttgttttgttttgaggaaacatctcataggtctcttattgcatctttgttgctgtaaatatttcaaaatgaagatggtcaagat

SEQ ID NO: 18534 - DNA, 526 bp, Zea mays
  Clone ID: LIB3088-014-C9_FLI
gggataatgaacgggaggtggtggggggagggggcaccgggacgtgtatcccttggacatgtgctagttgctacaaatttgtcgaactaattcacatcagcattttaaatcaatacatatcctctgtctctacctcatcttcagactcatcctcattcctctgaacgccgactgtctgaccctacaactctggaacatgctccaacaaagctctacgcctactactcgagctggaactagtgcccttaaacactaagtcctcctttctcataacataggcgctctcttcgcaagtcccttagtgaacttctagattttcagagagacacttagaattttgtggactaatatgactgttccaccaccatgagcgggattttcctgagtgcacctttctcttcatcttcaccaaaatataagaaaatctcctctgatatgcagagctttctcttcctgaaaggaacatactattttaagaagacacctgaaaatagataaaatgtgcaatatgattttggagaaaatg

SEQ ID NO: 18535 - DNA, 590 bp, Zea mays
  Clone ID: LIB3088-014-E1_FLI
gcggccgctgtgctcggcggggacaaccacctcaccggactggccggcaacggcaacggctggggctcccccgccacgatgcccgacgacggcgacgacgagggcttcggtggcaagcggaagggcgccggcatccgggtgctcggcgacctgtggaagaggaaggggagcaagtgaaggcctgccgcctgccgcggaatgggacccgtgtcccaaatttcgcaacggtgagctcgctcagcccgcccgcttgccagcttgaacaactccatcccttgcactagcttagctccatcgttttacagcgttttggttcggagtctacttatgtttgtatgacgatgatgacgatgatgagacgatgctcgtgaggttaaactatgtctgtaacgcttgatcccgctgctgcctgctacctccgcgtaaggagcaaccaagatggcttggtgcttttactgcattgcggcggtgctgttgacgagggagtagatggtgtttattttcatggtggaattgaggaatgcttgattgcagcatcaagaaatgcctcttgtgactctaacgaatcctaagatatcattgcagcgcgt

SEQ ID NO: 18536 - DNA, 412 bp, Zea mays
  Clone ID: LIB3088-019-C3_FLI
gagcgcatacatgcccgcggacctgttggagttgatggacttctaactactcgctgcattttgcgcggtagtggacaagtggtgaatggtgacaagggagtggtttacacccacaaggatcttcctttgcaatgaggcaaataacctccgttgtggtcgtaacgaatggctggactccccttttaagtacccttttcttttattccatgctacaaagtttggtgtcgtaacaagcagaatgcctatttagtaggcattgatgtaatcagaccattttgtcgtggtgttccttgtcgtataaaacatccgagacatctgtattagaggcgcggtagctagttgatacgcgattgttctggatgaaatttggatctgttccaatgcaatgataatgcatgtgtgatgaggtcct

SEQ ID NO: 18537 - DNA, 754 bp, Zea mays
  Clone ID: LIB3088-020-F12_FLI
gcaaacatcgagtacagtcggctaggtaatctggtggtacgacgactgacgacgacatggcggccaccagcagcaagtcgtcgtcgtcctcgagctcggcgcagcgggcagcagctgccgccctgctcgtggcggtgtccgtcctggtggtgggcgcggcggcggtgtgcgacatgagcaacgagcagttcatgtcgtgccagcccgcggcggccaagacgacggacccgccggccgcgccgtcgcaggcgtgctgcgacgcgctggcgggggcggacctcaagtgcctgtgcggctacaagaactcgccgtggatgggcgtctacaacatcgaccccaagcgcgccatggagcttccggccaagtgcggcctcgccacgccgcccgactgctagcagtgtgctagccaagccaagccaagcaggaaggcccccggcattgctagctgtacgtgtctgtgtgtgcatctgcagcagggtgcaggcaggggcccgtacgtacgtgtctctttctctctctcatcttgtcaccgtacctatctagagtgtgtgtgttcgtactaattaaaatgttcttgtcgtcgtcgtctgtgcatgcatgtaccatgtcgtcgtgcatgtctattatgtgtgtgtcgtcgtgtcgatcggtacgtatagatgcctgttgttagcatgtgtgtcattacctagtcgtgtgtagtgtatgtatgtgcttgccgggcaaaagttgcatctagctaaacagtagtatt

SEQ ID NO: 18538 - DNA, 222 bp, Zea mays
  Clone ID: LIB3088-020-H9_FLI
gcgcttgccgccatgcgatccgtctggcactgctcacgttgtttgacattgttcagaatcgccgtgtgcactgtagtttcttatccgcagtagcttttactattcgaaataatgtagcatagcaatgcaagcgctgcttcttcctaagtccgtgcagcgtagcccgcgtgttcgagctagtttgtgttaagttgaatgagttaatggatgctagttgtagtc

SEQ ID NO: 18539 - DNA, 900 bp, Zea mays
  Clone ID: LIB3088-021-B6_FLI
cagaagagcggcggcgcggacggacaaggagcaggcggaagaggagttgtgccaaggcacaatgggtatctcgcgtgactcgatgcacaagcgccgagccaccggtggaaagcagaaggcctggaggaagaagcgaaagtatgagcttggtcgccagccagccaacaccaagttgtcaagcaataagacagttaggagggtccgtgttcgtggaggtaatgtgaaatggagggctcttcgccttgatactggtaactactcatggggaagtgaagctgttacccgcaagacccgtatcctcgacgtggtctacaatgcatcaaacaatgagcttgtgaggacacaaacccttgtgaagagtgccattgtgcaagttgatgctgccccattcaagcagtggtacctcactcactatggagttgacattggtaggaagaagaaaacccctgctgcaaagaaggataatgctgagggacaagaggttgaggcagcagctgaggaaacgaaaaagagcaaccatgtcacgaggaagcttgagaagcgcaaggagggacgtacccttgacccacacattgaggagcaatttggcagtggacggttgctggcatgcatttcttcccgccctggacagtgtggccgtgctgatgggtacatccttgagggtaaagagcttgagttctacatgaagaagctacagaggaagaagggcaagagcgctgtagcttagagcattctcatggattgtcttgcaccgaaatgtgtgtcctgatgagtacactttttttggttagtcgtctcaagttcagagcgttatgccatgttttcagacctgattagtacactcttttctaaaagcgattgagctctagtccaatgtattgataatatctgctgttgtcc

SEQ ID NO: 18540 - DNA, 1120 bp, Zea mays
  Clone ID: LIB3088-021-C10_FLI
gtgtttgtttgcagctgcagctggatgaaaatggcagccgaaaatggcagccaaagcaatctcaagcgaatcaaaccgccagacttcgcagtcctcctccactaccagagcatgcgcgttgccgcgacccgagccgccgccgccgctcaccctccgagcgccttcctgctcctcctcgtactcctctgttgcgcgtccctcgcgatcggaggagcagccatggccggccacgtcctcggcggcgtgaaggagaacccagccgcggccaacagcgccgagtccgacgggctcggccgcttcgccgtcgacgagcacaacaggcgcgagaacgcgctgctggagttcgtgcgcgtggtggaggccaaggagcaggtggtggccggcacgatgcaccacctcacgctcgaggccgtcgaggccgggaggaagaagctctacgaggcaaaggtctgggtcaagccatggctcgacttcaaggagctccaggaattcagccacaagggggacgccaccgccttcaccaacgccgacctcggcgccaaggaaggtggacatgagcctggttggcgtgaggttccagtagaggatcctgtggtcaaagatgctgcacaccatgctgtgaaatcgatccaagagaggtccaactccctgtttccctacgaacttctcgagatccttcgtgcccatgcacaggttgtggaagactttgcaaaatttgacattctgatgaaactgaagagaggcagcaaggaggagaagatcaaagctgaggtccataagagcctggaaggggcctttgtgctaaaccagcatcagccggcggagcatgctgagtcgagcagccagtgaactgacgtaactgtgtgagctgtagtagtaacgtacttcgtgttacgtagaagaataaggagaaaacgaccaatccggttttatctggatgtcatgtatggtcgacggtcgttgctggcttggcttccgaacgcagcaggcatactggtgctggaagacggtacctgctgtcgcacttgccgttataataggcattggaacttgtcgatttcgggagctgatctgtttgtaccgtattgtttatttataatatgatggatcgtatgttgat

SEQ ID NO: 18541 - DNA, 356 bp, Zea mays
  Clone ID: LIB3088-022-A12_FLI
caactctgaacctgaatgcaatgaaccagtctctgaacccatggcatgtgtcgttctcctatgcccgggctctgcagaactcggtgctgaagacatggcaagggcgccctgagaacgtggaggcagcgcagaaggccctgctggtgcgcgcaaaggccaactcgctggcccagctcggtcgctacactggtgagggcgagagcgatgatgccaagaaaggcatgttccagaagggctacacctactaatgtgccagcgagatgtttccatgacataataataattgtagcgttttggtgttattattattattattttggtacgctctggtgaataataaccaaattgttggtgcc

SEQ ID NO: 18542 - DNA, 732 bp, Zea mays
  Clone ID: LIB3088-023-E2_FLI
aaggaccttcggcgcccgttcaggatccacatcttcccgagcgagttcttggttgacctcttcctcttcggaccacctccaaggctcttggtgtagcttgccactctcaccaatcaagttttcatgtctgatctcgacattcagatcccaactgccttcgatcccttcgctgaggccaatgctggggactctggtgcggcagcagggtcaaaggactacgtacacgtgcgcatccagcagcgtaatggtcgcaagagcctgaccaccgtccagggattgaagaaggagttcagctacagcaagatcctcaaagatctcaagaaagagttctgctgcaatggtacagtggtccaggacccagaacttggacaggtcattcagctccagggtgatcagaggaagaacgtctcgaatttcctcgtccaggccggcattgtgaagaaggagcacatcaagattcatggtttctgagcaaccgccgggtccatagcaaaccaaccctgcatgcagggccagcttattatatataatatctgaggtggagcatatctatctggctgtgtactgcaagcaggcctagtacgccgcctgcgcgttcctcctattacacatataggcccctccctgcgtgtatgcttgttaccgtcgtgtcgaaccttgtactacgaggctccatcgaacatcgatggcttgcttctttatcagaacatgtttgaataaacgctatttggt

SEQ ID NO: 18543 - DNA, 716 bp, Zea mays
  Clone ID: LIB3088-024-E11_FLI
ctctctgccttccctacctcagatcctccctcagattgccatggcggaccagctcaccgacgaccagatcgccgagttcaaggaagcattcagcctcttcgacaaggacggcgacggctgcatcaccaccaaggaacttggaactgtgatgcgctcgttggggcagaaccctactgaggctgagcttcaggacatgatcaacgaggttgatgctgatggcaatggaaccatcgacttccctgagtttctcaacctgatggcacgcaagatgaaggacaccgactctgaggaggagctcaaggaggccttccgcgtgttcgacaaggaccagaacggcttcatctctgctgctgagcttcgacatgtcatgaccaacctaggtgagaagctgacggacgaggaggtggatgagatgattcgtgaagccgacgtggacggtgatggccagatcaactacgaggagttcgtgaaggtgatgatggccaagtgagatgatgtgcctgttttgaagctagttcctctcttgatggtagtagctagtctagtgttggagactgactgcatttggtccgccttgttcctctcgctgcatcaatggacatatccgtttgttttctcccaagggattttaccatgtcggtaatttcgttcaaatttgtttatggttgtattaacatttgtgttatcttggtacaatgatcatgcctttcccttct

SEQ ID NO: 18544 - DNA, 498 bp, Zea mays
  Clone ID: LIB3088-024-E4_FLI
cacataacaagatggatttcctgcctaagaaagagttcgatacgtacttctgcgcgtatgagccctacgagcagtgtccaagatcagattcaagagctacttacagttcaagagacgatgacttgtggagcaagaattcacgctttggctcgaatctactctgctggagagccccaaaacagtccatgtaatggaggaaagaacgagtgaactgggtggaacaaatcgattctgctacgagattttaccaattttgcccgaagctggagacatggacaccacctacggctgcggggacaaattttgaagggaagtctgggaggggtctgtgctattcttgttcttggtaggcagctgcggattgaggaactatttagtgacattttcttggagatgcaggtcctttataatgttagtgggcagttgtacagcgcgccagcgacgaaaccctgtgaattgtcctgttattctgaattttgtaggacgatttgatgctct

SEQ ID NO: 18545 - DNA, 1029 bp, Zea mays
  Clone ID: LIB3088-024-F3_FLI
ggggttcagaggattgccatctacgagtacatggaaagcggcaatctgcacaacctactgcacgacttgccactaggagttcaggcaaccgaagactggagtggcgacacatgggaggacaacaccggtggtgttgcaacaactgaaatcgtcacgccggaaggtactgcaacatggatattccggcacaaaatcgccctaggtgccgcaagggcgctggcattcctccaccatggctgtatcccgcagattgtccaccgggacgtgaaggcaagcagcatctacttcgactgcgcaatggagcctaggctgtccgatttcgggctgtcgatggtggcaggaaccagggccgatctgctacaccattccccgggctacgcgccgccggagttctccggctcggagaacgccgcggcgaccgccaagtccgacgtctacagcttcggcgtcgtgctgttcgagctggtcacaggcaagaaaccgctgggcgatgagtaccctggggcgcagaaggaggcgagcctggtgagctgggccagggcgatggtgaaggcgagcctcgcgccgagcatcatcgaccccaagatccgcgacacgggaccggagcggcagatggaggaggcgctcaggatcgcctacctgtgcaccgcggagctgccgtccaagaggcccgccatgcagcagatcgttggccttctcaaggacatcgagccgaaggtggaagaggagggggactgaagatctggaggagtgatcggctgcacctcgcagcgtgtcggatggtggtgagatttgtgtagtgacagcgtcggcaggcaggcaggctgtgactgtgagtgagctcgtggttgttttaccatcgtcgagctcactatgccatgccttgctctgcatatatctttttcatccttctttcttccctttttcccgcttatcgctcgctgattcttccagttgctgaagattattgcaatactgctctgttacattacacctgccccttactaaccatgccactgctcgagagat

SEQ ID NO: 18546 - DNA, 2032 bp, Zea mays
  Clone ID: LIB3088-024-F4_FLI
accccccgagctcagcttacctccactccagctccaatcacagtcgtgaccagagcgagagctagctagagggccgtgaaaatgccgatcaataggatcgccctggggagccaccaggaggtgtaccacccgggcgccctcaaggcggcgttcgctgagttcatctccaccctcatcttcgtcttcgccggccagggctccggcatggccttcagtgagtcctccgctgtccgctcctacccatgtgcatgcaacacaggctcgatcggccctcgtcctgccttcaacgagcagctagctagttagcctgccctgtacacggcacgccccaccaacagcttcacgacttcttctaagctgttctttaaacatcttgtttaaaacaggctctagtatctctttgagctcagcttggtctgtcatgctctagcactagcacaaggtcatggccggctcttttgagttcgacaccgaatgactgaaacgaaggggcagaaaaaaaaagatgtccttttcgtcctactagctagtaccaggctttcggtaggtattcctttaatacaaggccagtgtttaatagaagctcgcagaaatgtctttttgaaaaaaagtcaaaagcgaggaaagcgaagccttttaggtgaaatgattagtgcaaatgacagatttagacctgtcatcatgctagagggctgcagaggatgggaatccttggcagaatcagtagtaccttctattcgcgtattacctgtgatgccacaaggcccagttcccatgtgcagatgtgctgctgctccgctgctccccagaactactagcaaaaatgctccacctccactgacacgaacgcctcctgtgtcctggaaaaagaaacgtgctgtagtttttatattagtatcaggaaaagaagaatgtttacagatgggccagtaaaaaaaatatcagacagtgcttgatactagtagttcaaactgatccagttaagtagctaatgctagctaggattagtaaacaaataacagttacagactcaacagcggcagtaaaaagtcacagcagtaaagcagaaaggcagggaaaaagaaaagaaaccctgaacatgtttttatttgtacagtagttgtcagtatttgactgttactcgtacctgctggtgtccccctcgcgcaggcaagctgaccggcggcggcccgacgaccccggcgggcctgatcgcggcggcggtggcgcacgcgttcgcgctgttcgtggcggtgtcggtgggcgcgaacatctccggcgggcacgtgaacccggccgtgaccttcggcgccttcgtgggcggcaacatcaccctgttccgggggctcctgtactgggtggcgcagctgctggggtccaccgtggcgtgcttcctgctccgcttctcgacgggcgggcaggccacgggcaccttcgggctgacgggcgtgtcggtgtgggaggcgctggtgctggagatcgtgatgaccttcgggctggtgtacacggtgtacgccacggcggtggacccgaagaagggcagcctgggcaccatcgcccccattgccatcggcttcatcgtgggggccaacatcctggtgggcggcgccttcgacggcgcgtccatgaaccccgccgtgtccttcggccccgccctcgtcagctgggagtggggctaccagtgggtgtactgggtcgggcccctcatcggcggcggcctcgccggcgtcatctacgagctgctcttcatctcccacacccacgagcagctcccctccaccgactactaaaagccgaagccgaccgacccaggggtgcgcagctagcatccagctctctctccccgctcgccgtcgatcgtttagtttctctcgtgcacgtgcatgcatcgtcgactgtctcaggccgccgctgcgccggcgccgctcgcatcgtttgcttttccttggaccagcagtcgtcgccgtcaggctgagctgcttgtaaccgtgaatccggacccgtttgcttctgtaagatttgtgcatttgcc

SEQ ID NO: 18547 - DNA, 677 bp, Zea mays
  Clone ID: LIB3088-024-H4_FLI
gtccaattggctcaatcattgttggcaatttactggggatggttgctatttttctcattcagaggaataggcatgctttaattggccgggccattgatgatcatgacatgcaacgagtccttgaatttctgaagtctgatccggttgtagatgctctttatgattgcaaaagtgaggtgattgggccaggtttttttagattcaaggctgaaattgatttcaatggagttgttctggtacaaaattatttggaaaggactggacgtgggagttgggcaaaacagttccgggaagctgcaatgtccaaggatgatacggaattgctaagggtcatggccaactacggggaggatgtagttgaagctctgggatatgaagtggatcggctggagtctgagatccaaaagcttgtgcctgggattaaacatgttgacatcgaggcacacaatcccgaaggacttgctcttagagcagaagttttgtagattacctgtgtacattgcatttgattaacactgttgctggtcgctgccagtttgatttgggtccaccaccattcgataagattgtcttccattggcaatgtaagaatcagatggctgttgttgcgtagcgaggcggtatttttatatttggaagaagacgtggtcgcgcctgacatggaaggctttatgttc

SEQ ID NO: 18548 - DNA, 616 bp, Zea mays
  Clone ID: LIB3088-025-D5_FLI
tcttgatgctgcgaaggctgtgagattgatcaactagcgagagtccgaagtccttagttagcaactcaaaacttaaaagggcttcctgacgatgatgaatttgtcttttcttgtttcaccttgaaagcttctccgcagcaagggtagcttggcaggatgctgagccggttcggaagcgctttgctacgacttgtttctccgacgggcatgctgttcaacaaaaacttcaaccaggtcgagtacattgaggcaaaaacgacatgaagatgcactgtacccatcacaagaggtgggatgatgaagatgtagaaaatgaggcacagaaacctggaaagatgaatagatgcaaaaggattcgcaaaaaccatgggaagatcatttgggcaaatcacttccgtccagaaggggatcagagttggctacgatcacttccattcgtcctaggaactatatacctcacagattcatggaagctgagaactgtagtagtggctacgctttccaacacttggcagtttgcgcccgtagaatggagttaaactgagtgctaaattttgtttcttgttactaaccgttaagaatcacgagatggttaatgatggttgagcttgtccag

SEQ ID NO: 18549 - DNA, 454 bp, Zea mays
  Clone ID: LIB3088-026-G1_FLI
tagagatgcaagagccggtttccctgacctttgccctaaggtacatgaactcgttcaccaaggcgtcttcactgtccgaacaagtcacgatcagcctgtcgtccgagctaccagtggtggtcgagtacaagatcgctgagatgggttacattagattttacctggcgccaaagatcgaggacgatgaggagatgaagccatgattgccatcagtgctcgtgctgccgactttttctcgtcttccatccatggtttgcttattagctattatttgcacgcaaaggaaaaaaaagatgttatgttttatatcttaggccagactgctttagctacttatttgtgactgctgtgtgtccatggatttatagtgaatctagattagtgggcttgtgctttgtgcatgccgctgctgtctgcccctttttctattcagacatgaaattttttgttgggg

SEQ ID NO: 18550 - DNA, 280 bp, Zea mays
  Clone ID: LIB3088-029-B12_FLI
gggcggcaggtcaaagctatttggtgcggttgcaggggctgctgctccgccctgtccggcacgatagcgtggagagtgacggtgagccggcggtgggcaacagtcgcttggttggcaccgaagagctgcctagcatacttgtagacgatggccatcagctgccagatcgctgactgatttgatgacctgatggatccagcatacttgtcagcataatttaggatacttgtcagcttttcttttacagttttcttttgcaaatgaaatgcgagttttgttg

SEQ ID NO: 18551 - DNA, 1035 bp, Zea mays
  Clone ID: LIB3088-030-A1_FLI
tcaagcttgaggagcagagggttgagtgcattgctcagctagaagagaacaatatgttgagaagtaaactcaaagacattgctgatcagtataacattactcagcagaaatatgctcaccaattgaaagagaaaatgatggaacttgagcttgctgatctgagacttcaacaacatcaagagaaggctgctcacgaacatacccaaatgcaattgtatgccgagcaagtttctcagcttatgactactgagaagaacctgcggttgcaactagcttcggatggagaaagatttcagcactttcaggatgccctgtcaaaaagcaatgaagtctttgaaacttacaagcaggagatggaaaaaatgattttggtgataaaaaatcttaagaaggacaatgaatttctgaagggaaaatgtgagaactcagatattgctcttgtgaagctcattgaagagcgtgagctaacgaagaagcaaatagagaaattgaaaaaccaaaaggagacacttgagtccctgtgtcgatcactacaggcagaaaggaaacaaggccgctccgccagtattccagacgccccttctagccaagaagacatgccagcgacaagtcaagaatcttagcatatgtgcttgtcaatattccgttggtgtccgttacagcttgccgggacttctgaagcctgagaaatgaatatgttactgatatcttgttttgcttgagtttgcgggagttctggtcccatttaacacatactcagctgtcaacctactcaggcctttggggattgtaactataacctagaggtgcattcctctacaagtaactcggtattgttactaaccatataagctatccgttgttccttgttttttgttcgagacaaaggctgttgctgggaaatgttaccaatcatataagctctcagtcgttccttttcttgattttgtttgagacaggctgttgcattgtgggtgtgttggttcctctgatcttttgttcccgttttgtccctaattaatggcctttttgttc

SEQ ID NO: 18552 - DNA, 613 bp, Zea mays
  Clone ID: LIB3088-030-F11_FLI
ctatctgccgctccagcctttcgctagggtttatccaccggcggcgcgcgcgacggcggcaagatggtgcagcgtctgacctaccgcaagcggcacagctatgccacgaagtccaaccagacgcgggtcgtcaagacccctggtggcaagctcgtgtaccagtacaccaagaagagagccagcgggcccaagtgtcccgtgaccgggaagaagatccagggcattccccatctgaggccagctgagtacaaaaggtccaggttgtctaggaaccgcagaactgtgaaccgtccctatgggggagtactatctggaactgcagttagagaaaggatcatccgtgctttcctggttgaagagcagaagattgtcaagaaggtgttgaaattacagaagaccaaagacaagacttcctcaaaaaagtaactctgaaacagaagtgagccactcttctgcagcaagggaagacatttttgtcgacagttattatcaatggcttagtctcttctagctgttctattgttcttgtatcttgagcggacaactggtttctagggcaccttgaaatctgtctacgagatctctaagattatgagatgacatatgaccccct

SEQ ID NO: 18553 - DNA, 843 bp, Zea mays
  Clone ID: LIB3088-030-G3_FLI
gcgtgcgagaggcttgaccaagcagcagcagcagcagcagcgatggcgcctctgaagctgtacgggatgccgctgtcccccaacgtggtgcgcgtggccaccgtgctcaacgagaagggcctcgacttcgagatcgtccccgtcgacctcaccaccggcgcccacaagcagcccgacttcctcaccctcaaccctttcggccagatcccggctctcgtcgacggagacgaagtcctcttcgagtcccgtgcgatcaaccggtacatcgccagcaagtacgcgtcggagggcacggacctgctccccgcgacggcgtcggcggcgaagctggaggtgtggctagaggtggagtcgcaccacttctacccgaacgcgtcgccgctggtgttccagctgctcgtgaggccgctcctgggcggcgcccccgacgcggcggtggtggacaagcacgcggagcagctcgccaaggtgctcgacgtgtacgaggcgcacctcgcccgcaacaagtacctcgccggggacgagttcacgctcgccgacgccaaccacgcgtcctacctgctctacctcagcaagacccccaaggccgggctcgtcgccgcccgcccccacgtcaaggcctggtgggaggccatcgtcgcccgccccgcgttccagaagaccgtcgccgccatccccttgcccccgccgccctcctcctcggcttgacctcgccttgcgttgcgccgttgcctgggtcgcggatgcgtcggagccccgagtcgaataaaagaggcagcatcctgtcttgcatttgctgctgcgccatgtgttaacagcctgtgtaataaacactgttgcttt

SEQ ID NO: 18554 - DNA, 201 bp, Zea mays
  Clone ID: LIB3088-030-H4_FLI
ctgaagcttgtcttggttttatcactctgtaaactgatttgctccagcgacatgtcttggttttatcactctgtaaactgatttgctccagcgacatgtggttcttacatttgaaaccctcctgagcgcatactgtagacaaatgagatacgtaagatggatgttgtatttgacagtctctgcagtttgtttatgtgattc

SEQ ID NO: 18555 - DNA, 870 bp, Zea mays
  Clone ID: LIB3088-031-B5_FLI
cacccttccccacaccagcagtcgagctgagcacgacacaaagccggctggggccgcctcgccatggcgatccggatgagcaacaacgtgatcggcgcgctgaacctggtgacactcctgctctcggtccccatcctcgtctcgggaatctggctgcggtcgcgcgccgacggcaccgagtgcgaccacctcctgtccaccccggccatcgcgctgggcgcggtgctcatggccatcgctgtcgcgggcctcgccggcgcctgcttccgcgccacctggctgctatggctctacctcctcaccatgctcgtgttcatcgtcgcgctgctctgcttcaccgtcttcgccttcgccgtcaccaacaggggcgccggggaagccgtgtcgggggtaggctacagggagtaccgcctcggggactactccacctggctgcggcgccacgtcgaaagccgcaaggactgggcccggatccggagctgcctcgccgacgcgcacgtctgcaggcgcctggaggagagggagagcaaggacgcggcgggtctggctcggctcggcctgtccccggtcgagtccgggtgctgcaagccgcccacgagctgcaacttcacgtacaccggcggcacggagtggaccaggacagcggcgggctccgcgcccgccggccgggactgcagcgcgtggggcaacgacgaggacgacctctgctacgggtgccagtcgtgcaaggccggcgtggtggacgcgctcaagcgggactggaagcgggccgccatcgtcaacgtcgtcatcctctccttcatcgtcgtcgtttactccgtcggctgctgcgccttcaagaacagccgccgggacaactacgcctaccac

SEQ ID NO: 18556 - DNA, 796 bp, Zea mays
  Clone ID: LIB3088-033-A1_FLI
cttctccaggtagaaggcatgcaggtccatgcgaatgagggtggcgttactcaaactcggggtggcatatattggataatcttgcccgctggatatctgggttcatctttttggggaatggtgttcatacttgcatccacaaatctcctcactacaagaattgcagcgggttgtttcatacttgcactgtttattgtcctttttgttgcagacaattggtttcttcgctggctctgccttggattcattgtattcattgctgttgtttgggtcatacaagaatttacatctttccatattctgaaatatgtgatcttattcataggtgtgatgaacagcttattttcggtttatgatatttatgacgacttgatatcccgaagagttaatacaagtgatgctgagaagtttgctgaaatctgcccttgcccttgcaatggttttgcatggggtgttatatggggattcatctcgtttatcttcctctgcgcttcaatataccttggactggtcatattgtcttgagggttccaacctcgcgcacgccgttttgatctgacaaccaactctggttggctttttccagagttctccttgctctagattttgggttcaaacttacattgttctggcggctgtacagtatacatgtagggtaaacatgtacatccattgtggagttaattcggcggggattgttcatgtgattcttcgattttagcggttctatagataccattgctcatttatggtctgtagcctcattgctcatttgaccaattgaaatcgtattcag

SEQ ID NO: 18557 - DNA, 333 bp, Zea mays
  Clone ID: LIB3088-033-D8_FLI
ggtggtgatggtctgcccggtgcttcttgcgatagcgctgaagaaggttgacctgaagagcgaagagcatggtggtgccgtcccgaccaccatgctcgtggtagcagcggttactctagtcgccggtatttgcccctacctcgtctgctgtctctccaagagattcttcaattataatgggagctcctcaggttccccacacgctgctaccatgttgctggcacccttatccagcacatgtttagtggcacttgcctgttggatcgtacatctcatcctagacagctgggcgttccctgcggtcggcgccctcgcggagcagagtccgacgag

SEQ ID NO: 18558 - DNA, 577 bp, Zea mays
  Clone ID: LIB3088-035-A10_FLI
ttcctttgtgctatgtagtatttggaggacaagtacccagagcctcctcttctacctcaagaccttcaaaagaaagctttgaatcaccagattgcaagcattgtagcttctggtattcaacctctccataacctcacagtgttgaggttcattgaccagaaggttggtgcaggggagagtgtgttgtggactcaacaacaaatcgagagaggtttcacagctattgagaacctgatacaactaaaaggatgcgccgggaagtatgcaacaggagatgaagtccaactggcagatgtattccttgcaccccagatctatgcagccattgaacgcactaaaattgacatgtcaaactaccccactcttgctaggctccactcggagtacatgtcacaccctgcgtttgaagcagcgctccctggcaagcaaccggacgccccttcatcctcctaggaactgcaccctagtgtgttgttcctctgaatatatatatatatatatgtatacttctgtaagaattaataattacagagtttcgtctgctatgtcgaaaaatgtcaaaagtttttgtgatttc

SEQ ID NO: 18559 - DNA, 334 bp, Zea mays
  Clone ID: LIB3088-035-C9_FLI
gtttttttccagagaatattggaagtactctacgctcacatggatgcaaaactcaaggacgggaacagaaaaggttttaacagcttatacgtccagcacactgattaatgacaatacatctcagtaagactatactacaccgtctgacaagtcgaaacagcaccgcctaggggaactaaacaagaattacaccaggaagtgccaaagcagctgaaggggatcataattactctacgaagccattacaatatattaccagaaaacaatagaacaacagaaaaagggccacttatatctaatatatgatgctaggttaaagatcatggtgtgctcg

SEQ ID NO: 18560 - DNA, 419 bp, Zea mays
  Clone ID: LIB3088-035-D12_FLI
agatgtagaagcgtgttccgtgagttggaagcaaaagacctttgtgtgtgtgatcccaccgtccacgcagtagataggattcccacgagccgttcagtacctcagtaagccagaaaagactcatcaggaccctcttgaagatttagatgcaaaaattttcttcgccaaaaatgtacagttttgctcactgacttaggacatgtttggagcatctatttttttagaaactggtttatgaaaactgaaatggtttcaaacatatctgattatatcccagtttatagaaactagattcctagtttcttaaaaactaaaaagctagccttatctagctaaaaccagtttataaaaactgaggtggtttcaaacaccataaaccagtttttttctacaaattagtaataaaaagttgattcttg

SEQ ID NO: 18561 - DNA, 427 bp, Zea mays
  Clone ID: LIB3088-035-E4_FLI
cagcaaaaaatacgaaaaaacagccgacaatcaagctgagagggcaaattggtggaggattgcatctggcaagcctaatgtgcttactcttgattatgttaacatcagtccattttcccttccagcaagaaggacaaaggaattaagagctttgattggatggaggtattacttcagcttattcttagagttgtcagatattgccatgcccttcataagggttgctatcagcaaagtgagctctgcggtgtcctacttctgggtgtcaatgattggaaggtctcttgggctgattttctcagggattagacaatcactaggctggaaataagcttatacggtcatacctgttgagttttgagtctgacttctgcgactgaatgaatgtctgttaggttatgcattgtaaatctttgagatggctgtc

SEQ ID NO: 18562 - DNA, 407 bp, Zea mays
  Clone ID: LIB3088-038-E5_FLI
ggaaatgtctgtcttgggcttctcaacggaacggagattaatcatgggtcaactatcatagtaggagatgtttctctgcgcggcaagttggttgtgtacgacaatcaacggaagcagattggatgggcagattcagactgcaccaaacctcaatcacaaaagggctttcctttcttcctctgacgaagcatcactcgctacataatacatgtgtaaagcgtaaatagtgaacgccattgtattgtagaatacattattaagtggagactgcctttgtgtatgggtatatcgttccattggaactgtcagaaatcctccactgtgttgtacccgtctgtaatgtgtatactatgttgtttacttgtatgatgtatgtacactatctcctctacatggagttgtcccct

SEQ ID NO: 18563 - DNA, 999 bp, Zea mays
  Clone ID: LIB3088-039-D10_FLI
agccatgtggaggagggctttagcgatggtcctgttcatggctggcgccgcgctgctcgccggggctgccggcgccggcgcgcagcagggcgtgtggagcatcatcacccggcccatgttccagagcatgctgagccaccgcggcgacagcgggtgccagggcgccttctacacctacgacgccttcatcgaggccgccagcaagttccccggcttcggcaccaccggcgacgagcagacgcgcaggcgggagctcgccgccttcttcggccagacgtcccacgaaaccaccggtggatgggcgactgctccggatggaccgtttgcctggggatactgccgggtgaaggaacagaaacagacggacccaccctactatggacgaggacccatacagctaactcataagtacaactacaggctcgccgggcaagcgctgaacctgaacctggtgggcgacccggacctggtggcgagagaccccgtggtagccttcaagacggccatctggttctggatgacgccgcagtcgcccaagccctcgtgccacgccgtgatgaccggcgactggaggccctccgccaccgaccgcgccgcggggaggctccccggatacggcctgaccacgaacatcatcaacggtggtctagagtgcggcgaggaccgctccaccgacggcgccaaagccgccaaggaccgggtcggctactacaagaggtactgcggtatgctcggagtggggtacggggacaacatggcatgcgggagccagaagccttacggaggatgatgacactagtagctgatctatggttgctgcaatgcaagccttcacgtgtgtttgcctctctacctaaagaataaatcaagctagcagcaaacctaccttcggcgtgtgtctacttgcttatcatagtgtgtgtccgtgtatgagagatgatgtactgtcacgaactcacgtgtgtatgagagaggatacatggtaagactatcactact

SEQ ID NO: 18564 - DNA, 480 bp, Zea mays
  Clone ID: LIB3088-040-H12_FLI
ttgctggccacctggcccgtcagtgccccaagtctgatacattgggcgagaggggtgggcctcctcccttccatggtgttggcgctcccttccgtggtgttggcgttcccttccgtggtggcctcagtgacgtgatctgccgggcctgcaaccagattggccatgcgagtcgtgactgcatggctggtgctttcatgatctgccacaactgtggcggccgtggccacacggcatatgagtgtccctctgtgagtctcattgagaggttcccacctcgccgtttctgaaggacgtccaagggctatccagatgactgttgttttcagcccattgtgtcaagaacactcatttccgttttcttttttttttccaaaccctaatggattctagatctttcagattcttaacttgtcagcactatttgtgattccctaatggattctagatatttcagattaataactcgtcagcaccatttat

SEQ ID NO: 18565 - DNA, 520 bp, Zea mays
  Clone ID: LIB3088-041-D8_FLI
gttctcctcctccgtccgcgtagctctcggtttcggcgatgtcggggcgcggcaagggcggcaaggggctgggcaagggcggcgccaagcgccaccgcaaggtgctgcgcgacaacatccagggcatcacgaagccggcgatccgtaggctggccaggaggggcggcgtcaagcgcatttctgggctcatctacgaggagacccgcggcgtgctcaagatcttcctcgagaacgtcatccgcgacgccgtcacctacaccgagcacgcccgccgcaagaccgtcaccgccatggatgtcgtctacgcgctcaagcgccagggccgcacgctctacggcttcggcggctaggccgcctccccttctgatgctttgatgtgacggccgtggtcggttgtgtgtctagttggccggtctactgtagtttgttctgtatcttcgtttcgaggtgttccagtttctagcccatttggtgtaatattttcactgctattatcaatggaaagccctcggttctatcc

SEQ ID NO: 18566 - DNA, 605 bp, Zea mays
  Clone ID: LIB3088-042-C9_FLI
gtgcgcgcattcttcgatgtgcatgatcaagaaggaagtcacccaggaggcatccaccttgaaatgactgggcagaacgtgaccgagtgcattggtggatcacggactgtgaccttcgatgacctgagcgaccgctaccacacccactgtgacccaaggctgaacgcctcccagtccctggagctcgccttcatcattgcagagaggctcaggaagaggaggatgcggtcggggctcaacaacagcttgcctctgccaccactggctttctaagtagccgaagctgaacagagaaggtagagggatagttgcggcgactcgaaagattacgcatgtttatttgttgatgcttggtgtggaggactggtgggtgctcttggcacaagttacatgctggggagctataggagggtacctgttgcgttgtggaagacagtagctagtattatgtgttgtaattgtatgccttcgtttcatgttctgggtgcgtgacttgtcgactttgctgcttctggggttctgaccttggtaaggagagaataaagagataatatgagtgcgagatgcttgctgaactggtgctcagtaaattgatcccttgattg

SEQ ID NO: 18567 - DNA, 796 bp, Zea mays
  Clone ID: LIB3088-043-B6_FLI
gcctctttcatttgccgtacgtacgtgtggtacagctgcgatgggctcgggcttcatcgccaagggcctcaccatcgtgaacagcgccgggccagggaaggggcaggccgtggcgctgcgcgtcggcggcgacctctccgtggtgtaccagtgcgccatccaggcgtaccaggacacgctctacgtgcactccggccgccagttctacgccgacgacgacatcgccggcacggtggacttcatcttcggcaacgccgccgtggtgctccagagctgcgacatccaggcccggaggccgagccccgggcagaaggacacggtgacggcgcagggccgcaccgaccccaaccagaactccggcatctccatccaccgctgcaggatcaccggcgcgccggacctcggcggcacgccggtgtacctgggccgtccgtggcagaggtactcgcggacggtcgtcatggagagcttcctcgaccgctcgctctcgccggccgggtggctcgagtggtcgggccagttcgctctgagcacgttgtactacggggagtacggcaataccgggcctggtgccggaacgagtcggcgagtgacgtggactggggtgcacacgtcactgtccaagtcagatgccgcgaggtttaccgtggcggaattcatcctcggagacgaatggttgggtggcactggagtcaactatatttcaggactgtgaggtgaatgtctcgcctccttgtccgtatatgtgtacgtaattcagtgattttaataataactaaataaaagattcctgggt

SEQ ID NO: 18568 - DNA, 456 bp, Zea mays
  Clone ID: LIB3088-043-E7_FLI
ttcaccgccgagcaggtcctcgctcacccgtggatcgtgagcggcggcggagcccgtggcatggagcggccaacctgaggcggcgcgcggcataccataccagcagaccatggcgggcggacgtgtattgccgtagagacacagattcggcaaggaatcccgacgttatgtgcagaggttttgttatgtgcgtacggaccagagaaggagagacggtagctgctgccggctgcagagtagcaagcatcctttgcggtgtactgtagtcgcagactcggtagcagagcagatggatcggcaagaagcttctggtaggcaggcttttggttttcctcaggcccccgggagatgctctttacctatgagcaccctttttggacgtgctggtagctggatgtgtatatacactgaccgtctttgtacaaaccgagaggttgaataaataaataaataaat

SEQ ID NO: 18569 - DNA, 746 bp, Zea mays
  Clone ID: LIB3088-043-F3_FLI
tcctctccctggctccacgacgcggcggcctgctagctctctgggcgggctactaattctccggatggtgtcgactgctacttctccgatgccgcgcgcgcggcccgtgcggtccgctgcgcctccgtcggatgcgcaagcaggaggcggacgcgcggcccgctgtgcctccttgcgcccccatcgcccgaggcagaccgtcgtgctcgcctgctccatccggtcccgtcgtcgaggagtcctcttcgccggcgtcgcgcccgtctctgtgtttcccatgtcgtggcggcgtgctcctctgcgccggcgccgcacaacctcatgtcagctttcgtcgctgcgatgcccacggccggcggtgtgctcctccctactccacgcccaccttcgcccgaccttcagctgcgcgtcgtgatgcagcgagactcgagctgcgtgttcctgtacgcgtcgatctgctgcttccttcggcttcgtcaggactccggccttgtcgagctcctctcctcgcgtcgcgctcctgctccatcgaacaacagagctgttcatgccccgtccgcggcactatccgtctccgtcaagcggggacattagcaacttctgcggcctcctcccctcgcggtggggtttcagtgaacgacagtaggcttgtaggctcattgtgttgtaggagctttgctgaaatgacagaaatttgcatgtgttgtaagagcttcgcggactgaattgatgtgatgcatgtgctg

SEQ ID NO: 18570 - DNA, 1062 bp, Zea mays
  Clone ID: LIB3088-043-G4_FLI
catcatgtctctgttcggaattggcctgctggaatgtggtggatctcctcccagtgttggcgatattttgaacttcttcagtgccgtgtttttcgggatccatatgcttagaacagaacaaatatcaaggagtacggacaagaagaaatttttagctcttcttggcttcgaggtccttgtggttgctttctcctccgttctctggtttatgttcaaagatggctacgttgataccagcggatccagctttgaatcttggacgttcgggatgctctgggataccacagtttcgtttccttggataccagcattgtacactggggttctttctacggtgttatgcatgtgggcagagatggtggcgatgggcgatgtttcagcaaccgaaactgcagttgtttacgggttggagccagtttggggagctgcttttgcttggttcctccttggtgaaagatgggatgacgctgcatggactggagctgctctcgtattatgtggcagtttgacagttcagctatttgggtcagctcctgagaagtccaagaaagtcaaaaaacgcagcagcaatgctttagaaactccagtgaaacgacgagactacttatcgttgtctcccataccagttgattccgggaagatcataggaaggcaattagaaaggaagaacaaagcagtataggtagcccaactacaaggcaagaagaaaggaaacgctgcgatgataggggagcgcatgtaccaaatcattgtcctgaggcatcgtctgtttggctccgtcaatatggggatgctgctcgattgctccgcatggattttttttttcctttgtccgcattgaaaatggtcgtatttggatttctgttgtctcagttgaccgtgctagagtacctcatgcgtattaggaaatgaggcattggtagtggcaactcgaggagaatacttagacacatctactggcgtagtaatggcgttcagtgtaaatagataacttagtatgttttgggcactgttaaccatacaggttcatgtaaatatatagtggctaaatggttctagagt

SEQ ID NO: 18571 - DNA, 385 bp, Zea mays
  Clone ID: LIB3088-043-G5_FLI
gggacccgatactcgtgttaactgtatagcccctggttttgttcctacacggtttgctagtttcctcacagaaaatgagaccattaggaaagagcttaacgagaggaccaagcttaagagattgggtactgtggaagacatggctgcggctgcggctttcctggcatctgacgacgcatcatacattacggctgaaaccattgttgttgctggaggggtgcagtctaggctgtaaatctggctgaagtttatatttacttggttaataatgtgtactagtgccctaggcgtggctaataatgtgtactagtgccgctagagcatcaggctaccttctatatatgacaggcaactctaaaagattttctatatcttattcctcttc

SEQ ID NO: 18572 - DNA, 683 bp, Zea mays
  Clone ID: LIB3088-044-G8_FLI
ttgaccctgatgcttcttcaagattaaataacccagattcttctaaaatggacaccaattttttgaaagaggcctacccattacacacaccaaatccatccagtgtgattgaaactgtgtatgaaccgatggcgttggtgacaatctctcccccttttatatgttcagatggtttgtctttcgcacccgaaattagatctaagccaggagaaatgtcagactgtgaagcagagatggtcacatgctcaaacaatttttttggtaatgccgagcaatctgctaaacttgccagcagtgatgacaggccagaggctttcacaatgactgagagcactacaaactgtggggatgaacaattgacagatgtcaaagaacctgtggccagtacagcaaaagaacagttatcgaaagacatcgagactatgccagataaaaagaagggtgagggggctctattctatgaacctcctcgattccctggtttggatgtcccgtttatcagttgcgatcttgtaacttctgctgatctgcaagaatttagtccccttggaattaggcagtggatgcggtcgaccatgaatgtcccaactcctttaagattatggggctctccaacacatgatgaaagcccagatgcactaaaaactgctgctgaaagcttcccatgcacaagttcaataatg

SEQ ID NO: 18573 - DNA, 323 bp, Zea mays
  Clone ID: LIB3088-045-A7_FLI
tccgcgatgatgatgctctacttctcaagcctgggttacattgatgttatctgggaagaggcacttggtaagctggcgcttgttgcactagcagcaacagtagtggagtgcgtccctgtgaccgaagttgtagatgacaacatatctgttcctttggccaccatgctggtagcttttctcttgtttagctccaaccgcacaatagttaattaaaatactactagtgcattatttaagacatgtgatgagttcttcagtgatgagttgtgcttgcttttgcttcctatgtgaatgtgatctctagtacttgatggcgacagcct

SEQ ID NO: 18574 - DNA, 378 bp, Zea mays
  Clone ID: LIB3088-045-B1_FLI
tcgtggagtatgatctgaaactgcagaaacagtatgttgcttggaaatattctgcaacaacataattttgctccgtcactgttcgtggcttttggtggtgttagggactccaaagtagggttgcaactgatcttacatgtaggcctagtttgggtactcttggattgaagtggtttggagggattgaagagtgtttaaatcccgatagatcaaaaactcccccaatacatctcaatccactccaatccgtctcattcctagagtacccaaaccaagccgtaggggggagagtttcccagctgatgacgcgtatggaagtaagagatcatgtagaggggcattgttttatggaaattttgacattcttttgcaagtttc

SEQ ID NO: 18575 - DNA, 595 bp, Zea mays
  Clone ID: LIB3088-045-E1_FLI
acagccaccatttacagttgcgtgatgtcaaggtgcaaaacatcgagacaggcaaggttcattctgtactccatatagaatatcctgattggcccgaccatggagtggcaactaatacagatgctgtacgggaaatctggaaacgactgcatcacattccaacggaacatcctatagttatccattgcagtgcaggaatcggaaggactggtacttacatcacaatccatactacaattgagcgaattcttcttggagataaaagctcttacgatcttgccaaaactgtaaagaattttagatcccaacgacctgggatggtccaaacagaggaacaatacaagttctgctacagggcaattgctgacgagctgaaagacctgctaaattcagatcattgaggtgggtcacatgagacggacagcaacgctgttagcatttattacgtttttttagacatttctatgtgaaggaacacttaccctttagaggagtgaattagtcaatctcagttctctttaaactatgtttgttctagtcaaaatctatgtaataaaaaatctatcatatgtgaagctatgctatgtttttgact

SEQ ID NO: 18576 - DNA, 481 bp, Zea mays
  Clone ID: LIB3088-046-F2_FLI
caaagaaaagcgccacaagaagaaacaggagaacgctgatcccaaccggcccaagaggccagcctcttcctttcttcttttcagcaaggaagcgaggaagcagctgctcgaggaacgcccgggcatcaataactcaaccctgaacgcgctcatctcggtgaagtggaaggaactgagcggcgaggagaggcaggcctggaatgcgaaggccgcgcctgccatggctgcgtacaagaaggagatggaggagtacactaaggcccaaagctcatctgcttgacagcataactaattcctgcaagtgatctttggttacaaggatcctcatctctgaatcctggtgtggtagattacttcgtgtgatctttagctttttgtgaccttattagtcgcagcaatcagtgtagtgtggcagttcatatggtttagtggcagtttatattgttgccacgagcccacgaattgagtaatctttcacttc

SEQ ID NO: 18577 - DNA, 464 bp, Zea mays
  Clone ID: LIB3088-047-D6_FLI
ggcaggtcatctctttcaaaccccacacggccacacggcatgtttcaaaggcaggtccagattccagcagctctgagctatagaaaaaacggcttgggggcgagacggagagaggggtatttgcagtataagtacctttggatcgaagagcatcactcgaagatgcatcgaggactgttcttcttcttcctcaagctgtagcctgtgggaggagaggccggagaggcctcccatggagttcccccactcatcacttcttgttggtcccctgctagctgttcgttccctcagcaggtagctagagatgatcttgctttaattttgtgctgatctcttcctcgtcgtgtacgctcatatgcatggggcgacggatttgtctctgatcgttcccatgccgcctcttgtatcttgacttggatctatatatcaatgcaaataaatcatcgatgggtgacaatcgatcc

SEQ ID NO: 18578 - DNA, 459 bp, Zea mays
  Clone ID: LIB3088-047-E3_FLI
gcgacacgctcttcaacgccgtgccggggctggacggcgcgccgggctccgtgtccctggagcttgccaccaggccggggtggttcgtggcgacggcccccacagcgatgcacgcgaacgccaccacgcaggtcgtctgccgagccaacaagggcggcgcggcgttccggcgagcggcgagcttcgcgcgcgcgccgccgctgaggcgttaccacccgctgagcttcgcggcgcgcgggacggcgcggaacttcctgctggagccgctgcggagcctgcaggatgagttctacaccgtctattttagcctcgtctccgacggcgagagctgattgatcggtgtgctcctgaacgaacgctccgctagtttcgctgtgcaatgagccattgacgctctgtatcccccatgaactatgtgcaatttggagtggagtaaaaatgtatggcgctagttccatg

SEQ ID NO: 18579 - DNA, 513 bp, Zea mays
  Clone ID: LIB3088-047-F7_FLI
caacttctttggagttttggccttgcttgtcttgatgtctactctttgaagactaaaagagatcttcacaaccctgtgcttgtaagcctttttgttgttggggactgggtcactgcaattctgtcgtttgctgccgcgtcggcgtccgcgggcgtgaccatcctgttcgagagggacgtccacttctgcaggatgtacccgcagttgtcgtgcggccggtacgcgctctcggtggtgctggcgttcatcacctggtccttcatcgcaacttctgctgtctccatgttctggttgctgccgtcgctctgatgtggcacggaaggagcctgccgtgtcgtcctgtttagatccgtttgcttcagcagctggttgatgccctgggtcgctctgggttgtgtgcttaagtaactatcaggatcctgatcttaaccggatgtactctgctggagacgagaaattatctagtgtatttgttaaaacaatgaggtggtttatcttcttatttcttttttt

SEQ ID NO: 18580 - DNA, 501 bp, Zea mays
  Clone ID: LIB3088-047-G5_FLI
tctgatcccctgcttgatgcggccaaatcgaacttgttaaaagtcctcacattgtctacgaaacaatagaacaagagaagacctaactcctaaggaaattgccactggagcctcagagttcagacacggaagcgcggtcaccaaatctctgttctgaagtgtctcaactgccagctcaaaattgatgcttggtgcctctagtctactgctcattgctcacagagtcacaggtgtaggaagtttcagaagtgcggcttcgaagactgcatttgattttgactgagttgctgcctatatgacaatcaaagctgcacaggctccgaagtggctgtgatgtgttcttaaagagtcgcatcagcgcaggaagagcccagattttgaagttcatgtgtagctaaatttcgatataagcttgaacggcttcccttagctgatgtatatacataaatatactccaacttgaggtgtactccaagttgagcatgtgcaagttataggttc

SEQ ID NO: 18581 - DNA, 450 bp, Zea mays
  Clone ID: LIB3088-049-C2_FLI
ccactcttggcgaagcgaaatccaccgtacaccgctgcctccctctccctgtctcgtctcgtcgaaccagccgaggaagccaacgcagacccagcgatcctcgtcgcgcgtcctccactcctcccccacggagggaaggatggcggagcccaaagcggcggcggcgaggaagacgcgggtgggcccgtacgaggtcggcaagaccatcggcgagggcagcttcgccaaggtcaagcacgcgcgcgactcccgcaccggcgccgtccgcgccatcaaggtgctcgaccgcaaccacgtcctccgccacaggatggtcgagcaggtctgtccgtccgtgatccgtccctcccgcctcccctcgcccgcccgctgtggaacatatgtaatgtaacctcggggaaaatttttaaatatactggagctgccatagaaagatcgcctccgcgattc

SEQ ID NO: 18582 - DNA, 431 bp, Zea mays
  Clone ID: LIB3088-049-C8_FLI
caaggacatcaccactacatttccgagctttgtcttccattctcaggtcgatgatacctgaatttctgaaaactaatgaatgtcagaaggtggactgcttgctttgctaagcaaactttcagtgcctgtttgatggttgaaaaatctcatcgtcctgaaggcatcaaatcatcgtttgttgttaataatctttttccttgttttgtatttggaattcttgctggatcctgtgtgaatcctcttctattttccctctccattgttcctttattctatttcggttttgatggccagtacttgagtcaggtaatgtgtacaaagttgcgtctgatgctgcctgtcattgaattgtatggcatgtgaggaagatttaaattgtatattcaacttttgtggtcatgatagttgcacatatttttaccatcctttct

SEQ ID NO: 18583 - DNA, 214 bp, Zea mays
  Clone ID: LIB3088-049-F5_FLI
atcgatcgatctgtggtgatgagtgtccctatctgtgtgtttgtgtttagttccagtcgtctgtgaggaagtcagttatgtttgagtgagaggggtacttcgctcttcggtgaacactgtacttgtcatgaggagagttttcatacccggagtgtaggaactctgtactgtactcggatccttcctttttcatcgaagtgggttttattttatc

SEQ ID NO: 18584 - DNA, 490 bp, Zea mays
  Clone ID: LIB3088-049-G3_FLI
gtcggcatcgagcacaccaacgcctgacgaaacatgcaatcgctccaagagaagggctgcagcacttgctaaattcaggcagaaaaggaaagagcgctgttttgacaagaaggtgaggtatgtgaacaggaagaaacttgctgagacgaggccaagggtgcgaggtcaatttgttaggcatgcaagcaatatggatatcataagcactggagatgatatatctgaagacgaagatgacgatccaacctccagggaggtagatatgatttcttctccagagtagtggagaggtcctcttgtgtgaaaaattagagtgcagatggttactgctcactttgttacaactcagtaggactagacaatacattcttctactggcaacaaggcaatacaccctttttgctcacacacagtataaacttttgtccccaaatatttggctgttacagtgttactccggttgctttaatcgagaaatcatctttttgat

SEQ ID NO: 18585 - DNA, 567 bp, Zea mays
  Clone ID: LIB3088-049-H6_FLI
ccgctatctcgcacgtcgctccccaaatcatcccatcctacgcccgcggccgtggcaccgaatccagaagcgtctagaagggggaggtggtcgcccatgaccgtctgaccggccgtcgccatgggatgcgctggatccactccaaagactgacgataatggtaagaatttgaagaaaccaaagccttggaagcacacccaagcaataacgccggcacaactcagacagatgcgtgatgaattttgggacactgctcctcactatggtggacagaaagagatttgggacgcacttagagccgctgcagactctgacctagcgcttgcgcaaaccatagtggatagtgctggcatcatcgtatcgaattctgacatgacactttgctacgatgaaagaggtgccaaatatgagcttccaaagtacgttctaagcgagccaacaaacttgatcagggacggttgaattgataaaataaacgtggggtccaatgtaaattatgtggatcacattattatactgacatcacgttggcatgattttggaacttcaataatattatgatgtgct

SEQ ID NO: 18586 - DNA, 319 bp, Zea mays
  Clone ID: LIB3088-050-E7_FLI
ctagatgacccgtacttctctgcgttgatgtcaattacattagttgacggagtgcttgtttgtgttgaaagagctgaaacgcctgtgtttcttaatctggaaccctcttctcccgttttacttgtccgtggaaacatttcatgttccagctggttgtatattccgaaacagaccatgttttagttcactcggttcttcgttgacttaagttatttatcaaatatttaagtatcgtacgtaagtttgaaacctggggggaagaactatgctggctttgttgtactgccaatttcaatttaggaaggatgaaattgaagtt

SEQ ID NO: 18587 - DNA, 318 bp, Zea mays
  Clone ID: LIB3088-050-E9_FLI
gccaggcgctcggcggccacaagaggaagcactacgacggaggcgccgcgacgtccgaggtggggagctccgggaacggaagctccgccgcccgcgcgttcgacctcaacctcccggccgtgccggagttcgccttccggtgcggcgccaagcccggcaagatgtgggacgaggaccaggaggtgcagagccccctcgccttcaagaagccccgcctcctcatgaccgcgtgagcctgagcctgagccgaggcgcggatctgatgttgatccgcacgagacttttttggatgttcggtggaacactattcgttcgttc

SEQ ID NO: 18588 - DNA, 614 bp, Zea mays
  Clone ID: LIB3088-050-F2_FLI
gggagttccggtctggctcctcccgtgtgctcatcaccactgacctgcttgctcgtggtattgatgttcagcaggtgtccctggtcatcaactatgatcttcccacccagccagagaactacctgcatcgtattggtcgtagtggtcgttttggtaggaagggtgttgccatcaactttgtgacccgcgacgacgaacgtatgctgtttgacattcagaagttctacaacgtgttgattgaggagctgcctgccaatgttgctgaccttctgtgatcaatttcaagaaaaaacaaaacaaaaaagggtggtgaggaacctggtaaggcttggttttgtcgaaataccgtgggagagggggtgataaggacggtggggtttctatgttgaagtcgtggtcatggacaatttgtgattttttctcctttatgccatgttttggaatttttgtagctgcctaggccttgtggtaatgtgctgctgtgggggttcattagtatgaagaggaagacgctgctggcgctgagtctttctctttattagtattttgtttaaaactatgtatgaccgaatggtggtatttatttgtgtcatccttgactcttattctgctgc

SEQ ID NO: 18589 - DNA, 588 bp, Zea mays
  Clone ID: LIB3088-050-G10_FLI
cccaatctcccctacaccagaaaaattcccagttctttggtccgcgtcagagaggcggcggcgatgtctgggcgcggcaagggcggcaagggtctgggcaagggcggcgcgaagcgccaccggaaggtgctccgcgacaacatccagggcatcaccaagccggcgatccggaggctggctaggaggggtggcgtgaagcgcatctcggggctcatctacgaggagacccgcggcgtgctcaagatctttctcgagaacgtcatccgcgacaccgtcacctacaccgagcacgcgcgccgcaagaccgtgaccgccatggacgtcgtctacgcgctcaagcgccagggacgcaccctctacggcttcggaggctaggctaggcgcctcttcatagtcggggactggttaggggacatgtctctgtgtgatgctttctgtggtattattgctgcaatagccgtgtaatccatcgcttctgcaatgaagcgctcggaagcatgctacgtatgttgtgtctgtgggtgattgtatttctggtagtaacagtgattgttcctgaattttggataatacaagctcattcgcagt

SEQ ID NO: 18590 - DNA, 621 bp, Zea mays
  Clone ID: LIB3088-050-G8_FLI
ccgccagccgcccccgccgcgacgtctagccacagcagcaccgtcgagtcctggagcggcggcagcggcggcggcgcgcccgtcgggatcctccgcgccccggccgccgaggaggactgccgcagctactgcggctcctcctcgtcggcgctctgcgaggacggcgcgtcgggcccgggctgtggcgacgagaccgccgcgccgccgcggtgctccccgcttccgttcgacctgaacgtgccggaccccgcggccgacgagatggactggcgctgcgacacgctgctgcacctgtagccgcgaacgcgaagcgagcactcagcaaaactgctgctatcgtgctatgtctccatagaaattgatagcttaaattttttctctccaccgcttctttagtcccactctctctcttttaccactgccaagattcggtaatacttatttgtgatagtgtgaataactgatcatgtaatccgtggagggaacctgttcgttctgttctcgcaaaccttcctgcttcctgctgtgtagtgtatctgtaacagcaccatgtatgtgaccacggcctcttgtcttgctgtaattctcaagatgatggaatcaagagacgcctttggttct

SEQ ID NO: 18591 - DNA, 665 bp, Zea mays
  Clone ID: LIB3088-057-E11_FLI
gtcaggcatcttcgtggtgaaattgacaagctcgttaccgctcggaaagaactatctgcagaggctgcatctctcgtggaagagctgaacagggagcaatctgttaaacagcagctacctgtgctgaaaacagaaattgacggtctgcaacaggaacttgttcacgtgaggactgcttgcgggttagagcagaaggggaatttggaattgctggaacaaaggaaggcaatggagaagaatatgctttctatggcacaagagatcgagcagatgcgaggcgaattagctaattttgaagttagaccaaggggcccaggtggagcatatgggatgcagattgggagttcggaagtgaccttcactaagaacccatatgaagatggttataatgcttatgtgggggttcctgagaaagatcctttgcatcctcctgaatatgcttcatgggggacatatgacaggagtcgccttcagtaccgctaagaccagaacttagtcattggagaaagaattgccttctaggttttaatggacatgtcttgtcgtttacagtaccgaagctttatgcctgctgcttggttttccattaagagttgtcctttttaatgcttctaatcgtaactttttccattacaaactggctagattattaaactattggtacc

SEQ ID NO: 18592 - DNA, 1019 bp, Zea mays
  Clone ID: LIB3088-058-F1_FLI
gcggctccgtcgtcgcgtgccatcctagggtttctttccccgtcggcgcctcctcagatttaatttggacgccgccgccgccgctgacccaggttgtcttgatggcgcccgctgtagaagccgtgaaggagacaggctcgttccagaaggttcctgccttgaacgaaaggatactgtcatccatgtccaggaggtctgttgctgcacacccttggcatgatctggagataggtcctggtgctccaaccatattcaactgcgtcattgagataccaaggggcagcaaggttaaatatgaacttgacaagaaaactggactgatcaaggtggaccgtgtgctgtattcgtcagttgtttaccctcacaactatggattcattcctcgcactctttgtgaagacagtgatcctttggatgtactggttataatgcaggagcctgttatcccaggctgtttcctacgtgcgaaggctatcggccttatgccgatgattgatcagggagaggcagatgacaagatcattgcagtgtgcgctgatgatcccgagtacaggcattacaatgatatcaaggagctcccacctcaccgcttggctgaaatcaggcgcttcttcgaggactacaagaagaatgagaacaaggaggttgctgtgaacgactttctaccagcgagcgccgcttatgaagccatacagcactctatggatctgtatgctacatacatcgttgagggcctgaggaggtaggattctgatggctaggaaggtggggaggatgttgacgaaaaactgggagaccatttaccgcatggaacgagtaccgttattattttatttgtgtcgtgtatactgctagtagtgaaccctcaatcaaagaccgaaatcccctggggagtcggagtcggtagtaggtgaagctagtaacaaggttggcgaaatattattttctggcctgactgcctatatatgttgtacgtgattggtatcgtaatattcattcgcttttgtgatacataattc

SEQ ID NO: 18593 - DNA, 1520 bp, Cucumis sativus
  Clone ID: LIB3089-034-C6_FLI
acttcctgctccgaccaaatggcctccgttgccctcaaatccttcactggcctccgccaatcctccacggagaagcctcatttcatcacccaaacgaaggccaaccaaaacccccaatttcggcgccgtttttatgtcgctgctgctaaaactagtcctaaaatcgccggtcggaacctaagagttgcggtggttggcggtggtcctgctggaggatcagcagctgaaactctcgccagaggcggcgttgagactttcttgttcgagaggaagctcgacaactgcaagccctgtggtggtgcgattcctctgtgtatggtcggtgaattcgatcttccgttggacttgattgaccgacgtgtcacgaagatgaagatgatatctccatcgaacgtcgccgtcgacattggacagaccctaaagcctcacgagtacattgggatggttcggcgagaggttctggacgcgtatcttcgggatcgagcagccgagaatggtgctaatgtgattaatggcttggtcatgaaattggaacttccgaagaatcaaaatgcaccgtatgttcttcattacactgcgtacgacgggaagaaaggaggtgtcggagagaagatgacattggaggtcgacgccgtgatcggtgcggacggagctaattctcgtgttgctaaggccattgacgccggcgattacgattacgccatagcatttcaggagagaatcaaaatcccagatgacaaaatggtatactacgagaatcttgcagagatgtacgtaggtgacgacgtatcgccggatttctacggttgggtgttcccaaaatgcgaccatgtcgcggtcggcaccggcacagtgactcacaaagccgatatcaagaaatttcaaatagccacacgaaacagagcaaaggacaagatcttaggagggaagatcatccgagttgaagcacatccaatcccagagcaccctcgtccacgacgactagctgggagagtagcactcgtcggggatgcagctgggtacgtgacgaaatgctctggcgagggaatatattttgcagcgaagagcgggagaatgtgcgcagaggcaatcgttgaaggatcggagaatgggaagagaatggtggaggaatcggacttgaggaagtacttagagaaatgggataaaacttactggccaacttataaggtgctggatgtgttgcagaaggtgttttacaggtcgaatccggcgagggaagcttttgtggagatgtgcgccgatgagtatgtgcagaagatgacattcgacagttatttgtataagaaagtggttcctgggaatccattggatgacttgaaattggctgtgaataccattggaagcttggtgagagctaatgctttgaagagggagatggagaaagttagtttatgagagaaatctaattaaaaagatcaaaatctttaatttcccaatctttatagattttgtagatgggttgtttcatgttaatgaattttcatcactttacttttctc

SEQ ID NO: 18594 - DNA, 1278 bp, Glycine max
  Clone ID: LIB3092-002-D9_FLI
atttgatcctgatacatgtgaatcacaagctaagtttggtcattctggtatccctagttcatcctctattttgaatttgacgtccaactcatgcaatgtgggaacttctgaatgtctggagcaatcagggtcaactgccaatgaaggagatgaaggcaccatcttttcgaaccgagagcctgatattattggaactcctgctaaaggaaaaaaattgcctcaggaagagctttctctacaacagaaattatcagttgcagatgtgacatgtacaatgtgcaagcaactgctctttcatcctgtagttcttaattgtggtcatgtgtactgtcaaatttgtgtcatcaacatagatgacgagatgctcagatgtaaagtttgtcaaagtccacatcctagaggattaccaaaagtgtgtttggagttggatcactttttggaggaacaatttcctgaagaatatggacagcggagagatgccattgaactacagcaaatcaaagtcaaacctgacaccccttcttcttgttcattggatggtggtaagaaaccagaaaatacagattggtggtctgatcctgactcaaaagttcacattggagttggttgcgatttttgcgggatgtttccaataattggagatagatatagatgcattgactgtaaggagaagatgggctttgatctttgtggtgattgctacgcaagccgctccaagcttcctggtcgatttaatcaacaacacacctcagagcacaagttcaagcttgtacaacccaacattattcataacataatgttgaggctggccacagcacagttaggggaaggttcgattgacctggagtctataggaaacatagaagttacttcagacggcgctgcattgtttggtgatggagaagataaccacaatgattctgaagccgccaattgaaaaattgagctcaacaaaagtccattgtctaaaaattggtgttttggtggggggtttaagtggataactcctaatagtaagaggagcaaataatgcaatgcttcaaggaagtttgctagtcaattggttgaggaattctcaattctacatggtctctgtgattttctaatgcatgccaacttgatagtgtttttatgtctcaactgaatttgtctccagcttgtggctattttatgttattgcattcgggaatgtatatattctaggagtttgtctgagatctatgatgatgtgtttgttacaataatattaataataattggtacatcattgtgaataat

SEQ ID NO: 18595 - DNA, 1697 bp, Glycine max
  Clone ID: LIB3092-013-G2_FLI
gtctcactcaaccaaatctcagttttgagttcaactcaactaaactatgtcttccttatccctatatgccaacctctcctctctaccatcctccctcaccattcgttcttcttcatccaaagatacctctttgaaacaggattggaggacaaagtccaaacctatcccaccaggtggcacataccctgcaaaagatcattgcagtcgttgtgggttgtgtgatacttactatattgcccatgtcaagaatgcatgtgctttcttgggagatggaatgtctaagattgaaagattggaacctgttgttcatggtagaggcaggaagactgataacttggatgagacctacttaggggtatatgaggaactgctatatgctcggaaacttaaccctgtggaaggagctcaatggactgggatagtaacaaccattgcaatagaaatgcttaaatcaggcatggtggaggctgtcatttgtgtacaaagtgatcctgatgatagatttgctccaagacctgttttagcaaggacaccagaagaggtgttggctgctaaaggtgtcaagccaacattgtcacctaacctcaatactctcgcacttgttgaggctgcaggtgtcaagcgccttcttttctgtggtgtaggttgccaggtgcaagcattaagatctgtggagcaccacttgaatttggataagctctatgttttaggcacaaattgtgtggacaatggtactaggcaagggctggataagtttctgaaagctgcgagccaatcaccagaaacagttctacattatgagtttatgcaagattacaaggttcacttgaagcatttggatggtcatatagaagaggttccttatttctgtctgccagcaaacgatttggttgatgttattgccccatcttgttacagctgttttgactatacaaatgctttagctgacttagtggttggatatatgggagtgccaaaatattctggaatcggcatgacacaacatccacaatatgtaacagtaaggaatgaacgtggaagagagatgttgagtcttatagagaacttactggagattactccaacaattagtactggggataggcgaccatttgtcatggagactgttaaggctgatgatgaagctaagttaggaagaggtccttctcagcctgccccaaagtttattggaaatttgctggcttttatactaaacttgattggtccaaagggtcttgaatttgcacgctattcacttgattatcataccattcgcaactatcttcatgtgaatcgtatgtggggaaaggaaagggctgataggcacatgcctacatatgctaagaaaattgtggatttgtacaaccaaaatggtcaaattgagaagatgctttctaacaagtgattctaacatattaaaagctcccaatcagtggcataggtgacttcaaagtatgcattgagtctatttttcattttacactgaagtcattggaaattatcatgaggtcataacttagtctatatttggataactcttgattcatataaatgtatttaggatagagcactcagcaaatatgaagatttaaattcgaacttgctgattacaagtctactcaatttttgagctttgcaaaactgcctattgagttgtaacaagaaaaaattggaaataatgttatatttttgttact

SEQ ID NO: 18596 - DNA, 831 bp, Glycine max
  Clone ID: LIB3092-014-C10_FLI
gtttcattagtttctccgaagagatgcggaagggcagaggaggaggagcctcggcggcggcggcggcggcggtgaacggatccgttttaaaggagcctcggtaccggggcgtgcggaagagaccgtgggggagattcgcggcggagatcagagacccgttgaagaaagccagggtttggttgggaaccttcgattctgccgaggatgctgcacgtgcctacgacaccgccgctcggaatctccgaggttccaaggccaaaaccaatttccctctctcacctttttgctatcaacacccaccacggatcctttcttctacgctggtttccacgaccaccaaaacaacagcaacaacaacaacgacaaccttaacaaccctcaaagaccaacttcaagtggcatgagtagcaccgttgagtccttcagtgggccccgccctcccaccacaaccacaaccaccacgacgccgtttttgaccactacgcggagatacccgcgcactccccctcttgtccccgaagactgccacagtgactgcgactcttcctcctccgtcgttgacgacagcgacgacaacatcgtttcctcgtcgtttcgacctcccttgccgttcgatctcaacgcgctgccgtttgatgatgatgctgccgtcgtggatgatgatctacgctgcaccgcgctttgtctctgatgattatcgtgcgatgatgatttttaatttctcattttttttatctcttcaacttgattttttgttattgctatgagggaaaaaatatattaaaaaaatgatcagatgtaagattatggtaatatgatcttaattctgtc

SEQ ID NO: 18597 - DNA, 873 bp, Glycine max
  Clone ID: LIB3092-016-A6_FLI
tctaatttgggaaggtgctaagaatatggagaaaacatcttgggcgtgcaccgttatcacccaggtgtgtctctgctttgctctatacatagctctcaacttgggtcaacctcagacttctgatctttacttcatcagtgtcaaaggaggtttcagaccctttacccaacaattgcatcttctcaagcagatggataaggtggcaaaagcttacaacgcaagttttgttgtgagcagcagtgagctgggggaatatgattcactcatgcagaatgctactcaacattttccgtctctgagactaccctggtacaccacatacactactactacatcttcaaaaacaaaaggacaagaagtggggtgcttttcaaagaagatcacgacatctaacaggataacctcaggtgtcatcggtgtggatactgaattattgaaagattatgtcttgagaggatcattaagtggcaacaaaatcaatcaattgcattggctaatcaaaacactggcagcaaacagtagcaactggcgcattattgttggataccatagtagagaaccctattcaatttttctaaatggaaattctgtctttaaaagagaactggctaatggattccttcttcaccatgtcagctcagatcaaattgtaaccaactatataaattttgctggtgaagttgtttgcacagctgtgctacaacagaagggtagagagatcatgtaaatatttcgagttaaagattcacagtattacatggtggtatccgttggattaatttgttgtaaattccatgagtaaacagtgctcatacattttgttatgaattacttgagtaaacagtgctcttaagagattttttaattcttcac

SEQ ID NO: 18598 - DNA, 975 bp, Glycine max
  Clone ID: LIB3092-016-B12_FLI
cccaacccaacccaaaactcaagctaaattctcactctcacaacttcaatctctttctctctctctctctctctctctctctaccaaaaaaatggctttggaaactctcaactcaccaacaacaaccgccccatctttccccttcgacgacccaactattccatgggccaaaagaaaacgttcaaagcgttgttcacgcgaccacccttcggaggaagagtacctcgctctctgcctcatcatgctcgctcgcggcggcaccacccgccgcgtcagcactccaccgccgcaaccgactccagatccttccaccaagctcagttacaaatgctccgtttgcaacaaaagcttcccctcttaccaagcgctcggtggacacaaggccagtcaccggaaactcgctgcctccggcggcgaagaccaacccaccaccacctcctccgccgccagctccgccaacaccgcctccggaggtaggacccacgagtgctccatctgccacaagtccttccccaccggacaggccctcggcggacacaaacgttgtcactacgaaggtaacagtaatggaaataacaacaacagtaacagctctgtcaccgccgcctcggaaggcgtggggtccacccacaccgtgagtcacggccaccaccgagacttcgatctcaacatcccggcttttccggatttttcgaccaaggtcggagaagacgaggttgagagccctcaccctgtcatgaagaagcctcgccccttcgtcattcccaagatcgaaatccctcaatatcaatgaactctatgaattttttatttttatttttttcgattattttggagaattttgagatttactataatttgattttgtacatagtcctacctggaagttttgttgaaccgtacgtaccggacccagttctctgatttaggttgtactttcacagtgmcagatttgcaattcaattcaatttcttt

SEQ ID NO: 18599 - DNA, 764 bp, Glycine max
  Clone ID: LIB3092-021-A11_FLI
cttaatctttcttcttgcattaacgactctgcctcggattcaccctcatctatgtctacagagaagcccaaagagaacaagactaccactgctgaacctcctccagctaatgatccagcaaaaccacctgcaaaggcacaagtggtgggttggccaccagttaggtcatttagaaagaacatagttcaaaggaacagcaatgaagaagaggcagagaagagcacgaagaatgctttcgtgaaggtgagcatggatggtgcaccgtatctacgaaaggtggacataaagttgtacaagagctaccaggagctgtcagatgcgctggctaagatgttcagttccttcacgattgaaaagtgtgggtcccaagggatgaaggattttatgaatgagaccaatggctctgactatgtacccacatatgaagacaaggacggagactggatgctcgtcggtgatgtgccctgggagatgttcgttgaatcatgcaagcgtcttcgcataatgaaaggctccgaggcaatcggtcttgcgccaagagccgtggaaaagtgcaagaacagaagctgaagaagtgatttcatctgcgtcacaaggaagcaaattgactcgagcaagatcgagtctaatataggaataagagtttaattatcatgtgcctttgttatcttttttgtaattttcttatatgtgtattatatgaatatgagaaaatagttggaaattcgttagggacacgaaataatatagaagatgtttatatg

SEQ ID NO: 18600 - DNA, 156 bp, Glycine max
  Clone ID: LIB3092-029-E5_FLI
gggaacttctccattgggttcttccgttactattacttccctaaagagagcaagcttttagttaataattgttattaattttgtttttgacaggctaggatcatgatattgtatggttacattttacataaaatgtcttgatttgattttcttcct

SEQ ID NO: 18601 - DNA, 1744 bp, Glycine max
  Clone ID: LIB3092-033-F4_FLI
cacagagcacatttcaagatgagaagcaagtggaatttgactgttgcatgaaaccagaacagacacaagcatgtgctatgtacaaaatttgcagttgcaagtgttgtggagagaaggcagatgacacagactgtttggtttgtgattcatgtgaagagatataccatgtgtcctgtattgagcctgcagtgaaagaaataatacctcacaaaagctggtattgtgccaattgtactgctaatgtgattgaatctctccatgagaattgtgtgctatgtgaaaggttaaatgatgcaaagaccctggatgatgtaattggtgatggaagctttcctacaattgaggaaacacaaaatgaatttgaagagaattcaaattgcacctctgatggaattcaagtttccataggtgaggaaaaaacacccaattgcaagatatgtgaaaatgaagtggatggtggaaaaataaaaatatgtggccatcggttttgctccaataaatactaccatgtaaggtgtttaacaattaatcagttgaagtcatatggtcattgttggtactgcccttcttgtttatgccgggtttgcttaactgatcaagatgatgatcggattgttctgtgtgatggctgtgatcatgcatatcacatctattgcatgaaacctccgcggacttctattccaagagggaactggttctgcagaaaatgtgatgctggaatacaagcaatccaccaggctaaaaaggcatatgagtttaacaagccaagaagaaatggtgaagatgctgcaaagccaatgccaatcttgaaaagaaacacaacaataaacgtgcacgggaattggaaagtggtggagcaatggacatgcttttaactgcagccaatactctgaattttgaagagaaagaggcggcaagccacatcaagttacagagaacatgaattttgtggtgggcttcgttaaccttccagttattgttagtagtgactttaacttcatatttgttgactgttaatacacagtattttgcatttgctgcattttttgaatgactgatattttggtaggctgtaaaactttcatagattttccgacattttgatacatcacatggaaagacatgactagagaggctaaagagcaaaaggcataatctgaagctgctctaagtgccatctgtcagagtaagcaggtcagatactgtagcatatagactataggctatagacatggttgatatgaagtttaattggctgctttgcttgtttcattcagaatattgtatttggggttgggatgttgtaagccaatatttcccaatagttgtaagttctgttactttcgaaaattaaaagaatggagatttttccccctcatggtttagaatttaatattttattaccatttctgtatagagcttattctgcattgatgcacttgatagttgatcaaatatattttgccttttcaagtaccacgtaccagcactcttccagttgttgtttgttttgggagttcagaaggggctagttaaggttggtaacatgatatttgatggtaaatggttgcagcccaaaagtcttggtgttgtttaggttcagttttaaatagcttgaggtaagttctagcttacaaataagcccttgtaaggttataggcttttgtagaaaagttagatgaagaaattgctgaaaatgttgaagaatattagttgattttatattacgagagaagtttgattt

SEQ ID NO: 18602 - DNA, 850 bp, Glycine max
  Clone ID: LIB3092-041-H8_FLI
ccagcgtccgcccagcgtccggaggaagtgggggaagtacgtgtcggaaattaggttacccaacagccgtcaaaggatttggttgggttcctatgacagcgccgagaaggcggcacgcgcgttcgacgctgccatgttctgcttacgtggcagcggcgccaaatttaatttcccgagtgacccacccaacatcgccggcggggggaacatgacctcctcccagattcagatcgcggcggcgcgtttcgccaattcggagccccgaaatgagcgttcggatcaacccgtggagtctttaacttcggatgaggaaacggcatcgtttccggtcatttcggatacggatacatcatctcctcctctctcagacgtgacgttccaaaacgacgccgaattagttactgggtcgttccctgatatgttttcggatttcgggtcgggcgattttgtgcccgatttctccgattttccgagcttcgacgatttcagccgggacttcttcttgcatgaacttccgggtttcaatttcggagaagagaacttggatggattgataattcaggactcgttcttgtggaatttctaagcgggtcagggttcggataattttattatatccgaacccgatatcagaatccggatcggatccgggtttgggttgggtcaaattttgcgtgccaagccctccatgtgttagtagttagtgatgattatagttttttttttttaacgtaccaagtagtcaaatgtttcgattttttgggatgcgaatcataattcatttatttgtcatgacttatgtgattaattgtaaagtcgtctgctgaatgatagtgtaatttttttggcc

SEQ ID NO: 18603 - DNA, 446 bp, Glycine max
  Clone ID: LIB3092-049-G3_FLI
gtccgctttcaccatgggtggagcagctgtatatagagcagaagcaaatggtagcatgagcagcaagggctgctgccatgacaatgcttcttggttattctgacatagtttgtttatttatttatttaattattttattcattttgaactgcttctactatccacaacattacacaatattatagttagggataggatgagatatgatattgcaaagaacaaagttcaggttaatccagagatttgaacggagagttccaacttctaggtcagggaagacttggagaaacgttgaacgaagaaggatgctgaattttattttattttattgtataatagtataatttattccccccttttctctacgggtggatggatgtattttctctagcaagtggacctcaaagtatttgccattgattaagcagcacaattcttttttatat

SEQ ID NO: 18604 - DNA, 1029 bp, Glycine max
  Clone ID: LIB3092-053-C4_FLI
ctctaagctgtgtgcgtgaaccagcggatagcaaggatgagtaaacaagacatgatgaaaagtcagaattgccttctcaaggtcaatatccactgcgatggctgtgaacagaaagtaaagaaaatcctgcagaaaattgatggggtgtattctgtgaacatagatgcggagcgagggaaggtgatggtgtcagggcatgtagatccagctaaactgataaaaaagctgaagaggtcagggaagcatgccgaactttggggtggccagagaggcatgatgtacaaccaaaactaccccacctaccctcagttcaagaacttgcacatagataacaccaaagggggtagcaaggacaataagtctcagaatcacaagggtggtgctcagaaaggtggtggtcaactagcacacttccaaagtgctaatggagggtcaaaagtaccccccaagaatcagaaatctgtcgacttcaacttatctgaagatgaacttgatgagagtgattttgatgaatttgatgatgactatgatgagtttgaagatgattttgatgaagaggatgaagaggaagagtatggtcatggtcatggtcatggccatgggcagcaggggcatcctatgcaacataacaagatgatggctatgatggcccagatggggaacgggcgtgggccacatgggcctggtggaatgatgaatgggcctgccatgaacggccataaagggaatgggggtgtcaagaagggtgaggtcattgatctgcctatacaaatgaagggcaaaggtggaaacttcagcttcagcgagggtaaaaatgaaataaagggcaatggagatggtggtcaaaagaacaaaggtggaaagcaaaagggtggagataataatcataacaatggtaacaagaaaaagaactccaaaggcaaaaatggtggtggcttcctagttcggttcctaggcttaggaaaaaagaacaagaagggaggcggaggtggaggttcagccgacacaacaacaagcaagaataaaaac

SEQ ID NO: 18605 - DNA, 1193 bp, Glycine max
  Clone ID: LIB3092-062-C5_FLI
aaatcctcagttgagatggcaaagaagcttcctcaggaaaaacgattatgtcttttaaaatgtttagaggcatcattggccctctgtggtatctgtaatgaccctcctgaagatgctgttgtttcagtttgtggtcatgttttttgtaaccagtgcatttgtgaatatcttactggtgatgacaatcagtgccctgctccaaactgcaaaactcgactaagcacgccctcagtgttttccaaagtcacactgaatagttctttttctgatcagccttgtgataatttgcctgattactctggttgtgaagtggaggaatctgagttttgttctcaggctcagccatatgattcttcaaaaattaaggctgcacttgaggtgttgcagtcgttgtctaaaccacaatgctttgcttcccaaaacaattctgtgcagagcacttctggggaaagtaccgatggccttggtagctcctctagtgctgacagaatgaaatccttgaatgaaattcctgagagtcaaaatgtgcttgaggagagaagctctaataattcagttggtgtaggggagaaagctatagtgttttctcagtggacaaggatgctagatatacttgaagcatgtcttaagaattcgtcgatccagtatagaagactggatggaacaatgtcagtcactgcaagagataaagctgttaaagattttaacactctccctgaggtttcagttatgattatgtctttaaaggctgctagtcttggtctgaatatggttgctgcctgccatgttcttatgctagatctatggtggaatcctacaactgaagatcaggcaatagaccgagcacatcgaattggacaaactcgtcctgtcacagttttacggttaactgttagagatacagttgaagaccgtattttagctctgcaggtgtcagtgggttgttctttttggtggaagcagaagaaacagggtgctgaaaattttgtagcatggcctctgttgacactcgacatgaagattatatgaattgtcttttatagagagatgattcaattgtttaccttgaaattttggtttagttgttaacatttgtataggttgtagagagtagtagcatagacagaaacatagaaattgtgctcattgtaaatattatagatagataatatctcttttccttttccaatctt

SEQ ID NO: 18606 - DNA, 1248 bp, Glycine max
  Clone ID: LIB3093-002-E11_FLI
tgctctgctattaccctgtttcctgtggaacaaatttccatctagctctcctccgaattaggttttgttctggagaaatgtatgcagagactggtcttctcttcccatatttgaacaacatctctcacggccttcatcagctcgaggagtactgcaaaacccagaagtccaatgcttcaatggatgaccttgttcagtcttctgtcatgtcagagtatgatttggcagcagagggagatctgttcaaagctcctgaacctattattgaagagccaatcatggatatggatcccatgacagccaccatctccatgatatcttgtggggaagatgtctcctcacagggactaaaatccactgatattgatattcttcaaaatgatcagtttctgcatgaggtgttctatgaatgtgaaaaggatctcttagaaaaggcagcaatagagccaccattctctgagattctggaaatcaaggttcctcttctgaacattgatgagaacacaattcaagaaaacaagctgcttcctgacatgcaattagcaaagagtgtcagctcaggaagtttgagctcaatggactggatgcgtggagctgcaatgaagcctgctttcattgatatccctgcaatagatttcaatgcagattatggcatgcggagatcatttagcgaaggagatataaagactcttggtaatggtaacatgaacatcgtccaatcaccccttgagaggcccttgcttatcagcaactgcaccagtgaggaacgctttcaaaagctctcaagatacaggaataagaggacaaagaggaattttgggaggaaaatcaagtatgcttgcaggaaggctcttgctgacagtcagccaagaatccgtgggagatttgcaaggactgaagagtctgatgtcaagagggaatgaatgacttataactgatttagtaggaagaaagtagagttgagtagctatatctgatcaagctatatggaaaaactcagcagtaatatgtgattagaacttatgtggggattctctgtatgcttgagcagatatttgctgaataaaccaggccccaaacttcttggggtagttcatctcttatctattgtattaacgcccctatagacggaaataaccttccagatatgtatataggtttgttgaataatggaaagaaaaagaaaggattttactatgttcatatatatgatgaaatgacaaggtaacatcaataatttcgttctct

SEQ ID NO: 18607 - DNA, 1998 bp, Glycine max
  Clone ID: LIB3093-002-F7_FLI
atgggatgaaacatcaaacataccacgtcctgagagagtttcacaatggaagatagagcctgctcttgctcctcttgctctgaatcctctaccaatgcccaggcctaaaaggcctcgatctaatgtggttccatcatccccagattcctcggttcttactcgtgaaggtatggataggttgcttttaaatatttgatatttatttgagtttcatctttgcttaacatatgtaattatgtgaagcctgatctgttatcggtgattaacagcttctaaagtaagcgtagatcctttgccaacaagtgggtttcaaagggtcttgcaaggtcaagaactttcgaccttgagaggtaattttgctgaaagcaacgaatctgatacggcagagaagtctggtgtgtggccacctgccacggatgatgaaaagattgatgtttctacctcaagaaggtatgggtcagacagctggatgtcaatgggaaggcatgaaccaacatatccagatctactttcaggctttggggcccacggagatcattcatcccatccatcatttgttgatcaaaatggtcctgtagctaaccttagtagaaaacatttgctggatcgtgaaggcaaacataatgttcttagtccttggcctggagtgccatctagcctatcactgaatctcttggactcgaatttaaaaggctctgctcaaggcggtgatacagcttaccaagtacgagggaatctgaggtatagtagtgcatttggtgagtaccctgtgcttcatggacataaagttgagcattcccatagaagctttttgatgccaccaccaccatcaactcaatatgagagtcctcgttcaagagaactgttgtccaaaccaatatcaggaaaaccttgtgaggtttcaaaactgaaagacagtgactgtaagctatttggcatctcacttcttagtagccgccccattgcatcagagccttctctatcacaaagaaatgttacaagtgagtcagttggtcacatgcatacagcatcacaccatcaacgtgcaattgaaaacgatcagaagtctgagcattctaggggttcaaaaccagctgatggtctgctgattgatgaccacgaaaaggtgttacaaacttctcagccacatctgaaagatgtacaagcaaaatctcatagtggttctgctagaagttgcactaaagttcacaagaagggtattgcacttggtaggtcagtggacctcacaaaattcagtgattatggggaattaattactgaattggatcaactattcgaatttggaggtgaattaacttctccacaaaaggattggcttattgtctacactgataatgagggagatatgatgcttgttggtgatgatccgtggcaggaatttgttgcaatggttcgcaaaatttatatctaccccaaagaggagattcagaaaatgagcccgggtaccttgagttcaaagaatgaagagaatcaatctgccagtgaaggtgcagcagacgcacaagaaatcgagtgtcagctcaatcattcatcttcagatacctgatagttcgtagatttgatttccatagcttccaggttccggactggagtggaaagtagtaggtgactgtcataaagccatctagttggagaatatgacctgaagaaggaaattctaattctgaatctgactgttttatcaagtgagtgcttgtgtttggaatcagaatatggatggcatgaatgagtatccatccaattttggaccgtgtcgtggaattagtagtagtagtagtagtagtagtatatatgccttccctgttatacactcctaatatagtagtatagtacggaattgtgcgttgtgcaaggtgataagggagtgtatcggccttgcatttttcaacaatcctaccttgtacatagttttactcgcaaccttagtaccggaactcgttaatgtaattaagttgatatacaagggcgattttaaac

SEQ ID NO: 18608 - DNA, 2713 bp, Glycine max
  Clone ID: LIB3093-005-B3_FLI
gtacgtgcgaggtgaaatattagggtggaatccatgacttgccggggttaccagctggagtgaagtttgacccaaatgaccaagaaatattagaacatttggaggcaaaagtggcgtctgatgcatgcaagcttcatccccttattgacgagttcataccaacgcttgaaggcgaaaatgggatctgttatacacacccagaaaagctaccaggtgcttcatgttttacttaatttattttattttaattattttttgtctaattaattagtatagtttcgtgttttagaatacttattgcatatacacatcattgaattctcatttattgggagacacgtcttgatgtgcacgataccgcatgcatgaaattaattgttttagcaatgaaatgattttttttttctttgaaaaggatctctaatcataaggcggttcaaatttgaaaatgacagcagaacattttatgcactctataaaatgagatctcaaaaattaacttatgagaaaatgtttttggtttaaaattaaattttcttcatatttttagagatactaaagattttaatatgagctagaaattctagctagtatgagaaattggggataaatataaacggataacctgaaataaaaaaaaattacaagtctacacaatcatgcatttcttcattcgtcgttcttgcaattgtaacgtagcaaagaaaactttccgtccagtactccttgtatgtgtcattcttaatatatgttcaaagaaagatgcacatgggagaagcatgcagctcttttatataaccaacttcttgttcaactatatatgttgcaagaaagttcttaagttagcaatgactaccaaactcatcaaaagtggcatcttatcttccattagccatgtagcaagagaaatgtaattgtcatcccttaattttcagcaatatttttttatattttatgtcatatttcaacatgataccaaatagaggattgtcgtcggctaattgtatcaacaaaagaaaaatgaggttgctgcctttttactcttaatggggagctttctcaatttcttactcgattcaacttttacaaatatacattcattttctcttatatttcatttgcatcacattttctttaattttatctctttttttactaacatatcatttattatatctattttgttctccttaccttttcttatatatatatatatatatatatatatatatatatatatatatatatatatatatatatatatatatatatatatatatatatatatatatatatatatatatatatatatatatatattaaatttttcctaccggataatacccaccttttttatgagattcacttcccaaacatcattcacaaattaaaaagggtaactttttcctggcatcccttgtgggatgtggaattggtggaatgaagagagatgtagagatcaagagagagagaaatgaaagatatgatagctagattatgcaatgcgagagatatgagaaattgttcaatgaaacaatgcaggtgttagcaaagatggacagatccgccacttctttcacaggccctcaaaagcatacacaactggaacgaggaaaagaagaaaagttcacactgatgatgaaggaagtgaaacaagatggcacaaaacgggaaaaactagagcagtttttgcagcagccggtggtgcagtaaaaggttttaagaaaatactagtactctacaccaactatggaagacaaaagaagcctgagaaaactaattgggtgatgcatcaataccatcttggcagtactgaagaagagaaagatggagaattagttgtttcaaaggtcttctatcagacacaacctagacaatgtggcaatcccattataataaaggattcatacgaaaaaatgttgaatgatggaagtggccaagacaacattaatatatcattaatacctaaaactactgcaactcttttggattgctacactgctccttacatagattatgatcacgtccatgtgagtcataacagggaaagttcctcacaactaattattcccagctcggttgttcaagttgatggctcttatattcgcttaacaatggatgcaaagaaagcaagatttgaaagtaacactgggaagagattctaggcagagcagcaatgacaaagacttgcatataaatgttctccatattgtttcctttactaattgatcagtacgtaacattatttatatgtgggattagaatgaaggaatttcaagggttggaaaaataagttggcttccttattaagatcaatatggtgcaggcatggtggacttaatttcccataattgaccctggttgaagttgagagacaagcaagttaggtatatatatttgcggtactgtagtttgattttaattttagggtacatgtatattcgtaaaatgtgcttatagatattacaatagtagcagggatatcgtttattgactactcttcagaactatagtcagtctatatactgtattttgtctagaattgaattttgcaccccctcaatcctgaaaaaaatgctgagatgtttcattattattatattatgcgtgtcagctacttaatttgctgggaagtttgtcccttgtagttttcccccctgttttctttgaaaggtcgattgtaaaataaggtgaagaacagtagatttttttt

SEQ ID NO: 18609 - DNA, 1268 bp, Glycine max
  Clone ID: LIB3093-006-E10_FLI
aaattctcaactttcctaactttagcaaccatccaagaagttgatcagttccttgtctctccttgaattataaaaccattcacagtcttgaacccaatttcactctttgcacctcaaacaccttataagcctcaatttcacaaccaaaaatgcaaagttcaatctcacaatctgagatttgcatcactgattaccttctaccccaagaagttccatctcaatttcaatttccagatatgagcaacaataacataccaatgaaccataccaaccttcaaatgcctcaaatcacatctttctccaagcctccaaggtcctcatcaaatctaagcaaccgcaaaccgtccttgagaaacatcacaatcccttccataacctcaggtcttacaacaactatgtcacaaacaacaacaacaacaacaatagctacaaccatgtataacaacaatcaagttacttcttcttcagatgaaaccaacaacatcaaagagaacaagcactatagaggggttagaagaaggccatggggcaagtatgctgcagaaatccgtgaccctaatagaaaaggctcaagggtgtggcttggaacctttgacacagccatagaagctgccaaggcttatgacaaagctgctttcaagatgagagggagcaaagccatattgaatttccctttggagattggagagtcagaggaatcagtctcaagctgcatcaaggttggtgtgaagagggaaagagaggaagagagtaaaagcaacaactatgagaaaagtgagtttaacaacaataataatagtaataagcatgtgaagaaagaagagtgttctcccaaagctgtttgccctttgactccatcatgttggaaaggcttttgggacactgatgttatgggaactatctttagtgtgcctcctttgtcaccactatctccactaatggttgtttgagattgtggactttcgctatttcaatgatggtttgaggtaaccaaattaaggagagatgatgctggggattgtcctctctgatttaggttggtaatttgcgtaaatcaaaatggtagtactaattaatctactaatagattaatttgcaagtgaagatatatgggtttgtataatgtaaatataggatagtatgaagcaagatttttttgtttgttaaaaaaaaaaaagctctcatgcttatcttcttcccttagttatgtttcatttggtcaagaaatgtactgtacttgaagcaacattgaaatttgtttattcgtt

SEQ ID NO: 18610 - DNA, 756 bp, Glycine max
  Clone ID: LIB3093-006-G6_FLI
gtgaaaacgaatggaggttgatgatcgagagagagcttttgggccgggagattatgaatgttatagcatgtgaaggttctcagaggattgagaggcctgagacatacaaacagtggcaggttaggaatacgagggctggtttcaagaagctccctctgaatgaggaattaatggccaaattgaggactgcgttaaaggaatggtaccacagattttgtcttggatgaagataacaactggttgcttcaaggttggaagggccacattttgtatgcttccacttgttgggtgccagcataatgagatgctactggactgggttcagaactcatactatactgaaggttttggtatccttggtttggctacctctacttgcttaaccttcaggtgctgtgatgaagattgcaacaagctttgcacgaagttacttggtaaaactatggcacaagttttcgggtagaattgagacttgtgaatgtaatgcaatttctgtaatgatattgataagtagggcctattagagtaggaaggccattatagcatgtttgcccgagtaccagtatattgagttattttctctaaccaacatgtattaggcattttgttaggatggacccaaagaggtccaaaagaaggatgtttaagtggctcaaagattataaaagataatgttttttatttataaattatagttttttatttaatttatattaaaataacatgatgttgagacttggataattattatccatt

SEQ ID NO: 18611 - DNA, 1234 bp, Glycine max
  Clone ID: LIB3093-010-H4_FLI
tgcaacgccattgcacttggcagctcgtcagagacggtctgaatgtgtacatattctattagacagtggtgctcttgtttgtgcttcaactggtggatatggctgtcctgggagcactcctctacatctagcagctagagggggatctatagattgcattcgtgaattgttggcatggggtgctgatcgtcttcaacgcgatgcatctgggcggataccatatatggttgctctgaaacacaaacatggagcctgtgcatcattgctaaatcctacatctgcagaacctcttgtctggccgtctccattgaagttcatcagtgagcttaatcctgaagccaaagctttattagagcaggcattgatggatgcaaacagagaaagagagaaaaacatattgaaagggagttcttactctctgccatctccatcacattctgatggggtagctgataatatgtctgaggttagtgagtccgaattatgttgcatctgctttgagcaggtgtgcacaattgaagttcagaactgtggccaccagatgtgtgcacaatgcacactagccctgtgttgccacaacaagcccaaccctgccactgcctgtcttactccaccagtttgtccattttgtcggagcacgataacaagactcgttgttgtgaagacagaatgccacgatgaaactgatcaagacagtgctgatatcaactgttccaagctgagcaagtcatcaaggaaactcagacacttgaatgacagtggtagcagcagcttcaagggactatctagtgttagttcattcgggaagttgggtagccgcagctctggaaggattgctgctgagtggcttgataaacagtgatggcaaattacttgtggtaatcaatgattccatattggcaagatacggtaactacagaggtgcttaaccggcaaggcaaaaatcaaagttgaaaacaggtgaaggaatattatgtaattttgggaaataagcaaaagtgagttgaagtgaagtgaagttcgcggtaggtaccaagtgttgttgggaaaaagagaaggggatgtcatgttgttgtagtattattgttacttgagaatgaagaagcatcacctgcgtcgatcgatgattttgggcatcgtcaataattttattttatcatacgtatcccagtaaagtgggaataatttctctcaaaagtataaatcaataatattaagggaaagtgtattgctt

SEQ ID NO: 18612 - DNA, 2631 bp, Glycine max
  Clone ID: LIB3093-013-D11_FLI
gttttggttccgcagaagattctgaattctgatgctctagtgcgattccatgggagaggtggtcatcatgagtggagagaagaagtcagttagagtggagggggtggagaaggaagatagtggtggaagtgggagcaaggctggtgaatttaaggggttgatgaggtgggagaagttcttgcccaagatggttttgagggtgctgttggttgaagcagatgattccacaagacaaattattgccgcgcttctcagaaaatgcagctacaaaggttatgtgatggggatctgggttcaatgaaagtctaaggatctaatggctcctttccacttgctttaagagtcttggcagtctggaaactacaggcttacatgatagtgatacaattattttcttacatgatatgattattttcagttgtctatttgccataaagaatttctattattgacctttgttcttgtatgaaacttttaatgtgagaaaatgaagtacttgaaactaatttacacaatattagaacttcaaaataactttgctcatctgctttgagcagtggttgctgttcctgatggcttgaaggcatgggaattactcaagggaagaccgcacaatgttgatctaattctgacagaagtggatttgccatccatatctggctatgcacttctcacattaattatggagcacgagatttgcaaaaacatccctgttataatgatgtcttcccaagattcaattagcacagtatacaaatgcatgttgagaggtgctgctgattatcttgttaagcctattagaaaaaatgaactgaggaacttgtggcaacatgtttggagaagacaatcatcaaccactggtattaatggcctccaagatgagagtgttgcacaacagaaggttgaagccactgcagaaaataatgctgctagtaatcgttcaagtggtgatgctgcttgcattcagagaaatatagaactaattgagaagggaagtgatgcacagagctcttgtaccaagcctgactgtgaagctgagagtgaccctgtcggtaacatgcaggaattttctctgctgaaatgtggggaagcatatccaagtggaacagagacacaacaggttgaaacaagctttcgcttaggccagacattaatgatgcatgactgtcatgctggaggattaaatgtgagtatccgcaaaaatggtgaggcaagcacgactaatgacaaggatactgatacagagcattttgggaatgctagcatcagtggtgaggctcatgacaatccctatgttcaaattaactcttccaaggaagctatggacttgattggagcatttcatactcatccaaactgttccctgaaaaattccacagttaattgcacaggcaactttgaccattctcctcaattggatctttctttgagaagatcttgtcccggaagctttgagaataaactcactgaagaaaggcacaccctgatgcattctaatgcttcagctttcaagcggtatactaccaggcaattgcaaatatcaatgcctgcagtgttaattaacttctctgatcaacaaagagaacagataacaaattgtgagaaaaacatctcacacatcgctactggcagcaactcagatagttcaacacctatgcaaagatgtattgtgtctccaactacagtccaatcaaaagaatctgaacttgcaacctcacaccccccgcaaggacattctctcccaattccagtaaagggtgtaaggttcaatgatctatgcacagcctatggttctgtacttccttcagtgtttcatacacagtcaggtccaccagcaatgccaagtccaaattcagttgtgctccttgaaccaaactttcaagtaaatgcattttatcagtcaaatatgaaagagagtagttcagagcagctttatgaatctcgtggtccaaatggaaacaccacccaaaaccacattgtgtacacacaggagcacaaatcagaacatgcagaagatcgaggacatatctctcctacaactgatcaaagtgtgtcaagtagtttctgcaatggaaatgcaagccatcttaacagcattggttatggaagcaactgtggaagtagcagcaatgttgatcaagttaacactgtttgggcagcttcagagggaaagcatgaagacctcacaaataatgcaaactctcatcgatctatccaaagagaagcagctctaaacaaatttcgcttgaaaaggaaagagagatgctatgagaagaaggttcgatacgagagcagaaaaaaactagcagagcagcgtcccagagttaaaggacaatttgttcgtcaagtgcatcctgatcctcttgttgcagaaaaagatggcaaagaatatgatcattcagatttctgactcactggagaggagagcatgaattccttagagtatatagttgcttcaaaattttgttttcctgaatccttaaataccagaagcacttaatctgtatatgctttctaaaaccgtttttcttatttgcccttactgtagatcgtgatatataatatacctgatgtattatatcattgtaattttacagtcttatagggatcttcgtgcatcattatttattt

SEQ ID NO: 18613 - DNA, 489 bp, Glycine max
  Clone ID: LIB3093-015-A9_FLI
atttgtattggtttagaggaacatagtccgaggaacagccaacacatgtatggtagggagttccaatcgatgttggacggactcgacgaggaagggtgtgttgaagaaccggggtatcaatctgagaagaagcgtcgtctaagtgtggatcaagtgaaggctttggagaagaactttgaggttgaaaacaagcttgaacctgagaggaaggtgaagcttgcccaagaacttgggttgcaacctagacaggtagccgtatggttccaaaaccgtcgagccagatggaaaaccaaacaattggagagagattatggtgtactcaaagccaattatgatgctcttaagcttaactttgacaccctcgatcaggacaacgaagccttacgaaagcaggtagaataatactccttccaaaatataaacaaatttcgattatttatctgtcttattaatgatattttctccaaattatattttatttaataagat

SEQ ID NO: 18614 - DNA, 879 bp, Glycine max
  Clone ID: LIB3093-015-B5_FLI
aaaaattcttaaggatggccacagcagaagaaatttcaactttgaaactgttgcgccaatatctcttgggggatatttcagacccttttctcaccaatctcattccagtaaaacttgaagacccctcatcaggacttgatatgggttcaaacttctcagaacaaagcagcttctgcaagtttctggagtgctttgattttgaagcagaagtggtaggtctcacttctcatcataaggtccaaagctccattgcaacaagtccaccccagaatttcaattttccagaagaaccaatggtgtcaatgaaaaaggaagcaacatgttatgcaacaaggcattacagaggagtgaggagaaggccatgggggaagtttgcggcagagattcgcgaccccaaaaagaaagggagcagggtgtggcttggcacatttgacactgagattgatgctgctaaggcttatgattgtgctgccttcagaatgaggggtcataaagccgtgttgaatttccctctagaggctggaatgtctcatccagagcccaacagcagtggcaggaaaaggagaagagagtacacaacagctgccacaagttcaaggcatgttatgtcatgagaaataattcagtgtgggagaaccatgtttttcttttggcattttttgccagttacacaagttaaagcaaggttttatagttacactacagttgagcatgatgagatctgttatttaaatccttgagttatggttaagggtgaaattgaattaaacccaagaatgaaacagctcataaagaaacctacttctacttttttatacaaggctctcaaagtagaatgtgtgatagtcaccactcaccttagttcattagataatgagg

SEQ ID NO: 18615 - DNA, 1412 bp, Glycine max
  Clone ID: LIB3093-015-G4_FLI
gcactctcttcattactacaggaaacagatttgacagctgagcaacgactgatggtggagacaatattgaaaagcagcaatttgttggctaccctcatcaatgacgttttggatctttcacggcttgaagatggcagtcttcaacttgaagcagcaacatttaacctccattctttgttcagagaggtccttaacttgattaagcctgttgcatctgttaaaaagttatcactcacttcacatgtagcctcagatttgccaatgtatgccattggtgatgaaaaacgtctcatgcaaactattctgaatgttgttggtaatgctgtgaagttctcaaaagagggttgcatttccatcactgctttcgttgcaaagcctgaatcctttagagatgctagaattcctgactttcttccagtgccaagtgataaccacttttatttgcgagtacaggtaaaagattcaggatcaggaattaatccacaagatatcccgaagttattcactaagtttgcacaaaaccaatcattaacaagaaatcctgctggaagtggacttggcctggcaatttgtaggaggttcgtaaatcttatggaagggcatatttgggttgaaagcgaaggtattggtaaaggatgtacagtcacttttattgtaaaacttggaatcccagaccgatcaaatgaatttaagctaccttttgtacctaaagtaccaggaaatcatggatctacaaactttgctgggctcaaagttcttgtcatggatgacaatggggttagcaggacagtaacaaaaggacttcttatgcatttaggatgtgatgtaacaactgcaagctcaagtgaagaatgtctgcgtgttgtttctctggaacatgaagtggtcttcatggatgtttgtacagggttagatggttatgaacttgcagtccgtatacatgagaagtttacgaagcatcaagatagaccactgatagttgctcttactggaaacaccaaaaaggtaacaaaagagaactgtatgagggttggtatggatggccttatattgaaacctgtttctgttgacaaaatgaggggtgttttatcagaactattggagcgccgagttctgttcgaaagtgtttaacctgttagattgttgtacatagctatatcaaatttggagaagagcacaaacttatgaagcaatgaggcaattgacattagttgtcatcctttttgctgttttgagatcccggcaaaaggaacaacgattgagtctgcgttgttaaataattttttgtgaacacaagttcgtatatgttgtgtattctgcattttatagcagactttcgatgttttgcaatggcggtaaaattgcatttatactgtcctagactgttttgattaattgatttaagtttaatt

SEQ ID NO: 18616 - DNA, 792 bp, Glycine max
  Clone ID: LIB3093-016-E5_FLI
taccaatatgaacagaatctcctctcgacacctttgctttgctgcagctcgcaactgcaacttcccacaaatataaatatatattacttcatggtcacacatagttaattttattaattactactaggtagctggtttttaataggtagtaggtaggtgtaatcgttgtcttcctgcagatatggaagaagcgggtttaggagattgttgttcctctaatacgactattacgaggaaaagcgagaagcgaaagcagcagcaccaacaacaagagaagccatacagaggaataaggatgaggaagtggggcaagtgggtggcggagattagagaacccaacaagaggtcgaggatctggttgggttcttacgccacccccgtcgccgccgcacgcgcctacgacaccgccgtcttccacctccgaggcccttccgctcgccttaacttccccgaattgctgtcccaggacgacgacgtttcgacccaacaacagggcaagatgtccgccgattcaattcgcaaaaaagcgacccaagtcggcgccagagtcgacgcgctccaaaccgcgcttcagcaatcctcgtcgacacactccattagttccagccacgtcagctatgagaaaccagacttgaacgagtatcccaaacctgaagattagtaatttccttcaaccttcaagattaatattgatccaccaatcatgggttctgatgtgacttatatatagggcttcaacttgccctcttcacctatgttaatttgaaaagaaaaaacttttatatttgtcat

SEQ ID NO: 18617 - DNA, 765 bp, Glycine max
  Clone ID: LIB3093-016-F6_FLI
aatacaacagcaacatgatggtttcagtttcttgagggtactaatatgaacagaatctcctctcaacacctttgccttgctgcagttcgcaactgcaactgcactcaaatataaatatatatacatatatatatatatatatatatatgtattacttcatggtcacacatagttaagtttattaattactaggtagctggttttgaatagggtagttggtagttatagttgttgtcccagatatggaagaagcaggtttaggagattgttgttcctcgaattcgacgattacgaggaagagcgataagcgaaagcagcaacaccaacaacaagagaagccatacagaggaataaggatgaggaagtggggcaagtgggtggcggagattagagaacccaataagcgttcgaggatctggctgggttcttacgccacccccgtcgccgccgcacgcgcctatgacaccgccgtcttccacctccgaggcccttccgctcgcctcaacttccccgaattgctgtcccaggacgacgacgtttcgacccaacaacagggcaacatgtccgccgattcaattcgcaaaaaagccacccaagtcggcgccagagtcgacgcgctccaaaccgcgcttcagcaatcctcgtcctcacactccgctaattccagccacgtcagcagctctgacaaaccagacttgaacgagtatcccaaacctgaagattagtattttcttccaccttcaagattaatattgatccaccaat

SEQ ID NO: 18618 - DNA, 1835 bp, Glycine max
  Clone ID: LIB3093-017-F2_FLI
cataactagcaaaaaaatggaccttctcctaaattgcctaaaccttaacaccattgctattgcatcaatcctttctctaatcttcttatgtttgtttctatatcgtaaaaattctcgtgggaaagatgctccagtagtgtctggtgcatggccaatacttggtcacctctcattgctgaatggttcacaaacaccacataaagtgttgggtgctttggctgacaagtatggacccttattcaccatcaagctcggtatgaaaccggctttggtactcagcaactgggaaatgtctaaggaattgttcaccacaaacgaccttgccgtttcatctcgccctaaactcgtcgccgttgaagtcatgtcttacaaccaagcctttgttggcttggcaccgtatggaccctattggcgcgagttacgtaaaattgtcacgttcgagtttctctccaatcgaagaatcgaacaacggaaccacattcgtgtctccgaagttcgaacttcgattaaagagctattcgacatttggtcgaatggaaataagaacgagtctaggtatactctggtggacataaaacaatggttggcgtatttgacatttaacatggttgtgcgaatggtcgttgggaagaggtattttggtgtcatgcacgtggaaggcaaagacaaagcgcaaaggtttatgaagaatattagggagttcatgaatttgatggggactttcacggtggcagatggggttccttgtttgaggtggttggatttggggggtcatgagaaggctatgaaggcaaacgctaaggaagttgataaattattgagtgagtggttggaggagcaccgtcagaagaagcttttaggtgaaaatgttgaaagtgatagagacttcatggacgtgatgatttcagcacttaatggtgcacaaatcggtgcgtttgatgctgataccatatgcaaagccacaagcttggaattgattttgggaggaactgattcaacagctgttactcttacatgggcacttagtcttctattgcgaaatcctcttgcattgggaaaggctaaagaagaaattgatatgcaaattggcaaagatgaatatatacgtgagtcagatataagcaaacttgtgtatcttcaagctatagttaaagagacactaagattgtatccaccagcccctttttcatcacctcgtgaattcacagagaattgcatcctaggtggataccacatcaaaaagggaactcgacttatccataacttgtggaagatccacagggaccctagtgtttggtcagacccattggaattcaaaccagaaaggttccttaccactcacaaagatgttgatctaaggggtcacaattttgagttgttaccctttggaagcgggagaagagtttgtgctggaatgtcccttggcttaaacatggttcatttcactttggctaatttattgcattcctttgacatcttgaatccatcggctgaacctgtagacatgactgaattctttggatttaccaacaccaaggctactccacttgagattttggtcaaaccacgtcagtctcccaactattatgaaactttataacccttatgtcagtcgtgtgatccttattgttctttttcaaatcgtggtttgtcgtctattctaagttaaattgcgtctgttttggaaaattttgttatgtaaccttgcgatattttaatttttcttaattaggtagatgcattgtactggcttctatttactgatcgtgaaaacccgtggttttgttatcaatttatttgtattggcgtatggttaaaataatattttaaatggg

SEQ ID NO: 18619 - DNA, 926 bp, Glycine max
  Clone ID: LIB3093-017-G1_FLI
gcgttttgctgctgttattatgaggatcagggaaccaaaaactactgcactcatttttgcatctggcaagatggtctgcactggagctaagagtgagcaacagtctaaattggcggcaaggaagtatgctagaattatccaaaagcttggtttcccagctaaatttaaggattttaagattcagaacattgttggctcttgtgatgtcaagttccccattcgacttgagggtcttgcctattcccatagtgctttctcaagttatgaaccagagctgtttcccggactaatctatcgcatgaagcaacccaagatagtcttgcttatatttgtctccggaaaaattgttctgacaggagccaaggttagagatgagacttacacagcttttgagaacatatatccagtgcttactgagttcaggaaaaaccaacaatgattactactgtcaagagagcaggagcaagacttgattgaactgtaaatatgaagaccagagatagaaatatctgtaatcaggattgagttttaataagacacctgtgtttgttctgtctttttctctcttttaagaaaagggatcctgctttagtaaagtggaagaaaaaaaaaaccgtgtattgaatttgactgtagaaaaagagatatataagaggcagaatgaaaagaaaaagtggaagcttgtgcaaatcatgaatatctttcactgaagtggaaactatttttggttcatttcaactatgagcaactttgttttttagttaatcaagttctaaagcttaaggatagtgtcttcgtatactgttcaaaacagcaacgacgtgtttaatacactatgttttatgaagctagcaacatctaggtattttaatttcatattggaatttgaagacgttatgataaataaaacactacatttgataact

SEQ ID NO: 18620 - DNA, 791 bp, Glycine max
  Clone ID: LIB3093-019-A6_FLI
atctgaaacaagcatggagtttggaaatggtgaattcagctcagaggagctaaagaaaataaaggagaacgataaacttgctgaaattgccatggccgatcctaagcgtgctaaaaggattttggctaatcgtctatcagctgctcgctcaaaagagaggaagatgcggtacatttctgaattagagctcaaagtacaaacacttcagacagagacaaccacattgtctactcagtttaccaaattacaggtgtgtacggtctgagttgagccaatattcccttttcttcagtttttcaattatattttattgtgttgaataatgtttgcttctagcattcatttattcttttctttcctttcttttgttgtgcttgtctacagatggataattcagagctgaaaagtgagaataatgagtacaaattgaggattcaagccttggaacagcagtcccaactaaaagatgctctgaatgagaccttggatgctgaagtgcggcgtttaagacgcacagttgcagaacttggtggagagtctcttctctcaagtcgcatggctcaacagcttgctattagccaacaagtgttccagttacagcaccagcagcaccctaaccagcttagacatgttcaactggacaatagccattcccaggagcagacacagactcagtcacagtgccacaatggcaaagctactgcctactgattagcactctgataccatgtatgctcaatgtttgtgatatgaatctgaataggatattgcatgaccaaacaagctcaagt

SEQ ID NO: 18621 - DNA, 2349 bp, Glycine max
  Clone ID: LIB3093-019-C2_FLI
tggatcaaataattcgggggacgatgagaggggtagaatcgaagaaggtgaacgtagcttcggcggtaaccggtggccacgacaagagactttggccttgttaaggatacgctccgatatggacgtggcgtttcgagatgcaagtgtcaagggtcccttgtgggaagaagtatccaggaagatggcagagcttgggtatcacagaagctccaagaagtgcaaagagaaattcgagaacgtgtacaagtaccacaagagaaccaaagaaggccgaagtgggaaacaagatggcaaaacctatcgtttctttgatcaactacaagcccttgagaaccactctccaacaccccattctcccaacccttcaccaaaacccccacaatcagcaccatcaagagtagtagcatcatcggtgtcactaccaattgcaacaacaacaacagtgtcactaccaattccaacaccaacaacagtgccaatgcagcctatattgtccaacaacgctatactcactagtagtgtccccaatatcactgttccatcaacaacaccactccctataaccattcctcaacccattctcacctccccatcaataaacctcacaatcccttcttaccctccaacaaaccctaccaatttcccaccaccaccaaaccctaccctaccatcctctttccccaccgacaccttctccaattccagctcctcctccacctcctccgaggaaacattggaagggagacgcaagaggaagcgcaagtggaaagatttcttcgagagactaatgaaagaagtgatcgagaagcaagaggagctacaaaagaagttcctggaagccatagagaaacgcgaggacgacagaatagcaagagaagaagcatggagagtacaagagatgaaaagaatcaatagggaaagagaaatcttagcacaagaaagatccatagccgcagccaaagacgcagccgttatgtcattccttcaaaaaatagccgaacaacaaaacctcggtcaagtatcgaccaacatcaacctcgtacaacaaccacaacctcaattacaaccgcagccaccactacaacaacaagtgacacaacctagtattgcagcagcacaaccctcccgtacaacagccaccgcccgtggttgttacacagcccgtggtgctgccagtggtgtcacaagtgacgaatatggagatagtgaaagccgatataatagtaacaacaataataacggcgagaatttcttggcaccaagttcttctcggtggccaaaagtggaggttcaggcattgataaagcttcggacgagcatggatgagaagtatcaagagaatggaccaaagggtcctctctgggaggagatctcagcctcaatgaagaagctcgggtacaaccgaaacgcgaaaaggtgcaaagagaaatgggagaacatcaacaagtacttcaagaaagtgaaggaaagcaacaagcggagaccggaagattccaagacgtgcccttatttccaccagctggacgcgctgtacaggcagaagcacaggggcgaagagagccccgcggcggtggaggcgaagccggagagcgcggtggcgccgttgatggtgcagccggagcagcaatggccacctcagcagcagcagcaggatagggacatcacaatggaagacatggagaacgaagatgatgaatatgaagaagagagggaaggagaggaagaattagaggatgatgaagatgaagaggatgaagaaggtggtggtggtggtgggaactatgagatagtggcaaacaaaacaagtggtggtggtggtgcttctgctgcttcagtgggggcttcaacggagtagtagtgtgaagaaaccaggtttagcgtgggggtgggtcagagagagtgcaggggttgtcggaggtggccattgtggtggagaaattaagaatttgaatattcacgtacggtgaagttacacatggcaatggttatggtatcgacctgtggtggaaggaggatgatgaggtttggttggtactttgttgtagcatataatcagtaagattagatttttttttttcttttctgttttataacagtttgtttattttttgggagaataaataaagtccgatgagagagggaatttaagatacagaccaataaagaagagagggaccttaattaaggttgtattttttcttttcttttatcttcatcttatttttttttaatgttcgttcttggtgctgtaaatgggaggagagattaattcgggttttgtccttttcttatctctttaagttttgacatcttgttactcttcaaatgactgacattgacttctctttc

SEQ ID NO: 18622 - DNA, 2537 bp, Glycine max
  Clone ID: LIB3093-024-F2_FLI
ttcggacggaacctccgccggttcttccgacgaggacaccggcgggcagacttgtcaccagtgccggaggaatgaccgcgaccgagttacttggtgtcaacggtgtgataggaggggatattgtgatagctgtttatcaacatggtactcggacatttcattggatgaaattcagaggatatgtcctgcttgccggggtatatgtaattgcaagacttgtttgcgaagtgataattcaattaaggttcggatacgcgagatacctgttctagataagttacagtatctccatgtgctgctgtcgtctgtgctacctgtggtaaagcagatccactgtgaacagagttttgaagttgaacttgaaaagaagttgcgtggtgctgaaatagatcttccaaggataaaattgaactcagatgagcagatgtgctgcaatttctgtaggatacctattactgattatcatcgacgctgtccaagttgttcatatgatttgtgccttagttgctgtcgagatcttcgagaagcaactgcagatcacaataaagaaccccaaacagagcaagcaaaaacttctgatcgaaatatattaagtaaatttcctcattggagatccaatgacaatggaagtattccatgtccccctaaggagtgtggtggctgtggttattcttcactaaatttaagccggattttcaagatgaactgggttgcaaagttggtgaaaaatgtagaggaaatggttagtggctgcagaattagtaatgccgatggtccaccggaaaccgggctgaatgatctgaaactttgccaatattctcacagagaagccagtgatgataattatctttattgcccagcatccgacgatatcaaaactgatgggattgacaattttagaaagcattggaaaactggtgagcccattattgttaagcaagtatttgatgggtcatccatttcaagctgggatccaatggtcatatggagagggattctagagacaatagatgagaaagcgaaagatgaaaaccggatggttaaggccatagattgcttagatgggtctgagattgatattgagcttgctcagttcatgaaaggatactttgaagggcttattcttgaaaatggttggccacagttattgaaattgaaagattggccttcacctagtgcttctgaagaatttctgttgtaccaaagacctgagtttatcagcaaactacctttacttcagtatattcactccaagtggggccttctcaatgttgcagctaaattgcctcattactccttgcagaatgatgtaggacccaagatatatatatcttatgggattagtgatgaacttggtagaggtgattcagtgacaaatctccacttcaatatgcgtgacatggtgtaccttttggttcatacaaatgaagtaaagctgaaggactggcagagaactaaaattgaaatgatgcaaaaagctaaagctaataaggaatttgaggcaaaagaatcacatggggatcctcaaatatcttcaagggggagttcacctgattcctcacttggtacaaaaagtagtggactggaaatagactcaaaccagaataagtcaattatggatcaagggtttgaaatttattctagtgctgaaggtaatacggccaattgtaaacttccattcaatcaaaatggagacgtctctgagaaaacacatcctggagttctttgggatgtttttcgtcggcaggatgttccaatattgactaaatatttgaaaatacattggaaggaatttgggaagtcagatgatcttggaaatgaatttgttgaatggcctctttatgatggagctatttttcttgacaaacaccataaaagaaagttgaaggaagaatttggagtggagccttggtcatttgaacagaatttgggggaagctatttttgttcctgctggttgccctttccaagcaaggaatgttcagtccaatgttcagttaggccttgatttcttatctccggaaagcgtgggtgatgctgtaagattggcagaggaaattcgctgtgtacctaatgaacatgaagcaaagcttcaagttttggaggttgggaagatctccctttatgcagcaagttcagccatcaaagaagttcaaaaacttgtacttgacccaaagtatgcaaatttcagacttgtcttggcaattgcattaacttggcgcccagatcggttatggagatcctaatttgactgcaatggtttccgagaattatgagaagatggttaagcggaggcagattacttgtgcttgaacttccacactcggtcattgaatccggaaagaggggggattgtgtacattagttgtatttgagcaatattttatgggttggtattttcagtgtagttttgatcaaatacctaggtaatcatttaaatgtgtataatagttacgttagagaatcatgtaatgaccaacttcaaatctgattttatttcaaaatgtggaaaagaaacaatgtaatatatacaaagct

SEQ ID NO: 18623 - DNA, 1258 bp, Glycine max
  Clone ID: LIB3093-025-E10_FLI
gttctgcaagactgcaactattggggaatctttcgcagcctcccactaaatcttttgaaaaaatattgaatcctcaaagtgccgatcctcctaaatccaatgtttgctctttttagcccttctctccctatatattttttcacaagcacctctttcaattctctccgtttcactagctcttattccaaagcaaaagaagaagaaagggcaaattagtataatatggagaccatgaatgttcaggtgatgagaagcttatcagatatggtaattaaaaaaggaccatggactgaggaagaagattctgttctgatcaactatgtcaacgtccacggcgaaggccactggaactccctcgctcgctcttcaggtttaaagcgaacgggcaaaagctgcagactaagatggttcaactacttgcgcccaaatgttcgacgtgggaacatcacccttcaagaacagctcttgattctcgaactccattcccactggggcaatcggtgggccaaaatagcagaacaactgccagggagaacagacaatgagataaagaactattggaggactcgagtggtgaagcaggctaagcaactcaaatgtcatgtaaacagcaaacagttcagggacgccttgcgtttcgtttggatgccgcgccttatggagcagattcaggcttcttcttcttcctatggccttgatcaaaccacgttgtgcaacactcaaacccacagagacaactcaatggtttcatcgtactcatcagaggttgatcttcagcctccttctctttctgatacaagtataacttcatcatcttacaatttaattggtgatggaggcctgtcaacggaaagtgcagaaaaggggtccatatactctctttggcagcattgggactactctgacatacaagcatttgagccatgcaatggttttggtgatgcagacttgtggaccgatgaaaacatgtggttcttgcagcagcatcttgctgatgaattatgatccagttttgcaatttacactaggctttgcaattaacaagttcaacgatatatcgctaattaaactactgaatgtcattatttgagtgatgattgattgtttgtaattgtcctacatgatacattaattttcttatgaaataagatacttgtagttgaatagtacatttctctaagaacatgtaggaactcaatttaagttgaccctctgtttagtgtccgttattgttatatacaatataagaacattcatt

SEQ ID NO: 18624 - DNA, 513 bp, Glycine max
  Clone ID: LIB3093-027-E9_FLI
ttttccaaaaggagaactgggctgcgcaagaaagccaacgaaatctctgtgctctgtgatgctcaagtagcactgattgtgttcaatgctaaagggaagctttttgagtattcttctgaatccagcttgcttcaaagtcaaactgaaatagtactcgggaaggtttttaaattgtgcggccgtgattacaatttcgttgcaatctttggtattgtggaaaattaagaaaaatgcagctgatgttgtaacaattgcgattatgacgcggttgtgatgagttgaaaaacttgatgctgccactcatggtcacagacggtgtttccaaaccttggtgcagtaaaaagaaatgaaatagtagtaatatacatttccatacaatttcctagctaatttgttattgtgttttcattacctttttttatttattttttcctattttgggtttaatgcattctaccctctggtgacacatatccgagttataattctatggaataagtttacattatattc

SEQ ID NO: 18625 - DNA, 1390 bp, Glycine max
  Clone ID: LIB3093-028-E3_FLI
ccgcaacagagagtagaaaagatggcgcggttgatcacagtggtgtggtgcgcggtggcggtgctactgtgcgccgcggcgggcgcgtcgtgggtggaggaggcggcgaacccgatacgaatggtggcgggggtggaggcggaggtggttcgggtgatagggcagtgccggcgcgcgctgaagtttgctaggttcatgagcaggttcgggaagagttaccgaagcgaggaagagatgagggagaggtacgagatattctcgcaaaacctcaggttcatccgctcccacaacaagaaccgcttgccctacactctctctgttaatcattttgctgattggacttgggaggagttcaaaagacacagactaggcgctgcccaaaattgctctgccactcttaacggcaaccacaagctcactgatgctgttcttcctcccacgaaagactggaggaaagaaggaatagtgagtgatgttaaagatcaaggcagctgcggatcatgctggacattcagcacaactggggctttagaagcagcctatgcacaagcatttgggaagagtatctctctttctgagcagcagctagtggattgtgctggccgtttcaacaactttggctgtaatggtgggttgccatcacaagcctttgagtacatcaaatacaatggaggacttgagacagaggaagcatacccctacactggaaaagatggtgtatgcaaattctcagctgaaaatgttgccgttcaagtcattgactcggtcaatatcaccttgggtgctgagaatgaattaaaacatgcagttgcatttgttcggccggttagtgtggcctttcaggtggtgaatgggttccatttctacgagaatggagtttacactagtgacatttgcggtagcacttcccaggatgtgaaccatgccgtccttgctgtggggtatggagttgaaaatggcgtcccatattggctcataaaaaattcatggggagaaagttggggtgagaatggctacttcaaaatggaattggggaagaacatgtgtggtgttgcaacttgtgcgtcttatccagttgtggcataaattgcataagaatatggtccctggtgactaccaccttgtcatgcttcagagtttaaagataagtgtcattgtataatgaaaattgctcctagttgggttggtatgatgtattaaataagttagaagttgctgtaaatcacgtaagaatatcatggcctgaattgtgtgtatcacagacataaataacgatcatatattgatagttcatagttacatattgtattgtattgtattgatgcgccccgctttaattatcagttataagaattaagatagcatgtctttgctactttgcactatttac

SEQ ID NO: 18626 - DNA, 799 bp, Glycine max
  Clone ID: LIB3093-028-E5_FLI
ctcattttctagcttccaaaccctaacactcctcttcctcttcgatcatcacctctccacaatgccgccgaagttcgacccctcccagatagtcgacgtcttcgtccgcgttaccggcggcgaagtcggcgcggcgagttccctggccccgaagatcggtcccctcggtctctcccccaagaagatcggagaagacatcgccaaagaaaccgccaaggactggaagggcctccgcgtcaccgtcaagctcaccgttcagaatcgtcaggcgaaggtcactgtggtcccctccgccgccgccctcgttatcaaggccctcaaggagcccgagcgcgaccgcaagaagaccaagaacatcaagcacaacggcaacatctcgctcgatgacgtcatcgagatcgctagggttatgaggccgaggtccatggccaaggacctcagcggctccattaaggagattctcggaacatgcgtttcggttggttgcaccgttgatggaaaggatccaaaggacttgcagcaggagatttccgatggtgatgttgaggtccctctcgattgaggaagaagactttgtttctctctctttttccttctctcttatgtttgtttcgtgttttttaaatataaatctggggaaactattgaacgttttgtttaaggctattttactgttttggataatttagatgatggtttcgagaggtattattatgggctgattagtttatttctctgctcacagtatgatatgttttttgatataattttgccaatggatttttagcttattatgcgc

SEQ ID NO: 18627 - DNA, 949 bp, Glycine max
  Clone ID: LIB3093-031-C9_FLI
cttgcggataagccttgggcttgagccatgtttcctagttttttaaacaatcaaaactattttcttttcattttcatcatttattcttcttttccccccaacccgcttcacagaatatcagaccaacaaactaactacatgctttgtcccctaaacttaacaaaccaccaagaatgattctattccttttttcttggcaatcaacccattagagaaaaccattttcatcatcaccttgttgtgtcttgttattgaaagatctaaattttaagcttgttgagcaaaagggtatgtctgttataggcgcgtattctcattttctctacggagaggtttaccagagagatcaacagtgcccacagtacttggtcagtgggaggggctattttttctctcacaagagtggttgtgggaacatatgggttggaagcagaaagagtgaagggaagattattaaaaggaggaattttcgtgtggaagctatgtggccagatttgtcaagaccgagtgaattggagatggaagaaattaatgattctgagcagcttgatcaaattcttgttcatgcccagcagaactcacagcctatcctcattgattggatggctacttggtgccggaaatgcatctatttgaagcccaagttggaaaaattagcccctgaatatcaagacaaagtcaaattttatttcgtggatgtgaataaagtacctcagactctagtcaagcgtggcaacatatctaaaatgccaacaattcagctgtggaaagatggagagatgaaagaagaagtcattggaggccataaggcctggctagttattgaggaagtcaaagaaatgatccaaaagtatttatgattcttctattttatttttcttgctccctcaaccccccaccccacctcacaaaaaaaaaaaaagaagaaagaaagaagttacaattgaag

SEQ ID NO: 18628 - DNA, 699 bp, Glycine max
  Clone ID: LIB3093-031-D8_FLI
aacaaaacctacgaggaagaagaaagcacggttctattttcccattcccaaacacaaacagagttgttacccttcaacgagaacgacccgcaggacatggtcatataccaagtcctcaacgaagccaatgctctcaccaacacatttctccctcagaggcttcaccaacctcagttgtgcctcgagcccaccagaaacataacaaagaagcactacagaggagttcggcgccgcccctggggaaaatacgccgctgagattcgcgactctgcccgccacggcgccagaatatggctcggcaccttccaaaccgctgaagaggctgccatggcttatgaccgagccgcgttcaagatgaggggctccaaggctttgctcaatttcccagctgaaattgttgctgcaacggagttatctttcaataatactaatagtaacaatcacgatgctgtttctgattccagtgctggtagctcttgcacgaacaattccgttcagctaaataggaatcagtcagaaagctgcacaagtagcacaggttagctaaatggggttcaacaattaattgtagaaatctttttttttttttttcgcaattgggttggtttgttataattattataattatttgtatctgtctgtcttacaggacaccgaaaattaattcatttaatgtgataccatgttcatgaatgggtt

SEQ ID NO: 18629 - DNA, 820 bp, Glycine max
  Clone ID: LIB3093-032-A12_FLI
gggatgaggatgataatggggagactggggaggatgagatgggggtcgaagatgatggggagtttgaagatgacgatgaagaagaagactatggtgctgggtatcttgttcagccagttggacagtctgatgctctcaatgctggaggagctgatgtggatggtggaaatgatgacgatggtgaagaggaggatgaagttgatgacgacgacgatgatcaggtgttgcctcctcctgactcttcccacaagaggaagagggatgatgaagaggacgtggacgacgatgacgatgtggtagcattcacgaagtcacccaagaagcatcattgacttctattatatatatcaatgttcttgttctgtttcaggcttccatgtgttggaagcagggaaacctcagttttagatagaagaacgattgattagtttttaggaatttagctctctcatgaacagaggacatattaggggaaaaaaaaaagaattgtatgttgggtggaaatgtgtttagttcaaaaagtcgttagtgttttttccctcttgcctttcacatagagccgttactctattaaatattcaaatggcagttatcagaggtttaccgctcggtcatgtgctcgatgctggtgttgttggcttgtaaaggaactggctggtgcttggagggaaagggtgggaaccttttcaatttttttttgtttttcaaaatcctctagtttattgagagtacttttttggtgggagaaaaaggaaaaagcttgtaaaaacacctgtagatagttctttctttcttatgatgaaaatgattcctatcgatc

SEQ ID NO: 18630 - DNA, 579 bp, Glycine max
  Clone ID: LIB3093-032-A3_FLI
tttctccaagttgatgacgttactttactggttgaccatcataatgatatgcgcttggacattgaggatatgtcttatgaggagcttcttgcattaggggagcggattggcaaagtaaacacaggtttgtcagaggaaatgattacaagtcaaatgaagacaaaatcttatttattactagctactaatgctattaacttggaggaggcagcttccgaggaacaggaaactgattcttgcataatatgccaggatgaatataaaaaccaagaaaaaattggtattcttcaatgcgggcacgaatatcacgcagactgtttaaagaaatggttacttgtgaaaaatgtgtgccccgtatgcaaatcagaagcattgactcctggagagaagtgtgtataaaatctgagatttacatgtctctgttcctacatgcacacttcttagctactacatttttctaacgatttcatgttttgttgtgtatatgaacccgtacatatagacagtcgcattgtccaactcatttatttgttggcatcaaaacattgtatgtatcaagttgtacagacttctgttgat

SEQ ID NO: 18631 - DNA, 2461 bp, Glycine max
  Clone ID: LIB3093-032-C6_FLI
ccgatgaatgccttcctccgctggacatgtcaaagcagccacctacccaggagttggtggccaaggatctgcacgccaacgagtggcgattcaggcatatttttcggggtcaaccgcgtagacacttgctgcaaagtggttggagtgtttttgtcagctccaagagactagttgctggggatgcgtttatatttttaaggggtgagaatggggaacttcgagttggtgttaggcgtgcaatgagacaacagggtaatgttccatcatcagttatctcaagccacagcatgcatctcggtgttcttgcaactgcttggcatgccatattgactggcaccatgttcactgtgtattacaagcccaggactagtccagcagagtttattgttccctatgatcaatacatggagtctctcaaaaacaattataccattgggatgcggttcaaaatgaggtttgaaggtgaagaggctcccgagcaaaggtttactggtaccattgttggaattgaagatgctgataccaaaaggtggccaaagtccaaatggagaagtcttaaggtgagatgggatgaaacatcaaacataccacgtcctgagagagtttcacaatggaagatagagcctgctcttgctcctcttgctctgaatcctctaccaatgcccaggcctaaaaggcctcgatctaatgtggttccatcatccccagattcctcggttcttactcgtgaagcttctaaagtaagcgtagatcctttgccaacaagtgggtttcaaagggtcttgcaaggtcaagaactttcgaccttgagaggtaattttgctgaaagcaacgaatctgatacggcagagaagtctggtgtgtggccacctgccacggatgatgaaaagattgatgtttctacctcaagaaggtatgggtcagacagctggatgtcaatgggaaggcatgaaccaacatatccagatctactttcaggctttggggcccacggagatcattcatcccatccatcatttgttgatcaaaatggtcctgtagctaaccttagtagaaaacatttgctggatcgtgaaggcaaacataatgttcttagtccttggcctggagtgccatctagcctatcactgaatctcttggactcgaatttaaaaggctctgctcaaggcggtgatacagcttaccaagtacgagggaatctgaggtatagtagtgcatttggtgagtaccctgtgcttcatggacataaagttgagcattcccatagaagctttttgatgccaccaccaccatcaactcaatatgagagtcctcgttcaagagaactgttgtccaaaccaatatcaggaaaaccttgtgaggtttcaaaactgaaagacagtgactgtaagctatttggcatctcacttcttagtagccgccccattgcatcagagccttctctatcacaaagaaatgttacaagtgagtcagttggtcacatgcatacagcatcacaccatcaacgtgcaattgaaaacgatcagaagtctgagcattctaggggttcaaaaccagctgatggtctgctgattgatgaccacgaaaaggtgttacaaacttctcagccacatctgaaagatgtacaagcaaaatctcatagtggttctgctagaagttgcactaaagttcacaagaagggtattgcacttggtaggtcagtggacctcacaaaattcagtgattatggggaattaattactgaattggatcaactattcgaatttggaggtgaattaacttctccacaaaaggattggcttattgtctacactgataatgagggagatatgatgcttgttggtgatgatccgtggcaggaatttgttgcaatggttcgcaaaatttatatctaccccaaagaggagattcagaaaatgagcccgggtaccttgagttcaaagaatgaagagaatcaatctgccagtgaaggtgcagcagacgcacaagaaatcgagtgtcagctcaatcattcatcttcagatacctgatagttcgtagatttgatttccatagcttccaggttccggactggagtggaaagtagtaggtgactgtcataaagccatctagttggagaatatgacctgaagaaggaaattctaattctgaatctgactgttttatcaagtgagtgcttgtgtttggaatcagaatatggatggcatgaatgagtatccatccaattttggaccgtgtcgtggaattagtagtagtagtagtagtagtagtatatatgccttccctgttatacactcctaatatagtagtatagtacggaattgtgcgttgtgcaaggtgataagggagtgtatcggccttgcatttttcaacaatcctaccttgtacatagttttactcgcaaccttagtaccggaactcgttaatgtaattaagttgatatacaagggcgattttaaac

SEQ ID NO: 18632 - DNA, 846 bp, Glycine max
  Clone ID: LIB3093-035-F1_FLI
cttggactattcgacagcgaagtagaagctgcaagggcttatgacaaggcagctatcaaatgcaacggaagggaagcagtgaccaactttgagccaagtacttatgaaggagagctgaaatctgcagccattaatgaaggaggcagtcagaatcttgatctcaatttgggcatagcaaccccaggacctcccaaagaaaattgggggcaacttcagttcccctccttcccttacaatacacatggtggaagaagttcaatgatggaaaccaatgttagttctggaattggtaatccatctttgaaaaggatggttgcaactgaagatcgtccttcattatggaatggcatgtctcctaatttctttcccaatggggaaagagcagagagaatcggcgttgatccttcaaacggactccccaactgggcgtggcaaacacatggccaggtcaatgctaccccagtaccaacgttctctgctgcagcatcatcaggattctcaatttcagctacctttccatcggctgccatctttccaacaagttctatgaactcaattccccagagtctctgttttacttcatccagcatgcctacccgcaatgcatctgaatattattactaggttaagcccccacaggcaccaccatagctgattttgcagtacagattaaagacaaactaaaacaaaagtgttttcggtccaaattctttttataattcagccactgattggtgtatactgagattcgacaccttattgctgtctcttgcttaaactataatgccccatgtttggatacatcatctttgaagcaaatgctatttttagtgcactagcacagcg

SEQ ID NO: 18633 - DNA, 717 bp, Glycine max
  Clone ID: LIB3093-035-G6_FLI
cccttctcgttagcttgatatgataatctaaatgtttcaacactttgtttaacctgaaggttttgaatttgggttctctttgttgcacattaaatcttagctgtttcataatagtgcaagggctttggaagagaaaagagctcgtttgggtttagtggaatgtgtgaatcatgagctcctgcaaccttatcctgttctgcatgaaaagcctggtgattatgttgcacatatcaaattcactgtcttgctaatgcccaatggatcagatcgtgttacgtctcactcactccaggagttgcagcccaccaaaacaatagatgatcccgaaatcaaggcgtggctagcattgggcacaaagacaaagaagaaaggcggtggaaagaagaagaaaggtaagaagggggcagaagctgaaccaatggatgcaacaaatgatgctacaccccaagaacaagattgagagacagaaaccctttgattttgcttttgatccctttcaattttggtacatttttcaccaagttgtatctgcttgattgtgaatttagtacagctttcggacatccaatgttaataggaatttgatttccttggctattgtacttgacctgaatgctgtactcctgattaagcataaatatgcttaattgttggaggggttttaatttataaacaaaagatatcaaatttaaaacccaattacatggttggaaatgt

SEQ ID NO: 18634 - DNA, 1658 bp, Glycine max
  Clone ID: LIB3093-037-E4_FLI
aaaacttctctctcacactcactttctctctctataactctttctcacccgctagggtttccttttcatcgcatcttgagtttgcaacctcgtcttgtgatttccatggagggtgctgggatggaagagaataatattattaatgatgatgataataataacaagtctgaggcgcatttgacttctgccgctgcttttgtggagggtggaattcaggacgcttgtgatgatgcttgcagtatatgccttgaagctttctgtgatagtgatccttccacggtgacgagctgcaagcatgagtttcatcttcagtgcattctcgaatggtgtcaaagaagctcccagtgccccatgtgttggcagcctatcagtctcaaagatccaacaagccaagaattacttgaggcagtggaaagagagcgaaactttaggttcaatccatctagaaatgccacaatatttcatcatccaacactgggggattttgagttacaacatttgccagttggagctagtgacgctgatcttgaagagcgtataatccaacacttagcggctgcagcagcgatgggaagagcacgccacattgctagaagagaaggccagagaaacaggtcatcagctcaaggtcgcccacattttttggttttttcaactaatcctaattcacctcccatggctcctgcttcttcctctccatctcagaggggggatgatgaaccaattcctacaattgctgttgccaatctgtctccaactcctgcaactggagaagaatcatcacagctgactttagttccgcctattcaagcagaacaggtgtctgcttcaggatctggatctactgctcttgctacagatcatcagggatcatcttacaacaataggagatctcctaatcagtcatctccaagtagtcaagacagagcagggccatcagaattacaatcattttcagaatctctgaaatctaaactgaatgctgtatcaacaagatacaaggagtcaatttccaagagcacaagagggtggaaggagagatggttctctcggaacaacactatgtctgaccttggatctgaagttaggcgagaagttaatgcagggattgcaactgtgtcacgcatgatggaacgcctggagaccagcgacaataatagaagcaatagcaattctgcccccagtaatatagaggatggttcagttcaggaatataatggtcaaactttaacaccaggcaatgaaggggacggtcttttgagagacaataacacaaaagcttcttgtgctgcaggctctagttcgaactaggcatgtagaaggaattgcttgaactctgaatttgttttgtccaaaaggtagaaatagaattgcccattggggatgtgaaattccatggatgtgatgcattgcctattggctggcgcagaccaggcaagtgataatccattggcctgcagaagaagaccaacaattgtgatattggaaataaaaaaacttaaaaaaggcagcagtggtctctttcgtttgaaacttaggaacctatatatgattgtatattcacattgtaaacttatttatagatattcctcagataatctttacatgaattgctgtgtttccttcttctacttctagagataaatcactctttttgg

SEQ ID NO: 18635 - DNA, 1501 bp, Glycine max
  Clone ID: LIB3093-041-C7_FLI
aaaactaaaagagaaaaatggattgtagtaacgagttggatatgcaagaaccgagcattgagacggataagcttagttacgaaatcttctccattctcgaaagcaagtttctcttcggctacgacgatccaaagctctggttccccaagcaaatacctcccaagccggaatctcagactccggcagctaccgccgccgtggactgcgtctccgcagtcaagaaccagcgcggcaagatatgcattctcgccatcgacggcggcggcatgcgcgggattctcgccggaaaagccctcgcctacctggaagccgcgctgaagaagaaatccggcgaccagaacgccaccatcgcagactacttcgacgtggccgctggcgccggagtcggcggcatcttcacggcgatgctcttctccaccaaagaccaccgccgcccgattttctccgccgacgacacgtggcggtttctggcagagaaaggaaacaaattctaccgcgcgggaggcagcgcaagcaaccgggggttgctgaagaggttactttccagtggaggttccggctcggtgtcgtcggcgacggcgggtttggagaaagcggtgaaggaagcgttcacggcggagaatggtggtgggagtttgactctaaaggacactctaaaaccggttctgattccgtgctacgacttatcgagtacggcgccgtttttgttctcacgtgcggacgcgttggaaacggatagcttcgacttccggttgtgggaggtatgtcgtgccacctcggccgaaccgggtttgttcgaaccggttcagatgcgttccgtggatggtcaaacaaagtgcgtggccgtggacggaggtttagcgatgagtaacccaacgggggcggcaatcacgcacgtgctgcacaacaagcaagagtttccgttcgtgcgaggcgtggaggaccttcttgttctgtccctcggaacgggtcaactattggaggtgagttacgactttgaccgagtcaaacgctggaaggccaaggattgggccaggcccatggcccgcatttccgccgacggctcctctgacctcgtcgaccaggccatcgccatggcctttggtcagtgccgcagcaccaattatgtccgcattcaggcaaatgggtcaagtatggggcgatgtggacccaatgtggatacagattcaagtcccggcaatgtgaagatgctagtaggaatagcagaagagatgttgaagcaggagaatgtagagtcagtactgtttggaggaaagagaattggggagcagagtaacttcgagaaacttgactggtttgctggagaacttgttcaggagcatcagaggaggagctgcagaatagctcccactgttgctttcaagcaagcaaccccaaaagcgacttaggccatccatggccaacaacagttcaaagaatcaacctaaagaaaaagtgaaaaaccgatatagtaggaagcaggagcaaggaaaaagaaggg

SEQ ID NO: 18636 - DNA, 1036 bp, Glycine max
  Clone ID: LIB3093-042-C4_FLI
accctctctctctctctctctctctctgttcactctcactttttgttttcacctcctcctaatttccaagcacactttctttgtttcttatttcttcctgtctcaattataagtaaaagaaaaacatatttttaaggagattactgggacagctagatgacgcgagcgttcagaattctcgggtccgcggacaacgccacctcgctggcagcggtagcggcgccgccggaggcggtggcgcttgagtcggacttcgtggtgattctcgcggcgctcctctgcgccctcatctgcgtggtggggctggtggccgtggcgcggtgcgcgtggttccggcaaggctccggcggcggaagctctccccggcaagccttggcgaacaagggcctaaagaagaaggtgctgcagtcgctgccgaagttcgcgtacgtggacagcaaccccagcaagtgggtggcgacatcggaatgcgcgatctgcctcgccgacttcgccgccggcgacgagatccgcgtgctgccgcagtgcggccacggcttccacgttccctgcatcgacacgtggcttgggtcccactcttcttgcccctcctgtcggcagattttggcggtgaccaggtgtcagaagtgtgggcgttttccggccaccggggccggagcttccagaacgcctgcgaccgaacccgaattgaagtccagagaagacaacaatgtcgctagtaacagtagtaacaatattaataacaacagcgacagcggtggcaataacagtaactgtaacatagaacatcatcacagccatcatgtgaatagtgggttcttgccatgaacatagtagctactatttattagctttttttttttttttaactttgtacctttttatcccttcaagttgttcaagaagatcagaaattgggcatttttttcccctctctttatagatttttgtttatcctgcaaatattactaagtgcgtatgatataatgatgtataaaaagatgtaatcagtcgaaatgtaaaaagtttaaagtgt

SEQ ID NO: 18637 - DNA, 1041 bp, Glycine max
  Clone ID: LIB3093-044-F7_FLI
ataacgtcgattttctcttcggtctccagcctcagccaccacctattgatgtcaaattcaatgatccgctgccggagcccgtggcgccgccgccggagcatccgttgcgattcaattttaaccctgcggtctcggatccgagcgcgattcagcgccagttgcagcaactgcaaattgcggagaacgagcaagctgcgcatcggaggaagggtgaggataattaccccgccggtgattactacgttcaaaaagtgcctgagaagttccccccaccgaattttctggcaagctcgccgggttattggcctgaaaaacatgtttccggcgacgtttatcctccggctgtgacggctacgtccggcggaggggaaccgtcggtttatatggttccggcgccggggacgttctatcatgcaccggttatgcggcctccacctccagcaactcagggatactacaccgtgcaacgaatgggttccgataattaccgtgaagcgccggtgtacggcggtgttccgccgccaaaagcggcggttccggcgagtatggcgccagcccagcagccgattaaggctcccgcgtatacggaaggattcggaatggttcggccaggtgggatagtggataatactggtgttccgtacgcgcaggtggcgtacgatagtggaagtgggagacaggtttattatactgcgcccggtggtggtgtaacgcacgctcctccgtaccatggggtttttccgcccgtaaccgctgatatgagactgggaggggtttcgtttggtcaggatgttaaagtcataagcaagcttacccaaggttcagtctgatcattatcgaacaaaaaaataaaaataatagttcagtgtgattatgattatggttatcgctaaatatgttttttttttttgctatcttgttcgtaatcctatttatgtaataggaatactattagcttttagtttttcgcttgctattgttgtacacaatgttgccgatgatggttataacttataccatgttattcctatggttttgtgt

SEQ ID NO: 18638 - DNA, 732 bp, Glycine max
  Clone ID: LIB3093-050-G7_FLI
agatggctcgtacgaagcaaaccgctcgtaagtccacaggaggaaaggctcctaggaagcagcttgcaaccaaggctgcacgtaagtctgcaccaactactggtggtgtgaagaagccccaccgttatcgtcctggtaccgttgctcttcgtgagattaggaaataccagaagagtaccgagcttttgatccggaagctccccttccagaggctggttcgtgaaattgctcaggacttcaagactgatctgcgtttccagagccacgccgtgcttgcattgcaagaagctgctgaggcataccttgttgggctctttgaggacactaacctgtgtgccattcacgccaagcgtgtaaccattatgcccaaggatattcagctggcaagaaggattcgtggtgagcgtgcttgagttggtggttggaaagatgaagatgattggtggctgcggttggtgtttttgtttttcagattcctttttttattcaataaatggggttgttaggaagggtaggttttctgctggtagtagcattaattgggatataggcaaatactgctaagtgtccgtgactgtgttttcttcctttaagaaaattggcttgtaattgatttttggacaaatgtatgtgttagaatgcttctgttttagtttttacctgcgggatgttgcagccactttagaaactgtattggacaacattcagttgccatctaatctcgtttaagtt

SEQ ID NO: 18639 - DNA, 2422 bp, Glycine max
  Clone ID: LIB3093-058-E4_FLI
cttcttttctcttctttcttcttcttccatctctttttttctgcttaaggtctacaaaagttctcttcttcttctcctcctattgaactttggtcatcacacgagaaaacccacgtctggatcttctggtgtaaaggccattagaagccttttagaaattttcaaattgagttggtgtatagtgttgaagggggtgaaatttggagcccagtttgttacttcatttgaaaggtcatagtttgaaccctctttttctggagatttacctgggaaaagatgatgatgtttgaagatatgggattctgtggcgatttggatatgttatgtggttctcttggggatggggatattgctgtgagacaaactgaaccggatcctgtagttgaggatgactacagtgatgaagaaattgatgtggatgaactcgagaagaggatgtggagggacaaaatgcgtctcaagcgattgaaagaacaaaccaagtccaaggaagggactgatgcagcaaagcaaaggcaatcccaagagcaggcaaggaggaaaaagatgtcaagagcccaagatggaatactgaagtacatgctgaagatgatggaggtttgcaaggcacaagggtttgtttatgggataattcctgagaaggggaagccagtgaccggagcatcagataatcttcgcgaatggtggaaggataaggtcaggtttgatcgaaatggtcctgctgccatagccaagtatcaagccgataatgcaattcctggaaagaatgatggatgcaattccattggtcctacaccacacaccttgcaagagttacaggacacaaccttgggttctctcttgtcagcacttatgcagcactgtgatcctcctcagaggaggttcccactagagaagggtgttcctccaccatggtggccaactgggaatgaagaatggtggcctcaaattggtctacctaaagatcaaggccctccaccttacaagaaaccacatgacttaaagaaggcgtggaaggttggtgttctcactgcagtcatcaagcatatgtcccctgatatcgccaaaattcgcaagcttgtgaggcagtccaaatgccttcaagacaaaatgacagcaaaggaaagtgcaacctggcttgccatcatcaaccaagaggaagccttggctagagagctttaccctgattattgccctccattttcctctgctgtagctaatggatccatggtgatcaacgattgcagtgagtatgatgttgatggggctgaagaagagccgaacttcgatgttgaggaccggaagcccgaccatcttcatccatcaaaccttgggatggagagaatgatgggaaggatgccaattcagcaaccttctcatcccatgaagggagatgttgtcacaaacctagatttcatccggaagaggaagatttctagtgacttcaacatgatgatggatcagaaaatctacacatgcgagcatccccaatgcccttacagcgaagttcgccttggtttccatgataggtctgctagggacaatcatcaattgaattgtgcatatagaaacagttctgcagattatggtggtggtcccaatttccatgctactgaggttaagccagtcatattcccccagtcctttgttcaacccaacactacagctcagtctgcaagtttggttgcaccttcatttgatctaactggtcttggagttcctgaggatggccagaaaatgattagtgaccttatgacaatctatgatacaaatgttgtaggaaacaaaaacctaagctccaccaactgtgttactgctgaaaatcataacctttctcaggccagcttacaacgacaggacagttttttccctggtcaaggaatggtgttggaagggaacttgtttgcacgagaggaaggtcaatttgaccggttcaaggccaccatgaacatgaacatgaacatgaacactccttttgataccaaccacaacaacaataatatccatttgatgtttaattccccttgtgatttgtcatcctttgatttcaaggaggatatacaaggagtaggaatggattctcttcaaaaacagcaagaggtttcaatttggtaccagtgaaaatgcgaagagggaaactcgtgtatcacggacttttattgtgtcattaaagagggtcatgtgaaagtcccttgactcaaaaagcagttaatgcatttttcttcccatgtaatagtttaggtcttagatattttatgctttgggaggtctggtctggtctggtggcattatattatgggttaataaatcatgggtgttcccataatgtaaccctttttatgtgtctctttatgtgttagccctatgttacttatatcatatgtacgactgtgatataaataaaagatttttattctcttat

SEQ ID NO: 18640 - DNA, 1311 bp, Glycine max
  Clone ID: LIB3094-027-C10_FLI
tgaagctggatcattcctccgcggaatcgatgtgaaccgtttaccttctgtggttgattgcgaagaggaagcaggtgtttcatctccaaacagcacggtttctagcgtcagtggaaagcgcagcgagagggaaaccaatggagaagaaaacgacacagacagagcttgttccagaggcatcatcagcgacgaagaagatgctgaaacctctagaaagaaacttagactctccaaagatcagtcaattgtcctggaagagagcttcaaagaacacaacactcttaaccccgtaagtaaacgtacacatgccaattaattttttttgtcctgtatcagagacatagtatcctctgatctactggatcatatattaatctcactcacgatgtataggtgcgattgatcatagaaaattttgtacacaatgtgaatcaaatacagactgttgctaaatagattattttcattcacaaggatgtagtgggacattatactgttcaattaatttgttttttgttttgtgcgtgaatatgttgttgtgttgtttgcagaagcaaaagttggcactggcgaaacagctgggtcttcgagcgagacaagtggaggtgtggttccagaacagaagggcaaggtgggttcatttcgccaacatttttgttgtgtgatctttaagagttttactgaaattaattttcaggacgaagctgaagcaaacggaggttgactgcgagtttttgaaaaggtgctgcgagaatctgacggaggaaaacaggaggttgcagaaggaagtgcaagagcttagagcactgaaactttccccgcagttctacatgcacatgaccccacccaccaccctcaccatgtgcccctcgtgtgagcgtgtcgcggttcccccctcctctgccgttgatcctgccacgcgtcaccatcacgtgcctccatctcacccccgggcctttcccattggcccatgggccaggcccttcgatgccctccgtcccagatcttagactcgcggaaacaaaatgacaaaattgaaaaaaagataggaagccatgaattatgtgttcaaagtgtggtctaagatatggttgttaggaaaactgattttgtgggtctctaatgttttgtactagtttgacccttcgtctttcttttggatttcggggcatgacctggtctagttactagttaggttttttagttttataatacttactgcgttactctcgtttctcatgattaaatccgagactttctgtaaagtttactggtcttaattaatagtattatatatagctttcttgtgtg

SEQ ID NO: 18641 - DNA, 771 bp, Glycine max
  Clone ID: LIB3094-047-F9_FLI
gtttgaggagaatgaagtttatgcaattgatatcgtagcaagtactggagatggcaagcctaagcttttggatgaaaagcagacaactatttataagagagctgttgacaagagctatcacttgaagatgaaagcatctaggttcattttcagtgaaataagccaaaagtttcccatcatgcccttctctgcaagggctttggaagagaaaagagctcgtttgggtttagtggaatgtgtgaatcatgagctcctgcaaccttatcctgttctgcatgaaaagcctggtgattatgttgcacatatcaaattcactgtcttgctaatgcccaatggatcagatcgtgttacgtctcactcactccaggagttgcagcccaccaaaacaatagatgatcccgaaatcaaggcgtggctagcattgggcacaaagacaaagaagaaaggcggtggaaagaagaagaaaggtaagaagggggcagaagctgaaccaatggatgcaacaaatgatgctacaccccaagaacaagattgagagacaaaaaccctttgattttgcttttgatccctttcaattttggtacatttttcaccaagttgtatctgcttgattgtgaatttagtacagctttcggacatccaatgttaataggaatttgatttccttggctattgtacttgacctgaatgctgtactcctgattaagcataaatatgcttaattgttggaggggttttaatttataaacaaaagatatcaaatttaaaacc

SEQ ID NO: 18642 - DNA, 989 bp, Glycine max
  Clone ID: LIB3094-060-C7_FLI
agttcctccattttttcatcctatggtaccgcctccgcatgttgctgttcctggttatgctttcccacttggtccaggaccttttccaggtgcagaaaaccctttagtgaagcctgtttctcaggcacccggacaagcttttgctccacctgctcatgctgttgatggcaaaaatgttcagcctctggtgcggggagatccaaatgcctatgttggcaatttttctaatggaagaacaaatatccaagaacaaggtgaccatctaaatcatgcttggcatcatcaaagaccttttccttccagagtaaacattcctatgcaacagggtttgggcccaaggccatttatacgacccccattttatggtccacctccagggtacatggttggtccaagcttcccaggacctgcacccgtttggtgtgtccccatgccacctcctggctccattagaggaccccatcctaggcactttgtcccatatcctgtcaaccccacacctcagccaccgcctccagaaactgtatcgttgaggactagtattgtaaaacagatagactattattttagtgatgaaaatctgcagaatgaccattaccttatttccttgatggatgaccaaggatgggttcccatatccactgttgctgattttaaaagggtcaagaagatgagcacagacataccttttatccttgatgcacttcagagctctaatactgtggaagtgcagggtgataaaataaggcaacgcgatagttggtcgaaatggattggagcttcctcaggaaattcaggatcatcaacagctcaggttcaacagggccaacttgtagatggtgctttcaattctcttgagaatagtgatgctgttggagataagatgaaggagatttccgaagaaaatcctaaagatgctgttcatgactcaatttttgaagagcataatcagccaaacagagatatgttacaagtttcacttatgaacc

SEQ ID NO: 18643 - DNA, 949 bp, Glycine max
  Clone ID: LIB3094-074-H5_FLI
gtcacaatctagggttttagaatttacccaaaaccctcttccatggcagaagaagcagcactggaagtcgttgatcccaacaccgccgctgccgccgccgccgtggacatggacgtcgagaatgtcgaggccggcggcaacggcgccgagccgaaccagaagcgcgccagggaggaagaggagccccagggcggcgacgacgacgtttcgaagaagcagagggtggacgaggaaaacgaaaagtccgtagaggaacaacgcttggagaagcgcgatgaacaagaagaagaaaaaggagaagaaaaagaagcagaaaaagaagaggaagaagagaaggaagcaagtggttccgtgaacttgggattcaagagcttcggttcttcctcggagatgtttcattacttctacaactttcttcatacctggcctcaatatctcaatgttaacaagtatgaacatctgatgttgttggagttgcttaagaacggccatgcagagcctgacaaaaagattggtggaggggttcgtgctttccaagtccgcaagcatcctaccttcaaaagcaggtgctttttcctcatcagagaggatgactctgctgatgattttagcttcaggaagtgtgtggatcacattctgcccttgccggaagagatgcatttgaaatccgatgcaaacaaggcattaggtggtggtggtggaggaaaacattatggaggaggaaagggtggcagaggggggaggggtggaagaggaggaggtgggcgtggtggtcatgggagaggaggaaagtggagaaattaaatataatagttgctgctggtctgagttttattttgatatctaaaatgttttttgtatacttgccccgcatatttcatgtttactgctaatttacatttcaagttttttgttacagttatttatgagttatggagctttttgggct

SEQ ID NO: 18644 - DNA, 650 bp, Glycine max
  Clone ID: LIB3094-078-E1_FLI
atttgaaggttgttttgtgcttatagataaaagttctgccaaatcaagaggggttttcagatcatagtgtgtgtgtgtgtgttaaacaatggctaagttctttgctgctatgatcttggcactcattgccatttccatgcttcaaacagtggttatggctgctaatgagcaaggaggccacttgtatgacaacaagagcaaatatggaagtgggagtgtcaagagataccaatgcccatcacaatgctcgaggagatgtagccagacccaataccacaagccctgcatgtttttctgtcagaagtgctgcaggaaatgcctgtgtgtgcccccggggtattatggtaataaagctgtgtgcccttgctacaacaactggaagaccaaggaaggaggacccaagtgcccttgaacttcaacttcatcaaattgttgcttttcactatatttttatcatctcccttgggccaatttaatgcactagcttactttcccaactattttacccgtcctaaccaaatgctccccttttggtggcactctacgatatatgtttttatgtattttggtgtatcctccttaggccttgtttgcctttaatgagagtggttattaatatcaatatatcaactataaaacttattgctagc

SEQ ID NO: 18645 - DNA, 2070 bp, Homo sapiens
  Clone ID: LIB3101-194-B6_FLI
ggctggagctgggctgggatcccgagctcggcagcagcgcagcgggccggcccacctgctggtgccctggaggctctgagccccggcggcgcccgggcccacgcggaacgacggggcgagatgcgagccacccctctggctgctcctgcgggttccctgtccaggaagaagcggttggagttggatgacaacttagataccgagcgtcccgtccagaaacgagctcgaagtgggccccagcccagactgcccccctgcctgttgcccctgagcccacctactgctccagatcgtgcaactgctgtggccactgcctcccgtcttgggccctatgtcctcctggagcccgaggagggcgggcgggcctaccgggccctgcactgccctacaggcactgagtatacctgcaaggtgtaccccgtccaggaagccctggccgtgctggagccctacgcgcggctgcccccgcacaagcatgtggctcggcccactgaggtcctggctggtacccagctcctctacgcctttttcactcggacccatggggacatgcacagcctggtgcgaagccgccaccgtatccctgagcctgaggctgccgtgctcttccgccagatggccaccgccctggcgcactgtcaccagcacggtctggtcctgcgtgatctcaagctgtgtcgctttgtcttcgctgaccgtgagaggaagaagctggtgctggagaacctggaggactcctgcgtgctgactgggccagatgattccctgtgggacaagcacgcgtgcccagcctacgtgggacctgagatactcagctcacgggcctcatactcgggcaaggcagccgatgtctggagcctgggcgtggcgctcttcaccatgctggccggccactaccccttccaggactcggagcctgtcctgctcttcggcaagatccgccgcggggcctacgccttgcctgcaggcctctcggcccctgcccgctgtctggttcgctgcctccttcgtcgggagccagctgaacggctcacagccacaggcatcctcctgcacccctggctgcgacaggacccgatgcccttagctccaacccgatcccatctctgggaggctgcccaggtggtccctgatggactggggctggacgaagccagggaagaggagggagacagagaagtggttctgtatggctaggaccaccctactacacgctcagctgccaacagtggattgagtttgggggtagctccaagccttctcctgcctctgaactgagccaaaccttcagtgccttccagaagggagaaaggcagaagcctgtgtggagtgtgctgtgtacacatctgctttgttccacacacatgcagttcctgcttgggtgcttatcaggtgccaagccctgttctaggtgctgggagtacagcagtgagcaaaggagacaatattccctgctcacagagatgacaaactggcatccttgagctgacaacacttttccatgaccataggtcactgtctacactgggtacactttgtaccagtgtcggcctccactgatgctggtgctcaggcacctctgtccaaggacaatccctttcacaaacaaaccagctgcctttgtatcttgtaccttttcagagaaagggaggtatccctgtgccaaaggctccaggcctctcccctgcaactcaggacccaagcccagctcactctgggaactgtgttcccagcatctctgtcctcttgattaagagattctccttccaggcctaagcctgggatttgggccagagataagaatccaaactatgaggctagttcttgtctaactcaagactgttctggaatgagggtccaggcctgtcaaccatggggcttctgacctgagcaccaaggttgagggacaggattaggcagggtctgtcctgtggccacctggaaagtcccaggtgggactcttctggggacacttggggtccacaatcccaggtccatactctaggttttggataccatgagtatgtatgtttacctgtgcctaataaaggagaattatgaaataatttt

SEQ ID NO: 18646 - DNA, 1360 bp, Homo sapiens
  Clone ID: LIB3105-042-B11_FLI
gcagggacttgacatttattaggcacctgctgtgtgctaagcgccggtggagcatgtggggagacctcagtggagccgacgggtgcttcgggggtgatcagggctggtggggaggagtcgtccggctggaaaggggtggcccatcccgagtggggactcatttcccctccgtgactgacggctccggggctccctgcgggtctccggctttcgaggacaggaagaaggcagccagggcaggggtgggggtcctcacagccagggcagccccagcgcgttggctccaggagcccgggtgggggccgaccgttggggtgcccctccctgtcctcggccttacctccaccctggagggcaccttgaacataacaggaaatttcaaataacaggaaaccaagaccagcaaggcgggtggctccaccctgcgtcgggcctcagtcagcccccgggggaggccatgaacgccacggggaccccggtggcccccgagtcctgccaacagctggcggccggcgggcacagccggctcattgttctgcactacaaccactcgggccggctggccgggcgcggggggccggaggatggcggcctgggggccctgcgggggctgtcggtggccgccagctgcctggtggtgctggagaacttgctggtgctggcggccatcaccagccacatgcggtcgcgacgctgggtctactattgcctggtgaacatcacgctgagtgacctgctcacgggcgcggcctacctggccaacgtgctgctgtcgggggcccgcaccttccgtctggcgcccgcccagtggttcctacgggagggcctgctcttcaccgccctggccgcctccaccttcagcctgctcttcactgcaggggagcgctttgccaccatggtgcggccggtggccgagagcggggccaccaagaccagccgcgtctacggcttcatcggcctctgctggctgctggccgcgctgctggggatgctgcctttgctgggctggaactgcctgtgcgcctttgaccgctgctccagccttctgcccctctactccaagcgctacatcctcttctgcctggtgatcttcgccggcgtcctggccaccatcatgggcctctatggggccatcttccgcctggtgcaggccagcgggcagaaggccccacgcccagcggcccgccgcaaggcccgccgcctgctgaagacggtgctgatgatcctgctggccttcctggtgtgctggggcccactcttcgggctgctgctggccgacgtctttggctccaacctctgggcccaggagtacctgcggggcatggactggatcctggccctggccgtcctcaactcggcg

SEQ ID NO: 18647 - DNA, 906 bp, Glycine max
  Clone ID: LIB3106-005-A2_FLI
ttactatgaccttcataagggaggatgatgatgatcaagttgatgatgatgatgatcatgatcatgtggatggtggtggatcacaaaacagtgccagcaacatcactgaaattgtgaccaccccagaaggggaaaacttaggagaatggctgagtctaggcctcaaaggagacatcaacatgccagcagaagaacaaaactcatcatcaaggcctctccacagcaacaacaacaaggtattctcatgcaacttctgcatgagaaagttttacagttcacaagccttagggggtcaccagaatgcacacaagagggagagagaagctgctagaagctaccaccaatctcatcatcacagaattgggttttcttacactacttctctggcaactaggtcactgggaattaagcctcactctcttgtgcacaggcctaacagagaaaggtctgctatggtggctagattcagtagtagtgatgccattaatgttggggttggatcagtggcatcatcatggacaccctttatgcttgaacaagctgtggatttctattggccaggtagctttcgtggggacttattgccaaagcaagaatcatcagatgttaagaagattgacttagatcttcggctctgatacattaatttggtccaacttctatgctcagagtcctggtttaaaccactactgctgctgctttttcttaatggtttccccctatgctatatatgatgccacttgtgctaataaaatgtcaaggatattgttgtaattcagtagttgtacttgtactaattggtttgagaatggaaacaattccatgtcaatgtgtattaattgcaagtttgctacattaagagtgtgtgtatcatttccatgtttaaaaaataactttgtggttttg

SEQ ID NO: 18648 - DNA, 1314 bp, Glycine max
  Clone ID: LIB3106-005-H8_FLI
gttaggacttaggtggttaaaatattggacaaaatgattgtcaacgacagtatatttgttggggtgtctgctttttgtctcctgcctcctacatttcaccaccccctttatccttatctcctctcttcttcatttgttctgctcttcccctctatttaaagctcacacaaagggatcatataccttggttgcactttggtaaggtgagagaataggaaaaagggaaatatggcatttgcaggaacaactcagaagtgcatggcttgtgacaaaacagtttatctggttgataagttgacagcagataaccgagtgtaccataaggcttgcttcagatgccaccactgcaaaggaacactcaagcttagcaactataactcttttgagggggttctttactgcaggccacacttcgaccaactgttcaaaagaactggtagtcttgacaaaagcttcgaagggacaccaaaaattgctaaaccagaaaaaaccggggaagaggtaaccaatcttaaatctaaatacctactgatgcgcaacaaaacaccttagcagcacaccctttagaacacattttttatcattggtttaaatatatttggaatcacaaagttttgtattttcaattcttatttaatgagagttactcatgactttgtagtttcaaataaactctaagcaatagtggagaatgtgttaaagaatgtagccacaactcaaagcatttatctaatttttgagctgtttttaatcagaaacctgcagcaaccaaagtctcaagtatgtttggtggaactagagataaatgtgccggttgtcaaaaaacagtgtatcccactgaaaaggttactgtgaatggaactccttatcacaagagttgtttcaaatgcactcatggagggtgtgttattagtccctccaactacattgcacacgagggcaaactctactgcaagcaccaccacgtccaactgatcaaggagaagggtaatttaagccaacttgaaggtgaccatgagaagagtgcagagcaagagaaaatcaacggtgaagtagttgcagctgagacatgaaatgaaatgaaatgaaatgcttgagttatcacagatgaatattcccttcctcaagttccatatttctgtatcatgtgtttatgctatctctcctgctttgccaatatggagtccataatgctcttgaaaaatatggtactccctttttttgtggttggggtgtgtgcaaatccatcgttttgttttctgttgttgtgaagttgtggattctaaaaatgagacttaatggcatgcaattctg

SEQ ID NO: 18649 - DNA, 839 bp, Glycine max
  Clone ID: LIB3106-006-D11_FLI
gaatggcacgcatcaaggaggatccatctctgaaacatattttggaggagatagagactggcggtcctgctgctatgatgaggtactggaataatgaggaggttttgcagaagttgggacaagccatgggtcttgccaattcgggagatgcaggtgcctctgctgaaaattctggggcagatgagaccgaagatttgggaaatgaagatgaatcaattgttcatcatactgctagtgttggtgatgtggagggcttgaaaaatgcactagcctctggtgctgacaaggatgaagaagattcagagggaagaactgctttgcattttgcctgtggatatggcgaggtaaaatgtgctcaagttctcctcgaggctggagcaaaagtggatgctttggataagaataagaacactgctctccattatgcagctggttatggcagaaaggaatgtgtggcccttctccttgaaaatggtgctgcagttactctccagaatatggatggtaaaactccaatcgatgttgcgaagctaaacaatcaaaatgaagtcctaaagctacttgagaaagatgcttttctgtagttgtaatgcatgatgccatgctgtcaccaacaagcaaagggggaaactgaggggaagaaggcatggtgacttcgttattttctcttttggtttcttccagccatttagtgtgttaaactaaattgattagcgttgttggatgagttaccatagaatttgttatctatggtcttgtaatgcatttattgttacactgcatgattttgaagattagtgccgtcatgattttattaatgtttcaattttacttataat

SEQ ID NO: 18650 - DNA, 941 bp, Glycine max
  Clone ID: LIB3106-026-G8_FLI
attaccactaaaatatcgcatccgaatgtttcgctcctcgtatcctcctcatccttttatgcgtgtcttcccccaacgaaaccagcgagaccaaacgtggtaacgctttgaatctttgaattcattcaaagatcccccttctgtctccctctctacgcatatcagggcactatggctgccacggtgaaacaaatgtctttgatcgtgtcactgttcggcgtggtgtccttcattttgggtgttgttgctgaaaacaagaagcctgcggcaggaacacccgtgcctggtttggatggtgtctctgtcacctgcaagtacccagctgatccaactgttgcattggggtatctttctacagcatttcttgttgcatccactgtgactggatatctgtctttgttttacccttacaaaggaaagtctattccacaaggggttctgtttaagcacaccactttcacagtgttcttcaacatttctttctgcagctatgctgttatggccaacaatcaccgaacacattcacctgacacgcaatgtgcaccgcaatatcaactatgaatgtcctacagctaaaactggtctacttggaggtggtgcctttctatcacttgattcatctctcctttggttgattgcccttatgctagctgacaatgctcgcgaggacttctttgaagaagaaggagaagatggtgacaagggtgaatttggcacagcctcctctgatgcttattatgatgctgattcaggaccgaaggctagttcctgaagtatgctacaagtagaaataagtgttgcacctggtatttctgtagtttccttttaatcacgctgaacaattccgtgaaataatgaatgtacatatatttaaaatggttgttctcggtgaacatttattgtgcttaagcactactgcagaaaaaaacatagttgtttgt

SEQ ID NO: 18651 - DNA, 1270 bp, Glycine max
  Clone ID: LIB3106-028-E6_FLI
ctttcttatcttcccatgacactttgagagttcaagtttccttttctttcctacaaatccaaaataatagttttagtttacaaaatggctgtggaactcatggggttcccaaaactagacgaacaaaaggccattcaagaagccgcatcagaaggcctcaagggcatgaaacacctgatccgaaccctttccaaccaaccctctcacttaaacaccgaacttaccgacgttaccgtttcaaagttcaagaaacttatttcactcttaaatcgaaccggccacgcccggttcagacgcgccccggttcagtactcatctccacacgcacccgttcacaacactaacgcttccacctcatcaattcaactccctcctccgccgcaaaaccctaatattcccgcgctggcgcagtttcctactccggcgccggtggccgtgcaccacacgccggtgacgctcgatttcacgaagccgcacaacgcgcttctgagctccaacgccaaatccgtcgagctcgagttctcgaaggaaaccttcagcgtttcctctaactcctctttcatgtcctccgcgatcaccggcgacggcagcgtctccaatgggaagattttcctcgcgccaccggcgacctccgccggaaaacgtccggcgttcaagaagcggtgccacgaacaccgcgaacactccgacgatgtctccggcaacagcaagtgccactgcgttaagcgaaggaaaaatagggtgaagagcactgtgagagtgccggcgattagttcaaaagtcgccgatattccaccggacgagtactcgtggaggaagtacggtcagaaaccgatcaagggttccccatacccaaggggttactacaagtgcagcacgattagagggtgcccagcgaggaagcacgtggagcgcgcaccagacgatcctgcaatgctgatagtgacgtacgagggggagcacaggcacgcggttcaggctgcgatgcaggagaacgcagccggggtggtggggttggtgttcgagtcaacgtagagaatgagaaagaaggtccaataaaaaaataataataaatttggaagtggaggacttttttaaaaaatatatatatataatttttggaaagtgtagtgggaagaaccaagaagtaaggacaatggctgccttgtaaatttgttttatttttatctttattattattgttatattttagttgtcatagactcgtagagaggtgaaaaatggaatctcaagttgtttatttatttct

SEQ ID NO: 18652 - DNA, 850 bp, Glycine max
  Clone ID: LIB3106-032-B6_FLI
cttccaagagtcacagtgaagctgaaaggagacgcagggagagaatcaataaccatcttgctaagctgcgcagcttgttgcctagcacaaccaaaacagataaagcatcattgctagcagaagtgatccagcatgtgaaggagctgaagcgtcaaacctctctgatagcagaaacgagtccggttccaacagaagctgatgagttaacagtagtggacgaagctgatgaagatggaaactcagtgatcaaagcctctttgtgctgcgaagataggtcagatctgttccctgaactcatcaagaccttgaaagcgttgaggctaagaacgcttaaggctgagataacaacgcttggtgggcgcgtcaagaacgtattgttcatcactggagaagaaacagactcatcaagcagtgaggaccatagccagcaacaacaacagtgctgcattagctcaatacaagaagcgcttaaggctgtgatggagaagagcgttggggatcatcatgagtctgcttctgcgaatattaagaggcaaaggaccaatataatatcaatgtcctaggaacggatcgaggtctttatgaattttatttaattaaaggcctatatatgcatgatcattattattattattactatctactaattaattagttgttatataagcatatatatatattttgattttgatttgcatattttttggggggtgtggtttggcttttacttttttttcttttcttgttaatggtgtgtgctggaaaatgttgttactttatatgtattctccatcaacatcatcatcgttataagaaatgaggaaatgagagtttggtggggttttttgtt

SEQ ID NO: 18653 - DNA, 835 bp, Glycine max
  Clone ID: LIB3106-038-C6_FLI
tctttctctcttctctctccacccaaaccctaactcccgaccctgttcccctctcgtatccgtcatgaaaggaggaaagtccaagaccgaatctaagagagccgatcccaaacttgctgtgaataagaagggagccgccaccaaggctaggaaacccgccggcaaggggaaggcagcgaaagaccctaacaagccaaagaggcctccaagtgctttcttcgttttcatggaggagttcaggaaggtattcaacaaagaacatcctgaaaacaaagcagtgtctgctgtgggcaaagctgctggagcaaaatggaagaccatgtctgatgctgaaaaagcaccttatgtggcaaagtctgagaaaaggaaagtggagtacgagaagaacatgagagcctattaacagaaacaggcggaaggtcctactggtggggatgaagaagaatctgagaagtctgtatctgaggtgaatgatgaagatgatgatgaggaaggcagtggcgaggaagaggatgacgattagagaatggactgataattgcatttatgtaggttctgatgattttgatcatctgttgtaggtggtctggtcatttcctgataaacatatttcttgcttccaaaaaatatttccctgctccctccgtaaattggttgtctttccaaaacgtgaatagtttaaagaagggagttctttatttgtacttctaaatccaactgtttagttaaggggtgtttatctcttgtagagcttttagtttgatttagagttttcttgttgaaatctggttaagtttgtatcaatataattggcttatcattcgctttctgctgt

SEQ ID NO: 18654 - DNA, 550 bp, Glycine max
  Clone ID: LIB3106-039-F7_FLI
ttcagcttcagaatgtcttctggaagtcatgaaccttgccatggacgtcccttcagttggcaccatcaatgaaggattcaaggacgagctgcttcatcagtacgagatagagaagaacgaaggtgcaaagtcaatattaaaaaagtgtgtcaacattcttcaagactggaaatagtaaattgtacgagctatagctgtaaccctcatttatcaaattttgggtagatgaagcatttaatatgtatagctcgtgcttggtgtagtaggtccacatatagcgatgacaagaaaactactagtacccttaggtgaaatccgttacggattgaatttttaacacgatgagggtggatagcaaggtatctatattttatgaatattcataatttgaaattacttaaatgtctttcattatattttataattatctagtttttttttttttacctgattcgtgtaaacaggtaatatgggcaattgtaatgatatacttagatggcagatgctctgctttatgttgtctttcaaggagatatgcattgtttttaag

SEQ ID NO: 18655 - DNA, 417 bp, Glycine max
  Clone ID: LIB3106-040-G11_FLI
agaagaacaaggatcagtggcaagctcaagaaattacaggaccttgtacccaatatggataagcaaacaagctatgcagacatgctcgatttggccgttcaacacattaaaggtcttcaaactcaggttcagaagcttcacaaagaaatggagaattgcacttgcggatgcaaacaaagcaaataacttcttttttttacgagattctatagcaacgtgcatagaagtcaaggttttgatggcaaagattgaaaactgattttgtaccgatctacttaaatgaataatgaaggaactgaaactttgtaggttgtcaatgctacaattgtacagtgtatgttgtaatatggtagtctagaaaaatttcttcgttttcttcaagaattggctttcaaagtccaggttgattttctattc

SEQ ID NO: 18656 - DNA, 1105 bp, Glycine max
  Clone ID: LIB3106-046-E9_FLI
aattggggtttgaaaagaagccggtgctgtctccttgttctccatcgtaagatataactaattatttttatatcttcatcaagatgcgccgagggagaaccgccgccgccgctgccgccgttgtggatcccacgccggaccaggccaaggagacgacgcggttccgtggcgtgaggaagcggccgtgggggcgattcgcggcggagattcgagatccgtggaagaagcagcgcgtttggctggggaccttcgattccgccgaggatgccgcgcgggcctacgacaaggctgcccgatccttccgcgggcccaaggccaaaaccaatttcccccccttccccggcccggcagaggcggaccaccactcgcagattccgctctaccaggcccatgggctttccaccaagttcgagcccgtcgtccaggtgaaccggcccacgagcagcggcatgagcagcaccgtggagtccttcagcgggcctagggttccctcctcctcctctcgcgctaagccccttgttgtggttgttaaccctatcatccctctcaacgacgacgaagacgattgccacagcgattgcgactcttcttcctccgtcgtcgacgacggccaggactgcgtcctcatctcctccttccggcaaccgctgcccttcgatctaaacctcccaccatccgatgccgacgacgacaacgacgacgacctgccggccaccgcgctgtgcctctgatgatgaagaagaagaagaagaagaagaacctcttctcggtataatcatcattttcttcttgttgttgttattgttgttgttgttgttcaccatctctggtttaattaattaattaaaagttgttagattgtgttgtggtgttgtagagtaatattataataggcatgaatgtgttgttgtaagttatttggatccattactgtgtcatagcattggacctgatctcaaaaactggttggtgcttatgctttcttcatggatctgcttcttacccttacccccaattagaacttactcttttcttttttttttgttgttgttgttctgtacaaaaattatggctatcagatcatagaataaattacattctaatc

SEQ ID NO: 18657 - DNA, 566 bp, Glycine max
  Clone ID: LIB3106-046-F3_FLI
gcaagtccattgcatgttctttgataaacaagaagattttgatgatcgagatgtgaggcagatgttgtcattggttcgaagggaagtcttaagcggatgtgtgatcattttcagccgtattgttcatggtgcaataccatctctgaggaagatggcagaacagatgggagctacttgtttgactgaaattgacccgtctgttacacacgtagttgctactgatgctggaaccgagaagtgccggtgggcagtgaaagaaaagaagttcgtggttcatcccctatggatagaggctgcaaattatttttggcaaaagcagcctgaggagaacttcattctcaaaaaaaagcaatagtcacttttcttatggtatcaaacagtgctgtgttcataatagcttgcttacttagtggcccaagtatatgaaaggatatctaatacctaaccaacaaccttctgattgtgaaacgtgaacagtcaacttaccatttgagtagaaaacaataccatttttatgtctagtttaactctgtttgcttttggactatttcttttgtttcattctt

SEQ ID NO: 18658 - DNA, 519 bp, Glycine max
  Clone ID: LIB3106-048-C3_FLI
gagagggtctgtggaaaccgagaaacaaagcagggataggaagaaggaaaaatggaaaagtatttcggaaacgcttatcgtggcgacccgggagtgccccattcggacccggatcgcttcgtcaacatatgggtcggatccgctgccttcgctgttctcacatatttcaatccctacatgtggcagctctctaatcagttcaattggcatgacaaagcaatgctatatgagcaatatcactggaaacaggcaaggaagaagaatcagccatatgagttcatgtggaacaagacctgggacaagaaccaccgggaacattactactacaactggcctatttactttccttaggccacttctatttttcttgcatactttgtcctatctttattttggttgcaaacctggatcaattgatgccccctcccccctacccggatcacatgcttttctctgatcacttgaaaaacaaatacaaggattcaattgttgtgatgaaacgagtaactatgtgtttgg

SEQ ID NO: 18659 - DNA, 691 bp, Glycine max
  Clone ID: LIB3106-049-H1_FLI
gttctaacatacatcaaagatattgctagatgttcaaactgttaagacacccgagtgtaactttcaatctctgtaattttcgaatttgttggacaggggatggttaggtctgagaaaacaaataattttttgatatttactgcaaaagtttataacttatgctgaaaggtcttcaaagattcagtgagattaatgatttcaggcgcgcatgcaagaaatgaaggaaaaagaactcaagtaccttgggaacggcgatgcaaattcccatgtttgtaaagtatgttttgaatctccaactgcagcaattctgcttccatgccgacatttttgtttgtgtaaatcttgttcacttgcttgttctgagtgtccaatatgccgcacaaatattacagataggatttttgcttttacataacagagggctctatcccattgaattaatatactccatgctgttacgggtgcaattcttttattagtttgcctgtatgtaaatccgtttaaaagatatatcaatatcttctttcttttatactaccccaggggaactgtattatagggggggggtggggggggggggacaaaggggtgcggagaaagaatgtaaaaagaaaaaggtgtaaacagcactgctgaagtacatgtgcacaatatacgtttgttttatgtaatccagcagaattttgtttcc

SEQ ID NO: 18660 - DNA, 1398 bp, Glycine max
  Clone ID: LIB3106-051-G6_FLI
ttctcctaaatcctaatccttcttcactttcagttctcagcatgggaagttctggaacaaccgactatggagcatacacataccaaaaccttgagagggaaccttactggccctctgaaaagctcagaatttccatcactggggctggtggtttcattgcctcacacattgctcgccgcctcaagaccgagggacattacatcattgcttctgattggaagaagaatgagcacatgactgaggacatgttctgccatgaattccatcttgttgaccttagggtcatggataactgcttgacagttaccaagggtgtggaccatgttttcaatcttgctgctgatatgggtgggatgggttttatccagtccaaccactcagtcattatgtacaacaacaccatgattagcttcaacatgattgaggctgccaggatcaatggtgttaagaggtttttttatgcctctagtgcttgtatctatcctgaattcaaacagttggagacaaatgtgagtttgaaggagtctgatgcctggcctgctgagccacaagatgcatatgggctggagaagcttgcaacagaagagttatgcaagcattataacaaggattttggaattgagtgccggattgggagattccataacatatatggtccttatgggacatggaagggtggaagggagaaggctcctgctgctttttgtcgcaagacacttacttccaaagatcgatttgagatgtggggagatggattgcaaacaagatccttcaccttcattgatgagtgtgttgaaggtgtactgagattgactaaatcagacttccgggagccagtgaatattggaagtgatgaaatggtcagtatgaatgagatggcagagattgttcttagctttgaggataagaatataccaatataccatattcctggcccagaaggtgttcggggccgtaattcagacaatacattaatcaaagagaaacttggctgggctccaactatgaagttgaaggatgggctgagaattacatacttttggatcaaagagcagcttgagaaagagaaggcagaaggtgttgatttatcaggctatggatcatccaaagtggttcagactcaagccccagttcaacttggctcgctacgtgctgcagatggcaaagaataaagctgctagtgcaagggatgttcggcagttgcagcagatggcaaagaataagagtgaacaatgcatttccaagtgaagggcaggcttttatgttgctattttgtagagatctttggttacagattagctattgaagttagttttggaacttgttcatgtatttgtaacggatggtgttatgttcttgttttgtttgaggtaataataataactgctgcttaaggtg

SEQ ID NO: 18661 - DNA, 1467 bp, Glycine max
  Clone ID: LIB3106-060-E1_FLI
atttagtgctgcgtactaagtttttggtttcatcagatccacaccggaattctattcagactctatacatagttacatcgatcctcgcggggagagccaaataacgagatacacaggttttaattctttgagagcggaaatggatacattttcacatgtaccaccaggctttcggtttcatccaaccgatgaagagctcgttggttactaccttaggaaaaaggtagcgtctaaaaggattgatctagatgtgatcaaagatgtcgatctctataaaattgaaccatgggatctccaagaactatgcaaaataggaaccgatgaacaaagtgactggtacttcttcagtcataaagataagaaatatccaactggaactcgcaccaatagagctacaaaagcaggattctggaaagccacgggaagagacaaggcaatatactctaagcattgcctcattggcatgagaaagactctcgtgttttacaaaggacgagccccaaatggacagaagtctgattggatcatgcatgagtacagactagaaactaatgaaaatggaacttctcaggaagaaggctgggttgtgtgtagagtgttcaagaagaggatgacaacaacgcagaaagtgggagagtatgatcaatcaccctgttggtacgatgagcaagtttccttcatgcaagatcttgaatccccaaggcgcaatatttctcagacttatgcatcataccaccatcaccaacaacagcaccaccaccatccctgcaagcctgagctcatggaattgcaatacaacaacattccccacgatgcattcctccaacttccgcaactcgaaagccccaaagttactcaatcatcatgctcagttgtcccttatggctatgaaagcaacaacaacaacaatggaagcaccttgcaattctcatcactcactcaggaagaacagctacaatattgcaataatcaacaaagtcaccattctctctatggtagcaatgatcatgcagttgaccaggtcacagattggcgtgtgcttgacaagtttgttgcttctcagctcagtcacaacaaccaagatgtttccaaggaaaccagttattccaatgcacctatcttccatgtggctgaacaaatttctgtggctgcaaatggatccaaaaaggagcaagtttctcaggagtatgcttcaacgtctacctccagttaccagattgacctgtggaagtgaatttttatatatatatatatatatatagtaactataaataagatacgatgcataataccaattataggaagtacgtacaagtgaatgttggaaaaaaaagaccatagtgttgttgctacgtgttgttgtacataagaagcctaaaatgttttatatatcattagttgttgaacctcttgaggctggagtatatggactgaaaatgtatccattagttgcaattcttcagttgc

SEQ ID NO: 18662 - DNA, 567 bp, Glycine max
  Clone ID: LIB3106-061-G2_FLI
gttacaacccgtaaaatatggcatatatataacacaatgatgtagaacgacacgggtatacccgtatttctgggatatatcttttacatcaaatgaacgcaaaatgaagcatgcatctagtacatacttgaacttatttaaatttgtggggtacaaaacgacattagaaagaaaacaaattaacaatagcaaaccataactgtgaaaatgaaacactaatcttagtaattatcatcacaaatctggaattattgaacgtacgtacgtaattaactcaattgatttttcaaggcttgttggcttcaacatgcttgaaaccaccaatgacaccaccaacaccaccaatagcacctacaccacctccaacccctccaaatccaattcctttgtaaatgcctcctccaattccaattcctttgtaaatgcctcccccaattccaccacctagaccactaccacctccaagtcctccaactccaccacttccagctcctcctccatatccaccacctaaaccactatcacctccagctcctcctccatagccacctcctaaaccaccaccac

SEQ ID NO: 18663 - DNA, 896 bp, Glycine max
  Clone ID: LIB3106-062-E7_FLI
agaaaggaggccaccagaaaagcatggcaattttctgcatcaagtatggatgcaacttatgagcctttaatttgtggtagcatataacaatcaactttggttcatcaaggtctgtccaaattcaatcaccaaatttaatcctctccctatttatgtaagtccacccactttatataccaaattgaaatttggtttgttcaaatttatcagtaagttatggtcaaggtgaatttctgcacccttttgctaccatgtttgaaaggttgagtagactaagccatgatctattgcagcttctgatttgttagtggttgaaatcctaaagggtgatgatcaaaagggtatcatgcttcaaactagaatcaggactggtcatgccacagagttaagtgtgttggggcatggaccaaagactgcaagcaagcttcaagggtcaacaccccatgatcagttactgatccaaacctcagattccttctctggcttgctgttgttcacaatagggttccttgtgttcatggttgcttgtgttaaggactgggagttccagagtttctttgccaaagggtgtgtgcttcttcatatctctatggcagtgtggagattctactttgaggggaagcttgaggatcttgcgcatgactggcctaggcatgctgttggggacattgcattggccacttcctggctcttctttcttgtgtacatgtggagggagaagtatgattagttagttattgttgtaaagtagtataaatgttggggtctcacatctgaagaaaattctttggttttgtgttgtgatatgcttgtttgaatcatttatgtacattttgtagagttttcaatgtaagtttacccatatttgatctcaataagttaagaataaagtaaat

SEQ ID NO: 18664 - DNA, 1153 bp, Glycine max
  Clone ID: LIB3106-062-F7_FLI
aagaccgttcaagtgttttgatattggtttgggacgaggagtaagttaatttgtgtagcgtttccattaaaacggcgtcgtaatcatacgttggtattcagacagcatgaaaactccgatttcgggtttctacagaaaccccgtgaagttcagaatgccaactgcggagaacttggttcccattcgattggacatcgaaatcgaggggcagagatacaaggacgcgttcacttggaacccttctgatcccgattccgaggttgtcgtctttgcaaaaaggactgttaaagacttgaagctccctcccgcctttgtaacacaaattgctcaatcaattcaatcacagctttcggagtttcggtcctatgaaggccaggatatgtatgctggggagaagattgttccgatcaagcttgatcttcgtgttaatcatacgctcgtgaaggaccagtttttatgggacttgaacaactttgagagtgaccctgaagagtttgccagaatcttctgcaaggacacgggcattgaagatcctgaggttggaccagctattgcctttgctatcagagagcagctttatgagattgcaattcaaagtgtggtttcagcaagagaaagcagaatgagcaagaagggtcgtcgaggggctgaatatactccagtcagtaaaggaggtgcagcagcagtggacttggtcaagttgtttggtccgaaatctagtgtagttcggaaaagaaaggagtgggacgtatatgaacctattgtggacctactatccaacgaggaagttgatgcccttgaagcgaaggaagagagaaatttcaggtgaattcgccccatggtcagccacgccacatcagaagggtatatagttcaatgacaacatatattggagggttagagttcgaagttattgtagtatatacaagctggttttttagtacgggcaatcaatgattcagaatattgttatcgtttgatttctttggtttgtagtcttgtagagtttcttatttgttctctgtaccctcggcagaagaggagggaaaaaaatagcacccccacggccccacctactctctttatatattttttctgtcaaacttagcagcagcaacaatgaagtcatttctcattaggtgggttttccgtg

SEQ ID NO: 18665 - DNA, 887 bp, Glycine max
  Clone ID: LIB3106-067-B9_FLI
agtgaatgccccatctgcttagaagagttctatgtagggaatgaggtccgtggcctgccctgtgctcacaattttcatgttgaatgcattgatgagtggcttaggctcaatgtgaaatgtcctcggtgccgttgctcagttttcccaaaccttgatcttagtgcactgtccagtctccgtgctgagcctgaacaattttctgccagtgttgtgacaacagccagatatgtgagaggccaaccatctagtctaagttaccggctaagattgcagggtcttctgtgtccagtccgtgctgaaattgcaggaccagttggtgacatagataatgcgttgaaaaatgctcagaatggcgttgtatcaattgtgactcaaaatgcatcatcatctggagaccaagcctcttctgtcgaatgcatgcctgttactgtctgtcattcctctgcacaaagttaggctacattgtttctgaagtcctattatatttctaacccattcttgagaaggtgaagaatgcatatccatatctggcccttgtaaaaacgatgttttgatccacataaagaattgggtcagttccttgtcggggcagcttggagttgtaggacttggaaaatcaaagtataatttttggcttaactaacatagattagagctgcaaatgtgtagttgtctttacgtttaataataacttgtaaagagagtttgaaattccaattatatattgaattctgcttttgccttttaccttcctactcggggataaaatattttcacacttttttggcagcagggtgtgtagggttatacacacaggcagtgcttgtaggtattttgtaaaagtcaataaattgatttgtgattgaatgagtaaataagatcatttt

SEQ ID NO: 18666 - DNA, 1801 bp, Glycine max
  Clone ID: LIB3106-068-H1_FLI
ctgtgagcgagactcggtagtaatagtatagtctacaaggtttcgtattctactacttgaaacctaactcttccttcttcttctacactactcctatggctcccgatgcttccgacgcacttgcagtaaggcagaaagttcaattatttctgaacgcggctcgtactggttcaattgatctcttaaagaaattggcgttgcagctggacgagggcaaggatttggcgaaatcggtggaagcaataaaggacgccaacaagagaggagcactgcattttgccgcgcgagaaggccaaacctctgtttgcgagtacctcttaaccgatttgaagctctctgtcgattctcaagatgatgatggcgagactgcactcattcatgctgctcgtcagggacataccgccaccgctaaatatctgattgaccacggtgctgatcctactgtggctagcaatttaggggccacggcattacaccattctgcggggataggagatgctgagctgctcaagtacttgctgtccaggggagttaatcctgatctagaaagtgatgcgggaacacctttggtttgggctgctggtcatgcccaaccagctgctgtcagtgtactgttggaacatggtgcaaatccgcatgccgaaactgatgatggtattaccccactcctttcagctgtggcagccggttctctagcatgcttagagctgttaattcaggcaggtgctaaagcaaatataagtgctggtggagcaactcctttgcacatcgcagctgataatggaagtcttgaactattaaattgtttattgaaagtgggagctgatcctgatgtctctgacgaggatggtgtcaagccaatacaagttgctgctgcaaggggctatccaaaagctgttgagatattgttcccattgacgtccaaagtagatactattcctacttggactgttgatgggatacttgagtatatgcaatctgaaactagaaagcaacaggatgaatcgataaatgcaaaagaaactaatcagcccaaggaagctgattttccggagcaaaatgtccctgaggtggcacctgaagccaaaaagagagcagcagaagcaaagtcaagaggggatggggcttttaaaaggaatgaccatcatatggctatagatttttatacccaagcaattgatctgaaccccattgatgctactttgctatccaatagaagtctctgttggattaagttgggccaagctgagcatgctttagctgatgcaaaggcctgtagagctttaagaccagattggccaaaagcttgttatagggaaggagcggctctgcgtttgttgcagaaatttgatgaagctgcaaatgctttttatgagggagtaacgcttgatcctgaaaataaggagcttgtaaatgcgttcagggaagctgtcgaggcggggaggaaattttatggaacggctgaaaataaatcatagtttagccttttgttaataccatgtttcagagagaagagatcaaaatattgcgggtggtgcagccttattcacttgatccttttttccccaatgtgtgtatgcgtgttttctttaactagttactgtcgtataggaagagtcagctagtaatctgtttcattaaattgttttagtaattataaaggttatgcttatttgacatgttccaaaattgttgcagaattagtacacattatgaaaatggcaatgcaggttcatgggtatttctcccatactgttgtaggattcatttgtttaaagttcagaattttttttatagaatt

SEQ ID NO: 18667 - DNA, 738 bp, Glycine max
  Clone ID: LIB3106-070-A1_FLI
gaaaaggagcatcgagtaggtttcctactcccttctcatcgttggcaagatgagtgccatgaaattttgccgtgaatgcaataacattctgtaccctaaggaagacattatactcttaaagttcttctcttcgcttgccgcaactgcgaccatcaggaggttgctgataacttctgtgtgtataggaatgagatacatcactctgttggagagcgcactcaggtgttgcaggatgtcgctgcagatccaacgcttcctcgaaccaagtctgttcgctgcagtcaatgcaatcatggtgaagctgtctttttccaggcaactgccagaggggaagaaggaatgacactttttttcgtttgctgcaacccaaactgtggacacagatggagagactgaaatttgtgcttcctcagatcaaaggttcaatattggggagatctaactatttgtggttatctgaaaaaacttggctgatgcggggacagtaatactgaagtatttgtgttacctgtttaactgcagttcctgatcaaataattaatacagttaatggacaaactgttgtttgccaatgctgataaattctgaggatgggcataaatttcatggtttgttaaaaggaaaaaggatgagtgacactgcttttatggatgggcctaactttcttggtggggagttaggaatcaaaatgactttttttttgttatatgctatattatttgatgaaaaattcttatt

SEQ ID NO: 18668 - DNA, 653 bp, Glycine max
  Clone ID: LIB3106-074-C2_FLI
caattccaatcaccaattcaaaacccttcttcccttggaacaaattgagagatcgtgatggcaccaaaggcggagaagaagcccgcagaggagaagaagtccacggtgggagacaaggctccggcggagaagaagccaaaggccggaaagaagcttccgaaggagggaggcgccggcggagaagggaagaagaagaagaggaacaagaagagcgtggagacatacaagatctacatcttcaaggttctgaagcaggttcaccctgacattggtatctcaagcaaggccatgggaatcatgaacagcttcatcaacgacatcttcgagaagcttgcccaggaatcttctagacttgcccgctacaacaagaaacccaccatcacttcgagggaaattcagaccgcggtcaggcttgtgctgcccggtgaattggctaagcacgccgtctctgagggtaccaaggccgtcaccaagtttactagctcttaaactgttgtttatgggcttgttgcacgcccaagtctgttctatgtatctggacacctatgttcagattttaatcaattgtaggggtggtgatatagtatagtgtagcatattgttggtacggtacattgaattgctgttgagaattaatacatttgagattctct

SEQ ID NO: 18669 - DNA, 1077 bp, Glycine max
  Clone ID: LIB3106-076-F4_FLI
aacaaccgcaaacacaaacacagacccttcccttccttcctccctccctcattcccttcttcaatttcatcaacacaaccatcaatttcatcaaccatcgcataataatagtattatcatgatagccgtggcccgaaaggacatggaccggatcaagggcccgtggagcccggaggaggacgaggcccttcagaagcttgtggagcggcacgggcccagaaactggtcgctcatcagcaggtccattccgggccggtctgggaagtcatgcaggcttcggtggtgcaaccagctgtcgccccaggtcgagcaccgggccttcacaccggaagaggacgagaccattattcgggcccatgcccggtttggtaacaagtgggccaccattgcgcgcctcctctcgggccgcaccgataacgccatcaagaatcactggaactcaaccctaaaacgcaagtgcgcgtccttcatgatggcgggtgatgaagccgtcgccgtgagtccgaggccgctcaagcgatccttcagcgccggcgcggcggtgcctcctcccggaagcccctccggatccgatttcagcgagtccagcgctcccggcgtggtctcggtctctccttcgcacgtgtttcgccccgtgccggttcggccgattgttgaaacggcgtcgtcgcaagacgatgccgacgatgccggacccgcgacttcgctgtcgctgtctcttcccggtgtggagtcggcggaaatttcaaatcgcgcaactacggtgccggtgatgccggtgaataccgttgcggctccggcaccggttccggcggaggttggattgggagcgttgaatttgagtggagagtttatggcggtgatgcatgagatgataaggaaggaggtgaggagttacatggagcagcagaagaatgggatgatgtgttttcagggtatggaaatgatggaagggtttaggaacgtgtcggtgaagcgaattgggattagcagggtggattcgtaattattatgacctatttagtgttttcacaaaatgaggtttattaagaacttcgatcaagggagggaagagag

SEQ ID NO: 18670 - DNA, 2290 bp, Glycine max
  Clone ID: LIB3106-076-H11_FLI
ccgaagtgaacagacactaactcttttctttgcagttgcagttgctgcaatgcctacaaagctattctcccaactacatcttctccatcccctcctccccatgaagccccgcactctcccccttctctccagacccttcttcttcccttcctccaagttcctccgaacctcaccgtttaaggttcgcgccttctcctcccgggagaaggttcccctccgcccctccaagagcctcatcgacgacgaggccgacctcagcaactgggttgacgaattgcgctccggcgggcccgatgaaatgcggtctggccggggcaatgaagtgcggaccggtcggagagaccggtttgccgattctggccggttcagccgcgatgacagggaacgcgaattccggccgccgaggaataataaccgggcttccgcgttggggaagagaaggggcgaggatttgaggaaggggggacagagtgtcggttcgaggagaaagtttcaaccgaggagtgatgatgatgataacgaggtaatgaatggaagaaagttgaagggtggtggcgttggagcctttcctagcgaggatgaggatgaagatgaagacgaagagagtgaagggagtgaggaggaagagatattgaacaagagtagaaccgctttgtttggtcaacaaaacgttttgaaccggaggaacaccgaaccaactccaagaccttcttctcctggaggaggatctgattcttatttgagtgaaaccagatttgaccaatgttcaatctccccactgtcattaaaaggagtcaaggatgctggatatgagaaaatgacggttgttcaggaggctactcttccagtaattctcaaaggtaaggatgtccttgccaaggccaagacaggcaccggaaaaacagtagcctttttgcttccatcaattgaagttgtggcaaagtcacctccaagtgatcgtgatcataggcggccaccaattgctgttcttgtcatatgcccaactcgagaacttgcaagtcaagctgctgcagaggccactaaactgctgaagtatcatcctaccattggtgttcaagttgtgattggagggacaagacttgcgttagagcagaaacgaatgcaagcaaacccctgccaaatccttgttgccacacctggaaggcttagagatcatactgagaatactgctggttttgcaactaggctgatgggtgtgaaggtcttggtgcttgatgaagctgatcatttactagacatgggatttcgcaaagacattgagaagataattgctgcggtccctaaacaacgacaaactcttatgttttctgccactgttccagaagaggtccgtcaagtatgtcatattgctttgagaagggatcatgaatttatcaatacagttcaagagggaacggaggagacacattcacaggtctgccagacgcatttagttgccccattggacaagcatttctctttactatatgttcttctgaaggaccacattgcagatgatgttgattacaaggtccttgttttctgcacaactgctatggtcactagacttgttgctgaacttcttggtgagttgaacttgaatgtgagagaaatccattcaagaaagcctcagagttacagaaccagagtctctgaggaatttcggaagtcaaagggtctcatcctggttacttcagatgtatctgcacgtggagttgattatccagatgtcactcttgttatacaggttggtttgccagcagatagagaacagtatatacatagactcggtagaacagggcgaagagggaaagaagggcagggcatactgctgctggctccttgggaagacttctttttatctaccgtaaaagatttgcctattgagaaagctcctgtagtaccttcagttgatcctgacaccaagaaaaaggtggaaaaagccctatccaatgtggagatgaagaataaagaagcagcatatcaggcgtggcttggttactacaattccaacaaaaaaagtggggcgtgacaagtacaggctagtggagcttgcaaacgagtttagtcgaagcatggggcttgataaccctccagctatacctaagctagtccttggcaagatgggcctcaggaatatccctggtttacgggcaaaataggttattctttcaattcaatttctgacaggtcatgtgaaatatgtattgttttttagttaaaatggtcccttatattgtaagacttgagacatcaaattttcaattatatatacatccattttttgttt

SEQ ID NO: 18671 - DNA, 837 bp, Glycine max
  Clone ID: LIB3106-079-D1_FLI
tcttcgcaccttagaggacctgccaaaaggtgcatttgtgtgcgagtttgttggagaaattttatccatgaaagagttgcatgagaggaacttgaaatgcactgaaaatgggaaatatacatgcccagttttactggatgctaattgggattcaggatatgtgaaggacgaagaagctctatgcttagatgcagcttcctttggcaacactgccaggtttatcaatcacagatgttctgatgcaaacttgattgaaatcccagtcgaagttgaggatcctggtcattattactatcattttgcctttttcacttccagaaaaatatcagcacaggaagagctaacatgggactatggcattgactttgatgaccacgatcatcctgtcaagctgttccagtgcagatgtggcagtaaattctgcaggaacatgaagagatatagcagatctcttagatatgcgtcaattgcaggatgatagcctttctccgtgaaaccaattttgttgtctcaccgtgcggctggatgagatgtaatgaggtccagtctattacgagtggcgctttttgtctagtttagtggttgggagactcgttattttgtacagatctgcgaaaactatttataggcagactgacctagaaaggaaagagtgatcgtttattctgggatttattttgatatactttaggttcaaacttagataagaccaaaatggatgtttgcgaaagaaaaagaaacggttaggcggtagtgaaggtgaatattttagtttctaactgcagcgtttgtggggcttttaatatcaacgtactatgtgttggatttcatgatatg

SEQ ID NO: 18672 - DNA, 665 bp, Glycine max
  Clone ID: LIB3106-087-H5_FLI
tgcaaaaatggcatcattcaccatgacagcttccatccttggcagcccagccgtcaccaaccggtcggcagtagcaacgcagaggagatcactcgtagtgaatgctgccaaagctgttgaagcagaaaaggtcagttatgacaatgacatggatggtagcaatggaaggaggaacttgatgttcgccgcggcggcggctgctgtttgctctgttgctgggatggcagtggcagatgagcctaaaccaggaaccccagaagccaagaaaaagtatgctccgatttgtgtcaccatgccaactgctaggatttgtcgcaattgagggactttggtttttattttacttctgatgattggaaatgtacaatggggttgttgtaatgctttgatgatttcatttgatcctcactgtacaagatgttcataaaactatcgagctttgctttgtgtctttggtgtcgccagtttaatgcttaaccaagtaacattatttttccttttgattttctttgttcgcttagtttgaagttgaataagagcttactacttttcccccttcgaggggaggaaagaaaaacaatttgcagtctatgaagatgaaaggaaatttgtgcaattttgaattccaaacatttataacaatgtgcaattcaaccattacaaaa

SEQ ID NO: 18673 - DNA, 837 bp, Glycine max
  Clone ID: LIB3106-090-F5_FLI
caagagaggaagaaaggagtgccatggacagaagaggaacacagaatattccttgttggacttgagaagctgggaaagggtgactggaggggaatctctagaaactttgtgactacaagaaccccaacacaagtggcaagccatgctcaaaagtactttcttcgattggcaactatagacaagaaaaagcgacgttcaagtctctttgacttggtatgcatacataacaatgaattaatttactatatattgcttttattaattagctacctgataatttcacactgaatgaatgataaatgtttctctttaaactgaaaagtaattcacttttcttttttacttttcctttgtcgttgaattattgtggcaggttggtagcaacaaagcaggttctaattcattttcggctcatcaaaaggatgagtctaaatgtgaagttaagaataatgatgctgccactttgtctttgctagggcgtataacttactttcaacaagaaaacaaatcatcagagtataagcaagaaacatttgataattgctcatatcaaagtcaaccaggtgaagagcatcaagtcgcagttcttaatctggatctcactcttgcagcccccaaggcaaagaccctgcaggaacaaaataagtcatctccttctgctccatttctgcttgggccaattagcgtgacttaaactgtgtcaagtgttatatatattaattgtattaggaatgtacccttttatctgttgtcaagtgtcaactcgtgtagaagatcttcaggtcaaagaaacacattgttcattgcagtaatagtagtgactagtcgttattaatt

SEQ ID NO: 18674 - DNA, 578 bp, Glycine max
  Clone ID: LIB3106-094-F3_FLI
caggatctagaaaagccattccatcttcaccaccaaaaagaaaataatggcaatggccagtgcaacaactccagccacaatcactgttgtggccatctccagtgttgccagcacaaaaagaagggagaggaatgtgcacttcatcagaggtttgaattcctttggagggttgaaggctcagaacagtgtgacatcactaggtcttcctgtgtgcactgaacagtgttttgcaaaggtggtgagctcattgaaatatcaatcatcatctaagggcagaggtggaggtgctgcctcttcaacatgcaatgctgctggtgagattttccagattgcagccatcatgaatggtcttgtgcttgttggggtagcaattggatttgtccttcttcgagttgaagcgtttgtggaagagtctgagtgagaattgcataaacttttaatcagttttcatatatatgtatttttataaagaaaaaaaagggggaaaagttgtatctttctttaattcttgatatgatgtagaactacattatttttggggtatctgaatagtaccatgtgaattttaatttggagag

SEQ ID NO: 18675 - DNA, 582 bp, Glycine max
  Clone ID: LIB3106-094-H2_FLI
agttacaagtaaagtaaattaagaagatcattaatggcttctcttgcaaccttagctgctgttcaaccagctgcgctcaatggccttgctggaagttccctctctggaactaagctctctttcaagccctctcgccacactgtcaaatccaagaacttcaggagtggtgccgtggtagcaaagtatggtgacaagagtgtgtactttgatttggaggatctggacaaccctcttcagagcaagttcttcgagacatttgctgctccattcacaaagaggggattgttactcaagtttctgatattgggaggtggttccacccttgcatacttcagtgcaacagcctcaggtgacattctaccaatcaagaagggaccacaacttccaccaaagcttggtcctcgtggcaagatctaatttgatttgtatcagagctccatctattgagttcctttttaatttttatttttctggtttgcataatgtgtaagtatgcttgcagactactattcaaagatgcttctttccagtctaattgagtggcattgctttggttttcaattgaagcaaagacatatttgg

SEQ ID NO: 18676 - DNA, 773 bp, Glycine max
  Clone ID: LIB3106-096-A12_FLI
attcaagattcagcaagtgcgttttggaagcagagaccgaaatacttcgagatggcccgtacaaagcaaactgctcgtaagtcaactggaggaaaagctcccaggaagcagcttgcaaccaaggctgcacgtaagtctgcaccaacaactggtggtgtgaagaagcctcatcgttatcgccctggaactgttgctcttcgtgagattaggaaataccagaagagcactgagctcctaatcaggaagcttcctttccagaggttggttcgtgaaattgcccaggatttcaagactgatctgcgtttccagagccatgctgtgcttgcattgcaagaggctgctgaggcataccttgttgggctctttgaggacactaacttgtgtgccattcacgccaagcgtgtgactattatgcccaaggatattcagctggcaagaaggattcgtggtgagcgtgcttgagttggtgcgttctgtgtttgtgaagatggattgttggtggctgcggatggtgttttgttactaagttttctttttgttgaagcctataggttattagggaaaataggtgtttacttggtagtcatattaattgtcattggcaaatactgcctaagacactgtgaaggtctggttgttagaaatttggcatgtatttgatttttttggatcctttatttctcgttttatttctggttgtgcagccactttgggaattgtattggacaactttctgttgccatctaatctagttgaagctagcttatcgtgtc

SEQ ID NO: 18677 - DNA, 1398 bp, Glycine max
  Clone ID: LIB3106-098-A2_FLI
ctccattggtgttgtcaaatagtgacaacatggagattcagaaaatgaataatggtcacagtgttgttactgctactgttactgctactgctactcctactcctactactactttcgttgctgctgctactgctattactactactccttcttcattgagttctttatcttcttctaggtggccaaagacagaagttcatgctttgataagactgaggacaagtcttgaaaccaagtaccaagaaaatggaccaaaggctccattgtgggaggatatatcagcaggaatgctgaggctcgggtacaacaggagtgccaagagatgcaaagagaaatgggagaacatcaacaagtacttcaagaaggtcaaggagagcaacaagcaaaggcgcgaggatagtaagacatgtccctattttaatgaacttgaagctttatacaaagaaaagagcaagactcagaacccctttggcgcttcgttccacaacatgaagccacatgagatgatggagccattgatggtgcaacccgagcagcaatggagacctccctctcagtacgaacaaggtgcagcgaaggagaacaataataatgaaagaaaagaaagagaggaggaggaagaagatgaagaagaagaagaagaagaagaagaggatgaaaatgaagagggagatctagagagtgtggaagatgaaggaggtaaccgttatgagattgcgacaaataaactttcttcagtggacaccgttgaatgagacaagataaggaagtttctgattggatggagagttttaattttaattttaattttaattttaattttaatatatatttttttcttcttctgggggatggatttttaattattatgtaagttgattttaatttttccaaaattggggttaggagatgtcactgaaagggcatgatgatggcacaaacaccggcactataaaattcaattctttaataatgaatgacccatctaaaagcatggtggtgcagaagcagaagcagaagcagaagcacaaggtacctatctgacacactttctgatcatgggccagcttaaaagcagatcattggagctgtgggtcacattccggccgccatgaactgggatcagagatcgttaattaacactaagaaacaacagttcacatgggccagcaaagcagaagcatagctatagtgggtgtacatgtttttgcgctcataaatttatgtgtaaagtgtaaattgaagatgagagagagagagagaaaaaaaaagaatacgaggtcccatagcagtttaatgaaatgaaataaaataaaaaagtcacatgcatgatgcaactcttgtaattttcctttactttcattatatatcacggaaccactgtgtggtactgctttc

SEQ ID NO: 18678 - DNA, 1079 bp, Glycine max
  Clone ID: LIB3106-100-H11_FLI
attattttatattattttttgtctatagtaagtttgaaaattaggtactacatcatatgcatgatcagcatttgtaactgctcctctgaatttgtctgagtctgagctgttgattctcccaacacaactaaaaaaaagaagaaaaacttagagtggtagttgtaggaaagcaagaacagtgaagtgttctcctaattcagtgagtgaggttctgaattctttaacttgagatgatggcatcatttgcagggactactcagaagtgcaaagcatgtgagaagactgtgtatttggtggatcagctcactgctgacaacaagatctatcacaaatcatgtttcagatgctaccactgcaagggtacccttaagttgagtaactattgttcctttgagggtgtgttatactgtaagcctcattttgatcaactctttaagaagactggcagcttggacaaaagttttgaaggtattccaagaactgctagacttgaaagatctactgatcaggtccaaaccaatagcaaggtttcaaatttgtttgctggaactcaggaaaaatgtgttgcttgcaagaaaacagtttacccaattgaaaaggtagctgttgatggaacatcttaccataaggcttgtttcaggtgcactcatggggggtgtgtaattagcccctcaaattacgttgcccatgaacatcgtctttattgtaggcaccatcacactcagttgttcaagcagaaaggtaacttcagccaacttgacaagcaagaaaatgatgaaggggtgactgagaacacaataactgagtaatagcatgcatgcaactttcaagttactttggcaatacaagttcagttggtgactcattttaaggcatcaaatgcccttgtctcaatccacattaaattctgtttactgtgtatgtgaaaagttttgtgagacaaattttggggttgataattgagaataattagtagatagtttggcttaattatacggctgaccagtctgcatttttctttgaagcttaatgaagtttgtatttttcattattgtgataaaatctggttttctctgtgt

SEQ ID NO: 18679 - DNA, 1564 bp, Glycine max
  Clone ID: LIB3106-102-C2_FLI
atttaatttcatatgaaaatgatttcatctgcctccaacgaaaacaagacggtggtggacatggacgaccacctcgccggcctgggatacaaagtccgttcatcggagctgtgtcaagtggctgcaaacatggagcgtttagaaaacgtgatttcatccaccgacctatctcaactcgcatcagacacaaccctctacgatccttccaacatagggttaggttcgtgggtggacacgctcctctccgagttcgaccaaacggcgtcgttaccgttacaatacgatttcgccacggatccaaaccataacaagcaattagcgctggtcaccaccgtggaagaagactcggggataagactggttcacatgctgatgacgtgtgctgattccgtgcaacgtggtgacttctcattcgctggctccctcattgagaacatgcaggggttgttggcgcacgtgaacaccaactgcggcatcggaaaagtcgccggctacttcatcgacgccttgcgccgccgcatctcgaacacgcttccaacgtcatcatccacttacgagaacgacgttctctaccacaactactacgaagcgtgtccttacttgaagttcgcgcacttcaccgcgaaccaggcgatcttggaggccttcaacggccacgattgcgtccacgtcatcgacttcaacctcatgcaagggctccagtggccagcgctgatacaggcactggcgctccgtcccggcggaccgccgctgctgaggctcaccggtgtcgggcctccctcggcggaaaaccgcgacaatctccgcgagatcgggctgagactcgccgagctggcgcggtccgtgaacgtgcggttcgcgttccgcggcgtggcggcgtggaggctggaggacgtgaagccgtggatgttacaggtgagtctgaacgaggcggtggcggtgaactcgataatgcagctgcaccgggtcacggcggtggacgccgccgtggaagaagttctcagttggatccggagtctgaaccctaaaatagtgacggttgtggaacaagaagctaaccacaacggggaagggtttttggagcggttcacggaggctttgcattactattccaccgtcttcgactcgctcgacgcgtgcccggtcgaaccggacaaggctgctttggcggagatgtatttgcagagggagatatgcaacgtggtgtgctgtgagggaccggcgcggctcgagcgccacgagccgctcgctaagtggagggatcggctcgggaaagccggcttcagacccttgcatttgggtttcaacgcctacaagcaagccagcatgttgctcactctgttctcagccgagggtttctgcgtccaagagaatcaaggctctttgacactgggctggcatagccgccccttaatcgcagcttcggcttggcaagccgcgccgctgagagatgacgaaacgctgcgttttgggcattgaggaatggaacgcttcacttgtttttgtaagtacttgtagtacacgggaagagtggtgaatctataaaactataactgcttttaat

SEQ ID NO: 18680 - DNA, 575 bp, Glycine max
  Clone ID: LIB3106-102-E11_FLI
ccagcgtccggtcagaatcagaatcagaagaagcgagcaaagatgtcgggtcgtggaaagggaggcaagggtttgggtaagggaggagccaagaggcacaggaaggtgctccgcgataacatccagggaatcacaaaacccgccattcgccgtttggctcgcagaggcggcgtcaagagaatcagtggcctcatctatgaagaaacccgcggcgtccttaagatcttcctcgagaacgttattcgcgacgctgttacctacaccgagcatgctaggaggaagactgttaccgctatggatgttgtttatgctctcaagaggcagggcaggactctctatggtttcggtggttaaattttagggttttgatgggcttagcagctggttatttttgtaaatggtcgtttgtttgggagtatttgattttgtgcttttttgttttttagcctttcttgttaggtgtattgttatttttgcttcaattgaaatggaacaaagagtgttttgtttctggaattctcttcttgttgaaggtgtacactgattacccgctagttaattgcgactttggagat

SEQ ID NO: 18681 - DNA, 801 bp, Glycine max
  Clone ID: LIB3106-104-G8_FLI
aaaaaaaataaaaaagaaaaccaaaaaataatgtcaatggaaatgatggcaacggaacgtgtttgttatgttcactgcaacttctgcaacaccattctagcggttagtgttccatacagcagtttgctaaccatagtgacggttagatgtggacattgtgccaatttgttatcagttaacatgggagcttcacttcaagcatttccccctcaagaccctcagtcacagaaacagcacctaagctttcaagaaccaagcagcaaggaactgggatcatcttcaaaatgtagcaaaatagcgccatttgaggcagtagagcatgaactacctaggattcctcccattcgtcctacagagaagagacatcgtgttccttctgcttataatcgcttcattaaggaggaaattcaaaggattaaggctagtaatccagatatcagccacagggaggctttcagctcagcagccaaaaactgggcacatttccctcacattcactttgggttaaagaacttaaagctggatggcaacaagcaagaaaagttggaccagggggaaggagctgaaaagtctaacggattctactgataatggaagcctgtgagtatgaacttgtttttttcatgcttgacctaaatcagtgaaaaaatgaggttgatcaaatttcccaatatatcgtacaactggatgggagactcctgcaaattaacctcagcctctcacaccaatgtttaatagtactacatatatgtattgcccttttctatatatcgttgttatgaaatgattgctattcttgtg

SEQ ID NO: 18682 - DNA, 1000 bp, Glycine max
  Clone ID: LIB3106-107-E10_FLI
tctgcttccgagttccgagttgcgagttgcagagagagcaatgagtcaggaatcgtttatatatagcttcgtggctcgggggacgatggtgttagccgagtacaccgagttcactgggaacttccctgcaattgcagctcagtgcctccagaaactaccctcttccaataacaagttcacctacaattgcgaccaccacaccttcaattttctcgtcgaagacggttacgcttactgtgttgttgccaaggaatctgttagcaaacaaatctctattgctttccttgaacgtgtaaaagcggactttaagaaaagatatggtggtggaaaggcagacacggctgttgccaaaagtctcaacaaggagtttggaccagttatgaaagagcacatgaagtatatcatagaccatgctgaagagattgaaaagctaataaaagtgaaggctcaagtttcagaagttaaaagtattatgttagagaacattgataaggccattgatagaggagaaaatctaactattctggcggacaagacagagactttgcactcacaagcccaggaattcaaaaagcaaggaactcatgtccgtcggaagatgtggtatcagaacatgaaaatcaaattggttgttcttggaattttgttgcttttggtcctggttatctggctttctgtttgccatggattcaactgcgcaaactagaaacaaatgaaagtttatggataggtatttaaatgatgtttaaagagcaatttcttaaaagctttagcaagaatctgcttagaaggggggagtttggcaactggagaaaaagtttcctaccttctttatttgttgataatcatatacgatattcttggaaattcttaagagaaaggagatcgggtgtatttgtaatgtatcatatgctggactgtttggtcttgtcaaacaatatagttgtaatttgcttctcttttcttctttattttaaatatagaaaaatgttattaactt

SEQ ID NO: 18683 - DNA, 970 bp, Glycine max
  Clone ID: LIB3107-002-C9_FLI
gactgcggtttttttctcctccagaagaagaaagatccttaaatcaacattctctctccctcccttggttataatagcaagcttttcaagcatatttccggggtttgttcccttttccttgtttagggttttctttggaaaaaaaaggtaattaggtataataatataattaaagcaaaaaaaaaaaaaataacatgggaaggggtagggttcagctgaagaggatagagaacaagatcaatcggcaagtaactttctccaaaaggagagctgggttactcaagaaagcacatgagatctctgtgctctgtgatgctgaggtcgctttgattgtcttctcccacaaaggaaagctctttgaatatgccactgattcttggtaattaattatatatcatagatctctatttcttagcacgtattcttgctaaatattttaggttttactatactttatatgtgcatatatcgacaaagtttgtaagtgttttaaaccttagtatactgtgtgtaattcttatgaataaaaaaacatgtgtatatatcgtataatctccatagatctctctgttaaaccctatatttagtgcatgagtgtggagtgagggcgatctatgaatatcatttattaatatacttttacattgagtcaagaattgttcagccttttttgtttaatttgttgaaattttcttgcttttttcccttaattttccgtttagaatggtttcggttttgggcttaacaaagctagaggccggagaaacttctttcatctttgtttgcttccagaagtcttaattatttttggctagatcaaacaaatttctttctgtgattgtgcacaaacaaacctatctcatatcttaaagaaaaataagcaaaaagaaagaacctgtcccatttatgtgaagagtaaattcttcacatactgcgttagaaaataatgtgtggtatcctctggtcatgc

SEQ ID NO: 18684 - DNA, 991 bp, Glycine max
  Clone ID: LIB3107-006-H2_FLI
gatccacacgctcacaataacacactgtcaccgttccgttccgttttcctctgttttttttttctttctttcaaatccccgcttcgtggaaatcccgaaccagaaaccatgcttctccgaaccgctgctgcttctgcttcgtccctctccctcttcagcccgaacgccgaacctccccgttcggttcccgctcgtggattggtggttcgcgcagcgaaaggatccacgaaccaccgcgccctgaccggagtgatttttgaaccgttcgaagaggtgaagaaggagctcgatctcgttcccaccgttccgcaagcttctctcgcgcgccaaaaatacgttgacgaatctgagtccgccgttaacgaacaaatcaatgtggagtataacgtttcgtacgtttaccatgccatgtttgcgtacttcgatagggacaacgttgcgctgagaggacttgccaagttttttaaggaatcgagtgaagaagaaagagagcatgctgagaaattgatggagtatcagaacaaacgtggtggaaaagtgaagttgcagtcaattgtgatgccgctttctgattttgatcatgcagataagggagatgcgctgcacgcaatggaactcgctctgtcattagagaagctaaccaacgagaagctccttaacttgcacagtgttgccacaaagaatggtgacgtgcagttggctgacttcgtggaaactgagtatctgggtgaacaggtggaagccatcaaaagaatatccgagtatgttgctcagctcagaagagttggcaaaggacatggtgtttggcactttgatcagatgctcctccacgagggaggagatgcagcttgatgattattactacattacccccctttctattattattttgtatcttgctcatctaggtggctttctagtcttttgctagaaggtggaactgaactatatggatgaataaaataaatgtggactggtttcggtcctctcg

SEQ ID NO: 18685 - DNA, 1088 bp, Glycine max
  Clone ID: LIB3107-008-C12_FLI
gaaaccgcgtcgatttttactttctttcgccattcttttttccttctccaacccacattcttcttattccagaatatacacccaaattcctctttcctagggttttagtccaaagggttttggaggcatcaccatcaccatgagagccaaattgtttgtgttcccaatacgaggcaggaactggtgcttctccagaaccatcgatcactctctctccgcttcccatgcttcctctcaatccccctcaaccctcaaagacttgtggaccaacatcaacgttggtgataagcccctgaacaccaaaactgagctctttgtcgattacatcgccaacaagatgaataatgcttggattggcttggagaaggcgccggaggggtctttcaagaacaagattcatgggttggggttgcggctcttgtcgcgggttaagccctctgagatatttttgaagtctatatcgaaggaaatcactagtgttgaaatcatttatccatcaagtttgaatgctcaacttgttcgtcgaagactaagacacattgctgtgaggggagcagttatccatcggaattacttatacggtttagtttcgttgattccattgacttcagcacttagcattttacctttgcctaatgttccgttcttctgggttttatttcgcacttattctcattggagagccttgcagggaagtgagaggctgtttcaactagtctcagataacagcaagacttcaaacacttgtacatatgaaaagaaaactgagcacaaggaatctaaaagtcaaagacatagttcaaatgaaccttgttgggtgttgaggccatccaaagaacttgagaatcttgtccatctagaagatggtcaagagagtcttagtcaacatgccatcataaacatttgcaagatctatgacttgaacccagtagatgttataaaatacgagaagtccgtcttttaatcagttttgtaacaacttgcattagaattttctattcaatccacttacttcacaatgccataaatttttacccatattttttggttgatagtaactcgtttatcaatatatgttacttgtgaat

SEQ ID NO: 18686 - DNA, 377 bp, Glycine max
  Clone ID: LIB3107-008-D2_FLI
tacggctgcgagaagacgacagaagggtacggctgcgagaagacgacagaagggtacgcctgcgagaagacgacagaagggggttgcactttggtaaggtgagagaataggaaaaagggaaatatggcatttgcaggaacaactcagaagtgcatggcttgtgacaaaacagtttatctggttgataagttgacagcagataaccgagtgtaccataaggcttgcttcagatgccaccactgcaaaggaacactcaagcttagcaactataactcttttgagggggttctttactgcaggccacacttcgaccaactgttcaaaagaactggtagtcttgacaaaagcttcgaagggacaccaaaaattgctaaacc

SEQ ID NO: 18687 - DNA, 594 bp, Glycine max
  Clone ID: LIB3107-013-B12_FLI
ctaagaaattatacaatgtaccaggaactgtcttctgcccttgagaaaatgttcagctgtttcactctaggtcaatgtggttcccatggagctccaggaagagaaatgttgagtgagagcaagctgaaggacctcctgcatggttcagaatatgtactcacttatgaagataaagatggtgactggatgcttgtcggagatgtaccatgggatatgttcattgacacatgcaaaagactgaaaatcatgaagggttctgatgccattggcttagctcccagggccatggaaaaatccaggagcaggtgctagttggtattggaacatgaagagtgtggaaagagaacttatgatataaatgactgaatgccgggttttgatggttaactgctattcaagatgttgtctatggttacaagtatcataatagtgtcttggtcttttgtttgtgttacatttgtttctactataataccttatgaagctaccttgaatattagtaattgtggagcttgtaatctttataggaacatgtttgtttggataagttgaatgtatgttgcaatcagtgtattgttttcaatgttttgctag

SEQ ID NO: 18688 - DNA, 1118 bp, Glycine max
  Clone ID: LIB3107-015-C7_FLI
gattatcatagtagatattcattccccttatctttctctcttctctctccccgcccaaaccctaactccctaccctattccgctttctctcatccatcatgaaaggaggaaagtccaagaccgaatctaagagagccgatgccaaacttgctgtgaataagaagggcgccgccaccaagactaggaaacccgccggaaaggggaaggcagcgaaagatcctaacaagccaaagaggcctccaagtgctttcttcgttttcatgtaattataatatattgttatctctacgattcatttgacttccgatgcgctctcttatctttcctccgaataattttatcgtcaaaacttttatccttgtccaattgtaagtccacgcgttctttacctgttgttgtttgtttacctcgattgctttattgttaaaattatgttttttgagtatgctagatctagcttatgcttcgtgaaacttgatattactacacgccccgttgtttttatgattgtattgtggttgttttctgaaatttgtgttgtaattaaagggaggaattcaggaaggtgttcaacaaggaacatcccgacaacaaagcagtgtctgctgtgggcaaagctgctggagcaaaatggaagacgatgtctgatgctgaaaaagcaccttatgtggcaaagtctgagaaaaggaaagtggagtacgagaagaacatgagagcttataacaagaaacaggcggaaggtcctactggtggggatgaagaagaatctgagaagtctgtatctgaggtgaatgatgaggatgatgacgaggaaggcagtggcgaggaggaggatgacgattagagaatggactgatgataatagcatttatgtaggttctgatgattttgatcatccgtgtaggtggtctggtcatttccttataaacatatttctctttccaaaaaatatttccctgctcctccttccgtaaattgctcgtctttccaaaacgtgaatagtttaaagaagggagttctctttatttgtatttctaaatccaactgtttagttaagggatggttatctcttgtagagcttttagtttgatttagagttttcttgttgaaatctggtc

SEQ ID NO: 18689 - DNA, 1345 bp, Glycine max
  Clone ID: LIB3107-017-G3_FLI
ctgttcatggcaagcgaaactacacctattccgatgttgtcagatccgtcttaggagggaggaaatttcagctgtgtggattagctcagtacataaatcttgtcggtgtaactatcggttacacgataacggcttcaattagtatggtggcggtgaagaggtcgaattgttttcacaaacatggtcatcatgttaagtgctatacgtcaaacaaccctttcatgatcctctttgcctgcattcaaatcgtgcttagccagataccaaatttccataagctctggtggctctccattgttgcagcagttatgtcttttgcttattcttccattggcctcgggctctcagtagctaaagtggcaggtggtggagagcctgtacggacaaccttaacgggggtgcaagttggggtagacgttacaggatccgagaaggtctggaggacgtttcaagctattggtgacattgccttcgcttatgcttattctaacgtgctcatcgagatacaggataccctgaaatcgagccctccagagaacaaggtcatgaaaagagcaagtttgattggcatcttgactacaaccttgttctatgtgctatgtggctgcctaggttatgcagcatttggaaacgatgcaccaggaaatttcctcacagggttcggcttctacgagcccttttggctcatagactttgctaacatctgcatagccgtgcacttggttggagcatatcaggtcttctgtcagcccatatttgggttcgtagagaactggggtaaggaaaggtggccaaatagccaatttgtaaatggagaacacgctttgaactttccactatgtggaaccttccctgtgaacttcttcagggtggtgtggagaacaacatatgtcatcatcactgctttgatagctatgatgtttccattcttcaatgacttcctaggcctgattggttcactgtccttttggccattaaccgtttacttccccatagaaatgtacattaagcagtcaaagatgcaaaggttttccttcacgtggacatggctcaagatactgagctgggcttgcttgatcgtttctattatctcagctgctggttccatccaaggcctcgctcaagatctcaagaaatatcagcccttcaaagcccagcaataataataatttgttccaaagttctaaattgctttcttttctaagtaactttttttagtaagtttcagcatgttcatggataatttattgttatcaagtgcttatgaaagaaagaatataacacccagctgcattgtataactgtcaagaataattctaagatgtatgaaagtgtgcactgtcac

SEQ ID NO: 18690 - DNA, 1047 bp, Glycine max
  Clone ID: LIB3107-018-D7_FLI
gaaggtgcaagagtttgttgtgagctataagctagtttatcgtgaggagaatatgaagttgtttgttttctttgttgctgcagtagttttggtagcatggccatgccatggcgcaggctaccaaaggttccctctccgaatgaaaactggctatggtgagcgttcttcggaggtaaaatgcgcaagttttaggcttgctgtggaagcacacaacatccgagcctttaaaaccattcctgaagagtgcgttgaaccaacaaaggactacattaatggcgaacaatttagatcagactctaaaacagttaaccaacaagctttcttttatgctagtgaacgcgaagtccatcacaacgacatatttatattcggcatagataacaccgtactctctaatatcccatactatgaaaaacatggatatggggtggaggaatttaatgaaaccttatatgatgaatgggttaacaagggcgacgcaccggcattgccagagactcttaaaaattacaacaagctgttgtctcttggcttcaagattgtattcttgtcaggaagatatcttgacaaaatggccgtaacagaagcaaacctaaagaaggctggcttccacacatgggagcagttaattctcaaggatccacatcttatcactccaaatgcactttcatacaaatcagcaatgagagagaatctgttgaggcagggatacagaattgttggaatcattggagaccaatggagcgatctgcttggagaccacagaggcgaaagcaggacctttaagcttcctaatcccatgtactacattgagtagtaccttcacctctctcaacaatctagctagagtttgctcctatctatatgtaataaggtatgctgatatgcactattcaaataggagcattagctatgtttgttaatgtcactttatgttatgtgggtaagtcacctaagacactccacgtacctacttgttgtctcttacgcggctttaataaatcttctgcccttgttccatatttactaattatccctttcttcact

SEQ ID NO: 18691 - DNA, 1494 bp, Glycine max; identical to SEQ ID NO: 13393
  Clone ID: LIB3107-030-B2_FLI

SEQ ID NO: 18692 - DNA, 1380 bp, Glycine max
  Clone ID: LIB3107-030-D4_FLI
gatattgatcaatccatcatttccaattaggtaaagtgaaacagtaaaagagcaatggaggaggaggaggaggcggagaaacagaagaagcacttagcaatgctggaacgcctttccaaacgcacccaaagccgttcgcaaaaccccgattcctcatcatcagaatcctccacttcctccatcctttcacgcttcacccacttaaaatcctcgattgagtcccaactcgcccaatcccaatccatttcctccgacccctccaacctcaaactccacttcaatcaaatctccgaatcaatctccgatttagaaaaattcgtcgccgaaaactcctactccctaccctcctacgacgtccgaacctccctcaaaaccgtctccgacttaaagcactccctcgacgacctcacttcccaacttctccccaaaaagaaattctcattcaaaaataaacccaccaccaagaaagaatacaaggattccgctattccactacccacacaaccccctcaactctccacgcgccttgcgccgcgtgactcgccggggttccgaaacaaaaccgctgagcttttaatttcggactttcgaggatccgaggttggggaattcaccgtttcggatctcgattcctgccaagtcaggataataggttccgtcagggcgcttttcgttcataggttgaagaattctagggtttacgtgggccccgtgacggggtcggttctcattgaggaagcggagggttgcgtcttcgtgttggcgtcgcatcagattcggattcacggtgccaaaagaagcgatttctaccttagggttaggagcaggccgataattgaggactgtaatggcgtcaggtttgcgccgtattgtttgaactatgaagggattgaggaggatcttcgtggcgccggtcttgacgccgagaccggaaattggagcaatgtggatgatttccggtggctgcgcgcggtgcagtctcccaattggtcggttttgccggagaatgagagggttgggactgttgagatatccaatttgaaaaatgagggtaaggagatttgatttgcgtctcaacgttgtttccttctttgtttcttttatgtgaggctgggatgttattgagtctaggtatgttctgtttcaggaaattgatgttgagaacttgaggttaatgcgattttggtaattgaaatggttttggatatgttcattttcagtgtagtaatgagttttctgtgtgttgcttccatgagaacttcagcaatatgttcttttttcttcgtattagtctgcatttatcctggttcgggaattgcttggttattaattatttgtttgtttttcaaatacgttggccacaaacggttggaatgttcc

SEQ ID NO: 18693 - DNA, 1162 bp, Glycine max
  Clone ID: LIB3107-036-B11_FLI
gatctacactcataaatcattacatggtcatagtctacacctaattagccaaacacaccacagcaccaaactagttggctcaattctctttgaatggctttggaggctttgaattcaccaacagcagccaccactcccttccgtggttaccaagaagaggaggaggaggttgaccttcacctacgcgagccttgggccaagagaaaacgctccaaacgacctcgttttgagtcggaggaagagtacttggctctttgcctcatcatgcttgcacaaagcggtaacaacaacaacacccaattaccgtcttcgtcacagtcacacaaagaagcgtcaccgccgctgaaactatcacacaggtgcaccgtttgcaacaaggcttttccttcttaccaagcactcggtggacacaaggccagccaccgcaaggcctcgtcggaatccaacaccaccgcctccgccgtcgccgtctctgccacagccaacgacagcgtttccgcttcgaccgtcggcggcggaaggatgcacgagtgttccatctgtcacaagagtttccctaccggtcaggccctgggtggccacaagcgctgtcactacgacggcggaaacaaccacagtaacagcaacgccaacggcaacaacagcagcggcgtcactacctccgacggcggcgctgcctcctcctcctcccacgcgttccgtgggtttgacctgaaccttccggctccgctgacggagttctggtcgccggcggggtttgatttcggaaagaagaaggttggcgttgaacaagaggtggaaagcccgttgccggtaaccgccaagaggccgcgtttgttttcgggggaagataatgaagaggcgtagatttgttcacagaatgtttattttaatttgattgaaattgaatttgttggtacggtgaatatgaattcacaccagttaatttaattttcattttatgtttttttttttgtttgtttttagtatatatataggtgggatcgggattaggttcggattttgtttctgctcctctgtacagacaaaatttgttcattgcttttggattcttgtttgccattgattgaatctaacaattgttttcatcatcagtaatatttatgccaaagataaatatacaggttaattcccattatat

SEQ ID NO: 18694 - DNA, 1114 bp, Glycine max
  Clone ID: LIB3107-052-A6_FLI
gaggagacacaaacaaccacaagtgttcttcctctgtacacaaactctattcctagttcagagtaccgtccttttaccttgcgtacacatcaaagaagaaaaaaaatggaaggagttgggtattgtgggagtttctttcagaggtgcaagccttacatagccatggtttctctgcaattcggatttgcgggtatgaacataatcactaaggtttccctcaaccgtgggatgagccactatgtgcttgtggtttatagacacgcctttgctactgcagctattgctccttttgctattgttctagagaggaaagtgaggcccaagatgacatttctcatgttcatgcaaatatttgtgttgggtctacttgggcctgtgattgatcagaacttatactatgccgggctgaaatttacttccccgacctactcatgtgcgattagcaacattcttcctgcaatgacatttgtgatggctgctatttttaggatggagaagttggacatgagaaaagtaagatgccaagcaaaggtgattggaactattgtaacagttgctggggccatgttgatgacattgtataaagggcaagtaatcagtttcttggggtctaagtacatgcatcaccccagaaactatgtacctgaaaacaccactgattctggtgaaaaggattggtttaagggctctattcttctaatactagccaccctttcatgggcttctttcttcatccttcaggcagggacattaaggaaataccctgctcagctctccctcacagcacttgtgtgtgccttgggtacactgcagtcaattgcagttacctttgtcatggagcacaaaccctctgtttggaccattggctgggacatgaaccttcttgctgcagcctatgctggaataatatcatcaggtatcacctactatgttcaagggattgtcatgcagaaaaaaggtcctgttttcgtaactgctttcagccctttgatgatgattatcgtagccatcatgggtgctttcatccttgcagaaaaaatatatctcggaggggtcgttggtgctattctcatagtaatgggactttactccgttctatggggcaaacacaagg

SEQ ID NO: 18695 - DNA, 946 bp, Glycine max
  Clone ID: LIB3107-055-B3_FLI
agtcatcgaaacgttcccaacgttcgtgtactccaccgtaaagagcctcaagttagggcgcgccacgctagaatgcgccgtgtgcctcaacgagttcgaggaggtcgaaacgctgcgtttcatcccaaattgcagccacgtgttccactccgagtgcatcgacgcgtggctcgccaatcactccacttgtcccgtgtgtcgcgccaatctttttcccaaacctgatgacccgtcttttgatcctatccaaattccggatccggaacaacccgttatatcatcaccgacccgagccgaaactgggggctctaatcctcgttctccgaatttgattgatcagaaccctacgtcgcggtcaaggtcaacgggttttcgtatcgcggggtggtttccgcggtctcactcgacgggtcactcgctggttcaacccggggagaattgtgaacggtttacgctgcatttgcctgaggaagtgcggaaccagcttatgctgagtcgcaccaagagttgcggcgtgggcgtgacgttcacgcgcgagaacagtgaaaggaggggttatagggcgaggagcgttggtagtagcctcagccctcacgtgagggggtggttttctgtgaaggatgatgtcggggaaaggtcttcggatcggttattctccacgtcgacaagggatagtgaggtttagatgcttccttttggtttggtgggtaaaagtcaaatatcattatttcacactttcacaatggcttttgccattttaccaattaaccagcctttctggcctgtgctcctgtatataatatatactctagtaatatttacatgtgtatggttttagagtttggaaattttggagtcttctgttctgtgtggaacaaactacattgatagtaggattttgtaaacgttaataaatttgaaaatctgaaacatttacttattttct

SEQ ID NO: 18696 - DNA, 719 bp, Glycine max
  Clone ID: LIB3107-056-E11_FLI
gagggcacttctccaatctcaacaactttcgtgtagtgcactgttttgctatagtaacccattaattaaaccgacctacgtagtagccatgaagagaggcagagaagagagtaagttagacatggctaattgcttgatgctattgacgaaagttggagagagtgaaaccaattacccaatatcaaagggtagtgatattggtgatttcaagtgcaagacttgcaatagaaggttctcttcttttcaagcccttggtggccatagagcaagccacaaaaaaaccaaagctcatggtcacagatctttcgtgccatcaagagttaccgaacccaaccatgaaacaacaacctaggatgcacccgtgtccgatttgtgggcttgagtttgctattggacaagctttgggagggcacatgagaaagcatagaactgctattaatgatggcttgttgtgtggtaaaccttcttcttcgttgtccatcttgaaggaatcatcgaaagatggtgatcaaaagttgaatttgcgcttggacttgaacttgacgccattggaggaggatgatcttaagctcaacctaaggacgcccgtgctcaattgtttcatttgattggaaattaattttgtactaaaccagattctttttttcttattaatatagttaatgtgtatttttcgtaatttattattatacgtacgacctataggtagctcattttgt

SEQ ID NO: 18697 - DNA, 1041 bp, Glycine max
  Clone ID: LIB3107-057-C11_FLI
tggaaagcaactggaacagacaagatcatcaccactgaaggtagaaaagttggcataaaaaaagcacttgttttctacattggcaaagcacccaaaggctccaaaaccaattggatcatgcacgagtatcgccttctcgattcttcccgcaaacacaacctcggaaccgcaaagcttgatgattgggttctatgtcgtatctataagaagaactcaagttcacaaaaggttgaggctaattttttggctatggaatgcagcaatgggtcatcaccttcttcatcgtcccacgtggatgacatgctgggatcgttgccggagataaatgaccggtgcttcaccctgccacgagtgaactcactcagaacaatgcaccagcaggatgagaaattcgggtctccgaacatgggatccgggtttttctcggattgggttaactcgaccgatctcgattcgatttccgaattcgagtcgggttgccaaacccaaagaatggtgaattatgattgcaatgacttttttgttccttctctgccgcccttgggccatgtggactacatggtggatgcacctttggaggaggaggttcaaagtggtgtgagaacccgacgggtcgacgggccggggcattttcaaccgaatccagatacccgattgttaccgggctcaggtgacccattcgggtttgggtttattatgggtcagcaagttgggttcggggttagggagtgaagtgaaggatcagaaagtgtaattgtgtaaataattggggattttagtttaatttgaattctatgaccattgttatggtttgtgttattgattcccgcttggaaaggaaaaattgcaattttggtcatacttttcggctagaacaagatgaaggacggttgacacattatgaaactgagaaaggacgcaatggtgattgcaccacaaccacaacaatgcatgctgaaaagtaattgctttgtaagacattattgcctaaacatgaatcacgttgtacttcaaagcattaatacatagcaactattttac

SEQ ID NO: 18698 - DNA, 482 bp, Glycine max
  Clone ID: LIB3107-060-H11_FLI
gatatcaagcacctgatgaagttctgcaacagcctccatggagggttgaacaagctcgcggagttgttggaggtggagagggttggcgtctgccatcaggctgggtctgatagtttactcacttcttgtacatttagaaagttgagggatacgttcttcagtggctccacggagaaatatgctggtgtcttgtatggtttaggggttgagagtggacagactaattgaaattgaaagagaaaaagaaaaaaggaaagaagaatataattggatgtagagtacgttttaagtgtgagtctctttttacttcgtgtacacttctgccaaaaaatggttgttgtttacttgtaacattttcatcatcatccttgcttgaactgtaactcaaaccctagctggttttgttagcttgagttctttgtaaatcatcacttcagtttagtgtttcaaatttaaataataacttatatgatgattccctc

SEQ ID NO: 18699 - DNA, 453 bp, Glycine max
  Clone ID: LIB3107-067-B12_FLI
taatgtgagcaaggaaataagctttggggactctgaacttgatgagggtagcaatggtcaacaacaaccaatgccaagaaggtgcacacattgcttggctcagaggaccccacagtggagggcaggaccattaggtccaaagacactatgcaatgcatgtggagtgaggtacaagtctggtaggttgctaccagagtataggccagccaagagtcctacttttgtgagctacttgcactccaattcccacaagaaagtcatggagatgaggatgtctgtttactccatttctagtgagcagtagtagtggtggttgttagaggtatatttttatgtaaaaaaaattgcaaattttaggaaaaaaactatttggcaaacagagagatactgttaaggggagtgattagtgctatgattgattataggcacatttatttacatgacttgttatac

SEQ ID NO: 18700 - DNA, 1449 bp, Glycine max
  Clone ID: LIB3107-076-A3_FLI
ggttaaggtcaaagatgaagaagaacttgatgctgatgatgacacagcttgccatttggattcgattcttgacatgaatagcgaggcctttaattggaatattgctgagtcagagtcacctgcacaggcacaagaagatgaagtgagtaaagtgagaaccaataagaaggacatatttttgaggctaaactatgaagaagtcattactgcttgggcaagtcaaggttctccatggactacaggaaccccacctaagttcttcaactccgatgattgctggctagacttggtaacttctcttcaaccctctttgcttatgcagcagtatcttcttgtgtgtttggtttgacttatttttatgagaataaatttttcagttttcttatagtatcatagccgatctcatatatatctggctaaaggaggaaggttgtgttgcgtcttcagtaaccgatgtaaaattcgtcgatatacctgaaatcattcgtagggcggagatgtgttatgccttcggtaaccaatgcaaagttcgtcgatatacctaacatgaatcgctcacagtgagataaaattttgttgttgtggatacatgagagctctcaaaagaaaactattatatattttttattttttttaaaaaagaaaaagtctctcaacaagcatgcagctactcaattatgcacaattgtattgtataggtggccgtagctccttatgagttgtttaattacatagctgtgtttttagtttttgaagttgcaaaccaaaatactgagtttttaaaaaaaatttagaaatgaccatttaaattgttttgaagctcaaacttgatcatcactgtttctatagttgaaatgaaactttctaatttttattttattttgttaagggttcgaatggtgggggtgttcaatgctattatggggaagtgagaagcttaagagtgcatgcagatgggggaagagaagcaagagtgtcaaggtaccgagagaagagaagaacgcgtttatttgcaaagaagataaggtatgaagtgaggaagttaaacgcggagaaaagacctagaatgaaaggtcgatttgtgaagagtgttcctttgttggagccactgctttgccagcttaattatcaatcatcaccactgacatgattgatcatcaaagtgatcaaattaatggttaacttctccaagttaatttgattttatggaaaagttaatttttagattaattattagttacttggttttgccatatatgtacaatatcatcactaggtcaggtttctcttgcttgggatatttatttctttctctaacaggtctagctagtactaatggaaatgtggtagcccctctcagcattttgaaggctttggtaatcaatttcagaagccctttttcaatgttgcttgattgtcatcatatgaataaaaatctgtaactaatcc

SEQ ID NO: 18701 - DNA, 1482 bp, Glycine max
  Clone ID: LIB3107-077-E11_FLI
gataactctctgtagcgaaaagtcagcgccttcttttgtctctctctctcaaaaaaaaaattccacacactgcagagtttgtctctctatggcggaagattgggatctacatgcggtggttagaggctgctccaccgttacatcatcctcagtgtcttcttcttcatctccttcttcctctggttttgcctcttcttacttccaccctgaagctgcagtttcttcttcttcttcttcctattctggcttcaacatcttcaagggtgaacaaggaataagccaagttttgtcgctctctgcgtacccctttgaggcaaggagctccattgaggaattgcatgagctttgcaaacctttcttctccaaatctcagcctctaacgttgcaagcctcttcacctttgtcctcactctcttcctattcctctgcgccacccaaatctgtttcaacgcaagagaaacaacaacagaggagcaagcaggcacatgctgtcaccaccccacgatctaaaagaagaaagaaccagcttaagaaagtttgtcaagtgccagttgagaatctctcctcagacatatgggcatggaggaaatatggccagaaacccataaaggggtctccatatccaagggggtactatagatgtagcagctcaaaggggtgtttggcaaggaaacaggttgaaagaaacagatcagacccaacaatgtttatagtgacttacactgctgagcacaaccaccctgctcctactcacagaaactctcttgctggctccacacgtcagaagccattggtacctcaaacagccaccaccactgaagaagactctgacaagagcaagagcctcacaaaacccacttcccctgccacctcaggggcagaagaagaggctccaacaccatcacaaggggaaaagtctgagagcagagaagagaaagaggatgtgatggatgatgaggaagaagatgaatttggcttgtctgatatggtgctttcagatgacttctttgaaagtttggatgaactgagccaacttacggctccttctgttgtcactggagactgtttcagtgaccccttttcagcaattgcaatcccttcttgggtggctagtggtgctgctactgctagtgggtgtagatgattctttcgggcaaatcatcacaatgcttttcattgatgacaatagggaccttttctttttggtttttgtttgtagaggaaatggaacattttggaggaatctttactaacaatggtttgtggatgggaggaaaagttttccttagtagagtagtagtgactagtaaggtagatcaagcattaatcttgttaaaaatcaatgattattattaggcattcatagttttattatttatgtcatacctatgttaatgtaaaaacaatatattttagtaagctttttgtatgctccttgagttgtggttgagttcattgtatttgacattggttttgtgatat

SEQ ID NO: 18702 - DNA, 867 bp, Glycine max
  Clone ID: LIB3107-078-H7_FLI
gaccaagccagcatttccaatcaagtaatcgagatagtgctccaactagctaatagagtgaaatatatcaacaaattaaaatcgaaccccaccaatccaaagctatcatacccttgcatgttcacgagcttccttttgattggtttgtgcagctgctaattattaaaatgacgagaacgaggataaagataaagaaaatcgacaacataacggcgaggcaggtaacattttctaagaggaggcgagggctattcaagaaagctgaagagctttctgtgctatgcgatgctgaggttggtctcattgttttctcatctaccgggaagctctttgattatagcagctccaggtacgtgtacggacgacgactggtatattataacacaccactcttgagtttttgacttttctctcagtattttgtatacacatactagtagacgtatacattgttgggaaacctaggggataaaaactggggtataaacatgtgtaaagcacgttcttaattccgttgctttcaattaatattaatatgtctgtatggttctttctatcctaattcctagccagtagtgccagtggtttatgtacggagtgagtatctggaagtctgttagagagagagagagagagagtgtgtgtgaaaactgagaggagaaggacggggattagatgtaatctcatgatgggtttggagcagaaacctcgtttcactcgcttatggttctaattttatggaaatttaatagtaggctattgaagtttccatgaaaggttgtgttgggagagaaaaaagaaaatgaagcattagttaaatagtaattcctaagcgatcgttttaactattttttttgtaaatattcg

SEQ ID NO: 18703 - DNA, 1490 bp, Glycine max
  Clone ID: LIB3107-079-C9_FLI
gatcactcaattcaattggatcttttgcattctctctctctggtgtctgatttcagggttgatcttctcttcactgggttcaagaagcttgtgatgatgcttgcagcatatgccttgaggatttttgcaaaagtgatcctgccactgtcactaattgcaagcatgagttccacctgcagtgcattcttgaatggtgtcagagaagctcccaatgtcctatgtgttggcaacctatcagcttgagggatactacaagtcaagaactgcttgaggcagtagagctggaaaggagcttgagggataccccatctagaaatgctgcgatttttcatcatccagcacttggtgattttgaattgcagcatttacccatggctatgaatgaggctgatattgaagagcgaataattcaacatttgactgctgcagcagcaatgaggagatcacaccacctcggccagagggaaggccatcgaactaggtcatctgctcatggccgtccacacttcttagtatactcaactcagccaagtgcaccaccatttgctgcaggaggggaaagtgaaccagctgcaattcctgtaggaattccatctaccccacttacatttgacggaaatgagcaatcatctccacagcagatcccctatttccaaactcggggttcttctttaacttctggctctactgtcgcaacaacaaatcttcaaggagttcactctaatgatagaaggtttgcctctcattcttttcctgcaagccaagacagagcacagccatcagaacaatcgttctctgattctctgcgttccagatttaatgcagtatccacgagatacaaagaatcaatttcgaagggcacaaggggatggaaagagaggctgttctctcccaattcttctatgtcagaacttggttcagaagttaagagagaattgaatgccaaaattgctagcgtgtcccgattgatggagcgccttgaaacaacaagagaaaataatagggctgcaggaacttctttatcaaatccaaatcatttggtgaactgttccattgcagagacaagcaaccaaaacaatgtggaagctcgtggagagaactctttgcgtgacaatagtactccaactacattttctgctagctcagattcaaaatgagttccagtttgcttctgtgaatgcatctttgctcagcatatcatgcttgaaggctaactgtttgctcaggcatgacatgatgaggaatatatgctcgaggcagttgttggattccaataaataaaaaaaagaatctgagacacctgtgtcctagagctaaaaactttttcttttgtgtatatattatataagccgagaaccgtagggagtatttaaggagtaatccaagggagaaagtgttgtgaaattccatcagacttgtgtccataatctgtccctgtgatttactttttggagtcaatggaaatatagatcaaggtggcaactgtaaag

SEQ ID NO: 18704 - DNA, 762 bp, Glycine max
  Clone ID: LIB3107-080-C1_FLI
gacaacacaacgcaacacaacgcgcactctctcttttctctcttaacacaaaaaccctatcgttcttcgcggtttcgccgattctcgccatgccgaaagccaaatccgacgccaaagccgccgatagccggttgaagcgcaagggcgctggtgctggaaggaagcaatcgaagaaagctgctaaggatcctaacaagccaaagagacctccaagcgctttcttcgttttcatgtccgagttcagagagcagtttaagaaggagcatcctaacaacaaatccgtcgctgttgtcggtaaagctggtggtgacaaatggaaatcgctgtctgatgctgaaaaggcccccttcgttgccacggccgaaaagaagaaacaagagtatgagaaaactattttggcttacaataagaaattggaggggaagaattcagaggaagacgagtctgacaagtcaaagtctgaagtcaatgacgatgaggaagatgaggaggaggaggatgatgatgacgacgagtgaagatggtgatacaagatgaagcgtaggaggatgtgggaaaagaaaattgttttgcatagtagttgttgggtttagaatttcataggatggttcccaacccacatccctttatgataattagtttctgaatttttattttgtcctcccttactagggttagattagcgcacaatcgtaattagggttcagtatcatgatcatgtacttaaaagtcaatgctatgatacgtttcaattctattccc

SEQ ID NO: 18705 - DNA, 1127 bp, Glycine max
  Clone ID: LIB3108-017-B4_FLI
tccactttcactggaatcacaatcctgaaacaaaaacatcttagcatttaacatactactagacaacatgaccaccacattggaaagaggtttctcggaagagcaagaagctctggtggtgaagtcatggaatgtcatgaagaagaattctggagagttgggtctcaagtttttcttgaaaatatttgagattgctccatcagctcagaaattgttctcattcttgagagattcaacggttcctttggagcaaaatcccaagctcaagccccatgccgtgtctgtctttgtaatggtaagctaaaattaaatactaaaccaaattccagttaaaccattataaccataaattatagaagccatgtctcttaattggtaatatcaatttattttgtttttgtcattgcagacctgtgattcagcagttcagctgcggaaggccgggaaagtcactgtcagagaatcaaacttgaaaaaattaggtgctacccattttagaaccggcgtagcaaacgagcatttcgaggtatataaacatcttagtatgagtataattgccaaattaaacattgtttattagcaagggtcaatttatagattgaaaatgacatttgctcataactatttatatcaattgttacattcaaaaatataattggcataaataagtgatggcaagacttgtatttatttgtgttttttaactacactttggagggtaattctctagaagcatgatgtatatagtttattgtttggttttaaggtgacaaagtttgcactgttggagaccataaaagaagctgtaccagaaatgtggtcaccggctatgaagaatgcatggggagaagcttatgatcagctggtcgatgccattaaatctgaaatgaaaccaccctcctcttagactccagtttaagcagttcctttccttccctctcaattctcaaattgttatattaataaaagtgagaaagtttaggcttgtgcttttattttgtgtgaatgtaatatactttgtgtacgtagacttggctattgggagttgctaggttgggaagtgtttcgcattcaacaattctgtagttgaaggtgattaaatgaattatagctatttgtttctttat

SEQ ID NO: 18706 - DNA, 997 bp, Glycine max
  Clone ID: LIB3108-055-G8_FLI
cacgctcgaagtaagagagaaagaaataaagaattggcgtgagtcgctcgcaagtttgtgatggcggcctcttcttcctctctctctgcctccgacgactcttcttctcaccgtcgcaggcgtcaccaccgccatcgccgataccgtgataaggactccctcaagattcgaaagaagagcaagtcccaatcccaatcccgcggagaacgacgccgtaggcatcaccgccactcttccgattccgattcctattcttcatcttccctctctgattactccagaagtgaaagttcttctgatagtgagcatgaaacatctcaccgttcaaagaggcataaaaagagtgacaggccaaagaagaataaggaaaaggatcgaagcaaaagccaccgccataagaggcagaagcataaagtaaaagagaagcagcatgatgagaggagcagcagccctgtgcagctttccaagtttttagggcatgacaaagatgacggtgtccgtcgcagtgctgtatctggcaagaagattcttctgaaacttgagaaaacaaaggaagataaagtggctgaaagcaagagaaacgaactgctgaactttttaaatgctagttttgattagcattgagaaggtatggatttgatagaagggtacaacaaaatctgggaaggaccacatttacttacacaggtgcagaaattatttttccgttataagaaccgggcagcctaccatttccttggggaaggggagtgggatatcataatattgtgcttaccattgaaagacatgtatggttctcgatcagtggatttctcttttatgaaatttgttatgagcttttgtaggatgaggagttcttgacccaactgattccatacatggtattttgagattgggcaatcattgtgttatgtgccaagatatttttttcttgtgttgatttgggcacatgtgactgaattattaaaaaatttgttcccttcttggtttccccccg

SEQ ID NO: 18707 - DNA, 1053 bp, Glycine max
  Clone ID: LIB3109-002-B7_FLI
gggagtcagacagacaaacaaactactgctacgttaatcatgggtccaacctctatggccgccggaagagtcacgaggtttttggccaggcactaccctctcgagcaccaccgtgataacgccgatgttgagttcgactttcttgatgatattggagaagccttgttagctcaaagtgctagcagtgatgagtgcggtcaccccaatgaaatggaggaacagttcgaccaagacgaggatcacagagataccgtcgaggagaatagaaccttttgggacaaacaacaccagcttttgcaggccagtatatgcagaactagttcttcggagtcacggataaggcatgccaccaaagaagcgcttcaggaaattcaaagcgcggaaactgtgtgcggttgtggcagacaggtggctgtgatcacaacttgtcgaaactgtttgatgagagaagtttctaggcggcttcagaaagcaggttatgatagtgctatttgcaaaactaaatggagaagctcacccgatatcccatcaggggaacacaattttttggatgtgatagacagcacaaagaagggggaggtgagggtgattgtggagctgaatttcagaggagagtttgagatggcaaggggaagtgaagactacaaccgacttgttaggaggcttccagaggtgtttgtggggaaggtggagagactgagcaacctaataaagatattgtgtatgggagccaaaaggtgcatgaaggaaaagaaaatgcacatggggccatggaggaagcataggtacatgcaagctaagtggttaggtccatgtgaagggaacacttccacaacctcactttcagtgaggtataattctgagaggatattgccaaggccaaaggcatccatgttgactgttgatctgctagagaagccttcccaatatgcattgcactgctgttgaggttgtgtaatataattctaagagagagaaccacctttttttgtttattttggtaattaattaattcccctccctaaaaaggtgaatattaaatgagtgattcgc

SEQ ID NO: 18708 - DNA, 1334 bp, Glycine max
  Clone ID: LIB3109-006-H8_FLI
ggcggtggtttgtggtgaaaatttgcataataatcttttgcagaaagcaagcaagaaagaaaaagggccatggaggccctgcacttgcaccgcgtgcttctcatgcctgtttcccaaaaaacctcaatctttttgcgcgccagtggcaccccattatccacacttgcaaggccaccattgcgttggagctctcaaacttgcagtgccagagcagggtggtttttgggtcttggagcagacagcaagaagaccaatttacctgataccgtcaaagccggtgaccccgttctgcacgagccagcccaggatgttgatcctaacgaaataaagtcggagagagtgcagaagattattgatgacatgatccaggtcatgagaaaggctcctggtgttggtcttgctgctccccagattggaattcctttgaggataattgttttggaagatacaaaagagtacattagttatgtctcaaaggaagaggctaaaactcaagatagaagaccttttgatcttttggtgatcctgaatcccaagctagagaagaagggcaagaggactgctctgttttttgaagggtgcttgagtgttgatgggttcagagcagtggtggagcgacaccttgacgttgaagttacaggtttggatcgttatggtgcaccaatcaaaataatcgcttctggctggcaggctcggattttacaacacgagtgtgatcacttggatggaactctgtatgttgataagatgctacctagaactttcagaactgtggacaacatggacctgcctcttgcccaggggtgccccaaacttggtcctcgctaaaattacactccagctgtttctgataaggcattcaatgcaggtatctaatgcattttagtgaacaattgacatttgtagatcctaaaatggaggccagattctttacattctagaaatagtctcaacttaagaaaaattaaatctccctcaattttcaatgccatcattttgccaagaattgccattgcactactcctgattaattcacttcatttaagtttcaatgttgtagcttatactcgaaaaaaaaaatcagagttgtggactatggagtctggatattgacagtgcctagcttttctgcccattgacaaaaaattgggtttgctgtcttcttgttatttggagcattgaggtggctacttaggcattagaaattcatgtaacttttgtcagctctaatgcaaacttataccaattgtgtgcagatcttggctatttcatccttcaatgatgagggagaattgtcgttctaataaatcagaatgatatgaaagttcatgtgc

SEQ ID NO: 18709 - DNA, 1104 bp, Glycine max
  Clone ID: LIB3109-009-C12_FLI
gggggaaaagcgtagtcatcagtttgccgatagaagtagaaaatggaatcttgatcgtattatctttgttgctcatccattactccttctgcagtagaataatatataaagagagaagagtgcaatctagaaccacatagttattttactgtgtgagtgagagagagaaaattaacatgggaagaggaagggttgttctggagagaatagagaacaagatcaaccgtcaagtaacattctcaaaacgcagaagtgggttgctgaagaaggcctttgagctttctgtgctatgtgacgctgaagttgcccttatcatcttttctagccgtggcaagctttttcagtacagcagcactgatattaacaaaatcattgagaggtatcgccaatgtcgttacagcaagtcgcagactgacgattcattggaacacgattcacagagttcataccatgaattcttgaaattaagagcgaaatatgaatcacttgagctgacacaaaggcattttcagggagaagaacttgagccacttagctttaaagatttgcagagccttgagaaacaactagacataacgctcgcactaactcgacagcatcaaacgaagaaactcttggcacgagcagatgaattacgcgaaaaggttcacaagttggaggatcttaacaaacaattagagtccaaggaaaaagatgaattctcaagcctcatccttgacaataacaattacattcaagtgcatgctacacaaggtgatcaatttgagtctgggacaacactaaacacatgtaggtttcaacgccaagattcaaaggaaaaagcaattgataccaagacagacggtagtcaaagcagtcacaacaaaaacaaaggatggctattgtgaatattcatttaatttacatgttgaaaaaaaatatctatcaataactcaggggtgcccatgtattggtataattcacaaaatagtttatataaagtattatttctactaaacacacacattgttcctaaaataagatattgtactttatgcaacagtaaagaggaaaaattatgtatttcaactatcattgtataaattgtcattagaagatgttctg

SEQ ID NO: 18710 - DNA, 1100 bp, Glycine max
  Clone ID: LIB3109-009-G5_FLI
ggaccttcatttgtcattgggaattgattcctaaaatttgacgaaaagagattacagggaaagtgggaaacagtagatgatcccaatgggaattggcaaaattggagatcatcgaccatagatatcaaggtctgaagttgaaccaatggattgtacagctgcaaggaaaacacaaaaggctgaccgagaaaagctaaggagggatcgattcaatgtacagtttgtagaactgggtaacattttagaccctgataggcccaaaaatgacaaagcaaccattctaggtgatacaattcaattgctaaaggaccttacttctgaagtcagtaaacttaaagatgaatatgctactctaaatgaagaatcttgtgagttggctcaggagaaaaatgaactcagagaagagaaggcttctcttaaatcggatattttgaagttgaataatcagtatcagcaacagctcaggactgtgtctccatggactgcaacggatcgttcaataatgctagctccaccatcatatccatatccagtgccaatgccaatacctcctgctcctattgccatgcagccataccccttctatgctaatcaacattctgcaatcatccctaacccttgttcaacatttgttccttatttagtccccaatacccttactgaacagcgatccacccagtacatgtcgccacctgttcatccaggttttcggtcccatgtgtcaggaaaacaagagtccagaaacaaatcatccaaggagagcaaggctgaaaaacatgaggattctaatgatgtcactctgactcctgggtcttctgctgatcaggatttatcatctggacaaagaaaatctagcaagttgtcaaggaaggaaagcagttgcactgaagtgagttctttagataggtgctctttgtcttgtagcgttcaggatagttcatcaagtagtgtagttcacaagcacaaaggctaatgaatgagaaatggtacaattttggtcaagtgcttatgatgaagtttttccattgttttaactgctgcaactgtctggaggcataagttatttgtggtcttattaaaaaagaagtaacttctgtaag

SEQ ID NO: 18711 - DNA, 1378 bp, Glycine max
  Clone ID: LIB3109-011-F8_FLI
ggagacagatttgtgtgttgagcgcatagaacgatgagtttggttggtagaggagcaagttttgcattgtagtagttgtagcaatagccacacaacaaaagaaaacaaaaaaccaagtcttcgtcatcttcgtatgcagagatttttcttcaacatgatgatgatgattagtttatttaccaaacaatgattgccttgccttccttcgtgagatactggtagcaatttcaaaccttttcgagtaaccaaaaagaaaagaaaagaaaaaacaaaagctagaagatgaagcgcatgaatgagagtaacaacaccgatgatggaaacaatcataactggttggggttctctctctcgccccacatgaaaatggaggttacttcggcagccactgtttccgacaacaatgttccgacaaccttctacatgtccccttctcacatgtccaactccggaatgtgttacagtgtcggggaaaatggtaacttccattctcctcttaccgttatgcctctcaagtctgatgggtcacttggtatcttggaagctctcaatagatcacaaacgcaagtgatggtgccaacttcgtctccgaaattggaggacttcttaggtggtgcaactatgggaactcacgaatatgggaaccacgagagaggtttgagcctagacagcatctattataactcacaaaacgcagaggctcaacccaacagaaaccttctttcacatcccttcaggcaacaagggcatgtgaatgtcgaaacacacccttattactctgtatttgcttgtcgaggtttgtatcaggcaccgtcggaggaagaagcaacaaaggaaacgcacgtttcagtaatgcctcaaatgacaggaggaggtttgcaaaactgggtagctccaacaagggagtattcaactcatcagcagattctggagcagcaaatgaactgtggcatttggaatgagagaagtggggtatctgttggaactgtggggtgtggagagttgcaatctctaagcttatctatgagtcctggttctcagtctagttgtgtcactgctccttctggaacagattctgtggctgtggatgcaaagaagagagggcatgctaaacttggtcagaagcagcctgtgcatagaaaatctattgacacatttgggcaaagaacgtcgcagtatagaggcgtcacaaggcatagatggactggtaggtatgaagcgcatttgtgggataatagttgcaagaaggaagggcagactaggaaaggaagacaagtatatttgggaggttatgatatggaagaaaaagctgcaagagcctatgatctcgcggctcttaagtactggggaccttcaacgcacataaacttttcgatag

SEQ ID NO: 18712 - DNA, 1049 bp, Glycine max
  Clone ID: LIB3109-014-H11_FLI
tactgggatgaggaaatcaaaagcagatgagaagattctcagctacaacgatgtggtgcttaggcgatctgatttacacatccttagtggtccatattttttgaatgatcggattatcgagttttatttcagctatctttcttcatgtcatccctctcaggatatcctgctggttccaccatccattgcattttggataatacaatgccctgtcgctgaggctcttggtgatttcatagaaccccttcatttgcctgataagacactggttatatttcccgtcaatgacaatgatgacgttgacagagctgaaggtggttctcattggagcttacttgcatattaccgcaacgctaatttgtttgttcaccacgatagttgcagaagcatgaatgcagcacccgccaagcaactctataaaggcattgctggatacatgggatcctctggatcagcttctgaggctagctttctggaatgcactaattcacccatgcaagacaatggttatgactgtggcttatatgccacagccatagccagagtaatatgcaactggcatgtaaatcataaaaatgctgatacaaatgatctgtggttttctgcggtgaaggaacaggtttccccatctgctgtcgccagcatgcgaggcgagatcctggccttgatcagagatctaatggcaagacattgagatcagcatgttccagattaaaatctgtcttcttacttggaagtctagaattttaagtgttgagcttcccctaatgagaagtgtcaagtctgtctgaacctcaaagtttgagcttcctctataacttcatttatgaggagactctgatttagtgtcgagtctatttgagcctttgactaccagtcattgctgaagcaaatttgatctttagcaaattgatgtttgttgggcagtaaatactaagatgggcgtacatcttggttaaaggaaaccctgtatacactgttattggcttactgccattgcatcttcaacttcgttacatttttttgtttatttttttcgttacaatgtc

SEQ ID NO: 18713 - DNA, 1046 bp, Glycine max
  Clone ID: LIB3109-015-C12_FLI
ggccttggtattgggaaagttattgaaaatggaggagttggaggaagcctaaccgggataacaattggtaccgtgacccaaactgataaagtttggagaaccatgcaagctcttggtgacatagcctttgcttattcatactccctcatccttatagaaattcaggacacagtgaaatcccctccatcagagtcaaaaacaatgaagaaggctagtttcatcagtgttgcagtaactagcattttctacatgctttgtggttgctttggttatgctgcttttggagatgcaagccctggaaaccttctcactggttttggcttctacaacccatactggctccttgacatagctaatgctgccatagtgatccaccttgttggttcataccaagtttactgccagcccctcttcgccttcgtcgagaaacacgcggcgcaaatgttcccagatagtgattttctgaacaaagaaattgaaattccaatccctggtttccatccctacaggctcaacctcttcaggttggtttggaggacaatatatgtaatgttgagcactgtaatatcaatgctcctcccattcttcaatgacataggtggacttcttggagcatttggattttggccccttacagtgtatttcccagtggagatgtacattattcaaaagagaataccaaagtggagcacaaagtggatctgcctccaaatacttagcatgacttgccttttgatgactataggagctgcagctggctctattgctgggattgccattgatcttcgaacttacaagccattcaagaccaactattgattaaactatgattgccattgatagagatttcagaaaccaaatttcatttcttggtcatattcttatgaagccaaggatatatggtgatcttgtttgtttatggcctagcagccctgtgtgttccacttctttctactgtgtatctgttactctctagctcgttctgcaacctaattcaaaatggaagaaatgaagtaaaagcatataaatctagtgtaattataaac

SEQ ID NO: 18714 - DNA, 1196 bp, Glycine max
  Clone ID: LIB3109-015-F4_FLI
ggagatagctgcaaatttgaccatcctgtttgggttccagagggtggaatcccggattggaaagaggctccaaatgttgttacaagtgaaactcctcctgagagaccaggggaaccggattgtccatactttctgaaaactcaaagatgcaagtttggttcaaagtgcaaatttaatcatcccaaggtttcctctgaaaatgctgatgtttcttctggcttacctgagaggccatctgagcccccttgcgcgttctacatgaaaactggaaaatgtagatatggcactgcttgtaaattccatcaccccaaggatatccagattcagttgtctgacgacttgagtcaaaatgttgcacagacacaaacaaattctatgatgggtggagctacaggagatacacagccaattaaatctcttatatctccgtcgttgcaaaatagcaaagggcttccagtaagactgggggaagttgattgtccattctacatgaaaactgggagttgcaagtatggtgtcagttgccgctacaatcatcctgacaggaatgcaattaatccacccattgctggattaggtgcctctattttgccatcctcggctgctaatctgaatattggacttcttaatccagctgtttctgcttatcaagcttttgaaccaaggctgtcaaatccaatggtgggaattgcagaaactatctatcctcagcgacctggacagattgaatgcgatttttatatgaaaactggcgagtgtaaatttggggaaagatgcaagtaccatcacccaattgaccgctcagcactgtcactgtcaaagcaggctactgttaaactcactcctgcaggattaccaagaagagagggtgatgttatctgtccttattatttaaaaactggaacatgcaagtttggtgcaacctgcaagtttgaccacccaccacctggagaagttatggagatggcaaaatcacaaggaacatcagccaatggagaggaagctgaaggcgatacttctgctctggaacaactttgagatctttcatgaaaacttgactctgtatttgatgagcccttttatttcttccttatatgttttttctgatcatgatatcaacagctgtggctgaagacctgctttgtttaatttagtgactaatttgtctcttgattggtatgagtgctgttttttcc

SEQ ID NO: 18715 - DNA, 1419 bp, Glycine max
  Clone ID: LIB3109-015-G9_FLI
gagagaaagagggtctctttctttttggagtattgggtcacagcctcttttaggaatgccaaagttactcaacaacacctcacgctctctgaaaatgctgcaggcatgaaaccgctcattccaaccttcacctccttcttccaaacctctccttcacttgttagatttgttcacattgcaaagggaactttgttgctatggggttgatcgatctgaacaccacggaggatgatgaagctgctccattatctgcttcttcttctcactcggggataagcacttctgcttcaaccttggttgtttctcctcctccttctgtgtgcttggaactgtggcacgcgtgtgcgggccctttgatctctctgcctaagagaggaagtgttgttgtttacttgccacagggacactttgagcatgttcaggattttccggtcaatgcttttgatatcccaccccatgtgttctgtcgtgttcttgatgtcaagctccatgcagaggaagggagtgatgaagtgtactgccaagtgttgttggttcctgaaagtgagcaagtggagcatagcttgcgggaaggggaaattgttgctgatggggaagaggaggatactggagctacggtgaagtcaacaactccccatatgttctgcaagactctcacagcttcagacaccagcactcatggtggattctcagttccccgtcgggcagctgaagattgctttcctcccctggattacagtcaacagagaccttcacaagaacttgtggcaaaggatcttcatggcctggaatggaggtttcgtcatatatataggggccaaccacggaggcatttgctcacaactgggtggagtgcatttgtgaacaaaaagaagcttgtttctggagatgctgtattgtttcttaggggcaatgatggagaactgagattagggattcgcagggcagctcagttgaaatgggctggttcctttgcagttccctcaggtcagcaattgaatcctgcaactctcatggatgttgttaatgcattatctacaagatgtgcatttagtgtttgctataatccaaggtatttttctctttattcacttgtaccttccccaggagttattgaaggaaatctgttaatgtcagttcctgtgcacagttattatggagttttttctgtttgtataagatggggatggggattctgaattctgaaacatgtttagtcataatgtctaaatgaaaatttcccatttcacctcagtcttctattttaaggtgctagactggagatttggtttaatagaagaaaacaaactgcattgaagttcctagttccttaccattaataattgaatattttaatgatttttaaaatttccattttctctgtatgcatagtatgttttaacaagatttgagttatag

SEQ ID NO: 18716 - DNA, 1992 bp, Glycine max
  Clone ID: LIB3109-016-A2_FLI
gcgagaagacgacagaaggggatggtcagtagtaggtaacttgttttctcttcctcgatttgatcgatcgttccttctctctcttgtgtttatgccaggaatgacagcgtatcagtggcagtgcaggaaacgagagggagagttttcattgggaaggtaaaagcctttgtttgtagcagtgccttacatgaaccctcgccccccttctcttgttcgctaccactaactcatcgttttctcagtgtgccccgcgtgcgttctgctgtgtcctctcactcacaggtgtaaccgtgtaaccactagaatcatacttagtggcatggaaagaaagaaagaaagattaacctaaaaaccctgtgcaggctttcccagaaaagccaagtgagaaaaccaaaccctctattaccacttactacttacttcatgtaactgactatagccaccactatcactatttaggattttctgtaaaaagcctgatactcttttaccataaaacccgggagagccctcataataaaattgagagagagaataagagaattgtgtgtcgtgtttgtttttgtttggtttgttgtaaggttagctagtgagtattctacacaagggtggtggtagggcaaaaaggataagacagtgaatgtgtgtgtgtgtgtgtgtgtgtgtgtgttgttgacaagcaaaagctatggagggtggtagtagtagctctaatggcacttcttatctgttggcttttggagaaaacaacagtggtgggctatgcccaatgacgatgatgcctttggtgacttcccatcacgctggtcatcatccaataaatcctagtaataataataatgtaaacacaaactgtctcttcattcccaactgcagtaacagtactggaactccttctatcatgctccacaataatcacaacaacaacaaaactgatgatgatgataacaacaacaacactgggttagggtactatttcatggagagtgaccaccaccaccatcaccacggcaacaacaacaacaatggaagctcctcctcctcctcctcttctgctgtcaaggccaagatcatggctcatcctcactatcaccgtctcttggcagcttacgtcaattgtcagaaggttggggccccgcctgaagtggtggcaaggttagaagaagcatgtgcttctgcagcgacaatggctggtggtgatgcagcagctggatcaagctgcataggtgaagatccagctttggatcagttcatggaggcttactgtgagatgctcacaaagtatgagcaagaactctccaaacccttaaaggaagccatgctcttccttcaaaggatcgagtgccagttcaaaaatcttacaatttcttcctccgactttgctagcaatgagggtggtgataggaatggatcgtctgaagaggatgttgatctacacaacatgatagatccccaggcagaggacagggatttaaagggtcagcttttgcgcaagtatagcggatacttgggcagtctgaagcaagaattcatgaagaagaggaagaaaggaaagctacctaaagaagcaaggcaacaattacttgaatggtggaacagacattacaaatggccttacccatccgaatcccagaagctggctcttgcagagtcgacaggtctggatcagaagcaaatcaacaactggtttattaatcaaaggaaacggcactggaagccttcagaggacatgcagtttgtggtgatggatccaagccatccacactattacatggataatgttctaggcaatccatttcccatggatctttcccatcccatgctctagaaaattatccctcgtttgtgggctgctgataatagattcataaactcgtgctgtcacttattaaaaccttacaattattaatattaattaatatgcattctaagaaatcctagattgctatactataatatagtacgcaggtgtatcccttgctagctttttag

SEQ ID NO: 18717 - DNA, 1112 bp, Glycine max
  Clone ID: LIB3109-016-H5_FLI
gacacacaacattttcagtgaaactgaaaaggggaagaagagagtgaaatgggggagctttacgcgttggacttcgatggagtcatatgtgatagctgcggagaaagctctctctctgctctcaaggctgccaaagtgagatggcctggtttgtttgatggggtggattcaaccacagaaaattggattattgaccagatgcacacagtgcgaccagtagtggaaactggatatgaaaacgttttacttgtgagattgttgcttgagagcagaacaccaaccatccggaagtcttcggttgcagaggggctaacagttgagggtatattggagaactggtcaaagttgaagcctattatcatggaagaatgggatgagaagagggatgatctgatagatctttttggaaaggtcagagatgaatggttggagcaggattttgctacttggattggtgcaaacagattatatcctggtgtttctgatgcattaaaatttgcaagctcgagagtgtacattgtcaccacaaaacagagccgctttgctgatgctttactccgagagcttgccggagtgaccataccacctgaaagaatatatggccttggaactggtcctaaggtagaagttctgaagcagctacagaaaaagccagagcaccaaggactgacactgcactttgttgaggatcggctagctaccttaaaaaatgtcatcaaagagcctgagttagaccaatggaatttgtatcttggtaattggggttacaacacccagaaagaaagagaggaagctgctgctatccccagaattcatgttcttgagctctccgacttcagcaagaagttgaaataggggtcttcattggattgtcaactgtcaatcgttgaaccaaatatttttcttccaactcatttataagcaataacaagtttctagtgaacacaatctttctactcagaaattctctccttttcgtcttgtgaaactgcaataattgggtcgagagctttgttgtctttactagacctgcccaacttgaacttgaataagatggttcaaacccataagttacagtaatttgtactctcttagaggaaatgaaaattggc

SEQ ID NO: 18718 - DNA, 795 bp, Glycine max
  Clone ID: LIB3109-017-E9_FLI
cgcgagaagacgacagaagggggagaaaaacgagccaattcatcattttctctcttctctgcttcttcttgttcaaatcttaggagctgaggagaatcaatcgagagaaatatgtctggtatcgctcgtggacgccttgctgaggaacgaaagtcatggcgcaaaaaccatccacacggtttcgttgccaagcccgagactctacctgatggcaccgtaaatttgatggtctggcattgcactattcctggcaagaccgggactgattgggagggtggatatttcccactgacaatgcacttcagtgaagattaccctagcaagcctcccaagtgcaaattccctcaaggtttctttcaccctaatgtgtatccatctggaactgtttgcttgtctatacttaatgaagatagtgggtggagaccagctagaacagtgaagcaaattcttgtgggcatccaagacctgcttgatcaaccaaatcctgctgaccctgcccagacggagggttatcatctattcatccaggatgcagctgagtacaagagaagagtccgacagcagtcaaagcaatatccacctcttgtctagtgttatatctgctcactttaggaactgttatagtatgttagttgttgtcagttatttcttgttctgtgttaaaactgttatgtgattgttggctgccataatatgcagactccatggttttaacaatttctgcttactctcaggtctggataacgtgttaatatataacaatgtgaaagtccaccaataatacttgttggcaac

SEQ ID NO: 18719 - DNA, 1174 bp, Glycine max
  Clone ID: LIB3109-019-A10_FLI
gaagagggttttgggtaaaactcccacagtcaagaggcaatcttgtgggaaatacaaaggtgttcggatgcggaaatggggcaaatgggctgcggagattcgtgaccctttcaagggcgcgcgaatctggttgggtactttcagcactgcagaagaggcttctcaagcctataatgccagaaggcttgaatttgaggccatggccaaggctctatctgatgagaagagcaacaatggcagcaacagcagcagcaacaacaatgttgttgcttctgctgaaactgtggctgccacagaaaataacagttccaactattgtgtttcttctgctgcaggttctgtatcagactccaagtctgcttctatggatgaatcagagagtgtgttgtcactcacatcaccatcttctgtgcttgaattggatacatctgctttcaatttgattgggagtggtaaggtttcaagcaatgaagttgttgagactaaaggattggaggctgaagttgctgagactaaaaatttggcagctgaatttgccgagctggaaatgctggaaatgccggatttgagtatgctgaatgtgccatccccatctgctgtcgctgctactgctgccgctccatctgagtttgaattggatttgttggcatttgttgattccgagtatggatttcatgatgagcatgactttgatgatgatcttgctgccctggaagactttcacatttgcggtttcgatgacaatgagcctagcgagcttcccgattacgattttgacgactttggtgctgatgagtttgctggttggattgaagaacccctcaatataccttgcgtatagattttgcagcttcataggaatgagttctatccaagagactagtactactacaacattacaagttgtgtcattgcttaaaaatgctatagttttttgagatctcaggaaaaaactagttcctgggagagttgttttgtcaggtttgttttaatttatttgtttctttagggatggaagatcaatgagaggttaagagacaatgccttggtttttcttgtgctattagagccgtccaagggtttttcaatttctattatcgtgaaagttgagtgtgtagatgtctatcaaacttgaaatctactatctttatcagaaattctatggtatccttgg

SEQ ID NO: 18720 - DNA, 843 bp, Glycine max
  Clone ID: LIB3109-019-D11_FLI
ggttggagagagagatgggaaggtccccttgctgtgagaaagcacacacaaacaaaggtgcatggaccaaagaagaagatcatcgcctcatttcttacattagagctcacggtgaaggctgctggcgctctctccccaaagccgccggccttctccgttgcggcaagagctgtcgtctccgctggatcaactatctccgccctgacctcaagcgcggcaatttcaccctcgaagaagaccaactcatcatcaaactccatagcctccttggcaacaagtggtctctaattgctggaagattgccgggtagaacggacaatgagataaagaattactggaatactcacataagaaggaagcttctgagcagaggaattgaccctgccactcacaggcctctcaacgatgacaaggtattggaacgctgccctgacttgaaccttgagctaaccattagtcctccccgtcaacctcaatctgatcagcatcacttgaagcccgttgggagaaactcaaacctttgctttgcctgcagtttgggtttgcaaaatagcaaagatcattgtagctgtgcgctcaacactgccaacgctgcttctggccatgatttcttggccttgaaaaccagcgttttggaaatgaaatgagtcaaattcattttggaatctttcttccctaattaattagttgttaatggatgcaaatgattgcctgcccaatttcctcgtggagccctttctattattcctatgttcatgtacatgtgcgtaagactacaaactttcttgtttatacgattggttctttccaaatagaatacaactatatatttttgttatttct

SEQ ID NO: 18721 - DNA, 1627 bp, Glycine max
  Clone ID: LIB3109-022-B12_FLI
gggcttacacttgtaaaaaaaattcacagcagcctaatcagcaagcaggaattggcactaataatccacagattccaccacctctgcagccgtcaccaccttcatcggtgacgacaggtatcggaggtagtgactatattcaaggctctatcagaccaggatcaatggctgatagagccaggatggccaagatacaccaacccgatgcagcactcaaatgtccacgatgtgaatccacaaacaccaagttttgctactacaacaactacagcctctcacagcctcgccacttttgcaagacttgtcgtcgttactggaccagaggaggtgcactcaggagcgtgccagttggaggtggctgcagaaggaacaaaagaaacaaagggaacagtgctagatcaaagtctcctatgaaaccttcagcaagtgctaattcttcttctagtggctgcacccctgatcatgtgatgatgactcatttgccaactccaataacaccaactcaattcccattcttggcctctttacatcattataatggcgactacgtttctgggggcattggatctcattttggggcgatcacaacacctttggtggctagaaataatggcaacaacactagtgatgttgagtttcaaattggtactagttcagcttcatcacttggtaatattagtggaggggctatgttgtcaaataatggccttggtgatcagcaatggaggtttaacaatctgcaacaagttcaacatcagttccctttcttgagtactaattttgagccacaaattggggtgtttcagtttggtggtggagaaaataacaatgctgaaccgccaagttatgcaaagggtcatggaggccggtttaataatattcgttctaaaatggattctattaattctagtgtaagtggaatagtgcctcagcttaatacaataaagctggaagagaatcaaggtttgagtttgtcaaaaaatctcttgatgactagttcgggaaatggtgtactttggaataatggaagtagtggcaatgcatggagtgaggttcctagtttcattccttcacctaaccacttgttgtgatcattggaattaaactactccaattctactgctttgctttatttcctactcgccacacagatttttatgatcatagaaatgatctaatgtataagagttattagaagaacctattatatcaccttgctaactttggaacggaattctactaccctctatgcatgagtcttgtcttttgaggataaatgggatggaaggataagaagatcagaaccctttgtgtaacatcaatgtgacgataaaatggtacgcaactcttcaagtaatttcctttttccatcgttggatgtcgtcgttgatatttttttgttgtactccaagtatgaacaagttgagcaaaagtattggtgtgtaattgtttatatatatgcttgtgttgtgatgacatgagcggttaattagttgatattactaattgtgtgaagctatgtggactagcctagaaggctttttatatgatgtcatttttttttatatttgctcattgttaacgatttgcaccaggtataatgtaagtttaagaaactttacacatc

SEQ ID NO: 18722 - DNA, 744 bp, Glycine max
  Clone ID: LIB3109-029-F8_FLI
gactacaacattgttttatgtactatgtgggtgcttaggctatgctgcatttggaaatgatgcaccatctaatttcctcacaggattcggcttctatgagcccttttggctaatagactttgccaatgtctgcatagcagtgcacttagttggggcataccaggtctttgtccaacctatatttgggtttgtggaaaagtggagcaaagaaaattggacagaaagccaatttataaatggcgagcatactttgaacattcctctatgtggaagctacaatgtgaacttctttagggtagtgtggaggactgcatatgtgattatcactgccgttgtagctatgttactcccattcctcaatgactttttggcccttattggtgcactctctttctggccattgacggtttacttccctatagagatgtacattaagaagtcaaatatgcaaagattttccttcacctggacttggctcaagatattgagttgggtttgcttgatcatttctattatctcacttgtgggttccatccaaggcctttcggttagtatcaagaaatacaagcccttccaagcagaacaatagaactttcatacttagtattccaacttgagccaagagtttctattgagggcgacaaaatttgtattactatgttttgaaatagttgttatattttcaattctcgaaatcgggacaacttgttatactaaagtaatataataaaatgtttagtttgc

SEQ ID NO: 18723 - DNA, 1770 bp, Glycine max
  Clone ID: LIB3109-031-C4_FLI
ttaggaaaatgggggtaacaaggatcaaatctgcgagtgcgaccacttaagctattaggtgaaaaaacacgtgaatggttttatatgtttattatcatgtcaagtgttaaaacaataattttttttatcaagacaaattttgatcgacattgaaaagcctaactgaaatttcataactaaaagactctgcgctaccagaaatccagtgcctatacatttattcacatgcaatcatggatgttgtggattttctctcgccttgagtttggtcatgtgtggttgaatccttagtttaggacacattgttttactgctctaacatcaaactgtcctatcttctttacataagaaaggatatatttgaacagaatcagcatctctaattgttgtgcaacaaagagtgtgtaccctggaactagaatctttaggtaattgtggggtattctgattcaacctaggtttactaatttgtaattgctagctattatttcaattgcaaatatgtgcttgcaatctttaaatactctaaggcaatgacccgtttgccctacttttgttatgcatttctttctggtattccggctgcagcatttgagtcttttaatgctaatagcatattaatgctgattgctgagtctctactactctactcttctcacatgtttttttcctggttgccatgatatctgccctctgttgctaaacatgaataataatggcttgtaaatgagattaaatgattttttctggcacttaatataatttgtttttggtctaatgtgcttaggtagaactctatgcggactatgatccaaagatgctgctaccttttctccgtagcagtcaacactacacccttgagaaggcttacgaaatttgcattaaaagagacctattgagggagcaagtcttcatcctaggaaggatgggaaactcgaaacaagccctagctgttattataaacaaattgggggatatagaggaggccgtagagtttgtcaccatgcagcatgatgatgaactttgggaagaattaatcaagcaatgccttcacaaacctgaaatggtgggcatattattggagcacacagttggaaatcttgatcccctttacattgtaaataaggttcctaatgggttggaaatccctcggctccgggatcggctggttaagattatcaccgactacaggactgaaacatcgctcagacatggatgcaatgatatcattaaggcggactgtgtcaatcttttaattaagtattacaaagaggcaaggcatgggatttctttaggtaatgaagatgagccgcgggttaaaatgagtgatactcgtgcttctcaggtatttgacaaatctccaagtctgagaactgtggagttgaagtcaaagactaggggaggtggaagatgttgtatatgtttcgatccattttctatacagaatgtatcggtcattgttttcttttgctgtcatggttatcacacaacttgtctcatggattcgtcttacactagtagtaaccagaaagaggtccaagccacgtccctagaggcggaaacgtatgatggttacaatggttatgaggaagatgctagtgaggatgatgaagaagccaagtctggtggtcctcgtatgcgttgtatattgtgtactactgctggctagttgagtgtgttttttgtatgtgtccacagttgtgtttgcatggttaatgttttagttcaaagttccatgcacaacgagcatgtgtggtttcctttgttgcc

SEQ ID NO: 18724 - DNA, 2076 bp, Glycine max
  Clone ID: LIB3109-031-F1_FLI
gaaagagagaagtaacatcaaggtgcagagagaggaattgaagcatgggaagagggaaggtggttctggagagaatacagaacaagatcaatcgccaagtaaccttctcaaagcgcagaaatggtttgctcaagaaagctttcgagctatctgttctatgcgatgctgaaatcgctctcgtcatcttctccagccgtggcaagctttttcagtatagtagcactgagtatttttcttcgatctctcatcttttttatcattataatcctaggttttgatttttcaacatatattgctggttggtttgggttgtttttttagtattacacacacacacatatatatatatatatataggcaataaatctctgaaatttgcgtggttccgattgttttcttctattaattgggatgtagctagggttttccaattcttcatccaccccctttcccctctttttgccactttttatttatttatttgtcattaaaacagaaaagataatatcctctcattattcatatacgaacattatgtatcttatatgaattaaatagaggtggccgggggtattgtaatttggtgaagggtaatttttcgtacgtctaaaagaaagcaatactcagtttttctttcttttcttttttccatctcaattttcatgcatgctgttatgccacggtatttgtcatccgatcaattactcttgccatattaagaattaaaaaatagatgctattttcagcagaacaaaagtattatgctaattagtcacttgtagaaaatatcaactttctatgagaccccatgtttaactttcatgaaaagaatgttaattgggagctctagaaatagtattttcctattaaaagaaacattttttttactcatataataacttggtagctgtgcagatctgtttgtcgcttacttcgtttcaattctaaaaaaaaagaacacagtaccgtttccctttttttaagacataatattttactcataaatctaattactagtatacaagctttaccaaaaaaatactatattcaagtgcatgtcactgtccaatatgatttaatttgtttgtttattagaatgaaactatgattacccagcttgttagaattatattatttatttaagaataagtattttcttataaattaaaactaaataactaatattatttgaatagttaacattaaaaaatattctttagagggtggtaattctttgtttgaattaggtgttttgcatgcttttagtaggtttagattgtttcgtttatagagaaaattaacagtaaaatcactatttcagtattatggctaatttttttctcctcaagtcccaaatcactaggataagtataggtcattcatgtaggggtaaaggctcttttgttagggggtagagtagtcactacctgtaggtacaagacacacacagcttccttcttctttttactcttttttaactaagggttattttgtaattaagttttcatattagtattgtcatattctcttctagctcactttcatcctttttttcccttcatatttctatctttattttttatatttatcatatcacataggcggaggaagatagaaaaaaaccaaaatatgatttgttctttctattttcctgcacctatatatacaccaaaaaatgggatgtatatatattggtttttttcttgtatccggcccgttcataatcataatataatgattcaacaatattaattcatgttttgtttcaagatagttaaaacaggataggaaagcaactgaaaaactcttgattgattatttatacatataataattttattattaggtctccctgtaaatctacatataaaactgtacgtaaactgggacagattggttcaaatatttcttttagtcacgcactactaaaatatttcttttcagcattaacagaatcattgagaagtatcgtcaatgctgcttcaacatgtctcagactggcgatgtagctgaacatcaatcggagcgggtttgcactacctttaattaattctccattaatatctattgtcttct

SEQ ID NO: 18725 - DNA, 1081 bp, Glycine max
  Clone ID: LIB3109-031-F7_FLI
gtggtgaaatggagcaaaagtacaatatggtagaacatgacttgaaagatgaagaagatgtagaggatggagaaaaccttgcccctggttcatatgagattctacaattagaaaaagaagaaatccttgctcctcatacccatttctgtacaatttgtgggaaggggttcaagagagatgcaaatcttcgaatgcacatgcgaggccatggtgacgagtacaaaaccccagcagcgcttgccaaaccgcacaaagaatctgcatcaccaaagcctatcaagaggtattcctgcccctatcctggctgcaagcgcaacaaggatcacaagaagttccagcctctgaagacgatcttatgtgtcaaaaaccattacaaaaggacgcattgtgacaagagttacacttgcagtaggtgcaacaccaagaagttctcagtcatggctgatctaaaaactcatgaaaaacactgtggtaaggataaatggctctgttcgtgtggcacaacattttctaggaaagacaagctttttgggcacattgctcttttccaagggcatgcaccagccattcctttggatgacactaaaggggcaggggtagctgaggcacccattcatgatagcaaagagaacaacagtaaggtgcagagcatgaacttcacttttggatcaaatccttcaaatgcaaatgaagttccaaatgccatggatgcaaaaggcgatagcgatgatcctatcaattatttctcatcattgaactttgaagccaactttggtgagtttaatgaattcaccagacctctatttgatgacccagaaggttcgttctcttttgtcatgcctggatctttcaaatctggaggagaatctagttctgacaatcttttataacaatggtactaccattggttctgtaataacttaatatctatgtttctcttaattgtgaagatataactttcgggtttgtgttaaatttgtaaagccggtttaatttcatgaccatgcaaatccttaagaaggatgttagattttcttgatgattttataaattataaattgcgcgtctcggttattcagcc

SEQ ID NO: 18726 - DNA, 1809 bp, Glycine max
  Clone ID: LIB3109-031-H4_FLI
ggagggaagtggaagctagtagtccgtttcagcgtgtgtgatactttcctctcatcttcttcttctctctgcgataaaagcaaaacctaaaatttggtttaggcataggaatctgttgtagagttgatctacctggaatggagggagcatcgtggaatagtagtgtttgtgtggcaccgtttctgagcaagacctacgacatggttgatgatccttccaccgacttagtggtgtcgtggggcgaaaacaacaactcctttgttgtttggaacgtcccccaattcgccacagacatcttgcccaatcattttaagcacaacaacttctccagcttcgtcagacagttgaatgcttatggttttagaaaggttgacccagatcgatgggaatttgcaaatgaaggatttttaagaggtgaaaaacaacttttaaaaagtatcagtaggcggaaatctgctcatgtaaatggtagtcaacaagcatctcaagtgcataaatcagctgctggagcatgtgttgaagtggggaaatttgggcttgaggaagaggtggaaagactgaaaagggataagaatgttcttatgcaggaacttgttaggttgagacagaaacagcaagggactgataaccaattgcaaaatgttgggcaacgtgtgcagtcaatggagcagcgtcagcagcaaatgatgtcattcctggctaaggccatgcagagcccaggcttcttagctcaatttgttcagcagcagaatgaaagtagtaaacatatccctgggagcaataaaaagaggaggctccagcgacaagaagaagatagtttagccaccaaggatctccatagttctcttgatggacacattgtcaagtaccagagttccataaatgaggctgcaaaagcattatttcgccagatattgcaaataaacaattctacaacacaatcatcaattaagaaccctgatgttttccttattgatgatattccttctgccattgcatcagatagcagtagttcatccactcaggtttctaatgtgatggttccacctatatctgagctgacgtctatggaagtaggatcacagtttcctctcagttgtatgcccagtaacatatctgaggtgcagtcttcacctgctgttttgggtttctgtagaagtcaggggatggagacagaaagcagtttattgaatcatgagctgaatgttatgggggctgatactaggaacatgggggagatagatatgatgtcaactgttttagatgaggcagacgaagctgatcatttttcacctgacacagatggaatttctaaactcccagaaatcagtgatgaattctgggaactgtttttaaggccaagcccacttacagaagacacagaggaaactaaatgtagctctctaggatgtggtttgactgaagatcagggtttgccttcagaaatgggaaataagcaggaaaattttgatacaatacaacatgttgactgtcttactcaacagatgggacttcatgcattggagtactgattgtgtgtatatatgttactcacaaccgaaggttgaggtcccctttgctactgagcagacaaagccatcttacttatacaacaaagaaacctgacagatccaacaacttgatcggtgcttttatccgcttgtaatgtcgtcgtgtgttctgtttgtcattgggggcttaaaaacatacaagttcacgaaacttcatatatctccatgtattttgaattttaataactatgcccccgtttccaatgcgatgatatttttgtggggatgttccgtatac

SEQ ID NO: 18727 - DNA, 944 bp, Glycine max
  Clone ID: LIB3109-035-C2_FLI
ggagtgagtgagagaaagaagagaaggagttgaagtggttgttgtattgtagtagtgtgtaaagtcttggtgatggatagacacaaatgcaagctttgttcaaggtctttcagcaatggcagagcccttggtgggcacatgaaggctcaccttgcttctctccctctccctctccctccaaagcttcactcttgcttctcttcctctgactcagaacaagaacaatctttaagggagaatcctaagaaaaccttgaggattctggatcctgaagacagagagagcgagacagagtctaataagaacccgactcgtcaacgatccaagcgcaactggaaatctaccatgcccaagctcagcctcggacaccccgaagccgaacctctcagctccgtctccgacacctcccccgaagaagacctcgccatgtgcctcatgatgctctcccgcgacacgtggcaggaacacaaactcgccaatgcaggtccacccaagactcgctgcagcagcggatcagagatcaagctcaagagcaaagtccgctccaagcacctctgccacgcttgtcacaaatcctttcgatcctctcgcgctcttgggagccacagaaccctgtgctctccccgtcaggaagcccaaaataacagcatcattagtaataacaacattaaggtttttgaatgccccttctgttacaagctgtttggttctggccaagcgctcggtggacacaagagatctcacctaattccttcttcctcttcaaccgttaatcattctgtcaagttgaaacagagcttcatagatctcaacttgcctgctccggccgaagacgacgatcttagcgttgtttctgatgcctaattcgatctggcatatgttttaattgtttaatgtttagttgtctggtggtgttactcataaagtgaatttttcttcttctt

SEQ ID NO: 18728 - DNA, 651 bp, Glycine max
  Clone ID: LIB3109-035-E6_FLI
gaagaagaggcagagaagagcacgaagaatgctttcgtgaaggtgagcatggatggtgcaccgtatctacgaaaggtggacataaagttgtacaagagctaccaggagctgtcagatgcgctggctaagatgttcagttccttcacgattgaaaagtgtgggtcccaagggatgaaggattttatgaatgagaccaatggctctgactatgtacccacatatgaagacaaggacggagactggatgctcgtcggtgatgtgccctgggagatgttcgttgaatcatgcaagcgtcttcgcataatgaaaggctccgaggcaatcggtcttgcgccaagagccgtggaaaagtgcaagaacagaagctgaagaagtgatttcatctgcgtcacaaggaagcaaattgactcgagcaagatcgagtctaatataggaataagagtttaattatcatgtgcctttgttatcttttttgtaattttcttatatgtgtattatatgaatatgagaaaatagttggaaattcgttagggacacgaaataatatagaagatgtttatatgatcccgtttttgtttccaagtaaaaaatgtgactttgtctattccattgccagcttgcttacctaatgtcaatgtttcgggttaatcg

SEQ ID NO: 18729 - DNA, 815 bp, Glycine max
  Clone ID: LIB3109-036-C4_FLI
gggtgtgagttcatttgatgcaaacagcattacaagtctgtcgcaatatgtgaagccacttaccaacttccttgaaaaacttttggaaggcgaaaaggtgatcttggttggacatgattttggaggggtatgtatatcatatgcaatggagatgtttcctcttaagatttccaaggctgtctttattgctgcagcaatgctgactaatggacaaagcactcttgatattatttctcaacaggcaggttcaaatgatcttatgcgacaagcccagacttttgtatatgctaatgggaatgatcatcctcccacttcttttgatctggacaagtcattgtcgagggatttgttattcaaccaaagtcccaccaaagatattgcactggcatgtgtctcaatgaggtctgtaccatttgcaccagttttagagaaggtttccctttcagacctgaaatatggatctgtaaggcgattttatatagaaactcttgaagacaatgccatacccatttcactccaggaaaacatgataaatgcaagccccccagaaaaggttttccgtttgaagggggctgatcattctccttttttttcaaagcctcaagctctgcataagttattagtagaagtctcaaagatcctttgagaacattcattgtctaaattgtttgtgcagccctaccaacagtaaagcttcagtgacatgaaataagaatgtgcatctgccttattatttaagtctatcattttgtgtgacttgtaacatgtattacttgtagcataaaattactagtcaaaagattcagtatttgttg

SEQ ID NO: 18730 - DNA, 1739 bp, Glycine max
  Clone ID: LIB3109-041-F10_FLI
gacgtcgaatcggtgtggtacggtgtgttttattcattagacaagattggaatgcaagtttaattgattaatactaataatcaatcatcgtagcgagatggtgtcgccgagccaggtggtgaaagtaaagagaaatacgctacgaccatgcatgacatgccctctctgccacaagttcttcaaagatgccaccaccatctctctctgccttcacaccttttgcaggaagtgcatatatgagaaactctcggatgaggagatggattgctgtcctgtgtgccatattgacttaggctgccttccggtggagaaactcaggccggaccataatttgcatgatataagggcaaaaatattcccttttaaaagaaaaaagatcaaagcccaagaagttttgtcttcaatatcattgcctgcaaaaaggaaggaaagatcactttcatcattggtagtcagtgctcccaaagtttcaatgcagcctggctttacaggaaagagaacaaaaaacagtacacgaaaggctgctgctttacgtggatgcagttttcttctcgacgaatcaataaagaaggaacaaacaaatggtgatgataatatggattctcccatgcctgagcattctaagaagcataagccccatgaagatacagagaacagtgtgcaacatacagaagggaaggttgatctttggacaccactgaactgtcttgttgaagctgccaacagaacaaagtcctccaggtcaaattcacaagcaactcctcttgccaaattagagtccccaactactcctcatggtggacaggatgcatctgaaactacaaccaaaacagacctacctgcttctgcccagagtgaattaaacattccaaaatccaaaaataaggatactggacttaaaccaatatttggagatgacaaggatgcaaacagcttgcctttaggaccagtgaagcgaagaagattgcgtcctgctggtcagaaaagggttgcagcatctgagatgtctgcctcatccccagccccactcgatgcaacagggggcaagtgcaacagaaaaaacagtcctatttggttttcattagttgcttcagaggaccagaaaggagattttcccttgccacagatctcagcatgttacttacgaataaaggatggtactgtgcctgtctcatttattcaaaagtaccttatgaagaaacttaatcttgccagtgaagcagaggtggaaataatgtgccgaggtcagccagtgctcccatctttacaactgcataatttagtagatctatggttcccggacagcatcaacctcaaaaaagataccagcatcagtggggtcctcagccaaagattttgtaatggttttatcatattgtcgaaaggccttgcctccttgacaaagtttcctattctatctatatatcattttccctccgctactttacatacatacacaatcaactgttttgatagcattctcaccgatattactgcttagagatttgttcatttagtagcatgcgaggaatctatgattttgttttgctcatgactgaatatgtgcagccagcaattttcagttttcttctgcttcatttgctgctgttctttggatcatgattactatttccttttgatccaatgatgcctttccccttagtaagaatcaaaatgagtggttataaatcaggaagtactctaccaaaatttctctaatccaagatgcaatcattttc

SEQ ID NO: 18731 - DNA, 1965 bp, Glycine max
  Clone ID: LIB3109-043-B4_FLI
actacaaaatggggtaccaataaatgccaaaccacagcttaaaagggtcgacacagctacttacaaaaggccttcacttgattttctacaggatacgagtgattaagtcattttttgtgttgcttctgctattcagaggatgcaatggaggttttcttctcccaatgtgtgccactttacaagcatgcattagatggcaattggcaagcagcaaagcacatcttagatgcaaaccctgcactgaagactgctgccatagcacctgggtggcccacagtgctgcatgttgctgcaggcacaaaccattatcactttgtggaggagttgctcaacatattagacaatgatgcaattcaattgcaggataaaaagggcaacactgccttttgctttgttgctgcggctggcaattggcgcattgctgagttaatgcagaaaagaaatatacttctgccaacagtcaagggtggagatggaatgacccctcttcactttgctgctttgcaaggaagatgcccaatggcatgcaagctataccctatgaccaaagagatgtttgatgatgaggattgggaattattgttcttcacttgcatcaaaacttgcaactatcacttggccttaaaaatggtaagagataggaaagaactagcttttgcacgagatgggaataacggtgaggagaaaaagggcggcatagctttgcatctcttggctcaaaatcaaaagcctttggattcttgttgtcattgccaccaacatcaaattcccgtcaagataaaccctggcatgaaacaacacgtgtttcttcaattggttaattttctctggaatacccttttggaaaacatagactccaagagcaagatacttgacatcataagtgaaccttctcatctattatttgatgctgcagaagttggtaattttgggtttttgtctgagcttattagtgcttatcccagcttgatatgggaagtggatagcagaaacagaagtataattcacacagctgttttgaatcgacatgctagcatctacaacctcatacacgaaatagggtctataaaagatattatagtgacatttgccggagaagaagacgagaacactttattgcatttggctgcaaaattagctccacctagtcaacttgagttagtctcaggagcagctttccaaatgagccttgagatatcatggtttgaggaggtgaacaagataatgccaccatcattcagatggatgaaaaattccgaaggcttaactgctcgagaattattcacaaaggagcatgcagatttgcggaaaaatgcagaatcatggatgaaacgcacagctgagtcatgcatgcttatttcaaccgttattgccacgggagtgttctctgccgcaattagcacaccaggtggcatgaatgacgaatcaaaagaaccaaactatttggacaaaacatcgtttctgatatttgctgtatcagatgcaacttcactgatctcatctgcaactgcaatactcatattcttatcgattctcatctcgcgttatgctgagtatgacttccacaagtcactgccattgaagcttatatttggactgataagtttgttcatctccataacaagcatgatggttgcatttggttgttccttcttcataacttattactatggcatgaagtgggttcctagtttcatctcagtacttgcatgtctacctatacttctctttataggtctgcaattttcgctgtggtcagttattatctactcgacctactactgcaaagctctctttaagccaggtaaaaagatgctctacgtggtagagagaaaaggatacaatgtttaagataaatgagggatcatataatgtttcgttgaagtttgtaatatagtagttggcaacaatttgtattgtaagggtattttaaataaatttgaaatgtgaataatatatttgccc

SEQ ID NO: 18732 - DNA, 1934 bp, Glycine max
  Clone ID: LIB3109-043-E12_FLI
ggagagagaacatataacaggtgtggacttttgtcttacttttagacgttaaatttgtgagagaatagagatatttatttttctagatatccaatttctttagtacatgaaagagtgctgacaaaatggacacctctattttataaatatttcatcaatatttatctttttctcttttcctatagtgtcataatactatatgtaatgatatttgaacatcaatttattttaaatatttcattaattatttctttttattttttttctttttatcacatcataagcgcatgatcataataaggtgttttttttttttttttaaaaaaagctaaaaattcttcttatatattatacctggtaattaggttaatacttaacacatatttgtgataactcatgccacagatgaaggtgaaggtgatgatgatgaaggggaacttgctaatgacattaaaacagatgatcagttgttgcaatttgactttgcaaccatcaaatttgcaacaaatgacttctctgacgcaaataagcttggccaaggtggatttggaattgtttataagggtacgctttctgatggacaagaaattgcaattaaaagattgtctatcaattctaaccaaggagaaacagaatttaagaatgaaattttgctaacagggaggcttcagcaccgaaacttagttagactacttggattttgttttgcaagaagagaaaggttattgatatatgagttcgttcccaataaaagccttgattatttcatatttggtacgttacaaatttttgctttaattttaccttcactttgatgaaataaagagttgttttgaacatttttttaggagccaaaaagatgtaactcatttaaattgtgaaagactgtgtatgtcatatgttagcctgggtatttatgtagatccaacaaacgtgtaaatttgaattgggagatacgctacaaaatcataagaggcattgctcgaggtcttctttatcttcatgaagattcacgattaaacgttgttcatcgtgatctgaaaacaagtaacattttgttagatggagaattgaatcctaaaatatcagattttggcatggcaagattatttgagatcaatcaaactgaagccagtacaactacaattgttgggacctttggatatatggctcctgaatacattaaacatggacagttttctatcaagtcagatgtctttagttttggcgttatgattctggaaatagtatgcggccaaagaaacagtcagattcgtgatagcgaagaaaacgcacaggatttattaagctttgtaagtgtggtatatgataccttttcactattagttaattaatttccctgtttatttgaggttcggaagcgtatagttcaacagattaaattttcaacatttaagaaattccattataattgttttattttcaatcgagcaatttttttgcaggcatggaacaattggaggggagggacagtttcaaatattgtagatcccacattaaaggattattcttgggatgaaataaggagatgtattcacattggattactgtgtgtacaggaagatatagctgatagaccaactatgaataccgttttattaatgcttcatagcagctctttcccacttgctgaaccttctgaacctgcgtttttaatgcgccgtaaaagttctttgcctatgattatgttgtctggcagtgagcaatattcagaggtaacaagatcaagtgattcaggaagtcaatatgctcaaggatcatcaatagttaagactccaaccactgagccatatcctcgttagatatttatttatttattttatcaaatttacttttaaagcgctttgggcaaaaagggtatgaatgattctggaaacaagattttaattattgaaacttcttcctttggagtt

SEQ ID NO: 18733 - DNA, 1140 bp, Glycine max
  Clone ID: LIB3109-044-D5_FLI
ggagtatcaaatatatagcaagacatagcaagacaagatatgagggagaaaagaaaagggtggtgaatgtgaaaatagagggagcatgtggaatggttgtggtcactattatatatgttgtctcttacgctttgcatgtgactttctttctttctttatatcctttatatattaagtatatgctgcaatatatttaattaaagagagaagtaacatcaaggtgcagagagaggaattgaagcatgggaagagggaaggtggttctggagagaatacagaacaaaatcaatcgccaagtaaccttctcaaagcgcagaaatggtttgctcaagaaagctttcgagctatctgttctatgcgatgctgaaatcgctctcgtcatcttctccagccgtggcaagctttttcagtatagtagcactgacattaacagaatcattgagaagtatcgtcaatgctgcttcaacatgtctcagactggcgatgtagctgaacatcaatcggagcagtgcttataccaggagcttttggtattaagagtcaagcatgagtcactccagcggactcaaaggaatcttctgggagaagaactagagccacttagcatgaaagaattgcatagtttagagaaacaactggatagaacgcttgcacaagctcggaagcacctgacacagaagctggtatcacgaattgacgaattacatggaaaggtgcatagcctggagcaggctaacaagcatttggaatctcaggaaagaggtaaatgtacccagatttgtgaaggttctcctaatggccatattttgcaagataaacaagtcaatcagtttgaatatggaacagcaggttcgtttcggcttcagcaagagcaaactactgcttccaaaggaaaagaaatagagacgatcgaggactggttgaggccaaagcagtcataatattaatatattgcaactttgaatgttcatagagttaaaatatattgttcgtggtcgtgtgtgtatccatcaaatatatagttccaagtctcaaaattctagctatatagtacgttaagcgtccattgatgtagctttgattaatttagtgtatgtttgatacaagatatttaatttagagaattaatagttttatttt

SEQ ID NO: 18734 - DNA, 1631 bp, Glycine max
  Clone ID: LIB3109-052-H6_FLI
ggagtgagagggtagcaattgagtgatcagtcatggcgaaagccgtagtcggagaagaaacgcgactcaaattggcggaggatcgtctcagccaatccgcagttccatccgaggtgggtcttttaatcggaaagttcagctccgctttgggccgggccttcctcttcgatctcattcccaccccacacaacgactccggcgagcccgcctgctccctcaccgagcccgacaagaagaagggccccaaatctaaatccaaatccgagctcgctgattcctcttcccttttcatcgacaaggactgggtcgccgaacatgtccgccaggtttctagaatgctcgtcggcggcatcaaggtcgttggcctatacgtttgggttagcgacgccgcgttcaagaattcaaccataatgctttgccagaccgtgaagggtgttgctgacgcagcgccgggtttggacggtaactgggatgagagactgcttcttcacatttcttatagcccgaggaggtggaattgtagaaactgctcactgtcttcgaatattacatcaagtagtttgcggccttgtgattttaagatggggaaggtcttaacttcccttcaaacgttcaagtgcatgcacaactttaacctgaggttgcccatattacgcgacagtgcctcaaagttccagacgttgagtgatgttcttcgtcatgcaatatctattcatgccaaagagcttgcaggtgcaaaggccttgattgatggtaaattggttgttgagagtgagtcatattcatcagatggtgtgcatgaagttgaattgcttctttcatttctgaacgatagttctattgaagcatgcagccaaggagatgttgttggtattctttcatttagtggcttgatatgttcgtttgcatatctaaattcaaaagagccaatttcccaagccatcactgatataaagggagatataattacgagtctgcaaagtagattggatataatctgtgatgaggtagatgctgactctggtaacaatcatgatgttggaagccaagtaagcgatgaattatcagctgaaacgcctgttccccaactagtgttgcacttattgagaaaaggatgcagtcttccatttcctagaagagtctttgcaccatggttagcagtggtgtatgtgtgtgattatttgcagccttttgaaactgttgaggttttaaaagatcattgcatggagttattgtccatgaaagctccaactgatgtctctaaaattttggagccagagaaagaagagttatctttcaaaactaaatctttctgggatgtggcagtgccctcctattcagaaattcacctcatggaagacaagagcaaacgtgatggcggaagcgagagttcaagtagtaaaactgtgaagccaggtcacattaatgttgtcgctgccggtctcattcttctattgtctgtgttagttggttttctgctattcgccctcaagggttgagggttttgtactgggaatttctcacctccagggacacacattcgcttagtttacaacattttatacttcaaaatgatacaagggcagatatgaaaaagaaaaaaaaaaaaaaagaacagcaatatcattagc

SEQ ID NO: 18735 - DNA, 1325 bp, Glycine max
  Clone ID: LIB3109-053-B5_FLI
ggagggagttttggtggatattgagaacatgttagctcgtggtaggatggacctaccagtgagtgtgtgctttgcggcagcaagaggagatgacttgttgttgcatcaattactcaaacgaggcatggatccaaatgaatccgacaacaatcgaaggacagctttgcatatagcggcatctcaaggaaaacagaactgtgttttgcttctgttagactatggggcggatcccaacattagagatttggaaggtaatgtgccactatgggaggctatagtgggaggacatgaatcaatgagcaagctgttatcagagaatggagcaaatttgcaatgcggggatgtgggccaatttgcatgtactgccgctgaacaaaacagcctcaacttgctgaaggaaataatgcgctacggaggagatatcacgcttccaaacagcagcaacacagggaccacagctttgcacgttgcagtctctgaaggcaacgttgagactgtcaaattccttttggatcacggggcgagtattgacatgccagacaagcatggctggaccccaagagatcttgcagatcagcaggcacatacagaaatcaaagccctttttgattccattggggagcctaaggtccattcttccgtcgctattccggtgaggaatagcaagatcaagtaccttggtaggttcacaagtgagccaaccatgacattgcctcttgatggatcgtttcatggaactgatggctcttggagccagaaccagagccaaaaccagagccggccgaggcgtcggagcaacaactaccataactctctgttcgggatattgtcagcagcacacaatggggaaaagtacctgctttcagctgttgacatgaataacaatgcaaggaatggtatgaagagtagtagtgcagttggtccaactagagttataattagttgtcctgagaagggtgaggttgttgggaagcttgttttactgcctggaagctttcaagagctagttgagattggagccaagaaatttggtttctatcctaataaggttgtatgcaaagatggaggtgaaattgaagatatagagataattagggatggtgaccatcttgtttttcttggtgcaagtggagggtgctagaatccaatcgtgcagctccagcaacaccactaaccaatggcgtgcatatataaaatgcatataaggaacgtctttactgttattgtaattgttttatttttcctgtctcatctgtgttctcattctcaattgtaaatctttagccttcttctcatggttaatgtgaaataatatatttctgcct

SEQ ID NO: 18736 - DNA, 1700 bp, Glycine max
  Clone ID: LIB3109-053-D12_FLI
tgcacaagaagatgagacattaaggaatgctgttgcagtttttaagggaaagagttggaagaaaatagctgagttttttcctgatagatcagaagttcagtgtctgcacagatggcaaaaagttcttaatccagaacttgttaaaggaccttggacacaggaggttgaaacttggtccttttctttttaatttttcctacagctttattcaagcaataacttcttttgattggcttacaggaggatgataaaattgttgaactggtgtcaaaatatgggcctacaaaatggtctttgatagccaagtctttacctggtcgaataggcaaacaatgtcgagagcggtggcacaatcatcttaatcctgacataaagaaggatgcctggactttggaagaggaattggccctgatgaatgctcatcgtatacatgggaacaaatgggctgaaatagctaaggtccttcatggaaggactgataatgcaataaagaatcactggaatagttctttgaagaaaaagttggatttttatttagctacaggaagacttccaccaattcctaagaatagtccacaagttcctgtcaaagatacaattagacgttctgctagtaaatcaatgcttggttgttcaaataaagaattaaatgcagctgttgaaacatcatctgaaactacagccattagtaagctagatgacagtggcaggaatcagtttgagtcctcaggcacagttagagaagttggtgattcttcaagtgttcctgcaaatgactctgccgattctgactgtgtagaatgcaagcctggatcatccaacatcaaccccagctgtagcaactcagaacacgtgtcaagagctaattttggaacaacttttgggccaatatctgagaattctggactcaatggaaactcaacttttgagcattgtacaaacaatggtgacaggagcagtaccaggttaatcggaacatcttcacaagaaaatccaacctgtggttctttgtgttatgagccaccacagttagatggttcagttcccatagattctctttatttaaattatacttgccagcagaatgagtactgtccgagtccaacgatgtcacctactggtttcttcactccacctcgtgcgaagggtagtgaattatgcactgagacacctgaatcgatcttgagaaaggctgctaatacttttccaaatactccttccatattgaggaggagaagaactggggcccaaacactcaccagtcccactaaagttttgaaagtagataataatccacatacttctaataaaacagagagaaccaatgatgattctggttctgggcatttctccgggagtccagcaagccatggctatgggattggcattcccaacaataaggcattcaatgcatctcccccatacaggttaagatccaagcgaacagcaattgtcaagtcagtggagaaacaactggagtttgcatttgacaaagagaagaatgacgacaagaggagtaatgtgatgactgaagatcgtctgcatgaaaaaaaattggttgtgacatagtgcataaattggattatggctggacttgcttttgaaggtagctgattgtttctctaaattgtttgacaatgtttaccaattttatgaagaaaattcagtgcacgggtcacaatgacttggcacttctccac

SEQ ID NO: 18737 - DNA, 1200 bp, Glycine max
  Clone ID: LIB3109-056-E5_FLI
ggatgaaagaaatataaatagaagcagcagcgggatttggtaaagctagaaattgcaatgaagaagaggagcagcagcagcagcagcagttcagtttttgaggcgaatggagtggaggaacctcaacaaccttcatcctgtgcagcagcagcacttgatgagttgcataaagagaaaaatgagaatggagaagaaaccctcgtgccttccaatccctatcccaatcttgacgatggcttctatgaaatcgaaaccatacgccgtaagaggctacgcaagggtcagctccagtacctaatcaaatggcgtggatggcctgagactgccaacacttgggaacctcttgaaaatctacagtccgttcctgatctcgttgatgcttttgaggacagcctcaagtctggaaaacatcagaagcgcaagcgcaagcatgtggatgtgcttcaactcaccctactcaagaagcgctccgaacgttctaccacttcttacagccttagacatttcccacctctaactcccactaatgcaaatgattatgatccaaagctcagtgaacttaaggcaccaacacacactggggttcagctagataaccttgcaatacatttccaacaaccaattccaagcagaggagcaaaaaggagaaaatctgcttcttctgtcaagaggttcaagagagacaccgatgcagctgcacttcaaccaatttctgctcctatcaacatgcctgatgctaatactgcctgcaatattgtcaagattatcaagccaataggctattcagcttctttatctgacaacatgcacgatgttttagtcacctttatggctatgaggtctgatggaacagaagtgatggtggacaacagatatctcaaggcatacaatcctcttctgctgatcaatttctatgagatgcatctccggtatactcctacaccgtgactgaacagggtaatgaaggggcttcctgtgtttgctgttggtgataacaatgtagttttgtagacgcagcggatcgtgaagggtaatacttttttggttagtgtatgacgatataaccattagaccaattgtttcaaatgcctgcctgcatgacttcatactaagacaaccaagaattagagccatgaacatgactaggaaattgtatttcaaatctttgcaaacctctttaatctaattattctacatccc

SEQ ID NO: 18738 - DNA, 1513 bp, Glycine max
  Clone ID: LIB3109-057-C3_FLI
ggtgagattggtgtgctttgttataagccacagcttttcacagttcgaacgaagcgactaagtcagttgctcaggctaaaccgtactacgttcttgaatattgttcaggccaacgtgggagatggaaccataataatgaataatctccttcagcatttgaaagagatcaacgatccaatcatggagggagttttggtggatattgagaacatgttagctcgtggtaggatggacctaccagtgagtgtgtgctttgcggcagcaagaggagatgacttgttgttgcatcaattactcaaacgaggcatggatccaaatgaatccgacaacaatcgaaggacagctttgcatatagcggcatctcaaggaaaacagaactgtgttttgcttctgttagactatggggcggatcccaacattagagatttggaaggtaatgtgccactatgggaggctatagtgggaggacatgaatcaatgagcaagctgttatcagagaatggagcaaatttgcaatgcggggatgtgggccaatttgcatgtactgccgctgaacaaaacagcctcaacttgctgaaggaaataatgcgctacggaggagatatcacgcttccaaacagcagcaacacagggaccacagctttgcacgttgcagtctctgaaggcaacgttgagactgtcaaattccttttggatcacggggcgagtattgacatgccagacaagcatggctggaccccaagagatcttgcagatcagcaggcacatacagaaatcaaagccctttttgattccattggggagcctaaggtccattcttccgtcgctattccggtgaggaatagcaagatcaagtaccttggtaggttcacaagtgagccaaccatgacattgcctcttgatggatcgtttcatggaactgatggctcttggagccagaaccagagccaaaaccagagccggccgaggcgtcggagcaacaactaccataactctctgttcgggatattgtcagcagcacacaatggggaaaagtacctgctttcagctgttgacatgaataacaatgcaaggaatggtatgaagagtagtagtgcagttggtccaactagagttataattagttgtcctgagaagggtgaggttgttgggaagcttgttttactgcctggaagctttcaagagctagttaagattggagccaagaaatttggtttctatcctaataaggttgtatgcaaagatggaggtgaaattgaagatatagagataattagggatggtgaccatcttgtttttcttggtgcaagtggagggtgctagaatccaatcgtgcagctccagcaacaccactaaccaatggcgtgcatatataaaatgcatataaggaacgtctttactgttattgtaattgttttatttttcctgtctcatctgtgttctcattctcaattgtaaatctttagccttcttctcatggttaatgtgaaataatatatttctgcctacgtcc

SEQ ID NO: 18739 - DNA, 1945 bp, Homo sapiens
  Clone ID: LIB3113-018-A8_FLI
acgcggaggtggtggctgcggcctttgaacaaacaccatggccgagcctctgaaggaggaagacggcgaggacggctctgcggagccccccgggcccgtgaaggccgaacccgcccacaccgctgcctctgtagcggccaagaacctggccctgcttaaagcccgctccttcgatgtgacctttgacgtgggcgacgagtacgagatcatcgagaccataggcaacggggcctatggagtggtgtcctccgcccgccgccgcctcaccggccagcaggtggccatcaagaagatccctaatgctttcgatgtggtgaccaatgccaagcggaccctcagggagctgaagatcctcaagcactttaaacacgacaacatcatcgccatcaaggacatcctgaggcccaccgtgccctatggcgaattcaaatctgtctacgtggtcctggacctgatggaaagcgacctgcaccagatcatccactcctcacagcccctcacactggaacacgtgcgctacttcctgtaccaactgctgcggggcctgaagtacatgcactcggctcaggtcatccaccgtgacctgaagccctccaacctattggtgaatgagaactgtgagctcaagattggtgactttggtatggctcgtggcctgtgcacctcgcccgctgaacatcagtacttcatgactgagtatgtggccacgcgctggtaccgtgcgcccgagctcatgctctctttgcatgagtatacacaggctattgacctctggtctgtgggctgcatctttggtgagatgctggcccggcgccagctcttcccaggcaaaaactatgtacaccagctacagctcatcatgatggtgctgggtaccccatcaccagccgtgattcaggctgtgggggctgagagggtgcgggcctatatccagagcttgccaccacgccagcctgtgccctgggagacagtgtacccaggtgccgaccgccaggccctatcactgctgggtcgcatgctgcgttttgagcccagcgctcgcatctcagcagctgctgcccttcgccaccctttcctggccaagtaccatgatcctgatgatgagcctgactgtgccccgccctttgactttgcctttgaccgcgaagccctcactcgggagcgcattaaggaggccattgtggctgaaattgaggacttccatgcaaggcgtgagggcatccgccaacagatccgcttccagccttctctacagcctgtggctagtgagcctggctgtccagatgttgaaatgcccagtccctgggctcccagtggggactgtgccatggagtctccaccaccagccccgccaccatgccccggccctgcacctgacaccattgatctgaccctgcagccacctccaccagtcagtgagcctgccccaccaaagaaagatggtgccatctcagacaatactaaggctgcccttaaagctgccctgctcaagtctttgaggagccggctcagagatggccccagcgcacccctggaggctcctgagcctcggaagccggtgacagcccaggagcgccagcgggagcgggaggagaagcggcggaggcggcaagaacgagccaaggagcgggagaaacggcggcaggagcgggagcgaaaggaacggggggctggggcctctgggggcccctccactgaccccttggctggactagtgctcagtgacaatgacagaagcctgttggaacgctggactcgaatggcccggcccgcagccccagccctcacctctgtgccggcccctgccccagcgccaacgccaaccccaactccccctgaacaatccttttcagtattatatttttattattattatgttattattacactgtctttttgccatcaaaatgaggcctgtgaaatacaaggttcccttctgcacctg

SEQ ID NO: 18740 - DNA, 442 bp, Zea mays
  Clone ID: LIB3114-013-E11_FLI
gagagctcgtcggcttccgtccacgcgtgaagcgagagcatggacacccaggtgaagcttgctgttgtggtgaaggtgatgggcaggaccggctccaggggtcaggtgacccaggtcagagtgaagtttttggatgaccagaaccggctcatcatgaggaatgtcaaggggcccgttcgcgagggtgacatcctcaccctgctcgagtccgagagggaggccaggaggctgcgctgaagccctagcgttcttggtgggctcttgtatggtctttggtgtcttggaatttgtgctatgtttgaacttctgtgaccctgttttaagagtagtaagcctggttataagattgcagttttgtttatcttggttgaaagtgcaattggtgttgagacatggttatccttgctatattatctataaaacgacgcatgcattgaatact

SEQ ID NO: 18741 - DNA, 289 bp, Zea mays
  Clone ID: LIB3114-025-F6_FLI
ggcggcaagaagaaggcccccaaggcgaagacgaactagggctgcttagatagctgcacgcctcaggcggggtgtatcaggccacaggtctatttcgaagcaggcccagcgcgatgcagcgaatgccatcgagctgcgcttttacatgtttatcatcagattccattttgcggggcacggcccggacaaaggtgtgaccggggtgggttaggcgactagattgcacgattatgtacttgcgatttgtttgttgaactgggttgccgacagttaatcttcatttgatttt

SEQ ID NO: 18742 - DNA, 434 bp, Zea mays
  Clone ID: LIB3114-028-G2_FLI
aatccgatccatccaagccaagccaaggcagagaagaagaagaggaggaagaagaagcatcggcagcatgtcggaggggactgccaactgcgtggacatcctgatcgccatcatcctgcctccgctgggggtgttcctcaagtacgggtgcggccacgagttctggatctgcctcctcctcaccttcctcggctacatccccggcatcatctacgccatctacgccatcaccaagaacacctagctagtcatccttgccgacgacgatccatgtctctgtatctgtgtctgttcatatgcctgatgccgacttgtgctgtatgtagttgcttgaattcagtcgtgttcctgttttgctaccgtacccaccccatgcatcatctgtcaccgcgacgcaataatcatagtaataacaagttcagataatcgaattc

SEQ ID NO: 18743 - DNA, 474 bp, Zea mays
  Clone ID: LIB3114-043-A6_FLI
gtgggatcccagccaccgccgctagaagaagagctcggcgattcccaggtcccgcgagaagatgccgaagcagatctatgagattaaggacttcctcctcaccgcgaggaggaaggatgcccgctcagtgaagatcaagaggagcaaggatgttgtcaagttcaaggtgcgctgctccaagtacttgtacacgctctgcgtcttcgatgctgagaaggcaaacaagttgaagcaatctcttcccccaggtttgaccgtcgaggaggtctgattggatacatggcaacgccgggttgaactacccaagcttctttatcagtagcagagcatgctactcatgtacttttggaacctaagctattagacctgtcagtgttggatgtgtggatcttgcatttttgtggagaaataccaatttacctcgttcaaggatgcacctttcagtatatttcttgtttaactgcacattacttt

SEQ ID NO: 18744 - DNA, 600 bp, Zea mays
  Clone ID: LIB3114-045-E1_FLI
ctcgacattcagatcccaactgccttcgatcccttcgctgaggccaatgctggggactctggtgcggcagcagggtcaaaggactacgtacacgtgcgcatccagcagcgtaatggtcgcaagagcctgaccaccgtccagggattgaagaaggagttcagctacagcaagatcctcaaagatctcaagaaagagttctgctgcaatggtacagtggtccaggacccagaacttggacaggtcattcagctccagggtgatcagaggaagaacgtctcgaatttcctcgtccaggccggcattgtgaagaaggagcacatcaagattcatggtttctgagcaaccgccgggtccatagcaaaccaaccctgcatgcagggccagcttattatatataatatctgaggtggagcatatctatctggctgtgtactgcaagcaggcctagtacgccgcctgcgcgttcctcctattacacatataggcccctccctgcgtgtatgcttgttaccgtcgtgtcgaaccttgtactacgaggctccatcgaacatcgatggcttgcttctttatcagaacatgtttgaataaacgctatttggt

SEQ ID NO: 18745 - DNA, 220 bp, Zea mays
  Clone ID: LIB3114-046-F9_FLI
tggactagttggcgattgcaacctgcttgtggattactctcccattttgttatgtaatctgttaagacatcagcattccctacagcatattttgtgtacctacgtcttagtagttgccgaaatctcaatcaaaatcacccgctattggaggtgaatttcccatgtaatcttctgctcatgtaaatggttttctttttaatgaatcgatgtttatcgccct

SEQ ID NO: 18746 - DNA, 369 bp, Zea mays
  Clone ID: LIB3114-056-C11_FLI
ttctgtcagtcatggcctgcagcgaggtatttgatagcagcaagggaggcgccgagaagatgtgccgtgaaatgggggttcctttccttggcaaggtgcccatggatccgcagctgtgcaaggcggctgaggaagggaggtcatgcttcagtgatcagaaatgcggtgccagtgcgccggctcttcagagcattgtaaagaagctgatcaagactgggtgagaaaataatgttggcctgctgggaatctggtagtgagaattgagatgaacaggtgtcagagttgtcatgaccaatatatatgttattgtgttttgaacactgaatctgtgtattagactattagtgccagtactagtattggatctgt

SEQ ID NO: 18747 - DNA, 479 bp, Zea mays
  Clone ID: LIB3114-057-A12_FLI
ctagcgccgccgccgccccagctcgccttgcgtgactgagagctcgtcggcttccgtccacgcgtgaagcgagagcatggacacccaggtgaagcttgctgttgtggtgaaggtgatgggcaggaccggctccaggggtcaggtgacccaggtcagagtgaagtttttggatgaccagaaccggctcatcatgaggaatgtcaaggggcccgttcgcgagggtgacatcctcaccctgctcgagtccgagagggaggccaggaggctgcgctgaagccctagcgttcttggtgggctcttgtatggtctttggtgtcttggaatttgtgctatgtttgaacttctgtgaccctgttttaagagtagtaagcctggttataagattgcagttttgtttatcttggttgaaagtgcaattggtgttgagacatggttatccttgctatattatctataaaacgacgcatgcattgaatact

SEQ ID NO: 18748 - DNA, 649 bp, Zea mays
  Clone ID: LIB3115-001-A11_FLI
gggcccctgccccgcgcgccccggccacgacgctgagcctcatgcccggcgcggacgtcggcgccgagcaggagcaggccgccgcgagggggcaggagacggccgggtccgcctccacggcggcgccgctcaccatcttctacggcggcagggtggtcgtgttcgacgacttcccggcggagaaggcggccgaggtcatgcgcctcgcagctggcgccgagcgcccggcggccccggccccggcgccggcgccgcgcgacgacctgcccatcgcccggaaggcgtcgctgcagcggttcctggccaagcgcaaggaccgcctcgtggagcgcgccccctacgcccgcccgtccccatccgaggaggcggagaaggcgaagccggcctcctcgtggctcgggctcggcggcacggacgccgagcgcctcaacatcgcgctgtgatttggatctcgcttgctacccacctggatcgaccgggggcgatttgattggctgggttcctggcttcctttgggtctgctggattggggttggtgtggagatcggagacggaggattgtagaaacgtattcttgttttttttctctctcccttacgagagagtttggctgttaattgattcgataatagaaagatggaggatgtac

SEQ ID NO: 18749 - DNA, 701 bp, Zea mays
  Clone ID: LIB3115-001-B7_FLI
cggcgggcactgcaggcgctcgaggccggcgagggggcgcgctgcggcgccggcggccacgggcacggcgaggaggcgcgcgtgcttctgcagcagcccgccgccgccgccgccccggcgcccgtggaggtcctggagctgcgcgtgtcggaggtgggcgaccgcgtgctggtggtgaacgtgacgtgcagcaagggccgcgacgccatggcccgcgtgtgccgcgccgtcgaggagctccggctccgcgtcatcaccgccagcgtcacctccgtcgccggctgcctcatgcacaccatcttcgtcgaggtacgtcgtcggcaggtggattcggaccagacgaatcgtatccagatcaagcacatgatcgaggccgctctcgcccagctagatgatgcctccgcgagcccgccgagcgtgatgagctactattagaatcggacaaccgtcacgctgacatgcacgagccggcctagctactgtggccgaccggtactgttccgtgcgcgtatataggaactaggaagaagtgggtgctttgtttgctatatatgaggcactaggtcagggggttttgtgatggggctttatgcaactttgatgtaatggaccgaaaacgacagattgagtgttggcggctagctcccatatgtttagagtctagggaaggaataaataatcgagacaagtcttatccctgt

SEQ ID NO: 18750 - DNA, 1131 bp, Zea mays
  Clone ID: LIB3115-001-C3_FLI
tctgattttttgccaagtgttgatgaatgcactagtttgctgctggcaccaaaggaagatctaatggaactagaagatgaagatcttgcttcacaaatgttaaaacaccaggaacgagcaattgacttttggcaaaagcattggatatgttgaaccactcacccaatgctaattgcttcctgcattggcgttttaaagaccgtatgcttgaagttatgattaaggctggacaagctatcaagaaaggagacgagatgacgatagattatatgagtggcgtcaacagcaaatttatggaaagatatgggttctcatcaccaacgaatccttgggagctcataaatttctcgagtcctgcaacaattcacatggattccttcttatcggtcttcaatatcgctggcttgcatgatgagctgtaccacaattctgcattgacctcagtagtagaaaccgactttgtggacggagcagtcgtagcagcagccagagcattgccgacatggtcagatggtgatgttcctgcaattcctagtgtggagagaaaatctgctcaggcactgcaagaggagtgccgccaaatgttggattcattcccaactaccatcgaacaagaccagcagatcctagattccgatgcgcatatcagcaaaacccgagaaattgcgatcaagtatcgtctgcaccggaagatgctcctacagaaaatcatggacgcactggacatatatcaggatagaattctgttctagctgtagaggcggcgctacctgtgctcatttagagcacagaacgagtgcccagttctactgctagtaaacctggggccattgtagaaaggggattttgtagggcagcctttcagttcatagcgtctgtaggttaacagcagaggatcccagaaggaaatcaacattaggataggctggttgccaggaaatatagctgctgtaagttcaagtcagcaagctgccatgtaacttgtttgcacagggcggcaatctgtcatagccacctgcatatctctcaggctcagcttcacaacaacttgcactgctgaaagaaatggcctgtgggctgtgtcctgtcacctgtgtgtgtgaaatactatccatatgattggttggccgc

SEQ ID NO: 18751 - DNA, 974 bp, Zea mays
  Clone ID: LIB3115-001-D3_FLI
caatcagttcaggttctttgacaaggccgccattgtcccaccaggcaacgaatccacggtgcagacgagtccatggaggctctgcacagtgacacaggtcgaggagctaaagatgctgctcttgacgctgcctacctgggcgtcgttcgtgattttctacgcagtcacgtctcagatgcagtcgacgatgattgagcaaggcatgctcatggacaaccacgttggctcgtttgccatcccgccggcatccatgccgatcattggtgtgctcagcttcctcatctgggtcgccgcctatgaaaccgtcctagcgccattggcgcggcgcttcaccgggaacgagaagggcttctccagtggcagcgcctcgcgatcggccaagccctgtccattctgacaatggcgcttgctgcgctggtggagacaaggaggctggcgatcgcggaagccagcgggctgaggcatcgggaggtgccggtgcccatgagcatcctgtggcagggcccagttttctttgtgcatggtgcggccgaggtcttcggtgccatcggcatgacagagttcttctacgaccaagccccggcgaccatgaagagcctgtgcgccgcgttcgggcagctcgcggtggcttccgggtcgtacctcaacacggtcgtgctcagcgtcgttgcgttggccacaacgcgcggcggcgcaaccggatggatttcggacaacctcaatgaaggccatcttgactatttcttctggatgatggccgctcttagcttgctgaacctagctctgtttgtgcgctactcaatgcggcatacagacaggcaacgtaagcaagaccttggtttatcataatttcaggaaaaatatgtgaacaaagcagactagaagctatatggacagactactcatgaatagtaacattgtatgaaacagctaaatgcatgtaacaacttattcaatatagggtctctcgaggg

SEQ ID NO: 18752 - DNA, 1014 bp, Zea mays
  Clone ID: LIB3115-001-E3_FLI
ctcctcccgcggtcagggtaacgccgcgtgtctcccgtcgcatactcgctcacacccatggccgcaccgccggccgcctcgctagtggcacgcgccgccctcccgccgcgccttcgcccaaccaccgcttctccccttggccccgccgtcctcggtcccagcagccgccgccggtacctccgtctccgccgctcgccatcgctggcggggactgccgcggcggcggcgagctccccatccgtgccttcctcgtttccggggcccgggccaggtatcggcgatgccctcggcgacgtcgaaatctactccgcggccaccggcgagcccgtcctgttcagagacctgtgggaccaggacgagggagtgtctgttgttgcgctgctaaggcatttcgggtgcccatgctgctgggagttggcctctgttctgagggacacaaaggagagatttgattctgctggagtaaaactgattgctgttggtgttggcactccagctaaagcccgtattcttgccgagcgcttgccctttccgttggaatacctctatgctgatcctgatcggaaggcgtataatctcttgggtctatattttggtgttggtcgcacgttcttcaatccggccagtgcgaaagtgttttcacggtttgactcccttaaggaggcggtgaagaattatacaatcgaagccaccccagatgacagggcaggtgtcctacaacaggggggaatgtttgtgttcaaaggtaaagaactgttgtacgcaaggaaagacgagggcacaggcgaccatgcacctttggacgatgtgctcaatatctgctgcaaagttcctgtaacctaacccgacggcttgtcccacagctcagtaggtccgtaacacagatcactttgagctatctttactagtgatttcttatttcatccttgttacaaaaaggagagtaagaatatactcgtaacaggcacattgtctttcatccattctcttttggcaattggcgttagcagatcc

SEQ ID NO: 18753 - DNA, 520 bp, Zea mays
  Clone ID: LIB3115-001-E8_FLI
ctcaatctcgtaatcaaacaccatacctcattttaagtggcaatgcaaaaacaggtcaaacaagtgatagcggcggctatgctaccttggagacagagcaacctgggagcctaacgcccatgcttggggacaaaaaggtcgagcattttttgggcatcaaacgaagtgccaagcctggaagcttacctcctccagtcccaaagaaaccgaagaactgaacctggtggtagcactcagccaacgaagcaggctacaacgcatttactgtgagcagcaatcagcccacaagcttccacggctcaaccccccgccgccgcactagaaatgcaatatcctctgtatttcttctaagctgattacactaacattctggcatgttcgatggggttttgtaattcagtgatatacgtgtgcatccttgatctgccttgaacatgtaagtgatggaactaaatattgttctaacgacacaccgtttccgtttgaataaagtgtagttatgatgtgacggtttaaggtt

SEQ ID NO: 18754 - DNA, 689 bp, Zea mays
  Clone ID: LIB3115-001-G1_FLI
acccaatcgaaggacctagcgagcggcagcggcggcggcgatcggagaagatggtgcgcaaggcgaaggttgagttcgacgagcagccgccggataacttcgacccgaagaacccgtatgccgacccggtggcgatgctcgagtaccgggaacacctggtgcgagagaagtggatccatatcgagaccgccaagatcatccgggagcgcctccgctggtgctaccgcatcgagggcatcaaccaccaccagaagtgccgccacctcgtcgaccaatacctagaggctacccgcggcgtgggttggggcaaggatgcccgcccgcctgaactccacgagcccaagaagaccgtcaaggcggagtagcggcgctgctgccttgcttctcgtgctgctgttcctggattggagaggtgatctgacccttccattgagttgaatgaagtagcctggaactgtggtagttcgtcttttacatcttaagctgctgatagacttcaaataaaatcttgtccaagaaaacattctgtgagcgtacatgttgtcgtcgagctgtgtaattgagcaaatcgtcagattgaaactcgttgtctgccttgttcttcaaataccgcttatccagacggtgcttttgttttcacttttccactgcatctttgctctgcaaggatacgaaaggcatcattggtt

SEQ ID NO: 18755 - DNA, 623 bp, Zea mays
  Clone ID: LIB3115-002-A10_FLI
ggctagcttttggctcggcagctaacgacctgcagccaaccatctaccagcgactcagcgagcgagagcagcacacactgcacgcagctagctaggagcagcagcagcggcggcgatggcggcctccatgatctcctcgtcagctctggcggtggcgcctcagggcctgccgcccctcggccgccgcgcctcctccttcgccgtcgtctgctccaagaagaagatcaagaccgacaagccctacgggattgggggtggcctgaccgtcgacgtcgacgccaacgggagaaagggcaagggcaagggcgtgtaccagttcgtcgacaagtacggcgcgaacgtcgacggatacagcccaatctacaacgaggatgactggtctcccaccggcgacgtctacgtcggtggaaccactgggcttctgatctgggccgtcaccctcgctgggatcctcggcggcggcgccctcctcgtctacaacaccagcgccctctccggctaaggatatccaatgcatgcgcttcttgcgattcgtcatgtaaaatcagggtgtctgtctataatctagcctccatggatgctcaaccttcgtcatgtaacaataatcagtgctactcttcatt

SEQ ID NO: 18756 - DNA, 953 bp, Zea mays
  Clone ID: LIB3115-002-C7_FLI
cttgtccaggtccaaccgtccaaggataaaaaatgagcacgaacctgggaggagcctcttgcttcggcttcggcttgactcagctgcagcccgccgccgttaggctccggttgccgcctgctcgcgccgcggacacttcgtcctcccagtcgccggcgcgcttgacggcggtgctggagcaggtggaccagttgctaagccaggggaacgacatggccgcgctctccctcgtgcgcagtacgcaggggggtgacggcgggctccgggcctttggcgccgccaggcaggtatattttggtggtggggtgagaaacttggttcttgatacaattggtcactatcttagccagaagtatcacaacagagttatccagcatgaagctggtcacttcttgatagcttacttgcttggagtgcttccaaaaggatacacaatcacaagcttagatacacttatgaatcaaggatcgcttaatgtgcaagctggagcagcttttgtggactatgagttccttgaagagatcaatacaggcaagctatctgccacgatggttaacaagttctcgtgtatagcactagccggagttgcagcagagtatcttctgtatggacgtgcagaaggaggattagccgacatcaataagcttgatggattgctcaagggtttgggtttcacccaaaagaaagctgattcacaggtgagatgggctgtgctgaatactgttctcatactgcgtcgccatgaaaaagctagatcgcagcttgcagaggcaatgtctacagggaagtcggtgggctcttgcatccaagtcatagaagagtgtataagcactgacgatatttaacgtggatatgttgctgaccctacgttgtctcaatggcatgttatcaacaacaaatcaaggcttgtcaatccaaaagaggatttgagtattaaatccactcttaaggct

SEQ ID NO: 18757 - DNA, 520 bp, Zea mays
  Clone ID: LIB3115-003-F10_FLI
aggccgcgcagatcgactacagctcaagcgtctcggtgttcccgatggaggcctgcgacctgcttggtggcgacgcgtgcaacgggcccatgttcccggaggccaagcccgcctcggcggcggcggcggcgagcaggagtgtggtcggggtggacagggactacctgtcctacgacgagccaaagacggtgttcccgggcgaggcgtgcgatgaccttggcggcgagttctgcgaggcgccgtaccaggacggcgtctccaaggagctggcgcacgcctgaagaccctgatccatccatttctgtccaccacgctatgtacgtatgtgtagcagatggtttacatctacgtgttagagcccggagagctggagaagctagctagcgtgcttacagaataacagcagccaagcaaagccaagggtgtgtatataataggcatgccttgggttgtgtcagctgcgactgtatgtatagtttaaaccaagatgaaatggtactgatggtgatattccgtgttt

SEQ ID NO: 18758 - DNA, 269 bp, Zea mays
  Clone ID: LIB3115-003-F8_FLI
gtttgaaaggaaaagattacattcacgtgtacctggccaattctcttgattaaaaggcttgactattttttacattagcctcgtgttgtatttctaatactgcatccagttttcttattctcatcgatgcggttttctataaaatgtttcagcaaaaatctgtcgtaataatcacatcaactagctagatctgtactgtttggtagttattcagatttttataaaaatattttggatccaaataaatgtttaggagataaatcagaatc

SEQ ID NO: 18759 - DNA, 405 bp, Zea mays
  Clone ID: LIB3115-004-D10_FLI
tataatctctcttcgtcactagctcgtggtaataagggaagcttgatcatctttccttacggcggtgatgaagagcagcacaatcgtcgcgcttctattggctgttgccattctgtcctcactgtctccatgctacgaagccggcggctgcatcgggaaacccaagaagtcaccgccgccgccgagaaggccatacttctcgtcctattccgaggaccaccagaaggaccaccagaattgccgcttgatctgtagctccaagggtttcaaggacggtggctggtgtgacgaaagcgtggagcacaaagtgtgctgctgctcccattagaaatataatagcgtatgttatgttgatgcatatatatatgcatcgtccatctacctctgtggtgcaaaattctgaat

SEQ ID NO: 18760 - DNA, 701 bp, Zea mays
  Clone ID: LIB3115-005-A11_FLI
gccagcaggtccagcagcaccagcagcagcaggcggttggcgcggtgaaatgcgagccgcccgtggccgcggcggcgtcggagctcatccggcggaacctcgcggagcagatggccatgacgctgacgcgggaccccagcttcaaggcggcgttcgtcaccgcgctgtccggccggctcttcgagatgtcgccgaccaaggactgacggaacggatcggatggattgggagattggcatcgcaggagattctggatcagattgtcttcgagcgcacgccgcaatggtcaactgcgcagcgctggcttggctgtcagagcgaaacagcggtaacagagcaagacacgaggggtctgcactctgcagttgtgcaggaggaggaacagacacaaggggaggacggcgcgcggccggacatggcgtggaacagagatcgtcgtcaccgccggcgggggtgtggtcgacgacgcgacatgcgaaacactacgtgctagctagcataggaaaaaacaacatgaaatcgtacaaccaaccaatccctcgcactgttttagttgttagctgtaggcgaaactgttcatccaattgatcaaatgaaacttattttttccctagcactatgtttcatgagaatgagaccaggaatgaaccaacttgagtttgaaaatttccataggggagtaataataacagaggtatact

SEQ ID NO: 18761 - DNA, 548 bp, Zea mays
  Clone ID: LIB3115-005-A2_FLI
ctcacctgcgatcggcagctggcgtacgccgagggcctccagcaagacggccaccatgtgaaggtcgtgtaccgtgagaaggccaccgtgggtttctacctgctgtccaacacggaccactaccacgaggtcatggaggagatcggcgacttcctcgcggctaacctctagcagcacatgcacacaaacttcacatgttatagcaagatgggtggtaagcttgactttatagttgtaccgatctgctgctgcttgggggggtggtgggctttgctgctgataaaactctctatctaggaaagaaaccacagtgactttttttttgtttcgtcgtcgggttgctgatcacaaagctgcttgatgatctgcgtcgtggttgatggagggaagcctataatttcgccgtcaatcatctaacattctgtgtacagtggtggactgatggaccaacaaggaggtggacggcctttttttttgttgctgtgtctgatgtagtagtatttctcatctttttatggatcggatgggatggtgcctgcctttcattc

SEQ ID NO: 18762 - DNA, 1171 bp, Zea mays
  Clone ID: LIB3115-005-C7_FLI
cgtccacctccaccgccaccgatcggtagcaacgcgcaccaccgcgtcgtcgtacggcagcacacggaaagagagagagagagagagagagagagaggaatgggcgaccacgagggtcacggggtcgatttcgagaagaaggccgatcagaagctctccggctggggcctcttcggcaataagtacgaggaagccgccgacctcctcgacagggctggcagcttcttcaaactcgcgaagaactggagcagagcggctgcggtatacaaaaagattgcagattgtcatttgcagggggataacaagcacgatgctgcctctgcttatgttgaggcagcaaactgctacaagaagttctccctgcaagatgctgcacaagcacttaacagtgccgttaatcttttccaggaaatcagtagactgaacatggctgcaagatacagcaaggatatcggtgaaatctatctgcaagaacaagatttagagaatgccgcagtctacctgaatcgcgctgctgatctttttgatagtgagggacaatcctctcaggcaaacagcatgacacagaaaatcgctgaaatatatgctcagctggaaaagtaccagaaagcaaccgagctctttgaagaaattgctcgtaaatcaataaacaataaccttctcaagtacggtgtcagaggcactcttcttaatgcgggcatttgccaactttgtagaggtgatgttgttgctataaataattcattggagcgctatcaggacattgacccaaccttctcagggacacgcgaatacaagcttttggcagaccttgcagcctctacggatgaaggagacgttggcaagtttactgatgcagtaaaggagtttgacagcatgacacgcctggatccttggaaaacaactctccttctgaaggcaaagaacgagttgaagaaaaaggaggaggatgaggatgatctaacctaggctctgttccacaaaaggtttcatgatttcgttgaggatgccgtgaaatcattacacaagattgtttgatataagtatggatatacaaaacctcctggataccgcatttggaatccagtagctgccatttatatatatggcatcctatatgttgcatttgtggattattgttcatggttatatatgctacccatattactcc

SEQ ID NO: 18763 - DNA, 214 bp, Zea mays
  Clone ID: LIB3115-005-C9_FLI
ctgctgccggtgggcacgcccgcggccagcatgaaccgcgaggtggccgacgccatgttggtgctcgccatgggcgcggactccttgcagcgggtgattgatttgtagtagttgtgaaatgaggctgtgaagctgcatgctgtgctggctagcgtcacaacatcgatcctatgtgtaatagcataatccacataatcatatcatgtaattgctt

SEQ ID NO: 18764 - DNA, 1095 bp, Zea mays
  Clone ID: LIB3115-005-E10_FLI
cgcgccgtcagtgggcggagagcatcggtcgtgcgcgcggcagcggctggcgacagggccgcgccggccggtgcccttccagcggcgctgttgttcgattgcgatggtgtgctggtggacaccgagaaggatggccaccgcatctccttcaacgaaaccttcgctgagagggaattaggtgtcagctgggatgttgaactgtatggagaattgctcaggataggtggtggaaaggaaaggatgacagcttacttcaaccagacaggatggccggctaaagcaccgaagacagatgacaaaagaaaggagttcatagcttctcttcacaagaggaaaacagaattattcatggccctaattgagaaaaagttgctttctctccgtccaggtgttcaaaggttaatcgatgaagctttaggaaaggcagttaaagttgcagtgtgcagtacatcaaatgagaaagctgtttcagcgatagtgtcgtacttattggggcctgatagagctgataagattaccatatttgctggagatgtggttcctcacaaaaaacctgacccagcaatctacatattagcagcaactacacttggagttgatccacaaagctgtgttgttattgaagacagtactatagggctcgcagcggcaaaagctgccggcatgaagtgtatcgtaacaaaaagcagctacactgcagaagaggacttcgagacagcagatgcagtgttcgattgcattggtgacccgccagaagtgcgcttcgatttggatttctgcgccaagttgctcaagaaacaatatgtgagctgaaagggggctagtgcaagtgatataccaagtacgaggttcctgaatatggagaaagagtccatgatggcatgccaatgttggttcttcaagccatgacctgatactaggacttggaagtccacgttctacccaattgtaacttatagaatggcattcactactgcccacccagttggcagttgtaaatgtgttagtcattcaacaaactggaaaccactcgaataagggatcaccaagtccaaactcttcagtcaaagcaatagtaattgaggttacgagtcg

SEQ ID NO: 18765 - DNA, 1297 bp, Zea mays
  Clone ID: LIB3115-005-G3_FLI
gctctgcgtcacagtgaaagtggcatggtagatcaggttctgttaacaacaaatgcggatggtctaagatttgtcaaggttaggatgcgatctgttcgcataccacaaattggcgacaagtttagcagcaggcatggacaaaaaggaactgttgggatgacttacactcaagaggatatgccatggacaatcgaaggcattacacctgatattattgtgaatccacatgctattccatcccgtatgactattgggcagctgattgagtgtattatgggtaaagttgctgctcagatggggaaggaaggcgatgccactccattcacggatgtgactgtggataacatcagcaaagctcttcataaatgtaattatcaaatgcgtggatttgagacaatgtacaatggtcacactggaagaaaactgactgcgatgattttcctgggccccacatattaccaaagactcaagcacatggtggatgacaagatacattcgagaggacgtggtcctgtgcagatactcacccggcaaccagcagaggggcggtctcgtgatggaggtctccgctttggagaaatggaaagggattgtatgatcgcacatggagcagctttcttcctgaaggaaaggctgtttgaccagagtgacgcatacagagtccatgtatgcgagaaatgtggtctcatcgcaattgctaacctaaagaaaaactcgttcgaatgcaggggctgcaagaacaagactgacattgtccaagtacacataccctatgcttgtaagcttctgtttcaggagcttatggcaatggccattgctcccagaatgcttacccatgatatgaagacagggaaggatcagaagaagcgctgaacgtgtatcacgtgagatgtaaccagaactcatgccccgttgctatattcctggatcctggttcacacaatagtaccctgttgaggaactttgtggtcacttcttttctgatttggacttcggttcttcgcgatcgatggagggctgttactatctcttgatggattattatcctatctgtgctcgtgttgcctgaagatcagtgctagcagatcgtcgagttaattttgtacattaggaatgtgttgtaatgtattaatctgtgcgagtagaaagatttttgactaaaggtgtcaatttggaggtgtaactgtacgttaatactaaacgcgatgccattgcaatttcagttttattttgaaatacatggggttttagtggcatgtctctaaactatcacaatcttaatggcatggttctaatt

SEQ ID NO: 18766 - DNA, 564 bp, Zea mays
  Clone ID: LIB3115-007-H5_FLI
gcagcagcacaagcaagaaccacacctcctcccttcgcctgtgatcatgtcgtcttgctgcggcggcaagtgcgggtgcggctccagctgctcctgcggcagcggatgcaacggctgcggtatgtaccctgacgtggagaccgccgccaccagcagcgtcaagaccacggtcctcgccgcgccgaccaccaaggccagcgccggcggcttcgaggcggccaccgagggcggcggctgcgactgcaacacctgcaagtgcggcaccagctgcggctgctcctgctgcagctgcaactgagctggcccggcccggcgatggcgcacgagagtcgagaggaggaggacgacgacgaggcgtataaatataatagcggcgtccagtaaataagatcctgtcaactgcacccgccattatccatggtcgctcgctcctcgcctgcgtctcctggtcctggggttcgtctgaacgtcctcgcggcttcacgacggcgatgccgcctccgtcgatcctgtccgtctcgtgccggatttaatattagatctatatgcgtgtttttctgcgtt

SEQ ID NO: 18767 - DNA, 455 bp, Zea mays
  Clone ID: LIB3115-008-D1_FLI
cgctcgcccaccctccccgcggatcacagacagcctgtgcccgccttccagtccacaatctccctgcctctcctctcccaccctccgaaaagcaagctccggccggaccgccccaccgcgcgcgcgcatacacacagagatagagagaccgcacggtcgttcggggttcctttggccaggcgcacgacacgagcatggcgcagcgcgacaagaaggaggagcccacggagctgcgggcgccggagatcgcgctctgcgccaacaactgcggcttcccgggcaacccggccacgcagaacctgtgccagagctgcttctcggcgtcgaggtcgtcgtcgtcgtcgtcttcgcagccgtcccctacctcctctccctcagcttccgcgccggccgccgcggtgccgcagccgaggccggcgctcctgggcgcggcgctgcagctggcgcctccggcc

SEQ ID NO: 18768 - DNA, 797 bp, Zea mays
  Clone ID: LIB3115-009-A12_FLI
ctacccttctcctggcaactggcattggtcacgtatactgccttgctgtcagttgcatggacgggctgacggtcgagcagaggctcgcgttccaggaggccttctcgctcttcgacaagaacggcgacggatgcatcaccatggaagagctggccgcagtcacccgctccctcggtctcgacccgagcgatcaggagctcaatgatatgatgagcgaggtcgatacggacggcaatgggatcatcgatttccaggagttcttaagcctcattgcccggaagatgaaggatggcgacggcgacgaagagctcaaggaagcctttgaggtcctggacaaagaccagaacggcttcatctccccggttgagctgaggacggtgatgaccagtctcggggagaagatgaccgacgaggaggttgaacagatgatcagggaagcagacaccgacggtgacggtcaggtgaactacgatgagttcgttctcatgatgaagaacgctgagcggaaaatatctgggtgaagggcgcgatgtggtgtggaactagtagtcgtcttggttggattcttctgtcagaaatctactactgtaaatgcttagtactatgatcgtgttattcgaagtgttggaggttggaaaagtgatctcacgctcattaacgggtggccaacggccttatgtatacgatgaatatttagataggtggcttttattttgttacgataaatagcaggaggaagatccattgacgacctctactaggtttaccgacagcgaactaccatgaaaattacagtt

SEQ ID NO: 18769 - DNA, 532 bp, Zea mays
  Clone ID: LIB3115-009-D11_FLI
caaatcaaaagtctcattatattttcatgctgactcataacggtcaaaacatttattatcatcacggtgactgcgtcacaacaacaacaacaacaacaacaacaacaaatcaagtcacaacattggtacaacaatggccctactaaataatgccaacaaattatgaagaaaatctaaatctcagctacatttctacaactgccacctgggggtcataagttcttatagaatcattttgtatgaactcatcccatccatgacaacagctactgatcaaaccaaactaacttcaaatgcaggagaacctagggcaagcagcaagggcaaatatgtgtgcatcagggaaggaagtcaattagtcaaacgtacacataactatacattccttttatatatgatagaagcatgctaccttatagttctcgcctaatattttggccagcagaaggaaggacaggtctcttctccactgcttcgtaatggagaacaaagttgtccttatgaacagtatcccagatgcttggatcaaaat

SEQ ID NO: 18770 - DNA, 699 bp, Zea mays
  Clone ID: LIB3115-009-E10_FLI
ctagcagctcaacaccctcgaggtacatccattcgcagtcggccgtgtcctcggagccgcgggagatggcggatcaggagaccgtagctgtggttgaggcacctaccccggttcttggggaaccgatggacctgatgactgccctgcagctcgtcatgaagaagtcaggtgctcatgatggccttgtgaagggtcttcgtgaggctgccaaagccatcgagaagcatgccgctcagctctgcgtgcttgccgaggactgcgaccagcctgattatgtcaagctggtgaaggctctctgcgctgagcacaatgtccacctggttactgtgcctagcgccaaaactcttggagagtgggctgggctttgcaagatcgactctgagggcaaggcgaggaaggttgtaggctgctcctgtgttgttgtcaaggactacggcgaagaatctgaaggccttaacatagtgcaggagtacgtcaaatcgcactagatacagtctgtcagtatctggaagttgtgttcaacactacattttgcacctgagtttaaatatgtgtttggttcttgggctttgctaggagattagaacagttttcaagtgagcctaggatccatgtgaacgatttgaatatctcgcctcttgtcttgcaagtgttctcatctgctgttaatacaaaatcagcaagagctagtattttgtt

SEQ ID NO: 18771 - DNA, 571 bp, Zea mays
  Clone ID: LIB3115-009-F10_FLI
agaacttcagggaccacatctacaacgacaccaacatcaaccagggcttcgcgagctcgctcaaggccaactgcccccggcccaccggctccggcgacggcaacctggcgccgctcgacaccaccacgccgtacagcttcgacaacgcctactacagcaacctgctgagccagaaggggctcctgcactcggaccaggagctcttcaacggcggcagcaccgacaacaccgtcaggaacttcgcgtccaactcggccgccttcagcagcgccttcgccgcggccatggtgaagatgggcaacctcagcccgctcaccggatctcagggccagatcaggcttacctgctccacagtgaactaagattaataataatcaccatacgcaaaaaagagtggtatattcacatgcgaataataaggctaagccaccatgtgactagctagtggtatattcaacgaatcgtttgaaagggacgagtgcgactttaattttagatactagctgcaaaagcggcatatatgtatcagcccgatcaattgctcaaagaaaagatgcacgtcatacatttc

SEQ ID NO: 18772 - DNA, 1022 bp, Zea mays
  Clone ID: LIB3115-010-E1_FLI
gtcgaggagaacagggcaatgctaacttcaagaactgttgcttacctaaatgttgattctgcagtggctggtcatggattttatgcgtctgcaactcctcaacttgatgaattgcttaaagaagctagtaagcaggtccgaaatccagacaatgggacacagagtctctatgatttgtggatgtcttctaacagttctcctttgattggaagattaggaggtggaagttcggattattctgcatttgttcaacacattggtattccatcagtggacatggcgattgggtcagactatccggtctatcatagcttgtatgatgacttcatatggatggaaaagtttggagatcccttgttccagaggcatgttgcagctgcaagcatgtgggggcttgttgctcttaggctctcagatgaggagatcctacccttcaactacagcaattatgccacagagcttgagaatggagcattgggcataagtgaaagagtacagggaatgcctgtcagcttatcacccctgcacaagtcaatcaaagagttcagaaaggcagttgcaaaagtggattctgaattgaaggctctacagacatggaaaatttggtccccatggagaaacaaccccttaaaggtcagagacatcaatgatcggttgatgatgaccgaacgggcattcacagaccgggaaggactgtctggacggccatggtacaaacacctgatttacgcaccttcgctgcacaacgattacggggctgaagtgtatccaggcattggtgacgccattgagagggtgaagaaaacaaatacttctgaatccttgcaatctatacaacatgagatttacagggtctctcgagtcataaaccaggcagcgcttgttttaagtggagggctcacgtgagtattatttcaccttgctatagctggagttcgtgaatgcagtagctggactgatacagtattgcataggatggtgatattaaggggaaaaaaataaatttcactggcagtcattat

SEQ ID NO: 18773 - DNA, 815 bp, Zea mays
  Clone ID: LIB3115-010-F4_FLI
cgccgcagccaatccctccccagcagccgtcgtcgccaccgctgcagcgcggaggcgaccccccatcgccgccaagatgcagatcttcgtgaagaccctgacggggaaaacgatcacgttggaggtggagtcctcggacaccatcgacaacgtgaaggccaagatacaggacaaggagggcatcccgccggaccagcagcggctaatcttcgccggcaagcagctcgaggacggccgcaccctcgccgactacaacatccagaaggagtccaccctccacctggtgctccgcctccgaggtggcgccaagaagcgcaagaagaagacgtacaccaagcccaagaagatcaagcacaagcacaagaaggtaaagctcgcagtgctgcagttctacaaggtggacgacgccaccggcaaggtgacccgcctccgcaaggagtgccccaacaccgagtgcggtgcgggtgtcttcatggccaaccacttcgaccgccactactgcggcaagtgcggcctcacctacgtctacaatcagaaggcgtaatcccatgcgccgctttgcttcacccgcctacctatcaagcattcacctgttggttactcgatttgaatatcatttagatctgtttgaggttggaacataaatgcagcagtagtttctgtcttattatattggtacctctgttactgagttgatgtggtcctggttcctgagcttaattttgttttcgtgttctatccttagagacgattgtaccttttggccgtttcactttcattcatacataggtagattatggtagtattgcatgctt

SEQ ID NO: 18774 - DNA, 462 bp, Zea mays
  Clone ID: LIB3115-010-H11_FLI
gtggaatgtcaacaagtgagcgtattctccttcgcgaggatgctgaatgctgtatctgtctatcatcatatgaagatggagctgagttatctgctctcccctgcaatcatcacttccactggccttgtattaccaaatggctgcgcatgaatgcgacgtgtccactctgcaagtataacattctcaaaggcagtgacagtgcatgaccaacttattctgacataacttccgtacacagcttcctttcaagtggcgttctcaaagcaatgctgttttcacagctgtgttattaagtgacagtgatctgtgtttttctgtttaggatgtggtgataacctgtagatggatgaaaccttatttacaattgtccttgttaatatcgcttgtaaatacctttcgagttgttttctacgtatgatggaattggaattgctgaaatactttgtgattctggtttgactt

SEQ ID NO: 18775 - DNA, 542 bp, Zea mays
  Clone ID: LIB3115-011-A2_FLI
gggcgtactcctcacggatgccgcaaggaagagggcccggtgcgaggaggcggcggccagcgagcggcccattaagatgatcagaatcggcgagccgtggatcggcgtcccgtcgtcgggcccggggcggtgcggcggcgggaattaaggtaaggtatggttggaactgatgcgccacggccggccgtgtgacagctttattacagcgagcgcatgttcgagtcgtggatgctttttgtgcgtgtttgtatttgtcatccaaggtgaggttgatggcaaggataattccagtgctgtggtaaaactgtgaaggcagaacacagggcacaggagataaccgtaacgcatgttaaaagttaattatgggatgatttggaggtagcaagattgaaagtagggaactagggatgaccggatgagtagacggtctagaaagacaagcccatatgtttggaatggaatattatcgtttttatatgttttgttaatctgttagtatttgtttggctgcactctaatacatcatatatttcatccgtctc

SEQ ID NO: 18776 - DNA, 1733 bp, Zea mays
  Clone ID: LIB3115-011-D5_FLI
ggccatgcacccaattccatctccttccccagctccggcgtccgtggcacctaggccatggctctgtgctcgccggttcgtcctaagcgttgggcatgtgctcccctgcccctctgtccgccgacgactctcccttaccatctcctcgctggttcaagacgcccaaccttcttctccctgctcggatcccgctcgtggagctcccttcctctaccttggccgccgttgagctcacccagcggcccttcctctacctcccgcaagctcccagcgatgcgccccaggtccctgcgcacagccgccaccggccgagctcgcccccggcacttcgctcctccatagtcgcgccctggagctcgcccagcgttcttccacgctgatggtcggtggtctccttacagcgacaccgattcctgctcccgtggatgacggcggcaggagatgcttctcccccgcgctcgcccatggacgccagccgcgcccccttctcgtcgtggagcttgccgcgcccttccagttccctctgcccggccatggagctcgcccctggcttggattccagcgccccgctccctgtttgcccctgctcgcctggccactacgcagccccctcggcttctcctccccagcacgccacgcccagctccctgcgcgcgtccctctgttggccggagtaccctggcccgaccccgtgctgcgctggcccagccgtggtctccagctcgccggccgcgagtccctacccatggccgctgtgccgagttcttctccagcgtcgtgaagcccctgctcctcgctcgcctccatggtgttgccgtagaatttcctcgccgcgcccttgccaagctctggcgcgcgtagtcctgtttcaatgatggccgctcattccttctctggtgctcgccgatggcgcgcagtcgcgtcttctcattcgacctgctccggatccgaagctggtcgccctatgtgctcgactttgtcttatcgcagaaaccccaacgtcgtcgaccttgccgattgtcgtcattcgtcgtcgcgtcgtgcgtgcagcagccccagatctgtgcagctctgctcttgttgtcgacatcgctcgccgtggctcagcttgctagcttgtcgttgtttcgtcgtctcgtcttgatgtcagtccctacgtggcatctccgacatatattcacgccgacaaaagaatcccaagaagatatagagaagcaagtcaatcatcgccatttatacggagttctagttaatatggagagattccaagaattgcggatggaagagaaagtaaagctccgttctatactcatcaactgtttgatcgaagattttattcggaggctgtcgacgttctcgcaagctttgagtcggacttgctttggatgagaaatccctgatgttcgagagaggcctgtaagcgctctcttgggactcgaccaaatgactaaattggaaaaccatcatcgccctcgcggatatcgaatccattcggtcttggtaagccaatttattatttcggttaatcgaattggattaactagactcattagttgtaataattcttgtgtttagcagatgcgtcgtatttgtgttagatgcttgctaaaatatctcagcccctctggtaatgtaattgtgtgaaataaatgcgtgatatggtgcaccttaggtgtaaaatgcaggataaataaaatatttaatttagtgagaacttagaatagtaattctag

SEQ ID NO: 18777 - DNA, 570 bp, Zea mays
  Clone ID: LIB3115-011-E3_FLI
tggccgacaatgggctgacatcatcaagcccggaagcgtcaacaccgaccccatcttccccagcaacaagctcaccggcaccgacgtcgggtaccctggtggcctctggtttgacccgctcggctggggcagcggctcgccggagaagatcaaggagctgcgcaccaaggagatcaagaacggacgcctcgccatgctcgccgtcatgggcgcctggttccaggccgagtacaccggcaccggccccatcgacaacctcttcgcccacctcgccgaccctggccacgccaccatcttccaggccttcacccccaaatgaggagttgaacttattattagcattttgaggagtgctaccacacatgcatcgtcaggttgatggccgatatatatgaaacttcacattttttttggtggggaaggactgctgagtagactgtcaatgatggaatgctcgtggtgcgagtgcgatgcatggtgtacttgtactatgttgtaaccagtgtaaaaaggggatactcgttagatgttatgccatgttctctgaatcaacggcttgatgatttgtgc

SEQ ID NO: 18778 - DNA, 516 bp, Zea mays
  Clone ID: LIB3115-011-G8_FLI
cagttcaacacgggaacgactgcgcctttcatcataaagtgcggagcaaattccagtggtgaactggtgattaaggctgatctgcgagtccaggagcctaaaggtggcgaggtgatccgtgttgttccaagaccaacagttcttgcggacttgagttttgaggaaataaaaggtgtgtttgagcaattgccagaggcagttagcttgcttgccttggcacgaacagcagatggtacaagggccaggtattcaagattgtacagaaccttagccagcaaagtgacggccttgaaagagactgttgcagagatggagagaggtggtgttttcaaagatgtacgataaatgctgtgttattgtagagttatttatgatattgatgttgtatatggatgccatttgtcggcatcccttgtaactgtatttgtttttactatgtggaaacctatgttgtaacactattctttggcaagagatgagccttgcctgccccaacccgtaatactatggttgtgc

SEQ ID NO: 18779 - DNA, 649 bp, Zea mays
  Clone ID: LIB3115-012-B10_FLI
ccagaaccagacgagcacggacggacctccgcaggccgcatccctccacgtgcacgagttccgaggcgccccttcgatccgcccggcccggccctctccaccgcgcgcgcgcgtccgtcgctagcgtttggccgtctccctcttgagccccgagtacccccacgacgcggcaaggaacctcgccatgagggtccacccggctccgcggaagcgcaccatcgccgtgcagcgctgcgccacggcggcggcggcggcggcggcgggcgcactcggcgggaagaagctgcgccgcctgccgcacatcttcgccaaggtgctggagctccccttcgcggccgacgcggacgtgtccgtcgaggaggacgcggcggcgctgcggttcgtcgccgcggccgtcgacggggtctcccccgatggcgcccgcgcgcacgccgtcgagatccacccgggggtcaccaaggtcgtcgtccggggcctctcccccgccgacggcggcggcggcgtcgacgacgacgatggggccgccgctttcgagctcgaccgctggcgcttccgcctcccgccctgcacgcgccctgccatggccacggccacctactcccagggcgagctcgtcgtcactgtccccaagggcgccggccccgacgac

SEQ ID NO: 18780 - DNA, 901 bp, Zea mays
  Clone ID: LIB3115-012-C6_FLI
ctcaactggtccttcgtccggaatgaccagccgaggtttgagacttgctaccagatcgctcttgcgatcaagaaggaagtcgaggatcttgaggctggtggtattcaggttatccaaatcgacgaggctgcactgagagaagggctgccgctccgcaaggctgagcatgcattctacttggactgggctgtccactccttcagaattaccaactgcgagatccaggacaccacccagatccacacccacatgtgctactccaacttcaacgacatcatccactcgatcatcgacatggacgcggacgtgatcaccattgagaactcgcggtccgacgagaagctgctctccgtgttccgcgagggcgtcaagtacggcgcgggcatcggccccggtgtctacgacatccactcccccaggatcccgtcggctgaggagatcgccgaccgcatcgacaagatgctggcggtgctggacaccaacatcctctgggtgaaccccgactgcggcctcaagacccgcaagtacacggaggtcaagcccgccctgaccaacatggtctccgccgctaagctcatccgcacccagctcgccagcgccaagtgagcaccttttttttgcctttttcgtttccgaggagggcgtcgtcgatgccaatttgtttccaataaacagggctgtgcccgccgttctgttgtactccgtctgtggttaggttagtagttttcttgatctcgcccccacgcggtacctgttttactactctctgtttggtggtttctgaggaagttgcccgtgtacttgtatcgtaaaaaccgagtgggacatctgcatcgtttcatctgccaccactcccccgaggtgtgctgtttcacggctcaaagaaagatgtcgtatcggc

SEQ ID NO: 18781 - DNA, 570 bp, Zea mays
  Clone ID: LIB3115-013-B1_FLI
tcttgtgttgttcggagcgggcagcagcacacagccccatcccaatcctagtcgatcttcttcccctcctcaaggaagaaaagaagctgaaccatggggaagagaaagtcagctgctaagccacctcctaagaagcggatggacaagcttgacactgtcttttcctgcccattctgcaaccacgggagtagtgttgagtgccgaattgacatgaagaatctgattggcgaagcatcttgtagaatctgtcaggaaaacttcagcacaactgttaatgcactcactgagcctattgatatatatagtgaatggattgatgagtgtgagcgtgtcaacactgttgaaggcgacgatgatgcgtgagcttgccccatgcgatgaaactgttacctacaatcgtaatgtaatgtgctggtattctcgaatgccatagcccatagtcagccatggcttggaataacgtagtggctgactgatatgccagtaggcacctgtctagtacttacagaactacaaaaagtttgtactatacatatatggacaaccttataagtggctatgtgtgtacct

SEQ ID NO: 18782 - DNA, 730 bp, Zea mays
  Clone ID: LIB3115-013-C11_FLI
tgaatgactgccaacgcactgcattctatgagggaattggtctggacaccaaagaattcgacatgcatgtgatcattgagaccaaccgcacaacggcgaggatcttccctgctgtcctagacgtcgagaaccccgagttcaagaggaagcttgacaggatggttgagatcaaccagaagatcattgccgtcggagagtccgacgaaatccccctagtgaagaacctgaagaggattcctcttgtcgcctctctggtgtccgagatcatcgccgcatacctcatgccccccatcgagtctggctcggttgatttcgccgaatttgagccccggctcgtttactgattctgtacaaagatttatccttgagttattcaccctgaaagacaagctggtggtgctttctgcctaaggggccttgaatgaatggtgaaaaccgctggatggttagaggatctgcatcttcttgtgttcttctgtaagatactgagacttgggcagcataaaaagcttggcaaatttctgttgtgtggcatctcaatgtaagtaacagtggactgcatcagaagcgagcgttccagttttgcgacagaagggggcgtccgaagttgttgtactgctagtgaacgtcgaactagcatgataaatgtatcccagcacatttggttgattgtgtaacactagaaagccattgaacagcgtttggctatgatgctgtatcatctgaattt

SEQ ID NO: 18783 - DNA, 526 bp, Zea mays
  Clone ID: LIB3115-013-E1_FLI
caagcgctgggagcggcgggactacctcggcgtgcacccgcagaagcaggaaggcctgtcgtacgtgggcctccacgtgccggtgggccggctgcaggccgcggacatgttcgagctggcgcggctcgccgacgagtacggcaccggcgagctccggctcacggtggagcagaacatcgtgctccccaacgtcagcaacgagaggctcgacgcgctgctggcggagccgctgctgcaggagcagcggctctcgccgcggccgtcgatgctgctcagggggctggtggcgtgcacgggcaaccagttctgcgggcaggccatcatcgagaccaaggcgcgggcgctgcaggtggcgcgggaggtggagaagcgcgtggccgtgccgcggccggtccgcatgcactggaccggatgccccaacagctgcggccaggtgcaggtggcggacatcggcttcatgggctgcctcaccaaggacagcgacggcaagatcgtcgaggccgcggacatcttcgtgggcggccgc

SEQ ID NO: 18784 - DNA, 759 bp, Zea mays
  Clone ID: LIB3115-013-F9_FLI
cccaccgcgacctccggcgggcccgcgcggcggcgctgaacatcgtgccgacgagcacgggcgccgccaaggccgtggcgctggtgctgccgcagctgaaggggaagctgaacggcatcgcgctgcgggtgccgaccccgaacgtgtccgtggtggacctggtgatcaacaccgtgaagactggcatcacggccgacgacgtgaacgcggcgttccgcaaggccgccgccggcccgctgcagggcatcctggatgtctgcgacgtgccgctcgtgtccgtcgacttcaggtgctccgacgtgtcctgcaccatcgacgcgtcgctcagcatggtcatgggcgacgacatggtcaaggtcgtcgcctggtacgacaacgagtgggggtacagccaacgcgtggttgatctggcgcacctggtggcggccaagtggcccggcgccgcggcggccggcagcggcgaccctctggaggacttctgcaaggacaaccccgagaccgacgagtgcaaggtgtacgaagcatgaggccagggttctttccacgacgaaacgtacagcacgggcgcgagggttctttccatagagaataatatacagattattcgcccaaagagacgtatgttatatatatgagttgtatgcagtcaccgaactggtacaggcttccgctttccatttcctgttgggagtcgtgtagtgtaatcctggggtgtgtatttgtttcatcaatcatgccagccgatttgaatctcgtttc

SEQ ID NO: 18785 - DNA, 844 bp, Zea mays
  Clone ID: LIB3115-013-G2_FLI
ctcgattgggaggggagagatgaaggccacgctcaagggtcgctacgagggcgacaaggccacggccgccaccagcctcgccgcccccgccggcgacctccgcctcaaggcctctgccaccgaggccgtcttcgccaacgggccttccctccggggcctcaccctcaccctcgagaagcctggagctttcctcgtcgacctcaagccccacaaccaggatgtgcgcttccagttcatgaaatccgcgctcgtgctcgacaagcgcgtcagcctcacctacacccactccaccagccttgcggcgccggcgccgccctcccgcaccacgctcgactgcactgccaccttcgaccccgccaacaaggtcagcctctcccacacgctcgggtccggcggctgccgcgtcaagtacacctacgcgcacggggtcgagcgcctcaccaccatcgagcccctcttcgacaccaacaagaacgcctgggagttcgccgtcaccaggaagttagcgggaggggacgccgtcaagggcacctacgccgccaccaccaagctgctcggcctcgagtggagcagggactccatcgccggcggttccttgaaggtcgcgactatgtttgatttgtcggaccaacccaaagcaccaaagctaatagcagagagcacatggaattacgagatatgatttttcccataaaaatgagaaatcacccttctcatattacacctactgcttgcttgattactgtatcctccagaacaatggagctattgtttcccatgtgctggtttacatctggttatgttgaccattttgagctgcggtcgaatgatgccgcgacattgc

SEQ ID NO: 18786 - DNA, 375 bp, Zea mays
  Clone ID: LIB3115-014-F4_FLI
tgcatccgaggtgacagaactgccgttctttgcaacgaaagtgaggcttggccgtggtggagccgaggagatcctgccgcttggccctttgaatgatttcgagagagctggtctggaagcggcaaagaaggaactgggcgagagcattcagaagggcatcgctttcatgagcaagtgaagtggtaaggaggagggatcgtccctgagtcagatccggaccatacgtagtaacgtagatgtaagagtgttgtgatatagtgctcctacctatacttgtaaggccacggtaaaaagaaggctaattaccctttagcaactgtgaccatctacttggcataatggcatggaataaatctttcgtcttcggtggcggac

SEQ ID NO: 18787 - DNA, 700 bp, Zea mays
  Clone ID: LIB3115-014-H2_FLI
gcgcctccccgatctcgtcgagaggaagcccaatcccgaaaccgccgccctattccaatggcgcccaaggccgagaagaagcccgccgccaagaagcctgcggaggaggagccggcggcggagaaggccacggcggggaagaagcccaaggctgagaagcggctccccgcgggcaagtccgcaggcaaggagggtggcgagaagaaggggaagaagaaggcaaagaagtcggtggagacgtacaagatctacatcttcaaggtgctgaagcaggtgcacccggacattggcatctcgtccaaggccatgtccatcatgaactccttcatcaacgacatcttcgagaagctggcggcggaggcggccaagctggcgcggtacaacaagaagcctaccattacgtcccgcgagatccagacctccgttcgcctcgtcctccccggcgagctcgccaagcacgccgtctccgagggcaccaaagccgtcaccaagttcaccagctcctaggcgagcgatgcgacgtgcactcgtctcctcttcttgcaggagtacaatagtagtacggttaggtgtgttgccgcggtggtagttgccgctgcgtttgctttctgggctcggttgatgtcttttatgtaagaaagtaactgtattgtgtctgcagtaccttaccgtgcatgttttaagtagcatcccataatct

SEQ ID NO: 18788 - DNA, 580 bp, Zea mays
  Clone ID: LIB3115-015-A1_FLI
aagatcctgagcatcagtttggtgaagggtgctcgggccattttcctagagtacctcttcgtaagaacatgttcgttgaagcgtcccgatcctctgggactcaaatgtgatacaattactagtcccaggaggctagtaaacacatttatacatcagatgatttcagatctgcttaaatgagacaaacctataaaggtggcgatcaactttaagagttggtccacaacttgggaaaaatcatcagagtggggctgaagcagcccgatatacgcagcgaagcaaatcagcggtccaacagccacaggcaaggttgagaacagtcgtaactcttacccgatctccttttctgaaaaacaacaaataagcaaggatgagtacaaacgtactcagcagcccaccttcacccgcggaatggggaaatcagatataatgcatggaatatgtggagctcaggatattttgcagaaacaacaatattttatgcagggttgttttgaaaaacattttattttttttgcaaagcgcatcctctccaaaaggagcaggaagttttttagtatagaaaaaagtccacttgact

SEQ ID NO: 18789 - DNA, 617 bp, Zea mays
  Clone ID: LIB3115-015-F5_FLI
gtaaccacagccagccaccaccgcgagaacaagtcgcagccaagagaagtcgtcctcgcgcgcgtctcgatctcccagcgaagctagagcttgccgtgtgccgtgacttccatggagctactccacgccgtcatccatggagctgcgacgacgacgacgaccaccaccaccaccaccacgagcagcagcgccaccgtcaccagcggcgacgagggcgcccacctgccccaggggtgggccaagaagaagcgctcgcggcgccagcgctcagaggaggagaacctcgcgctgtgcctgctcatgctctcccgcggcgaccgccaccgcgtccaggcgccgccgccgccggtcccgtccgcggagttcaggtgctccgtctgcgggaagtccttcggctcctaccaggcgctggggggccacaagaccagccaccgggtcaagctgccgacccctcctgccgctcatgtccagctcccggcaccaccggcagtggccctcttggtggaggcccccgcaccaccaccagtcactgccaccccgcccccgctgccgctagtcgcggtcgccgtcgccgtccgtgagccggccacgtcgtccacctccgacggggcggccgc

SEQ ID NO: 18790 - DNA, 933 bp, Zea mays
  Clone ID: LIB3115-016-B10_FLI
cggcaatgccgccgctaagtcttcggcgccaaaagcagccgaggagcaggtgtgcacgctcctctccaagcggctccagcgcgtgtcgtgccactgcctccgcatcgccgcggcggtcctcgtcgtctacagtttcgccgtcacggcgtggcgcgtgcgtcaccagccgcaggacctggccttcgtcgctgccgccttatttctccttgccgagctccaggcgtgcctccgacgcgccgagcggctcgcgccggaatcgcccgccggggagaggcgccgagtgcgggccgccgtgtgggcgctgtccaccgccctcagctgcgcgttcgcctaccgcgtggccgcggtcatgccgccgccgctggccgtcctcgtctggtgcattaccgcgtccgtcggcctcgtcggtctgtgtctgcttgtgctctgcagagaccaacagtatcaagcgctccgcaacgacgatgccgcctgcgactgcgacagaagggcctctgccaagactagtcctactgatgaattggtctaaagcattcagattcaggggggcaagaaattacaaagagtttttctgaaaatgtcttggattttggtattgattttcgtgctaatgcttccctgctgccattgtttctctaaatacctcgcttggaacgacgtcatctaccaactcagatgaagagtagtgcctgcattttcgttcatcacgtataataaaaaagatgtgttctagctcagcttagtagtactgtaagaacaatttgtggtgtgaaggtgttccacctccaccccaggagaacgtaacgtgtctgtggtggtactcggctctggctccgccgcaagaacgattaatcttaaagccaagcaagtcttgctgtttagttaaggaaatgtaacataaatggtaatagtctatactatacttaaagcacc

SEQ ID NO: 18791 - DNA, 1034 bp, Zea mays
  Clone ID: LIB3115-016-B4_FLI
ccgacacggcggcgttctgggacgtgatggactcgggcggcgagtgcggcgtccccgccgagacctactactactaccccgccgagaaccgggccaacttctggtacaaggtggactacggcatgttccgcttctgcgtgggcgactcggagcacgactggcgcgtcggcacgccgcagtacgacttcatcgagcactgcctctccacggtggaccgcaagcaccagccgtggctcatcttcgccacgcaccgcgtgctgggctactcctccaacgcctggtacgccggcgaagggtccttcgaggagcccgagggccgcgagaacctgcagcgcctgtggcagaagtaccgcgtcgacatcgccttcttcggccacgtacacaactacgagcggacctgccccatgtaccagagccagtgcatgaccagcgagaagacccactactccgggaccatgaacggcaccatcttcgtcgtcgccggcggcggcggctgccacctgtccagctacaccacggccatccccaagtggagcatctaccgcgactacgacttcggcttcgtcaagctcacggcgttcaaccactcgtcgctgctgttcgagtacaagaagagcagcgacagcaaggtctacgactccttcaccatcgacagggactaccgcgacgtgctcagatgcgtgcacgacagctgcttccccaccacgctagccacctagttaattaaactaattaatgagacgccgccagttttaattggctttcatccgaataaaactaaacgacgtgtcaaccacttattggtagaataatgtgccccgtcgaggcacactgtactgtagctgtatgcctgtattcatgatagcgcacgcagggtcagggagtggtgttgctgtgctcctgctccctcgatctctgtattaaatatcactagctagcccgtgcattaccacttattctcagttggtgccgtagggctttgtgtgctggtgtggtttaatttccagataaggaaaatgggagttcaaacccct

SEQ ID NO: 18792 - DNA, 301 bp, Zea mays
  Clone ID: LIB3115-016-B5_FLI
atggaccatgaggaggcccgccgtaagaatgttggtggcaaggttctaggtttcttttattgaaaatgtgtttttttgagccacagatgcgtccaagaactcgtctgatgttttgaggtttgttaagactgggtgtccgagcctttgtggtttgttaagacagcgatgtgtcatgtatttcagaaattgggatttttatgagatgtacctgcgagagccctgtctgtttcgattttcagatattggttttgatttatgcgatacaaacaggtcctttagtccatataactttttgatgctg

SEQ ID NO: 18793 - DNA, 866 bp, Zea mays
  Clone ID: LIB3115-016-D12_FLI
cggcatcacgaccctgcgcgccatcccctggatcttctcgtggactcagaccaggttccaccttcccgtgtggctgggagtcggcgccgccttcaagttcgccatcgacaaggacgtcaggaacttccaggtcctcaaagagatgtacaacgagtggccattcttcagggtcaccctggacctgctggagatggttttcgccaagggagaccccggcattgccggcttgtatgacgagctgcttgtggcggaagaactcaagccctttgggaagcagctcagggacaaatacgtggagacacagcagcttctcctccagatcgctgggcacaaggatattcttgaaggcgatccattcctgaagcaggggctggtgctgcgcaacccctacatcaccaccctgaacgtgttccaggcctacacgctgaagcggataagggaccccaacttcaaggtgacgccccagccgccgctgtccaaggagttcgccgacgagaacaagcccgccggactggtcaagctgaacccggcgagcgagtacccgcccggcctggaagacacgctcatcctcaccatgaagggcatcgccgccggcatgcagaacactggctaggcggcttctcttcactcacctgcagagtgcaccgcaataatcagcttccggatggtggcgttttgtcagttttggatggaaatgccgaactggcagcgtctgttttccctatgcatatgtaatttcctgcctctttatattcactcttgttgtcaagtccaagtggaaaatcttggcatattatacatattgtaataataagcatcgtacaatctgcatgctgttttgtaataattaattaatatcccagccc

SEQ ID NO: 18794 - DNA, 266 bp, Zea mays
  Clone ID: LIB3115-016-E5_FLI
cagctccgtgtaattttctactgtttggtttttgcggctgcgttggcccgatggcattttagacgtcggccatggcggctgcaagtagcaagtgagtaactagctagctagtacatcgtcgtcgtccagtgttgtgaagcagagttaagtacatgcgtgctaatctcctggttgagctgccggttgttttttctcacggcacggccagtcgagaagagtcagtagtgtaatctcgtggttttatgatcatctgttgcagcttatgt

SEQ ID NO: 18795 - DNA, 284 bp, Zea mays
  Clone ID: LIB3115-016-E7_FLI
gcggcgcggggcagtcgatgaacgtgccgttccccgccgcagcagtacacctgctccaaggagatcctcttccacccttcaagaagtggatgctcaagcagcagctcaaccaggacgacgaccctttccagctgcctggcgtcgccatggacaactgatacaccgtaccgtcgtctctgtttgcgtttctgtcaagtgtgcatggaataatactgtaactgtgtttcctgccgggcaatgcactgtgatatgatgcccaacgaataaatgtcgcttttattttt

SEQ ID NO: 18796 - DNA, 646 bp, Zea mays
  Clone ID: LIB3115-016-F5_FLI
gggaaaggttcacggatcgctcgcgcgtgccggtaaggtcaagtcgcaaacccccaaggttgaaccccaagagaagaagaagaaggtcactggtcgtgccaagaaacgtctcatcttcaactctcgtttcgttaacgttacctccgctcccggaggcaaggttcaacgcaacaagcaacctcaaggaaagtccggttaaacgaaccaacaaggagagaaaagaagaatcaatccagagaaaacacgaaaatcccagcagaaacagacttttattcagaattacattactcttatcactctcgccctttcctcccttcccctatcttcgcctttactcgttctactccctatcaatcctacttccagctcccaacgtatctttcctgcggtggatcagaggttattagtagtgagaggttggaagttttactcgggacgagcaggtcacaatttagtacgaaggaaggtcgtctaggtggatcaggcgctgtggaaggttatgtgaattctgtatttgtgtgtggaacgttggaaatgttcgtgttaactctctcgaaaggttttaattttctactttttacatatggacgttttaatctttctttttattgttggttgagaaatgcaaatggggtttttgtaaaag

SEQ ID NO: 18797 - DNA, 499 bp, Zea mays
  Clone ID: LIB3115-016-H3_FLI
gctgccgcctcaccgcctctctcaatctgataccgcagatccgtcgtccggtgagtggaagccgcacgaacccatggcctccggcgagcttgcctgcacctacgccgctctcatcctcagcgacgatggcatcgccatcaccgccgagaagatcgccacgatcgtgaaggcggccaacatcaaggtcgagtcctactggccggccctcttcgccaagctcctggagaagcgcaacgtcgaggacctcatcctctccgttggatctggtggcggagctgctccagttgctgctgccgcacctgctggtggtgctgcggctgctgctgccccggctgtcgaggagaagaaggaagaggccaaggaggagtctgatgacgacatgggcttcagcctgttcgactgaggagaccccctcacccagccattagcaaatttcacttgtgctgtcaaagactatcttgtcttatgttatgtctctaggcttttgttacaactaccc

SEQ ID NO: 18798 - DNA, 510 bp, Zea mays
  Clone ID: LIB3115-017-C3_FLI
ccggtttgcttctggtttctgccgcacaagggcatcgacgtcgtgctcttcgcgccggacgacgccaaggccacgcagaccgccgacccgaacaggaagaagatcaagctccatgcagggcatcacccaaggccacgcagaccgccggacgactccaaggccggatctccgtgcagccgtgcagggcatcacccacaagaagaagatcaagctccggcgagtacctctttccatctcctgtcgctgcctctaccatatctatctaaaggaacaaatttgagcgcatcttctgttgacagtgactttagtttgctattggtgctccagtaagaaaaatagatgtattttgttgatggtggcttcacaatctggcacatgactcatgaaaagctttgtttgacaaactattgtgaaggaacaagtatactgtcttttactacttcagtttgcttgacaaactattgtgatgatggataaagtgtgatgtgatgatggataaaccaatttact

SEQ ID NO: 18799 - DNA, 986 bp, Zea mays
  Clone ID: LIB3115-018-C7_FLI
gccatatcctctccagctttccgctccgcccttgtcgctcgtccagccaccgtgcccgtgcccgtgccgccgagaattctatccagaagcaagcaacaagagcccacccccgcttcgcgcgctctttcgtgccaggcaaacacagagcacagctatctgctcgtgtcccggtccgtccaactcgctcgctcgctcaatccactgatgatggggatcccgctggtgtgctactgcctcgccgtgcccaagccggtcatcgccttctgcaggctgctcagcgccgtcagggacgccgccctgctgatgctggccgtggtggggctgtgccgcttcccgcccgacggcgcggtggacgccggccaccagcccggcgaggtgaaggcccggctccccgccgtggagtacggccagctcctggccgagcacgacgagcagcagcagtccggcgaccacgactgcgacggggacgccgcgtcgtcggattgcatcgtgtgcctcgagacgctggaggcggcggacgaggtgcggcggctgggcaactgcgcgcacgccttccaccgcgcctgcatcgaccgctggatcgacctcggccgcgcgacctgcccgctctgccgctccgacctcctgccgcgcgcgccgggctgggccagccggctcggcctgggccggctcacgcgcgttcggtgaggaggaccgtcttccagggcagtttttaatttgtctattggatgatggggcgcggacaggttagcgacggcgatcgcccgggtggtataacagctgctctgcctgccatcagccaaccgctaatctacgggggggcttcattagtacgtaaaaggcgcctcacacttggtatacgtaaaagatatactagttattaatacgttaaaggattgagtatacggcacctagatgtttcatttgtacacgattttaatttcagtctctcctcgaccatataatagtaattaaattagttcgtc

SEQ ID NO: 18800 - DNA, 904 bp, Zea mays
  Clone ID: LIB3115-018-E12_FLI
cagcgccagcggcggtcagcgtcagcgtcagcgcccgaccaaatttcccccctcacctccccctctcccgtcgtcggcatggccaccgacgtgctgcgcgcgcgcaacgtcctcttgccggcgccgccgcagaggatccgggcggcggcggcggcgcgccggagggcagctggtagcgacagccaccaccccggcgccaccgccaccaggaggaggtcgccgccggccgggacatcgtcccccgcggcggggcgaagacaccccggcggcaggagggcgaggcctgcggcggaggtgtacgccggcccatcgttctcgacgtcccccgacccgagcttgctgccgctaccgcagttccctgccaggaaggccgtggccgtggccatgacgaccgccgtcgacgccgccgccgccgcgacgcgcgacctcaggcttatcctgcggctggagtagccatcaggacacatagctcgtctgctggctctaacgctggcttcgatttctcttcttaattcttccttctttattagctcctactcctagtccttgtcgacgcatcatcgatcgagctgcacgttggttctggctgctctcctggtatgggtcccacgctgccgcggcgaggcttccggctcagttttattgtgtggtcggcggcgaggcacgcggcggccatgggatcccaccgcgacggcggtgtagaatgatagcagtagcagctgtaatacactactctgtactgtgacgtgcaagtagatagtactagttactagttagccagtgtagggttcctccgtgtaacaagtcatcagcgtgtgatcctcttcgtctgttcatcaatatacacatttctatatgtttcaacaattactgatttgaattagtaaaagtcaaattgtctgcc

SEQ ID NO: 18801 - DNA, 878 bp, Zea mays
  Clone ID: LIB3115-020-A11_FLI
gctggcttctcctccccctcttaccaagtcctcctcgggttagggttccttagggttttgtggaggggcgatggcggcggctgatgtggagtaccgttgcttcgtcggcgggcttgcctgggccaccagcaacgagtcgctggagaatgccttcgcctcctacggcgagatcctcgactccaaggtttgcttcgtcctcgctaggtttcattccgcggtctgtttgtgccgttggggctagatccgggtcgtggttcaacagatctgcttcgttttggtacagatctgcgttcgctcgaatcgagcatgacgttttcatgtgattatgcaggtcatcaccgaccgggagacggggaggtctcgcggcttcggcttcgttaccttctcctccgagaactccatgctcgacgctatcgagaacatgaacggcaaggagctcgacggccgtaacatcaccgttaaccaggcccagtcccgtggcggtggcggtggcggcggtggctacggcggcggtcgcggcggcggcggctatggtggcgggcgccgtgacggcggttatggcggcggtggcggctacggcggtcggcgcgagggtggtggcggcggctacggaggcggtggcggctacggcggtcggcgcgagggtggtggtggcggctacggcggcggcggcggcggctggagggactgatgtgtgggcccatcctggcttcggccgagttatcttatctatctatagtatcgtgttaccgttcgcttctgtcaccgtgttagtgtccgttctacctttggattaggtgttggtacccctgttgttccctttgtttgctcccgctatgaaacgagacgagagaagaatgagcaaggtttttgttcgc

SEQ ID NO: 18802 - DNA, 523 bp, Zea mays
  Clone ID: LIB3115-020-A3_FLI
gttcagcttgtattcccactctgtcgcacagcgtcgcccgtcgccgctgagatcctaggaagaaatggagctctctcgcaagctcttcacggccgtcctcctcgtcatgctgctgctgctgtccgcagaggtcgggccggtggcggtggcggaggcgcggacgtgccagtcgcagagccacaggttccggggcccctgcctccgccggtccaactgcgccaacgtctgcaggaccgaggggttccccggcggcaggtgccgcggcttccgccgccgctgcttctgcaccacgcactgccactgattcgctcgcccagcggccggctggcgtcgccgtcgatcgcgtcgcgaccagtccatggctccatgcatgaataacaagggtgtgcgcggtttgtgttgtgatgccaaattgtatcctcgtcgtgtgttgagcagcggcgtgctgttgtacgtacgtctgcctctgttccatgtttcgggattttccatagcaaatgcatgcgtcgatcgagatctaaaa

SEQ ID NO: 18803 - DNA, 599 bp, Zea mays
  Clone ID: LIB3115-020-C11_FLI
gatggtgcctttcttatcgaaatggcatcatggactgtatcatttgtgtggacattgggtaacgttttcagttcaacagattggtgatttctggcatgggttcaaaagtacaaatctaacgctacattaacaggcatagacttatcatcaaccgcgcccaatcagatgatacagtttccgaaacataagagaattttctttgcagaatgctcagggcttcgtatcgctcttcagagcttcggtggttgtggtggagtttggttctgccagcgaaaacttcttcaccctcttgcgcacgatgcattcacggagggcgtcgacgagggcgaggcacctatcccggtcgtagggggccgaggcgacgcagttgagcagcgccagcgactcctgcgcgcaaaccggctgcgccgtcgtcgtcgtcttctccatgccgatccaaacaggaggatgctttgtctaatccagagagagggagcgcaggccgctcccgtgcggcgaggcctttacaagggaccgcgccggcggcgcggcttgggcgagaagaaagaaaaccagcggcggccggcggccgttgatgggatcgcaatcggaaagctctc

SEQ ID NO: 18804 - DNA, 512 bp, Zea mays
  Clone ID: LIB3115-021-G9_FLI
gctccctgggggcgggcccctgatgctcccactcctggctctcatttccctggacaattacccgggttgcccggacaaatgacccaaggaattggtggtatccaggcaggccaagcaccactgacacctgagatggaaaagatgctagtccaacaagtcctgggcatgtccgctgagcagattaacatgttgcctccagaacaacggcaacaggttcttcaactacgagacatgctacggcaatgatagatcgtcagttgactgggtggagaagtttcagttcactgcagcagggatcccgagtgtgggtgcctgttcgttttagccttttgtatcacctgattgacatcccgactagtctgcagcctaccttggatatgcgattgtagaatggtagtcgttgtcgtcatttatagaaatgcttgggcaatatgttttccgaaggactcacaaatgaactgcatgttttggtccagttcagccgcttcaatttcaagtcgtgttaaacattt

SEQ ID NO: 18805 - DNA, 628 bp, Zea mays
  Clone ID: LIB3115-021-H3_FLI
agtcgcacctgccgcagcttccctacctgcacgcggtggtcaaggagacgctgcggctgcacccggcgctgccgctgatggtgccgcactgccccagcgccgacgccacggtgggcggctaccgcgtcccggcggggtgccgcgtgttcgtcaacgtgtgggcgatcatgagggaccccgccgtgtggaaggacccgcgggacttcgtcccggagcggttcctggacggcgccggcgaagggcgcaggtgggacttcacgggcagcgagatggagtacctcccgttcgggtccgggcgcaggatctgcgctggcgtcgccatggcccaacggatgacggcctactcgctggccatgctgctgcaggcgttcgactgggagctgcctgccggcgcgcggctggagctggacgagaagttcgcgatcgtcatgaagaaggccacgccgctcgtggccgtgccgacgccgaggctgtccaagcctgagctctactactcggcctagtccaccactggcaccacatccatccactggactgggccattcggcagaggaggaaatgtaacatatttggcccacctgccctccctcgtgaatacgttacatactgaacagtgatgttttaatcg

SEQ ID NO: 18806 - DNA, 687 bp, Zea mays
  Clone ID: LIB3115-022-H1_FLI
gatcttgttagctagctgattaaaatattaaacttatctgtcacgccattaactagatcatacaacgcctccatatctaccattatactttgcataattatgcacctaaaatctaaacctcatcatacacatatgatacagctatttcacaatcatgaacatcacaacatacgtatgctcaattaataaaaattatcgtgaccaacaattctatttaatccatctatatacctagttgactgaaataacgaatcatcttaccatcattaaatacgacttgaaactacgaaatcgacgacgttgtccgacttgcgcatatcaccaatacttgacgagcgtggcactggtgcttccctttcgtcttccggcgtgaacgcaaggtgtgacaaggctgctgaaacgatgacgataccggggatgcggacgttgatgcctcggagtcggatgtggacacgaccaccaaaccccgtgcgaggacagggaagccagagcgacaacggcgcgacgacttcgacgctaagcacccgagctcgacgatgtcgcggcgcaacaggaaatagtgacgccatgatggccagggaggcgtggctggcggtgcaaggcgctcagcgctagggcgagaccgagcagttggaagacgacgcaaagagcagagctgggcgtgcgcgtggcctgcgtcgagcgagc

SEQ ID NO: 18807 - DNA, 529 bp, Zea mays
  Clone ID: LIB3115-023-E10_FLI
cgcgctcaccatcctgctcatggaccagcaggtggccggcctgcaggtgctcaaggacggccgctggatcgccgtgaacccgcggcccggcgcgctcgtcgtcaacatcggggaccagctgcaggcgctgagcaacggcaggtacaggagcgtgtggcaccgcgccgtcgtcaacgccgacaggccgaggatgtcggtggcgtcgttcctctgcccctgcaacgacgcgcgcatcggccccgccgccaggctcctcaccgacggcacgcccgccgtctacagggactacacctacgccgagtactacgccaagttctggagcaggaacctggaccaggagcactgcctcgagctcttcaggaccccgacctcctaggagtattttggatgcttctctttcattttagcttttcggtactagtttgtttgttactagaatggaacttgccgactgcatcagaaactgtctgtctgtacccctcatcagctccccctccaaataatctctctgcccatgtgggcttgtttc

SEQ ID NO: 18808 - DNA, 619 bp, Zea mays
  Clone ID: LIB3115-024-C1_FLI
tttgcttcaccacaccttcatcagagagccgagacgacacgctcgagacccagcaaggcaagaagaacacgagagagacagcaggcaccaggcagggatcaatcatccgtccatggagaacctaaaggagcagcggggccacgacgcggcgggcgccaacgcctggatgacggtgccggcgttcggggactgggacacgaagaacggcgcgctgccggactactccatggacttctccaagatccgcgagatgcgcaagcagaacaagaaggagctctcccgcgccagcctcggcggcgacgacgacctcctcgcccacgcccagaagccgcagcccagtatcgccccgcccaagctcggccgcccccgccccggccccgccgacgaccactccccaacgggagggaagaagttcctgagctacttccggtgttgtatcaaggcctgaagaggtgctgctctagtgcctgcagtccctgtgtttttttttcgcagcagaacacttgtgagcaatcaggcctcggttttgttaagtaccccgtgtccaaaaacgtgtaatatatttgtccttatggatcagtcgttgggcctgtatgaagaacagaccagtttatggggt

SEQ ID NO: 18809 - DNA, 614 bp, Zea mays
  Clone ID: LIB3115-024-D5_FLI
aacggcaccgcggtgggcgtcgtcgggagccgccgctacctgcccctagccggggagcagctccccgacgccgtggactggcgcgagcgcggcgccgtcgccgaggtcaaggaccagggccaatgcggtgggtgctgggcgttctcggcggtggcagcggtggaagggatcaacaagatcgtgacaggcagcctcatctcgctgtcggagcaggagcttatcgactgcgataagttccaggaccagggctgcgatggcggcttcatggacaatgctttcgtcttcatgatcaagaacggcgggatcgacaccgaggccgactacccgttcactggccacgacgggacgtgcgatctcaaactgaaaaatacaagggttgtatccattgattcgttcgagcgtgtgcccatcaactacgagagagcgttgcagaaggccgtggcgcaccagcctgttagtgccagcattgaagcatctcggcgcgcgttccagctctacagttctggcatcttcgacgggagatgcgggacgtacctggaccacggtgtgacggtggtggggtacggcagcgagggcggcaaggactactggatcgtgaagaactcgtggggcac

SEQ ID NO: 18810 - DNA, 802 bp, Zea mays
  Clone ID: LIB3115-024-G6_FLI
gataaagctaagccaaaataatattatctccgtttttgaatatttatcagccgctagttcattttttactaaaatgtggtaaataaaaaaacggaggaagtatcatgcatgagcgcacgtgtggaagtggtacaaatatatttctcccgaacaagctcactgcagctaagctagattttctctcttccctcttcaacaagctccgaccttgtgaagctccagcgcatgcacggctcgccggtggcctagcatgtgtccaccctcccagccgctggcctgctggcagccgtgggagtccaagaagttcttgctgaggtccctcgtcacggacccacctgcgcgctcccgcggcggctgcggtggcgtcggtatcctctggagcgacgaccacgccgtcgcgaggccgtggtccgatggcgacccgcacgccagctgctgctccctgtcgtcctcggcgatggtgtccaggctcctcggccccttccttcgtcgcatgaccgacaccacctgcggcggcgccacctccgtcgtgaacctcgccgccacctgcgcctgcgcgtggccgtggtccgacggtgacccgcacggcgccagcatctccctgtcgtcctcggcgatggtgctcaggctcctcggcgccttcctccgccgcatgaccgacaccacctgcggcggcggcgcctccatcatgaacctcgccgccacctgcgcctgcgccttcgccatgatcgaggaaatgacgaacacacacacacacagctcgctctagttttgtgcatgtacgtacgtctttgttgaatcg

SEQ ID NO: 18811 - DNA, 499 bp, Zea mays
  Clone ID: LIB3115-025-A7_FLI
ccagggcacgccgctcaggcccgccgtgcccgtcgacgtgtacgtgttcgcgctcttcaacgaggacttgaagcccgggcccacgtcggagcggaactacggcctgctctaccccgacggctcgccggtgtacgcgctcgacgccggcggtccgggcccgggcggctcgctcaacccgtactacacgtccatgttctcctcctcctcctcgtccggatcggcggtgggcgtaacctttttgacggagaaagtggtactatcactgctgctgcaagcaattgtaatactccgacgatcacattcgtactgttagactgttagtcagtgccatatactcttgtaatcttgtatacgaaaaatatgcatttcaattcaaccatagggtaggcctagattcgggaattttgcacgacggcggtgtggctgctccgaaagctctcgtcttttctcttattcccccgcccccagcaatggtcttgaaaaagggtgaccttttctt

SEQ ID NO: 18812 - DNA, 503 bp, Zea mays
  Clone ID: LIB3115-025-B11_FLI
actgctataacgacagtttactgatcttacactgaggcactgattggcgtctctgcatgctttatttttaaatttgcaggtggcaaatcgttggatccagtgacgaggtcgagtacagcccgttccctgtgcccaagcacggcttgcctgtcagattatggagacaaaacaatccggtcgacataaaggggcgtgagaccgacgacgatcatatggaggaggatattttagtttgactcttgagttaggcatgaatttaaccccaagctagctagagaagttttttttttcaccctttgaaattcttctttgctcgcctcttcctcctggatcaaattaccttggaggagaagaaacggcagctttctctctttcgttttctttgcctgcttcaccgcgacgataatggtgaaaatatgtaagctacgtggacatcaatgatccacagcgtcgttgatatatataatatagagaggaaattctctgcacgatcaatgcagttt

SEQ ID NO: 18813 - DNA, 1186 bp, Zea mays
  Clone ID: LIB3115-025-F6_FLI
tccccgttcgaaggcgcggcaagcgagcgattcagccagattcgattcgacatgaatcccgagtacgactaccttttcaaacttctgcttattgctgatgtagctgtccaaatatgaatcatccgcaaatctgagaagcaagcatgatttcccaacaccagaatcaccaataagcagaagtttgaaaaggtagtcgcggacgcgtggggggtttttgattttagccgccgccgctgctcatctcacatccctcgagaagacgcctgctcctcgccgatcgatacgatggccgtcttctccgacctccacaccgccgacggcctcaagtccctcgaggctcacctcgccggcaaaacctatgtgtctggtgactccattactaaggatgacattaaggtcttcgccgcggtgccgtcgaagcctggcgctgagtttcctaatgccgcccgctggtacgagaccgtctctgcggctgtagcctcaagattccctggtaaggctgttggtgtaaatctgcctgcgggatcagctcctgcggcagctgctcctgcggatgaggctgaggatgatgatgaccttgatctttttggtgatgaaactgaggaggacaagaaggcagctgatgagcgtgctgccgctgccaaggcctcttctaaaaagaaagaaagtggtaaatcctccgtccttatggatgtaaaaccatgggacgatgagactgatatgaagaagctggaggaggctgtccgcagtgtccagatggagggtctgacttggggagcatcaaagcttgtgcctgttggatacggcatcaagaagatgactatcatgttgacaattgtcgacgatcttgtgtccatcgacactctaattgaggaccaccttacgcaagagcccatcaatgagtacgtccagagttgcgacattgtggctttcaacaagatctagagttcagtttctgagtttgggcaacggcagcggctcagctcgtcaagtttgtgctgggatgccagtttatcccttctagtctattacagaaacgttgttcggagctgagtctattataaacatcttggtctgagtttattgttgagtggtgccagtttttttcaatatacatttatcttaaaaacagcggtactgatgtttttttgtctaaagttaatgagtttgcaatggttctgagtct

SEQ ID NO: 18814 - DNA, 581 bp, Zea mays
  Clone ID: LIB3115-025-G4_FLI
cgccccagcgagccagctccggcgaagtcaatcctgcgctccgcaggcagcatcaagcatggcggacacgaaggcgtcacccgcggtgacgctccgcacgcgcaagttcatgaccaaccgcctcctctcccgcaagcagttcgtgctcgaggttctccacccgggccgcgccaacgtctctaaggcggagctcaaggagaggctggctaagatgtacgaggtgaaggatcccaactgcatcttcgtcttcaagttccgcacccacttcggaggcggcaagtctaccggattcggtctcatctacgacaacgtcgactcagccaagaagttcgagcccaagtacaggcttatcaggaacggtcttgctaccaaggtggagaagtcgcgcaagcagatgaaggagaggaagaacagggcgaagaagatccgcggtgtgaagaagacaaaggctggggacgccaagaagaaatgagcaaggtttcagtgtactttagccgtcttgagttcgagtaacacctgttcgccgtcagaaattttgtaccccatgtcgcaatgctttgatctagaaaaagagttttttt

SEQ ID NO: 18815 - DNA, 859 bp, Zea mays
  Clone ID: LIB3115-025-G8_FLI
gaatcgacgcagacaaaagccctgagccgcacaagacgccaaagcaactcggtgctacacaggtggatcctgtcccagagagatgcccacaagcttcaaggggcacacagtgcaaatcacaaggcgggtcgactaggagctgcaagaaggtccacaagcaaggaatggcgctgggcaggtccgtggaccttaccaagttcaacggctacacggagctggtggcggagctggacgagatgttcgacttcaacggcgagctgaaaggctgtagcaaggagtggatggtcgtgtacaccgactacgaaggcgacatgatgctggtcggggacgacccctggaatgagttctgcagcatggtgcacaagatcttcgtgtacacgagggaggaggtccagcgcatgaacccgggcgccctgaactcgaggccggaggacagcggcctcgccaattcgacggagaggggctccgcatctactgctgctgctagagaggcacccggctaccagtccgcctcgtcgcttaactccgacaactgctgatgccttggcagctagctggtcgtcccaagtagtagagaacaaggcaaatgtatccatagatctccttgtagcggagcttaatgcctttttttcccctttctaatatgcattggatgagcccgtagcgcaccgtagtagtatctaaagctggtgttctgagttggttggaccttcctgcagttttggtttctccttctgatgtggcaagttttagctggtcgcacctacctaatgtatgcttagcaaacgaagtcccactaagcgctgtacataactgcccctccctgcatcaactctaatatatcatctgcttaatcgtc

SEQ ID NO: 18816 - DNA, 597 bp, Zea mays
  Clone ID: LIB3115-026-G6_FLI
agaaaggtgattaaattaagtatacaaaatggtgttccgtcggagtacacagatatgatctttcttcaaacaaatctggataaagtagaaggaacacaaaaggtcaagcaaaaactgaaaggacacaaaggcagagatgagcaacagatttatggcctgaaactgggattcggtaacaaagatgctacacgggaaaatctcatcacaggatttggagacatgaatccggcagagaaatctgtgatgctccaaaagggatcgggctgttgcagccgcgtcgcagactgcctctgctgcatgtgctgcatcaaggcgtgcaacaggatgaacgaccagtgcgccgttctgatggcacagatctgcgcggctctagcgtgcctcggctgctacgagtgttgtgcagaggtgtgctgtggagggtcggagtcgtagtaggaagtgttttgtatatttgtatggaagattggagaattggagtgtacataatagagttcgcggaagcccggttctggcccggctcttggttgtatccgtccaaacgttctataatttgctcgttacatgcaatgcaaaagagggatggcacacttgagtagt

SEQ ID NO: 18817 - DNA, 704 bp, Zea mays
  Clone ID: LIB3115-028-E3_FLI
attaccaaacgaattttatattgggttattgctcaatatacatcttcatgcaaacattcatgatccctgggacaatattcatgtctttacttgctggggctctttttggagtgattaaaggtggcattttggtagttttcactgccacagccggtggatcttcttgctattttgtctccaagctgattggcaggcccttggttagttggttgtggcctgaaaaactgagatatttccaatcagagattgctaagaggaaagaaaagctgctgaattatatgctttttctgagaataactccaactttgcccaatacattcataaatatggcgtcaccgattgttgacatacctttccatattttctttgctgcaacactagttggtcttattccagcatcttatattactgtaaaggctggtagagccctaggcgatctgaaatcagttagagagttgtatgacttcaagacattagtggttctgttccttattggatctgttgttgtcgttccaacaatcctgaaaaggaagagaacatacgaatgatgtcttagagcatctacatactttctttagatgttcaaaatgtattaggatttttttaccttttgttttcttgatatcgtatacattttcaattctatacgtagagatgtaaaatcgaatcgaatgctttctaatactagatgatgccatcattgt

SEQ ID NO: 18818 - DNA, 418 bp, Zea mays
  Clone ID: LIB3115-028-E5_FLI
cacagctcatgcaaaggaatcttgtgggcgggccttttgcccactcatttatctggatggataaggcactaattatcttggataccatcacgctgttcatccggtctgctgggtaaccatgacaggaaaaatgaagcagcgggcgtcttaccttatatatgttctctggaagcagctgacatttgttttctggatcatattcataattctatgtaggctgtgacaggaatctctatagtagagccatgatttttttttggttgggtttcagcctgcgttggagaatatgcccaattttttttttggagaatatgccttatctggatggataaggcactaaacacttgaagattatatttcggagggtggagaatatgacaatttgatttatatcactaaacatttgaagattatgttt

SEQ ID NO: 18819 - DNA, 675 bp, Zea mays
  Clone ID: LIB3115-028-E7_FLI
gctgcgtttcgccactgagatagccaaccctgcgactgcgtgcgtgcgggcgagcgagcgagcgagcaggcagaatggagcgccacgcccagaaccagaagcaggcgccgctagtcctcgcgctgtcctgcctcctcctcctcgcccccctcgtctccgccgtccccactccaagaagcctgcgcctggggggccagcagcagcacccgccggctctgaagctcacttcttctcaggaggcggcgatcgcggcggcgatgaacatgggcaggccgacggcgagggtggccgtggaggtgaacgactaccaaccgtccggccccaacaaccgccacgacccacccaagggcccctgaagagcttgttgaacggcgctcggctggacgacccaataatgcttctccttcgttgttgtcatctttaccagcagtatagagtgctttgctagtgctcttgtattctaccccaccagtagagattaaggatttaaggtagacacaaagttacctagttatatttgtacactggccgataggaacttggaagcacatcggtagtttgtgttgttcttaggttgccgttcgtcagaactgcatgcagatcgatttcatctcctgctgcagctgcaggtgtcgatacagcacctgcagcagatcgagattgttcagcttaatt

SEQ ID NO: 18820 - DNA, 556 bp, Zea mays
  Clone ID: LIB3115-028-G12_FLI
gggcacacacgcagatccgagctaaccaccatcgacgagcgccagccgccagcagccgagccggagcgaccttttcttttttcttttacacagcgggacggagaaaggagtcaatcagccaaagccacccaccgcttttacccaccgatcggcgttgccgccgctagcattgtcggcttcagctccatccaaatccaccgccagcaagcaagcaagcaagccggcgccatgggtctgccgatgaggagggagagggacgcggaggcggagctgaacctgccgccggggttccggttccaccccaccgacgacgagctggtggagcactacctgtgccgcaaggcggcggggcagcgcctccccgtgcccatcatcgccgaggtggacctgtacaggttcgacccctgggacctgccggagcgcgcgctcttcggggcccgcgagtggtacttcttcacgcccagggaccgcaagtaccccaacggctcccgccccaaccgcgccgccggcaacgggtactggaaggccaccggcgccgacaagcccgtcgtgccgc

SEQ ID NO: 18821 - DNA, 671 bp, Zea mays
  Clone ID: LIB3115-029-D2_FLI
gcttttccggtcttcccgaccgagcgatccagccagcgagaggttgcgagaagtagccgccggaggagcacgccaaggccgccgcctacgaggacggccatggggttctgggtgaccacgctcatctttctcctcgccggcgtcgccgcatccctcttcacgctcctctgctgcaaccgcgggccctccacaaacctattccatttgaccttggtgactacagctgtaatttgttgttggatgatgtatgctatcgtttaccttgctcagatgaagccattgatcaaccccatcctgagcggggagtgatctctcctctgcattaaaaagaatgaaagctagatctgctgtaccattattcaatctgtgaacttcctattcatttggccccacctgatgaaataaataaactgccatgagtttttttttttttgctactccttcactgcagacattgagaaggttcgctgtgattagtgtatgcaattgtatgatatacgcaataataatagtatctaaatatctgtgtgccgctcattggaatgtctgggtgcgtgtacccaactttgttcgtcacgactcaggtgtttgtctgcttgtaatggaattatgaacgtaaaacaatgtagcacaattttctgctttcagtgggtgttttgacttttgagctt

SEQ ID NO: 18822 - DNA, 568 bp, Zea mays
  Clone ID: LIB3115-029-E11_FLI
gcggacacagcaaccaacaagtcgtccaacgtccaggcttttctgctttgtttctctctcacgcaagtcgcaaagcaaagcgtcccccaccatggcttccacgacgacgacggcatccaacaacctggcgggcgtgtggctcggcgagctctcgtcggcgctgcatgggacgtggcaggcggtggccgtggccgccacccacgggctcggcgaggacgacgacccgcggctgccgtgccagcagcagcagaggccgtggcgaggcgacgacaggagcagcagcaacaacaaggcgttgcgaggagccgcggcggccgggacggacaggcgggagggggacgtcgcgaggtgcggcggcgccatgtccgacaccacgctctacctcctcctcgaccggttcgcgcccagctgagcgggccccttgctcacccgccgctgccgccgccgccgccgcgatcgatcggcgcgtgctgtactgtacaggcggaataactgcacgtctgcacgccatggtttctgtaaataaatgctgtatataaactgcaatggcatcttgtgttgctttctg

SEQ ID NO: 18823 - DNA, 1828 bp, Zea mays
  Clone ID: LIB3115-029-F11_FLI
aggcaaggcaaggcaaggcaaggcaacgcgccgtcatctcattctccctcgcaccgacgaggtcaggtcagagaccttcgagtactactagtcatggcccgcatctagaaggcagcaagaaagggggcggatggggcgcgcgttcgtgtacgtgatcctgggcggcggcgtggccgcgggctacgccgcgctcgagttcgcccgccgcggtgggtactcccgcggagagctctgcatcatctccgaagaggccgttgctccttatgaacgtcctgcactaagcaaaggctatttactcccagaaggtgctgctcgtcttccaggatttcatacttgtgttggtgctaatgatgagttactgacaccgaaatggtacaaagaacaaggcattgaacttgttcttggaacaaaagtgatttctgctgatgtgaggcgcaagacattgcttacaggcactggtgaaactatcagctacaaaactctaattattgcgacaggtgctcgggctttgaagctgcaagaatttggaatacaaggttcagatgcttcaaacatatgttatttgcgcaacatcgatgacgcggataagttggtgagtgtgatgaaatcatgtcctggtggaaatgctgttgtcattggtggtggctacattggaatggagtgtgcagcggcattggttactaacaagattagggtcaccatggtcttccctgagaaacactgcatgggtcgtctatttacaccaaaaattgcagaattttatgaaaactactacacctcgaaaggggtcacctttgttaaaggaactgtgcttacatcctttgaaaaagatacgacggggaaggtgactgcagtaatactcaaagatggtaggcaccttcctgctgatatggtagtagttggtattggcatccgtgcaaacactagcctttttgaaggtcaactgatgatgtcaacagagaatggtgggataaaggtaaatggacagctgcagacaagcgacagctctgtgtatgccgttggcgatgtggccgcgttccccatcaagctttttgacgatgatatccgacggctcgagcatgtggactcagctcgtagaactggtagacatgctgttgcctccatcttggatccttcaaagacgagggacatcgattacctgccgttcttctactccagagtgttcacgttgtcctggcaattctatggggataatgtcggggaagtggtccactttggagacttcacaagcagcagtccgaggttcggtgcatattgggtcaacaaagggcggatcgcgggtgcgtttcttgaaggcggaagtcgggaagagtacgaggccatatcgatcgctgttcggcgggaagctgtggtcacagacatgggtgaactcgagaaacaaggcctggcactcgccattcaggagagccagaaggaggtgcctgacagtgggcttgctgttgtcggaaaacctacttatgcgtggcatgccacagccggtgtcattgcagctgtgtcgattgctgcaattgggtattggtatggcaggaagcgccgcaggtggtgaggatttgcattggggtgattccctttggtctgccgggccgaactgctgctggtggaatatctgggacgagtgctattggctgttaatccaatcatagttgtatagcttgtatgagagtatagtctgtcgcaaacgtatactgaaacacagatgcctcgtgtattatctagtgaagaaaccagtggctgcctctaactcctcaggggttctcttgttgtaaaattgcaactcttttcttaatgagatccgcaattttgtggc

SEQ ID NO: 18824 - DNA, 894 bp, Zea mays
  Clone ID: LIB3115-029-F7_FLI
ggctggcagggttcggcgagcaggagcgctacttcttcacgtgcaaggaggccaagtacgtgaagggccggcgcgcgaaccgcgccacgggggccgggtactggaaggcgacgggcaaggagaagccggtggccgtggcggtccggggcgtgcaggggcagagccagagccagagccaggccgtgctggtgggcatgaagcgctcgctggtgttctaccgcggcaagccgccgacgggaagcaagacggagtgggtgatgcacgagtaccggctggcgggcgccgggctcgcgccgtgccgccgccgccacgccgacgccgacggagacggcgtggcgcgggcgccggccgagggctgggtgctgtgccgcgtgttccggaagaagggctccgccgccgtcgcgaggcggcccggcgaccgcagcgacggcgagggcgacgagagcgcgtgcggcggcggaggaggcggcgggcgcgggttcatcgacttcttcgcgcgcgcggacgccgccgggcgaaggcgccgcgctccgtcgcccgccgtgtcgagccggtggcttgcggacgcgtcgccccagccggagcaggaggccaccagcagaggcccgtgacgagacaagggccggccggctggctggcgtgaagcgatcaagcaaggtagagagagagagagagagggaagcttttgttgcattggcagtacctaatgaggggagggtccagtacagtaggtaggagcaaagtgaattcgttttagcaacgtgagagagagaggcccgatagtcagtgcagtatcagttgttgagcgtagatggtgaaactaatgtagcagctcagttgtactcctcccaaccacctgatgaatcctacacaattgtagagtgtggctgcagc

SEQ ID NO: 18825 - DNA, 425 bp, Zea mays
  Clone ID: LIB3115-030-A4_FLI
tgttgatttcattgaccaggaactgtcacggttcattgcagctgggaagctgcactgcaagattgataaggttgctggtgttctggagactaaccgacctgatgagaggaatgctttctaccaggccaccatcaagcaaggggacttcttgctgaaccgcatccagaagctttcacgggtcattgatctttaaggactgtctgtgttggagctcttcctgcaatcggcgcctgcaaatgtttcccaccctacggcttccacaagacatgaccatttctctcgagcggggaacaagtcttaagaacatctgtgttttaagtgcagaatatttgtgttttaatcagtaaacgctgtcctgtcatttcaagtttcctatctgtggctctgtctgtgattttcttacttaagttgctagcttgacaatc

SEQ ID NO: 18826 - DNA, 577 bp, Zea mays
  Clone ID: LIB3115-030-C5_FLI
gcacaagagaaagctcaaggaggagtatggaatcgagccatggacctttgtgcaaagacttggagatgcggttttcatacctgctgggtgtcctcatcaagtacggaatctaaagtcttgcaccaagatagctctggattttgtatcaccagagaacattcagcaatgtctcagcttaaccgaggatttccggagacttccagtgggccacagggcaaaagaagataaactagaggtgaagaagatgatcgtctatgccgttgagcatgctttggcgattctgaaagagccttgcacaccccgcgagtccgcctgaacaagctggcatcatatctgggtttctgctagtcaacgagggaaactagagaacatgatgcgatgttgtgcgacagtagacgtggggtagcgctagttgctttgcttgtcggcacaaataataatcttggaaatattactaataagggctcggttaggaagggattggaggagattaatttttttttattttaactgaatagaaagagatttgatgagatccctatacaatcgaaaaaggcctaaaatggtagattttgct

SEQ ID NO: 18827 - DNA, 488 bp, Zea mays
  Clone ID: LIB3115-030-C7_FLI
aaggagcaactgaggatatagtgaagtttctggcagcgggtgtggaagtcaacatgagagatactgaaggtagaactccgctgcactgggctgttgaccgtggccatcttagtgctgttgaggttcttgcaaaagcaaatgcggacctgaatgccaaggacaacgaagggcaaacggcactccactacgctgctgtttgtgaaagagaagacatcgcagaattgctcgtgaagcatcatgccgaccttcagatcaaggatgaggatgggaacacggcacaggacctgtgccctccgagctggtcttttatgaaccgggcgaactgacaaccaacatgctaccttacattagctgtactctaagctggtaccgcacttggtcaatgtgttttttatttatgggggacatatggtgtgccctgtgtgaagtgccgtgcgtggcgcccgctatgacgattgggaaatcagatgagctgttttattttatcc

SEQ ID NO: 18828 - DNA, 985 bp, Zea mays
  Clone ID: LIB3115-030-F10_FLI
cccgttcggaacgccaagcccccctccggcgaaatggcccccaagcgaggtggcagggcgccggtgccggccaagaagaagacggataaagtgacgaaccctctattcgagaagaggccgaagcagttcggcatcggcggggcgttgccgcccaagaaggacctgcaccggttcgtcaagtggcccaaggtcgtgcgtatccagcgacagcgccgcatcctcaagcagcgcctcaaggtaccaccggcgctcaaccagttcacccgcaccctcgacaagaacctcgctacgaacctgtttaagatgcttctcaagtaccggcctgaagacaaggctgccaagaaggagaggcttctgaagagggcccaagctgagaatgaaggaaaaactgttgagtcgaagaaaccaattgttgtgaagtatggccttaaccatgtgacttacctcatcgagcagaacaaggctcagcttgttgtcatcgctcacgacgtggatccgattgaactggttgtgtggcttccagccctgtgcaggaagatggaggtcccttactgcattgttaaaggaaaggctcgccttggatcgattgttcacaagaagaatgcatcagtcttgtgtctgaccactgtcaagaacgaggataagcttgagttcagcaagatcctggaggctattaaggcaaacttcaacgacaagttcgatgaggtcaggaagaagtggggaggtggcatcatgggatccaagtcgcaggccaagaccaaggcccgggagaagctgctcgccaaggaggctgcgcagcggatgacctagattgtctactgctgtgtctgccctgtagtttgacggggacgaactgatgaacgcgtattgtggttttccgaatctagtttcatatgttgctgtccaccagaccatgtttagaagctttgcaagacagagtttacagtgtttatgtgatgcctcagatccatgcagctttgcttct

SEQ ID NO: 18829 - DNA, 1194 bp, Zea mays
  Clone ID: LIB3115-031-A12_FLI
tacactgatgactggtcgagagagccagctgatcgatcgagttacccttagttattagacagacatggcttcgttccggaccagctggcattgcttgctcgccgcctgcctgttcctgctcgcttcggcggcgcacgggcagcagctctcgtcgtccttctacgcggcgacatgcccgacgctggagctcatcgtgcggaccaccatgctcacggcgctcctcgccgagcgtcggatgggcgcgtccctcgtcaggctcttcttccacgactgctttgtccaaggctgcgacggctccattcttctggacgacgtcggcagcttcgtcggcgagaagggcgccggccccaacgtcaactctctccgcggcttcgacgtgatcgaccagatcaaggccaacgtcgagctcatctgccccggcgttgtctcctgcgccgacattgtcgccctcgccgcgcgagacggcaccttcttgctcggaggaccaagttgggcggtgccgctgggccggcgcgactcgaccacggcgagcctggccctggccaacagcgacctgccgtcgccggtctccggcctcgccgctctcctcgcagcgttcggcaacaagggcctgggccccggggacctgacggcgctctcgggcgcgcacaccatcggcttctcgcagtgccagaacttccgcgcccacatctacaacgacaccgacatcgacccggcgttcgccagcctgcgccagcgcacctgccccgccgcgccgggcaccggggacagcagcctggcgccgctcgacgtgcagacgcagctcgtcttcgacaacgcctactaccgcaacctgctggccaagcgcggcctgctgcgctccgaccaggcgctcttcaacggcggctcccaggacgcgctggtgcgccagtacagtgccaacccggccctcttcgcctcagacttcgccaacgccatgataaagatgggcaacatcagcccgctcaccggaaccgcgggccagatcagggcaaactgtagggtggtcaacagcagctgaaacgtgacatatagcaccatcagtattgagtgcgaacgtactactggggggtgtataaatatgtaacaagcacatccaaagatactgtttgctacttcggttgttccagggattacattttcgttttgcaattttgggaaaccgttttgttgacc

SEQ ID NO: 18830 - DNA, 1248 bp, Zea mays
  Clone ID: LIB3115-031-G5_FLI
gtttaagtaaggaaaaacactcaacccaagaggagagacatccagaaggcagtgcatggaaggcctagaaaagttacccagaagtcagctcttacctgtatgggcactgctgtcagcatgtcagagtccttatcttaacccatacctttggggaacatagcggggcctttttttgtgcaagaaccatgtatcgggcctttgttagtagcgtcacaactgcaggacttaccaccatgctacaaacatgttctcttggttctggacaacatgatactaaagttctagaggcactaaaagattcgtcctcgtcaaggccagcaatttttgcaatgtccaatccaactaagaatgctgagtgtacacctggggaagcattttcaattctaggtgaaaaggtcatctttgctagtgggagcccatttcatgatgtggatcttggtgatgggaagattggccattccaatcaagggaacaacatgtacctctttcctggaatagggcttggaacccttctgtctggtgctcgggttatctctgatggaatgctgcaggctgcagctgaacggtgactcccttgatctcttgccattaaaccttgtaacacaaaaacacaatcgggctattacttacatctttaactgtaaaatttactgtgtaactttttatgtagtttggcttcatacatgaaagaggaggaggttctcgaagggataatttatcctccaatttccagaatacgtgacatcactaaggaggtggcagcagcagttgtgagggaggcagtagcagaggatctagctgagggataccgtgacatggatgcacgtgagcttgcacgactcagtgaggaagaaactaatgaatatgtcaagacgaacatgtggagtcctgtctatccaacaataatatacaagaaggactagatagctctatttgctattttgcatatgttcaatgatcatgtatgatatactttaggctgcgttctggaaggcactccagaagtgtaggcacgttagttataagaaaacagccttcattgttcattgaccttacttttaattgaatttagtacacgagacaccttaggccacagttcctgacgtactccatggtgctgaaacatttcccatctcaaatatcatcaactgtaccactactggaactgtagtccaatccctctcagatgttaaaatcctgtgtgtaactttgaacacagaccaaataacaaagccagaaatttgccag

SEQ ID NO: 18831 - DNA, 771 bp, Zea mays
  Clone ID: LIB3115-031-G7_FLI
atcggctcagaaacgcaggcagcccagcccacgccgcgaggaagcctgaggccgagagaggactgagcaagcgtcccgcgagaaactggtgttccggaccaccacgcggatgggctcgggcgacccggcggccgaccccctttcttccttcctccgccaccccggcgcgttctccttctcccgtcgcgtcgccatggcgcgcgacgccaccgccacatccgtgccagcgctccgcccctggatcgttgacctcctcccgctcctcgtcgtcctcctcatcgccgcccacgtcctcgccctcggttactggatctacaggctcgccacggacgggtccaggcagcccgcgcggagcaagaagcactaaggggacggcgcccgcggccggatgcttgaaaccagtttgttatttcagtcctgcatccttggcttgttgatctccaaccttccaacgtcagatgatggcgtggaaagttcctgaaagaactaggacagggaaccgatcttatccaatggtttgttcagatgttggtgtcaaaagtgacgatagctgaatagctgatatgtggaaggaggcccttttgagcataaatagttttcggttgctggataggtttgacatctctcgacctctccgtgtaaagaacagtagctagacagatgtgccgtttcatatgttgtggcctggtgggcttttgtaattcatgagcagcattttattactgggcaattaagttaacgaggcatactataatgttatgagagagagct

SEQ ID NO: 18832 - DNA, 827 bp, Zea mays
  Clone ID: LIB3115-031-H5_FLI
gactagttctagggcggtcgaatccgccagcgcatccgctgagcaccgccagccccgcacgcggaggtcggagggctacgctccggagtccgaggggaaggcagaggaggcaagcaggcaggatgggtgccgctggtgacgccgcggcagcgggcacgcggtgcgagctctgcgggggcgcggcggccgtgcactgcgccgcggactcggcgttcctctgcccgcgctgcgacgccaaggtgcacggcgccaacttcctggcgtccaggcacgtgaggcgccgcctgccgcgcgggggcgccgactccggggcgtccgcgtccagcggctcctgcctgtccacggccgactccgtgcagtcgagggcggcgccgccgccagggagaggcagagggaggagggcgccgccgcgcgcggaggcggtgctggaggggtgggccaggaggaagggggtcgcggcggggcccgcgtgccgtcgtcgcgtcccgctccgcgtcgcgatggccgccgcgcgctggtcggaggtcagcgccggcggtggagcggaggctgcggtgctcgcagttgcggcgtggtggatgacgcgcgcggcgagagcgagacccccggcggcgggcgctccggacctggaggagggatgggccgagtgctctcctgaattcgtggtccggcagggcccacatccgtctgcaacaacatgtgggcgacgttagtttgtccttttcctccctaattattttagtaattaacgagatcgatcgtgtggtggtggtgtcgttggcttcctctcgtcgtccgattaacaaaagccggttcgatttgattac

SEQ ID NO: 18833 - DNA, 634 bp, Zea mays
  Clone ID: LIB3115-032-B4_FLI
gggctcacgcagcgtgcttcccttcagaaactcgatggcctgccacctcgccatcgccggcgccaccgccgccgccgcccgcgctcctcgtatctccgtgctcgccgccgcctctgcttcctccgcaggggaacccgcgcgccgcatcatccgccgccgcgcgccgccgggtcagcagggctctgccacagcggcccccgcgcctcccgcccagccgtccgtggcggaggtgcgccgcgccatcggcgtctccgacgacgctgcgtcggccgccgcatccatggagaagaagaacaccgcgttcatggacctcatctctaccacgcccatcggccagccggagagcgagcccgagcgccgcctccgcgaggccgccgagtgggtagtcgacaccactgagacgcgcgcttgcgaaggacagaagtctttcttagtgctatgcatgatgacatttcctgcttggttcttgctcctgtttcttgcccttggactctttaagttaccatttgatattccggttctggataatctcctaatgtaaggtgttagctattatcatttttcccttttattttccaaatatacgagcttcacacactgaatatgaaaagaaatatatgccactactgaagtc

SEQ ID NO: 18834 - DNA, 750 bp, Zea mays
  Clone ID: LIB3115-032-C5_FLI
gcgccgacgaatccgacgtccctgacgcacagcgacgtcgtcggcacattcgggtacctggcgccggagtacttcatgtacgggaaggtgaccgacagggtggacgtgtacgcgttgggcgtcgtcctgctggagctcctgtccggccggaagtccatcagcagcgacgggtcgtcacccaagggccaggagagtctcgtcatgtgggcaactccggtgcttagcagcggcaacatctgtgacctgctggacccgaggctggacgtgaagcacgacgaggtggaggtcaggcggatggcctctgccgcgtcgctctgcctccggaggtcggctcgactcaggccgccgatatcgcagatactgagcatactacgaggagaaagcgcggcgagcatcgccgaccagggcgcgacggagccggactgcgtggacgacgaggcctaccccgccgcgaacgtgaggtcgcacctgggcctcgcgcttctcgacgtggaggactcggagtccatctccagcacggagcacagcagcggcctcagcccgttggaggagtacctgcgagaacgttggagccgatcgtctagcttcgactgatgattcatgcccgcgctgcgattttgtttgtgggcatgtgttttcgttttttttcccctctccgccggtaattcacatgtttattgtatggtttggttaccggggccgtgtgtacagtggacagtcaaaaatcaccagagccacatcttcggcgac

SEQ ID NO: 18835 - DNA, 448 bp, Zea mays
  Clone ID: LIB3115-032-D8_FLI
agagaatgctggcctcatgaaaaggtgctgccttagctgccagcctcatgaaaaggtgcaataagtaacttggatgattatacaccactgcccagatgatctcttagtagtgttaaggggcgcatcacgacatcacgtagctacttcaaaaggaggaggatatgtaagcttcataggagatgatcgcatgcaaaccagtgtatgtatatggagtatatcgatctaatgctttagggctcgttcgttggcggttccagctaaattttgtattaacattgattagctagaacagtttctagcctcagcccaagctaaatttgaagtgaagactttaggtaaaacagaaatgcaactataacacaactgggttaattttacattcgctcggatgctgagatgtccaattttcaatagtgatgtaagtaaagagcaccgataatctttttcc

SEQ ID NO: 18836 - DNA, 439 bp, Zea mays
  Clone ID: LIB3115-032-F11_FLI
cgaagcggaaaagaagatcaaaaaatcggggagaaaccagaactggagagaagaaaataaataaatttatggccaaaccctagccgagacccgccccgcttgcgctctccgccgagcgccccaccccctctccgtccgcgatgcgccgggcgaagccgccgccgcagcagccctcgccgtcgccggagattcggtaccgcggcgtgcggaggcggccgtcggggcgctacgccgccgagatccgggacccggccaagaagaccccgatctggctcggcacctacgactgcgccgaggccgccgcgcacgcctacgacgccgctgcccgatctctccgcgggcccaccgcccgcaccaacttccccagcgctgcggtccgtgcgccgcggcacagggctccctccgcctccgccgcagctcccacggcgccggcggccgc

SEQ ID NO: 18837 - DNA, 365 bp, Zea mays
  Clone ID: LIB3115-032-H10_FLI
cgtagtctctgaagcagctccggcgctgaagtgcgagggcgccatctgtttcttcctctcgtccctgatcatggccgggttctgcgtcgtcgcgttcggcttgagcttgatcctggtctatcggacgaaggtcgtgtacgcaggtctgtatgggaagccgcgtacttgaaagatctaaaccctcaagggccagatggcgtggatgtacaggcagtgttgtgtcttcccttcgttctgcacaagttctttgagagtagaacatgctgctgaatgctgatgcacctgagccatagaaggtgcagatgggaggttcattgtaaagtttacaacgaacgaagtatacggaggtcgaaagttcgcggtgg

SEQ ID NO: 18838 - DNA, 327 bp, Zea mays
  Clone ID: LIB3115-032-H7_FLI
gggatccagtttaggccttgttcgtttacatcggattgtacccggaatcattccggctaatcaaagtttatataaattagagaagcaatccggctcggaatcgttccgacccaccaatccgacacaaacgaacaaggccttatgtgacacagtcgttctcttcatctgttgaagtgccagcctgagtgaccgaatcaggacggctatgtaacaaccacttgtataatttttagcactattttagatttatatttgctgaggaaagttaaattaatatttacgaagttttaagtttaagtttaaagagttttagttaagtttttctat

SEQ ID NO: 18839 - DNA, 634 bp, Zea mays
  Clone ID: LIB3115-034-G7_FLI
gtgggccgtactaatcgaccaggtcgccatccggaacattcattcaaaatgggtcgtcttcacagcaacggaaagggcatatcagcctccgccatcccctactcccgcagcgctcctgcgtggttgaagaccactcccgagcaggttgtcgaccagatctgcaagctcgcgaagaagggtgctacaccatctcagattggtgagatcctccgtgacagccacggtgtcgcccaggtcaaggtcatcactggcaacaagatcctccgaatcctcaagtccaacggccttagccccgatatcccagaggacctctacatgctcatcaagaaggccgttgccgtccgcaagcacctccagaccaaccgcaaggacaaggacagcaagttccgcctcattctcatcgagtcccgtatccaccgtctctcccgttactacaagaccgttggtgccctcccccctacctggaggtacgagagcgccaccgcctctaccctcgtcgcataagcagatgtaggattggcgtgtgtggtagtcttcatgatagacgtttaagtggagtttcacaggcatggatgctttgcggatacctaacaggatcacgatatggaatgaatcaatcaaaagcatcacctcg

SEQ ID NO: 18840 - DNA, 769 bp, Zea mays
  Clone ID: LIB3115-036-E3_FLI
cgtcgacagcaacacctgctttcgctacgacgggagcaccagaggctaggcttgcttcatcagtgacagggagccaagatgccggccggagggttctcggtctcggcgccgtccggcgtcgagttcgaggctaagatcacgccgatcgtcatcatctcctgcatcatggctgccacaggcggtttgatgttcggctacgacgtcggcatctcaggtggtgtgacgtcgatggacgacttcctgggcaagttcttcccggcggtgctgcggaagaaactggaggacaaggagagtaactactgcaagtacgataaccagccgctgcagctgttcacgtcgtcgctgtacctcgcggggctgacggccaccttcttcgcctcgtacacgacgcggcgcctcggccggcgcctcaccatgctggtcgccggcgtcttcttcatcgtgggggtgatcttcaacggcgccgcccagaacctcgccatgctcatcgtcggcaggatcttgctcggctgcggcgtcggcttcgccaaccaggccgttcccctgttcctgtctgagatcgcgccgacgaggatccgcggcgggctcaacatcctgttccagctcaacgtcaccatcggcatcctgttcgccaacctcgtcaactacggcacgtccaagatccacccgtgggggtggaggctgtcgctgtcgctggcaggcatcccggcggcgctgctcaccctgggcgcgctcttcgtgacggacacgcccaacagcctcatcgagc

SEQ ID NO: 18841 - DNA, 769 bp, Zea mays
  Clone ID: LIB3115-036-E4_FLI
gaggaaagcaaactgagactacaacaatggggttacaggttcttggtgcggagcataatgccagttcacaccggaaatgtcgaatcacaaccggaaaaaaagaagagtgatcctgccggggagcaaccaacgcggcggagggagatggaacaagcaaaggagcacacgctaaaaaaaatccagatctccttgctctttcgtttccccctccttcaccaacagcgggagcagctacagacaaatctaccatatgtacacagagacggccagacagagaccgggctacggcggcggcgcagcccaccggcgagctggccgcgcgcgcacccccctaggaggagcgtgcgaggcgcgacgcgatggcggagtggtacatggcgtcgtggaaggactccgtctgcgccatccgcgcccgcagctcccgggccttctcctccgtcatcacccccacgaactgcctccgcggcgcctcatcctgcgccggcgccggggcctccaggtagtcggccttccccgaccaccccagcagcggcgcccaccacttggctccctccgccgaccccgcgacagcgtggaccgccccggtgcccgcggcggcgcggggcccggccgtggacgccgccgggcgggcggggaacgagacgacgcatgctgcggacggtgccatcgccattggattggatctgtttggtcgcgccctctctttgccttgcagggttgcttttcgactttcgagtgctttggtggttgactgcgttgtggtttaagc

SEQ ID NO: 18842 - DNA, 1212 bp, Zea mays
  Clone ID: LIB3115-038-B4_FLI
ggagaggggaagggctagagagagaaacaaaggtggtagtagatgtgagccaccctctttgtatccctcgtcaacttctcctaccaacttctttttcctcccccaccccttccttaccgtctcgcgcccgctccgcagcctcgcaccacccgccgccgccggccgaccggccggcaccgccggtggcatttgaagtatggttagcttgaggcgacgccgactattgggtctttgttctgggaaagactcattgccagttgatcttcctaagccgattgaaaatgaaaaaactgtggaagttgcacactccaatgtgaagccattcagtgtgcatccactacccttggcaaagacttctgatgtgctcataaaatcctcaaatggttctgatgattcaaaggaagagaaaacccagtactatccaggcaaggaaatcaagtgcagaaaacggcatagaagaaagcagtatgtggatcaagagccatgcattatgaggggggtttatttcaaaaatatgaaatggcaggctgccataaaagttgacaagaaacagattcacttgggtactgttgggacacaggacgaagcagcccggctttatgatagggctgcttttatgtgtggaagggagccaaacttcgtgctttctgaggaagagaagcaggagctacggaggtacacctgggaggacttcttagcagtgactcgcaacacgataaccagcaaaaaacaaaggaaagtcggatcactaaggcgtagcaaggcagacctgttcatgggacagagtgacggcgacaccgagatggccaatggtggcggttcatcgaattccgacaatggcgacgcggggacgtcggcgtcatagatcgctcccaggggttctgccgttgtggcaactcaaagtggagtcctccagcacattcatcccggtcatgcatgatacgagctccgtctaggattttgttctctcaataattaatttccatgtgcataaggccccgttggtctaatcaaatcaaaggttagggaaaccatgccatctcagacgagaattagaggtggtccattgttagaaaacagttcatctgaatagtaatgtataccggttctgaaaactgtgtatatctaccgataggttcaccttacattttgcccagtgtaattagtttaccttataatttaccaaaaaggaataatttttccctttccgtt

SEQ ID NO: 18843 - DNA, 714 bp, Zea mays
  Clone ID: LIB3115-038-D1_FLI
gtagagaaagccatagcaagcaaaagcacaggagcgcaagagcccaacaggcgccaagaaagcaccgcccggccggtccgcgccagtatggtgacggcgatcgcggtggcgtcggcggggctcgggatgctggcgggcgtcgcgatggccaacaggtcttcgccgccgtccgcgggcgccgcgctgtggaggcccggcgggggccccgcgctgcgctggggcggaggcgccccgcgctgcgaggcgtgcggggggtcgggcaaggaggactgccgcctctgcgcgcgctggtccgacgccggcgcccgcgggaagaagattagccgctccgggtgcggcgcgtgcgccggcacgcgccggacgccgtgccggtgctgcggcgggtccggcaccggccggcgcgcgcccgtgcggatcgccacgtccgcgcgcaccgcaccgactggcaggtgatgaccacctgaccgtccgtcgcgccgacgccgacgccgacgccgatgcctcgtctcttcgcctctcctggacccgccggttctcccggatcatggatgaaggcggctctgtgcggcgcgcgggcgacctgctggcacaagggaatgacggcgcggagctcttgctctcttttttggacgaaaaaagatcagagattgagattgtagtagtatttgttagctagcgcgctggattgattagcaaaaattattgaaacgcgct

SEQ ID NO: 18844 - DNA, 731 bp, Zea mays
  Clone ID: LIB3115-038-H1_FLI
ccgacatcgtcccttcgtccccacgagcaaccgataatccgccggcgttgagatgttggtttatcaggatctcctatctggcgacgagctcctgtcggattcattcacctacaaggagctcgagaacggcgtcctgtgggaggtcgagggaaagtgggtcacccaaggtcctgttgatgtggacattggtgccaatccatccgccgagggtggtgaggacgaaagcgttgatgacacagctgtgaaggtggttgatattgttgacacattccgtctacaggagcaacctccttttgacaagaaatcatttgtgtcttacatcaaaaaatacatcaagaatctcactgctgtgttggagccagagaaagcggatgagttcaaaaagggtgtcgagggtgcaaccaagtttctccttagcaagctgaaggacctccaattttttgttggtgagtccatgaaggatgatgcgtctgtggtattcgcctattacaaggatggtgccactaatccgacattcctctatttctctcatggtcttaaggagatcaagtgctaggcgtgcggcgaaattagttacccatgttgggtactatctatgtactattattatatccaaaactatagttgtcctggctgaattgaactcaaaagggtttgtttgagaaaaaattgtcccaagattggattgcttgttaaagctcaatattgttattgaagtgttattgcttagt

SEQ ID NO: 18845 - DNA, 348 bp, Zea mays
  Clone ID: LIB3115-039-D6_FLI
ccttaccgcttcagacgatgccagtgatgatgccacagatgatgacgcctaacatgatgtcaccattgatgatgccgagcatgatgtcaccaatggtcttgccgagcatgatgtcgcaaatgatgatgccacaatgtcactgcgacgccgtctcgcagattatgctgcaacagcagttaccattcatgttcaacccaatggccatgacgattccacccatgttcttacagcaaccctttgttggtgctgcattctagatagaaatatttgtgttgtaccgaataatgagttgacatgccatcgcgtgtgactcattattaacaataaaacaagtttcctcttattatc

SEQ ID NO: 18846 - DNA, 487 bp, Zea mays
  Clone ID: LIB3116-001-B12_FLI
ttatcaagaactggaactacaccggtctggtggaagcgttccacaatggcgagggcgcgtgctacacagcaaaggttcgaacagaggaggagctgacggaggcgctggaggcagctctaggacctaagaaggactgcttatgcttcatcgaggtcatcgtgcataaggatgacaccagcaaagagcttctcgagtggggatctagggtttctgcggcgaatagccgtccacctaatcctcagtgaatacatcaggtctcccgaattgccctgtaaaccgatccgctttctggtgacgcccataacaagaagtctcggcgatgacatgctgccgatttctgaataaattgtccctgtaattcactgatgttgcaagtccttgttgtaaaactagagagccgcttggaggaatcatggacagtctaaactcgggtctgagtatatacaagctgattgagtcctagataaatacaatatggacttaaact

SEQ ID NO: 18847 - DNA, 1439 bp, Zea mays
  Clone ID: LIB3116-002-E8_FLI
ccagcccagaaaattcgcagccgccaaccacccgaccccacatggccacatccgcgaccgcgatgcccacgccgtgagcccgtgaggcgcgccgctggagccgccgcagccgttactatgacctcgccggcccccacctcctggttctccggcctctcgcgctcctcctccaccatggccggcggcgtcgcctcggcccccacccccgcctccgcctccgcctccggccccgcctccgtgttcctccccgacgcgcccaagtccgtaatcggcgccggctccggaggaggcaagcggaatcatctctgcggggcgctgttcaagtacggccccaaatctgcgcaggtagcattcaggactggggattttaaccatcaggtgatcttcattggtggcctcacagatgggcttttagctactgattacttggaaccattgtcacttgcattggaggttgagaaatggtccttggtacagccattgctttcttcatcatacactggatatggaatttccagcttacagcaagatgcgttagaactagagcaactcatcagttacctaataaataaggaaaattctgaaggagtaatattgcttggtcatagtactggatgccaggatattgtgcattatatgcgcacaaactttgcctgttcgaaagcggtttctggggtcatcttgcaggccccagtaagtgacagggagtatagagcaactcttccggaaacagctgaaatgatagacctggcagccaaactgattagcgagggtcgtggaatggatttgatgcctagaaaagcaaactcagatgctcctattactgcctacaggtaccactccctttgttcatatatgggtgatgatgacatgttcagttcagatctaagtgaagatcagctgaggcagagacttggtcatatgtcaatcacacagtgccaggttattttttcaatgggggatgaatatgtacctgaatatgttgataagagggctctactagacaggctatgtagggcgctgggaggtgcagagaaagtcgagatagaatggggaaaccatgctctgtccaacagagtgcaagaagcagttgtggccattgtagattttgtcaagagggaggggtccaaaggctgggacgacccatggagctagatacagcagttataatctcatttgtaactagtttgtgcttttcctcttctctcttttctccaattgtaacatctttcttttgcattattattggtccatttttcaatagtgatatgctatttttcttataaccccctcccccaaacatgcatcgcgttctcattctagtatggtgtatcacatatgtaaattgcgttaggaatcttgattatcaggctgtctttggtggatcatgtaaaattggagttgtgggaacaaggagctgttggagacggcatcagatc

SEQ ID NO: 18848 - DNA, 858 bp, Zea mays
  Clone ID: LIB3116-002-F10_FLI
aaaaagacaaggaaaagggaaaggagaaggagaaggaaggcagccagctgcacaaggaaaaagataaggagaagaaagacaaggagaaggaaaaggaaaaagataaagagaaggaggatcataaagataagaaagacaaggatcacaaagagaagaaagaaaagaataaagagaaggaaggcagccagctacacaaggagctcaaggcgggtgtcgccgacatggtgcacacgctcagctcttcggcaccgtcatccgggggcggccacgagcgtgctggctctgcggcggcgggaacaacaatcatcacgctggccggcgagaacaagggcacgtccatgaaggtagacagcagcgccgtagcctacggcacggcggacgcggcgggcagcaaggagcgccgcggccacaagctcgacggcagcgtcatcgtgagcgggaaggagcaagctggggccggcaaagggctgacagctttcgtcaacagcaacgtgcaggtcatcaacaactcgctgctgctgcagagctcctgccacggcggcgacctgggggtgcacctcaagctgtccaccaaggccaagaagaaggacggcaaggaagccgggggcaatagtggctctgctgctgcgccaaaaaaatgatcaaccttcatccatatcgctggcgcgctgcatgcatggctatcgagcaatgactaataattatttgttaagtatcaatcaaaacagagagttggacggacctggttagcgtcgtcgattatttatatgtacaacatggatgtgagttcgcaaaaattcgtgctgaatgatgcctgtaaaacctaacaagatgccaaaatgggctaatcaagcaacc

SEQ ID NO: 18849 - DNA, 1215 bp, Zea mays
  Clone ID: LIB3116-002-H3_FLI
tcgccgctgctcaactgcgggcgcgcgccggctgcggcggcgtcggtcgagcacctcgcggtggtttcgccgttgttgtcaccggcagtggcggcgcctaggcaggggccggtgctgtgccgcgccatgtccgagggggacctcgccgcgccgctcgtgcccaagaaggatgatggacacgggagggcgccgaggctatcggcgtccttgtcctcgtccgcctccatcttcgtcgaggaggacggcgagggcgaggaggaggaggaggacctggtcgcggtcgcggtcgcgggggccggcgtggacgtgccgctgccgctgcgtcggctgctgacgaacacggggctggacgtgtccgccgccgcggcgctggcgttcgtggagcagggcgtcggcggcagcggcgggggcgggaaggcgtgcggcagcagcggcggcaagggtggggtcggggacggcgacggtggcagcaaccgcgccgccacggacgcccactaccggcagatgatcgaggcggacccgggcaactcgctgctcctggtcaactacgccaggttcctcaaggaggtggcgggggacgcagcaagggcgcaggagtactgcgagcgcgccatcctcgccagtcccggcgacgccgaggcgctgtcgctctacgcgggcctcgtttgggagaccagccgcgacgctggccgcgccgaggactactacagccgcgccgtccaggccgcacccgacgactgctacgtcctgggctcttacgccgggttcctgtgggacgccgaggaggacgaggaagagaactccgagcccttgccacctccttcgctgttccagggggcagctcagcgtccttccatcacagcggcctcttagatgatcgtgaactcgatctagatctcaccaccgcctgtgaacgaagctgaatctggaaccctggagagtggagagtgactgggagtgggagataaccgtgcagaaacccccgacgagtgactcgcatcgccggccggctcctcgccgcttgtgaactgaatcacggtacatgtaaaactgaatctggcagagcacacacgcgcctaagcctattagcgtctatagacttcgcagggctatgtatagtagatatgtagattgagaccctgctgagcatgtacgtgcagtatgttcctagtcacttgtgtatcattactagtaatgcagtatccctcgtgaaat

SEQ ID NO: 18850 - DNA, 839 bp, Zea mays
  Clone ID: LIB3116-004-B10_FLI
cgggtccggacccagcctacctccatctggcggctggcgggcacccggagcacgaggatccggcggcgccgtggtccccggggcggcgcccgtctccgtgcccagagtgcgaggcggcggcggcggccatgcgccagccggcgttccactggtgcgtgcacgacgcggtggtctccgctgtgttccgctcccacgtgggtcccatcgagcgccctccgaagaagaccccctctccgcctccgcttctgcctctgccgccgagccctggtcgcctcctcggcatgcccgtctacgagttcatcgaccagcacctgctcttccgtcgtcgtcgcctgccccactctagcagcaactgtacgtagacaaaaacaagcgggactgctggagtggatgggattggggatgaattgtggatggacggaggttgcgtgtgggagttggtttgcgcagcgcgaggaggtagaggattttcgtttcgatagtagctagtcaccgcagcagtcgtttctcctccttggtgtgcaaggaagccatgacgtggtacctggacggacacgcttgctcgctcttgtctcggtccggcacgcggcagggcttcttcgcctggttcaccgtggcactgtagcagtagaaaaccaaatttccccccttcctttttttcctttttctttcctgtggcctgtgggttgtggtgcactggtgcgtgcctgaacaatgtggcatgggcgagtccatggcttgattcgtttcggccatatttgtggactcctcttttgtttttccttttttctgagagaagagagagagatttgtttctgttatatcgaagtggtatatgc

SEQ ID NO: 18851 - DNA, 721 bp, Zea mays
  Clone ID: LIB3116-004-C2_FLI
aagcgagaaagagatcgatcgtattcgtatccgcggaacaagcagcgaaggatcggagcctatccaatggccgagggcaagagcagctccggcggcgacctgttctccagcggcaagctggtggcgggggccgccgtgtcggtgttccagcagaagagcgtggagaacgtcgacaagcaggaggtcgccggcgcggcggccgagctcctgcacgcggcgtccgcgtacggtaagctcgacgacaagccggccgggcagtacgtcgagaaggccgaggggtacctgaaggagttcagcgcgggacacgccaccgagcaggagcagcctgcggcggcagcaggcgacgacgcggcgcccaagtcaccggcgccggaggcgcccaaggagccggcggcggtgcctgcgccggccgcggaggaaggcagcaagtcgtcggaggggttcggcctcggcgacgtcatgaagggcgccgagcagctggtgggagggaataagcagggcggcggggaggagagcgccggcggcggtgggctgtttaagatggcccagggcttcctcaagtagatattgtctggccaacgtatatacgagtacgtaattagcttcaaaataatgttcccctcgcctttatttgctgttcaagtccctgtaataaccgagaacgttaattgtagcagtgtgttttttatatgattaaataagtactatgttgtataaggct

SEQ ID NO: 18852 - DNA, 348 bp, Zea mays
  Clone ID: LIB3116-004-G11_FLI
tgctggcgctggccctgctctactcggccgtgggagccgccgcggagttcggcatcctgggcgagcgcggcaactcgcacgtccgctggcctaaggtctgcaacgtctatggccgcttctgcgagcgcgccatggcggccgtcatcgtctccctcatcgccgcattcgccaacctcgtcctcctcatgctcaacatcctcaccatccacaagagctcttcctactactaagctagctactatactgtagagaagagaaaccatatacaatgcgagctagctactcatatatagctgttgctgcatgcatgcatggggattaactaaagtgatcgaccccaacttgttg

SEQ ID NO: 18853 - DNA, 772 bp, Zea mays
  Clone ID: LIB3116-004-G8_FLI
gcacggcagaaagatggaccattcgcacatggatcacggcggccacatgggccacgacatgcctggcatgggcggcgacgggcccaagtgcaacatgaacatgttgtttacgtgggacacgaccgacctctgcattgtcttcccctcgtggcatatctcgggcaccggctcactcatcttttcgctactcgccgtagtcctgctcacagctgggtacgaagctatccgagaaatatcaaggcgctatgaggcgtactcaaagggtatcatggagggacccagagacgacgcagatgaatctagctcattacttggcccagggagaaacggaggcgttgggcgtagtgccgagcagcagatgaagatgatcaaggctgtcttgtatgctgtgcaggttttctattcgttcttcatcatgctgcttttcatgacgtacaacggttggattatgcttgctgtcgcagtgggtgcattcgtcggatacctgatgttcagccagtcttcgtccaccaagtcggtcgcctgtcactaaggggaccggcaacggaaaacatctggcatgaggctgttcagaggactggagagtagtacaaggtcaggaaggcaaacaaatggttacacagtgttttgcttgccctcggtcggagctacggatttgcatgtcctgaaatatccgggcctaggatcctgcagcgccgacgggtcggacccgctattctcgtaagcttggctttggataccccagatatagagtaaacaggcagttcgcaat

SEQ ID NO: 18854 - DNA, 386 bp, Zea mays
  Clone ID: LIB3116-005-D4_FLI
gtaaccgtggtatatcgagtgatacttaaaggaactgatggagaggcatatagagatgccacgggcacaacacagttccatgaggggcgcagggaagatgctgttgcagccgcagaggaagctgcattcagcaaagcttgcgcatggttcggttttggcctgtatctgtaccaccaggatgaatctcattacgacgaccacttccattgaggctcaatctgcaaaagagttgatcataagttgtaacatgcgttggatatgcccctagaaaacttcgtatctagaatcaatttttggtctttgcgtagtatcatactcataacacaaagaagtgaacctatgtagatgctatttgaaacctttttattaatattataattcttatt

SEQ ID NO: 18855 - DNA, 579 bp, Zea mays
  Clone ID: LIB3116-005-F1_FLI
cgcaactgcctctttgcggcggcgggaaaggggaaacactgacacgtcttctctcaggttgcgagcacggtcggaggagctagggtttcgccgcggcgagatgtcggcgtacgacgaggtggagatcgaggacatggagtggaacgcggagctgaaggcgtacacgtacccgtgcccctgcggcgacctcttccagatcacgctcgacgacctccgcctcggggaggagattgcgcgctgcccctcgtgctccctcttcctcaccgtcgtctacaacgccgaggatttcgccgactccaaggagccgacccagaagccgtccccgaccccagtcgccgtcgcctgatgtggcccgttcgaggctagatggacgaatggaatggatctcggagcaggaaaaaaggaacgagttcatgtttgacacacacaccactacgggagtatttgtttgtactactaagatgagtggatccgctgcatattttcaaagctcaggctgttaaacctattttttttatgtgggtgacatagttgtaaggtgacatggacaactcatgctatgaaaatttttgttcgtcc

SEQ ID NO: 18856 - DNA, 355 bp, Zea mays
  Clone ID: LIB3116-006-A1_FLI
gcgacgcgccgtggtggccgcgcctgtcgacgcccgcggacctggcgtcgctgctgacgacgctgctgtggctcacctcggcgcagcacgcggcgctcaacttcgggcagtacccgctgggcggctacatcccgaaccggccgccgctgatgcggcggctggtgcccgccgagggcgacccggagtacgcgcacctggtggccgacccgcaccgcttcttcctgtcggcgctgcccagcctgacgcagaccaccacgttcatgaccgtcatcgacacgctgtccacgcactccgccgacgagcagtacctcggggagcggcctgatgaggcgtggacggccgacccggcggcgtt

SEQ ID NO: 18857 - DNA, 661 bp, Zea mays
  Clone ID: LIB3116-006-A12_FLI
gatcctcccctgcgccgacgcggcggtgacggcggaggcgctgcggcggagcaaggaggtgaactaccagctggtctccaagctcaaccagctgctctccaacgtgtcgaacggcaacgtgcctccgcaggccgggcccccgctctactacaaccagtcggggcctcccgtgccgctcctctgcagcccctacagcgccgacctctccgaccggccctgcgccgtcggcgaggtcaccgccgccgacgcgcagcaggtacgtacggtacggtacggcacgaacaaagaacctgtgcgtgcgttgttggcgagatgtctgacgtcgcgtgttcgtttcggtcgcaactcgcatcgcatcgcatctgcaggtctggcagcgctacgtgtgccgcgcggcggcggggtcgggccgggaagaggtgtgctcgacggcggggcgcctgacgccggcgatgtactcgcagatggtcgccgtggccggcctcagcgacgggctgaggcggcagtcccccgccctggccgacgtggcgagctgcgtgaccgtgcggcgcgcgttccggacggtgggccagcgcggctgccccccgctgcggcgggacagccgccgggtgtaccaggcgctgctcgcggcgtcggcggccgggatgctcgccgcggccgc

SEQ ID NO: 18858 - DNA, 449 bp, Zea mays
  Clone ID: LIB3116-006-B2_FLI
aaccaattgccatcaatccaggcatccatccatccacccgccccgctgacggcggcaatggcccggctcgtgctctccgagtgctgcggcctcgcgccgctccgccgcctgcgcgccggccggggcgccattgcggcgccgtcaccccccgcgctctccgcggcgccgcgccgtcgtcccgcgtccgcgtccatccaccgcgactgggcgctccgcgtctccgcgcccacccgcctcgcctccgccgccgtcgaggaggacaagccgagcgccgcgccggggcaggaggagggcgcggcggccggcggggagttcgacccgggggcgccgccgccgttcgggctggcggagatccgcgccgccatccccaagcactgctgggtcaaggaccctggcgctccatgagctacgtgctgcgcgacgtcgccgtcgtcctgggcctcgccgca

SEQ ID NO: 18859 - DNA, 471 bp, Zea mays
  Clone ID: LIB3116-006-C3_FLI
gtggaggaaagcctgtgcgccgtggagaagcgcgggcgggtgcacgtcatcaccctcaccggcgcgggggagcaccgcctcagcccggccctgctctccgccctccgctccgcggtcgcagccgcccgccgcgcctcccccggtgcgctcgtcctggccggcgagggcaagttcttcagcaacggctacgacctcgcgtgggcgcgcgcggggccggccccggcgccggagcaccgcctctccacgatgcgcgccgcgttccgcggcctcgtcgccgacctgctcgcgctccccgtgccaacggtcgcggccgtcacgggccacgcagcgggcgctggctgcgcgctcgcgctggcgcacgacgccgtcgccatgcgcgcctcccgcgggttcctctacatgagcgaggtcgacgccgggatcaagatcgtcgattttgtcggcgagctggttcggcagaaggtccccgac

SEQ ID NO: 18860 - DNA, 564 bp, Zea mays
  Clone ID: LIB3116-006-C9_FLI
catcaacccgtcggcgttcaggcactatcttgtcatacccattgatcatataccaactgtaaatagcctccgcaaaaccaaagatgatcaccagttagtgagccacatggtgaaggtggggaaagacttcctcaatcaagatgctccaaattctgaggaacacaggtttgggttccatcagcccccatttaatagtattgatcaccttcatcttcattgcctggcactgccatttatccccagttggaggcaagtaaaatatacccctctgggacctttaggggggtttatcgcagcagaaaagctattggaaagaataaaaccagaagcagaagcatacagttagcatcaatatttttactgatacctgctatccctgcttatttgcattattttgtactcttatttatgggtcaatcacaatcagtacatttatgtgagtatttactctcttccctcttctgtaatcagctgacgcgtattgtgtattgtattcactgtttggacttctcaaagactagatctgtaatgttgaactcaatgaaactaaccactctagaagtt

SEQ ID NO: 18861 - DNA, 405 bp, Zea mays
  Clone ID: LIB3116-006-F5_FLI
tgaagatccatgttctgtctgccttgaaaatccttctgtgggagatactatccgccatttgccttgctttcacaagttccataaagagtgtattgacgagtggcttaggagaaagaaactgtgcccagtctgcaagtttgggattaactgaagtttgccgtaccagtctacagtggagttctacttggtagtggcagcgacgaggtgctgcaatttctcatacgggatgctttcctgcagagatttttttttgtctaagataaaaaaaacaatgtattgctgtgatctgcgcttttgggcatcattttgtatgcacgcacgttttcttgctatttttgttgtcgtaatccaccaattcccatgaattggttaccagcatcttgtcaatcatttatgtcgccgcat

SEQ ID NO: 18862 - DNA, 822 bp, Zea mays
  Clone ID: LIB3116-006-G5_FLI
gcttttctttccctcccgttccccgtctgcctccctctcgtcgcatcgcgcaccgcttccccagctcccccaccttccgttgcctcctcgaactcaacccccgcccccgtcgcggatcgtcatggccgccggcctcgccttccccgtcgcctcctttcaactcgcctgcgtctcctcacatccccaccccgggcaccgcatctgctgcgcgatcccgtcgtcgtcctcgcgccgcatcgtcaaatcctcgccgctccgcgcgactaccgtcctctccagggaacgacggggcacgggccgtggcgcgtccgtagtgtgcgccgtccaaggccaggacacgaccatccaagtcccagatgtgacaaagtcaacatggcaatcactcgtgatcgagagcgagcttcctgtcctggttgagttctcggcggcatggtgcgggccatgcaagatgatagaaccagttgttggcaagctctcgaaggactacgaggggaagctgaaatgctacaagctgaacacagatgagagcccggacatcgcaagccagtacggggtccggagcatccccaccacgatgatcttcaaggatggcgagaagaaggattcggttatcggggccgtgccagagagcacactggtcacatgcatcgagaaatttgtcgagagttagaatgcgtagtggatctcttgagcggtttcctttaaatcaaaaggtcatttcgagaccacttgggccatacagaacaattctataactgtctctagatgatgggattatatgattatatgtatattatatattctgttattattgtttgaaaa

SEQ ID NO: 18863 - DNA, 377 bp, Zea mays
  Clone ID: LIB3116-006-H7_FLI
caagggggccaaggggagccagctcgagaccaacaagaaggccatgagcatccagtgcaaagtgtgcatgcaaacattcatgtgtaccacgactgaagtgaagtgcagggagcacgccgaggccaagcatcccaagacagacgtgtaccagtgcttcccccatctgaagaagtgaaaggcctgaacttagcaaccagtgctggtttggccaggggcgttccttgtgttgagggtgttcattccgtgttatcttcccgtcagtcatgcgtcctgtcctatgttaacctacataagaaagtgatgtggtgtccacttctagtgaaactactgtctgctgttaaaacctggttggtttcagaacgatgattttcgtgtgc

SEQ ID NO: 18864 - DNA, 713 bp, Zea mays
  Clone ID: LIB3116-007-D2_FLI
gaaactcggttctcaacctgatctcatcttgatccacaaccctttcgtgcctcccaagggcaagctcgtcgaattctggaagatcctcgaagagatgaaagattctggagaacttacggcgtctctcggagtatcgaacttccgccctcaagatttcaaagagttgttatcggccgacatcaagtataaacccgtttgtaaccaactcgaataccacccttacgtactagaagctctcgaacccgttttcaaaatccaacaagaacatggtatcctcacggaagcttacggacctctttcccctctgttacgacacaagactggaggacctatcaagccgatcctcgagcgtatcgctcaacgactctccaaggaaaccggcaaagacgtcgacgcggctgccgctttactcctctggactcgagcgaaaggagtcgtcgccgtcactgcgagtggaaacgaaggtaggatcgcaaagttggctcaaactcaagaattaccggatttgtcgaaggaggaagttgaagagattgaacaagctggacgaaaggtttacttccgtgcttacgacgaacacatgtgtgtcgactacgaaaacaaccccaagggtcttcccgaggacctctagatagataggtagctcttccatcgagtcctctacgcctgtagatatcctctcttcgattgcaaatagatctgaaaagtacattatt

SEQ ID NO: 18865 - DNA, 654 bp, Zea mays
  Clone ID: LIB3116-007-D5_FLI
cttcctcgctccgccaccgccacgctgaaaacccacgcgctaagtgcaccccgccaggtctaccagacgctctccggagcggcacgcgcgcgccaatggcggggccttgaggtgctcgtggggtgagggagggaggacggcgctggttagtgagggcgttaagcggcggctcggcgcggcgggccgggaggatgatacggcaccagatacggaacgagtatgggctggcggatccggaggtgtacgcggccccgggggaggaggatgacccggaggcgctcctcgaaggcgtcgccatggccggcctcgtcggcgtgctccgccagctcggggatctcgccgagtgagtggcgctgcctgctctccgatccgattttgtgtttaattaaagttctgtacaggttgtgtaggtagcctgtgacttcggtggtttctatttgtgagttgcagccgattggtgctggttgcccctcgttttgtttcgggaggtgtttgtgtactgcagtgcagcgtaatttggttattgaaattttgggggcgagctcctcggcgccttattcgctcaatctgagggggggctctgttgggcgaggacctctccttcgttttgttttcaagttgcatttcgctgcaatggttcgactactcttgttg

SEQ ID NO: 18866 - DNA, 488 bp, Zea mays
  Clone ID: LIB3116-008-D11_FLI
gcgagagcgagagcgaaagcgagagcgagagcgacgagagcgactgcgaggaggcgttcctgccgcacggcggccggacgccgcagggcggcgtgcagcacagctacggctacgggggcggggcgtacaagcacggggctggcaacctcggcggcttgcgccgctaccagtcgtacgagagccgcgaggatctcggcggcggacgccgctacgagacctaccagagcaccgtccagtacaccggctccccgaccaagaaccgccacgtcctacgctacggcgcgtaggcatatatacgctctgatccagttgcattgcagcacgtgcacctacgtatattcctatgccgcgtcgtgtgactcgtgtcgtataggcaggcggcaccgctacttggtgggccttgtgtttgctggtgcagatcgaaaaatctgacaataagatgtacttaatgccaccttgatataataatgtatgaagacgaaactttg

SEQ ID NO: 18867 - DNA, 350 bp, Zea mays
  Clone ID: LIB3116-009-B10_FLI
ctccctcaccatggtcatgggcgacgacatggtcaaggtcatctcctggtacgacaacgagtggggctactcgcagagggtcgtcgacctcgctgacatctgcgccaaccagtggaagtgaagcgttgcattgtaatagcactttgtaactcctcaccctccacagggctttgggattcaccccgaaatgactcactttcggtgaaattcacccgtttcggcgaggtcgtccgaatataccggccaaatgtttccattggatttcaattattagtcaactctagagttgaaacaaacatacaagttcttcattcaataatcaatatagaagtgcatatctgtttcctctt

SEQ ID NO: 18868 - DNA, 484 bp, Zea mays
  Clone ID: LIB3116-010-A4_FLI
cctgactgaacctccgtaatagtagatggtatcgtgtacaaaggtggaagagctccaagctgatgtagcttctatggatactgaagtttctgctctgatgaagctgttcaggaaaataacagagagtgacagagcccctccacccagggatagaaatgacgatttgtctttggaatgcgagccagttcaccttgatgacacggtagacgacattgaccttgagaagatggagaaggagatgtcagcctacgtctcggctttgtctgccgcgaaggagaaccctaccgacgagttcatgagagcagtcgccgatgcaagattaagacttcaagccgttgtactctgaccaagactagagcgttgtactgtgtaaccaacaggagcaagcaaatcgatagtacatttgctaatcgatgtgttttgccggtgccccccctcagggccttttctgtgttctttctcctaccttgcaagttgcatctga

SEQ ID NO: 18869 - DNA, 906 bp, Zea mays
  Clone ID: LIB3116-010-G10_FLI
gctcagcacgatcatcgacacacacacatatcgatcgatcgtgtcacgccagcagagcacgagcacggtgctccaatccagagccatgtcgaagccagcgtcttcgtcgtcgttcctcctcctcctgctgctgtcggcgacgctgctcgccaccgtctgccgcgccgacccggacccggtgcaggacttctgcgtggccgtggcgccgggcggccacaacaacgcgtcctcctcctccagcacctacccgggcttcccgtgcaagccggcgtcgacggtggtctcggacgacttcttcttcgcggcgcacgcgggcggcgcgagcacggacaacccgatgggcgcgggcgtgacgccgggcaacgtggaggcgttcccggggctcaacacgctgggcctgtccatcaaccgcgtcgacctcgcccccggcggcgtcaacccgctgcacacccacccgcggtccgccgagctggtgcacgtggaggccggcgagatgctggtcggcttcgtcagcacggagggcaggttctactccaaggtggtgcgcgccggggagagcttcgtcatcccgcgcgggatggtccacttccagtacaacgtcggcaaaggcgccgcgcgcgccatgaccgtcttcaacagccagctgcccggcgtcgtgctcgccgcgcagaccctgttcggggccgacccggagatccccgacgacgtcctggccaagagcttccaggtggacaccgacaccatcaagctcctcaagtccaagttccagaaaggatagcgcgcgtagccgacctgctcgctagatttgcagttccttacagttttgtttcatcagtacataactaatgttgtttcgcattattaaataattttatttgatcaataataaagttgtgtgatttagcc

SEQ ID NO: 18870 - DNA, 777 bp, Zea mays
  Clone ID: LIB3116-010-H10_FLI
acgaaaagatagaccagttcagtgcatgggtggagaaacacccaaaccgcagaagccagatctgcctctcctttttcgacgagaaacacagacaccctggttggtttgtcaacaaaacagagcgcatctattgggagcaatggttcatcaatttgcaagtcatgttccccaaaagatacagcaagtcaaacagctccaaagggctgacaaacatccaaggtaattttgttaactaaagtttcacagacgtcatgaggctaccataagcatatagaatgtagcagtaacattttgtgcaatatgctcctagcaaatgccgtggaggagaccagcacaaggcgtgctgcattggaggcgtcgattaacgaagtgctgttccagatcataaagttcgccaacgagaaaaaggaccacattcctgctatccctgacaggattttcaatcacgagatcatgatcccaagctcggattctgtatttggatggaacacggacgtcattcgcagagttctgaatagcgggcacccatactcgctttaactgaagacgacatctcagtgggcgcccgtattcagtttattagcgtgctgccgccctctctggaagacggctctgttaaccatcgtggtgaaccatataatatgcttagggaaaacctagttctgtgtacataaccctgctcatctggcttgtacatactgtgttgggatcttgctcatcggtcaaacattcttaagtttgattaagtttataaagaacaatattatgattctaaat

SEQ ID NO: 18871 - DNA, 629 bp, Zea mays
  Clone ID: LIB3116-011-F10_FLI
tgtagatctcctcgcacctcgcccattcgcttcaccaagggtttaagaccggcggcgatggcggcgaagctggcgcagctgcgcacacaggtaacgcgtgcggcggagttcgcctcgaagcacggctgctcctactacaaggaggtaatggagaagaacaagcagtacgtcgttcagccccccaccgtcgagaagtgccaggagctctccaagcagctcttttacacccgcctcgcaagcctaccaggtcgctatgagtcattctggaaggagcttgattgtgtcaagcaggtatggaagaacaggaaggacctcacggtcgaggaccttggcattgcgagtttatttggagttgagctctatgcatggttctgcgtaggcgagattgtcggcagaggtttcaccttgaccggctataaggtctagatgatttccactggtcaagacctgctttataattgatactcttagctgatgcttgtcgaaacgacgacgatggtacctgccttggttcacaattttgtttctttgtaagagtttacctagtgctgaatgccagcaaagacgggcacatcgttgcaacattgcctcaataatttgctcgctcaattgttgattttggtgcatgt

SEQ ID NO: 18872 - DNA, 914 bp, Zea mays
  Clone ID: LIB3116-011-H9_FLI
gccgacgccgccacgtccccacgaaaaagaaacaaaaaagaagaagacgacagactgccagaggcatggcggccacgagctccgcctgcgcggcggtagcgctcgcgtccttcccgtccgccgcctccacctccgccccttcccgcgtctcggccagcagccaccgcggtcagcggcactccagggccgccaccgtcagatgttccagcacgtcgcccaacgtgtcccagggcgcgccggcgccggcgccgcccaagccgcaaatcgagctcgagttcgtcgggccgaagcccggtgccgacggctccttcccggtggaccgggcggaggcggccagcggcgagaagctcctccgtgacgtcatgaacgagaacaagatcgagctctacgccgcatacggcaaggtgatgaactgcggtggcggcggaagttgcggcacttgcatcgtcgagataatcgatggaaaggagctcctgaatgagaggacgaacaccgagaatcggtacctgaagaagaaaccagactcatggaggctagcttgccagactattgtaggcaacaaagagaactctggcaaggttgtcgtccaacggctgccccagtggaagagatgaccgtgcagtgcagtgcagcaccacgttggtggatgatcgatcgtccagttgtatgtgactaaaacgccatgccctgtgcattagagaagagacagaatcgcctcgtcatatcgcttgtgaccagttctatcatctatgatactagtttgcaagtgtgggcttcggtccacagtatatatgtgggatatatatctgtaaacaaaaaaacaagcttgggcttcggtccacagtgtataagctgttttcacaaatggagaccagagtactccggtcagtccggtgtatgttggtagttttctg

SEQ ID NO: 18873 - DNA, 735 bp, Zea mays
  Clone ID: LIB3116-012-B6_FLI
ctggcttctcctccccctcttaccaagtcctcctcgggttagggttccttagggttttgtggaggggcgatggcggcggctgatgtggagtaccgttgcttcgtcggcgggcttgcctgggccaccagcaacgagtcgctggagaatgccttcgcctcctacggcgagatcctcgactccaaggtcatcaccgaccgggagacggggaggtcccgcggcttcggcttcgttaccttctcctccgagaactccatgctcgacgctatcgagaacatgaacggcaaggagctcgacggccgtaacatcaccgttaaccaggcccagtcccgtggcggtggcggtggcggcggtggctacggcggcggtcgcggcggcggcggcggttatggtggcgggcgccgtgacggcggttatggcggcggtggcggctacggcggtcggcgcgaaggtggcggcggcggctacggaggcggtggcggctacggcggtcggcgcgagggtggcggtggcggctacggcggcggtggcggcggcggctggagggactgatgtgtgggcccatcctggcttcggccgagttatcttatctatctatagtatcgtgttaccgttcgcttctgtcaccgtgttagtgtccgttctacctttggattaggtgttggtaccctgttgttcgctttggttgctcccgctatgaaacgagacgagagaagaatgagcaaggtttttgttcgc

SEQ ID NO: 18874 - DNA, 642 bp, Zea mays
  Clone ID: LIB3116-012-C10_FLI
gtcctggaacaaagccagttgaaactgctgagttgctccagagtcagggagacaagctagccgaggaagggaagtaccatgaagcacttgctaaatgggaggctgctctgatcttgatgcctgataatgcgatacttcatgagcagaaagctcaggttttacttgaagtgggagatgcatggcgtgcactgacagcagcaaccagagcaacagaactggatccattttggcctgaggcttgggttacacttggtagagctcaattaaattttggggagccagattcagctatactgacttttgacaaggcgttagctatgaagcctgactacaccgacgcaaaagctgaccgtgaaactgctgctcgcctagtcaagaaacgaggacagctgcatacgtcaggtttaagtgctaacaaaagacgcttcacagttggggagtacccaaaggagggaggtgcagagggtgaagaaaaagggaaagaaacagccgagcaactccaaaagatcacccaagaaaattagctaaattaactgattttgttactgtgtaaaatagatattacaaaaaaatattacattagtgttggtcacctgctttaattcgtaaagggaaccataacaaggcaatacaattaaagat

SEQ ID NO: 18875 - DNA, 582 bp, Zea mays
  Clone ID: LIB3116-012-C2_FLI
cgagagacagagccttcttacgaggagcgcatatcgaaagtcaaagcgaagctggctgataatctcaagtagagccaccgttttcaattgttacaccaatacttggaagagaacttatggaactgtagaaggtttcttccaaaagcctatatcttggcaggtttatgacgtgcgctttttttatggcaaaattggatctgttaacatgtggagatggaaattacccggaaacatgagcttagcgtggattttaccattttgaggtgttagaaaagcgtgctgcctattttagactagatatacagactaaaacatatggagccccacatttcgggtattgtcaagttgtgcgtttcactttcaaaatagtgtaagggccttgtgttttttttcttcttctgaatttgttgtaaaatagtctagcatcccttgcaaagagggggtaatgttgttgtcacatgatggtgtgtaccaaagtgtagtaaagcatcccttgcaaagagggggtggtagtgtcctgtatgtttttttaagcaaatgtgacaaactatataagaaatgaatatttcatgtgagttatgt

SEQ ID NO: 18876 - DNA, 873 bp, Zea mays
  Clone ID: LIB3116-012-F7_FLI
cctctgcagtctgcatcaccaactattccactagtaggtctaaattagtagccaagatgacgtcagcagcatcgttccccagcagcctcttccccttcccgaccagagcaagcacgccaccgcttccgtcgtcgtcctcccgaccgtctcactcccgcccccacctccgcatccgatctccgaaacctaataatccaacggtcgcgcccgcgtcctctcggatggaggtggcccagccccaggcgagcaacgcccagggaggggcggagccggccatgaagctactgttcgtggagatgggcgtcggctacgatcagcacggccaagatatcaccgccgccgccgtgcgcgcctgcaaggacgccatcacctccaactccatccccgccttccggggcgggtccattccaggagtgaacacggaccagatgaagctgcagatcaagctcggagtgcctaggtcgacgcagcacttgctggatgctgagagagtcaaggccgtcttcccctatggcaagataatcagctttgaggtcgttgacggtggcatgatctgttcaagcggcgtgtgcctggaagcaatgggggataagaacgatgactgctacatagtcaacgctgcagtgtatgtcggctactgatgtactgtagtacctggaatggaacagtagagattggttatggttcctccgttatagaaaaaaaaaactgctacctccgtcctaaaataaaatagttgatattttttcttcatagaagccaaatattgtaaactttgactaaaaattactccctccaattttttttatttggcgttttgtagttcagttttgcactatttggcgttaaataaaaaaaggatgtaggtagtat

SEQ ID NO: 18877 - DNA, 523 bp, Zea mays
  Clone ID: LIB3116-012-F8_FLI
ggtggggaaaggttctaggagcattatgtaaatcatgaacagtagtaccactgtaccagctaggtaatagaagaaacgcccatcttataagttgtattcctgctgatgtctattaattgtgggtgacagattgccaacatgataaggtttctggtggatagctacaacaagcccgtccctgctattctggagatcccatccaaggaccatccatatgatccagcgcacgactctgtgctctctcgagtgaaatatctgttctctgcagaatcggtggcgtctgataggcgatgaaggcatccttgcgtagcagtacccttcgatgcatctattttgttatggtattgaaaagaagatggcacgtaccattgggtgcgagcgagccagcatgaataataatgagcttgcaaacaatgattggttgaactaaaccaacacaattttttttcataaatggttcgaatgatattttggtgcttgtgtttgattggttattagggaataaaatgcgattgttatgacg

SEQ ID NO: 18878 - DNA, 1312 bp, Zea mays
  Clone ID: LIB3116-012-H7_FLI
cgagatcgatctctctcaagggaccttgtttgcttgccgccacccccaccgcagttacagttatagctagggatctgagggctagctgatggacagcaggagggagtcctcggagaccttgaggaacaaatgcgcggcctgcttcaggcagtacaacaggatggagcacctggtggagcacatgaaggtctcgtaccactcggtgcacgagcccaggtgcggcgtctgcgggaagcactgccgctccttggagtcgctcagggagcatctcatcgggccgttgcccaaggtggagtgcgcgcgggtcttcggcgtccgcggctgcagcatctgcctcaacgttttcgacagcagcgccgccgtcagataccaccgtgcggcctgccagtactctcgtgctgctccgatgcccaggggcggtggcatgactggccgcgcggtcgccttggcttgcaagatggtagggggagggagcgacggctccatggacctttgtgcgagggtgtgcctcgttggagaagatgagcacgtcatcttccagacctatgtcaaacctacactccctgtcaccaactacaggtacgaagtgactgggataaggccagagtacctgagggacgcaatgccgctcaaggttgcgcagagaagaatccaggaaatcctgtgcaacggggagccactgtggaagttacgcccaaggagctatggtagggcaaaggtcctcgttggtcatggccttgaccatgaccttgagcgcctagggttagagtacccggcattcatgatcagggatactgcaaaatacccaccactaatgaagactagcaagctgagtaactccctcaagtaccttacacaagcatacctcgggtatgacatccatactggcattcaggacccctacgaggactgcgtcgcagcaatgaggctgtacatcaggatgagatcacaggctcaccagagagattacaactccggctctggcgaggcccagaacaactatccagcctggaggcagagggagctcgacaggatgagcccagaagaactcctggcactttcagcatcagactactactgctggtgcctggattactaaaccgatcggcttataaggaaaataaggcaggcgaacgttgtcggttgacatgttccgtctatggcgatcatctttagatgtacaagtagcttgcggctttgctatattgggggttaattaaagcgtataaacaaaggattctatataaatgtattgatgccttagatctgtataagaagcaatatcatgattcatgatgcatgtggaaagagg

SEQ ID NO: 18879 - DNA, 507 bp, Zea mays
  Clone ID: LIB3116-013-B9_FLI
accgcggacgcagcagaaaagaggtagaggggcggcgaccgatggcgcggcggggcacggaggcgttccctaacctgggcgcgcactgcgacaagccggactgcaaccagctcgacttcctgcccttcgactgcgacggctgcggcaaggtcttctgcgccgcgcaccggacctacggggaccacggctgcgccaaggcggcggaccagggccgcaccgtcgtcgtctgcccggactgcggcgacgccatcgagaggctggttccggggcagggcgagcgggagatcctggaggcgcacgtgcggtcgcggcgctgcgacccgggcaagaagcgcaagccccggtgccccgcgcggcggtgcagggagcagctcaccttctccaacacccaggactgcaagggctgcggccggaaggtgtgcctcaagcacaggttcccggccgaccacgactgcgccgccagcgcaccaggagctgccgcggcggcgaggagggccagcggggagt

SEQ ID NO: 18880 - DNA, 1049 bp, Zea mays
  Clone ID: LIB3116-013-E6_FLI
cctcaacccggtcaagagaaacctcctgtgccgttgttgaaggatgcttttggtgctgagaggaggaaagctaagatgctaaatttctccattgcatatgggaaaacggctcatgggcttgctcgtgattggaaggtttctgttaaggaagcaaaagatacactgaaactctggtatagcgatagaaaggaagttctggcttggcaaatgaagcagaaacagctagcacatgagaagcgtgaagtttatactttgcttgggcgatcacgccgttttccaaatatggctcatgcaacttctggccaaaggggtcacattgagcgtgctgctatcaatgctcctgtacagggcagtgcagctgatgttgctatgtgtgcaatgcttgagatagacaggaatactcgtcttaaggagcttggttggacgctactcttgcaggtgcatgatgaagtgatactggaagggccttcagagtctgcggagctggccaagtccatagttgttgagtgcatgtctaagcccttctatggcaccaatatcctgaaggtcgaccttgctgttgatgccaagtgtgcacagaattggtatgcggccaaatagacctgttaagtgtcccagaagggcgtcaattccttcggtgaaactcggtggattttgaactggtatctgctggctgctgctagtagcctagtgagctcatctccacgtggatgccatgcactgattatttcgctgttgatctggacagtgaggggtcagcactgagcagcgaaggcactgtacactattccgtattccctataggtcgggtagcttcacttcacactccctgttaggatctctcgatcattcatgcctgatgtagttggtcgtcctggatagcagtgaagactaagcatgccgtgttcataagatttatttagcatgctgatgtgttgagttgctgaccagttctgctgacgtctaacactgttgcacgcactgcaacaatgttttgatcacaagagaatgtagttgattgtgagcgttcttaatctccttatttctgc

SEQ ID NO: 18881 - DNA, 974 bp, Zea mays
  Clone ID: LIB3116-013-F12_FLI
gccgcactgcccgcgagtcctccactccgaccgcacgatggctgcgctgcgcctcgcctccttcaccctccgccccgccgctgccgcggcctccgcctcctccggcgcgaccccagccgcgtccggctccgtctccgtctccttcacccgcgcggcgcgggggctgccctccctccgcctggccccgccccgccgccgcggggacctcgccaggccccgcgccgcggccgaggccgcggcggagagctacgcgtccgcgctgtcggaggtggccgtcgagaacggcaccctcgagcagacggtctccgacctggagaagctggagaaggtcttcgcggacgaggccgtcgccgagttcttcgacaaccccaccgtcccgcgcgaggagaaggccgagctcatcgacgagatcgccaggtcgtccgagctgcagccgcacgtcgtcaacttcctcaacgtcgtcgtcgacaacttccgcgcggccatcgtgccgcagatcgtcgccgagttcgagaacgtctacaactcgctcacgggcaccgaggtcgccaccgtcacctccgtcgtgcagctcgagtcgcaggacctggcgcagatcgcgcagcacgtccagaagatgaccggcgcccagaacgtccgcatcaagacgcagctcgacccggagctcatcgccggcttcaccgtgcagtacggccgcgacggctccagcttaatcgacatgagcgtccggaagcagatcgaggagatcgcgtccgagttcgagttgcccgccgtcccgctcgaagtctgaccggcccgaggcgtcctccatcctcgcccatgagatgctttggtgcttcctgctgcctctctctccctgctcttcatgtgtaccattctctgattgaatatttgagtgaatggtgaatactgcatacctggatttcaggattcatatttgaatgaatggtggatacaccgcatacctggattcc

SEQ ID NO: 18882 - DNA, 902 bp, Zea mays
  Clone ID: LIB3116-013-F6_FLI
cggagaaccaatgggggcggcgccgtcgtccgacgactcgtcacgcgccggagacggccgggctgtggcgagcagcgctgcctctggcactggcactggcagcaacagcaaccaggcccagtcgaagcgggcgccgccgcctcacaagttccacgagatagttgcgcttgcgcaggaggcgacgacggccggcggcggcggcggcggcggcactgctgctgcagccgacctggaggatcaggcgtgcagcaccggggtctacctggctgggaaaaccaagaagtactgggtggacgagaagaccaggtgcaactgcttcgtgctgttcgctagagcgctgtccatcacttggggcgacgatcccagatactggatctggcatcccgtcagagaaaccagtgacgccgagatcgtcgaggctgcgtcgctgcagaacgtgtgctggctggaggtgcacgggaggctggagctgtcgcacctcacgccggggtgcagctacgacgtggccttccaggtgatgctcacggagccggcgtacgggtggtcggtgccggtgaacctgcggctcaggttccccgacggcacggttcaggcgcggaaggagaagctgcaggggatgcccacggagcagtggctggagctcagggccggggaggtgaaggcgccggcccagccggggggagcgggacgcagcggcgagctggagatctccctgttcgagtacgacggcgggctctggaagaaggggctcctcatcaagggcatcaagatcgtcccgaaggagagtgattattaattagtgtttgtaactttgtttcagggtgactgctcctgctcgcttttgcctgtcaggtgtgctaagaacttcgtctaagataattggaataattaatgtgtgtggc

SEQ ID NO: 18883 - DNA, 566 bp, Zea mays
  Clone ID: LIB3116-014-C11_FLI
gctaccgcgtcggcggcggcccgctcggggaagggctcgacaaggtgtaccccggcggcgccttcgacccgctgggcctcgccgacgacccggacaccgccgccgagctcaaggtgaaggagctcaagaacggccgccttgccatgttctccatgttcggcttcttcgtgcaggccatcgtcaccggcaagggccccatcgagaacctcttcgaccacgtcgccgaccccgtcgccaacaacgcctgggcatacgccacgaacttcgtccccggcaactaactgactgagcaacgccgtacatgtgtactaccatcagatccatccattcgttcgtccgtccgtcgagtgaacagtgtggtcttctctgtactctacttgttcagatcgtaggcgtgtagtagttgcaccagccggcgtatgctcatgatcgatgtgtgctcatcaatcaatgtcaatggctgcctgctgtaagcggtcgatgtaaactaagcacagacgcatgtatcgtcatcagtggatgaatcaatctatcgatggcctgtgccattcatttttgaatcgatc

SEQ ID NO: 18884 - DNA, 524 bp, Zea mays
  Clone ID: LIB3116-014-D1_FLI
gatcgagagcttcgtcatcgagcacactgctgatagttcagctagcgacgcgcaagctgagtcgcagatccagaggatacagaccttgtagaaccttaatccctttgtttgccacatagagcatcgttgagttatttgtaaaggaatggaagaagggagctaataatccgaagtgtgccgttggctgaaacatcgcctgtcttcactcctggctctgcttctgttcgcttctcatcgtggtttgataccttggtggacatctatgctgacacctcatctcaccaaacatacttgcataccgtcgtcgcccgctcgaacgaagaaacaaagtgccgtttggttcatatatttgtaatgtaatgggtaactgataatgttaaatcatatttgttttagtccaaccgtaatcagataccatactagatatcagtctatatgtaatgagtaactgataatgttaaatcatatttgttttagtccaaccgtaatcagataccatactaaaaatagatatcagtctattc

SEQ ID NO: 18885 - DNA, 832 bp, Zea mays
  Clone ID: LIB3116-014-G10_FLI
gagttgatttatccgctgcagccatgagtaagttgcagtctgagtctgtcaaggatgccatctcccagattgttggggatgccaaggagaagaataggaagttcactgagactgtggaacttcagattggtctgaagaattatgatccacagaaggacaagcgtttcagtggctctgttaagttgccccatatccctcgtcccaagatgaaggtgtgcatgcttggtgatgcccagcatgttgaggaggccgagaagatgggacttgactacatggatgttgaggctctcaagaaaatgaacaagaacaagaagcttgttaagaggcttgccaagaagtaccatgctttcttggcatcagaggccatcatcaagcagattccccgtctccttggtcctggtctcaacaaggcaggcaagttcccgaccctggttactcaccaggaatccctcgagtccaaggtgaacgagactaaggcaacagtcaagttccagctcaagaaggtcctttgcatgggtgtcgccgtcggcaacttggcgatggaggagaagcagatccagcagaacatccagatgagcgtcaacttccttgtttcccttctgaagaagaactggcagaatgtgagatgcctgtacgtcaagagcaccatggggaagccatacagggtgttctaagtctgctcttttgtgaagtctgctaggttctggcaccgaggttttattgaattaaactcttgttaagagtatgtttttggacgatcctatatttcgtcctggcgctactatgtttcagaatggtggtactactataagtattgcttgaaaggatcaat

SEQ ID NO: 18886 - DNA, 605 bp, Zea mays
  Clone ID: LIB3116-014-G2_FLI
ccctcgtgatcatattctgcatgggtgaagatggttgggccatcagcagccacaaaaaaaaaaacacaagtatatgccctagttggttcttggtgctttgtgatctctcagaagcactgaattgtgaataccgtcaaaagcaattatcggcaggttattttaccagtcacaatggtgcttcttggattcaaaacaattatcttcagaagaaatcatggaaccatcaaacccagaatatcttcacacagaaatcagaattgaatagaagattatgagcaaggacgaactctgctctggccgtctcattatatgaattgtgtcaagggtaataacaatattagtatggatggagcaggaacaagcattgtggcgctgcatcagaaacaatctggaatgctttgggttttaatgtgtctgggcgtgcgtaagtgaaagctaataatgaattctcgtaccatttttaggtaggattaagctcatgtaacacacagcacactattcactaagatgtactatgagctaagtgaaacgtaggaacaaaggtgccgtttggtcacatatttgtaacgtaatgagtaactaataatcttaaattatgtttgttt

SEQ ID NO: 18887 - DNA, 646 bp, Zea mays
  Clone ID: LIB3116-014-G9_FLI
gggccgccgcgtgctcgtcccaaccctgtcgccggcaagccatggcgtcgcgcttccgctccttcactcgcccggccgccgccgccttcctccggtccactgccagccgaagcccctccgcttcccttccccgcaccctcgctcctgtccctagggcttcggccacggggcggcgcatggctctggcgcggtctctgcaaccgctgcacagcgccgtctcggcggcccggctgacgtcgcggctgggggcggaggtggaccgggccgtgtcgcagggtacgctctgcagttcctacccgggagtctgagtctgatacagtagacaggtctcagtgtccctcgataatgaaaggaactgctccagatggcagcaacatcagcagcagatagttgtaagacttggtcatcataataatcattcttgttaaacggttacgttgtttatttagtggccactttttgctatgcgctaacggcgcatgtttgacctcttaccataatacattcctggtaagggcttttcttttgaattctatgtgtggtcaaggttttaatgagcatagtcatgttcttgtacgcctgtctccatttatatatgtggagatatgggcatcagttcaaagctgggatcaaatttctgggtagc

SEQ ID NO: 18888 - DNA, 624 bp, Zea mays
  Clone ID: LIB3116-015-A3_FLI
gggtcacactagcaataatgcctaataacggcgtccgcgccgtggcgacgcccgtcgcgcgagaagagccgctcctacggcgggaagacgacgcagcaccgccgaaggccgccggtggcgatgggcagccgctcgacgcgggcgcccgtgacgccggcagcttcccgtggctgccagccgcgggcgtcgtgtacctcacgctcagctccgcgatggccctgcaccgctgctggcccgaccccggcgacgtcgcgttcgtcgtgtcggcgtacgtcgacctcgtcctgctcttctgctgcctccggaggtacgagcgcgcggagcctgggtcgccgctcagggagcggctcaagctggcggtgtggctgctcacgtccgcgctgacgctcctcttctcctataaggtcgccgccgtcatgccggccgccgttgctgccatcgtctggctcatgggtctcaccaccatctgcggtggcttcctcgctttcttctgcttccagaagaaggcgtgactttcgctctatggacagagagagaaaaatgtcggaggttgacgatggacaagattaccgggttatcaaaattttattggtgataagcaaaattttttgcacgaatttatag

SEQ ID NO: 18889 - DNA, 923 bp, Zea mays
  Clone ID: LIB3116-015-A6_FLI
ctccgatcccaaccaggcaagcagtactcatggtggcgttcatggcgagcagcggggccatgaaggcgtcgagcaggccaaccttcgtcacccctcgcagcttctttaactggggcaaaagcgcgagagaaaccgagacgccgccgccgcagctgcagttctcctaccacgacgtcgagccaccgttccccatgtcgctcgtggcaaaaacacacctcagagaccgtgagctcaggtgctgctacaaggccaccgtggacggcttcagtgctacggacttccaccggcggtgcgacttcaagggcccctgcgtcgtcgttggctacaccgacggtggcttccgtttcggcgggttcagcccggaggggtaccgaagcacggacgactactacgacacgctggacgcgttcctcttctactgggcggaatctacggaggtctcggcgccgcccgtggtgctgcccaaggtgggcgggagcggcgcggcgctgttcgactactcccgcggcgggccacagttcggcgccgacggcctgctcatcggcccgccgctcaccgccgtgatgggcgtgttcactggacccgactccagcgccggcgtcggcgacctccgcagcgctcgctcgcggcttggcctgtcgtacgcgaggcggccggacgggaaggagagcctgttcggcgacgagggcagggcccagctcgtggaggtgctcgtcttctgcaatccgcagatcgcgagcctgtactgactgctcattgttactagcttgcagctagagtctgtataaactattcattatcgcttaatttggagtctaaaacataccaataataacaatgtaaaattgtgggtacggttaattagttgattattaagttattgaaagatcaaataagtaatgacgaaattacttttattctct

SEQ ID NO: 18890 - DNA, 226 bp, Zea mays
  Clone ID: LIB3116-015-H1_FLI
catggatgggggctcttcgccgcaaggaatattcaggagggtcaaatggttattgagtaccgtggcgaacaagttagacggtgtgttgctgacttgagggaagcacagtaccatagagaaaaaaaggattgctatttgttcaagataagcgaagatgttgtcatcgatgctaccgacaaaggaaacatagcgcgcctaattaatcactcgtgtatgtcgaaccgct

SEQ ID NO: 18891 - DNA, 669 bp, Zea mays
  Clone ID: LIB3116-015-H12_FLI
gctctagccacgcccacgctcccgcctccccggcaaacacactcacgcccgccgaggccacatcctagcacgttgtagacgccgccaccgccaccgcctgacgccatgcaggagttccagtccatccctggcctggccgggcggctgttcggcggggccgcggcacccggcgacctccggcgcgcgcaggcggcgcagcatggccccggcggggcgcgatgcggcggtgcctcgcccgcggcgcccgaggcggtgaagtgcccgcggtgcgagtctaccaacaccaagttctgctactacaacaactacaacctgtcgcagccgcgccacttctgcaagagctgccgccggtactggaccaagggcggcgtcctgcgcaacgtccccgtgggcggcggctgccgcaaggcgaagcgcgcctcgccgtcggcgtcggcgtcggcgtcctcgcccgcctcgtcgtcggcgccgtccacgcccgcgtcggccgacgcggccaagaacccgcgccgcgcctcggcctcgccccgctccaacagcggcagcgcgagccccacggccgccgccgcgacgaccccgaccccgaccgatccgagcacctccgccacgccgtcgtcgaacggcgtcgccttcacgggcagccaccactcgtcgaaccccttctccacg

SEQ ID NO: 18892 - DNA, 1230 bp, Zea mays
  Clone ID: LIB3116-016-A7_FLI
ggccgtccccgtcccgagtcaccaactcaccaccgaccctagcaaaaccgcacgcaccctgccagcggccccccaactcccaacccaacccctactccagctagctcgcggcggcggccagcggccatggcgttccggctgagcaacaacctgatcggggtcctcaacttcgtcaccttcctgctctccgtcccgatcctgggcgcgggcatctggctgggccaccgcgccgacggcaccgagtgcgagcgctacctctcggcgcccgtcatcgcgctgggggccttcctcctcgccgtctccctggcgggcctcgtcggcgcctgctgccgcgtcacctggctgctctgggcctacctcctcgccatgttcgtcctcatcctcgtcctcttctgcttcaccgtcttcgccttcgtcgtcaccaacaggggcgccggcgaggccgtctccggccgcggatacaaggagtaccgcctcggggactactccaactggctgcagaagcgcgtcgagaacaccaggaactgggaccggatcaggagctgcctccaggactccaaggtctgcaagagcctgcaggacaagaacgagaccgtcgcccagttcatgagttccagcctctcccccatcgagtctggctgctgcaagccccccaccagctgcggctacacctacgtcggcggcacggactggacgccggtgaccaccaactcgacggacccggactgcaagacctggagcaacgacgcctcggcgctctgctacaactgccagtcgtgcaaggccggcgtggtggccacgttccagcggaactggaagcgcgtcgccgtcgtctgcatcgtcttcctcgtcttcatcatcatcgtctactccgtcggctgctgcgccttcaggaacaaccgcagagacaacgcctaccgcggcgggtggaagggcgggtacgcttgatccaccatcgcgtcgtttaggagcggagccatgcacgcgcgctcggtgctctgctctgctccctgcccgccgctgtcgtcgtacgtacatgtttagtaggctcgttgtagctctgtacaggtgatggagatcgttgttgcggattcttatcgtcttcctggttacatacttacattattgttatgatctgatcagcggtaggttttgtatacgctgctcattgattcgtctgcctgctattttcgtatatcgatgcacttgttttaccagttgctttcgttc

SEQ ID NO: 18893 - DNA, 299 bp, Zea mays
  Clone ID: LIB3116-016-D1_FLI
ggcaagagcatgtaggatgcttcaactgcagcctctacttcaattacccaagctaccgcaacttgttccccatctgggctctcggtgagtaccatcgtggccttcgtgcaaagaaagacaattgagtccgtgtgtgtatatatatagtacgtatagcattgtgaggaataaaacaggttgcgtcggtggtgagtgcgcaaaaacaagatgtacttttatgtaggtgtaccacagtgtacaatgttggtcgttgttagactgtaaggctatcatgacgtgtatattgtaatatatatact

SEQ ID NO: 18894 - DNA, 922 bp, Zea mays
  Clone ID: LIB3116-016-G4_FLI
tcgacaagtcgttcggatttgacactgccgtggaggaggcccagagggccatcaacgctgctcatgtcgaggctgagagtgcagagaacggcatcggtgtcgtgaagctgatgggtcgcaacagcggtttcattgccatgtacgctactctagctagccgcgacgtggactgttgcttaatcccggagtcgcccttctaccttgaagggaagggagggctccttgagtttgtcgagagacggctcaaggacaacggacacatggtcatcgtggtggccgagggtgctggacaggatctcatcgcgaaaagcatgaattccgtggacacccaggatgcttcgggaaataagctgcttctggatgttggcctctggctatcccagaagataaaggatcatttcaagaagaagccccgtttcccgataactctcaagtacatcgacccgacttacatgatccgcgccgtcagttcaaacgcttccgacaacgtctactgcactctgctagcccacagcgcgctccatggcgccatggcggggtacaccggcttcatcgtcgctccggtcaatggcagacacgcctacatcccgttctataggatcaccgagaagcagaacaaggtggtgatcacggaccggatgtgggcgagggtgctgtgctcgacgaaccagccctgcttcctgagccacgaggacgtggagaacatgaagcacgacgacgacgagcaccacctgcacaacacgctgctcctggactcgccggaaaactcgtccaaatgaaatggggcacaagacttgttttgcttttttgggtgctggcgttgtagagattagcgaccgctatatgatagggttggataatgtgagcattttgtaataatataagcttcctgaagtaagctcgttttggctgttcgtgtatt

SEQ ID NO: 18895 - DNA, 713 bp, Zea mays
  Clone ID: LIB3116-016-H10_FLI
gcacggcggcgacgagaagtggcgagccccgagagcgggtttagttagaggctacgggcggtcgggcgcggcggcggcggcggccatgagcagcgggagcgagagcactaccgccagcaggtggctcgagctggccacgctgcgcgcgctggcgcgcgacgccgcggagcagcttcggctgccgcgggccggcacgtcggcgtcggcgtcgtcgtcgtcgccgtggcgcgggcgcgaggaccacctccacggccacggcaagacggccaaggtgatgcacctgctgctctggggacccaagtgaagcggcggcgagaggccaccgtaccgccgggctctcccgccggcgttgctcgttttgctctgcctgcaatccgccccgcacggactgtactgtacctatacacctatatactacgacgtgcacctgtactacgacgtgctgctgtaccatactaatactagtgcgctgctgctcccttgccttcttgcttgcaccagccactcccgctttttttgctcgaacgatcgactgctcgtgtcgcgtcgggccacggccggtcgtcagtttgggtgtgtccactccactgtaaagctcctctcttttttttgggtactccctccatgccaaagttagcggacgtgtactaggtgtggttcggagcagcaggttgtattacttaccacccctctgtaatgtaagaacgcgttct

SEQ ID NO: 18896 - DNA, 638 bp, Zea mays
  Clone ID: LIB3116-017-E9_FLI
ataatgtacattggcctgatgatgatcttacgactgaaacaataacttaggtcatctgcgaccacctgagcctgggagtcaagactggcctgccatacatctggcacagcaaggctagcaaccccttcgttaacttgaagaaggaatacaagggcatcttctggcaggaggacatcatccccttcttccagaacgtgaccatccccaaggactgcgacaccgtccaaaagtgctacatctacctctctggacaagtgaaggagaagctgggcacgattgacccctactttgtcaagctcggtgacgccatggtcacctggatcgaggcctgggatgagctgaacccgtcgacccctgccgccgcaaatggcaaggccaagtagatgtgccatcacttcggcactggagtgaaaaagaaagtatgattgggtcctgcctaggccccatagatatagctcttttttgagaaggaagagagattaattcagcagcagcttttataaattctttgttgtcatgaagcaggtggttcttttgtagttgatgaaagggatttgtcgtcgctatcgtttacataattcagacaataattttatattgtgtaattctgagaatcaaagcactgtttgtgttatagc

SEQ ID NO: 18897 - DNA, 953 bp, Zea mays
  Clone ID: LIB3116-018-F6_FLI
gggttacagctggtatattaccactctggaggacttcggattaatccaaacttgtataacaatgggaaagtgtgtcttagcctgttgggtacctgggatggtagaggttgtgagaagtggaatccagctcaatcgacaatgctgcaagttcttgtctccattcaagctctgattttgaatgacaagccatattacaacgagccaggatatgagtcctatgccaacactccgaatggagagcggttggctttggactataatgacaacacctttctgcactcatgcaagactatgttatactcacttcggaggcctccagagcactttgcagatcttgtcgctggccactttcgggtgcatgggcacacgattctcgcggcatgcaagcactacatggcgggtaatgatattgggtcagtggtgccagaggaggaggaggaggaggaggaggaagagtcatcagaacacaagagcggtgatgctggagcatcgggtagtgcaccagagctaggagtgatcaaggcaatccctacgaagagacgcagctcattcaatccaagcttgaaggtgctgtacgaagatctgctgatggaattcaatgtgaagggtgccgacacaaggaaattcatcgatgagaagttgaagaagaacaaacctgcagccgcctgaggaacatgcttgcaggcaaagcttttgtaggtataactggtcttggtggtgatatctaggacctggaacttgcttgctcacatgtagtagagagtatggtttaggggtggagtgctgagagagttctctctcggcactatttatcgccaatctaaatctaatgataggtttaccgcatcataaatatatatgtaacggctatatcgtctttcgctgattgttctggcatatcatgataggtttacccaaggacgaaagctaagtaccaattggtttggaactgt

SEQ ID NO: 18898 - DNA, 844 bp, Zea mays
  Clone ID: LIB3116-020-E3_FLI
gtgctggctagctccgctccatcggcccgccttacctctagcctcgtcgccacggcgacagcggcgatgctgatgcaaggcgccgtggtagtgacggactgtaccccgacgggcgtagcgtcgctgtcctcgtccgtgcggtgtcggctgggcccggcgggcgggcacacggggaagcggcgccggctgcggccgtccaagcgcgcgcccaccacgtacatcagcaccgacgtcgccaccttctgcgccatggtgcagcgcgtcaccggcgccgacgaggccgacctacagtcgccgcagcaggacgggcttaaccttggcctcctcctgccgcacctcggcgtcgagctgttcctacaggcggcgggacacgcggcgccgcgcgtcgctgctgcaccgtacacgcctgccccgcccgccgcggcagcggagcagcagccgctgtacccgatgctggctggactcgtggaacgtgatgtatgggaagaagaccgaggtggtctcagccctgactgaccaatgaaaccgtcccgattgttccccatccgttccagttccaggcaagcctgtacgtgcctgcgcagcattagcatctaccgtcgatgatctgatcagcagacgatcccttcttctccatggcggcggagaagctgtacatcatatattcatatatcagttggggtgacctcgagcgtggactaggggatggagtagcagagttgtgttaatcagagaaccagcagtcatgcgttctattgtctcgtggtctgcagttgcatctgctgatctgcactttgcatgcttttccatgatcccgtcaatgtgagcttcctgctatttgtgt

SEQ ID NO: 18899 - DNA, 516 bp, Zea mays
  Clone ID: LIB3116-021-A11_FLI
ggagctggtgatgtaggcgaggcatatgccagcgcctgcccggagctgatgctcgcgatgcgggagctcagcttcaggaaggcccaggcgtcgccagcgccggttctgcctgcagtcacagaggacgacgggccggacttggggtgggtgtcggagctggtgatgtaggcgaggcatatgccagcgcctgcccggtgccgacgcccgaaattaatcaaagccaagacgtggacgccgccatctccagaggcgcctctcgccgtttggaacagcttcattaagcaatgtttatttttagcatttccatgaattgcatcattcttctgtggatagaccaaacatggtgcaagtattattaatactgcaatctgtaagcgtggcgtgtgtgccccccttctctttttttttccggagaccatggcctcactcaacatgctactgtcgtccatggttttcgttcgatcgtgttactactaccagtaccagtgtacgtctaaccaagtgcagttggcagtg

SEQ ID NO: 18900 - DNA, 585 bp, Zea mays
  Clone ID: LIB3116-021-C7_FLI
caagatccaggacaaggagggcattcccccagaccagcagcgtctgatctttgcgggcaagcagctggaggatggccgcactctcgcggactacaacatccagaaggagagcacccttcaccttgttctccgcctcagaggtggtatgcagatctttgtaaagaccctgactggaaaaaccataaccctggaggttgagagctcggacaccatcgacaatgtgaaggcgaagatccaggacaaggagggcatccccccggaccagcagcgtctgatcttcgccggcaaacagctggaggatggccgcaccctagcagactacaacatccaaaaggagagcaccctccaccttgtgctccgtctccgtggtggtcagtaagtcatgggtcgtttaagctgccgatgtgcctgcgtcgtctggtgccctctctccatatggaggttgtcaaagtatctgctgttcgtgtcatgagtcgtgtcagtgttggtttaataatggaccggttgtgttgtgtgtgcgtactacccagaactatgacaaatcatgaataagtttgatgtttgaaattaaagcctgtgctcatt

SEQ ID NO: 18901 - DNA, 351 bp, Zea mays
  Clone ID: LIB3116-021-D5_FLI
cgagcgacttcatgagcctgacgggcgccctcagcaccttcccgctgacgtttgtgctcgcaaatcacatgtacctgatggtgaaggggcctaagctgggtgccatccagaaatcatggcactggctcaatgttcttgggttcactgcgctggctgttgcagcggcggtctccgcaataaggctcatcatgcgtgattccagcacctaccacttcttcgctgatctttgagatcgatcgttttcttttctttttgttggaatgctgagccagagctagtattttttcattttcagagaattattatccatgtatgtaaggatgacgcatatatatattgaatagatgattt

SEQ ID NO: 18902 - DNA, 579 bp, Zea mays
  Clone ID: LIB3116-022-A4_FLI
ccaggacaaggagggtatccccccggaccagcagcggctgatcttcgccggcaagcagctggaggatggtcgcaccttggctgactacaacatccagaaggagagcaccctccatctggtgctccgcctgaggggcggtatgcagatctttgtgaagaccttgactggcaagaccataaccctggaggttgagagctctgacaccatcgacaacgtgaaggctaagatccaggacaaggaggggattcccccagaccagcagcgtctgatcttcgccggcaagcagctggaggatggtcgcacccttgcagactacaatatccagaaggagagcaccctccacctggtgctccgtcttcgcggtggttattaagccatcagtcgttgaagctgctgctgtatctgggttatctagtgtctctgccattgcccatggatggtgctgtctttcaaagtatttgtatggtttgtgtcgtgagtcgtgactgagctggtttcatggaccagttgtgttctcgttacccaaaactatcgtgcgaccgcatatggcttaatcatgaataaatgttgtttgaattt

SEQ ID NO: 18903 - DNA, 337 bp, Zea mays
  Clone ID: LIB3116-022-A8_FLI
ggcccggcgcggcggcggccggcagcggcgaccctctggaggacttctgcaaggacaaccccgagaccgacgagtgcaaggtgtacgaagcatgaggccagggttctttccacgacgaaacgtacagcacgggcgcgagggttctttccatagagaataatatacagattattcgacgaaagagacgtatgttatatatatatatgagttgtatgcagtcaccgaactggcggtacaggcttccgctttccatttcctgttgggagtcgtgtagtgtaatcctggggtgtgtatttgtttcatcaaccatgcctgccgatttgaatctcgtttcacc

SEQ ID NO: 18904 - DNA, 1038 bp, Zea mays
  Clone ID: LIB3116-022-C4_FLI
gaggccgtgagcgcacgggtgcttaagggctccaacatcgtgctgggcccatacgcgcgcggcgacgcacaggtggtcaacgcagattttgtaaagagcagcgtgcgtcccgatgactgccctcgggacggccttccggagtttgcactcgttggccggtccaacgtcggcaaatcgtcgctgctcaactcgcttgtccgccgcaagcgccttgcccttacctccaagaagcctgggaagacccaatgtatcaatcatttcaaagtaaatgacagctggtatcttgttgacttgcctggttatggatatgcttctgcaccacaggaagctcgtaccaattgggatgaatttactagaaattactttctcagtcgggagaatttggtatctgtttttcttcttatagatgcaagtatacctgccaagaagattgatcttgactatgctagttggcttggccaaaacaaggttcccatgacccttgtgttcacaaaatgtgacaagcgcaagaagaagaagaacggcggcaggaaacctgaagaaaacgtggaaactttccagggcctaatccgcgaatacttcgaggccgcgcctccttggatcatgacgagcagcgtgaccaaccagggccgcgacgagatactcctgcacatgtctcagcttaggaattattggctcaagcattgagatgcaatgataaccaaaccagggcgaagcaactagaacagcatgcaaagcactgtcgtccattgatgcatggacattcagcagtcggcgcctccgcaatcaggcgttcgcaccaactaatccagccttttgagctgttgactgtccaatatggccccctgtacatgattacccaatcaacactctggggatgcggacaaggtgctaaaatcagctgatcatggtttttttctttatttctattgtgtacacgtacaatcccaaccaacgttttccccttgttcccatctgattataggcttgtgtatactgtggggttaaatgattaataaattctggtgttagctaatc

SEQ ID NO: 18905 - DNA, 605 bp, Zea mays
  Clone ID: LIB3116-022-D3_FLI
ctctaaggcaccgactcgccggggacagagagagagaccgacgcgccggcagatcccaagctcaccctagagggggaagagggcgaccgaaggcggcgatgggtttcatcatggacttcgcggagaatctgatcctccgtctgatggaggacccggacaagcgcgaccaggttcggcgggagcatgtctacaagatgaaggagcggtgcgagcgcactaaggcggcgtggagcctccctctgcgcccctacggcttctggaccttcgaccgcttcaactcgcagctctcctgggatccccagatcagccaggccgccggccgtcgggacccctacgacgacctcatcgcacgccactctggctcgccgccgtcttcctgaacacccgttccgatctttgcccagaaggtctacttgggcatcaataagaaactctttcccctcaaactgattgtggttccatcctcttctgtctggaaaatgttgtcaccaaactaccctatttcctgttccagtttggcatggaagtataagttgtgtacttctattctcaagttgttgtctttgtattatgaaatgtttccaataatcagcagtttttgatgt

SEQ ID NO: 18906 - DNA, 840 bp, Zea mays
  Clone ID: LIB3116-022-D7_FLI
ggagcaggcggaggaggagttgtgccaagccacaatgggtatctcgcgtgactcgatgcacaagcgccgagccaccggtggaaagcagaaggcctggaggaagaagcgaaagtatgagcttggtcgccagccagccaacaccaagttgtcaagcaataagacagtgaggagggtccgtgttcgtggaggtaatgtgaaatggagggctcttcgccttgatactggtaactactcatggggaagtgaagctgttacccgcaagacccgtatcctcgacgtggtctacaatgcatcaaacaatgagcttgtgaggacacaaacccttgtgaagagtgccattgtgcaagttgatgctgccccattcaagcagtggtacctcactcactatggagttgacattggtaggaagaagaaaacccctgctgcaaagaaggataatgctgagggacaagaggttgaggcagcagctgaggaaacgaaaaagagcaaccatgtcacgaggaagcttgagaagcgcaaggagggacgtacccttgacgcacacattgaggagcaatttggcagtggacggttgctggcatgcatttcttcccgccctggacagtgtggccgagctgatgggtacatccttgagggtaaagagcttgagttctacatgaagaagctacagaggaagaagggcaagagcgctgtagcttagagcattctcatggattgtcttgcaccgaaatgtgtgtcctgatgagtacactttttttggttagtcgtctcaagttcagagcgttatgccatgttttcagtcctgattagtacactgttttctaaaagcgattgagctct

SEQ ID NO: 18907 - DNA, 758 bp, Zea mays
  Clone ID: LIB3116-022-D9_FLI
cttctccatcctggatctgacgattcagctcaactgtcccagattgaaattgagaagcttctagcacaattggttgagaccgaaatggacaaacgcctagttcttggacatgtatgttatcacatcgtagcggctggtttgaacggctacatggccactgtgaccaaccttaagagtccagtaaacaaatggaaatgtggtgctgctcccattacatctatgatgactgtgaagagatggtcacgtggtgctgccaccagtcaaatcggtaagcctgctgtccacatggcgagtgttgacttaaaaggaaaagcatatgagttgttgagacaaaattcttctagcttcatgatggaagacatctaccgaaaccctgggccacttcagttcgaagggtcaggtgctgatacaaagcctatttcattgtgcgttgaagatcaggattacatgggaagaatcaagaagttgcaggagtatttggagaaggtgaaaagcattgtgaagcccgggtgctcgcaggatgtccttaaagcagcggtaagcgccatggcttctgtgacggagatgttgaccatcatgtcttccctttcatttagtggacaggcgaccatctgaaggccaagctgaagatgtcatatgctgttgcgctctcatgtcccgaacatatttgtgtttttttgggaaagaaacatacaatttttgttctcattctagtatcgtctacctatgtcaaactacaatatgataggacccttgct

SEQ ID NO: 18908 - DNA, 711 bp, Zea mays
  Clone ID: LIB3116-025-A11_FLI
cgatctcgcacctagggtttcgtctcgtcgctctcgtcctccgcgaagatgccgaagaacaagggtaagggaggcaagaaccggaagcgaggaaagaacgaggctgacgacgacaagcgcgagctcgtcttcaaggaagacgggcaggagtacgcgcaggtgacccggatgctcggcaacgggcggtgcgaggccatctgcgtcgatggcacgcgccgcctctgccatatccggggtaagatgcacaagaaggtctggatcgcggctggggacatcgtcctcgtcggcctccgcgactaccaggacgacaaggccgacgttatcctcaagtacatgaacgacgaggcgcgcctgctcaaggcctacggggagcttcctgacacgctcaggctcaacgagggcgtcgacgtcgatgggcccgaggaaggcgaggagggcagcgactacatccagttcgaggacgaggacatcgacaagatctaagaaatctgttcctgcttacggctacctgtattgttacgtgacgtgttcttctgcttctgcttgcggctacctttattgttacgtgacgtgtactggtatgttgtggtatggtttagcctgggttatcttgtaaaaggatctgaagtggttaaataatcgtgggtaatttcgtttttaatctggtacatgctgttacaaggtgttctgtactaagctattattgttctg

SEQ ID NO: 18909 - DNA, 715 bp, Zea mays
  Clone ID: LIB3116-025-B6_FLI
agccaccttatggccgagtctatttctgagctacagaagaaggagaggtcactgcaggaggagaacaaggctctgcagaaggaacttgcggagaggcagaaggccgtcgcgagccggcagcagcaggtgcagtgggaccagcagacacatgcccaggcccagacaagctcatcatcgtcctccttcatgatgaggcaggatcagcagggattgccgcctccacacaacatctgcttcccgccgttgacaatgggagatagaggtgaagagctggctgcggcggcgcagcagcagccactgccggggcaggcgcaaccgcagctccgcatcgcaggtctgccaccatggatgctgagccacctcaatgcataaggagagggtcgatggatcatgacgtacgcgtaccatatggttgctgtgcctgcccccatcgatcgcgagcaatggcacgctcatgcaagtgatcattgctccctgttggttaaaccctagcctatgttcatggcgtcagcaactaagctaaactattgttatgtttgcaagaaagggtaaacccgctagctgtgtaatcttgtccagctaccatgtatgcttgttactgcccagttacccttgaatctaggggcgcttttggtgagagggtgcagtttactttaaacatggttcgtgacttgctgtaaatagtagtattaatcgatttgggcatctagtaagt

SEQ ID NO: 18910 - DNA, 691 bp, Zea mays
  Clone ID: LIB3116-025-C6_FLI
ccgccggtgagggcgtacaggaagaacaccttccaggcggcagcggcggagacggccaagaaggccgagcagaagcagcagcagggaggcctgtacgtgaaggtgagcatggacggcgcgccctacctcaggaaggtggacctccggatgtacaagggctacagggagctcagggaggctctggacgcgctcttcaccaactccttctccgcggcggcagagggcggcggcgaccaccaccagcacgccatcgcttacgaggacaaggacggcgacctcatgctcgccggagacgtgccctgggatatgttcatctcttcgtgcaagaagctcaggataatgaagggctctgcctctgaggccaggtgatcgctgatccatacataaacagaggctacagacacgccacctggccacctgggaacgcggatccaagagcacacacggatcgtacgtgacgaggaaggagggaggagctgtgtggcttgagctctcaagtgttgtacaaaggcatgtttctttctgaacccaaaagggagaaagatgtatgaagcgtgtatataaaatcttagctagcagtttgttttcaaactgtgttttgtatgagcgatcgaaggctgtaaaaaaagaagaaaaaaagaaaagggaatgagaaattgactaaagctggtcattttcctctcaaaaaaac

SEQ ID NO: 18911 - DNA, 815 bp, Zea mays
  Clone ID: LIB3116-025-C8_FLI
ggcgagcgagggacccggggcggaagaagagagagaagacgtctctctcctctcggcgtccccgttccccaacctctcgtctgctgcctgcctgcctgcaaaaaggagtttgtcatggcgtctaagcgcatcctcaaggagctgaaggacctgcagaaagacccccccacatcatgcagtgcaggtcctgctggtgaggacatgtttcattggcaagcaacaattatgggaccacctgacagtccctatgctggtggtgttttcttagtgaacattcatttcccgccagattaccccttcaaacctccaaaggtttctttcaagacaaaggtcttccatcctaatatcaacagcaatggaagtatatgccttgacattctcaaagagcagtggagccctgctttgacaatttctaaggtcctgctctccatctgctccctgctgaccgaccccaacccggacgaccctcttgtcccggagattgcccacatgtacaagacggaccggccgaagtacgagtcgacggcccgcagctggacgcagaagtacgcgatgggctgacgaacgctttcctgctcgtctgggcgccattgttcccttggatttgttgttggtcgtatgtatccctgatccatctaggatcatcgtattgtattgtagtgtatgtatgtcgtcggcctaccatcgttgccatccaccatagtgaggtggttggacatgcttcgcctatatgcacctgtgcttgccttccttcgggtcggtgctgtttggttaatgttcatcgaagacgttgatttcgttgcccctggctcttc

SEQ ID NO: 18912 - DNA, 478 bp, Zea mays
  Clone ID: LIB3116-025-F8_FLI
ccccccgcaagcagctcgccaccaaggcggcgaggaagtcggcgccgacgaccggcggcgtgaagaagccccacaggtacaggcccggaacagtggcgctgcgcgagatccgcaagtaccagaagagcacggagctcctgatccgcaagctgcccttccagcgcctggtgcgcgagatcgcgcaggacttcaagacagacctccggttccagagccacgccgtgctggcgctccaggaggccgccgaggcctacctcgtcggcctcttcgaggacaccaacctctgcgccatccacgccaagcgtgtcaccatcatgcccaaggacatccagctcgcccgccgcatccgtggcgagcgcgcgtagccatcatctccgaggatctgatgaatgtctagttaccaaaaaataggccgtattagcgtcgttgttctgtattcgttattttggattcggttgcagtgaaaaacagctttact

SEQ ID NO: 18913 - DNA, 385 bp, Zea mays
  Clone ID: LIB3116-027-E7_FLI
aacgaattaccctcggtgccctccctctcggcggcggcggcgcaagtccccttcatctccggcgcggcaaatggcaggcggcagggttgcacatgctaccctcaagggccccagcgtggtgaaggagatcttcattggactgaccctgggtctgatcgctggaggtatgtggaagatgcaccactggaacgagcagaggaaaactagatccttctacgacatgcttgacaagggccagatcagcgtcgtcgtcgaggagtagttcctacgtgtcaacactgaagtttttttttccagatgtttttgaaaactcactctctgaagagcatgacaaagtgaatgctgtggagatttggcttgaaaataagcataaccatttgagaac

SEQ ID NO: 18914 - DNA, 375 bp, Zea mays
  Clone ID: LIB3116-027-F7_FLI
gccgcggcgcaacatggcgaagatcaagccgaaggccttgctcgcgcaaagcaaggtgaagaaggtccccggccaaatcagcgtggccacgatcgtcacctacatgatcctcggcgtcctggtcgtgtcctccgtttacgctgcctacaggtactgctgggcaggcacaggagcagcggaggcagtgggcgcccaggggaactgatcccccgccgactgcgtggctgatctcgctgttgttgtatcatccggttggggtaaaatttttggttgttgctgtctagcaaatggggttcttgggacatggataggttgtatgttgatacggttacaccgtagccgatgatatgtatgttgaatttcttcccttttatt

SEQ ID NO: 18915 - DNA, 785 bp, Zea mays
  Clone ID: LIB3116-028-A10_FLI
ccctagctcccgcaactgccgccgccactcccacgcccgcagccatgccgcccaagctcgacccgtcgcaggtggtggaggtgttcgtccgtgtgaccggcggcgaggtcggcgcagcgtcttcgctggcccccaagatcggcccgctcggtctttcccccaagaagatcggagaggacatcgccaaggagacggccaaggactggaagggcctccgcgtcaccgtcaagctcaccgtccagaaccggcaggccaaggtctccgtcgtcccctccgccgcggcgctcgtcatcaaggcgctcaaggagccagagagggaccgcaagaaggtcaagaacatcaagcacagcggcaacatcagcctcgacgacgtcatcgagatcgccaggaccatgaggcacaggtccatggccaaggaattggccggcaccgtcaaggagatcctcggtacctgcgtcagcgtcgggtgcaccgtcgacggcaaggaccccaaggacctgcagcaggagattgacgacggcgaggtggagatcccgtccgcttaagaaggattggtgtccaggactgtgttatctttgctgctgaagccattttctctgcctagattttctcatatttatttgaggtgggggtggacgtggacgtggaactatggaagttatcacagcggagttttgcttagaaactttgtcatgctttaagtctgagacaattttatgaacattcctaggtacaatcgaagttaccagtgcctgagttttgttggaatttttcatgcgatgttt

SEQ ID NO: 18916 - DNA, 610 bp, Zea mays
  Clone ID: LIB3116-028-B9_FLI
gctgggacgtcaacgcgcagaaggccgccgccgccccgccgtgttgctcgccgacaccgccccgccggcagccaaaatgccgttcaagaggttcgtggagatcgggcgagtggcccttgtaaactacggcaaggagtatggccgcctcgtcgtcatcgtcgacgtcgtcgaccagaacagggctcttgttgatgcccccgacatggttcgttgccaaatgaacttcaagcggctttccctgactgacatcaagattgacattaaacgtgtcccaaagaagactacactgatcaaggcaatggaggaagctgatgtgaaaagcaagtgggagaatagctcatggggcaagaagctgattgttcagaagaggagagcatcactcaatgactttgacaggttcaaggtcatgttggcgaagatcaagaggggcggtgccattaggcaagagcttgctaagcttaaaaaggtggctgctgctgcttagattgctttggtggttcctctattcgatctcttgaaatgtaatgcacgaattactttgacagttagcttgtcaagatgtcaattttaaactggcttatttagatattttgtccaaaatgctattctg

SEQ ID NO: 18917 - DNA, 508 bp, Zea mays
  Clone ID: LIB3116-028-C12_FLI
gctgatggtgagatgtttgaagtcgcagcggagcaacttggtctggagccagatgtctgtgttgtgtttggtaactcaaacttgacgacggaatctgcacataacgctgggatgaggtgtgtggcagttgcaggccgacaccctgcctatgagctccaatcagcaaaccatgttgtgagatggcttgaccagctctctattgttgacttgcagaggcttgctaatggtgaagttattggtcgcaggggtagagaatctgacatggatatggaaattgtgattgaggaatgatgatgtttctgcaaaaatgacgcactaatatattgttgtgcttataatctgatacacctaagtaatgcgttacattttctaaacaggccaagcagtgcaagttccggactaaggatactctggagtttgcattaccttcctggtttgcttgtgatgaattggaattcgcctaaaactcttttagtcattagagttggaagtgaagacaactcccacc

SEQ ID NO: 18918 - DNA, 678 bp, Zea mays
  Clone ID: LIB3116-028-C4_FLI
aggcagtcgcggacaggaggaagaggaagaagaagcggcagcgagcgaggatgccgtgcctgaacgtgtcgaccaacgtgaacctggagggggtggacacctccgccatcctcgccgaagcctccaagtccgtcgccaacatcatcggcaagcccgaggcctacgtgatggttgttctcaagggttcggtgcctatggcatttggaggtacccaggagccagcagcttacggtgagctggtttccatcggaggcctgaaccctgatgtgaacaagaagcttagtgctggcatcgcttctatcctggagtcaaagctgtctgttcccaagtcacgcttctacctcaagttctatgactcgaagcgctcggacttcggttggaacggctccaccttctagacttgaggtctgcagctgaaataaaagaaattcgtggaatcatggtacctaatgcccatggctattgcctattaaggacaatgtcataagatgtgtcttaatcggtgctgaactgagaaacagtaactgttgtcgtggaactggaagtggggtgctggcgtgtcagagtgcttgcttcctacctagcatagcatgcctgtgctatcttgttattggtattggcttgatatcagtctatattatcatttattatggttggtccttcgggtttggtaactgt

SEQ ID NO: 18919 - DNA, 748 bp, Zea mays
  Clone ID: LIB3116-028-C8_FLI
cctcgcgcggcgaccacccgattcgaagcgtgcggagagaccgaagaagcgggagagatggctcgtaccaagcagactgctcgcaagtccacgggagggaaggctcccaggaagcagcttgccaccaaggctgcccgtaagtctgcccccaccactggtggagtgaagaagcctcaccgctaccgccctggaactgttgccctccgtgagatccgcaagtatcagaagagcactgagctgctgatcaggaagctgcccttccagaggctcgtcagggaaattgcacaggacttcaaaactgatttgcgtttccagagccatgcggtgcttgccctccaggaggctgctgaggcataccttgttggcctgtttgaggacaccaacctgtgcgccatccatgctaagcgtgtgaccatcatgccaaaggacattcagctggcaaggaggatccgcggcgagagggcctaatcgccacctcaaacatcgtgacaaaaacatgaagtcctggggttattgttaatctggtgccattgtaaggacatatgagtagggtttgttttgtggatcgcaagtttctcttctgctactgttgctgctacctttgctggtgttattgctagggtcgaatacttaagttaactatgcgctgacagtctggactagcagtgttatgtgcgctgctggaccttgcgcgcaatgctgtggccgatttgttcgttaatgtcaagaattgtgttacagtgcgtgt

SEQ ID NO: 18920 - DNA, 556 bp, Zea mays
  Clone ID: LIB3116-028-D7_FLI
ccagtggtgtccattcacgcacctagggttttcgcgccgccgccgccgccgccgccgcagccgcaacaatgccgtcgcacaagaccttccggatcaagaagaagctggcgaagaagatgcgccagaaccgccccatcccctactggatccgcatgcgcactgacaataccatcaggtacaacgccaagcgcaggcactggcgccgcaccaagctcggcttctgagcgtcgggattggccggctgctgcgtcggaaggctagggtctaagagctatcttccttctgttttatcaatgtgtcagtttttctgtaagctagcaagtgttgctatgacgcttttattaagattctggtgagcggtgatgttaagagaaaattggcactactgtggtgtaccccaagattccttgcagcattgctatgctaagtaaagaaccctttatcttattatatatgtagtgttgcattgattgaggtccacagttgatcaacgtttcatggattgtggtatctttcttaaactattttgatgagtataactgcacaatgtttgttc

SEQ ID NO: 18921 - DNA, 669 bp, Zea mays
  Clone ID: LIB3116-028-F12_FLI
tgggttggcttctcctccccctccggttcgggttcgggttcgtgaggttctccggggttcggtttcgtgggtgagcggatcgagatggcggcgtcggatgttgagtaccgctgcttcgtcggcggcctcgcctgggccacggacgaccactccctccacaacgccttcagcacctacggcgaggtcctcgagtccaagatcatcctcgatcgggagacgcagaggtcccgcggcttcggcttcgtcaccttctccacggaggaggcgatgcggaacgccatcgagggcatgaacggcaaggagctggacggccgcaacatcaccgtcaacgaggcccagtcccgcggcggccgtggaggcggcggcggtgggtacggtggtggccgtggaggcggcggctacggcggtggcgggcgccgtgatggcggcggcggctacggcggtggcggcggctacggtggcggcggcggctacggtggtggtggcggcggctacggcggtggcaaccgtggcggcggctacggcaactccgacgggaactggaggaactgagcggtggggcccgcgcggccaagttatcctgttcgctgccgtgatgtttaccctagtccagagggtttatcttcgttcgtctcgtgtttgttgttgcccatctgtgtttttgattgc

SEQ ID NO: 18922 - DNA, 703 bp, Zea mays
  Clone ID: LIB3116-028-F2_FLI
cacctggtgctgcgcctcaggggaggaatgcagatcttcgtgaagacattgactggcaagaccatcaccttggaggttgagagctccgacaccattgataatgtgaaggccaagatccaggacaaggagggtatccccccggaccagcagcggctgatcttcgccggcaagcagctggaggatggtcgcaccttggctgactacaacatccagaaggagagcaccctccatctggtgctccgcctgaggggcggtatgcagatctttgtgaagaccttgactggcaagaccataaccctggaggttgagagctctgacaccatcgacaacgtgaaggctaagatccaggacaaggaggggattcccccagaccagcagcgtctgatcttcgccggcaagcagctggaggatggtcgcacccttgcagactacaatatccagaaggagagcaccctccacctggtgctccgtcttcgcggtggttattaagccatcagtcgttgaagctgctgctgtatctgggttatctagtgtctctgccattgcccatggatggtgctgtctttcaaagtatttgtatggtttgtgtcgtgagtcgtgactgagctggtttcatggaccagttgtgttctcgttacccaaaactatcgtgcgaccgcatatggcttaatcatgaataaatgttgtttgaatttaaactaag

SEQ ID NO: 18923 - DNA, 607 bp, Zea mays
  Clone ID: LIB3116-028-F4_FLI
catctaccagcgactcagcgagcgagagcagcacacacgcagctagctaggagcagcagcagcggcggcggcgatggcggcctccatgatctcctcgtcagctctggcggtggcgcctcagggcctgccgcccctcggccgccgcgcctcctccttcgccgtcgtctgctccaagaagaagatcaagaccgacaagccctacgggattgggggtggcctgaccgtcgacgtcgacgccaacgggagaaagggcaagggcaagggcgtgtaccagttcgtcgacaagtacggcgcgaacgtcgacggatacagcccaatctacaacgaggatgactggtctcccaccggcgacgtctacgtcggtggaaccactgggcttctgatctgggccgtcaccctcgctgggatcctcggcggcggcgccctcctcgtctacaacaccagcgccctctccggctaaggatatccaatgcatgcgcttcttgcgattcgtcgtgtaaaatcagggtgtctgtctataatctagcctccatggatgctcaaccttcgtcatgtaacaataatcagtgctactcttcattacataattttgatgctatatatatat

SEQ ID NO: 18924 - DNA, 765 bp, Zea mays
  Clone ID: LIB3116-028-G9_FLI
cagacgtgcggcagcgccgagtccatcgtcgccgacgaggtccagaaggcgtcgtacagggataggggcgtcctggccagcctcatccggctgcacttccacgactgcttcgtcaatggctgcgacgggtcggtgctgttggaggccagtgaccggcaggcggagaagaacgccaagcccaacctgagcctgcgagggttcgacgtcatcgagaggatcaagcagaggctggaggccgcgtgcgcgctgacggtctcgtgcgcggacatcgtggccttcgccgccagggacagcgttaagctgagcggtggcctttggtacgccgttcccggcgggcggcaggacggcatggtgtcgcgggcgagcatgaccggcgacctcccgcctccgaaccagcgcaacgtggacctgctcgcgcagtacttctaccgcaagggcctgacgctggacgaaatggtcctcctctcagccgcgcacacggtgggcatcgcgcactgcagctcgttcgactaccggctgacgagcgaccaggacaagggcatggacccggccttccgcaacagcctacggagccagtgccagtacaaccccagcaactacgtgcccttggacgccggcagccagtacgcgttcgacaccggctacttctccaacgtgctggccaaccgcaccgtgctcgactccgacgccgccctcgcctcgccgcgcacagcagacaaggtcaagcagtggaagaacaacccggactggttcaagaacagcttc

SEQ ID NO: 18925 - DNA, 654 bp, Zea mays
  Clone ID: LIB3116-030-E12_FLI
gtggagacgctgaccaccatcatgtgggtcacctccggccaccactcggccgtcaacttcgggcagtaccacttcgccggctacttccccaaccggccgaccaccatccggaagaacatgccggtggaggagggcgggccgggcgaggagatggagaagttcctcaagcagccggagacgacgctgctggacatgctgcccacgcagatgcaggccatcaaggtcatgacgacgctggacatcctctcgtcgcactcgcccgacgaggagtacatgggggagttcgcggagccgtcgtggctggcggagcccatggtgaaggcggcgttcgagaagttcggcggcaggatgaaggagatcgaggggttcatcgacgagtgcaacaacaacctggacctcaagaaccgctgcggcgccgggatcgtgccgtacgagctgctcaagcccttctccaagccgggagtcaccgggaggggcatccccagcagcatctccatctgatccatcctcagcatgcattagtccaattaattaaatcgggggttgtactattattgcatgcagaggctgcttgtcgaataaaacgtactatatgtacgattgtattgtacatgtgtgtcaatgcaacaagaggcacgtttgagactttgagtt

SEQ ID NO: 18926 - DNA, 845 bp, Zea mays
  Clone ID: LIB3116-034-B7_FLI
atcctattatgggagctttaaggatagaatgaaccagtgtagtagagaagacggaatgaatagcatgtctcaaatgatgcagcatacttcagcctaatatcccttcccattgtttcattctatcctattatgggagctttaaggatggcttatccaaataaatatgagatttatcgaagggttgacactctcaatggaaaagagaactatattcttatagctgaattcacgaacaagccaactcctgatgagatcaccagtgctttcaaaggacaaaaaagggaagaaaaggcatcttctggattctggggtttcttaagtggtttattttaagtcaagcgatctgctgtacggcgatgcaatcctccttgtatatttttatctgataagggatgtaatatggttcagaaaatatccgttcggatccggattcgaagatggtgaacactggttcagatggaattttcggatatccggacttttttcggataacggatacgaatacggatattttgttcggatatcgaattcgaatacaatatgtctgatattcgtcggatatcgaatatccggatattttatcggataaatcttctcggatatccagatatcttatctggatagctgtgtgcattttgttgattgtttgtagaaagaaattaataatacacaaatagcctcaaaaattcatgaaaatttatggaggcataccatatgtccacatataatcctccaaaatatttggaccataaaatccacaatattgtagtgtttctttcatttcactttcacttgtgtgaattacacgggaaatcactctaattatccaagttcactttatcatt

SEQ ID NO: 18927 - DNA, 1557 bp, Zea mays
  Clone ID: LIB3116-034-C8_FLI
gggcctcttcctcctctctctactctccaagttctcttctccgtcgaccgctctacacgtctcttgtcgacctggacaccgaggtggaagaaggaagcagtcagcagatggatccatggatcagcagccagccttctctgagccttgacctgcgcgtcggcctgccgccgctcagcctccaccaccaggcgccggtggccgtcgccttgcccaggcccaagctgctcgtcgaggagaacttcctcctgccgcctccaaagaaagaaccagaggtcgcggctctcgagacggagctgcagcggatgggcgaggagaaccggcgcctggcggaggcgctggccgaggtggcctccaagtacgaggcgctgcgggggcagtacacggagatggtggccgcggcggccacggcctgcgggaaccacccgtcgtccacgtcggagggcgggtccgtgtcgccgtcgcggaagcgcaagagcgagagcacggacaccgcgccgcccgcgcagcagctactgcaccagcactacccggcggtggcgccggaccagacggagtgcacctcgggcgagccgtgcaagcgcatccgggaggcggagtgcaagcccagggtgtcgaagctgcacgtgcacgccgacccggccgacctcagcctggtggtcaaggacgggtaccagtggcgcaagtacgggcagaaggttaccaaggacaacccctgcccgcgggcctacttccgctgctccttcgccccggcctgcccagtcaagaagaaggtgcagcgcagcgccgacgaccccaccatcctggtcgccacgtacgagggcgaccacaaccacggccagcccccgccacaggcgcaggcgccgcacgacggctccagccctggcgccagcaagaagccgccgtcgccgccgaggccggtcgccgccgctccggcgccgctccaccaccagcaggtccagcagcaccagcagcagcaggcggttggcgcggtgaaatgcgagccgcccgtggccgcggcggcgtcggagctcatccggcggaacctcgcggagcagatggccatgacgctgacgcgggaccccagcttcaaggcggcgttcgtcaccgcgctgtccggccggctcttcgagatgtcgccgaccaaggactgacggaacggatcggatggattgggagattggcatcgcaggagattctggatcagattgtcttcgagcgcacgccgcaatggtcaactgcgcagcgctggcttggctgtcagagcgaaacagcggtaacagagcaagacacgaggggtctgcactctgcagttgtgcaggaggaggaacagacacaaggggaggacggcgcgcggccggacatggcgtggaacagagatcgtcgtcaccgccggcgggggtgtggtcgacgacgcgacatgcgaaacactacgtgctagctagcataggaaaaaacaacatgaaatcgtacaaccaaccaatccctcgcactgttttagttgttagctgtaggcgaaactgttcatccaattgatcaaatgaaacttattttttccct

SEQ ID NO: 18928 - DNA, 456 bp, Zea mays
  Clone ID: LIB3116-034-E10_FLI
gacttccggtgcgccggcgcccgctcctgcgaggccgaggccgaggcggctgcgttcgaccacgacatttggagcatctggtgaaccgagccggtgccggtgccggtgccggtgccggtgccggtgcgttcctgttgcgctggtcttgctctctgccgacggtagtgtcttggtacaacagccggaggatgtgtatgcgaggtagctagtcgactagatgcgatggtgtgccgtgtgtgcatgtcggcgttggtccaactccattgatcgcgcacactgtctctgtctcccgggccgggcagacgtgcttggttctatgcgtgagcaacggcggcaatttcaatccgagcacgttgccggtgtgttcatttgacattttaggcaggcattgtgtgctacgggattgcaattcgcagttcacccaagctgggcatgtgatcaacacgttggaggtgg

SEQ ID NO: 18929 - DNA, 840 bp, Zea mays
  Clone ID: LIB3117-005-E8_FLI
aacatagaaagtggaatccagtagcaacaatagagcaacaatggcgaccaagatattttccctccttatgctccttgctctttctgcatgtgttgctaacgcgacaattttccctcaatgctcacaagctcctatagcttcccttcttcccccataccttccatcaatgatagcttcagtatgtgaaaacccagctcttcaaccctataggctccaacaagcaatcgcagcaagcaacatacctttatcacccttgtttcaacaatcgccagccctatctttggtgcagtcattggtacaaaccatcagggcacagcagctgcagcaactcgtgctacctgtgatcaaccaagtagctctggcaaacctttctccctactctcagcaacaacaatttcttccattcaaccaactgtctacattgaaccgtgctgcttatttgcagcaacaactattaccattcagccagctagctactgcctactctcagcaacaacaacttcttccatttaaccaattggccgcactgaaccccgctgcttatttgcagcagcaaatactactaccatttagccagctagctgcagcaagccgtgcttccttcttgacacagcaacagttgctgcctttctaccagcagtttgcggctaaccccgcaaccctcttacaactacaacaattgttgccctttgtccaacttgctttgacaaacccagcagcctcctaccaacaacacatcattggtggtgccctcttttagattgcttattagttgtaattcaataataaagttttttggatgatgtatgtggccaaccagaaataagaagttacatttcc

SEQ ID NO: 18930 - DNA, 805 bp, Zea mays
  Clone ID: LIB3117-006-E1_FLI
cctggctctcgctgcgagcgccacctccacgcatacaagcggcggctgcggctgccagccaccgccgccggttcatctaccgccgccggtgcatctgccacctccggttcacctgccacctccggtgcatctcccaccgccggtccacctgccgccgccggtccacctgccaccgccggtccatgtgccgccgccggttcatctgccgccgccaccatgccactaccctactcaaccgccccggcctcagcctcatccccagccacacccatgcccgtgccaacagccgcatccaagcccgtgccagctgcagggaacctgcggcgttggcagcaccccgatcctgggccagtgcgtcgagtttctgaggcatcagtgcagcccgacggcgacgccctactgctcgcctcagtgccagtcgttgcggcagcagtgttgccagcagctcaggcaggtggagccgcagcaccggtaccaggcgatcttcggcttggtcctccagtccatcctgcagcagcagccgcaaagcggccaggtcgcggggctgttggcggcgcagatagcgcagcaactgacggcgatgtgcggcctgcagcagccgactccatgcccctacgctgctgccggcggtgtcccccactgaagaaactatgtgctgtagtatagccgctggctagctagctagttgagtcatttagcggcgatgattgagtaataatgtgtcacgcatcaccatgggtggcagtgtcagtgtgagcaatgacctgaatgaacaattgaaatgaaaagaaaaaagtattgttcc

SEQ ID NO: 18931 - DNA, 392 bp, Zea mays
  Clone ID: LIB3117-007-C11_FLI
ggaacgtggccccgcggctgaccgtggatgctggactgccagcattgcctggattagatgacatattggacgtccctggagggctggatgggcagggcaacgacatcagctcgtggttcacggatggccttgacgactcgttgcaagacattgatctttcaggcgccctggagatcccggacgatgacctcacccagctgggttttatatgagaaggaagcacttgttgcttgctctgtgcatatatgttctttttttgggtgcttacctaatgtatggtagtagatataattaaccggtttaatctccctgccacaaccctgtaatcgaacctgcatggcatggaatggttagttgcagatgagttattcgattctcgtagcagcaagaac

SEQ ID NO: 18932 - DNA, 695 bp, Zea mays
  Clone ID: LIB3117-008-D5_FLI
aacgcagcaagcagacagaaggacaggcaggcagcgagtgcaaccgcgagagcgatcagcgatgggctccttcttctcgaccttagtgacgccccctccggccgccgacgacccgaactgcgccgtggtggccgcgcactccaaggccacctacgacgagcagtgggcggcccacaagagcagcagcaagctgatggtgatcgacttctcggcgtcctggtgcgggccctgccgcttcatcgagccggccttcaaggagctggcctcccgcttcaccgatgccatcttcgtcaaggttgacgtcgacgagctcgcggaggtcgcaaggacatggaaggtagaggcgatgccaacgttcgtgctggtcaaggatgggaaggaggtaggccgtgtgattggggctaagaaggacgagcttgagaggaagatcaggatgttcgtcacgtcatcttcctcgtcctaacttagcagtgcatacactcccaccttcttactggtttctcgactccagtggttcacctgggacggggttgctgaaatggttcccttctctgaatactgaaaaatcaaaaaaagaagtatatgaaaaaatgatggtagacgtgtctgggtcaataagagtttctgaaacttggatttgtatgtgtcagtctctgtgttctgtttccaaggaatggatcatgtgagtttggaat

SEQ ID NO: 18933 - DNA, 1304 bp, Zea mays
  Clone ID: LIB3117-008-D8_FLI
gggaatcgcaccggcagggccgcggccggcgggcgtcgcacttctgcgacgaggacggctacgacttaccttcgtcagcctacgatgcgacgccgcgccaaaacgaggaatcctctgaagacaacgacgacaccagcgacgcaacagcggaggacgaaccagagagggatacggaagcaggcgagcaggaccaatggcaaggatcaatgccttccaagtttcacctataccagctctccgtgcagcaccgagtggatccgtactgatgcaagaaggacagcaattggcttagacttggatcttgagtcacttgagtggtgccttgaaaacaacctaagcaagattggagctgatgggtattcaagaatgttgcttttccatggaaatgttctacaaccaatggaatcccgtcttgtcaagcaaaagtttactaatcttgtgcatggtctagatttgaacagcaacaatggcacaggaagtaacagttgcaagcagatgggtcttgctgactcgaagtgcttagccaatctgaccatgtcagaggcagattttcctgcaagggatattatctgtgcattcaactacagctgctgttgcctgcatagtagaaaggacttggttttatatttcaggcatgtatgcagtgtgctctcggaaagaggtggtatatttgtaatggatgtatatggtggcatatcatctgaacgcaagttacgtctccagcggaaattccccagcttcacgtatttctgggagcaagatgagtttgatatcatcagtcgccaaacaaggatcagtctccactttcaaggcggaaagaaacagatgctgcgatatgctttcacataccattggcgcctatggtcgattccggagatcaaggactgcttggaggaggctggattcaagtgggtccacgtttggatgagggagatgccaaatacccagtcaggtggaaacgccaaggagtataacgccaaccgggacgtgaagtacgaagaatcgcagcatttcaaccaaggagatgcttggaacgcctatgtcgttggagtagcaaatgtctagccggtacgtgctgaattctgctacgaaaatgtgatggtggctctcagtttcccaggttcgtggacgcttccgctttgatcacaactcctgcatcgcgttgctgcggaggaagtatgcagcaggctggctattaccggacccagagaacttttactccagaacacggcctcagtgatgtttctgttttcaaaatgaaatgctggcaacgtgacatgcctttgaatgtatttcttacggat

SEQ ID NO: 18934 - DNA, 756 bp, Zea mays
  Clone ID: LIB3117-009-G6_FLI
gatcaacaagattgaggagatctacctgcactcgctgccggtcaaggagcaccagatcgtggagaccctcgtcccggggctcaaggacgaggtgatgaagatcacgcccgtccagaagcagacccgcgccgggcagcgcacgcgcttcaaggccttcgtcgtcgtcggcgacggggacggccacgtcgggctcggcgtcaagtgcgccaaggaggtcgccaccgccatccgtggcgccatcatcctggccaagctctcggtcgtgcccgtcaggaggggctactggggaaacaagatcggccagccgcacactgtgccctgcaaggtcaccggcaagtgcgggtccgtcaccgtgcgcatggtgccggcgcccagggggtccgggattgtcgctgcccgcgtgcccaagaaggtcctccagttcgccggcattgaggatgtctttacctcgtcccgtggctccaccaagacactcggtaacttcgtcaaggcaacctttgattgtctgatgaagacctacggcttcctcactcctgagttctgggccgagaccaagtatgccaagaccccgttccaggagttcaccgacctcttggctaagccgacaaagggtcttctgatcgaggctcccaccgagacagtggaagcttgaacgtcttagtttactgttccaagtgtcgcgaaaagagttttctgtactagctacatattttaaatgttattttgaattatgatgagaaaccaaggtatgcaccc

SEQ ID NO: 18935 - DNA, 530 bp, Zea mays
  Clone ID: LIB3117-010-E9_FLI
gggaactcctaatccagttttaaatgcaattacaactggtgttgcttttgcagtatttcaaggtggctttttcatgattgggcagaaattctcaaagccatcaagtgaagatacatactactctctgacaagaagcatgctgcacaaactgggtcttgaaaaatatgaaaagaatttcaggaagggtctcctcaacgatcaaacattaccactccttacggacagtgctctgagagatgtgaagatccctcctggacccagacttctcattctcgaccaaattaaaagggaccctggcctggttcgagcaaagtgaagtcacaattgtcaacaattggtcctttctgagctgcatagggtttgaaagcaatgccacctcttttttttaaataagctttctaggaaagtaagcaataatttagctgtgctgttgttaattgtttttggccgatcaatttgcatcactcattaaattttgaacatgtgtttacatgcatcttattcaaatttaaattggcattccgaacgat

SEQ ID NO: 18936 - DNA, 733 bp, Zea mays
  Clone ID: LIB3117-011-B2_FLI
ggcttctcctccccctcttaccaagtcctcctcgggttagggttccttagggttttgtggaggggcgatggcggcggctgatgtggagtaccgttgcttcgtcggcgggcttgcctgggccaccagcaacgagtcgctggagaatgccttcgcctcctacggcgagatcctcgactccaaggtcatcaccgaccgggagacggggaggtcccgcggcttcggcttcgttaccttctcctccgagaactccatgctcgacgctatcgagaacatgaacggcaaggagctcgacggccgtaacatcaccgttaaccaggcccagtcccgtggcggtggcggtggcggcggtggctacggcggcggtcgcggcggcggcggcggttatggtggcgggcgccgtgacggcggttatggcggcggtggcggctacggcggtcggcgcgaaggtggcggcggcggctacggaggcggtggcggctacggcggtcggcgcgagggtggcggtggcggctacggcggcggtggcggcggcggctggagggactgatgtgtgggcccatcctggcttcggccgagttatcttatctatctatagtatcgtgttaccgttcgcttctgtcaccgtgttagtgtccgttctacctttggattaggtgttggtaccctgttgttcgctttggttgctcccgctatgaaacgagacgagagaagaatgagcaaggtttttgttcgc

SEQ ID NO: 18937 - DNA, 528 bp, Zea mays
  Clone ID: LIB3117-012-C12_FLI
tcaagatattcagagacgctggaatccatggccacgcattccttactgctggaaaccttgcgaaactgtcggagggtgagtacaagaacttttcggcttctgaatttcggcaaacgttccggagctctgctggcgttgggattattttgcctaccaaacttttccgggtggaggtgaactattgtcgcatcctaaagcaagctgagcatgacagcgcgaagactggaatccagttcagcttttcctcgcccatgtaggaacttgccatggcagccgaagtagctgcactttcctctgtagacttgcattcttcccgttcttttcatgctgaagcaattgaagaggtttacgtgctcccttttcttgtgacgcttgttcattgacacgaggagctgctccttttttttggtgtcttcaggagatgaatttattatttgctgtttttgacctcacgagggatttgtcctcgcacaactcaaataccgatgctgtggctacacaatggtggatagaataatattttggccc

SEQ ID NO: 18938 - DNA, 513 bp, Zea mays
  Clone ID: LIB3117-012-D5_FLI
ccatacccaggctccgcttagcgtcgggcccgcggctgaggcggccgtcggctaggacgcactggccacggccactctcgtcctccagccacgtaacgcccgtggcggctgcgggggctggggagctggagccgccggacctcacccgcttagccaacgccgcgcgcatctcgctctccccgcaggaggccgaggacttcgagcccaagattcgtcaggttgtggattggtttgggcaacttcaggcagtagaccttgagttcattgagccttcacttagagctggtacaacggctgatatttctttgagagaagataggcctgaaacattcgataacagagatgccataaaggaggccattccaagttatgatgatccatatatcaaagtgccaagagtgctgaacaaagaatgatctgtagcatgtatatcagaattgttagaatattaatactctacaatgcagcatggttaaacataatgataaaatttgcagaaagattgaacgagtc

SEQ ID NO: 18939 - DNA, 612 bp, Zea mays
  Clone ID: LIB3117-012-H3_FLI
aacaactaccaagacttcatcaccatcctgaccggtcacgtgaacagcggcctgatcccgatgagcaggatcgacgacgccgtgacgaggattctgcgcgtcaagttcaccatgggcctgttcgagaaccccatgccggaccctagcctcgccgaccagctggggaagcaggagcacagggacctggcgcgggaggcggtgaggaagtcgctggtgctcctcaagaacggcaagcctggcgacgcgccgctgctgcccctgcccaagaaggccgccaagatcctggtcgccgggagccacgccgacaacctggggtaccagtgcggcgggtggacgatcgagtggcagggcgacacgggccgcatcaccgtcggcaccacgctcctggacgccgtgaaggcggccgtggacccgtcgacggcggtggtgttcgcggagaaccccgacgcgggcttcgtcaggaacggcggcttctcgtacgccatcgtggccgtgggcgagcacccgtacacggagaccaagggcgatagcatgaacctgacgatcccggagcccgggccgagcaccatccagacggtgtgcggcgccgtgccctgcgcgaccgtgctcatc

SEQ ID NO: 18940 - DNA, 1259 bp, Zea mays
  Clone ID: LIB3117-013-A12_FLI
ctgaagagccagctggatggttccagggtacagcagactctatcagaaaatttatctgggtactcgaggattattacagtcacaaatccattgacaacattgtaatcttgagtggcgatcagctttatcggatgaattacatggaacttgtgcagaaacatgtcgaggacgatgctgatatcactatatcatgtgctcctgttgatgagagccgagcttctaaaaatgggctagtgaagattgatcatactggacgtgtacttcaattctttgaaaaaccaaagggtgctgatttgaattctatgagagttgagaccaacttcctgagctatgctatagatgatgcacagaaatatccataccttgcatcaatgggcatttatgtcttcaagaaagatgcacttttagaccttctcaagtcaaaatatattcaattacatgactttggatctgaaatcctcccaagagctgtactagatcatagtgtgcaggcatgcatttttacgggctattgggaggatgttggaacaatcaaatcattctttgatgcaaacttggccctcactgagcagccttccaagtttgatttttatgatccaaaaacacctttcttcactgcaccccgatgcttgcctccgacgcaattggacaagtgcaagatgaaagatgcatttatctcagatggttgcttactgagagaatgcaacatcgagcattctgtgattggagtctgctcacgtgtcagctctggatgtgaactcaaggactccgtgatgatgggagcggacacctatgaaactgaagaagaagcttcaaagctactgttagctgggaaggtcccagttggaataggaaggaacacaaagataaggaactgtatcattgacatgaatgctaggattgggaagaacgtggtgatcacaaacagtaagggcatccaagaggctgatcacccggaagaagggtactacataaggtctggaatcgtggtgatcttgaagaatgcaaccatcaacgatgggtctgtcatatagatcggctgcgtttgcgtctacaaaacaagaacctacaatggtattgcatcgatggatcgtgtaaccttggtatggtaagagccgcttgacaggaagtcgagcgttcgggcgcaagatgcgttgtctggcatgctgttccttgaccatttgtgctgctagtatgtactgttataagctgccctagaagttgcagcaaacctttttatgaacctttgtatttccatt

SEQ ID NO: 18941 - DNA, 261 bp, Zea mays
  Clone ID: LIB3117-025-B2_FLI
gtgtatgttgctgagcagtgtaagaggccatttgagcatggcttccagtgcggaagctacaaggttccagcaaactgatgatatcgcaagagggaagcgcttgacgtagtctttagatttcaattgttgcagccgatcaaccttcttagggttgtataatatgaagtcaatgttgagactaatgtgaggtgggagaggcctattgatgcatcaaaagtattatgagctaataataaagccttctccacagattttatgatt

SEQ ID NO: 18942 - DNA, 994 bp, Zea mays
  Clone ID: LIB3117-038-H6_FLI
tcaagctccaccagagaagacagcccgccgaggcgccgacggccgcagccgcgggcggactcgtgagtcgcgagtacgccgctgcagttcccaactcagggtgcctgcccgtaacctacccaagagcggtcccgccatgcgcgcggaggtcacccagatcagcgccctaaccgccgtggccgcgcacgtgctctgctctgcgggccttgctgccgcccacgccctcgctggccgcggcgcgctcgtctccgaccccgcgctcgcccttcgccttctcatggtctgtgaagcgcccatagtcatcgcagtgttcagctacctccggcgtgatgctaaaagttgctcgtttttcagggctgttgcaagaggattgatcggcttgcccgtgggagcgttccttaatgcatttggagcaatcattcttggggcacctgttggagtcaagtactggatagctactatttactggtcgcttgtcatgtccctgttcacgtttgttcccgcagcatgtgtctttggagcatccaggatcgattggcaggatgtgctttctcactccatttatttcacgccaactgatgttgagaactacatgatctctgcaccttgccatggagctgtgctaggagcatggctcggtgcttggcctatgccacttgactgggagagaccatggcaggaatggccaatctgtgtcacttatggtgcagttgctgggtatttgatcggaatggcagtgtcattggtcctaacagcacttcacaagagaagggtccgtgcaaaagctgactagccgttcttcccacaaagcaatgtatttgccgataacctttcttgttcctgcgagtactcgtcactttcagtagccttttcacccaggttcacattgttgtattcttttgaagcccccctcatttttttttgcagttgtacattgttttcttgaatgtaatgtgaaggactcagtttattactgtaaaatgcacgtttgttg

SEQ ID NO: 18943 - DNA, 844 bp, Zea mays
  Clone ID: LIB3117-040-C3_FLI
ctctcgaccgatcggcgccacgagtgctttgctttctggctgctgggagcgcgccatggggaggtcgccgtgctgcgagaaggcgcacaccaacaagggcgcgtggaccaaggaggaggacgagcggctggtggcgtacgtccgggcgcacggggaggggtgctggcgctcgctgcccaaggcggcggggctgctgcgctgcggcaagagctgcaggctgcgctggatgaactacctccgcccggacctcaagcgcggcaacttcaccgacgacgaggacgagctcatcatccgcctgcacagcctcctgggcaacaagtcagtgagcgtgtgccgggctgccggcgtccttctgtctagctattactctattagctctcgtcgtcgctgttcctattcctagtcgatacggttaatacaacaataatgctcccggccgggcgcttcgatgatcgcctaacgccacaacgaacctgctctcttctcttaccccccgcaggtggtccctcatcgccgggcagctgcctggccggacggacaacgagatcaagaactactggaacacgcacatcaagcgcaagctcctcgcccgcggcatcgacccgaagacgcaccgcccgctcggcgccggcgccgacgccgccgcgccacccggcgtggtcgcgcaccgggcgctgctgcaccgcgcaggcgcagcccccgtcgagctcgccgtgaagccggcgccggcggagtcatccgacgacggcggccggagcagcgccagcgccagcagcggcggcggcgccagcgtggaggagccgcggtgccccgacctcaacctcgacctgtccgtgggcccgcc

SEQ ID NO: 18944 - DNA, 753 bp, Zea mays
  Clone ID: LIB3118-003-B2_FLI
gctccatcactgatgccggggatcactacgttctgagatccaatagtgggagcgaatacgagtgtatggtgacggtggtggcaaccccactcgacgagctgaacattacgtttagccctccaatctccattccgccgaggaagatgcagcacacacatgcgacctttgtgagaggcatattgaacccgggatattttggtctgaactcggcatcagatattccagagctgattggtaccctagagctccctgatatccctttctcctgcatctctgttctgaagaggtacagcgaaggcgacatggcggcgtacaagatgttttcacgggcaaagctggatgatggtttgctggatcagatcttcagggctcggatagagacgatccggatcaactgggctgcttacccgcactaccaagccccagaggagtttgctccgatagtgttggacgggaagcagctgtactacgtgaacacctttgagagcgccgcgagcgccatagagacgggtgctgtagcagcagagaacgtggcgcggctcatcatctccaggctctctctactaccgcaggcacagcagcagcagcctcatatcatcaagtcattcgccgaacaagaatcccagcgtcgccatgtagacctgtgaaatgttgtaatggcattgtagccagttttatcccagctagcattttggtacatttatttatgtatttgaccaatggtttggtttgtaaatggatgatatagttagt

SEQ ID NO: 18945 - DNA, 419 bp, Zea mays
  Clone ID: LIB3118-003-B3_FLI
caattctaaatggtggtcagaacggaagtgccatgtctgcgcttggctctgagctagagaatgctgcagcagccatggccaatggccacgagccatcaggtagtggtgtttagccatggggtaaagccacgagcatcatcgcgcaatgatctctgcagtaggcggtcagttggagcctgcttagatatggaatcctgtgcctgtaggttttaagagctgcgacaatgttttgtcccgtgtaatcaagtttgcagccgttgcggctatagcaagtttgtttcttgtcttgagtcgtgactgttaagaactgatgaagttcattacttacttgcgtgtagttatacttagatatgagatgttctagccatgcagcaacgttttctatcaatgccagcaattagggagcgagcgtttggcac

SEQ ID NO: 18946 - DNA, 845 bp, Zea mays
  Clone ID: LIB3118-003-F3_FLI
cagagtcaattgagaaatgggaaaagtggaaacagaaccactgccaaccaaacttctggaaaaatgttgatcctgtcggtaagtgtggtccataccatcctatcaatttagcctcagttgaagttgagggttctgtaaagaatgaggtagtggggagtcaaggtggtctctgccaggggtattttgaaagtgataatttactggagccaataaagtccaatttgaaggttgttaatcgccacaaccatgacacaatttctatggctgtgattgacaagatgggccacatagcagttgggacatcaaccaatggtgctacatttaaaattccaggaagggtgggcgatggaccaataccaggatcttcttcatatggtgatgatgaagttggggcttgtggagcaactggtgatggtgatattatgatgcgcttccttccatgctaccaagtggtagagagcatgcgacaagggatggatcctcgagatgctgccacagatgctatatcgagaattgcccgcaaatacccagatttcatcggtgccgtatttgcagtcaacaaggaaggggtgcatgccggggcatgccacggatggacattccaatactccgtacggaattccagcatgcaagatgtggaggtcattacagtatatccttagcaatcgcaattcaacgaaaacaaaagtttgctttatcagcatgtttaaaaatgtcacggctgcccccctgttgatgttttaaaaatgttctgtgcggattatttcaatgttttcttaaagtcgattgttttgaaactagtagtactgtatgtaccaatctgaccttagttgttttttccctgg

SEQ ID NO: 18947 - DNA, 1298 bp, Zea mays
  Clone ID: LIB3118-003-F5_FLI
cttccaccgcgtactccctccctccctcgtctcgtcttcgtctccaggtttcgcgggggccaaggtttctgccggagcagtcgcggtctgcgctgcggcacggcgacgaggtggggatggagtaccgcgacaagctcgtgctggcgcccatggtccgcgtgggcaccttgccatttaggctactggctgctgaatatggtgctgatattacttatggagaagaaattattgatcacaaattcttgaagtgtgagcgtgttacaaatgaatctcttgggactactgattttgtggagaaagggactgacagtgtagttttccgtacatgcccacaagaaaggggcagggttgtattccaaatgggcacatcaaatgctgtgagggcacttaaagctgctcagatcgtgtgccgtgatgtttctgctatagatatcaacatgggttgtccaaagtctttttcacttagtggagggatgggtgctgcattactctccaaacctgagcttatacacgatattttgacaacattgcggaggaacttggacacaactgtgacatgtaaaatccgtcttctgaacacacctaaagacactgtggagttggcacgccggattgagaaaactggtgttcctgctcttgctgtccatggaagaaagattaaagatagaccgagagatcttgccaagtgggatgagatagctgatgttgtgtcagcgctgtcaattccagttatagctaatggagatgtctttgagtatgaggattttaagagaattaaagatgcaacaggtgccgcgtctgttatggttgctagaggtgccatgtggaatgcctccatcttttgtgccaaaggaaaaacaccttgggaggatgtcaaaagagagtatgtaagaaagagcatattgtgggacaacgatgtgaagagcacgaaacatacattgaaagaaatgataatgcactattcttgccttgaacttcctgaggggaaaggcgttataaagtgtgatacatcagaagatttagcgagactgtacggggaagaggactactataattttgttgttgcaaataggaaatgaatacaatttgatgttgtgagctctcatgtgtaccagcttctgcttgattcctatctcaccctttattgatgggattaggaggaattcctgccaccaaggacaacgggatttgccattttggcgctgtctggacttaacactgaagctgctgatctttctcttgtactggtaatagataggtttatacctggaattaatcgaataccatatttttttttg

SEQ ID NO: 18948 - DNA, 514 bp, Zea mays
  Clone ID: LIB3118-006-G1_FLI
ccatacccaggctccgcttagcgtcgggcccgcggctgaggcggccgtcggctaggacgcactggccacggccactctcgtcctccagccacgtaacgcccgtggcggctgcgggggctggggagctggagccgccggacctcacccgcttagccaacgccgcgcgcatctcgctctccccgcaggaggccgaggacttcgagcccaagattcgtcaggttgtggattggtttgggcaacttcaggcagtagaccttgagttcattgagccttcacttagagctggtacaacggcttgatatttctttgagagaagataggcctgaaacattcgataacagagatgccataaaggaggccattccaagttatgatgatccatatatcaaagtgccaagagtgctgaacaaagaatgatctgtagcatgtatatcagaattgttagaatattaatactctacaatgcagcatggttaaacataatgataaaatttgcagaaagattgaacgagtc

SEQ ID NO: 18949 - DNA, 535 bp, Zea mays
  Clone ID: LIB3118-006-H3_FLI
cccgcacaacggcacgattctcctcctccgtccgcgtagctctcggtttcggcgatgtcggggcgcggcaagggcggcaaggggctgggcaagggcggcgccaagcgccaccgcaaggtgctgcgcgacaacatccagggcatcacgaagccggcgatccgtaggctggccaggaggggcggcgtcaagcgcatttctgggctcatctacgaggagacccgcggcgtgctcaagatcttcctcgagaacgtcatccgcgacgccgtcacctacaccgagcacgctcgccgcaagaccgtcaccgccatggatgtcgtctacgcgctcaagcgccagggccgcacgctctacggcttcggcggctaggccgcctccccttctgatgctttgatatgacggccgtggtcggttgtgtgtctagttggccggtctactgtagtttgttctgtatcttcgtttcgaggtgttccagtttctagcccatttggtgtaatattttcacagctattatcaatggaaagccctcggttctatc

SEQ ID NO: 18950 - DNA, 580 bp, Zea mays
  Clone ID: LIB3118-007-B6_FLI
gccaagatccaggacaaggagggcattcccccagaccagcagcgtctgatctttgcgggcaagcagctggaggatggccgcactctcgcggactacaacatccagaaggagagcacccttcaccttgttctccgcctcaggggtggtatgcagatctttgtgaagaccctgactggaaaaaccataaccctggaggttgagagctcggacaccatcgacaatgtgaaggcgaagatccaggacaaggagggcatccccccggaccagcagcgtctgatcttcgccggcaaacagctggaggatggccgcaccctagcagactacaacatccaaaaggagagcaccctccaccttgtgctccgtctccgtggtggtcagtaagtcatgggtcgtttaagctgccgatgtgcctgcgtcgtctggtgccctctccatatggaggttgtcgaagtatctgctgttcgtgtcagtgttggtttaataatggaccggttgtgttgtgtgtgcgtactacccagaactatgacaaatcatgaataagtttgttgtttgaaattaaagcctgtgctcattatgtttt

SEQ ID NO: 18951 - DNA, 277 bp, Zea mays
  Clone ID: LIB3118-009-E3_FLI
gagaaggttgtgtgcatggagaaggttgtgtatgttgctgagcagtgtaagaggccatttgagcatggcttccagtgcggaagctacaaggttccagcaaactgatgatatcacaagagggaagcgcttgacgtagtctttagatttcaattgttgcagccgatcaaccttcttagggttgtataatatgaagtcaatgttgagactaatgtgaggtgggagaggcctattgatgcatcaaaagtattatgagctaataataaagccttctccacag

SEQ ID NO: 18952 - DNA, 99 bp, Zea mays
  Clone ID: LIB3118-009-E4_FLI
catgtatggtatccgtgtctggcaaacttattttgaggcttgttaaatatgtaccttttgtctctcaagatgttaaataaagcaaattaacttccagtt

SEQ ID NO: 18953 - DNA, 945 bp, Zea mays
  Clone ID: LIB3118-011-B1_FLI
accatgactagtgctgtagcaaggtcagccaagaggaagagaaagaatctatacaggggtatccgccagcggccttggggcaagtgggctgctgagatcagagatcctcagaagggtgttcgtgtttggcttggtactttcaatagtcctgaggaagctgcaagagcttatgatgccgaagcgcgcaggattcgtggcaagaaggccaaggttaactttcctgatgcaccagcagttggtcagaagcaccgttctggctcagcttctgctaaagcatccaagtcaagttttggacagaagcctatcgtcaaaggaagtaactcctttggctgctcagacttgggctgggagaatgataccaagacaccagacatcacttccattgctcccatttccactattgcggaaggcgacgagtctgcatttgtcgacagcaattcaaacagctcatttgtgcttcctgccctggagaacagtgctgttgatctcactgatgggctgacagatttagaatcctatatgaggtttcttctggatggtggtccaagtgattcagttgatagccttctgaaccttgatggatcgcaggatgttggtagcgacatggacctctggagcttcgacgacatgcccatcgtcggcgatttcttttgaggattttgaagcttggtcataggagtatgtacatagggactaggggaataaagaccgggggagattgggaagcacctgcttggcaccttgggggtagcatttgctcgtgtctagctcagagatgcagaagttgcattctgaaactacttggttatcgacctgttccctattttagctatctctttatgagagccatttatgagactgaaccattttgttttgctttcttttcgttgttacaatatatggtttaacattatgatttatggatatgtgccaaatatggtgctc

SEQ ID NO: 18954 - DNA, 626 bp, Zea mays
  Clone ID: LIB3118-011-C4_FLI
gcgcagaagacgtcggcaagcgttacgccgtctcggcaagccatgacggcatggaccagcgcgccagggacgcggccgtccagaagttcaggtctgggtcgtccagcatcctcatcgccactgaccacggaggcaccaccaacgcgatgccgcaggttcccatcatcatcaactatgatcttccgacagagtccatgcggtacgtccgtcgtctccagcagcagaacaggcagttcaggaggtcggtcagtgtggccatcagtttcgtgactcctgctgaccgacgcaccctctccgccatcacgagcttttgcaagtgctacatgggggagctgcccaccgacttgaaatgaccgtacctctttggtgagctatggaatgcagaagtagaactggtcagcatgcatgcatgcacaggttcttctggctgcaaggaagcggcatgcatgttcgtttcctcttgagatactttgcgcttgttgaaatttgaatactcatggaaggtttaacttcctatcactcagaaccttgagttccccagtatcttatctttgatgtaatattgttatttactggatgtggtcgtttgacagttgaatgttatatgatgacttatcttgtttttc

SEQ ID NO: 18955 - DNA, 541 bp, Zea mays
  Clone ID: LIB3118-012-H8_FLI
gctcgccgccgccgccgctcgtccctcgccccatcgcgatggcccggatcaaggtgcacgagctgcgggggaagagcaaggcggatctgcaagcgcagcttaaggagtttaagtcggagctctccctgctacgcgtagccaaggtcaccggcggggctcccaacaagctctccaagatcaaggttgtgcgcacctccatcgcgcgcgtgctgaccgtcatctcgcagaagcagaagtcggcgctgcgtgaggcgtacaagaagaagaagctgctcccgctcgacctccgccccaagaagacccgcgccatccgcaggcgcctcaccaagcaccagctctccttgaagaccgagagggaaaagaagcgtgagaagtatttccccatgaggaagtacgctatcaaggcctagatcagtgaaagaacatttatcctgtcaagttttgctcagaagttacttgaatttgagacaaatctatctccatccaagtactatgtagctgatcaactgcatgatgaaaaacgagtactttttgcttgttt

SEQ ID NO: 18956 - DNA, 613 bp, Zea mays
  Clone ID: LIB3118-013-A1_FLI
aattaatggcgtcgtcgtctagcagcagccaccgccgcctcatcctcgcagccgccgtcctgctctccgtgctcgcggctgccagcgccagcgccgggacctcctgcgtgccggggtgggccatcccgcacaacccgctcccgagctgccgctggtacgtgaccagccggacctgcggcatcgggccgcgcctcccgtggccggagctgaagaggagatgctgccgggagctggcggacatcccggcgtactgccggtgcacggcgctgagcatcctcatggacggcgcgatcccgccgggcccggacgcgcagctggagggccgcctagaggacctgccgggctgcccgcgggaggtgcagaggggattcgccgccaccctcgtcacggaggccgagtgcaacctggccaccatcagcggcgtcgccgaatgcccctggattctcggcggcggaacgatgccctccaagtaactgcgaagagcatagtgcatgaggaatgagcttgtagctagctcatatgtctgaataataagcacagcaagaagatgaatgcatttctcggatcgttcatccggaacaataattaaaggggatccggatttgttcttgtg

SEQ ID NO: 18957 - DNA, 442 bp, Zea mays
  Clone ID: LIB3118-014-D6_FLI
cgtcgtcaccagcagggtgtgtcccggccggccctctctagtttctaccccggcccccaacattggcctgatgctgctgccatgtagcccagcgctcccccctcggcttcaccggcggcggcggcaacgacggtgaaaactacatcgggtgctagctccgacggtggtgcgtgccctgttgacgatagggcgcgcggggcgcgggcagcttgtaggcgttcgatcggccatgtagggcaactatacatctttggcaggtctccatcatcctccgtgggagagaagatgcatggtaatggagtgcgtgtgtatgtatgtgtatgcccatggcgcgcgcgcgcggctctgggcgagtcacagtagagatgcaatatcatgtatccagtatctttcttacaacacaaacagtgagaaattattagtaaagtgtgcattgtggtgc

SEQ ID NO: 18958 - DNA, 217 bp, Zea mays
  Clone ID: LIB3118-020-F8_FLI
gattcgatagacttcgcataatttctttcggagtagatctcgatcgacgcatgcatttgctatggaaaatcccgaaacatggaacagaggcagacgtacgtacaacagcacgccgctgctcaacacacgacgaggatacaatttggcatagcaaatgcatgcgtcgatcgagatctactccgaaagaaattcgatagacttcgcataatttccattc

SEQ ID NO: 18959 - DNA, 576 bp, Zea mays
  Clone ID: LIB3118-022-H6_FLI
ggcctcactgctgccgcctgggccaagtcgtcgtcttgctttgccaatccgtcgctccacctgaacacaccggcgaagaggaggcgaagaagcgatgggcgtgaccaaggaggacgtcgaggcggccatcacctctgctctcagcccttccaatctccatcttcagttgttgactaaccaacaaagagcgggtcctttgctgcgccgttgattgattcgtcggtgcgaaggtgtggcgcgagctacgagatcgaggtggtgtcggagaagttcgaggggaagcggctgctggagaggcaccggatggtgaacaccgcgctggcgtctcacatggcggagatccacgccgtctccatcaagaaggcgctcaccccggctcaggcccagccccaggcccagccggagccggccgccgataagccccaggcttaagtgcttaacaccccccaaaacggtttgatcccatatgccgatgcacgattacattggctatctgcttgaataatgcggcggatgcacttgctaaattgcaggatgttatccttgactgattagaaacttctgcaccgtgcattt

SEQ ID NO: 18960 - DNA, 705 bp, Zea mays
  Clone ID: LIB3118-023-A8_FLI
agcaagaaaactagaaaaggctcctcccgaccgcaacgcccctcatctccctcgaccccgacatccccgacccgatggcgcccaaggcggagaagaagccagcggagaagaagccggcggccgaggagaaggcggagaagacgaccgcagggaagaagcccaaggccgagaagcggctgcccgcgtccaagtcctccggcaaggagggcggcgagaagaaggggaagaagaaggccaagaagagcgtggagacctacaagatctacatcttcaaggtgctgaagcaggtgcaccccgacatcggcatatcctccaaggccatgtccatcatgaactccttcatcaacgacatctttgagaagctggccggcgaggccgccaagctggcgcggtacaacaagaagcccaccatcacgtcccgcgagatccagacctccgtgcgcctagtcctccccggagagctcgccaagcacgccgtctccgagggaaccaaggccgtcaccaagttcaccagcaactgagcgcgctgcgggatccgcggatctgttagaagggttctttgctgtgtcctttccccagtcccccaccctacccgcctagtagctagcttgcctgctctataaatccggcgcgccggattgtaatggtcctcttagatttgatgtccctgttgtggaatatagttgtatctctccgcttgctatt

SEQ ID NO: 18961 - DNA, 686 bp, Zea mays
  Clone ID: LIB3118-023-D7_FLI
acctaattcacgcgtttcagggctcctcccatttcgtcggcttcgtttgtcgtcgtcgtaagctgcagctagtgtggactggagatccaccactccaccagtccggtccatctgctggacctcgattggtttcttcttacctaggaacatccggggatgtcgactcctgcgaggaagaggctgatgagggatttcaagcggttgatgcaggaccctccggccggcataagtggcgccccgcaggataacaacataatgctgtggaatgctgtcatatttggacctgatgataccccgtgggatggaggtacgtttaagctgactctccagtttaatgaagaatatccaaacaaaccaccaactgtgcgatttgtttctaggatgttccatcctaacatttatgctgatggaagcatatgcttagatatcctgcagaatcagtggagtccgatatatgatgtagctgcgatactcacgtcaatccagtcattgttgtgcgatccaaacccgaattcgcccgctaactctgaagccgcccgcatgttcagcgagaacaagcgagagtacaaccgcaaagttcgggaggtcgtggagcagagctggacggcggactgatgatgccctgtgttgcgtcgcgctgtgctgcgcagctgctcactgcgccccgcgtccgtccattccatacc

SEQ ID NO: 18962 - DNA, 390 bp, Zea mays
  Clone ID: LIB3118-025-B5_FLI
ctaggatcaatagtgaggagttccttaaattttcttgcgacatggagtacagaaagagggtggatgtgctagtgtttttttcgttacttctcaaatactttgctgctcatgcacatgggaagggtcatgtcacagatgatgtcggtgtttctactctagctaaagaaggaattatgcaaggaaacggagcacgatgtgcttaagggtttcctccatgcaaagataacaagtgctactgctgcattagggggcgaactcatgctcgctactctacgcttgctgagtgtagtcatgcctgcttctaaacaaaaaataagatcattgttattatatacattgtaatggtaggtaatgctattaataatatatgggaattttagttttggtatt

SEQ ID NO: 18963 - DNA, 742 bp, Zea mays
  Clone ID: LIB3118-025-D6_FLI
atatctacagaactctgggagagaacttcaatgagagagttttgccttcaatcatccatgaaacactgaaagctgttgttgctcaatataatgctagtcagctgatcacacagagagagactgtgagtagggagattaggaagatactgactgagagggctagattcttcaacattgctcttgatgacgtctccatcacaagcctgagctttgggaaggagtttactcatgccattgaagcgaagcaggttgctgcacaggaagctgagcgtgctaagttcattgtcgagaaagctgaacaagataagagaagtgcaattatcagggctcagggagaggctaagagtgcggagctgattggtcaagccatagcgaacaaccctgccttccttgccctgaggcagattgaagctgcaagggagatctcccacaccatttcggcctcagccaacaaggtgttcctggactccaacgacctgctgctcaacctccagcagctgaatgtatcgagcaagcagaagaaatgatgtcacaacgttatcccctttcttctgagtttgcagtcagtagtggatgcctttgtaccagacattgtgaggaacgctcggttttggatgtagtttcgccaatcttcctgtgatgtggaacttgcgagtatttgctcaaaggcaagcaagctgacaggttttgtttaaacgtgactacaggctgaggaagttttcaataaggaacaaattctgtt

SEQ ID NO: 18964 - DNA, 397 bp, Zea mays
  Clone ID: LIB3118-027-F11_FLI
caactgctcttgacggttgcagtaactggagttgcagttttgattggatcaatactgtaccaaggtaaggggaagtagttccggggatagtaatttcacgccccttgatgtgtaaattccctcataaccaaaagagtacagtttagaccccagttgagggaaacaaaaaagaagaaagaaagagagagtacagctgagattacaacatttatggaaggaccaatgaagctatgtcgttgttctatgtaaatggtaattttcccatcaaacttgtgggcgtttggtaacctatgcaaaatttgttacaactgcaaaagttgtaatatcttatggattcatggacaaactgtgatgtgcagtcagtcaaaaataacttatcctaatacatttgccaccc

SEQ ID NO: 18965 - DNA, 451 bp, Zea mays
  Clone ID: LIB3118-028-D12_FLI
cgacgtgaaaagagaccgtctgttccgaggttttgcttccatgtcgacgagaggcggcgaggccgcgaggcaggcgacggtgaagatcatcgagacggtgcacgtggaggcggaccggtacagcttcaagtccatcgtccagaggctcacggggagagacgcggtggtcggcggcggcggcgactactcggaaggggcgcccgaccgtggatcatatgaagaggcggcggcgcagcgggctgctgggtttacgagcaagcaagcgagcaggcccttcgctgatcgccacgcgtgtaaagacgagagctgttgatgtccatctgtaatttgttttcttttttttttggaactttgaatcagcgctccatatagatactagggtgtatttggttcaaccaaccaattgtagatttatgaaaacctatatattccactagttcaattgagaatc

SEQ ID NO: 18966 - DNA, 352 bp, Zea mays
  Clone ID: LIB3118-029-D1_FLI
agcggcaagcgcgcgcacacaccaaacgcaactgcaactgcaggtgcaagagcacgccacagcagaaaccaacagttccacacgaagcaagaaaaggggacccccacctctgccgatttccatccgccggggcgtcgtctgtgaccgaccagaccatggacaagatcctggccttctccatcctgagctcgtcgccggcggacatctccgcggccggcctctcctcctcctcgtccgcccggctctcgtggcggcctcggccccaggcggctgcggccgacgcggcgccaacgccgaggcaggagaaggcggccgaccagcgggccccggcggccgagcgccggcgggaggc

SEQ ID NO: 18967 - DNA, 296 bp, Zea mays
  Clone ID: LIB3118-029-G12_FLI
ccactcctcgccctctctactgtcctgtctcctcactccaccggtccaacccaacaaccagccccgccgaattccaaggtttcccgcgtgcggcggcgagcggggcgggacgtgccggggacggtggttgggttggattggattggatcggatcggtgccgcccgttgaccagagcgtaaaccagagatgggcaagggcggcggctgcgtccccagcaagaagcgccagccgccggccgccgcgccttcttcgtcgtccgccgcggcggcggtgccgcgcgaggcgcccgaggagg

SEQ ID NO: 18968 - DNA, 181 bp, Zea mays
  Clone ID: LIB3118-030-G6_FLI
gttttggctaagatcaagtgtagtatctgttcttatcagtttaatatctgatatgtggaccatgtgtttacttcgatattaaatttatttttcgtgggggagggtccactacagtggcttgccactgggctcctcaagcgtcgctcggccgttgcactactgtctgagcctggcgcacccc

SEQ ID NO: 18969 - DNA, 257 bp, Zea mays
  Clone ID: LIB3118-033-B11_FLI
ggtgacagaaaaggattttctcgatgctgtcaacaaggtcatcaagggctaccagaagttcagtgcaacacccaagtatatggtgtacaactagtcggcgtgtcttcatgggatctgttgtttctagaaactctggatctttttcatggttgtatcatcatgagattctctatgcaaaggttgttgtttgtttagcaaattggatgccgagtgatttgtgacctgtaccgcatgtttttaagataacaaggttcttc

SEQ ID NO: 18970 - DNA, 377 bp, Zea mays
  Clone ID: LIB3118-035-B7_FLI
gagccgctgcaccggtaccaggcgacatacggtgtggtcctgcagtccttcctgcagcagcagccgcagggcgagctcgcggcgctgatggcggcccaggtagcgcagcagctgacggcgatgtgcggcctgcagctgcagcagccaggtccctgcccttgcaacgcagctgccggcggtgtctactactgaggaaactatgtactgtagtaataatgtaatggagccgctggctagctacctagctcgctagtttactcatttagcggcgatgagtaacgtagtgtcacccatcaccatgggtggcagtgtgagcaatgacctgaatgaaccattgaaatggaaaggaataatatataaggaaaaaagatgattgg

SEQ ID NO: 18971 - DNA, 545 bp, Zea mays
  Clone ID: LIB3118-035-H12_FLI
ctaaaccgcggcggactcttcgtccagcaaggtttcccatccagatccggccacgccacttgctcctcttctccgccacaccgatggtgtacgtggattcctgggacgagttcgtggagcggtccgtgcagctcttccgcggcgaccccaacgccacccgctacgtgatgaagtaccggcactgcgaggggaagctcgtgctcaaggtcaccgacgaccgcgagtgcttgaagttcaagacagatcaagctcaagacgcaaagaagatggagaagctcaacaacatcttttttgctctcatgacacgtgggcctgatgttgatatcagtgaagtttcagggaaggaacaggcagagcaacagcaagcgaagaaaggtcggggaaggaggcaataatgcggtctgatccttatttgttacagaaaattcacaactggaatgatggattaacatttcattgactttttgtactctgaagaaagtttttccagtacagaaccgagaacaaactaaatgcactctatcatgaatgaatgcatgattgag

SEQ ID NO: 18972 - DNA, 234 bp, Zea mays
  Clone ID: LIB3118-037-G3_FLI
aggagccatgtttcgtttgatgtgatgtaaaaaacaactcttaatgtggcctgagatggtgaatgttggcaaaggagccatgtttcgtttgatgtgatgtgacataaatgtgtactttatgcttgagtattatttaactgctccttttaggtgaagaataatcttttagattttgtacttatgccaagttgtacaagcatctatttagaacctgctatctgagtttatttcttg

SEQ ID NO: 18973 - DNA, 551 bp, Zea mays
  Clone ID: LIB3118-039-C10_FLI
ctcaattgcccaccataacaccgtttcgctttctcgctccaactcccacagaaacggccgccagcgccgcaggcccgcagcgttgatggccgccgcacctggcgcaccagaggagcgactcggcgtcctcactcctcaatgcctccgggagaagaccggaatctccgagcccaggtcggaggtgcacagggacggaaactaccaccgagcggtgaacgtgtggatctacagcgagagcaccggggagctgctgctgcagcgccgagctgattgcgaggaattgtggcctgggcagtgagacatcattagcgccggccacatctccgccggcgattcctcgcactctcggcagagggaccttctggaagatccaggcatcaaccatttcagtcgatgctttcgagctcatgtgtgtgtttcttcaggaacggttagtatgcttataccgcaatccattatattctgcaaccgatgacaccattgttgtcaggatttgtcatatcacatttacataacaactttgatcaacctttagccaaacattggtggac

SEQ ID NO: 18974 - DNA, 576 bp, Zea mays
  Clone ID: LIB3118-040-C2_FLI
gtcggttcacttctccaggtaaggaaagggttcgtactcatggcgccgccgcagccaaagtcgggcctcttcgttggcatcaacaagggtcatgtcgtcaccaagcgcgagctgcctccccgcccgtgccaccgcaaggggaaatcaacgaagagggtgtctatggtcaggggcctgatcagagaggttgctgggtttgctccttatgagaagcgtatcactgagcttctgaaggttggcaaggacaagcgtgccctgaagcttgctaagagaaagcttggaactcacaagagggcaaagaagaagagagaggagatggcgggcgtcctcaggaagatgaggtcggctggtacgcacactgacaagaagaaatagagagcatttcaagttcatggagcctgccagagattatgttccagtgtctgattttccatacatgtagaacctaatagacatgtcaaagtattatgtatcgaaccagctcatgggattttgctccttccaatgcatccagggtttatgtatcgaaccagtttatgggatcttgctcctattccaatgcatccatggtttgtg

SEQ ID NO: 18975 - DNA, 4340 bp, Homo sapiens
  Clone ID: LIB3119-019-H2_FLI
ccgccgccgaggagtcaggaagttcaagatggccgccgcggagacccagtcgctacgggagcagccagagatggaagatgctaattctgaaaagagtataaatgaagaaaatggagaagtatcagaagaccagtctcaaaataagcacagtcgtcacaaaaaaaagaagcataaacacagaagtaaacataagaaacataaacattcctcagaagaagacaaggataaaaaacataaacataagcataaacataagaaacacaaaagaaaagagattattgatgcttctgataaagagggtatgtctccagcaaaaagaactaaacttgatgatttagctttgctagaagacttggaaaaacagagagccttgattaaggccgaacttgataatgagttaatggaaggaaaggtccagtctggtatggggctcattttgcaaggttatgagtctggctctgaagaagagggggaaattcatgaaaaggcaagaaatggaaataggtctagtactagatcttcaagtacaaaggggaaacttgaacttgtggacaataaaattactacaaagaaacgaagtaaaagcagatccaaagaacggactagacataggtctgataaaaagaaaagtaaggggggtattgaaatcgttaaagagaaaacaactaggagcaagtcaaaggagaggaaaaaatctaaaagcccatccaaaagaagtaagtctcaagatcaagcaaggaaatcaaaatcccctacccttagaaggcgatctcaagagaaaattggtaaggccagatctcctactgatgataaggttaaaattgaagataaaagtaaatcaaagataggaaaaaatccccaattataaatgaaagtagaagtcgcgatcgaggtaaaaaatccagatccccagttgatttaagaggtaaatccaaagacagaaggtcacggtccaaagagagaaaatcaaaacggtctgaaactgataaagaaaagaagccaattaaatctccctctaaagatgcttcatctgggaaagaaaataggtcacccagcagaagacctggtcgtagtcctaaaagaagaagtttgtctccaaaaccacgtgataaatcaagaagaagcaggtctccacttttgaatgatagaagatctaagcagagcaaatccccctcgcggacactgtctcctgggagaagagccaagagccgatccttagaaagaaaacgacgagaaccagagaggagacgactttcttctccaagaacacgacctcgagatgatatcctcagtagacgtgaaagatcaaaagatgccagccccatcaatagatggtctccaacccgaagaagaagtagatctcccattagaaggaggtctcgttccccactcagacgtagcaggtctccaagaagaagaagcagatctcctcggagaagggacagaggtcggaggagcagatcacgcttgcgaaggcggtctcgatcacgcggtggtcgtagacgaaggagcagaagcaaagtaaaggaagataaatttaaaggaagtctttctgaaggaatgaaagttgagcaggaatcttcgtctgatgataaccttgaagactttgatgtagaggaagaagatgaagaagccctaatagaacagagaagaatccaaaggcaggcaattgttcagaaatataaataccttgctgaagatagcaacatgtctgtgccatctgaaccaagcagcccccagagcagtacgagaacacgatcaccatctccagatgacattctggagcgagtagctgctgatgttaaagagtatgaacgggaaaatgttgatacatttgaggcctcagtgaaagccaagcataatctaatgacagttgaacagaataatggttcatctcagaagaagttgttggcacctgatatgtttacagaatctgatgatatgtttgctgcgtattttgatagtgctcgtcttcgggccgctggcattggaaaagatttcaaagagaatcccaacctcagagataactggaccgatgcagaaggctattatcgtgtgaacataggtgaagtcctagataaacgttacaatgtgtatggctacactgggcaaggtgtattcagtaatgttgtacgagccagagataatgcaagagccaaccaagaagtggctgtaaagatcatcagaaacaatgagctcatgcaaaagactggtttaaaagaattagagttcttgaaaaaacttaatgatgctgatcctgatgacaaatttcattgtctgagactcttcaggcacttctatcacaagcagcatctttgtctggtattcgagcctctcagcatgaacttacgagaggtgttaaaaaaatatggtaaagatgttggtcttcatattaaagctgtaagatcctatagtcagcagttgttcctggcattgaaactccttaaaagatgcaatatcctacatgcagatatcaagccagacaatatcctggttaatgaatccaaaactattttaaagctttgcgattttgggtcggcttcacatgttgcggataatgacataacaccttatcttgtcagtagattttatcgtgctcctgaaatcattataggtaaaagctatgactatggtatagatatgtggtctgtaggttgcaccttatacgaactctatactggaaaaattttattccctggcaaaaccaataaccatatgctgaagcttgcaatggatctcaaaggaaagatgccaaataagatgattcgaaaaggtgtgttcaaagatcagcattttgatcaaaatctcaacttcatgtacatagaagttgataaagtaacagagagggagaaagttactgttatgagcaccattaatccaactaaggacctgttggctgacttgattgggtgccagagacttcctgaagaccaacgtaagaaagtacaccagctaaaggacttgttggaccagattctgatgttggacccagctaaacgaatcagcatcaaccaggccctacagcacgccttcatccaggaaaaaatttaaacaagatgaagaaactccaagggtttgagtaaatacaaagactgaagaaatttcacagcagtttattaatgtatataaacttataaatatttctccagcaaatttgaggaagcatgatatatttgaattaacaccaagggtgatatttcttttagagatgttagttaatctgttttgtgtcttacgtgaaatttcactgtagactgttttaaattgccaagactgcacaaaattacagtgctaatgtatatggttgcagttcacataaagacaaaagcatctgttatgaaatgagtagtaatattgggtggttgatttgttcttagcagacttggcttcattttggtcttgagataaaatggccagcataaatgctgtttatattcacgttttcctaggtgtgtgtgtgcaggccacagcagcatgcccttggtgtagtcagtgccgaaaggggtctgttccttcttgagcctgcctgcagggatggtctccttttaaagcaggttgtgtgcagcattcagtacactgaaggtaagctaaaccatcaacatctctggtgttttaagatgttattttattggaacaactgacaaatgagggatgttagctttgtggcagaattccctgcatgtgtgataactgatcttgttttattttttggcattgcaactgtggcatagttacaatttctgtttgttcatcacatttaaaattggaagagaacgcgcttgatggatagagcgccttcagtgtactgtttcttattaactttactttttttaaatcaacttgctatagactttatatacattttgttaaatatagttcctagtgacatagaaacgatgcgtagttttcatttactaattacaaatgttgaggcctaattctgaaagtcctcatatttaaaggctagacaacgtaatgaaatttttaactatttgtatgtcattttgaaagtgtactgctttatggtaaaagtgtttttcatttgttcattgttttcattatttgtgatcatgttgtctttcaatacaggcataaaccttccactcttgaacaaagcagctgctttttaaaagcggtaattgcttctttaccttttatttcttttgtaaatgaagcttttctttaagaatgtgactttaaagtgttgtctattgcataaaacagttgacactcacttattgtaaagtgaagattgttctactgcatgtgaagtggaccatgcagatttctgtatgttctcagtatgcatcactagataataaagtcttttgtgaacaagg

SEQ ID NO: 18976 - DNA, 2801 bp, Homo sapiens
  Clone ID: LIB3119-029-B6_FLI
ggcagccccgggcgccgctccgaccacgacagggaaaggaaccttaatctcatctttaaaataaggagaattactgagtgacctgaaggacccttttcagctggaaagtctgaactgaccaacactggatgaatttgaccatttcttaggagactggaatgttaagtttctataaatgaatgaaccagttctctcttgtttggagcaatgctgaaattccaagaggcagctaagtgtgtgagtggatcaacagccatttccacttatccaaagaccttgattgcaagaagatacgtgcttcaacaaaaacttggcagtggaagttttggaactgtctatctggtttcagacaagaaagccaaacgaggagaggaattaaaggtacttaaggaaatatctgttggagaactaaatccaaatgaaactgtacaggccaatttggaagcccaactcctctccaagctggaccacccagccattgtcaagttccatgcaagttttgtggagcaagataatttctgcattatcacggagtactgtgagggccgagatctggacgataaaattcaggaatataaacaagctggaaaaatctttccagaaaatcaaataatagaatggtttatccagctgctgctgggagttgactacatgcatgagaggaggatacttcatcgagacttaaagtcaaagaatgtatttctgaaaaataatctccttaaaattggagattttggagtttctcgacttctaatgggatcctgtgacctggccacaactttaactggaactccccattatatgagtcctgaggctctgaaacaccaaggctatgacacaaagtcggacatctggtcactggcatgcattttgtatgagatgtgctgcatgaatcatgcattcgctggctccaatttcttatccattgttttaaaaattgttgaaggtgacacaccttctctccctgagagatatccaaaagaactaaatgccatcatggaaagcatgttgaacaagaatccttcattaagaccatctgctatcgaaattttaaaaatcccttaccttgatgagcagctacagaacctaatgtgtagatattcagaaatgactctggaagacaaaaatttggattgtcagaaggaggctgctcatataattaatgccatgcaaaaaaggatccacctgcagactctgagggcactgtcagaagtacagaaaatgacgccaagagaaaggatgcggctgaggaagctccaggcggctgatgagaaagccaggaagctgaaaaagattgtggaagaaaaatatgaagaaaatagcaaacgaatgcaagaattgagatctcggaactttcagcagctgagtgttgatgtactccatgaaaaaacacatttaaaaggaatggaagaaaaggaggagcaacctgagggaagactttcttgttcaccccaggacgaggatgaagagaggtggcaaggcagggaagaggaatctgatgaaccaactttagagaacctgcctgagtctcagcctattccttccatggacctccacgaacttgaatcaattgtagaggatgccacatctgaccttggataccatgagatcccagaagacccacttgtggctgaagagtactacgctgatgcatttgattcctattgtgaagagagtgatgaggaggaagaagaaatagcgttagaaagaccagagaaagaaatcaggaatgagggatcccagcctgcttacagaacaacccaacaggacagtgatatcgaagcgttggccaggtgtttggaaaatgtcctgggttgcacttctctagacacaaagaccatcaccaccatggctgaagacatgtccccaggaccaccaattttcaacagtgtgatggccaggaccaagatgaaacgcatgagggaatcagccatgcagaagctggggacagaagtatttgaagaggtctataattacctcaagagagcaaggcatcagaatgctagcgaagcagagatccgcgagtgtttggaaaaagtggtgcctcaagccagcgactgttttgaagtggaccagctcctgtactttgaagagcagttgctgatcacgatgggaaaagaacctactctccagaaccatctctaggcaactatcaaaaagaagcagaagttcaagtggacaaatttatgtgaaaattcatttaacatataagctgaactctattatggggaatggatacaaaagcagagctcccatcttgactttcaattcctcatcagaagtactggcttctttagagagtagtaagcatggctgcctatgcttggagtcataagtgttatttggactataccctgagataagcttatagatcaagtttggctcccttgaaaagcatttctctcatgtgcgccctcagggcttccagcaggattgagtcaccctgacgatgaccggggagaagccgtgtgctcttcattattttcagctggaggacagagctcagtgcctgactgcctagggtctcatggactgtaggcagcctgccagtgaaggtcactggactctagcctacaacatgctgagctacagcccagaagccagacatgcctgtcttagctgacctgtttttggtccacttttgcccttccatgactaataaggaagatatgtgtgtatttcatacacacacaaggacctggattaaaaatccaaaaagtgattctcttctatgatttatttcaaactcatccatagataattcaagatttgtattcaaaataaacatagttttcacagtt

SEQ ID NO: 18977 - DNA, 3747 bp, Homo sapiens
  Clone ID: LIB3119-049-F10_FLI
cgcctcctctccggccgtctgattttctacccttcggcgccctgctcttcctcatgttggcatccccggccacggagaccaccgtcctcatgtcccagactgaggccgacctggccctgcggcccccgcctcctcttggcaccgcggggcagccccgcctcgggccccctcctcgccgagcgcgccgcttctccgggaaggctgagccccggccgcgctcttctcgtctcagccgccgtagctcagtcgacttggggctgctgagctcttggtccctgccagcctcacccgctccggacccccccgatcctccggactccgctggtcctggccccgcgaggagcccaccgcctagctccaaagaaccccccgagggcacgtggaccgagggagcccctgtgaaggctgcggaagactccgcgcgtcccgagctcccggactctgcagtgggcccggggtccagggagccgctaagggtccctgaagctgtggccctagagcggcggcgggagcaggaagaaaaggaggacatggagacccaggctgtggcaacgtcccccgatggccgatacctcaagtttgacatcgagattggacgtggctccttcaagacggtgtatcgagggctagacaccgacaccacagtggaggtggcctggtgtgagctgcagactcggaaactgtctagagctgagcggcagcgcttctcagaggaggtggagatgctcaaggggctgcagcaccccaacatcgtccgcttctatgattcgtggaagtcggtgctgaggggccaggtttgcatcgtgctggtcaccgaactcatgacctcgggcacgctcaagacgtggctctgggcttggtctgtgaagccgattaccagccagtggcccgtgcagtacgtgaacgggttgctgccatccagcgaaagcgtgagaagctgcgtaaagcaagggaattggaggcactcccaccagagccaggacctccaccagcaactgtgcccatggcccccggtccccccagtgtcttcccccctgagcctgaggagccagaggcagaccagcaccagcccttccttttccgccacgccagctactcatctaccacttgcttttgccctatccattccacgttctggccctggaagtgacttttcccccggggacagctatgcctcagatgcagcttcaggccttagcgatgtgggagaagggatgggacaaatgaggagacccccagggaggaatctccggcgcagaccccgatcccggctgcgggtcactagtgtctcagaccagaatgacagagtggttgagtgccagctacagacccataacagcaagatggtgaccttccgatttgatctggatggggacagcccggaagagattgcagctgccatggaggagccagcaccattacctgccctgcccgtccccctcccagacccatccaatggtatgtactgagttgtgtccttgctcatcccaacccctggggttgctcctgggaagggcatagggcatgtgggactgtggtctcaacataccctccttcccagaagagctccagagcagcacctccctggagcacaggagctggacagccttctccacctcctcatcttctcctggaactcctttgtctcctggaaacccattttcccctggaacccccatttccccaggtcccatcttccccatcacttctcccccatgtcatcccagcccctccccattctcccccatttcttcccaggtctcctcaaatccctctccacaccccaccagctctccacttccattctcctccagcacacccgagtttccggtcccactctctcagtgtccctggagttctctccccacgacttctccacctacgttctctcccacttgttctcaggtcactcttagttcccctttctttcctccgtgcccctccacttcttccttcccctccaccacagcagcccctctcctttctctggctagtgccttctcactggctgtgatgactgtggcccagtccctgctgtccccctcacctgggctcctttcccagtctcctccagcccctcctagtcccctccctagcctgccccttccccctcccgttgctcctggtggccaggaaagcccttcaccccacacagctgaggtggagagtgaggtgagtagaaaaccaagagggatgattagggagactccactctgcactcttcccttctcatggccccccactttctaggcctcaccacctcctgctcggcccctcccaggggaagccaggctggcgcccatctctgaaggtaaggcctctgaccactgaccttcccctgccattatccctactcactgtctgtcctgtcactgctctcctttcctcatgccttcttcctcgtcgccctacagagggaaagccgcagcttgttgggcgtttccaagtgacttcatccaaggaaccggctgagcctcttcccttgcagccaacatcccccactctctctggttctccaaaaccttcaacccctcagctcacttcagagagctcagatacagaggacagtgctggaggcgggccagagaccagggaagctctggctgagagcgaccgtgcagctgagggtctgggggctggagttgaggaggaaggagatgatgggaaggaaccccaagttgggggcagcccccaacccctgagccatcccagcccagtgtggatgaactactcctacagcagcctgtgtttgagcagcgaggagtcagaaagcagtggggaagatgaggagttctgggctgagctgcagagtcttcggcagaagtgagtctcgggaggatggaggagtgagaggagaacctgggagagcaaggtgtgtggctagccctttcatgccctccgtgcatcctcaggcacttgtcagaggtggaaacactacagacactacagaaaaaagaaattgaagatttgtacagccggctggggaagcagcccccaccgggtattgtggccccagctgctatgctgtccagccgccagcgccgcctctccaagggcagcttccccacctcccgccgcaacagcctacagcgctctgagcccccaggccctggtgagactgcagtcacccagcttccatcttttccctgagacccctttctgtcgactgtttttctccaggccctgggggtctgccccgggggaatagaccccctctccccacctcccctttcctcacttagtgctctccttcccccatcctgctcccaggcatcatgcgaaggaactctctgagtggcagcagcaccggctcccaggagcagcgggcaagcaagggggtgacattcgccggggatgttggcaggatgtgaattcagaacagaagccatgtatctcccccacaccagggcccaccatggagcttgtgttctcagaatctgatgctttctgatcaacaaaactgagcaaggaagatcccaacactgaaggggtagaaggccaggggggcatggagagtgcagctccattatagtgaagagccaaacatatgtgaactgtttgctgtgtggaggtgttagttctgctgcctaccatcttcatctctagcacctcccctgccaagagtcaaccactaagcaatcccacccaagcctggatgcttctagaggggcccactcccagctgggagagtgtaggggatatgctcacaccacattagcagcaaccaataaaaatgctggaaacaag

SEQ ID NO: 18978 - DNA, 2074 bp, Homo sapiens
  Clone ID: LIB3119-052-C10_FLI
gcggtccccgcgggccttccgggcccactgcgccgcgcggaccgcctcgggctcggacggccggtgtccccggcgcgccgctcgcccggatcggccgcggcttcggcgcctggggctcggggctccggggaggccgtcgcccgcgatgctgctctccaagttcggctccctggcgcacctctgcgggcccggcggcgtggaccacctcccggtgaagatcctgcagccagccaaggcggacaaggagagcttcgagaaggcgtaccaggtgggcgcagtgctgggtagcggcggcttcggcacggtctacgcgggtagccgcatcgccgacgggctcccggtggctgtgaagcacgtggtgaaggagcgggtgaccgagtggggcagcctgggcggcgcgaccgtgcccctggaggtggtgctgctgcgcaaggtgggcgcggcgggcggcgcgcgcggcgtcatccgcctgctggactggttcgagcggcccgacggcttcctgctggtgctggagcggcccgagccggcgcaggacctcttcgactttatcacggagcgcggcgccctggacgagccgctggcgcgccgcttcttcgcgcaggtgctggccgccgtgcgccactgccacagctgcggggtcgtgcaccgcgacattaaggacgaaaatctgcttgtggacctgcgctccggagagctcaagctcatcgacttcggttcgggtgcgctgctcaaggacacggtctacaccgacttcgacggcacccgagtgtacagccccccggagtggatccgctaccaccgctaccacgggcgctcggccaccgtgtggtcgctgggcgtgcttctctacgatatggtgtgtggggacatccccttcgagcaggacgaggagatcctccgaggccgcctgctcttccggaggagggtctctccagagtgccagcagctgatccggtggtgcctgtccctgcggccctcagagcggccgtcgctggatcagattgcggcccatccctggatgctgggggctgacgggggcgtcccggagagctgtgacctgcggctgtgcaccctcgaccctgatgacgtggccagcaccacgtccagcagcgagagcttgtgaggagctgcacctgactgggagctaggggaccacctgccttggccagacctgggacgcccccagaccctgactttctcctgcgtgggccgtctcctcctgcggaagcagtgacctctgacccctggtgaccttcgctttgagtgccttttgaacgctggtcccgcgggacttggttttctcaagctctgtctgtccaaagacgctccggtcgaggtcccgcctgccctgggtggatacttgaaccccagacgcccctctgtgctgctgtgtccggaggcggccttcccatctgcctgcccacccggagctctttccgccggcgcagggtcccaagcccacctcccgccctcagtcctgcggtgtgcgtctgggcacgtcctgcacacacaatgcaagtcctggcctccgcgcccgcccgcccacgcgagccgtacccgccgccaactctgttatttatggtgtgaccccctggaggtgccctcggcccaccggggctatttattgtttaatttatttgttgaggttatttcctctgagcagtctgcctctcccaagccccaggggacagtggggaggcaggggagggggtggctgtggtccagggaccccaggccctgattcctgtgcctggcgtctgtcccggccccgcctgtcagaagatgaacatgtatagtggctaacttaaggggagtgggtgaccctgacacttccaggcactgtgcccagggtttgggttttaaattattgactttgtacagtctgcttgtgggctctgaaagctggggtggggccagagcctgagcgtttaatttattcagtacctgtgtttgtgtgaatgcggtgtgtgcaggcatcgcagatgggggttctttcagttcaaaagtgagatgtctggagatcatatttttttatacaggtatttcaattaaaatgtttttgtacatagtg

SEQ ID NO: 18979 - DNA, 3587 bp, Homo sapiens
  Clone ID: LIB3119-054-C11_FLI
gggagcggggagggcggactctgggggttcgggtgttgctgacttgtgctacgtggaacaagcagaaaagaagggaacagctcctgcccaggtctgtgggcactcagcatggatttcagtctccctgtgagtgatgggaaagaactaacagaggtggacgtctgatttatgaagctccccatccacctatctgagtacctgacttctcaggactgacacctacagcatcaggtacacagcttctcctagcatgacttcgatctgatcagcaaacaagaaaatttgtctcccgtagttctggggcgtgttcaccacctacaaccacagagctgtcatggctgccatctctacttccatccctgtaatttcacagccccagttcacagccatgaatgaaccacagtgcttctacaacgagtccattgccttcttttataaccgaagtggaaagcatcttgccacagaatggaacacagtcagcaagctggtgatgggacttggaatcactgtttgtatcttcatcatgttggccaacctattggtcatggtggcaatctatgtcaaccgccgcttccattttcctatttattacctaatggctaatctggctgctgcagacttctttgctgggttggcctacttctatctcatgtccaacacaggacccaatactcggagactgactgttagcacatggctccttcgtcagggcctcattgacaccagcctgacggcatctgtggccaacttactggctattgcaatcgagaggcacattacggttttccgcatgcagctccacacacggatgagcaaccggcgggtagtggtggtcattgtggtcatctggactatggccatcgttatgggtgctatacccagtgtgggctggaactgtatctgtgatattgaaaattgttccaacatggcacccctctacagtgactcttacttagtcttctgggccattttcaacttggtgacctttgtggtaatggtggttctctatgctcacatctttggctatgttcgccagaggactatgagaatgtctcggcatagttctggaccccggcggaatcgggataccatgatgagtcttctgaagactgtggtcattgtgcttggggcctttatcatctgctggactcctggattggttttgttacttctagacgtgtgctgtccacagtgcgacgtgctggcctatgagaaattcttccttctccttgctgaattcaactctgccatgaaccccatcatttactcctaccgcgacaaagaaatgagcgccacctttaggcagatcctctgctgccagcgcagtgagaaccccaccggccccacagaaggctcagaccgctcggcttcctccctcaaccacaccatcttggctggagttcacagcaatgaccactctgtggtttagaacggaaactgagatgaggaaccagccgtcctctcttgtaggataaacagcctccccctacccaattgccagggcaaggtggggtgtgagagaggagaaaagtcaactcatgtacttaaacactaaccaatgacagtatttgttcctggaccccacaagacttgatatatattgaaaattagcttatgtgacaaccctcatcttgatccccatcccttctgaaagtaggaagttggagctcttgcaatggaattcaagaacagactctggagtgtccatttagactacactaactagacttttaaaagattttgtgtggtttggtgcaagtcagaataaattctggctagttgaatccacaacttcatttatatacaggcttcccttttttatttttaaaggatacgtttcacttaataaacacgtttatgcctatcagcatgtttgtgatggatgagactatggactgcttttaaactaccataattccattttttcccttacataggaaaactgtaagttggaattatcttttgtttagaaagcatgcatgtaatgtatgtatgcagtatgccttacttaaaaagattaaaaggatactaatgttaaatcttctaggaaatagaacctagacttcaaagccagtatttgtttaggtcatgaagcaaacaatgctctaatcacaatattaactgtttaattaaaatgttgtaacaagtataaaacagggaatgtaagtttattaccaaagtgatatgtattccaaaaaagtcatagaagatgaagcactataatattgttcccatatatttaaaatacccaagtacattctaattaccagtatatcagaggaaaattttcgtagtctttgtaaaataatatactcatcatagaaaacttgaaaaatgcagaaatgtataaaaaagcaaaaatgattactgataatatcacaacccagaagtaaccacctttaaaaagcaacccccatgtatgcctatatgtgtattgtatacttttttttacataattggagtcatactgtaaacagttttataagtagatctttttcattgcaaaattgccacattttcttatggcattaaaaattttacaaaaacataattttaatggctatattatattccatttaatggatgcaactcagtttatttaaccattcccatgttgttaactatttaggttgtttctaattttcattattataaagttgcagaaatttggtgtacataaaactgtctccatataattgattattaggatatattcccatgaaggattctttttttaaaaaaatgtgaaatgtcatcttgtacttacacctttcatgaaaagggatttcctgcttttgtactgcatgggtggcagttgtgaggaaaagccagtcaaatgacctttttacaaaagaaatgcagtggtcacttcagttgagagtgactttttaatacaacaagatcaactagaagaattcaactgtctcaagaatcaaggtaccccaatatatctcgcaattccaaactttgtttgagggactcgttatccagctcttggtagccacacctgcaatgtaaaatggaagaaaatgcaaagaaaccaaatgtgccgagtgaataaaggattgtcatatcaattagtgtgggtccatctgtagcaaatgggttgagtgtgtcagtatgtggttggttactgtgtattcgccaggaatcaccccgataggctgccaccctattaggtgatacctgtttaatatgttgtccaggtagactagtagttgcatcagtttgctgtaacaagtaaccagtgaggtaacacagtggtgaagcaggtcaggggaggtcaggaggatgtctgagagaaagaagtccgggagatgaatggctgtctaggaaggaggatgtcagtgcacggttagtgtttgagcagagggcagacttgtaaagtacctgtagtgaaaagaatgtggggacccgattagcagaaaggtgtttgcacgtactttatacaaaatacagaatactttatattggaagtgaaagaaatgaacgtggacttttacacatgtgcatatttttctggaggctatatggattatttgaaatgaaaagcatactaattggactttaataaatcattttcaatc

SEQ ID NO: 18980 - DNA, 1368 bp, Homo sapiens
  Clone ID: LIB3119-094-C6_FLI
ggcccgcgacacggtcacgtccgaactggccgccgtgaagatagtcaagctagacccaggggacgacatcagctccctccagcaggaaatcaccatcctgcgtgagtgccgccaccccaatgtggtggcctacattggcagctacctcaggaatgaccgcttgtggatctgcatggagttctgcggagggggctccctgcaggagatttaccatgccactgggcccctggaggagcggcagattgcctacgtctgccgagaggcactgaaggtagctgggcctgtgaggtgcccacacctctggtctccagaagctgtgggccaggagcccagatgaccagcagggaggcgggtggagtgcctcgggtggggctggcccgaggggctgtaggtcctggggaaaaggggccccagccctgttgccggaagcagtccatttccctcttggctcagtcacttcctgtttggggagaggggaggaagaagcagcctgagtggggggccccagtcctgagagggggtttggggaggtgggacagtgctgggtggctgctctcagggactcctctttgtcgccaggggctccaccacctgcattctcaggggaagatccacagagacatcaagggagccaaccttctcctcactctccagggagatgtcaaactggctgactttggggtgtcaggcgagctgacagcgtctgtggccaagaggaggtctttcattgggactccctactggatggctcccgaggtggctgctgtggagcgcaaaggtggctacaatgagctatgtgacgtctgggccctgggcatcactgccattgagctgggcgagctgcagccccctctgttccacctgcaccccatgagggccctgatgctcatgtcgaagagcagcttccagccgcccaaactgagagataagactcgctggacccagaatttccaccagagcacctactaagagcagcgggcctgtccaggggctccccgccccaccccacgccttagctgcaggcccttttgggcaaaggggcccatcctagaccagaggagcccaggccctggccctgctggggctgaaggtcagaagtaatcctgagaaatgtttcaggcctggggagggaggggagcccccgacgcctctgcaataactggaccagggggagctgctgtcactcccccatccccgaggcagcccagtccctagtgcccaaggcagggaccctgggcctgggccatccattccattttgttccacatttcctttctactctttctgccaagagcctgcccctgcatttgtcctgggaaacacggtatttaagagagaactatattggtattaaagctggtttgtttt

SEQ ID NO: 18981 - DNA, 937 bp, Gossypium hirsutum
  Clone ID: LIB3120-010-A8_FLI
agacttatttactttaggaattttctagaaccttctcgaaggcaatggctgaggcgaccagcaccgagagatccactggcacagtcaaatggttcagcgcccagaaatgttttggtttcatagctcccgacgacggaggcgacgaccttttcgtccaccaaacctctattctttcccaaggctttcgtacactctccgataaccaacccgtcgagttcttcgttgatgtcggtgaagatggccgagctaaggccgttgatgtaactcctatgcctcgacctcgccgtccttcccgcggcggtggaagaggaggatattttggcggcagaggtagaggaggtggtggttacaggagaggaggttatggtggtggcggtggcggtggcggaggtagtggcgcttgttataattgtgggaggacggggcatatagccagggattgttatcaaggtggtggaagtggaagtacgagatacagtggcggccgtggagatggtggtggaaatagaagatacggtggcgatagcggtgatggacgaggagctgggggacgatgttttaattgtggagatgaaggccattttgcaagggattgccctaacaaataattcagaaaacaaaaccggacatttcctataatattttgtgagtataagtttttcttttacggtgttttggaaaggggtttatcagcaaaagaagaagaaaccggaaagttgtctattctttccgatcaggcttacttttcccgattccgattgatctggtaacatctttaaaaaaaaggtccattgttttgtataatgtgttgtaattgttgttattctcttaattcttatcgattcttctttctttaatcctctattcttagtctttgcattgacagtatgaacgggcaatcatttgtcttccttgaagcagatttcttttatttttc

SEQ ID NO: 18982 - DNA, 340 bp, Gossypium hirsutum
  Clone ID: LIB3135-022-G2_FLI
ttctctcttcaaaccaagaaaacaagagaaaaaaagatgtctaagctttgttcacttttcatagctgcgcttctttttaatttcatgcaaagctatgctgctaggcccgagccaactttgtccttaacccaacatgagggagttgaggcagagaaagttgatgctgatgagaactgtgaaggaattggcaaagaggagtgcttgatgagaagaacccttgctgctcatgtggactatatttatacccagaatcacaagccatgaagttgaattgttatggtaaaatattggttcaatcgtagcatcaaaagccataaataaaatcacatatatttccatt

SEQ ID NO: 18983 - DNA, 829 bp, Gossypium hirsutum
  Clone ID: LIB3135-055-C6_FLI
attacgtttcataaagaaataatcatctttttttaacttatttatctttactactaaggttttttttttttttaattttatttgggtcctgctattatatattataaacaaaactcctataatggctacatcctcgggttcatcagcaacacaaatcaactcaggctcagaagaagcattaatggacgaaaggaaaaggaaacgaatgatatcgaacagggaatcagcaaggagatcaaggatgaggaaacaaaagcatttagatgatctaatgactcagttgactcagttgcagaaacaaaaccatgagatcatcacaaacataaacttcaccacacaacacctcttgaatgttgagtcagagaactcggtgcttagagctcaactcaatgaactcactcataggttacagtccttgaatgaaatcatcagcttcttgaatgatgatcatggcgatgacgacgacgatgatgataaaacaagcattgacttcactcagcctgctgtagctgatactgccttccttaatcctttccatttggctttcttgaatcaacctatcatggcctctgctgataacacgtttcagtattaattttctataatgccataattttaatgggatttttaatctcagtttatatatatatatatatatatagttgtacaagcagtagtatgaaataaaatatgtgaaaatcataaagctatggtatggttaatggtagatttttttcagctttgtggtgtttccaaaggttgttgataacagttgtttttgaccgatgaataatatgaaagaacatataatgctcaatttccgaacttg

SEQ ID NO: 18984 - DNA, 747 bp, Zea mays
  Clone ID: LIB3136-001-C11_FLI
ccaaattccaatcccaccccgcccccttccaagaactctagtatcaaccaaccgtccaacaaaagcaggagtcgcatcccagatcccccgcgcatcagagacaggcagggagggaaccgagatccgtccgtccgtgtcgatggagtcaacggtggagcggataagctcgtcggtgcagtcctgggtgaaggaccacgagctcgcagccatcggaggcgtgtgggctgcggcggtgggcacttcggtggcgtacagccggaggaaggcgccgcagcggggcacgggcctgcgcctcatccacgccaggatgcacgcgcaggcgctcacgctcgccgtcctcggcggcgccgccctcttccactactacggcgacggcgggcgcaggaagagggccgacgacatcgacctcgacttctactcgcagctgccgccggccaccgacgccgacggcaacgagaaccagcggtggagctggtaggaggaggagccgaggagaaggaagaactgtagcagactagcagtgggtgcttgcagcaataataattgaggtggggcctatgacgtggcggcgggcgggagggagggattagtctgtgctaatcctaatccatccagctcagacaagacgacgggcggcccgtttactttacattatcgatccatgctgtcatggccggcaccacatccatatctactagtcatctaagagcagccgcccatagtttgctgctgctgctgcttctctcc

SEQ ID NO: 18985 - DNA, 493 bp, Zea mays
  Clone ID: LIB3136-001-D1_FLI
cagctagtagctctagcaaagcacttgccatctaccgaccgccgcattccaaacagcccgacgagctagcagagcggcaggcacctcctccaggaacatggcccgcacgcagcagttggcagtagtggcgacagccgtggtggccttggtgctgctggcggcggcgacgtcggaggcggccatcagctgcgggcaggtggcgtcggccatcgcgccctgcatctcctacgcgcgcggccagggctcagggccctccgccggctgctgcagcggcgtcaggagcctcaacaacgccgcccgcaccaccgccgaccgccgcgccgcctgcaactgcctcaagaacgccgccgccggcgtcagcggcctcaacgccggtaacgccgccagcatcccctccaagtgcggcgtcagcatcccctacaccatcagcacctccaccgactgctccagggtgaactgaaccctaaacgacgacgacggcgccggcggccgc

SEQ ID NO: 18986 - DNA, 2319 bp, Zea mays
  Clone ID: LIB3136-001-D6_FLI
gttctgtcagcagtgtagcaggtttcagcttcttcaagaatttgatgaagggaagaagagctgccgctcgcgtctagcacaacataatggaaggagaaggaaagttcaaccacaagctgttgtgaatgggaattccatgagtgaaaatcaatctctaagtagcaccttaatccttctgttaaaacaactttccaggctagagtgtacagacatagtcattctaaatgtgtgcttgtatgggtggcagctggtagctcctctgagccaatcaatcatcctaattctttggttaaccttttgaagaaccttgctgctattgctagcacacagtcatatcaagatattctaaagaatgcaaattcaaattcaatattgtcaaatgctggtaataatgctgcaaatggatctactgtgcatgagcaaactatacggtcaattccaatcagaggagaatcattagcagaagagcctccagtgaaaaggcgggtacatgattttgatttgaatgatgcttgctttgaagaagttgagagccgaacagataaaattgtgttcaagctgtttggaaaagagccaaaagattttcctgtagatctacgggaacagatccaacactggttatcgcattatccaactgatatggaaagctatattaggcctggttgtgttattctaactatttacctccgcctccctaattggatgtgggatgagcttgatgatgatccagcttcgtggatagaaaagcttattagcatatccaatgatggactttggagaaaaggatggttgtatgctagggtacaggactgcctaacactgagttacaatggtagtcttatgtttgcatctccctggcaactggtaattggcgacaagcatcagagactgtgtgtaactcctattgcagttgcttgttcttcgtctgtaaaattctctgtgaaaggtttcaatatagttcagccaactacaaaattactttgtgtgtttggtgacaaatatttaattcaagaagagacacaaatgctacttgaagattcaactgtgcagcaaggccctcaatgcctgaccttctcatgttccttttcttgtacaagtggaagaggattcatagaggttgaagattatgatcaaagcagcctttgtgttccctttgttgtcgctgacaaagatgtatgttctgaaattcggatgttggagcatggattgaatttaatttcatttgatgaaacctcggaaagaatagatgatctgatggcttatcgcaatcggtcgttacattttttgcatgaaatcggatggctccttcaaaggagccatgtgcgagctacatctgagcagccacagtattgtccagaccgtttccctgttgaaagatttagatggctgctatcctttgcagttgatcaggaatggtgtgctgttttaaggaagcttctgaacaccatgttccagggtgatattgacctagatgttccgtcaccaattgaattcgccttaggagaaaatgtgttgcttactgctgttaaaaaacgctcaaagcctttagttgagtttctattaagatacacagcaacagattacgccccagtgggcagtggagccggcgctccagttcagttcttgttcactcctgcgatgactggactgtcaaatattacacctctccatattgcagcaacaatcagtgatgctactggtgttttggatgctttaactgatgatcctcggcagttgggaatcaaagcgtggaagaacgctcgtgacgccactggcttcactcctgaggaatatgctcgaaagagaggtcacatatcctatatccaattggtacaggacaaaattgacagaagggtgagcagagctcatgtctcggttaccatccccagcacaattgatactgccggaaagcatgctagccgattgaagcctgccgaccaaatcacatttggtgtggagaaaaaacagcgagggatgaaccaaacattgagctgcagacaatgtgtccagcaggtccagcagcttgcattccactcccggacaaataggttcttgtctaataggccggcgatgctttccttggtcgccattgctgccgtttgtgtctgcgtaggattgatcatgaagagcctgccacaagttggtggtatgaggcctttcctctgggacaagatacgttggggccccaattgatagactgcacaagacccaacccaattgtatcagtgtatgatgaagatgtttgcgccgagcgaagctagattcttgtaatgtacatgtttcttagactaaatgcctaaattgaaatttctgttccat

SEQ ID NO: 18987 - DNA, 1101 bp, Zea mays
  Clone ID: LIB3136-001-F5_FLI
cgaaaaatggagctccggttggagccattccaaaagaaattaaaggcccactatatcctacaattgcagttcatagtcagggtgaagagttgactgtaaactttggaaaggaaccattctgttttgacattgagggttatattcttgaagagaaaatgaagcagcaatcggtgtctgataaattgaacttggagacggacatcagtcattggattgtccgctcatatctcctacattatggataccaagatacattaaatgcttttgatatggcaaatgcaactgacccccccaccaatcgccaaaatggtcatgcagaacctcccgaaacgtatggtcttagccacagaaaacttttgcgtcagcttatcatgagtggagatattgactctacattcaaaagacttggggagtggtatccacaagtgataaaggatgagaaatcggttatttgcttactactccattctcaaagattcatagaatatatcagggctgaacaactggaagatgctgtgcactatggtcgtgctaacctggcaagcttcttgacacacgaagcttttgagtggctgctgaaggatagtgtggccctgctggcgtacgagaagcctgcagaatcatgcttgggatacctgatgggctctccccagcgtgaattcgtggcagacgcagtgaacgcggctgtcctgtcgacgaaccccaccatgaaggaccctgagagctgcctctactcgtgtctcgagaggctactaaggcagctcacagtttgtagccttgagcgacgtgcattcaacaacgaccaaggagatgcattcttactccacaaagaaatgcaaaactatgaaaggtctaggcgctcatagcctcataggcatcaggattgttgcgcttctgaagtctgcagcgcccctcagctttcgcaagggtgagcaccgaattgcatggacacagctcaggcgcttcgggaggtgttctaacctctctgtaatcagaaaactcacagtgagataaagccaacgtttcagatttcccctattttgttggttggctaatatgctgtttgacactatgaatgctaaaaagtaaagacgcttcgac

SEQ ID NO: 18988 - DNA, 673 bp, Zea mays
  Clone ID: LIB3136-002-C7_FLI
ggcctccaccagatccgatgccttctttttcgctcttgctctgctctcatgggcagggcagggcatgcccatctacttgaattgcgatgcgtacatacatcgctgtctccatctagctgcacacatatatacatacatgcatacagagtgagagagaaacagatcgatctcacttagctgctgctgctgctgctgcttgctggtggcctgggcctggctgctgtgtctgtatcgatgtgtccgtattttctccatctcgtctgcatacgctgcaattggtaaggagctagctggcctttcatgtcttccatgctgccatagccatacggccggccggcaggcaggaggataccccatcgctcgctgcacatgcatgtatgcatggggatacatgttcatcatcagcagcacagtggctctgtatcccccatcccaatctgatcctatataggaggagaaggaggagcagcagcagcagccaggcgcggccggcggccggagtagtatccgaatccgctcaacacccaccggctggtctctagctttcctatcgatcaatggctttcaaaggactcccgcgtgattcccgagggtccctcgaagtcttcaatccagacgcccctgtttcagatcgagcaaccacctccccgtttctcctccctcctgcggccgc

SEQ ID NO: 18989 - DNA, 876 bp, Zea mays
  Clone ID: LIB3136-002-F11_FLI
gagcgtcgtcattcatttcctcactcagcgaggctaggcaagctggccgtcaagctcaggccgtcaggcgatacaactacaagcctacagtgcctacccctccgccgcctagagagagagaggccagcgatgacgaagacgacgccgccggcgttcgtgtaccggatcagcacggccgacgagtgggcggagtttcagcgcacgggcgccacccttggaggcgacctcgacagctccaccggctgcatccatctcagcgacctaaaccaggtgaagatgactttaaaaaactttttccttggaaggaatgatctgtacctactgcaaattgatactttcaagcttgcagatgggttaatttatgagctaagtgatggtgataactattttcctcatttctatggccctggtcggagctttgcacctcttcaactagatactgttgtgaaggcagacaaaatagagtttgcagacaatgattttacctgtggtctacttgatggaagttatctcccaagctgatctgtagagtctcaccttcatcttagcaatgctcatttgagttctctgccaaaggttagtgtttaatatgtctatatatgcagaagtcggtcatatatttgagtgacagattgtaccatccagaattttccacagttattcatatactttctggtggaagataaaatatgaaactgtatgtaattgacgcatcatgatggatacggatgttcattatgctatagcaagtagtacaatgtgtacttgctgtcatgttacatccagtgcctggttgcataaacaataagcactatatgttaccttgggtaacatacttgtaataatgatatgaattcaaaaggagaatgccacttc

SEQ ID NO: 18990 - DNA, 599 bp, Zea mays
  Clone ID: LIB3136-002-G9_FLI
ctttgccaaagtcagaggatgggagactgagaatattgaggagattgctttgaagatctctcaacttcctttggcttcaggcaagcaaaagaggattgctgtgattactcaaggtgctgatccagtggttgttgctgaggatgggaaggtgaaaacgttccctgtgatcctattgcccaaggagaagcttgttgacaccaacggcgcaggtgatgctttcgttggaggcttcctctcacagttggttctaggcaagggcattgaagactgcgtgagggcaggttgctatgccgcaaacgttatcatccagcgcccgggctgtacttacccggagaagcctgacttcaactagtgcaaaactgaggcacgtcatgagagggactgttataggcacacttaattgttaaccagtgcgtggttcggtgtctacacaccctgtattcttccgaggcttctcttctgatccggccaatatttttgccgtgaaatttgtgttctgcaactatggacgtctcctttgttgctgtataaggcatgatttgccatcattctgttgcttcggtgatgcttgcaatgcaatgagaatgtgttggaacgag

SEQ ID NO: 18991 - DNA, 656 bp, Zea mays
  Clone ID: LIB3136-002-H7_FLI
atgcatctccccatggctccacctcccagcgctgtccctcacagtcgcgccaccctccacccatctccctcgcgcccagctccattttctccacttcccagccatggccccgcgggcaggctccctgctgctgctcgtccgtggtctggaagctccgattggtgggcgccatcgtctcctacctccgtctgaaacaccacatcgagctcccatcgtcgcgcccctccttgctcctctgctggccatcgctgctccctggtgctcggactcgccagtcatcgccccagccgagatccctcctcagtatcgctcgcccaatccgaggggcactggacatgtttgggacatgggaggttcaggcagcgatgggttcgttaattgatcacgtgatgcggaggacaagagccgagttgatctcaaaatgatgctggtgaacgaacctaaggctagatgatctgattgagtgccagaatgggagatgctcaccaagtggtcgtcatctaacaacactaacttagtgttattccaggcaagccccggtgcatttgccacccccttgttgttataaaacttttatcacttatatgttgcattaggtgataggagttgtgtgaataaacagttgatgcattaccattccttggaatttgaatact

SEQ ID NO: 18992 - DNA, 1178 bp, Zea mays
  Clone ID: LIB3136-003-A2_FLI
cccagccaagctaagaatggtaacatcattcgcatcaagctaaaaagtaaccaagatccccaatcagttcttttggagaaaccaagggttctggagcaaccactggtccaacaaatgagttcggtttcatccctgtcgagcaaacaaaattcaatcaatcgtaaggtgaatgtgagatctacagctggccagcagtgggtcaatggtgactcccaagcagtacaaaaatctttggttacagaaaccctgtcaagggcaatgcagagaactgtcccccagcctgcagtgaaggtcacacgtcgggctgatccccagctatctgttaaggcgccggttggaagatctgacctacctccaaagttttcgggaagtgtgggcccttcacctgctagagtgaccggaagattttgtcctgcacctgttaagacgcaacagagaattgagcatccaccttccatggtgtcacagagagttgatcctcaggcgaaggtgtcacagaaggaaatgggatctgctgtttgcctgccacaagctccacatcctcctgttttgcagaaacccaaggacttgcctgttcctaaacagcgggagcctatcaactctttgccaaaagaagagccttgtttctctggaaggactgtggaagcagatcaagggaaggaagctaagctctcccgttcagatcggaagaaaatccacaaaactgagaagaaaaataagaagttcagagatctgtttgttacctggaatccgctattgatggagaatgaaggttcagatttgggtggtcaagactggctgttcagcagtacaagaagctctgatggtagcatggctcaacccacagtacctgatggtttagggccgattcatccgatggtgcagcagcagccttatttgcaacccagggcaacttttttgccggaccttcatatctatcagctgccttatgttgtaccgttttaagtctgttcgtagatgagaagtagatgagatgttgtgaaggagctgtgtggatgtgggatataatggttccctgccgcaattttccagctttgttagcaagattgtaatgtaatgttggttaattattttgctcatttatgtaagcagttgaactgcaaaatcttctttctaggcagttactgtaatacgacacgcaatatttgtttttatcc

SEQ ID NO: 18993 - DNA, 974 bp, Zea mays
  Clone ID: LIB3136-003-B9_FLI
gaagttgtactagctttggaatatttgcactctatgcacatagtccatagggatctaaagcctgacaacttgttgatagcccatgatggacatattaagtggggcttcactgtatggagatgatgagcctcagatgaatgaattcgagcaaatggatcaccgagcacggagacaaaatcgttctgctgttggaactcctgattatttagcaccagaaatcattttggggacaggacatggttgcagtgcagattggtggtccgttggtgtcattctatttgagctcattgttggcatacctccgttcaatgcagaacacccccagacaatttttgacaatattctgaattacaaaataccttggccgcatgtcccggaagagatgagttttgatgcacaagatttaattgacaaattattgaccgaagatcctcatcaacgactaggagcaaatggcgcctcagaggttaaacaacatccatttttcaaagacattagctgggatacccttgctaggcagaaggctgcctttgttccctcctcagataatgcatttgatactagctacttcaccagtcgctattcctggaatccatcagatggaaacatatatgaagcatacgagtttgaggattccagtgataatggaagccttagtggaagcagtagttgtctgagcaaccgccaagatgacatgacggaggacagcgatggcctcaatgagtttgaatctagtgcaaatgtcaattattctttcagcaacttctcgttcaagcgtgcagcggttggatcaccgtctaaaagttcagaatgcttgcttgcacgcttgcacctaagacctgcttgcacaatattcgttccctatttgtaaatatcaacatttgcaattgcaatgttatcgcaatagcaattgtagtactgctgtacctgtgagccagatcttgaatgctacaaaggcagtatcctttcttttt

SEQ ID NO: 18994 - DNA, 715 bp, Zea mays
  Clone ID: LIB3136-003-C1_FLI
cggagaagttggacccaagaccattcatgttcctactggggagaagctttctgtttttgatgcggccatgagatacaaatctgagggccatgctactataatcctcgctggcgctgagtatggaagcggcagttctcgtgattgggctgctaagggtccgatgctcctgggagttaaagctgtaattgccaagagctttgagcgtatccacagaagcaacttggtggggatgggaatcattcctctgtgcttcaaagctggtgaggatgctgattcacttggcctcactggacatgagcggtacagcatcgatctccctaccaacctcagtgagatccgtcccggccaggatgtgactgttactaccgacaatgggaaatctttcacttgcatcgttcgctttgacactgaggtggagctggcgtacttcaaccatggaggcatcctcccttatgtcatccgcaacttggcagctgcgcataactgaggcaagatcacacaccgtttgacccacaatggcagtggcaggctccatgttcccagggctagcgacctggttctcaatgtagtgacatttgtgatggatctaggggtctctttgtcgattcagcccataaataaagtgtgaaataaaagccgcaggtggaggcaggaacctgctgattgagggaacagttttgcctgtgtttggttacatgaaatatctgtttcacag

SEQ ID NO: 18995 - DNA, 750 bp, Zea mays
  Clone ID: LIB3136-003-D10_FLI
ccgtcctctcccgaaagatctccaacatcgagtaccacctcaagggcgccaagatcttcgacaagaaggccaagaccctcatcactcgagaggcggtgaacggcaccagcacggacagcaagaccaccatcaccctcaagtacagcgtcatcaagggcaagctatgggattcgagcaagtccatgaagctgggggtcaccaccaccattgaagctggggttcctgtggtcttacccgcaaccattgaggtccagagcgagttcaactccacctacagctggggcgagtccatcatcgagaaagaagagtactccaacgcctacgaggtcgttgtgcctgcatactccgtcgtcacggtcagcgtactcgccacacagggcatctgccaagtccccttctcttatactcaggaggatgttttgactaccggagagaggaaggttttcaagtttgatgacggcatctttcgtggtgtcaacagcttcggtttcaagtccgaggtcacggaaaggaagctctccaaggacgatgactgagcgatatatcgtccatagtctctcgataaacttcggtcggtgtgatttataaataagctatattaatgtaataatgctttaataagcagttcagtatatgtgtgtcgtcaaaatcatgtttttatactactactatgtgtgcatgcacacttcatgtgtaatgctttacttgtaatttattgcgaataaacaaagagagtacgtcttcgccact

SEQ ID NO: 18996 - DNA, 1178 bp, Zea mays
  Clone ID: LIB3136-003-D6_FLI
gtcctgccccgccaccacgccgcggcagcacaactgcacaagccctcctcagatctcaatcccggcgctccctccctccctccctcctcgcctcgggacagcgagcgccgccgtccgccgtccatggagcacgacgccgaggcgcgccgcgggttcgccaggatgggcttcgggtgcaagcactaccggaggcgatgccggatccgcgcgccctgctgcggcgacgtcttccactgccgccattgccacaacgagtccacgaaagacgggcacgagctggatcggcacgacgtccaatcggttatctgcctcgtctgtgacaccgagcagccgatcgcgcaggtgtgctgcaactgcggcgtctgcatgggggagtacttctgcgcagcctgcaacttcttggacgatgacgttgacaaggagcagttccattgccacgattgcggcatctgcagagtaggaggaaaggagaacttcttccactgccaaaagtgtggatcctgctactcgacgacccttcgcgacaggcactgctgcatcgagaactcgatgaagaacaactgccccatctgctacgaggcagtacctgttcgattcgctgagggagacgtcggtgctccgctgcggccacaccatgcacctgcagtgcttccacgagatgttgaagcacgacaagttctcgtgccccatatgcgccacgcccatcttcgacatggacaagttcttcaaggccctcgacgcagagatggaggcaagctacttgtacacgggaaagggatgggtcgtgtgcaacgactgcagggacacgacgcaggtcttctccggcgtggcgggccacaagtgctgccactgccagtcccacaacacctgccgggtggcaccccccgtccttccgtagccaccaccaacaccacatcattgttgttggaattggatgcagccagccaagatacccccccagcagctacgctattattaccagtagcgcctgcgcttttacacaccgctccgttccagtccatgatgaactgcataatttcgtgccatgcaggtatgtacgtacactgttattggagatcggaagatttatccgactcgggacgtattatttgtaccacaacaaaacacgtgttactattgtaataccagatccggatatatacgaaactatttttagg

SEQ ID NO: 18997 - DNA, 1307 bp, Zea mays
  Clone ID: LIB3136-003-E11_FLI
caccgcttcccgtgcagcgccctccctctacgttcccccatttcctgtgttggcggcgatggcgcggcacttcgtgctcaacaccggcgccaagatcccctccgtggggctcggcacctggcagtctgaccccggcgtcgttggcaacgctgtctacgccgccgtcaaggcgggttaccgacatatcgattgtgccagagtttacggcaacgaaaaggagattggtttggcgctgaagaagctatttgaagagggtgtagtgaagcgagaagatctgtttatcacctctaagctatggaatgatcatcatgctcctgaagatgtgcctgaggcactaaatgacagcctgaatgatttgcagcttgagtacctggatctttatcttatccattggccatttagagtcaagaagggaacaaataccagccctgaaaattttgttacacctgacttccctgctacttggggggcaatggaaaagttatatgatgctggcaaagctcgcgctattggtgtgagtaacttctcctcaaagaaattgggtgacttgcttgctgtagctcgtgtacctccagctgttgatcaggtggaatgtcatcctggttggcagcaaactaagctccatagcttttgtcagtcaactggtgttcatctaactgcttactcaccactaggttcacctggtacaacttggatgaatggtaatgtccttaaagaaccaataatcatctcaatagctgagaaactcgggaaaacttctgcacaagtggctctgcgctggaacattcagatgggtcacagtgttcttccaaagagcacgaatgaagaaaggataaagcaaaaccttgatgtttatgattggtcaattccagatgacttgcttgcaaagttctctgagattaagcaggctaggctacttagaggcaacttcattgttaatccagagagcgtttacaagacccatgaggagctctgggatggtgaactttaagaaggacgccgttgtccctcctgactcctgagcagggagcaagcagcgttccattagggctcgtcagatcatttcacctccaaagttgctcttttgaaatgaaggttcagtgctcggaagctctggtgccatcctgtatcacgaactattgagaaatttgtcggtgattttactttgtgctacgggatgtgctgctgcagtctgtcctagtgtcagttgatttttctggtaaaactgtgaccaaataagttaattcgccaggcatcattactattggaatttcatcgttttatctcctcactatttttttatgctc

SEQ ID NO: 18998 - DNA, 447 bp, Zea mays
  Clone ID: LIB3136-003-G2_FLI
cagatagtagtgtcgcttggagcaggtccatgggacgctctgtatggaggagggaataccccggcgttcgtcttggcttcggtcttctccctggcagcaggtgtgctcgcagttctcaagctgccaaagctgtccaactcgtaccaatctgccgggttccatggatttggctgatgctcatgcccaaaacacccccgtctgccatgtaaaacatcacaccaacacttggccccattttgccattcgtttacagagaaatgattcttttttcctcgtacaactacagaataatgacagtgaaagtaggagtttaggtgagagagagaggctaggtaggttgatgtgaaggtgtaaaagctgtatcctcctttttttgtttttgtttttgtttttgacagtgtatgtaagagctgtccacaagaaaatttacaagtggtgtaacctgcc

SEQ ID NO: 18999 - DNA, 622 bp, Zea mays
  Clone ID: LIB3136-005-A6_FLI
gcttataatacttacaacaaaagataagcccacgaatcagtagatcgaggtcccgcccagtccagcaaaagcacacacggagatgtcccagctgagctctgctggccacatggctgcgacgttcctcctcatcctcctcgcctccgcagcagcaacggtgtcagctgaccaacaagtctctgcctgccagaatgacatagacgcactgtggcgcagctgcaagcagttcgtccagaaggaggggcccaagatgcctccgtccgaggactgctgcaaaaccatcaaggccttagacgcgcacgcgtcctgcatctgcgactacgtcggctccccggacgccaggaataagctagacctggacaaggtgttcttcgttaccaaacagtgcggcgtcaccgtccccaagggctgcggatcaaagcaggactgaagagcggctgaatctgaatggagcaagttggctaacatacgcacggcagctacaaatacttataggaataaataaagttggtcaactgttggtttcatggtgttggagtacaacaactgtactgttcttatcctcatatatgatatatgaactctagttcatcacataatataaatctgtaagagagcccag

SEQ ID NO: 19000 - DNA, 882 bp, Zea mays
  Clone ID: LIB3136-005-B4_FLI
cacgcacatccacccgccgccacgcatcgcacgaactcccggtccgaaaggcaaaccagccaccagtcccaccaccaccaccctctgtcttcgcctccgctgccgattcgaaagcacccgtcctgtcccctcgcaaaaccctagctccagccaccatgaagggcaaggctgacacctccaagaaggacgagggcaggctccgggcgggcggcgccgccggaaagcgcaagaaggccgccgcgagcggcaagcccaagcgcccgccctccgccttcttcgtcttcatgtctgaattcaggcaggagtatcaggcgctgcaccctggcaacaagagcgttgcgaccgtgagcaaggcagcaggggaaaagtggcgtgctatgtcagatcaagagaagcaaccatatgtggaccaagctggacagaagaagcaggactatgagaagactaaggcaaactttgataagaaggagagcacaagctcaaagaaggctaagactgaggatgaggatggctcgaagtcagaggttgatgatgaggatggcagcagtgacgaggaaaacgatgacgatgagtaaacactgtctccaaggtcacgaggtagcaaatcgagtgttaggtccccaattagcttactgttttgctgcctttaaatgttaagttgtttcaaacaggtgtttatgaaggggatctattaatttcgcgatgtcgttagtttagtgcattagcaaagaaaaagccgaatgctgctagctgttctgttgcttttcttttgctaaccacttgtgtcacaactttctgtacctgcttcattgactaatctagtgactagtcagttattggttcaatatttggtcttggttttatatatttctgtgttgcatt

SEQ ID NO: 19001 - DNA, 633 bp, Zea mays
  Clone ID: LIB3136-005-H1_FLI
ccatctccggctgacgacgctgcagcagatgcacaagatcctgacgccgcggcaggcggccaggggcctcctggcgctcggcgactacttccagcgcctccgcacgctcagctcgatgtgggcggcgcgcccgcgggaggcggcgatcagctagatgcctgcggcgtggcaggccaaaagctcgctcactggtgaggcgaccgtaccaaagaacacgacgccgacgacgacgaagactaaagagtggtagcagttcgctgtatacttgcccccccaatgcaaggtgtaaagcccagtggaggacgaagagatcgacctcgctgtacgagtacgacgaacggaagggatgcttctcggtcggcggcggcggcgatctcgctgtacaaggcgattagtagacgtacaaaatgtaaacggaaatcgattgatgggcggaagacatgtacgtatcttgttttgatacccgcggccggggccctcctagaggcgtactgtatgatggttatgcgggccgtctacaactactactggtgttgggctatatgtatatttatataaaatgtaatcacctgtaactatcgttggtcagattctaaagagcacgcggcatgcaggtgtggaacagttcagttc

SEQ ID NO: 19002 - DNA, 407 bp, Zea mays
  Clone ID: LIB3136-005-H11_FLI
gaagctctcaactacttatttctcctgattcctctgatcaacgttatgattccattcttcgtgaagtcctttgctgttgtttggtcagcagatacagttgctttcttcgtgatgtatgcatggaagcttggatggctgcaaaggttgaaatgaagatttttggtgtgctctcttggtgatgtgtgtatgaaagcttggatatttggtttgaaaaggtggagtcggtagcttttttgctgagagaaacatttgtcctcaaaattttcacatcttttggagggagctgcatgattagtttattccaagatttagttcatatagccttttatatcttgtgtatatgcagggagtatgaaaaaacagcctttcacatttaagtgataaatatatgtacctgaagtctgaac

SEQ ID NO: 19003 - DNA, 928 bp, Zea mays
  Clone ID: LIB3136-006-B7_FLI
gtgccatgctagagtgtgatggaatatgaagagcatgagaagagagcatggagtgttgatttttctcgcacagactcttcaatgctagtatctgggagtgatgattgcaaggtgaaagtgtggtgcacaaatcaagaagcaagtgtgatcaatattgatatgaaagcaaatatttgctcggttaaatataatcctggatcaagcttctacgttgcagtcggatctgctgatcaccatattcattactttgatttacgtaatccaagttcgcctgtccatattttcggggggcacaagaaagcagtatcatatgtgaaattcttatctaacaatgagcttgcgtctgcatcaacagatagcacattacgcttatgggatgtcaaggataactgcccggtacggacattcagaggacacaaaaatgaaaagaactttgttggcttgtctgtgaacaatgaatatattgcttgtggaagtgagacaaatgaggtttttgtttatcacaaggctatctcgaaaccggcagcaagccatagatttgtatcttctgacccggatgatgccgatgatgatcctggttcttatttcattagtgctgtctgctggaagagtgatagccctacgatgttaactgctaacagtcaggggaccataaaagttcttgtacttgctccttgatgttatggagggcgttcaagaggttcacagtactgtccagttgtttcctttcgtgtcattatattcccccaaaattgggaacgggggcataattgatctccggttagggaatgaagttttgcagatggtcagctgacgtagggttttgaggtatcagaatgtgcatagtcatgtttatgttgtataggtgtaattgtgtaaagcagccaagttattggttacaagtgtaacacgagaaatacacatttcc

SEQ ID NO: 19004 - DNA, 1553 bp, Zea mays
  Clone ID: LIB3136-006-D7_FLI
ccaggcgcatgactgtgccgccgcgccgccaccagagcgagaagtggtagcgaggggtggcgcgtcgccaccatggagggaggatgaccgtgatggacacttcgtattcgaccttggcgagaacttgacccgccgatataaaatcttgagcaaaatgggagaaggtttgggttttctgcaatctgtcgtctcctcttctgctgggtatctccgttattattctaatgaagagggctacgagttggattttcgtaggtacatttgggcgtgttttggaatgctgggaccgtgaaacacatgaatatgttgccataaaagttgttcgcagtatccacaagtaccgtgatgctgcaatgattgagatagatgtgctcaatcgccttgcagaaaatgaaaagtacagatctctttgtgttcaaattcagagatggtttgactatcgtaatcatatatgcattgtttttgagaagcttgggccaagcttgtatgattttctaaagagaaatagataccaacctttccctgtggaacttgtgcgggagtttggacggcaactgttggaatctgtagcatatatgcatgagttgcggcttatccacactgatctgaagccagaaaacatactacttgtctcttctgagtatataaaagttccaagtacaaagaagaattcgcaaggtgagatgcatttcaagtgcttgccgaagtccagtgccataaagctgatagattttggcagtaccgcctttgataatcgggaccataactcgattgtttctacgaggcattatagggcacctgaaataatattaggtttaggctggagttttccatgtgatatttggagtgttggctgtattcttgttgagctatgctctggggaagcattgtttcagacacacgagaatctggaacacctagcaatgatggagagggttttgggacctctaccagaggatatgatacggaaagcaagctcttcagctcagaaatattttaggagagcaacacgattaaattggcctgaaggtgctgtttcaagagaaagcatcagagctgtgaggaaactggatcgactaaaggacttggtatcgaggaacgctgaccattcaaaggtggcactggtggacttgctatacggtctcctacggttcgagccatcggaacgcctgacagcagaagaagctctggaccatccattcttcaggaacccaacatgacttgttgagcaggcttgactcatgtgtaactctactgaaggtggtggtgggaagcaggcagagctgtccattgcaaagctgaaagcattttgctcctctataccagagagtttgtgtaaggcctgtcaatggggcttcttgtggtgataaaactgatggctttagtcacccaatgtcatgtacactagcatttttcctagggagcttagttcgccagatggcgcttgtatgttgttaaccgggatacactatgagctgtgccccgatgccctggtgccataatccaatcgcaaatgttgaaatcaagcatagcatgcgtccgtatagtttatg

SEQ ID NO: 19005 - DNA, 482 bp, Zea mays
  Clone ID: LIB3136-007-B11_FLI
ctgcgtggccctgctggtctcgctgtgccggcacggtggggacaaggtggtggccctgctggggaggatgccggggctgatgtcgtcgctgtacacgctggtggccgacggcagcccgcagacgtgcaagcgggccagggcgctgctcaacctgatccaccgccattacgagatggacggccagcagccggcgtcggaggtgcccggcgagcgtgtcgttcgcgtgctatagccgcagattccggagccgtaagtacagtaaataggtgtagatctttacggtgtgccatttgagaccatttcttgttttctgttctcagctcgtgttttagaagagctgagaacgatttttgctgcttccgttttgaagactgctgtagtcacagacacacacacagacgcgagagtatagataaatatgtttgcgagcttgagacttatagcagataatgaaagtgtgacagcatgggattactgtttgc

SEQ ID NO: 19006 - DNA, 782 bp, Zea mays
  Clone ID: LIB3136-007-D11_FLI
gccagcagcacaagaaccagagtccatagacatccatcaagccaagaagaatggcattcctcagcacgaacgcgttgatgagcgtccccatcacggcggcagccgctcctcgccaccgccgcagcttggtcgtggtaagggccgcggccgtcaaatctaacgagcacctgcaggaagagcaagcatccgtggccgacggagctcgtgggcgtcgccgagccatggtgttgttggccgccaccgctgctgtcactggatcatccgtagccatctgcaggtctgctagagctgcaggtgtcaccacgctgagcggacagtatgtcaaaatagagaacgtcaaggacccatatgtccagggtgtcggcgaatgggctgtcaaggagcacaacaggcagactggtgagagcttgcagttcgccgaggtggtcagtggcatggaacaggtggtcgccggcaccaactacaagctcaacctcgcaaccaaagatccaacgtcgtcttaccaagcagttgtgtttgatccgttgccaaactccagcaaaaatcgccagctcatgtccttcaagtctatttgatctctctctctcacgcctgcgtgggttgcagaataaatgtgtggccttgtatttgtgatgaggaaataataatggaataaatgtgtggccttgtatttgtcaaatagtcttgtactgtcgtttcaatgttttttttttcatgtgagccaagttttccatgtacgactttctctcagatatcatagatttgtatattatatatcccac

SEQ ID NO: 19007 - DNA, 807 bp, Zea mays
  Clone ID: LIB3136-007-G8_FLI
gctgttaattcttcgcgtaccggagaaacaggctacatcgattctccaacctccctccacatggatagcgtcgaaggccaaacaacggtgagggactcaagatctgtacagcaagcagatgtcaccatggccaccaaggagcagacccttccctccacctctggcacaaccgattcttcgagcggcagcgcctcaagtcagcctgctttcaaggggaacccaggacgtgccctcaaagttagcagcagcgatgcactgacggtgaaagctacctgtaacggcgacaccgtgcggttcaagttcctgccggcaatgggctggtaccacctgctggaagaggtagcgaagaggtttaagctggcgacaggagcgttccagctcaaatacaaggacgacgaggacgagtgggtgatcctggcgaacgacgccgacctccaggagtgcgtggacgtcctggactcgatcggctcgcgcagcgtgaagctgcaggtgcgcgacctcccctgcctcgtcagcagctcgggcagcagcagctgctgcttgcaggtggaaggaagcgcctagctcatgacggcaggacggaagcctgggtcatggcacgttgactgttgtagtaggttttagccttctgctgtcgccgtaatggatccatgtctacgctcaatacaaaatggcgagtgcagaaaaggagaagtgtaatactcgtcgcacggctgaaacaatgccgtgaaggccttgccataatctgttgtttgttcacaaaagtcgtggcaataatctgttgccatgaatatgggaggttttaag

SEQ ID NO: 19008 - DNA, 1544 bp, Zea mays
  Clone ID: LIB3136-007-H10_FLI
gctcgcgctcgtctccctcgtgctcctcctcatgccgcgctcgcccgccggcgccacggccggcgccaggaggtccggcccgcccggggccgacaagtacgccgtcatcttcgacgccgggagctccggcagccgcgtccacgtcttccgcttcgacgccaacctggatctcgtccacattggcagcgagatcgagctcttcgtccagataaaaccggggcttagccactacgccaacgatccccgggaggccgccgagtcgctcgtctctctccttgacgatgccaagcgagtggtgcccgcggaattgcgcgaccaaactcctgtcagagtcggggccaccgcagggctgagaaatttgggtgcacaaaaatcggaggcgatattgcaagcggttagggacattcttcgcgaaaagagttcctttaaaaaccaaccggattgggttacagttcttgatggaacgcaggaaggtgcatacgaatgggttaccatcaattatctgttgggaaacttgggaaagacttatgcagacacagttggagtagtggatcttggtggtggatctgtccaaatggcatatgctattgcagagaaggatgcagaaaaggctcctaaaccatccgagggggaagatgcatatgtgaagaaattgttcctcaaaggaaccacatattatctttatgttcatagttatttgcattatgggttgctggcagctagagcggaggtcttaaaagctggcaatggcaatggttacagcaactgtatgttagagggatttcaagggaaatacaagtatggcgacgattcatttgaagcatccggtccaccttccggtgctagttactcaaaatgcaaggatgatgcagtgaaagcccttaaagttgatgaagcatgcacccacatgaagtgttcttttggtggcatttggaatggtggtggtggtgctggacagaagaatctctttgtagcgtcctttttctttgatagggctgctgaggctggatttgttaacgccaatgcgcctgtcgctaaggttaaaccatcggacttcagacaagctgcggagcgcgcttgctcgttgagcgtgaagaacgccgaggccaccttccctggtgtacagaaggatagcattccatatatctgcatggacctcgtttatcagtacacattactcgtggaaggattcggcgtcgatccggaccacgagatgaccttggtaaagaaggtcccttacagcgacgcctacgtcgaagccgcatggccgcttggcagtgccatcgaggttgcatcttcgtagtaggaaggaaacacagtttagcaaggtaacatcggacggcattcttgtcatgaagttttgcgttgagagtccccactcctccacttcctcctcttgatcgcttgaattcgcacactcaatccattcatcttactatacggtacgggtagcgtctctcggctctacttggttccagcgggcattgttgtaagctctgttattaatatttgtatactactaatgcaagtaagattggagcctc

SEQ ID NO: 19009 - DNA, 1501 bp, Zea mays
  Clone ID: LIB3136-008-B5_FLI
ttactgttggatcatcggtgccaattaatcttcctgtcatcaatcaagtgttcagtagcaaccgggcaattataataccccacacatctcctttggcgcggattcgacctcttacagggcgatatgttccaccagaagtggctgcagtccgtgtacctcttctccacctttcaaacttccaaataaatgattggcctgagctttcagcaaaaagctttgcaatcatggttttgatgcttccatctgatagtgcaagaaaatggcatgtacatgaattggagctggttgaggtcgttgctgatcaggtagcagttgcactatctcatgcggctattcttgaagagtccatgcgagcacgtgatttactaatggagcagatgttgccctggatttagctcgaagagaggctgagatggctatccgtgctcgcaatgatttcctagctgttatgaatcacgaaatgagaacacccatgaatgcaataatagccctttcctccttgcttttggaaactgagcttactcctgagcagcgtctaatggtggaaacagtactgaaaagcagcaatctgttagcaacactcatcaatgatgtgctagatctttccaaactcgaggatggaagccttgaactggagattaaagcattcaatcttcatgctgttttcaaagaagtgatgggtttcattaaaccaattgcatctatcaagaggctatctgtatcggttatgttggcaccagatttgccgttatgtgccattggtgatgaaaagagactcatgcaaactattctgaacatctctggcaacgctgtaaagtttaccaaggagggacacatcacacttgtagcttccattgtgaaggctgactctttgagagagttcagaaccccagaatttcatccaactgcaagtgatgaccatttctatttgaaagttcaggtaaaagatacaggctgtggaattggtccacaggatctacctcatgtatttacaaagtttgctcatcctcaaagcggaggaaaccgagggtttaatggtagtggtcttggccttgccatatgcaagaggtttgttagtctcatgggagggcacatctggattgacagcgaaggaaccggaagaggttgcaccgcaacattcgtcgtcaagctcggcgtgtgtgacaacacaaacacctaccagcagcagctgatccctctagtatggccaagcagtgcagactccgatttgcgtgctccgaaagcgcttccggacgggagaggatccactcccttgaaatctcggtatcaaaggagcgtatgagcctagtgtaaatgattgacggcatagtgccaagtaggggaccgattagtgccaccgtctaattttgtttgtaaccctgtcatagcaggcatatgatgtacaaatactgtaaagcaaatggagactggggccgtgtatctgggtggcaacgctgacttgctgcattgagtggtatatacatatgctaccagcggattg

SEQ ID NO: 19010 - DNA, 1886 bp, Zea mays
  Clone ID: LIB3136-008-D7_FLI
cttctccccctcttctcttctcgtagacggcagatctccaggggtgtcgccgtctccggccacggcggccggcgctcggagcatcggtggggttcggtgcggaggtgggcggccatgtacaagaaccagctgcaggagctggcgcagcggagctgcttcaacctgccgtcttacacgtgcctgcgggaggggcccgaccatgcgccgcggttcaaggcggcggtgaacttcaacggggagcagttcgagagccccggcttcttcagcacgctccgccaggctgagcacgccgccgcggaggtcgcgctcgccgcgctcgcgcggcgcggcccgtcctactcgctcgccgcccgcatcctggatgaaacaggggtttataagaaccttctacaggaggtagctcaaagagttggggcgccgttgccattgtatacaacagagcgatctggcgttggccacctgccggttttcacatgcactgttgagctagctggtatcacatttacaggtgatcatgctaagaataagaaacaggctgaaaaaaatgcagcttcagctgcatggtcagcactaaaacaattggtacgcgaggaagtgaattcatccaatgagacagaaaacagtgatgagcaggagcagatcaggattgcccgagccctcctcaactatcgcttgaaggagaagatggcgatggccaattatcctcatgtttcaccattccctaagaaatttcccatgcagccagagaggaagccttcttttggtcaatcttctcagtccagctactcaaagattctccctctattccgccctaaatctaactcaagatccagaccagagtcaccagcatctactgatggcgcatcgcaaatgcctggccgggccatggatatccacactccaagcccaagatcaagatttccagctgcagaggcagccccctacgtgccagttgggcacttccgtatgccttgccacagcatggctccttcagtcacaattaggactgctgttcctgtgttctctgctccacctctcccaccgccgtctgcacgcccgcagcagcttcctccactcatgagccacccaccaccgattcggatggcatccccagttcgcatgaggccagcctctccaatgtttgcctcctcagctccagctcaagggccgaaacttgtgaggcctgttcaattgaaggatgtgcaagatcaaccaaggaaggaaacagctccatccgtgatccctgttcaggtaaaggacgtgcaataccaatcaaggaagagctcaatgtctcctgtgattcctgtcctggtaaaggatgcacaacgccagcctctcccagttcagacgaaggatgtgcaaacccaaacccaagccccaaaggaatcacttgcagatccaattccagcaatcaggcctgcagtcaagattgatttgcctgctcaaggcaagaaggaagcttcagctggtgctaccagcgaagcgccatcttctgccactggcaataatggtgctatggaacgcggtacatcatcagacgttctctcggcaaggcgatcaagggctgctgcggacggggatggcgacaaggtggaagcaaagcacgaggccgaggctcaagcggtggcagaggcagccatcaggcagctggagatcaattgacttcagaaaatgcgcggcaccatcttctcccagattttgtaattagctgccttgcctcctgtgcacattccgttctgcttagtccgtgtatgtcttgttcgggttagggctgtctgggcaaaagctgcattgtggtaggaacacctaggttttctgttgaggagaaaaaaaaacatggagtggtggtaggcggtttgcccagtgtttagttggagacggttatt

SEQ ID NO: 19011 - DNA, 1790 bp, Zea mays
  Clone ID: LIB3136-008-E8_FLI
caactcatgtttatttgagtttcaattattttcagggagtttttatcaattgtgcattgattgaaccatttggactcaccttgattgaggctgctgcatatggtctacccatggttgccacccgaaatggtgggcctgtggacatacatcgggttcttgataatggaattcttgttgacccccacaatcaaaatgaaatagctgaggcactttataagcttgtgtcagataagcacttgtggtcacaatgtcgccagaatggtctgaaaaacatccataaattttcatggcctgaacattgccagaactatttggcacgtgtagtcactctcaaacctagacatccccgctggcaaaagaatgatgttgcagctgaaatatctgaagcagattcacccgaggactctctgagggatattcatgacatatcacttaacttaaagctttccttggacagtgaaaaatcaggcagcaaagaagggaattcaaatgctttgagaaggcattttgaggatgcagcgcaaaagttgtcaggtgttaatgacataaaaaaggatgtgccaggtgagaatgctaagtggtcgtcattgcgtaggaggaagcacatcattgtaattgctgtagactctgtgcaagatgcagactttgttcaggttattaaaaatatttttgaagcttcaagaaatgagagatcaagtggtgctgttggttttgtgttgtcaacggctagagcaatatcagagttacatactttgcttatatctggagggatagaagctagtgactttgatgccttcatatgcaacagtggcagtgatctttgttatccatcttcaagctctgaggacatgcttaaccctgctgagctcccattcatgattgatcttgattatcactcccaaattgaatatcgctggggaggagaaggtttaaggaagacattaattcgttgggcagctgagaaaaacaaagaaagtggacaaaaaatatttattgaggatgaagaatgctcatccacctactgcatttcatttaaagtgtccaatactgcagctgcacctcctgtgaaggagattaggaggacaatgagaatacaagcactgcgttgccatgttttgtacagccatgatggtagcaagttgaatgtaattcctgttttggcttctcgctcacaggctttaaggtatttgtatatccgatggggggtagagctgtcaaacatcaccgtgattgtcggtgagtgtggtgacacagattatgaaggactacttggaggcgtgcacaaaactatcatactcaaaggctcgttcaatactgctccaaaccaagttcatgctaacagaagctattcatcccaagatgttgtatcctttgacaaacaaggaattgcttcaattgagggatatggtccagacaatctaaagtcagctctacggcaatttggtatattgaaagactaaatctttgatctttgctggtcagcagaggaatcaaagcaggatcgaggagtgacaggacttccccactgtgcacttcgccgaaaagtaataatgggattgctatgcatggcccttgttgtacactagaaaattgggcacgcaaacttgtgtcagtttttccgctgttgcaaaattcagtgatggtgtttttgtaactataccaacctgtgtcagttttgccgttgttgcaaaactcagtgatggtgttttttgtaattattatacatccgaataataagactggtgtttccagacagactatgcaagctaaggggaaatcacgattttcct

SEQ ID NO: 19012 - DNA, 432 bp, Zea mays
  Clone ID: LIB3136-008-F12_FLI
atcagctcgacgctcaagattgcgcaagcaggctgaatgggaggaagtagccaatcgtgcagatttgctaaagcaggaaaatagttcacttaaagaagaattgaaacaacttcaggagaagtgtgatggcttgacctcagaaaatacatctttacatgagaagcttaaagcgctcgaggatgagaaatcaaatggaaattggtacaaggattaaaggctgaaacttctctctctttctgactgctgatgtaaggttacttgtgagctgccgttaggcttacagaataccaactctgattgccggtgtaatgttctccatattttttttccagataatttggtggtaacctgataggacgacaactaaagaggtattcatatacggtattagacttttgtccgagggggtaaaattgtatcataggatttgac

SEQ ID NO: 19013 - DNA, 1432 bp, Zea mays
  Clone ID: LIB3136-008-F8_FLI
cactgcagtgcttacgagagtccattccagtagaaatgagaataaatcatcagaatttaaagagatcaatgcattggtggtagatcatagaccggtccgtgccaaggttactaagtatcatttgcagagactgggagttcagactgaattgacaactgacctagatcagtatatttctaaaaataattgtggatcacagattgcaaagcttgtgctcattgacaaagaaacctggctgaaagaatcccactccatgcctcttttggttactaaattgaggaacaaagatcagccagactctacaaagttatttcttttggagaaccctaaaagttctgtcaagagcaattcacatatattcagggaatataacttgaatgtaattatgaagccacttcgtgcaagcatgcttcaggtttcgctacaaagagcattgggtgggatagataaactgcattgcaggaatggagtagtcggaaattcaacactgggcagccttcttcacaagaagcgaatcatagtggttgatgataatattgtaaatctcaaggttgctgcaggcgctctaaagaaatatggcgcggaagtaacttgtgctgacagtgggaaggaagcaatcacactgctgaaacctcctcacaattttgatgcttgtttcatggacatacagatgcctgaaatggatggatttgaagccacaaaaaggattagagtgatggaaagagatctaaatgagcaaatagaatgtggagaagccccaccagaatgcgtaggggttcggcagtggcgaactccaatattagccatgacagcagatgttatccaggcgacacatgaacaatgcttgaaatctgaaatggatggttatgtttccaagccattcgagggcgagcaattgtacagagaagtagctcgctttttcctaaatcaagaccaagttcagtaggtaggcttatatggagtgtaaaatagtggaggatatcggggttcacccatcgaggctgaaagaattctgtcagagatcccatgttcttgagagtggaaaacactttaggctggagatggaaccacccatgttcggttccttggtacatctgaccaaactgcaaaactaaatgtgcaatgtcttgaaatcaaggtgcatgtggagctatttactcgacaatctgaagtcaaggcgtgtgaaaaaaaagcccagctgcattcactaaccgcagatgtcctctgccactataatatagagtagggagagaaattttccttccccggaaggtaccggctgtacatattaggtattggttgtttgtgcaggcatttgttggcattttgttgtgcatcgtcttcggtctgtattgtttgggtcgaagctgtaaaatgtaaatggcattttcaaagatggaagttttgtttgacaaatacatcggtcgtcatc

SEQ ID NO: 19014 - DNA, 1142 bp, Zea mays
  Clone ID: LIB3136-010-C8_FLI
ctggaggtttgtagtcctcgtgcaaataatgaaccttctgaggttgttcgtggacttgatccgaaatcaaagcgcttatcgttaggaagagctagtacatttaaagaaccagaagaagtgctccatccccactcccatggtacatctactcccagctggcgtagatctaagtcaaaatcaaggactgaaaaggcaaggccaggcttgtctgctacacacgatgcaaaatcttctaaggttaatgcagcagacaaagaggacacgtcatccacaatttctgatcctggacctgtggctgtatgggattcaggaccaaagtgggacgatgaacctaaatgggataatcaacctaactgggaacccgagacttcaattgagctccatagccctcgcgaggatattgagcttggtctgactaaggagctggtacctagtttagatgaaaggtggactgttaggaaaggacgctatcttggtgtactggtgtgcaaccattcatgcaagactgtgcagagtctgagctctcaggttgttgctcctaaggctgaatatgatgacaattgtttggacctgctgttagttggtggtagtggaagactgagattactgaggtttttggtgcttttgcagtttggaaagcacatatctcttccaaatgtagaatatgtaaaggtgaaatctgtgaggctcaaagcaggcccaaatacacacgacggatgtggtatcgatggcgaactactccatgtcaaggggcaagttcgctgtagtttgttgcctcaacaatgtcaattgatgggcaggccagtgaaaaaccctgtacagtagctgtaaatacactatgcggactgtctgcagctctgaggtcagcccagaatcttgcacctgtggtgtgtacaagcggcgaaccatggattttcgtctgcatccacatgtcagtaaattatattcagaagtgagaacatgaacatcctagctggcactcagctacagagatgtacatttgtggttgacgagcagaaggtgctgagtgggtgctatttcatcccatatgtaaagccaaagcctatctcggacagcagcttgttgcgcacctcttgcttttgcctttttctcgtccgatagaatgcatctactatacagcc

SEQ ID NO: 19015 - DNA, 666 bp, Zea mays
  Clone ID: LIB3136-011-A5_FLI
ggaggacataagggatttgtctcgagaggaatgtgtgacatacttgagaaggaggagcagctgcttttcaagaggagcttctatttatagaggagtgacaagaaggcagaaagacgggagatggcaagcacgcataggactggttgctggaactagagacatttacctgggaacattcaaaacagaggaagaagctgcagaggcttatgatattgctgccattgagatacgtggcaaaaacgctgtgaccaattttgaccgaagcaactatgtcgataagggtatgcactgtatagaaggcgaaggcttgaggctgcttgcatccaagccagaagaatgacttccaagttcaatgcagtgattgtcgatcgagcagatttggccagacgtatatgcagcttagttggtacatatacagataggagaaccggttgcagtttgtcaatattcctgctttacatgacttgggattacagttaaatcgacccgctagcaaaaaaaagtgtgcaaatgttagtagatttggccagacatatatgaagattggcctcgtaggatagatctttctgcaaatgttagcgaagccagtgtttatgttctgtttgctagattagcgttatcagtttgcacgttccccttttttttctgaataattgtccttgtatg

SEQ ID NO: 19016 - DNA, 974 bp, Zea mays
  Clone ID: LIB3136-011-A9_FLI
gggggatcgatcttgttcgcggagaggggtgacgtgcttgacagttttgactcgaatccatggtgtgcatctctaccagatagagagctgacctgaggtggagacgtggatcgtggctcctggggtggaggtacaagcgtacagctcaataggagatcaagagtaaagagtgtggggaggggaaggacgcgatatcgggggaggatggtgcttgtgcttgcgctgggggatctgcacatcccgcaccgggtgcccgacctgcccgccaaattcaagtccatgctcgtgcccggcaagatccaacacatcatctgctctggcaacctctgcatcaaggaagttcatgactacctgaaaagcctttgccctgatctccacattactggaggtgaatatgatgagtatgctcgatacccagagactaagacacttacaattggtcagtttaagcttgggctgtgccatggtcatcaggttgttccatggggcgacctggactccctggcgatgctccagcggcagctggacgtggacatcctggtgaccgggcacagccatcagttcaaggcatataagcacgagggaggcgtggtgatcaaccctggctctgccacgggcgcctacagcagcatcacttacgacgtgaacccaagctttgtgctgatggacatcgaaggactccgtgtggtggtatacgtctacgagctgattgacggcgaggtgaaggtggacaagatcgacttcaagaaagcagcgacgatgcaagcctagcactactatccttccacggcgtgattggtttcaagacacgtctaggttctgtttttttctcttcttgattcagagctccctcaacactctttctaccacttgtgctaacctgttcatgtgcaaataacttgtttaatacacattagctgatcagattacgagggcgtgatgttaaatgtcaaacatccagactccaaagttgt

SEQ ID NO: 19017 - DNA, 1275 bp, Zea mays
  Clone ID: LIB3136-011-B9_FLI
gtttgatttgccattagatttgccacctactcattcatatgctgatgcaaataactctgagcaaaatactggagatgtttttgttcacatgtcagacttgcttacaacaatatggccgtcaccctctcagtatttggggccaaaatgtgcactttgggactgtggtaggccagctggagggacagaagactctggagattactgcaacccttaccatgctggtttggctttgaatgatgatggtcttcttgggataagacctgtgatgcgtccaagaggtattgatttgaaagatgggccactgtttgctgctctcattgcaaaagttcaaggaaagaacgttggtattcctgtgtgtggaggcgctgctacgtctaaatccccatggaatgcacctgaacttttcgatctttctcttctggagggtgaatctcttagagaatggttgttctttgatactccaagaagagcatttgagagtggcaaccggaagcagaggtcattgccggattacggtggtcgtgggtggcatgaatcaaggaagctggtaatgaaagatttcgcaggtctgaagaggtcctattacatggacccacaaccatcaagcagccatgagtggcatcttttcgagtatgagatcaatgcttctgatgccctcgccttgtaccgtcttgagtacaagtcctctgaccccaaaaagggtgctgctaagtcaaaactggctagtccactgaatgaaatccggcagcgaatgggcaggctgactgcagacagccctgtggaaaacaagcggactgctaggagcaagccaaaggctaaccagaaccagaaggataccaatgcaaatacccgtccacatgttaacactcccaatcaagttaatgctccaaatgcttatcagacaacgcagcagggatactcagccgaaggaagcagcttcttttggaacccaagtgacgggacttgaagacgcaggcagcatcatgtagctgctcatgcattgcatggcacttatcaagcaaaaacctctaacatcatcgaccaagttggggctgagtagcttggcccttcacatttctaaattctaaatggttggtttctgcacgggggcctggcaggtcggtgtatttgaattttgaaatgcagaggtattacttgcataaactctgtataatatagccggtgtccaagttgccaatctgaatgtaaattagtctgctgtaccagtaaccagttgctgcttgggtatgttagatttgagtcctaagttctttg

SEQ ID NO: 19018 - DNA, 982 bp, Zea mays
  Clone ID: LIB3136-011-D6_FLI
caaggtttcaaggccattaccttggaggccagcgactaatgttttccgtgttaaagaggatgttcgacctatattctgggccaacagaccaaagagctatcttaaaaggacattaggttgggatcagtatccccatggacggtggggtgattctcggaacccatcatatggagcacttactgaccaccagcgcttcacaaacttctgtcaagggaaactcacaagcagcccatggtcagaattggacggtcttcaaccagagacaaagattatcgatgaccagttggtgaatattaaccagaagggtttccttacaattaacagccaacctgctgtaaatggagagaaatccgactcgcctactgttggttggggtggtcctggaggctacgtttatcagaaggcctacctcgaattcttctgcgcaaaggagaagttggaccaactaattgagaagatcaaagcattcccttctctcacttacattgctgtgaacaaggatggagaaacattctccaatatttcaccgaacgccgtgaatgctgtcacgtggggtgttttccctggcaaggagattatccagcctacggttgtggatcatgcaagttttatggtttggaaggacgaagcatttgaaatctggactcgggggtggggttgcatgttccctgagggtgattcatcgagggagctactagagaaggttcagaagacctactacctggtcagcctcgttgacaacgactacgtccagggggacctgtttgctgccttcaagatctgattatgctctcatggtctgtattgttgtatggttggacccaacaatattcttgcatccccgactacaggtctgatcgccatgaaagcttctgttcatttgagctcgggggagtccgctagtcttatttttcttgatttctcttggctttctggaaccatacgaatcaataagaaatgagctgtgttcactttccagttc

SEQ ID NO: 19019 - DNA, 818 bp, Zea mays
  Clone ID: LIB3136-011-D9_FLI
caagtgtcaccagaatttgctgatgcaaatgaagaaaagctgtatgattttcttaatatccagctaaaaagcgatatgaaaagaattcaaaggaggaatgtgctgtcgacaatgctctccgcttggacgatcctgctcttgaggccgggtcaggtcagcttagcagagacaaccggtggcgcattcagggagtatatcgacacgtttgacggctacaccttcctgtacccgaagaattggatccaggtccgtggagctggcgcggacatattcttcagagaccccatggtcctcgacgagaacatgtcagtggagatatcgtcgccttcgtcgtccaggctgggcgttcggcgtgaatccaacgtcttatcggcgtcatccaaggtcgctgacgatggcaagctctactacgaggttgaggtgaacataaaatcctatgcgagcaacaacgagctggcggtgatgccacaggacagggtgcagagcttggagtgggaccgccgatacctgtcagtgctcggcgtcgagaacaagcggctctacgagctccggctgcagacgcccgagcaggtgttcatgcaggaagaggaggacctcagaagagtcatggactccttcagggtcatcaaggcggcgtagtttgtcgatagtagagtgcacatgttttgtttttgtttgcttgtttgtttcttttgtacccgcagaaatgttcatatcacttgtttcttctgcagagcgcacatgtttccattcatgtctccaaagggatgtttacactttaaaataagtaagccaactatcagaaggttggtcaacat

SEQ ID NO: 19020 - DNA, 1995 bp, Zea mays
  Clone ID: LIB3136-011-F3_FLI
ccttctcctcccccttctccttctcccgtccactcagcgtgcctgactgcccgtgcgcgccctcgctcagtcgctctcgcgcgcggcgacaactgagccaccgccgacggtccaactcttcgtcggaccctttgccggcgacgagcacccaccaggggtttcatggtagcgtgacctgtctcggcctagaaaatgtatataaagaaggtcgtaatcgaagggtttaagagctacaaggaggagatatcaacagagcccttcagtcccaaagttaacgtagttgttggtgcaaatggatctggcaaatcaaatttctttcatgctatacgatttgtcctgagtgacatgtttcagaacctgcgaagtgaagataggggtgcccttctccatgaaggtgctggacactcggttgtatctgcttttgttgagatagtgtttgacaattcagacaatcgtattccagttgataaagaagaggtacgcttgcgcaggacaattgcttcaaagaaggatgaatactacttggatgggaagcatgtcagtaaaactgaagtcatgaatctgctagagagtgctggtttctctcgttctaatccatactacgttgtgcagcaaggaaagattgcatcccttaccttgatgaaagattctgaacgactggatcttctcaaagagattggtggtacacgtgtttatgaggatagacggaaggagagcttgaaaataatgaccgaaacagccaacaaaaggaagcagattgatcaagttgtccactacttagaggaaagactgagagaactcgatgaagagaaagaagaactaaagaagtaccagcagctggacaaacagagaagatcacttgagtatactatattggaccatgagcttaatgacgcaaggaatgaattagcttcgatggatgataaccgaagaaaaatttctgaaagtatgtcccttgcggacaatgaagtggtggatgtccgagagatgatcaagagttttgataaagaaataaaagtctcaactaaagggataaatgataccaaggcgcaaaaggaaggtgttgagaagaggcgtactgaagctctgaaggtagttgctaagattgaacttgatttgagagatataaaagataggattgtgaatgagaagcgagcaaaggatgaggcagcgagggatttgcagagtgtgaggagagagagtgaaaagtcaaagtctgaattggctgaaattagtaaggtgcatcaggccaaactaaaggaagaggaggatatatcgaagagcattatggatcgtgagaagcggctaagtatattgtaccaaaagcagggaagggcgacccaattcgcaaacaaagctgctagagataagtggcttcaaaaggaaattgaagatctcaagcctgtacttttatcaaataaaaagcaggaaggtttacttcaagaagaaatccagaagcttaaagatgaaatcaatgatttaactaactacatcgagtctcggaaaagcgaatcaagtaagttagaggaaacacttgcgaaaagacataatgactataacgatttgaggaagcagagagatgtgcttcaagaagaaaggaagtcatattggaaggaggaatctgaggtgacagctgaacttgataggctacaagaagatcttataaaggcacagaaaagcttggaccaagcaactcctggggatatcaggagaggcctgaattctgttagcagaatcattaaggaccatggtattactggtgtttttggtcctgtattagaactggttgattgtgaagagaagttctttacagctgttgaggtcactgctgcaaatagcttgttccatgtggttgtcgagaatgatgacatatcaacaaagatcattcaaatattaactagagaaaaaggtggaagggtgacatttataccattgaacagagtgaaagttccagatctcagctgtccgcaaagtcctgattttgttccattgttg

SEQ ID NO: 19021 - DNA, 499 bp, Zea mays
  Clone ID: LIB3136-011-G4_FLI
cgatgatgagaaagggcaatgctggcggagcaggacggcggaccatgaggaacagcttgcatgtgaatcttggcgagctcctgaagcccaccgagacctagtttttttttttaaccagaggatcctgcttcccagatgcgccccatctgaagcttacctaccgtgtgcctcatccgctttcacagatcgattagttgatctctagtagcagcgccaaaagcggtttaagattttctcagtggtactagtagtgaggggaaaatagcatcctgtggtgccagtgagagattttaggcgctgaagacgacgtgctatgctactccggagtcctgttgtcttcttcttcttgttgttgttgatttcaggtttgtactattactgatctttgttgtaaaatgcgctgttgtcccatgaggtaggcacctaggtctcctccatttgaattatatcaaacggatctgtaaacacgttctcatgcatgaaaccatttcttaatgat

SEQ ID NO: 19022 - DNA, 611 bp, Zea mays
  Clone ID: LIB3136-011-G7_FLI
cgctactggtggaaggagaaggagatgtcggagctgagcgtgcaccagagccaccagctcgtgtgggcgcgcgcccaccacctcgtctacgactactgcgtcgacaccgaccgcttccccgtgcagccgcccgagtgcgccggccgctgagttactgagtcctgaccgaccgacctcgatcggcgcggcgcggcgctgctccatgggtggtgggtggtacgtactagtcttgacaatggatggcatggcaatggatggcgtcgggtggggtggaaatggaactgcttgtttctgtttcagcaatggtgtctgtctgtagttctgtttcagctttgtgaaggtcgcattgttggcgacccatgtgtgggtgaaccggcggtggtgtctcttgtagaaacaagtgtatgggattatgggaacgaatgaacgatgccgcgctccgtttcagggatttgctactccacactgtgttcagtgctttgatctgattcctctgtacagaggcatgatttgtgttccctcgaggcttgcagctgtgcctgtgcgtgggtgtacttgaagctactttctcccttctttttttttttactgcggatgcttttaaccgagcc

SEQ ID NO: 19023 - DNA, 478 bp, Zea mays
  Clone ID: LIB3136-012-B1_FLI
ctggcgaagcaggacggcggaccatgaggaacagcttgcatgtgaatcttggcgagctcctgaagcccaccgagacctagtttttttttttaaccagaggatcctgcttcccagatgcgccccatctgaagcttacctaccgtgtgcctcatccgctttcacagatcgattagttgatctctagtagcagcgccaaaagcggtttaagattttctcagtggtactagtagtgaggggaaaatagcatcctgtggtgccagtgagagattttaggcgctgaagacgacgtgctatgctactccggagtcctgttgtcttcttcttcttgttgttgttgatttcaggtttgtactattactgatctttgttgtaaaatgcgctgttgtcccatgaggtaggcacctaggtctcctccatttgaattatatcaaacggatctgtaaacacgttctcatgcatgaaaccatttcttaatgat

SEQ ID NO: 19024 - DNA, 721 bp, Zea mays
  Clone ID: LIB3136-012-D10_FLI
atggttggctgaaaaggctggaaacgtttatcatcatccttataacctgggaatctatgagaacctagtttcggtgctaggtcctaacatgttgtgttggctgtgcccaatatcaaggaacatcggaaatggtgttcgtttccgcacatcatatgacattccactatcaacttcagcaatgtgacgcacaccatataagggtacactcatgttggatatctgctaactcgcaaaagaaactcaggtgcccacacaaagtgctaggtttgctattcttcacagttctaatttttagcatttaaccaaaccgtttgtctatccttaaaaggagagtgttttccaatgcttgaacttttgtagtaagggtgtggtacatcaaatccagcgtgtttaggatactgctacatacatgaagaggagctttaggattatttcctaaagcctcctggaatctgtcattaggaatttttagagatgctgacataattagatttttctctctttttgggacattcttgatcaaataagtaattattgcttgtgtagtagactagagtgggctgtattaacacactcaaaaaaaaggaaagaaaaggaaaaatgtactcgtggttgttctgttgtaaagttatgtccaaactgtcaaccaaatactattttatgtatacacttgttgagaaatacacgttgatatagctgtttgcacatatgggtgtaccat

SEQ ID NO: 19025 - DNA, 692 bp, Zea mays
  Clone ID: LIB3136-012-D11_FLI
ataccagagcggcagagccttcccctccgctccccagtcccacccgcaccctagccctcagcaaaccctaaccgctcgtcgccatgaaggacacctcgttcaaggccaccggcgccaagcgcaagaaggtcggcggcgccaagcgcgggctcacccccttcttcgcgtttttggctgagtttaggccgcagtacctggagaagcaccctgagctcaagggcgtaaaggaggtaagttgcttcttctcaccctaggcatgtagctgggtttcgcttaggtggctggtatatgcctttgctcgtcggtgactttgcttataggtgagcaaggcggctggggagaagtggcgctctatgtcggatgaggagaaggcgaagtatggcggtagcaagaagcaggatggcaaagcaagcaagaaggagaacactagctccaagaaggccaaagctgatgttcgggagggagatgaagcagaaggttctaacaagtcaaaatctgaggttgaggatgatgagcaggatggtaatgaggacgaggatgagtaaatagtacgatggggaacagcagctttgcaattgagtgtttgctgctttacttatttttctatatgctgttccttttgatgttatatgctgtaaggaaaatctgtacatgatggtaccttagggtatggcatgctggagttccccttt

SEQ ID NO: 19026 - DNA, 915 bp, Zea mays
  Clone ID: LIB3136-013-F12_FLI
ccgcggcgcgtcgcgacccgggccgacaagatagggtcggaaagccccgccgccgacggcgtcggcgacgccgcgcgcaagcggcccagcggcgatgatggccccaccccggggccagccgacaagcgccgccgcccggagcacccttcttcctcctccgcgggctcccgcgaccgccaccaccaccaccacggccgccgcccgccgtcctcggccgacgagaaggtgcgcgcctctcacatcctgatcaagcacgagggctcccgccgcaaggcctcgtggcgggatcccgaaggcgtcgccatctccgccacgacacgcgacgacgcggccgacctcgcgcgcgcgctccgcgaccagatcgtctctggtgaccgcgagttcgaggacgtcgctgccgagaactccgactgcagctcggccaagcgcggcggtgacctcggatcatttgggaggggtaagatgcagaagccttttgagaaggccgcgtttgctctgaaggtcggggagatcagcgacgtggttgatacagagagcggggtgcacatcatcaaaaggactggctgactgcacctgcggcagtatccatatacggtggatgccttggagaggatgtatggtttcttgcttcattggtgaatttgtgcgtggtttttcttcttctcttagacggttgtttggatgctcatctcttcacctcaacgcacatggttgagtggtttgaatccaaaccaaactactccaacctatatggattgattgagatatatacacgcgcatccaaacaatccctatgcccttaggaaatgggttgtttgacttccttttgtaaacttcgctggagacctgtggtttggaactatgctcacggctacgatgggatcagattattttgagtattgatgacacgagtat

SEQ ID NO: 19027 - DNA, 1210 bp, Zea mays
  Clone ID: LIB3136-013-F8_FLI
agaaggcagatccatccgcgagcaatagacttaaggtctatggaggggctgaaactactgctgatgtgaagaagggctggaaccgtcttgcgttagacagtcttcagaaacaaagtactagtcgtgtaaacacagacgagaagaagaacgctgcgcaaggactcgtcactagttcttgtggtactaatgatacagctaatacccctgccaagttagcttcgctgtatcaggacaacattgcctccattccaagtcttggcgccccaggaatccttggtgaccctcaggaccagcctagtcctgtatctgtgctagatggaccgtttattatacgtgataacagcaggaatgtactgtactcatctccatccccacaggctttgtcgaggtctcccttgatcggatcgtttccacggtccctgccagtgtcgtgggaggaccccccgccggaagccacgtcgccgaattccctgagactctcgaggcttttctccaaggccgacgaggatctagactcgctgacgttcatccagaagctggtccgctcctgtggcatggaccgagcaagctgcgtgttggctggccctctggacccggacctgctcgagaaggtttcagagcacgaagacgacggaaccaggttcgggagaaggcggcttcttttcgacgccgtaaacgaagcgctcgccgagctcgcctggacggcggaactggccgcgtacccctggggcggcggcagatcacgcctggactgcaactgcaagaacggttccggtggtgactcggcggccgaggagatctggcgcgttatcaggaactggtcgacacttgacaagtaccctccctgcgaaactatcgaaggaaacgtcttgctggagatgatactcaggcgggaggcggacagcggcgagacggctcggttggaggtgtttggtctcggcgcctcggtctgcgtcgtggtgttggaggagctggttgaagagacggttgtggatctcctgactgactgctagtgagtgatacttgctgctgctgttaacactgctccgttaatccacccctcaagctggaatgggtctctttgccttgttcacatctttgttttgaccggcatttgctctagccgttgactggtaatggatcatgccatttgtttcgccgtttaattacacacacgagacaaaaaaaaaaactgtaagtaattgcatct

SEQ ID NO: 19028 - DNA, 1352 bp, Zea mays
  Clone ID: LIB3136-013-H5_FLI
ctttgaccatgccattggtatcaacgttccaaggtcccgcttcctaccagttaaggcgacatcagatttgaagctagtacagtctgatctatataccttggttgatggcttcgttacacgtaattcagccagaacaaatccatcaaatccctcaattgaacttggtcctgagttcaagaaggttgggagcttccttggtcgcttcaagtccatacctagcattgttgagcttgacatcttgaaggtttccggtgatgtttggttcggttctggaattgtactgaaggggaaagtgaccatcactgcaaaacctggcgtcaagctagaaatcctagacggagcagtgattgggaataaggataattttggaaaaggaaagagaaaacaataccagatgccttacaacctgaattagggatgaaactgctaattgcacatggaagtcaccaagaacttggtaaaggtgattcaatgacaaatctaatgattaacatgtgcgatgtggttcacatgttaatgcatgcaactgaagtgcattaccaatgtcccaagagggtaagggtacagtctgatgtatctgaaaggattgctaatggaactagtgttcatgtaaatactcatgttcaaaatttgaatctggatattgaagagcaatcacacaaacactcgatttcacacatcgaggagccaaacactaataattcagaaggatccctggctggtgctgctgtctgggatgtatttcgcaggcaggatcttccaaagcttaatgaatatctagctgttcatcgggaagaatgtgcagctagatgtcaagcagtgtcttctgttaaatatcctatttatgatcaaacagtgtaccttaacgattatcataagaagatgttgaaggatcaatatgagggactgaagacaatcgagcagattacaatggactcagcttcggtcgagaccaatatgttcaagctctgcaaggtgaggtttgttcagtttggccaaaaaggcatcccctacctgaacacctacgatggtcgcgccatccgctacctcgacccgctcatcaaggccaacgacaccatcaaaatcgatctggagaccaacaagatcatggacttcatcaagtttgacgtcgacaacatggtcatggtgactggcgggaggaacaccgagcgtgtaggagtcatcaagaacagggagaagcacaagggcagcttttgctgcttggagctttttgctatgtctagttttctcctatttgttgtacaggaaaacttagaatagaattcaaatttggtggtcacaaaagtgtggagactttaattcatatataaagttaggcttaacattagtgc

SEQ ID NO: 19029 - DNA, 1192 bp, Zea mays
  Clone ID: LIB3136-014-B3_FLI
cccgcccccgccgctctacgccaggtgcccaggtcttcgtcgggcccttcgccgaagagcagccaacaggttgccggtctgcgagttgaatcatggcggagcacttggcttcgatcttcggcactgagaaggacagggtcaactgccctttttacttcaagattggggcctgtcgtcatggggatcgctgctctcgtctgcacaacaggccaactatatcaccaactcttgtgcttgctaacatgtatcagcgccctgatatgataacccctggagttgatgctcaaggccaacctattgaccctgagaagatgcaggagcattttgaggacttctatgaggacatctatgaggagttggggaagtttggtgagattgagaatctgaacgtttgtgataaccttgctgaccacatgattgggaatgtctatgtccagttcagggaggaagagcaagcagccgcagcatacaatgctcttcaggggcgcttttactctggccgccctataattgttgagtattctcctgtgaccgacttccgtgaagcaacctgtaggcagtttgaggagaacagctgcaaccgtggtggctactgtaatttcatgcatgtgaagcaaattggcagggatctcaggaggaagctgtatgggcgttctgcttccaggaggtaccatgggagaagccgaagccgaagcccgccaccacaaaggaggggccaccgtgaccgtgatgactaccgtggtggcggcggtggtggaaggggaagaggtagcaggtatgacaggtacgatgacggagcaggcagaggtggcaggcatgacaggtatgatgatggagcaggcagaggcggcagacatgacaggtttgatgatggaggaaggcgcaggcatggtagcccctcaaggcgtgcaaggagcccagtcagggaaagcagcgaggagcgaagggccaagattgagcagtggaaccgtgaacgagagggaaaacagtgagctctcggtggcgtggctactgttcgccggacttgttgctctcatccctatattctaagtatgcttgtgtggatgacattctgcctggctaagtaaaaccttttaagatcaggattcctcggttcattttatggttaaaccagacatcatttgtttccatctgtgttgtgtcggatcctttgctattatgttattttgac

SEQ ID NO: 19030 - DNA, 1195 bp, Zea mays
  Clone ID: LIB3136-014-B9_FLI
gtagtctttgtaactgtgatcacagacctcaacacatgccaccctacatggtttcatgctgatgtgaatagatgttactgtccttcagaagaagttgccaagcgggcagcactggatgatctacaaccatctcaaatccgcgtgttcggtcttccgattcgaccatctttctgtcgtgcagttcttgttaaggatgatttgaggagggaacttgaattggatcctgagcttcctgcagtactgctcatgggaggtggagaaggcatgggtcctgtcaaaaagactgccagagccctaggagaatcattgtttgacaaagagcttggaaaaccaattgggcagcttattgtcatttgtggccggaacaaaacgctgagctcctcactgcaggcagttgaatggaaaataccagtaaaggttaggggatttgaaacccaaatggagaagtggatgggagcttgtgattgcattataacaaaggctggaccaggtaccattgctgaagccttgataaggggtcttcctataatccttaatgacttcatacctggacaggaagttggcaacgtaccttatgttgtggacaatggtgcaggtgtgttctcgaaaagccccaaggaaactgctagtcttgttgcccgctggtttggtccagattcagaggaattgaaaaaaatgtcagaaaaggcactgaaattggcccaaccagaagctgtctttgacattgtcaaagacatgcatgagctctcccaggaacaaggtgtcatatcacagatatctagttccttgacttcatccttcttcttaccatcgcctgaaagcacccctctccaacttatctgaaaccatcaagctaggattgatattgttgacatcgtgaacttggcattctccctacagtgtgggcgtgctttcggctgatccgctcacatggtagttatgggcagggtcgtttgactgacaggttctcgcgtgtgatgatgtttgccttcatgttaacttttgtaaaaaaaaaacattcattcatattatgtttctggctcccttcgtcatcaaaggggaattggtggtggtggtggcttgtaaaatacactcaaattttgtgcatggacatgagacccttatcatgtatactagctgatgtgatccgttcatgtaagtggaagatgtgtataatatgattacagattgttgg

SEQ ID NO: 19031 - DNA, 1445 bp, Zea mays
  Clone ID: LIB3136-014-C8_FLI
ctcttcgtgcacatcgtcatggagctctgcgccggcggcgagctcttcgaccgcatcgtcgccaagggccactacagtgagcgcgcggctgcgaagctcatcaagaccattgtcggggtcgtggagggatgtcactcgctcggcgtcatgcaccgggacctcaagccggagaattttctctttgccagcaccgccgaggaagccccactcaaggccactgacttcgggctttccatgttctacaagcccggtgataaattctctgatgtcgttggaagtccatactatgttgcaccagaggtgcttcagaaatgctatggtccagaagctgatgtgtggagcgcaggagtaattctgtacattttgctttgtggtgtgcccccattttgggcagaaactgaggctggaatcttcaggcagattctgcgaggcaaacttgattttgaatctgaaccctggcctaatatttctgatagtgctaaggatctggtctgcaatatgcttacacgggatcctaaaaagagatttagtgctcatgaggttctctgtcacgcatggattgttgacgatgccgtggcacctgataagcctattgattctgctgttctctcaaggctgaagcatttttcggcaatgaacaagctcaagaagatggcattaagggttattgctgaaagcctgtctgaggaagagattggaggcctcaaggagttgttcaagatgattgatactgacagtagtgggactataacatttgatgagctgaaagatggcttgaaaagggtaggctctgaattaacagagaacgaaatccaggctctaatggaagcagctgatattgataacagcggaaccatcgactacggcgaattcattgcagctaccttgcacatgaacaagctggagagggaggaaaacttggtttcagcattctcgttttttgacaaagatggaagtggctttataaccatcgatgagctgtcacaagcatgtcgcgaatttggtctcgatgacctccacctcgaggatatgattaaagatgttgaccagaacaatgatggccaaatcgactacagcgagttcacggcgatgatgaggaagggcaatgctggtgcaacaggaaggagaaccatgaggaacagcttgcacttgaatctcggcgaactcttgaatcccagcaaaacctagcgcgttactggaaggccttgtcaggtacattcccatggcatctgaagtttttggatgcgttgtcggtctgctggcctattctgagatgttgagtggttatcctgtggtattactaagatgctggacaattttcgtagtgctggtggtatcagctagagaagagggatggctggcacaatgtggctactatggccaactgcttttgtatgtgtaactgtcgatgtagattgactatggtctaaacatcagtttagttg

SEQ ID NO: 19032 - DNA, 2524 bp, Zea mays
  Clone ID: LIB3136-014-G2_FLI
cccaattccccattcaccaatccccagtattgtagtagggggaaaaacgagagaaaagaaacagcagtagcggaggcaagacgaaatggtggccgccgtcgcgtcgccttcgtcggcggcaccctccgccggccgtccccatccgacatacaaggagatgatcatgcaggcgctgacggagctgcgggacccgagcgggtcgagccgcagcgccatcgccacctacatcgccgaccacttctccggcctccactcgcgccacgatgccctcctctccgtccatctccgcagcctcaagtcccatggccaacttcgcctcgtctctggcaactacttcgtctccaccgccgctcagcggcaggggcgaggctccaacatcccgcccaaccccaaccctgctccggggcagaagcgtggtcgggggcggcctcgcaagtacgcagattcagccccttccgcttcgatcccggcgtttcaggacgccaagcgagggcgtggacgcccacgcaaacgcaagagcgcccaggacccggtggcttcctccccctccccttcgccgctacagggagcaagtgttccgccgcctccatctggggtcaagagggggcgtggacgccctcggaaggacgcccttgtccctccgccttcctcttcttcgccactgctgggagggattgatccaccgcctccatctgggatcaagacgggccgtgcacgtcctcggaaggcccttgtccctgtgcgttcctccttttccgagctgctgggagctgttgttctaccacctccgtctggggtcaagcgtggccgcggacgcccgcgcaagagtgcctaccccgctgtggcgccgttggtgggagctgagaagggacctgctggtggacaaccacagaggaataccactcctctctcaccgacacctgctaccatgtcccacagtggtaagagtgagactgtccggctgcccaaggttgctgttgatatcagtgctttgcgtggttcctccatgaacatatctgcttctagtaacagtttggttggtgcgaagcggggaagagggcgcccacctaaggttgtggttgctgggaaagagaagatgcaacctgaatctgtgcagtccgtggatgcttcattgactaagagagggcgtgggaggcccagaaaggagaaggcattggaaagtggccgcatgaaagcctcgcagatgactgagggtcaacgtgaagctctgactgcagaccaagctggggctgtccaaaatgaagtagaagatagggatttgcaatccttgggtactcctttgacagagaagagaggccgcggtcgtcctagaaagaggccgttggaaatcgaaactgcaaaagcaggggctgctaagcgtgggaggccaagaaaggagaagacatctgaaactggggacttgaaagttgcacagatgactgagggtcggcatgaagctctgcctgcacaagctgtagaccaaactgggcctgtgcaaaatgaagttgaagctatgattttgcaatcccttgctactactcctttgatggagaagaggagtcgtgggcgacctagaaagaggccattggaaactgaaactgcagaaacccaagttgctgcatcggtggagaagcgagggcgtgggaggccaagaaagaagaatccatcggcagggtggtctgcaggaaccagggatactgcattaaaggggattaagagagggcctgggaggccaaggaaggccaggccttttgaaactgagtctgtgaaaactgcacttgaggtgtctagggacttgacagaagatgggcctcaaaaggatggggatcttgtgtcagggaagaaagcagatactcatggtgtggtttggtagtgtcaactgaggaggtagccattgctcccatggatgctgggtgcgcagacgccaagggttgatctgatggatgtgggcaccaagagtcactagtgctctgatggtgcgaacaagaacaaaaaagaaataatgatagtacctgaaaggctaaacagaacatgcagctaataagtgtgttcatggatataattaatagccatactgcaagtattgctatatgtttgcaccagtttgattactcgtatgtttttgagcagttccattggaaactgcgtttgatgggtttcacttttgggggttggatttaaatatctaacccacatcctctttctttgtcaaggactataacatttttgtaattttgttgcttgtactggaaactagccatcataaggttcattttgttttccagtttcaacatcttttagtgatatgttcacataatatctctgttttgtgctttatttggtgtgtctattgggtgtttggttggaggaatgggacgagttggtccactattgcttcattcagtcattcctcatactaataagcacagagtattcagtataaaaacaaggatttgtgtcatctgagtaaattttgtagaatggtattatgatgtaccaaaccattgaggtttctcataccaac

SEQ ID NO: 19033 - DNA, 690 bp, Zea mays
  Clone ID: LIB3136-014-G6_FLI
agagcagccgcatccacaacctgcctctctcgtcccctggcggcgtccgcggcaggatggcggaatctacggcgaggacggtgaaggatgtcaacccgcacgagttcgtcaaggcctactccgcccacctcaagcgttccggcaagatggagctccctgagtgggttgacattgtgaagactgcgaggttcaaggagcttcctccttatgatcctgactggtactacatcagggctgcatccattgcaaggaagatctacctaaggcaaggcatcggcgtgggtggctttcagaagatctacggtggccgccagaggaatggctcccgcccaccacacttctgcaagagcagtggtgctgttgcacgcaacatcctgcagcagctgcagattatgggcatcatcgatgtcgatcccaagggtggacgcctcatcaccaaccagggaaggcgtgatctggaccaagtggctggaagggtcgctgttgaagcgtgagcagtttcatctttggtttcaagggtgtcatgtttgatggctgagaaggctgcactctatttgctcttttgggttaggattttcgagttcagaggattttgaggtttattgcatctagctattgcgccacactatgttccccgagtacctaatgtgatatcaagactcaattctcgaatctaagatatatgtttgc

SEQ ID NO: 19034 - DNA, 1095 bp, Zea mays
  Clone ID: LIB3136-015-A2_FLI
ttccaaagcgtgaaattgttgattgggttgatcttcatgaaatggttactgctgcctgctatactccagatggaaagggcgcgctgatcgggtcccacaagggcagttgccatttgtatgatacatctgatgacatgctttgctacaaaacacagattgacctgcaaaacaagagaagaaaatctagccagaagaaaataacaggatttcagtttgtcccaggggattcttcaatggtcataatcacatctgcagattcacgaatcagagttcttgatggttttgagctagttcataggtttaaaggattccggaacaccagcagccaaatctcagcttgtttagctggaaacggacggtatattatctcggcaagcgaggattcccgtgtatatatctggaggaacgatgatggttcgaaaccaagtaaaaagaagggcattgtttctgtcacaaatacccatgaacacttccactgcgagagtgtcacggttgctgttacctggccttttaccagcaccacaatgacttctttaatgaaccccaggaaacaagagcttgagcgtgggtctgagaatggctattcaccgcaagatctgcaaaccaaacttgctaaggcacgggagatgacagatgttgagtaccggaggacaaatatcacaagttacaactcgaagcataacagtgaccggacatctccggcttggcctgaagaacttgtcacaccaccaaatcaaagtctcagcgctactacctgccatgccaacgagggagaccaagctctgaatcggtcggcctggggcctagtaattgttacagcaggccgtggaggtcaaatcagaacatttcaaaacttcggttttcctgtaagagtatagcatgagtccgaatacataagatagtcactgccattcaggagtgcagtttgtgtatagataggagatagtgggtgagtttcacactattcagggattgggtttgattgttccttggtgcacctgctagagatcagaatcttcatctaacatacactgtcagtagtccaaaactttgtatgccaaatttattttaccctgaaggcccaagttgtacatg

SEQ ID NO: 19035 - DNA, 659 bp, Zea mays
  Clone ID: LIB3136-015-G12_FLI
ggcaaaactgggtcggacgaatcgatccccatgattcccatttcctagccatcgccatcgcagagcagcagctgctgcaagctgaatttgatgactgtgtatctgcaaactctagcggtgccacatgctgccgatccattgctttaattgtgatgttccttttgctcgtacgccatgtaattgtcattgtgagggatgttagcatgctacaagatgcaacggtgctgttcagcgcaactcttcagtttgcgggattctttcttccttgttatgtaatagctcgttcttgctacgctttgcagcatcggagacggagacaggtgtagggagactcacctgaaccttaaaagaacacaaaggcgcaccaattgaagcgccaccgcggcggtacccccgaagataggaggactacatggaagcttgcgaagtgagcctccccgttgttgcttggagtcaccgcaagcatttggtttctgtcctgaagacgtcggcggtttaattaggttgattgagtagcgagaacaggcgctgtgaagctcaagtgtacatacgttgaggggacaaggccttttttttacagctgcgaggaagcaaaatgtagcctcacacatttctgctgcaaataaaagaacaatcgcccgtcagcgcctctgaatttt

SEQ ID NO: 19036 - DNA, 672 bp, Zea mays
  Clone ID: LIB3136-016-A12_FLI
catccacactaacgaacgaactcttgctccgatcacgagctagctgaggtcgacgatggcggctgtgctgaacagcaggaagacgccgcaggcggtggtggccgtgctggtggcggcggcgctgctggcttcgtccgcttcggcggcgatcacctgcgggcaggtggggtcgtcgctggcgccgtgcatcccgtacgcgacggggagggccagcgcgctccccgcgtcgtgctgcagcggcgtcaagagcctcaacagcgcggcgcggaccagcgcggaccgccaggcggcgtgccgctgcctcaagagcctcgccaacagcgtcaagagcgtcaacatgggcaccgtcgccaccatccccggcaagtgcggcgtctccgtcggattccccatcagcatgtccaccgactgcaacaagatcagctaagttacgacgaccaagctaataagcctaccgaacgtacacgtacgtcccgcgcgctgcacgagtgatgaagccagggaagaaataaaataaagccgctgtattgccaggagcagcatgcagtatcgatctatatatatactgtactgtagtactctatattatgtatgtgtggcctgcagtgcgagttgcttcgatccacctacttgttcagacagtttaatggtttttggtgcctgttatgaatc

SEQ ID NO: 19037 - DNA, 1214 bp, Zea mays
  Clone ID: LIB3136-016-A8_FLI
gtcgccgtgctgcgagaaggcgcacaccaacaagggcgcgtggaccaaggaggaggacgagcgcctggtcgcgcacatcagggcgcacggcgaggggtgctggcgctcgctgcccaaggccgccggcctcctgcgctgcggcaagagctgccgcctccgctggatcaactacctccgccccgacctcaagcgcggcaacttcacggaggaggaggacgagctcatcgtcaagctgcacagcgtcctcggcaacaagtagggccgccgcgcgcctctccctctccctcctacccctcgtcattcgtttcgtttcctaaactggccgggtacgttacgtgcaggtggtccctgatcgccggaaggctgcccggcaggacggacaacgagatcaagaactactggaacacgcacatccggaggaagctgctgagcagggggatcgacccggtgacgcaccgcccggtcacggagcaccacgcgtccaacatcaccatatcgttcgagacggaggtggccgccgctgcccgtgatgataagaagggcgccgtcttccggctggaggaggaggaggagcgcaacaaggcgacgatggtcgtcggccgcgaccggcagagccagagccagagccacagccaccccgccggcgagtggggccaggggaagaggccgctcaagtgccccgacctcaacctggacctctgcatcagcccgccgtgccaggaggaggaggagatggaggaggctgcgatgagagtgagaccggcggtgaagcgggaggccgggctctgcttcggctgcagcctggggctccccaggaccgcggactgcaagtgcagcagcagcagcttcctcgggctcaggaccgccatgctcgacttcagaagcctcgagatgaaatgagcgcgcttctaccctctctgtgtagcttctcccccccgtcgtcctcgtttttgttttgccacacctcacatggatgatgaattgatgatacgtggttggttagttttttcgtaggtgaaaaatacgcgatggtgagcgagtgaaagagagattttgtgccctgggtcctcctccctgctctctcttgctgctccattttgcctccctctgtcctctctctctctctctctctctctctctctctctctctctctgtatctctgtaattaccatcgccaaatgatcatgggggcaatatcatgctaggtctctgg

SEQ ID NO: 19038 - DNA, 1381 bp, Zea mays
  Clone ID: LIB3136-016-B4_FLI
gactactcgagtgatctccgctcttatctcaaatactgcaaggaagttgtttttgctggaattacatcttcagatgaacagactcatctaatagagatcttttgggatatgtacaaagccagggaggtcatgatgcaatgcaaatgctcaagtcagagatgcaagatcatggatttcattatttgccacctaggaaaccaaggaaatcagatggttatcttcgttataggcggcggcggctaagtggtggctttatttttgttgcacatgctgattattacttgttgctacgtgcttttgcaaagcttgcagaaattgatattcgtatcatgcatattagtgtgttgaaacttgagaagagactcgcatgtattgaggagcgaattgaaagaagcttgaacaccttacataacttttctactggaacagtagatgagctaagatctgtatctgactgaagttcctagtgtagtctcatactctgctagcatggaataccccctccattccttctggaaaaaaaacatgtggtgccattgcgtgactgtggttttgaaggatatacgtagcttgatacctcaggaattgagggcttctttctgtggcctcttggcattggtaagcaacctgagcacaacaaggtcagggcaggatgtgggtctgtatttgctgaagcaatatgtaccaagaattatgccccccttctttagaacgggcataattatatcagggtcctaatcagtactgtggtagattcagcaacagttccagtagtagacctcagtgcttggcagcaatggcactggggatctgcaatcatgaggcagtttcagtttgggaactggagtggcaagaggaaaaaggctggaacctgggctttttaaagaggctaatcagtactgtggtggattcagcaacagttccagtagtagacctcactgcgtggcagcaatggcactaggggatctgggttctgcaatcatgtggcagtttcagtttgggaactggagtggcaagaggaaaaagcatggaatttaggctttttaaagaaatgctatcaatattgtggtggattcagcaacagttccagtagtggattcagcaacagttcgaggtcagtacaattggtcttgtcaaagctgccgacagaactaaaaaaatatccagctgagtgaattgatgtactgccgacatttatttcgttccagcttccgcagcaagagctgatcgtttcaaaggtgacgagaaattggtcgtactagagatgtactgtctattcgctgtattcgcaagtttaaaccaattatttgaactactgcagctgtaatccggagacaatataatatagaaaaaatagaagtcggtggattaaagccgtaac

SEQ ID NO: 19039 - DNA, 1984 bp, Zea mays
  Clone ID: LIB3136-016-G2_FLI
gccgtgcgcggaatgcccgtggaaggaggggagagagggagggcgcaggcgcaggcgcactgagctgagctaagctgagcccgcgaggttcgcggtctgcggtgcggcggcggaggtctcgccagcgcgatggccagcggcggctcctccaggtacagctcgtacaaggcgccggggctgcgcggcgcgctgctggaggcggcgcacgtgtcgtgcctcgaggaccggtacgcgctgggcccgcagctggggtggggccagttcggcgtgatccggtcctgctccgacctggtcaccggcgaggcgctggcctgcaagtccatcgccaagggccggctcgtgtcccccgacgacgtgcgcggggtcaggctggagatcgacgtcatggcgcgcctggcgggccaccccaacgtcgtggggctcaaggccgtgtacgaggaccgcgactcggtgcacctcgtcatggagctctgcgccggcggcgagctcttccaccgcctccacgagcgcggctgcttccccgagcgcgaggccgccgcgctcttccgccacctcatggaggtcgtcgcgcactgccacgccaaggggatcgtgcaccgcgacctcaagcccgagaacatcctcctcgtcagcaggtcgccccagtcgccgatcaaactcgcggactttggactcgccacctacacccagcctggccgaagcttgagcggcatggtaggcagcccgttctacattgcgccggaggtgctctccggcgggtacaacgaggccgccgacgtctggagcgcgggggtcatactctacatcctcctcagcggcatcccgccgttttggggcaagaccaagtccaagatcttcgactgcatcaggtccatggagctgcggttcccttctgacccatgggacagggtttctgattccgccaaggagctcgtcaccgggatgctgcggcgcgaccctaggctgcggctcacggccaagcaggttctagagcatccgtggatgcaggaacacgcggacccacaagactcgtgcgggcagtgccacgagaccggcctccaacgggagggcgccggctcgtgctccttctccacgccgttggcgtcgcggagcagggacgtgagctttgacacgcgtggccccatcgcgtggaggggtgggggcgaggacgaggcgacctgctgctcgcccacgttcgccgccgtctgcaggtcgtcgttctcggcgttcatcaccgacccggccccgccgccctgctcggcctcctccgccttgggtggctctggcttctcgttcggtgagccctgcgaaccacttgacggaggaggaggaggagggttcccgatgcccatggcttccatgccgagcttctcgttcttctgcgcgcgggacagcagcgagccagctgagccacagccggtcgctgcctcctcgactccgaggacggcgaggggatccacgccacggggcgtcaacggcaggcggaaccacacgatcggcggcggcgggcgggagcacctggacgtggcggtggagtctgtcatccgctgggcgtcgtgcaccaacttctccacggcgccctcacttcgggcctccctcgtatgctagcactagcaacgtcgttccgcgcgccggcgccgccaacgccgggctgagggtgaggaggagaattccgacgagacgagcggtagagagtgtgcagtagcctcgaattgtataatatatatacagacacagtgctgttatagtggtgatgatagattagagagtgaaggtgaagttgctacggagggatggatgcatggagatggagagcgagtggcagagctggaactgatgtgttttattcttcgctgtcacgctgctggtcagataagatttgggaacgctgctggtcagataagatttgggaacacacctggcgacggagagagaaggcgtctgataatttgatatgaacaagaagcaacaatgttcaggatgc

SEQ ID NO: 19040 - DNA, 1501 bp, Zea mays
  Clone ID: LIB3136-017-A6_FLI
cgtcccgtggtctctacctccatgccacaaccaccaccaccaccgtcactgcattctcaaacgagcagtgcctgaacccaagtgcagtgcagcagccatgggagcagcagcagcaggtggccacgcgctgcgcgccgtcggcgacgtcgtctcgttccccgcgaccgtcgccgccttcgtggaggcgctgctccaggggtgggccgaggccagggccgggctgctggtgccgctgctccgcgccgcggtgctgctgtgcacggccatgtcgctgatcgtgctggccgagaaggtgttcctgggcgcggtcagctccgtggcgaagctgcggcgccggcgtccggggcgggtgtgcaggtgcgaccccgacgaggaggcggctgcggcatcccaggcctatcccatggtgctcgtccagatccccatgtacaacgagagggaggtatgtatgcagttttttatgtgtccacttgttcagtcagagtaagccaattgctggagactgctcatcctcgttcgttcgcttaaagagcagcagcatctgaatctctctagtcttttaagaggttgcatcgagccaattaatttcgcattactaccatttcaaggtggagcaggaagctggctcttccttatgcaacttctttggatacaacggaaccgctggagtatggagaacgcaagcgatcgtcgagtccgggggctgggaggaccgaaccactgctgaggacatggacttggcgctgagagcagggctcctgggctgggagttcgtctacgttggaagcataaaggttaagagtgagctgccgagcactctcaaggcgtaccggtcccagcagcaccgctggtcatgcggacctgccctcctgttcaagaaaatgttctggcaaattctcgctgccgagagagtgtcggtctggaagaagtggtacatggtctatgacttcttcattgcccggagaatcgtaggcaccttctacacgttcttctttttcagcgtcctgattcctctgaacattctgctacccgaagcgcagattcctgtgtgggagctcatctatatccccatagctatcactcttctcaactctgttgggactccaaggtctatccatctggtcatactgtgggtcttgttcgagaacgtaatggcgttgcatcggtttaaagccatcttgatagggtttctcgaagctgacagggccaacgaatggatcgtgacgcaaaagctggggaatctgcagaagctgaaatcgatcgccagacttacaggaagctaccgtttcaaagacaggttccatttcctggaggtgttcattgggctgttccttttggcctctgcgtgctttgactacttatacagagatgactatgtttacctctttgttcttccccagtcgatcatgtatttcgcgattgggtttcagttcattggtctcaatgtctctgaagactgacctattgcaagacaactgaacgttttggttgcgatattatg

SEQ ID NO: 19041 - DNA, 641 bp, Zea mays
  Clone ID: LIB3136-017-E10_FLI
tgtcggccaccggcatccgcgtcggcctcgcctcggcttccgcctgcagcgacgcctgcgacgcccacgactccgaccaccacgccccgcccaaggccaccatcgagccaccgcacgccgccgtctccgccgcggtgcagcaggtgccctcgccgccgcagttcctgccgcagggctgggccgtcgacgagctcctgcagttctccgactacgagtccagcgacaagctgcacaaggagccgacgctcgggttcaaggagctggagtggttcgccgacatcgacctcttccacgagcaggcgcccaaagccagcaggacgttggcggaggtgccggagcttttcggataccaggcggcgaacgacgcggcgtactacaggccggccaaagccgccggcggcggcggcgctggggttcgccagagcaagaaggcccggatcgaggtcaccgacgacgaggactacctcatagtccctgatcttggttaaataagagagcgcaggagttttgtttcttctcctgatgtgtaccagagaagaattttactgtgtacaagctagtgtcatgtgttgtgcatctttgactgtagtatcgctcaattgtgaactgaacatctattaagccacttttgttgctatgct

SEQ ID NO: 19042 - DNA, 778 bp, Zea mays
  Clone ID: LIB3136-018-B2_FLI
cgcggcggggcagggtgttgccggtgcttaagggatgctccctccttgtcccgcccgggcagctctggatgctcctcggccccaacggctgcggcaagtccacgctgctcaaggttttagcaggttttcagaatccaacggccggtacagtgtatataaacagaccatgcagctatgtcttccaaaatcctgatcaccaggttgtgatgcctacagtgggatctgatgtagcatttggtctcggtaagctcaaacttccgttagatgaggtcaggttaagggtatcaaaatctttggatgccgttgggatgttgaggtactctcagaggccaatccaaactctgagtggtgggcagaaacagagagttgcaattgctggtgcgttagctgaagcatccaaagtattactgctggacgaactgaccacattcttagatgaacatgaccagataggcgtgataaatgcagtgagggactctgtggctgccgatggggaggtcgccgcattatgggtgactcatcggttggaagagctgaaatatgcagatggtgccatctatatggaagatggccagataatcattcaaggcgacgtctctaccatatcaaaatttataaagaaaaaacaggcacgctactttggtcattttgaactctaaatccccaaagttttttggcaaagcttatcttgtgtatatggattaattccaaagcaacttattttgttgttgtcaactgtagttttgctggaacttctattttagtcatttttcaaagc

SEQ ID NO: 19043 - DNA, 624 bp, Zea mays
  Clone ID: LIB3136-018-C8_FLI
ctccaacttgtttccgcttctaaacaggtcatctatgtcagaccaggagacgaagtcgatctcgactcggtaatccaagagaccgtacgattaactgcgtccacgaagagttcatgttcggagacctgcgagaagtctacagttgtatggcaatatggtggtagccagaagaagaagacttccagccaaaggtggtcaaaacttcttgatctaaagaaaaccctggataaagcgcctaagtgaattacttagtatgcatcagtcaactgccaatgctgcatgcagagcaagagaatagtgctgtatcatgatgctggaatggaagtggcgacaacttgaacttgttcaaccaagatggaaggttggtggtttgtaactcattggctgttggctatccttttcttttgaacagaagagagaggattgaccatcttatctgaatggtatatacaatgcgactccatgcccagggactggtcatgttgagaacctagatacaggatcatacattataagcacatcatcagagaataaatgtgtgtgtgaacataactactatttgactgtttgtataaagcatttcatctttttttaaagttttaatataaaacatttcttgttggc

SEQ ID NO: 19044 - DNA, 854 bp, Zea mays
  Clone ID: LIB3136-018-F9_FLI
tcccggtggcgctagagaggcctccggatgtaggacattctgccggggcgttgctttcgcgtgacgagatcgagaggcggtctccatcaagaagggacgggatcgattccgcgcttgaggccaggctgcgtgcgtcctactgcgcctacctgcattgcctcggcaaccggctcgggttgccgcagacaacaattgcgacggctgtggtgttctgccatcggttcttcttccacagatctcatgcctgccatgatagatttttggttgcgactgcagccttgttcctggcagcaaaggcagaagaaacaacatgccttttgaatactgttcttagggcttcatgtgaggtttctcaaaatcaggaattcaatcttcttccttacatgctatgtggtgactggtttgaacagtacagagagagtgtaatacaagcggagcaaatgatacttacaacacttgattttgaactcgaagtagcccacccatatgcttccctatcctctgctttgggcaaactaggactcacacatactgttctgtttaatgtggcttggaatctgatcaatgaagggctacgaagttcactttggcttcagttcaagccccatcatattgctgctggagctgcattccttgctgcaaagttcctccactatgacatcacattccatccaaatttctggcatgaattcaagacaagtccatatattgttcaagatgttgtccagcagttgaaggagctactttaggatacaacattcaatgtatttacataatactcagagatcctcttggtttatacgctgtagtttttacaaccacagtgctatgtacaaaaggggaagatgttattc

SEQ ID NO: 19045 - DNA, 2347 bp, Zea mays
  Clone ID: LIB3136-018-G10_FLI
gcaggattcaatcaccaaaacctcaccagacgccatcctcgaaatttatcagaggtaattttctccctccatttttcgcattttgttttctccgttttttggttttcagtttgattgctcatcttttcaccaaaatatcaagtagcgtcatacttgaaatttgattgatcatcttctcgatttgatcttttattttcttataggagattggtcgtctatctggagcactccgcggccatcaacccccacgcttaaggtcagggtttctgttggagcgtcagggcgatggtgtttggggcgttcctttatcaacaaggggtagagaaggaagaaggttaatggagattcggaatgcacttgaaatgattcaaaggggggaaaatgtaaggctcgagtctatcttctatggcggcctcgacattcatgacagacacagggacatgcgccttgacattgacaatatgtcctatgaggaactattagcacttgaggaaaggatcggaaatgttagcactggcctcagcgaggaagctgtgataaagttgctcaaacaaaggaaattttcatcgtggagactaaaagcatctttggacccagaaccatgctgtatttgccaggtattttctgtactccatagcttctcaaaactgtgtgcctttttttcttctgttggccatgacgtttcattcacatacatcaatcacattgaattgttgaaaaatgtgcattttgttgtctcaaattatgttcattgggcattcagttggttcacttaggccatttcgtctacaatgaaatgctgctttaactaaattggcgaacaaagattagaagggcaagttaaatcatgctaagcctgtctatttataccatctaggtctccaaaggagaacctgttctggtaggtctgtggttttctattaattaaagattggaatttagaatgtctgtcttgtcccttgagatttccatgtctttgttcttgataactagtgtctcatgaaaggattacaatctgactctagcatttacttccattggaccactcaaaataccattaggtgattggaaagattaggtacaatgtgtgggattatttgcattgaaactctcaagcaagccagtcatccaactaatgcatccttcctcctgcaccccactgcagcctaagacacgtaggaaaccaatcagcaaataacacacctaacattgtacaggcaaaccaaatatcagcaaattgcattgtcttttttcctggttagagtacgctgcataacctctaatccaatactaaggcaagtaaccagtgaggccttaaaatacacagatttggaggggaagatgcctctctggatacatatgtcagactcatgatagcaaataacatcaactccagcaacaaaacttatagggcctctttggcagggctctagctcctctagaaataactcccaactctagctcctttgcaagagcagctccttgacatgagccattgttttatttgaaaaacgtttggcactgtcaacgctcacttttgccgtcagacgagcgccaggatatgcatgtgaatgcgtcgtggagccgcgtggagccactttttcaggctccagcttctgaccgcaaattggctcctgctccctggtcggagctgtttttgacacgctgtttgggagggctccggcaaggagccagagccggagctgctcaagagccctcccaaacgggctcatagcagatagctgtatatttatagcaaataacatcaactccagcaacaaaacttatagcagatagctgtatatttaccaggatttccagtgttagaaaccatatacatcagtatctgtcgtgaacatttgctttccgcctgtgaacatgctccctgcatcacctagctttgttacaaagcaatgaagttagcagttgaacaaggctaatacatactcatgctctttctcgctctccaggaggagtacgttgatggagacgatctcgggaggctggactgcgggcacgacttccatgctggctgcatcaagcaatggctggtggtgaagaacgtgtgccccatctgcaagaacaccgcattgaaagcctgaaaccgaacaaaggcgacacacccatgttccatgtccattcgatcggtcgcaagatcatttacccgattggtttttactatgcgttttttggttgggaaaattttgccatttcacctgggaaagtggtgggggggtgttggaggtggaagagaagatggcggtccctgtaaactgctgctgcagtaaataatccctggaatttgtctccctgcatttaaacaaaatatttatggctgttataatgg

SEQ ID NO: 19046 - DNA, 1323 bp, Zea mays
  Clone ID: LIB3136-019-A10_FLI
ttgctggccgccaacgcgctcgacttcggcgccccaggggcggcgcaccgcatcctgcccatgggcctcttcgtgcgcgtgcccacccgctgctcctgcgccgacggcgtccgcaagtccgtctccgtccgctacgccgcgcgcccggccgacacgctcgccaccgtctccgacgtcgtcttcgcggggctcgcctcctccgaccagatccgcaacgagaacggcctcacctccgccgaccccgacgcgccgctcgacgccggccagaagctcgccatcccgctgccatgcgtctgcttcaactcgtccgacaacaacctccccgcggtgtacctctcctacgtcgtgcaggtcggggacaccgtgcccgccatcgctgcaagctacgagaccaccgtcacggatgtcatgaatgtcaatgccatggggagtccagtcgccgcgccaggcgacattctcgccatcccattgccagcatgtgcatctacatttccaaaatccgcatcagaccatggactgattgtagcaaatggaacttacgcgcttaccgctagcaactgtgtgcagtgtagctgtggacctggcagcctcaatctatattgcacgccaacttcactgtcgggaacctgtcctagtatgcaatgtcctaacagcgacgtgatgcttggcaatgtgagcacccatccaaccggtgctggatgcaacgtctctgcttgcagctacggaggttttgttaatggaactataacagcttcgctaaccgcaggtctccaagccagatgcccaggaccacgccagtttcccgcactgacggaaccacctaccacagtgagccacgactcgacgtaccttcctccgttatcagcgcctgggccagcggaagctggtggcgtcatgcctgaaccaggctcgccagggccaggcgcctcggtgcaagcagggcccttcacgctcccgaaagtgtctaaggccaatggccccgccggcagcgtttcagcagctccgttggcgggtaaaccacttcaaatcctacacgtcctggtctcatgcctagccttctacttgcagctctgatcgagtgaacccacatcgcgatgaattctttagctttgtcctgtccccgcagcctagtatatgcttttgaagcaccacgggacatcattgctcgatcaaactccctctgagttgttgttctagctttgtttcgcgaaatctccccggcaactgcgcgcctaaacggcatatctgatgatgtgttcgctgcttttgtacaaaaagacaatggccctgtgtaaagcagtaaagtggtagctattgttcttc

SEQ ID NO: 19047 - DNA, 1641 bp, Zea mays
  Clone ID: LIB3136-019-A2_FLI
aaggacctgaacctgccagcagccctgccgcagccgaccaggacgccaccgcagcagcagatgggctccccgggactgctgcggtacaggtcagcgccgagcacgctgctcggcgaggtgatgtgtggtggtgatcaggacttccccgcggctggcggcgcagggcacggaccaccggaccacgccgccgcggacaacgtcctcgcgcgctttctcgccgggcaccactccgagacccgcgactgcaagcctccccgccccgccgccgccgctcacttcatggacgaagctgccgtcgcgtccatggccgcctcacagcagcagcagctcatgtaccagtcgcagcaggagcagcagatggccgccatggaggggctgtaccgcaacgtcagctccggcggcacggagcacggtgcagccgttggcgctggtaacaacagcctgatccgccagagcagctcccccgccggcttcctcaaccacttgaacatggacaacgggtacgggagcatgctccgggtgggcatgggcggcggcgggttcaggaacggcgtcagcgacgcgcggctcaaggggcagctgagcttctcgtcccggcaggggtcggtgatgtcgcagatctcggaggtgggcagcgaggagctcgacggaggcggcggcagcggcagccccgaggcggccggcagcaacgccagcggcgcggcgcgtgggtacagcggcatcccggggtacccgatgggcggcctcgcgtccggcgcctggccggacgaggcgtcgccgtcgccgacgtccggcgcgaagcgcccccgcgactccggccccgcgctgcagcagccgctggcgccgcagctcagcctgcccagcggaaagaacaagggcggcagggcggcctcggcggagatggcggcgatcgagaagttcctccagttccaggacgccgtcccctgcaagatccgcgccaagcgcgggtgcgccacccacccgcgcagcatcgccgagcgggtgaggaggacgaagatcagcgagcggatacggaagctgcaggagctcgtgcccaacatggaaaagcaaaccaacactgccgacatgctggatctggccgtggactacatcaaggatcttcagaagcaggtcaaggtactgaacgacggccgcgccagctgcacctgctccgccggcgagctgcagggccagttcacccgttaaaaaggagccgcgccacctttttctcaggggggccagttcagctcgcatagttgcgttacgttacatgttgagacctcgcaagagaagagccaagctctggcgctttggcatacgagacctgttgatccaacacatactggtatcagaaaataggcaacagtcagctgaagaaggttcatcagaggaccatgaggacaacacaggattacttgatctagtgctatgggctgcagttgaaggtgtatcatcatcatcagacgatgaggacgaggacgacgacgaggaggaggaggcggcggcctctgatggctctgaatagtagtcaaccgatctttcagggttgtttcaaaattgtaaatatacaacaataagccatcactcttctcatgtattatataatagaactatgatttattagcttgtcatttctatgtt

SEQ ID NO: 19048 - DNA, 1009 bp, Zea mays
  Clone ID: LIB3136-019-C9_FLI
ccgcgccacgacggcggggttctggaaggcgactgggcgagacaaggccatcttcctcggcaacgcctccaggaggatcggcttgaggaagaccctggtgttctacatcggcagggcgccacacggcaagaagactgactggatcatgcacgagtaccgcctggaccaagagaacgttgagattcaggaagatggttgggtggtgtgtagggttttcaagaagaagagctatcaccagagaggcctcaatccggctgaaatggccgccgcactggacgacgacgagctccagcctttccctgttcctatccccggcagctccctgcagccaacagagcacaagaccaaccctactcacctcatgcaatatgactatccttccttcgacccttccatgcagctcccacagctgatgagcgatgaccaggaacaggaacagcccgtgcggccaaccctcctccccggccatcccggcgttgctatggcctccatgagctcactcaacattgagtgctcgcagaacctgacgaagctcacatctaacggcagcgacgagatgctccacgtcggccacggcggtggggctggaggtggtgtagtcgtcgaccgcttcgctggcacgacgacagattggtcgatcctagacaagctcctcgcctcgcaccagaacctcgaccggctcttccacggcaaggtcgtcaccacggcatctgcctccccaatggcggtaccggtataccatcagcagctcatggaactcggtggctcgtcgtcgtccttgcagaggcttccactgcagtacctcggcggcgagacggccgatctcctcaggtaccaccccaagtaattggatcgacctcaagtttagctacctctcttgttgagcagtgaccagatcagggtttttggttgactactagatcgatcgactgcttaattaattcggtctactttgtatggagagtttagggctcctaaatgtatatatatggtgcaactgttttggggc

SEQ ID NO: 19049 - DNA, 761 bp, Zea mays
  Clone ID: LIB3136-019-E6_FLI
gtcgccggcggcgtcggcgccgccgtgggcaacccggccgacgtggccatggtgcggatgcaggcggacgggcgcctgcccctcgcggagcgccggaactaccgcggcgtcggcgacgccatcggccggatggcgcgcgacgagggcgtgcgcagcctctggcgcgggtcctcgctcaccgtcaaccgcgccatgatcgtcacggcgtcgcagctggccacgtacgaccaggccaaggaggccatcctggcgcgccgcggcccgggcgcagacgggctcgccacgcacgtggccgccagcttcaccgccggcatcgtcgccgccgccgcgtccaaccccgtcgacgtcgtcaagacgaggatgatgaacatgaaggtggcgcccggcgcgcccccgccctacgccggcgccgtcgactgcgccctcaagaccgtcaggtcggagggacccatggcgctgtacaaggggttcatccccaccgtgatgcgccaggggcccttcaccgttgtgctcttcgtcacgctcgagcaggtgcgcaaggtcttcaagggcgtcgagttctgagaccggcgacgaggaaagatgatgacgacaacaaacgctgcgctgctagttcgtcaccgcgttcgctgccaagaataacccgctgccaccctacctagaggcggcgactactattacgccctttgctttcatgcgcttcctgcatcctgttgtgtctggatggatttgaccaaatgcaaattgccaacatttttatt

SEQ ID NO: 19050 - DNA, 2412 bp, Zea mays
  Clone ID: LIB3136-019-H1_FLI
cgttaatgcaacatgccagaacagaacaaaatgggcccttcttcgtcaggaaagcaaattcacagattggcagcgggtcagaatgcaggagacatcaaaagagatacccgctgggtcacttcctcgttcccttgatgtcattctgcggcatgagattgttgagaaggccagagctggggacacgtgaggaagcttttttttggcctcttcctccttggaatgacttcatttgactgaatgttttgtttctggtatttccagggttatatttactggaactgttgttgcagttcctgatgttatggcactaacttcacctggcgaacgagcagagtgtcgcagggaagctcctcagcgaaaaaacggaggtgttcaagaaggtgtaaagggcttgaagtcccttggagttagggatctgtcttatcgccttgcctttgtagcaaattcagtgcaggtcgcagatggtaggagagaagtggacatcagggaacgggacacagatggtgatgacagtgagagacagaaattcacagaagaagaggaagatgaagttgttaggatgaggaacactcctgatttctttaataagatagttgatagcatatgtcctaccgtatttggtcatcaagaaattaagagggccgtgcttcttatgcttttgggtggtgttcataagataacacatgaagggatcaaccttagaggtgacatcaatgtctgtattgttggtgacccaagctgtgcaaagtctcagttcctaaaatatactgctggtattgttccaagatctgtttacacgtcagggaagtcatcatcagctgctggtctgacagcaactgttgctaaagaaccagagactggtgaattctgtattgaggctggtgccctgatgctagctgataatggtgtttgttgtatcgatgaatttgataaaatggacattaaggatcaggtcgctatacatgaagcaatggaacagcaaacaattagcattaccaaagcaggaatacaggcaactttgaatgcacgaacatcaattttagctgcagcaaatccgaccggaggccgttatgacaagtcaaaaccacttaagtacaatgttgcattgcccccagctattctttcaagatttgatctggtctacatcatgatcgatgaacctgatgaaaacactgactaccacattgctcatcacattgtaagagtccatcagaaacgtgaagaagcacttgcccctgcatttagcaccgcacaactgaagcgttatatttcttttgcaaaatctttgaaacctcagcttagttcagaagcaaagaaagttctggtggagtcgtatgttacgcttcgtaggggggacagtactcctggaactagggttgcttataggatgacagttcggcaattggaagcattgattcggctgtcagaagctattgctcgaagccatttagaaagagttgttctcccagctcatgtccgcctggcagttaaattgctcaagacatccatcatcaggtgattcagttgaactggtaacatttatgaattgatgtgtgcataatgatgccgctgatgctaatctcattgattttgtgtagtgttgagtcaagtgaagttgatctctctgacttccaagatgctgaagatggaacaaatgtaccttctgagagtgacgccggacagccagctgaagaagatgctgctcctcagcagcagggtgcagaaaatgaccaagcagcggataatggtaagaagaaattggtaataactgaagaacacttccagagagttactcaagctttggttatgagactaaggcagcatgaagagtcagtcaagaaagatggagatggtttagctggcatgaagcaaggggatcttatcatctggtatgttgagcagcagaatgccaaaggggcatatagttctactgcagaggtgaaggaagaagtgaagtgtatcaaggccattatagagagacttatacagcgggaaggccatcttatagtcattgacgaaggtactgcagccgcagccgaagatggcagtggcgcaaggagaacatcagagagtagaatactggcagttaacccgaactatgttattgattagcaacggcatcttaacatgctgttaacccaagccagttgatgtggttagctaactgaagctatgattctggtgatgtgtccgttgtgctctagagttgttgtaccatctccgtcactggtgtgctcgttccaagggagcacatgatctccaaaactacatactacgtttagtgatgcaggataattagcatctgtagtcttactaattttgacccgtgtttccctagtgaattttcgtagcaacagctttgatttatcagtcactgagtgctgcaattttctatttgctttctcaagttca

SEQ ID NO: 19051 - DNA, 1237 bp, Zea mays
  Clone ID: LIB3136-019-H11_FLI
cacagatagaggagggtttgcccctgcacaccgctgcgctactgggaggagcacaagtgtatcgctgtggctgcggcgcccggcagtccgccacaagcacacgcgcacacaggggccaagcgcctacacctacagaggagagacaaggtctgccgtccgcgcgtgcgcggaagaggggacggaggaagaaggctgccagcaatcagagatggaggtggggttcttgggtctgggcatcatgggcaaggcaatggcgaccaacctcctccgccacggcttccgcgtcaccgtctggaacaggaccctcgccaagtgccaagagctcgccgcgctcggcgccaccgtcggggagacgcctgcctccgtcgtctccaagtgcagatacaccatcgccatgctctccgaccccagcgccgccctatcagtcgtcttcgacaaggatggcgtgctcgagcagatcggtagcgggaagggctatgtggacatgtccactgttgacgctgcaacttcgaccaagattagcgaggcagttaaacaaaaagggggagctttccttgaagctccagtttcagggagcaagaagccagctgaagatggccaattggtcattcttgctgcaggggacaagccattgtatgatggtatgattcctgcatttgatgtactggggaagaagtcattctttctgggagagattggaaatggggcaaagatgaagcttgtggtcaacatggtcatgggaagtatgatgaattctttgtccgagggactctgtttggccgacaaaagtgggctgagcccccaaacacttcttgatgtactggaccttggtgccatcgcaaacccaatgttcaagctgaaggggcctacaatgctgcaaggcagctacagccctgcgtttcccctgaagcatcagcagaaggacatgaggttagcgcttgctctgggagatgagaacgccgtcgccatgcccgtctcagcagctgccaatgaggcgttcaagaaggcgaggagcctggggctgggagaccaggatttttcggcggtctatgaggttgtgaagggcgcgggtggttctggatctggccagccgtgatagaaggaccatttgtgactgtgttagcccatttccatgccgatttgcaacatagcgacgtacgagtacgtgtgtattcgagatttggaaccagaccatacgttgcaaaagaaataataaatcaaagagatggtgctagct

SEQ ID NO: 19052 - DNA, 1088 bp, Zea mays
  Clone ID: LIB3136-020-A2_FLI
aagacgaggatccttgtattcgtttactctcgtactgcaaaaagcatagacagccttctgctgctgaacgtccatctttagaaagtgatcctcctgaacccattcaggtagttcagacagatatggcttcatcatctggttgtgcaaggaccgaaccctataatttacacaggagaaggggccaaaagcagccacaagttgtcgctactgcttctctgaaacgtttatatgtggagaatagacctcatattgtcagtggctactgccaaaacagagtaggcaatacatgcggagaatcaattcaaccgtttggtttgtcagatgctgtgcagcaagaagctattggcaatgtgtcttctatggttgaaaaatatacaatcgtgaaggctacatttaggaagagactaacttttggaaaatcaaaaattcatggatatggtgtctttgccaaggttgcacacaaggccggagatatgatggttgaatacataggggagattgttagaccaccgatatcagacactagagagcggcgaatttacaactcactagtgggtgctgggacatatatgttcaggatagatgatgaacgtgttatagatgccactcgggttggaagtatagcccgtctgatcaatcactcatgcgagcctaattgctattcacgtgccataactattcttggagatgaacacatcatcatttttgcgaaacgggacatagatccatgggaagagctgacatatgattataggtacatcatattggttgggatatgacatgcttgtgtgatatgcttgccagtgcctaaaggcaaattctaaaaaatggttgagtttcattcttgaatcctgataattcttctcattatttgagtggaagacgaatctaattgtataggtacccaatataggatcggcaatccaatttggggacataagttgaatcaattgtcgtgtaccattgaaatgttagttgttacacatatttcggccatttgagatggcctgccatgtgtaatgtaatcgaagtacatggttgcacttttcggtgttgcccatatattatccataacaatatgtagtttc

SEQ ID NO: 19053 - DNA, 1188 bp, Zea mays
  Clone ID: LIB3136-020-A7_FLI
gccgggccgcgaatctctgcgtccccttcgccaaccatggcctccttcttcgccgacgacggcaccgatgacctcccacgcaccacttcccaccccttcgactccgatgacttcggcgccgccgcggccgacgtcgccgccgccgacggatacggcgggtacgcctctttcgccgaggggggtgtcgaggaggtggacgaggagatcaccgtcgagtccgatggggtcccgatccgccacgtctccggggggtactcgccctcgccgttctcccccgagctcgagcccaacggcggcgacggcccgatcctaccgccgcccaccgagatggggcgggacgagggaatcctcctccgcgagtggcggagaaaaaatgctatggaacttgagaaaaaagaacagaaggagagggagctacgtgcccaaataattgctgaagccgaagaattcaagaaagccttttttgagaagaggatacagaactgtgcgtcaaacatggtgaacaacagagagagggagaagatttttgtagccagccaggagaaattccacgccggcgcagacaagcagtactggaaatcgatttcagatctcatcccacatgaaatagccaccatcgagaagcgggggaagaaagacaaggacaagaagccatccatcacagttgtccagggccccaagcctggcaagcccaccgacctgtcccggatgcgccatatcttggtgaagctgaagcatgctccgccgccacatatgttgcagcctccaccaccagcacctgctgctaaagagggcacaaaggatggcagcgccaaaggtggtggaaaggacggcgccaaagaaggcggcgcggcagccccagcaaacggcgccaagcagcctgctgagagccaagaaaccaccgccaatggcccctcggaggcggagaaagagcagcctgcagcctcggagtgaccggaaagggtgtctttattaagacatacacaagagccttaactgtcagtagatggaaaagcgtgttttatttcagataatttccagactcgtctttcccgcgctgctgatctttttgtagaggagatctgcatccggatgtctttacatcatagcgcagaacattcatgattgtatcaccacagcagttgtatgtttactgctttcccccttgcccaagtgttgccttcactg

SEQ ID NO: 19054 - DNA, 2042 bp, Zea mays
  Clone ID: LIB3136-020-B1_FLI
gccggctcccgtcccatcgctcgcttccccctcccgcgaatcattcgattcggcccgcctcgtctcgcccgcccgattcgatttggccgtcagggtgatcggaaccggcgctagggttagggttccggcgatccccatacctatggtgcagctgccgagctcggggaagcggcacgcggagccggccatggctccggcgcggcgcgcggcgacggtcaagctagaggtggaggagctcggggccgacgagcgctgcccgctcagcaagcgcgccaaggcagctctgccgatgcccccgacgcctccgcagccgcagcaggatatgtaccacaatgtactcgatgaacctagcccattgggtctgcggctgaaaaaaagtccatcactcttggatttgattcagatgagactttctcaagcatccaatgctggcgagtcatccatggacaacagcggttctgagccttccaagaagaaagacaataaatctggtgcttctgcagcaggcgaacgactaaaagcttcaaattttcctgcaagtatattgaagattggttcatgggagtatgtgtcacggtacgaaggtgatttggtggcaaagtgttactttgcaaagcataaacttgtgtgggaagttctggaaggtggccttaagagtaagatagagattcaatggtcagatattactgctttgaaggcaacttgccccgaaaatggccaaggaaccttggacgtggtgttggccagaccacctcttttctttaaagagacagatccacagccaagaaaacacacactgtggcaggctacctcagatttcactggtggtcaagcgagtgtgcacaggcggcattttctgcagtgcccttcaaccttgttgagcaagaattttgagaagcttattcagtgtgatcagcggctatatcaattgagtcaacaaccggaaattacattagactctgcgttgtttgaacctaggagctcaatatttgaggatccggttgaatcaaaatgtgctgggtttactaattcgaaagatgaacatgaggctctacctggcttttcaggcccggtgtcaccatgtgctggttcctccatatctgctaagaatgaaaacaatgattccattggaatgacagctgaatatctttctcagacagtaggaacaggagttggtgctgtaggtgtacaagctgttggcagaaatgtgaatggtgcagcaccagaattcagtattccccactggtggagtcaattgaaggtgcctgggcttagaccatcgatgtctgtggatgattttgtgaaccacctaggcaactgcatctcagagcagataacttcaggcaatccggcgttggccaacaacgaggtgccgaccaaagaaacactcgaggggattgctcagtaccttcttggtgacacacaaggcccaccggtttctgcttcagacgagagatcactgatggccagggtggactccctctgctgtttgattcagaaagacacagtgccggtcaccaaaccaaaacctgagccaaatgatagcgacagcatcggtgttgaagcctcggatggttccgacgaagaattcagctctgcaccaactgggaaacctacagatgccaccaatctgccagccatgtcaagaaaggattcgtttggggagttgctgacaaacctcccccgcattgcctcgctaccacagttcctcttcaagataccagagggtacagagaactgaacctggcagtcaagacctcgcgcccttgtgctgtaaagattgtatccaagcaataagaaagctggtaggttgtattctggtgcaccggttccccgccctgtaaatgtaacactcggtaggttgccccacttgtgtttcgcgactcaaatgggtagtggaaaaattgagatgttcgttggttcttttaactcaatcgtgcccccacgcaaaacttctgagcttaattttcaggcggcacctccactggtaccctgtatgttcctgattgacgtgtatataaaggttgttccgatctgtcatg

SEQ ID NO: 19055 - DNA, 812 bp, Zea mays
  Clone ID: LIB3136-020-B5_FLI
gcctgacaggaaggatgaacgagcgaggattgaggccctggggggaaaggtcatccaatggaatggctaccgggtctccggtatacttgctatgtcaagatcgattggggaccggtatctgaagccgttcgtgattccaaaaccagaggtcacggtggttcccagggcgaaagatgacgactgtctcatcctcgcaagcgatgggctgtgggatgtggtgacgaacgaagaggcgtgcagagctgcgcgccggcaaatccaagtgtggcacaagaacaacggtgccgctggcgcatcgtggtcgttgtgcgacgagggtgatggatccaccaccgaccccgctgcccaagccgcagcggattatctcgtgagggtcgcgctgaagaagggtaccgaggacaacgtcaccgtcatcgtggttgacttgaaacctcgaaagaagctcaggagcaactcgtagcatcgggcgtgctgggtccatcacagtagagctgagctgaccatggcatgtccaaagaactcctgctagctggtcgtccgcacgagacttgaccggcccacagcttttttttggggtccgttgggcgtcaagaattgtacatgtatatatggtagatgcgttttccatagagggttatggcgctcaaccccgctctggtttctggtggctaaaatgctctccaatcggcatctctaccttgagcccccccccccccctggcacttagtatgtccctaatgctgtatgatagccgagcttgtaaagagccatgcggctgcactaaaattaacgcgctgttaccttcatgattc

SEQ ID NO: 19056 - DNA, 1562 bp, Zea mays
  Clone ID: LIB3136-020-C12_FLI
gcgagacgccattctcaccatccacacaaagccacagcccaagagcactagagcagagtcgtcgtcgtcgtcgggcatggcggggttcaaggtgacgcggatctcggagggccccgtgaagccggcgtcggcgacgcccgaggagacgctgccgctggcttgggtggaccggtacccgacgcaccgtggcctggtggagtcgatgcacatcttccggtcgggcgcgggcgaggccccggccgtgatccgggcggcgctggccaaggcgctggccttcttctacccgctggcggggcgcatcgtggagggggagcagccggggcgccccgccatccgctgcaccgccgacggcgtctacttcgcggaggccgaggcggactgcagcctggaggacgtgcgcttcctggagcggcccctgctgctgcccaaggaggacctcgtgccttaccccggcgacgaccgctggcccgtcgagccgcacaacaccatcatgatgatgcagatcaccaagttcacctgcggcggcttcgtgatgggcctgcggttcaaccacgcgtcggcggacggcatgggcgcggcgcagttcatcaacgcggtgggggacatggcgcgggggctggcggagccgagggtgctgcccgtgtggcaccgggagaagttcccggacccgagcatcaagccaggcccgctcccggagctgcccgtgctggcgctggactacgtcgtgctcgacttccccacggcctacatcgacgggctcaagcgggagtacaaggcgcacagcggcaggttctgctccggcttcgacgtgctcacggccaagctctggcagtgccgcacccgggcgctggccctggacccggccgccgaggtcaagctctgcttcttcgccagcgtccgccacctgctcaagctcgaccgggggtactacggcaactccatcttccccgtcaagatgtccgcgccggccgacaaggtgctggcctcctcgctcgtggaggtggtcgacatcatccgggaggccaaggacaggatggccgtcgagttctcccgcttcgctggggaggagacggaccaggacccgttccagatgaccttcaactacgagtccatctacgtctccgactggagcaagctcggcttctccgaggtcgactacggcttcggcccgcccatcttcgccggcccgctcgtcaacaacgacttcatcgcctccgtcgtcttcctcaaggcgccgctcccgctcgacggcaccaggatgctcgccagctgcgtcaccaaggaacactccgaggagttcgcccgtggcatgaaggaagacctgccctgaacttgttcttcctagcttattatatactgctgatgatcatcctgagccctggctgcagggagatgatgaatggtgacgtaaacatgcttctgtttcgttgatgctgttgttacttttggttgtattttttttggggttcactttatcttggtcaatacgtaccacattagatcacagcaagcaaattcgatcttaatttgtactacaccatttgatatgagaccgagacaat

SEQ ID NO: 19057 - DNA, 740 bp, Zea mays
  Clone ID: LIB3136-020-C3_FLI
gcgccatccaggcccaccgcgtcgcgcacgtgctctgggcgcagcagcgacggcccctcgcgctcgcgctccagtcccgcgtcgccgacgtcttcgccgttgacatccaccccgccgccgtcgtcgggaagggaatcctcctcgaccacgccaccggcgtcgtcatcggtgagacggccgtcgtcggcgacaacgtctccatcctccaccacgtcaccttgggcgggaccgggaaggcggtgggtgaccggcaccccaagattggggatggcgtgctgattggagcaggggccaccattcttggtaacgtgaaaattggtgccggggctaagattggagccggatccgtggtgctgatagatgtgccggcgaggagcacggcggttgggaaccctgccaggctgattggtgggaagaaggccgagggtgcgaatgacgaggacatgccaggggagtccatggatcacacgtccttcatacgtcaatggtcggactacaccatttgagagcggttatccaaggtctattgctcttcttttgtatcactagtaatggtgatgtaccaaataccgagtacttgctctttgttgtgtgctatggtttgtgtattgtacttagaagcctagtggtgtttatgatcattgtcagctgagtgtgccatgcccgaatactggtaaatttcgattgatggatggacaaatctgtattctaacattccttatgaaacaaattctgaggac

SEQ ID NO: 19058 - DNA, 1243 bp, Zea mays
  Clone ID: LIB3136-020-C9_FLI
cgctattttactttctgtggtagctaccacccttatagtgagaaggcgttcaagacacagaactgtctcaaaacgttcattgtcaaggttttctgtcaaagttgatggcgttagatgtttcacatttgaagaaatggctatagcaacaaataattttgatctatcagcccaagttggccaaggaggttacggcaaagtctacaagggaattctaggcgatggagcacttgtagcaatcaaacgagcacacgaggattcccttcaaggttcaagggagttctgcacggagatagagctactatcaagattgcatcatcgcaatttggtttcattggttggctattgcgatgaagaggatgagcagatgctggtttatgaattcatgtcaaatggcactttacgtgatcatctttctgccaagtccaagagacctctaagttttggtttgaggttgaaaatcgcattgggtgctgcaaagggaattttgtatctacatactgaagcagatccacctatattccaccgtgatgttaaggccagcaacattctgttggactccaaattcgttgcaaaggtagccgattttggtctctcgaggcttgctccagtgccagatgtcgaagggacattgccagctcacgtatccactgttgtcaagggcaccccaggctatcttgatccggaatacttcctaactcacaaactgaccgacaagagtgatgtttacagcctgggtgtcgtgttccttgaaatgttaactggtatgaaaccaattgagcatggtaaaaacatagtgagagaggtaaactcagcttgccagtcgggcgcagtttctggaataatcgatggccggatgggcttataccccccagaatgcatcaagaggttcttatcactagcaaccaagtgttgccaggatgaaactgatgacaggccttccatgtgggagattgtcagagaacttgagctcatcttgaggatgatgcctgaagaggacctgattctgctggaaacctcagaaacagactcgaccgatgtcagtaagtcgttgtcatcttcagcgaccaggaccctcttcgtctcgtcacaggcctctgggagtcttgatgcgagcagcggcatgatctctggaagagtaactccccggtaggcatggtgtaatacttgtgaatatgcaagtttgttctgtaacattataggcttaccactcctaggacctgtcttttatgaattattcatattc

SEQ ID NO: 19059 - DNA, 1864 bp, Zea mays
  Clone ID: LIB3136-020-E2_FLI
gttcttttgagatactagtggaatcgttctctgaattttatggatcatgacgtttcttggaatggatatgtcatcataataactctgcagttttcatcggttctttggttcttctctgcagtgaaaattgaatgttctaatggagtccaagggtggcaagaagaagtctagcagtagtcgttcctccctgatgtacgaagctccccttggctacagcatcgaggatatccgccctgcaggcggcatcaagaagttctccgctgcttactcgaactgcgcgaggaagccatcctgatatctctgttgtcatccccatcctagtagcgtagaaaccacctgcattttcattttgatctccctaatccctccggctagctgctttccagtgaccaaaagatatcaaagaccacttcccgtcttcctcccgtggcctgtctgtcatctggctctgaaacgatggcagtcctgcaagttgctgctgctgcccctccccctgtctctgtgattgggttcgagggatttgagaagcgccttgagatcagcttctctgaggcacctgtcttggctgaccccagcggaaggggactgcgtgcgctctcgcgtgcccagatcgactctgttcttgaccttgctcggtgcaccattgtgtccgagctctcaaacgaggacttcgactcttatgtcttatctgagtcgagcctgtttgtctacccatacaagattgtgatcaagacctgtggaactacaaagcttctgctcgctattccgaggatccttgaacttgctgaagagctcctgttgccactcgctgcagttaaatactcccgtggaacgttcatattccctgaagcacagccttccccacacaagaacttcgctgacgaggttgccttcctgaatcgcttcttcggtggcctcaagtccggtggcaatgcttatgtgattggtgactctgcgaagcccgggcagaagtggcacgtctactacgccgctgagcaccctgaggagcctgtcgttactctggagatgtgcatgactgggctggacaagaagaaagcttctgtcttcttcaagaccactgctgatggttactcgctgtgcgccaaggagatgaccaagctctctggtatctcggacatcatcccagagatggagatctgtgacttcgacttcgagccctgtggctactccatgaatgctgttcatggccctgctttgtcgaccattcatgtgaccccagaggacggcttcagctatgcaagctacgaggtcatgggcttcaacccgggctctttctcttatggtgacctggttaagagggtgctgaggtgctttggtccaactgagttctctgttgccgtgaccatcttcggtgatcgggacaatgcgaagacctgggggacgaaactggatgctgaggcctatgcttgcagcaacatggttgagcaggtgctgccgtttggtggcttgctcatctatcagagcttcactgttacggccgaaacgacccatgggtcgccgaggtcagtcctgcatgacttcgctggtgacattgtcaagaatcgctcagagagtgatgctccctgggaagctgatgctgtggatgagagcgaggaaagagatgtaaagaagatgaaatgctgatgtggtcgacgatagatcagattcagagttgctgccactggttatcttgtgaagcagccaagcctaattatttatgccacataacctgtgctattgtaatgtgtcacatgcttatatttgcaataaacagctctaggtggtcagctttgtctgccgcaatgagcagtgtatcgatattgtggttttgaattgtttggatctaaataaagtcttgttcgat

SEQ ID NO: 19060 - DNA, 817 bp, Zea mays
  Clone ID: LIB3136-020-F12_FLI
gctgagcccaactgtgaggatgggctaagcatgatgacaattgatgacagtgatgtgactaatcatcacggtgcttcagatgataaacgattgttggaaatagctaacacagcactcatgagtgatccaccttcacctgacaagcttaaacctctgataggctcttcttctggagatgggtttgatgttctgcctctagccacagatcagcctgctggaccagtttcagcgacacctaaggtaccttatgccagagatgacaataagttcaatgatggcatgtatgaagacttatgtgtggatgatgctgacctgacattcgagaattatgaagagctattcggtacctctcacattcgaatagaggaactctttgatgacgccggaattgacagttactttgaaatgaaggaaacaccgccttttgatttcaatgagcagcccaaaattgtgcagctacaatgtagcgatgtggtaccagctgattgtgcgatgtcaaacccaggggaaagggctgattccagcctttgtattcctgttaggcaggtcagatctagtatatcccatcccttatctggtttgactggtgagagcagcgctggagatcaccaagactgtggggtgtcaccaattctcctcatgggcgagccaccctggcattctcctggtccagaaggctcattagctggaggaagcagagatagcgctctcacacgatacaaggagaagaagaagagaagaatgtaagcacgtttaaatgtctgcttgaggttgttctgcgcttaacattcatagatcgtggctatctttttaaggc

SEQ ID NO: 19061 - DNA, 810 bp, Zea mays
  Clone ID: LIB3136-020-G7_FLI
caattggttcagaaactgcaggatccatagcatacccagccgctagatgtggagtaactgcattgcgcccaacatttggaacagttgcacgaaccgatgtcatgagcatttctgagagtttggataagcttggtcctttctgtagaagcgcagtagattgtgctgttgtattagacacaattcgcggaacggatgccggtgatccatcatcgcgtgaggttgctttgggtgatccatttcatgttgacatcaccaaactcactgtaggctacctcgatgacgctgagatggaggttgtcgatgttctttcctctaaaggtgtcaagctggtccccttcaagctgaactacactgtggaatcagtccagtccatcctgaacataacgatggacactgatatgcttgcgcacttcgataactggcagcgggaaggacatgatgatgactatgaggcgcaagaccagtggccggtagagcttcgtcgtgcacggttaatcccagcggtagattatatacaggcgcagcgagcacggggcaagttgatcagagaaatcaaagatagcttcactgttgatgcgtttgttggcaacgtgactgactgggagcgtgtctgtctcgggaaccttgttgggatgcctgtggtcgtggtgccgacaggcttgaagagcatcgagaacccgcctaaaggcggtaccaagagaagaacaacagtgacgacaggcatctacgctcctcctgaccacgaccacattgctctggcgctggcaatggcgtaccagtccgtcactgatcacaacaaacagcggccgc

SEQ ID NO: 19062 - DNA, 636 bp, Zea mays
  Clone ID: LIB3136-020-H8_FLI
ctcatggaaatgtagcttatgctggaatggagtccagcatatgtaagatggattaatccaatggagatcagccttcaggtgattgtgcatctgaaaattcgtgttggtgtgtggtccctagtcccagtcaccgtgcacagggtctgatgatcaagaagtgtgtcctgtcctgtacaagtctgcagtcatcaactcatcaccccgttgtctgcatgactacgggcctgtttggtttggtgcctaacttgccatacttttctgcctaaggttagtttttcaattcgaacgactaaccttaggcaaagtgtggcagatttagccaccaaccaaacagcccctacattcatcagcggtcagcctttggaccaaactctggaagacctagctactctcttttcctgagagttaccagtaagtgtatccagttctgtatgcagtcatcatcgtgttgtttacaccactgggttgtagccagtgatgatcattcgtctgtaccaaatttttattgttgcaactaaggtgtgatctagcgtgtagtgctctgtgtttggtggtttcaagtatagagcgcttctcttgtacttcaaaataaacccgtttacccatgatatgttctaaactgatgatgctatattt

SEQ ID NO: 19063 - DNA, 1082 bp, Zea mays
  Clone ID: LIB3136-021-D5_FLI
cgactttgtgcgcatgctgctgctcgacgcatgctacgtgcttgtcaatttcggcggcatcggcggcggcgggcaccgcggcagcgacatgatggaggacgttggggtggtgcgcgacgtgatctacctcgcggagaaccagataccgttcttcgtcgtcgacgagatccgcaagctcaccattccggacggcggcggcggttctgcgcctgacgcgattacggtttacgtccggaatctcctgcgggagctgcagtactcagtggcgatgccggcggtggctgagcctccggggccagacaaccttctgcatctgctgcacatgcacctgatgcccaccgtcgcactcccgtcgtcacgatcgaccgtaggcaccggcaagccgcgtcggttcggccggtggcgctcggcgacggagtactactgtgccggcgttggattcaggagccggcctctcggcggcaaaggggctcgctcaatcctcgaggtgaagctcgactactacggccgcacactggagatcccccacctgaagatcgacgccgagacgtcgcggctcctgcgcaatctgatggcgctggagcagagcaacccggaagaggtgggcagccacgtgacggcgtactgcgtcttcctgtcgcagctggcgggaacggtgcaggacgtggagctgctgtccaggcgagggatcatcgcgcacggcctcggcagccacaacgaggtcgccacctccctggcgaacctctgcaagggcatcgcgttcgggggcgacgaccccgacagcaactaccttcgtgcgacatgggaggggctggaggagagcttccggagccggccgcgccggtgggcggcatggctgatgctcaagtacttcaggaacccgtggctcgccgtggggctggcggcggccggcgtggggctggtttgtaccgtggtgcaagcagtgtacgctgttttggcttacacatcaaatccttagcaggaattcgtagtcaaacactgtgcggctatgctgtgcttgtgaaaagtagtcaatattggtgtgcctagtacgtccagcaatgatttcgttactattatct

SEQ ID NO: 19064 - DNA, 896 bp, Zea mays
  Clone ID: LIB3136-021-H3_FLI
ttaaggtgcaaaagggaggaagcaaagatcacagcttgggaaaatctacagaaagcaaaagcagaggcagctatccgtaagctggagatgaaacttgaaaagaaacggtcatcatcaatggacaaaattttaggcaaactccgctctgctcagaagaaagcacaagacatgcgaagtgtagtttcttctagtgaaggtcagtgtagtgtgagggcaaccaagaagacatcttcctctgtcaaaactggcaggcctttcagctgctgctttacctaccgtgcttgctagttgtgatacacagttggtgcctgtggatacagcaatggatataggtctattcggtgagtcccactggcatttgtattatgtgtaatttaacatctaaaactcacactagttcagcattaatgctttactgcttgtaattttgtatttgtgtaattttatcgaatttattaacttttaacctattatctcaatagtttctaatgctagaagtggctatctttctcaagacctcttctcaggcaacagttatggacgcgaagggaagtcagttgggttttgactacaaggcctaattgttaatgagatttgcactgatgaatgatatatcgttatggagcagcagacgaagaaagccacgcgaaatccactcatgtaactgatggagtggactaatgcagtctagtatgcgacgatcaatctctgtacacccggtagaaaaagttcatgagcttcatggcagttagaatcaggattgagctgatattcatcccgcttgatgtgtagctagcattcttgtaactggaattgtgtgtgtaatgcaaatcatgggcgcattagactgtaatgaagaaaaagtcagggctgcgcctttagaatgcagcttgctc

SEQ ID NO: 19065 - DNA, 867 bp, Zea mays
  Clone ID: LIB3136-022-E7_FLI
cctctacagatggcccaagtactggtcccctgttcgggctgaaagctgatggttcttcgttcccttcctttagtcttggtgctgccagcaacgggagttccgccacagtgcttgctacctcagcagaagcacccaagaaatttgctatggcagaaggccctgtcgaaaccggcgaagaaaacgagaaggctgtatttactgccgattctgccttgtatgagtacctagatgggggctggaaagaaagaggaaaaggtgaactgaagctgaacgtccctgtatcctcctccggcggcgagagagcccggctcgtcatgcgggcaaagggcaactaccgtctggtcctgaacgcgagcctctacaacgacatgtcgctcaaggacatggacaagaagggcgtgacgtttgcctgtatgaacagcattggggagtcgccgagcagcctggccacgtttgctctcaagttcaaggacacagccaccagggaggaattcaaggacgcggtggagtttcacagggcaagcaaagcaccggacgagccgctgaaggcgcccgagaactcttcgaaggcagcagaagcagaagcctgaagctgcactcgggtcacgcttactcgttttttgtagagtccaggaaggagctgagatatactttctgtcattgccttcttaagaatgttacgttatgacatgatgtcctgagcactgccactggtgctgttgttggaacagtgggtagccttgacgaactttcattagctacagtcctaatctagagttctggagacgagactcgttagatttattcgcttgtcttgtgctccgttatgtttgttctatcggttaagctatgcgtcatgtgttatct

SEQ ID NO: 19066 - DNA, 547 bp, Zea mays
  Clone ID: LIB3136-022-G2_FLI
gcggctacggtggctccccgtcccacggcggcggcgcgtacggtgggtctccgtccactcccggcagcggtggcgcctacggaggcgggtctccctcgccggcccatggtggcggcgcctacgggagctccccgacgcccgcgtacggcgacgccccctcgcacggcggcatagggacctcgtcgccgacgccgctcggcgacccccacagcttcggctctctcccgggctcctgcgactactggaggtcgcacccgatggagatctggtcggcgatcggcgggcggttcccgggcacgtcgtcgtcgatggggacgatgggccacttcttcggcgcggctggcagggtgggcgggacggacgtgagcatccaggacgcgctggcgaacacgcggtcggacggcgcgggcgcgctgctgcgcgagggcgccgccgcgctgctcaactccatgacccgttcgggcttcccctacacgacggagcaggtgcgcgacgcgttcgccgcggcggcggcggaggcggcgggcgggtccgacggcgcggccgc

SEQ ID NO: 19067 - DNA, 1637 bp, Zea mays
  Clone ID: LIB3136-022-G4_FLI
cggaagccctacccgcgccgccgcgccgatccagccgcgcgtggtgctgcgggtggcgtcgtccgccgcgccagcctcttcctcctccgcccgcccgcgcaggggcgccgtggcagaggccgcaatgcagccggccaaggcggtcgccgcggaggcggcctcccccgctgccgcgctggagatggggaacggcgccgcggtcgcggggctgcagcggcccgacgccatggggaggtttgggaggttcggcggcaagtacgtccccgagacgctcatgcacgcgctcaccgagctcgagaacgccttccacgcactcgccaccgacgacgagttccagaaagaacttgacggtattctcaaggactacgttggacgtgagagccccctttacttcgcggagcgcctgacggagcactacaagcgcgctgatggcacaggcccgctcatctacctcaagagggaggacctcaaccacacgggcgcccacaagatcaacaatgctgtggcgcaggccctgctcgccaagcgacttgggaagcagcgcatcattgccgagacaggggctggccagcacggtgtcgccaccgccaccgtgtgcgcccgtttcgggctgcagtgcatcatctacatgggcgcgcaagacatggagaggcaggcactcaatgttttccggatgaagcttcttggtgcagaggtgagggctgtacattctgggacagcaaccctgaaggatgctacttcagaggctatccgtgactgggtcactaacgtggagaccacacactatatattgggctctgttgctggcccgcacccgtacccgatgatggtgagggagttccacaaggttatcggcaaggagacccggaggcaggccatgcacaagtggggtggcaagccggacgtcttggtcgcttgcgtcgggggtggatcaaacgccatgggcctgttccacgagttcgttgaggatcaggatgtgaggctgatcggagtggaggcagctggccatggcgtagacaccgacaagcacgcggcgactttgacaaagggccaagttggagttctccatggatctatgagctatttgctgcaggacgacgatgggcaagttatcgagccccactccatcagtgctggactggattaccctggcgttggacctgagcatagtttcttgaaggacatcggacgcgctgaatatgacagcgtgactgatcaggaggcactggatgctttcaagcgcgtctcccgtctggagggcatcatcccggccctggagacctcccacgcgctcgcctacctggagaagctgtgcccgaccctgccggacggcgtgagggtggtgctgaactgcagtgggcgaggcgacaaggacgtgcacaccgctagcaagtacctggacgtctagaacaccggagaggagggctgaatgagagttttgcatgccaatttttgaagggttcagcagttatgtagcgctgtttttttttgtgataagagtacaaataacctggaagctaaagctagtattgttgtagccgccctttgttctttttttgagttgttgttctgtatctgaaatgttttggagtgcataatgatcaataaacaagtaaataccaaaatctttgtctatg

SEQ ID NO: 19068 - DNA, 1196 bp, Zea mays
  Clone ID: LIB3136-022-G5_FLI
tggccgccctccggacggccggctccggccgccgccgcggcgcgggttcccagcagaccggccttaacgggggcaggttcctgatgatgcagaggagggagctggtgaccaaggccgggatcccgctcgccgtctcctgctcgatggctacctcaccggcttcagccaacggcgctgctcaaggcatcgtcagcgactccgtctctcctgtcgtgcgtgcagggctggagattttgccgttcaaagctgacgggtacaacttctggacgtggcggggtcgccggatacactacgtcgagcaaggcgcggggcggcccgtcgtgctcatccacggcttcggcgcttccgccttccactggaggtacaacatccctgagctggccaagaagtacaaggtgtacgccatagacctgctggggttcggctggagcgagaaggcgctggtggactacgaggccaccatctggatggagcaggtctccgacttcctccgtgagatcgtcaaggagccagccgtccttgtaggcaacagcttgggaggcttcacgacgctgttcacggccaccgaggtgccggagctggtccggggcgtcgtgctcctcaactccgccggccagttcgccgaccccaacaagccggccgccgcgccggccgaggaggaggaggggggcagcgcgctgtccaggtgtacatagatcccagcaacgtcgacgactacctggtcggctccatcacggcgccggcggcggaccccaacgccggcgaggtgtactacaggctgatgtcgcggttcatgtcgaaccagagccggtacacgctggaccggctgctggggaagatgtcgtgcccgctgctgctgctgtggggggacctggacccgtgggtcggcccggccaaggccgcgcggatccaggagttctacgccgacaccgccgtcgtgcacctgcaggccggccattgcccgcacgacgaggcgccggagcaggccaaccgcgcgctgctcgagtggctcgcggccctcgacgcccgcgccaagtcggccgagcccagcctacagaccgtctgatggatcgagcgcaaggggcttagcgaatgctagtcaaagaatacaatttggtggcctatatctatagtttgatgtagtatgtcctgtagtaggaacagtaatttcttacggtgacttagtttactgttcc

SEQ ID NO: 19069 - DNA, 980 bp, Zea mays
  Clone ID: LIB3136-022-H6_FLI
cttttcattgccctcactaaattttctattggagtagaatttttttctcaaccagcaaggggtctacaccattgtcattgggagccacatctcagccatctaccactacggcttcgcaaaccttatgatgcgcaggtatgttgaggccactcgtgaattcaacaagattcttctgtatatcctcaagtacaagcagtaccaccagaattcccctcagtatgatcagatactgaagaaaaatgagcagatgtatgcattgttggcaatttgcctatctttgtgcccacagaacaagctcattgatgaaaatgttagcacccagctgaaagaaaagtataatgacaagatgacaaagatgcagaggtatgatgatgaagcatacgctgcttatgatgagctattctcgtatgcttgccccaagttcattacaccgtcgcctccaattctggaccagccgctaacaaactataaccaggatgcataccgtcttcagttgaagttgtttctctatgaagtaaagcagcaacagttgctttctgggattcggagttatctgaagctatattcaacaataaccattagcaaacttgcccaatatatggaagtggatgaagcaacactaaggtcgatcctgatgacatacaagcacaaaatgcatgcagttgacagtgaaggaaagatagtatcaagtgcagactttgacttctacatcgtcgaggatgtgattcatgttgtggagtccaaacctaccaagcgtcatggtgattactttttgagacaaattttgaagtttgaggaaatgattggtgaactggagaaggtacagcttgactgaaatctgatagcgatcatggagagaaatgtcactgtttcctttttgctctcttttgtactccgttgaaaccccatcttttttttttttgtttccttattgactctgaagcccgttgaaaccggccattattaaccgtgtaccgtgt

SEQ ID NO: 19070 - DNA, 629 bp, Zea mays
  Clone ID: LIB3136-023-A2_FLI
atttccgtcacaactcacaacccgagccccccaaacccgaagcagcaggagctcccctgaccttgctccgcctccgatcaaggaaaaggaagatgagctactacggccagcagccccccgtcggcgtcccgccgcagcaaggctacccggggaaggacggctacccgccagcggggtacccgccggccggctaccccccgccggcgcagggctacccgccgcagggctacccgcagcagggctacccgccgcagtacgcgcagccgcctccacagcagcagcagagcagcgggccttccttcatggaaggatgcttggctgccctctgctgctgctgcctcctggacgcctgcttctgacggatccatccgtgccgggttcaacacggctgcaagtgaagcaacaagcttacggaagagctggaactgggccgtgctattctagctttgtcctgcgttatcgccctcttttcttttcttttcttttttttttctctctctctctctctgttataagactactggtactctgtcgatgtcgattggattagactagggctggtgtgtattctgtggatgctccgtgtttctggtgggattcaagttcaaacctgggattattgtatttct

SEQ ID NO: 19071 - DNA, 782 bp, Zea mays
  Clone ID: LIB3136-023-C11_FLI
gcacagaggttgttcacaatgttatatatgacataattcagaaaggtggagatgctgggaaaattacaaagggtgccaaaaagttgaaactggaaaaagggatccttttggataattatgttcagaggggttctagattagtggattcccaagcaagatctttgttgattcattcaaagcgatcaaaaaggcacatgtctctaaaacaacataagaaatgtggttcatttgatttagatggtacattccacaagtacgacctctataagccaatgcatgagatgtggaaggactatatcagagagcttatggatctgagcccgaaaaagaaatttactgagaaccttctttcagcagatcttcatggggcccttctaatagtggcagaatgcaaagctgcttcatataaaggtgtaaacggcatcatgattcgggatactgcagagacgtttggaattatatccgaggacaaccgcttccgagttgtaccaaaagctggttcagtgttcgtacttcaagcagatcgctggaagttcacactgattggcgacaagctctcgcccagggagaagttgaaggaggatcagcgtcaacaacgtgcacaatcgctaatcagatagtttccaatgtgccagctgttctctcaaaatttttgctccacgaaatacttgcttttgtttagctgttttaccctttttagtttgcctctaacattgaaggtagataatgggtgtctgtttttgcaactattgattttattttacacagcaagatgtaactgc

SEQ ID NO: 19072 - DNA, 560 bp, Zea mays
  Clone ID: LIB3136-023-C3_FLI
cggctgccgccagcgtgccgctgctggcgtggccccgcggcggcgaccaccgcgtgaacgccaaggtagcggtgagcggtggggttggggtgtggatggagcactggagctgggacggggaggactggttggtgaccggggaggagatcgcgaagaaagtaaaagaggtcatgtccgacgaagcggtcagggcaaggacgacgaggaccgccgaggaagcggccaaggcagttgcagagggtggcaccagctaccggagcatggaggagtttatttccagcgtcaaagcaaccgtggcgtcttgattgcgtcgtggggctcctgatttccacaagtttgtgtcccctactcccctaccctaccttccactgatggggagtccggagttgtgacgtcgttgtcgtgtggctggttgcagtgtcaaccaaaacagttctcacacacgtgagttgttgggaggtaggtagcatgtactatcacgtacctaccccatcaagaatagtgcgtcatctgtcatcttgtgatgtcatcttgtaatgaaataaaaacagttgcatttt

SEQ ID NO: 19073 - DNA, 518 bp, Zea mays
  Clone ID: LIB3136-024-E7_FLI
gcgacgggggagttcttcgcaaatatatcccgcactggatacacgcggcgcggccaagcaagtaagcaacccaaaccctccctcccctcccattcgattcttgcctcccacgccgccgccggatcccgcgatggccgaccctcggctgtaccccacggagtccgggtccgacgaccggcgcgatgccgcctatcccggctccgagcgccgcctctacaacccgtaccaggacctcaacctcccctatcggcagctctacgaccttcccacctccccggagttcctcttccaggaggaggccgtcgcgcagcgccggtcctggggcgagaacctcacctactacaccggcgtgggatacctcggcggcgccggggccggggccgcgctggggctccgcgacgccgcccgaggcgccgagcctggggagcccgccaagatccgggccaaccgcgtcctcaactcctgcggcagctccggacgccgcgtcggtaacacgctcggggtcatcggcctcatgt

SEQ ID NO: 19074 - DNA, 829 bp, Zea mays
  Clone ID: LIB3136-024-G1_FLI
caccaagtcctctccggatggcaaggccttgtgaccttccgccggtgcggcaagcagcggctcttctcctggcatgcgcgcttgctctgctcgcggtgcagctgcggccgtgcagagcccagcagcagcagcagcctccgtcgccgggatactaccccagcggcatgttcaggccgctgggcttctccgaggcctaccgcacgctgtggggcgcgcagcaccagacgctgtcgccggacggcaagtccctgacgctctggatggacagcagctcgggcagcgggttcaagtctgcgcgggcgtaccggaacggctacttcggcgcgtccgtcagggtgcagccggggtacaccgccggcgtcaacaccgccttctacctgtcgaacagcgaggagtacccggggcaccacgacgagatcgacatggagctgctggggacggtgccgggggagccgtacacgctgcagaccaacgtgtacgtgcgcggcagcggcgacggcaccatcgtcggccgggagatgcggttccacctctggttcgaccccaccgccgacttccaccactacgccatcatctggaaccccgaccagatcctgtgagctagtctccgtgtcccttcccccggccccctgcgcgccattagctggctgcctgcctgcccggtcactcacatcacatgccatgagctgcgcctgcgtgcaggttcctggtggacgacgtgcccgtcaggcggtacgagaggaaggcggaggccacgttccctgaccgggagatgtgggcgtacggctccatctgggacgcctccgactgggccaccgacggcggccgc

SEQ ID NO: 19075 - DNA, 843 bp, Zea mays
  Clone ID: LIB3136-025-B1_FLI
tgccatcacatactttggggacggtgggacaagtgagggagatttccatgcagcgctcaacttcgcggctgttatggaggcaccggtgatcttcttctgccgtaacaatggctgggccatcagcactccgactactgaacaattcagaagtagcaacagcgtgtcttcatatactgatccatggcagttacaagtaaacaatgcaatgtcgtgttaaaattctagtcgtgttgcaggtgatggagttgtcatccgtggccaggcttatgggatccgtggcatccgagtagatggcaatgatgctcttgctgtgtacagcgcaatccatgctgcccgagaaatggctgtaactgaaggaagaccaattttagttgaggcactgacttaccgagtcggccatcactcgacatccgatgattcgaccaagtacaggccagttgatgagattgagcattggcgaacagcgagggatccaatttccagatacagaaaatgggttcagggtaatgactggtggtctgatgctgaagaatctgagctcaggagcagagtgagaaaagagcttctccaagccatccaggttgcagaaagaatgccaaaaccaccagttactgagcttttcactgatgtttacgataagatcccttccaacctgcatgaacaagagcaattgctgcgggatacaatcatgaggcaccctgcagactacccaactgatgtacccgtttagttttcttggccttagatgagcagtatcgttgtgtaattattgatgagtcaggtccatagcattttgaataatacagtgattcagccagtgaactgctgattcaacacgttctt

SEQ ID NO: 19076 - DNA, 1039 bp, Zea mays
  Clone ID: LIB3136-025-E5_FLI
caccaccaccaaagaaggcgagaacgctccccttcccctccaggctccaggaccgtctcctcgcctgctcatccgccgctgctccccttctctgggctcggagaaccggagagaagcgcgcgcggccatggcgtccagcgcctctcggttcatcaagtgcgtcacggtcggcgacggtgccgtgggcaagacatgtatgctcatctgctacaccagcaacaagttccccactgactacatacctacggtgttcgacaatttcagtgcaaatgtagttgtggatggcaccactgtgaatttgggcctttgggataccgctgggcaggaagattacaaccgcctgaggcctctaagctaccgaggtgcagatgttttcgtgcttgcattctcacttgtgagccgagctagctatgagaatatcatgaagaagtggataccagagcttcaacattatgcacctggggtgcccgttgttttggcaggcacaaaattggatcttcgtgaagacaagcactacttgatggaccatcctggattggtgcctgttaccactgcacagggggaggaacttcgtagacaaattggtgctatgtattacattgaatgcagttcaaagacacagcagaatgtcaaagctgtgttcgatgctgccatcaaggtagtaatccagcctccaactaaaataagagaaaagaagaagaaaaaatcacgcaaaggatgttctatgatgaacatcttcggtggaagaaaaatgatatgcttcaagtcctgaatggttcaagggggtcttacatggactgataccacgagtgtgaccccgagtttgcgaagcttgaaatcttgatgtgctcgttgcgcatgtgtatatttgcacctttggttattaatgactagaggtaggtaattgaaactagtctgcttaagcgttctgcactgctggtgtggttagctctatgagttaggcagttcgacagaggccaaaccgacagtgagattttgttctttcatggaaatgtgccaatgtcacagctttttcgtg

SEQ ID NO: 19077 - DNA, 1070 bp, Zea mays
  Clone ID: LIB3136-025-G3_FLI
caggcgctgggtgccgccgcaggggaagggagccctgtacctccggcctctgctcgtggggagcggcccgatccttgggctggctccggcccccgagtacaccttcctcatctacgccgcacccgttgggaactacttcaaggagggcctggcgcccatcaacctggtggtgcatgacgagttccaccgcgcgatgcccggcggcaccggcggggtcaagaccatcgccaactacgcgccggtgctgagggcgcagatggacgccaagagcaaggggttcacggacgtgctgtacctggactcggtccacaagcggtacctggaggaggtgtcgtcgtgcaacgtgttcgtcgtcaagggcggcgtggtcgccacgccggacacccggggcaccatcctgccgggcatcacgcgcaagagcgtcatcgagctcgccagggaccgcgggtacaaggttgaggaacgcctggtttccatcgacgatctgatgggcgcagacgaggtgttctgcaccgggaccgcggtggtggttgctcccgtgtcgacagtcatgtaccagggcgagaggtatgagttcagaacggggccggacacggtgtcgcaggagctgtacacgacgctgacatccattcagatgggcatggccgccgaggacagcaagggatggacagtagcagtagagtagattaataaggttggggaatgccatcgccacgacattggatcctacatcagtattgtcatccggtagaatgcatactcggttgatcagcatatgtaggtcctgtttgtttcggcttctggcagcttctggccaccaaaagctgctgcggactgccaaacactcagcttttcagtcagcttctataaaattcgttggaacaaaaatcatccaaaatcaacataaacacataatcggttgagtcgttgtaatagtagtaatccgtcactttctagatcctgagtcctgtgaacaactttatcttccttcacacgtaattgtaatgatactcagattttcctcacagccagattctccccacagctagatttttagaaaagctggtcag

SEQ ID NO: 19078 - DNA, 1258 bp, Zea mays
  Clone ID: LIB3136-026-A5_FLI
gcgccgtcgtgctcggctcgccaccccgcgccagctcctttcaggccctaaccgttcgccgccgcgcattcgagcactcgcggaagcgcacctagtgccatggcgaagaagcggaagcgcaccgacgcccccgcagaggcgaccggcgcagagaagcctgacgactctgcgccggcgcgcccggagcgcacgctcttcggcttcaaggacccggtccccgacgccgagcccgcctccgcgggcgccgaggccgcggtggcgccgttccggaacagggagaaggtactcatcacctgctcccgccgaatcacgtataggtatcggcacctgatgcaggacgtgctgtcgctgctcccgcatgcgaagaaggacagcaaggtcgagtcgaagcagagcaaggggaacgcgctgaacgagctccttgagctcaggagctgctccagctgccttttcttcgagtgcagaaaacagaaggatctttacctttggatggtgaagtctcctggaggaccatcagtaaaatttctagttaatgctgttcacaccatggaggagttgaagcttaccggtaaccatctgaaagggtcacgcccacttcttacattttctacaaattttgatgagcaacctcattggaagcttgtgaaggaaatgataactcagatatttgctactcctaaagatcaccgtaaagcaaaacctttccatgaccatgtgtttgtcttctccattgtggatggccatgtttggtttcgaaactaccagatttcggttccccacaatgagattgataaagttgataaaggtggtctggataaaatgacacttattgaggttggccccaggttctgtttgaatccaatcaaaatatttggtggtagttttggtggtcctacatggtatgagaacccatactacatttcccccaatcagatccgtgcactagagaagaggcagaaggcaggcaaatatgccaagaaggtgaaggccaaggtgaggcggaagatgcacgagatggagaacacgctggagcctgatgagtttgctgagctctggaaaggggagtaactggtctttgatcgaccctgttaaagtcgtgaagcaccagcaactccttccaccaagcgcggattttgtttaccagtgtggcagtgcccactgtcgaggttgtggaagttttgtatcacaaagcatacttttatttatataaaatcggattttagtgataagataacttctgcctatatggcattcttct

SEQ ID NO: 19079 - DNA, 1011 bp, Zea mays
  Clone ID: LIB3136-027-F5_FLI
caaggtcttctccctttcttcgctccacccgtggcttttccatttgtaccagctcctagtgctgcctttcccacagttgatgttccacgaccttcagagaaagacagagattgcccagttgaaaatgcacagaatgaatgccaagaagctcgaaaacaggtacagttcgaaggtttaagagttgctgcttcttcagagtctgatgggagtggaaaaggcgaggtgtctctccatacggagttaaagctatctcctgcccagaatgctgatgccacacctaccacaggagctggcacaaatgatgcattcaggaataagaaaaagcaggatcgctcttcatgcggttctaacacaccttcaagtagtgatgtagatgcgggcaatgttcctgaggaggacaatgctaatgagaaggcgaagcaagcctcctgcagcaactcttcagctggtgacactaaccaccgcagatttagaagcaatggaagcacaagtgattcatggaaggaagtttccgaagagggtcgtctggctttcgatgcgctgttcagtagggaaaagcttccgcaaagcttttctcccccacaagcagtagactcgaaggaggttgccaaggaggaggaagatgaagtgaccacagtggcagttgacctcaacaagaatgccacaagcattgatcatgatgacctcgacacaatggatgagcccagggcttcctttcccaatgaattgtcgcacctgaagctgaaatcgcgccgtacaggcttcaaaccatacaagagatgttctgtggaagcgaaggaaaaccgggtgccgactagcgacatggttggtaccaagaggattcgtcttgatagcgaagcatccacataattgatttcttcaaagttatatttacatctaagctactataggacttcagatcttgcaatgcagtgcttcattaaaactcaatctgttgtgtgctgtattttaatgcttgtcaagcagcccgctagactgctttaaaacctt

SEQ ID NO: 19080 - DNA, 976 bp, Zea mays
  Clone ID: LIB3136-027-H8_FLI
tgcacttctctgttgaaataagcaggaagcttacatggaacatccgcgtaaggatagcactaggcactgctcgagcacttgagtacctgcatgaggtgtgcatgccgtctcttgttcatagaaatttgaagtcttcaaacattctactagatgaggagcataatccacacctatctgactgtggacttgctgccttgactccaaatactgaaagacaggtttcaactgaagtatttggatcatttggctatagcgccccagagtttgcaatgtctggcatttatactgtaaagagcgatgtatacagttttggagtggtaatgttagagctattgacagggcggaagccactagacagttccagagagaggtcagaacagtctcttgttagatgggctacccctcaacttcatgatattgatgcacttgctaggatggttgatccagcattaaacggaatgtacccagctaaatcactctctcgttttgcagacgtaattgcactctgcgttcagcctgagccagagttccgcccacccatgtcagaggttgtccagcaacttgtgcgcttgatgcagagggctagcatcgtgaggcggcaatcaggagaagagctagggttttcatacagagtcccagaacgagaaggagacctgagagacatttccttctgagcaagtgcgtccacgatagaagcgcaaaacagtttggaggcttaatgtgcaaagaaaatatctagagcactcgtatagtcatatcgattggagaactcgagctgaccgcaacaattcaggatcggatgagttttgagaagataatttcgttgcctattgttcaactttgttcattcttctacattcgtctcattttcagtcagtatacttgttgcagctgtatttaaaacgagactcaaattgatggtggtgtatagctgattattggtagagaagaaggaaaagaaatgtaaaattgatgc

SEQ ID NO: 19081 - DNA, 742 bp, Zea mays
  Clone ID: LIB3136-032-A4_FLI
tttcagtgtgtgccaagaagttctcaggctcaaactgagcaatggcagctcagtttgcagcggcaacaggagtcttcctgagctgccttcttgctcttgcagcacttgcaagctgcaacactgaaggtgacatcctgtacaagcaaagggcgacatggaaggacccaaacgatgtgctcgtgagctgggatccgactcttgccaatccctgcacctggctccatatcacttgcaacaacgataacagtgttatccgtgtagatttggggaacgcaggcctatcaggcactctgattccagatttgggaggactgcagaacctccagtacctgatgttgtatgggaacaatctgacagggcccatacctgaatctctgggcaatttgacgagccttgagaggctggagcttcagaggaacgcgctgagcggtgcaatcccatcctctctcgggaacatcaaaacattgcagttcctgaagttgaacgcgaatatgctgaccggcacggttcctttggaagtcctctctcttgtcattgctgggaatctgaccgagctaaatattgcaaacaacgacctggccggaacagtcagatcatctggtttgagagtgactgcaatcatccaggacaagctgaagactacatgatgattctctgctgggtgtggatattggctttcttcatgagaatgtttgacaaaaaaataataaataaataaatccagtgacatggattgatctag

SEQ ID NO: 19082 - DNA, 481 bp, Zea mays
  Clone ID: LIB3136-032-B9_FLI
ttttaatcatatttatgtgatggtaataactcgagttttcacaggtggtgcttttggcggaaataggggggtgaggcctgtacctcctgaaaaaggtgtgttcccattggatcacttacatgagtgcgacttggagaagaaagattatcttggctgcctgaaatctacaggattccagtctgaaaaatgtcggcagttctcaaagaagtatttggagtgtcggatggagagaaacttgatggccaaacaagacatgtcagagcttgggttcagaactgtggacgaagcgggtacatctcctgacaagaacagcaaactggagagccctcctaatcagccaaaggattaaaaaaatagttgtttggctttgatgtagcttttgtatgtttcttcatcccggagatctgtcaagatctcaaacaaataagggtataatgaaaggacgatgttagtttacatagtaaccaaatttgaaacttgt

SEQ ID NO: 19083 - DNA, 976 bp, Zea mays
  Clone ID: LIB3136-032-F4_FLI
cggtgaagcaagccaattcggtcaagccggatcagggatttggagctttccagggtgtgaattccagtgtcgctgctggatttgggagcttccagagtactgatgctggatctggtggtttccaaagcgctggcacgaccacaccttctaactttacaccaccgccagcaccagcttcaatgcctactcctgtggctgcagcagttaactcaagcatggatcctctggataatctttttgcttcaaccacaagtgcaccgactgcagctgccgctagtaatggtgacagtggcggtgacatgtttggtgagatggatggttgggtcgatgtggaggcagagtttgctggtggtgatagtggtggcacaaccacagagctggatggcctgccaccgccaccatccggattgacaatatcagctgccaaggccaaagggatggatagctacaagggagggcagtatgctgatgctatcaagtggttgtcatgggctgttgttctaattgagaaatcagggaaagattttgacattgttgaggtgttgtcttcaagagcttcttcatataaggaggttggtgagtacaagaaggccatcactgactgctcgaaggtgctggatcaagataaggataatgtctcagtgctagtgcagcgtgctctcctttatgaaagcacagagaaatataggcttggtgccgaggacctgcgtttggttctgaagattgatcctacaaataggcttgccaggagtacaattcaccgcctgaacaagttggctgactagggatgtctttctagcgccctgatgtaatattgtactaccactgtactgcatccttctcacatgagatctgtgagttatttgaactctttagtctttattactatacttgtggctttgggggaatagtttgcaattgtgttgttataaagtatgaaatacgaatttacatacaatatattttttatttgtat

SEQ ID NO: 19084 - DNA, 674 bp, Zea mays
  Clone ID: LIB3136-033-A1_FLI
gaacaatctggacttcagcctgcctatggacgggcagaggtccatcgccgagctgatgaacatgtacgacaccaacttcatgacgagcaagaccatgagcagtagtgacagcgtcaccatcatggagaggccgaacgcgatgccccagaggatccagatggacgagggcttcttcggacagggcaacggagtcttcgacgacgtcaatagcatgatgcagcaacaacagcagcaggcaccacccgtggtgcagcagcagcagcagcagcagcagcagttcttcatccgcgacgacacgccattcatgagccagatgggcgacatcaccagcacggcggagttcaggtttggctctgctttcaacatgtctagcaccgccgccgctgactacccaggcgcggcgcagaagaacgacggggccaattggttctactgaagaataaaacttgtagggctcctcgttataagcttcggattcctccatggctctcccaagttgtcaagtcttataggtcttcgttatataggttttgcagtagctgcaagacggctggaacctggaactggtttatacttgtatgtccggccagccataaacctctcttatttgcaaacttaatgttattcctagctttaagttgttagtctcagtgctgtccatgtatatggctgtt

SEQ ID NO: 19085 - DNA, 1407 bp, Zea mays
  Clone ID: LIB3136-033-A3_FLI
gcggacgagtgggctcgctcaccaagccaacaaccaaatcgaattcgccgacgactctctttattcctcccgctcgccgccgccgccaccgcctgagggcaagaagcgagcgagcgcaccgcggatctccctcccggccccgccgcgcgcaccggtgaagacgacgagcccctcgtgaatggtgggagcccgcgcgacgtccgtcgcctcgcagccgcagccggaggaggcctccttccgcggcttcggttactgcatgcagggctggtaccaccgctgcatcggtctcgacccctgaaccccgccgccacttgcttctttgatttgatttcattcggttcgttcggtgcccctcccgtcctggatctgttgcccgagagcgcgagagcgcgcgagattcgcccccttctcttctcataggaagcaggaagcaagccgatcgctcgctgagcgccgccgccgatggccgtcgcggtgccgtccacgctgccgatgaagctctggagggcggaggcccgcggcaaggccgccgccgccgccgcggggcccgacgaccccctgcgcgtcctggtgacggtgaccgtcctcgggagcgccggcccgttgcgcttcatcgtcctcgagggcgacacggtcgccgcgctcatccgcggcgcgctgcgctgctacgcccgcgagggccgcatgccgctgctcggcaccgacccggccggcttcgtcctctccaccgccaacggcggatccggcgcactcggagaagacgagaggatcagcttcaacgggtgccggaacttcctgctttggcagaaggctgcggctcagggtgccgccgccaaccacgccgggtccgatgctctgacggcaaccctgagccccggcaggaagggcagcggtggattcaaggctactgatccgagccatggcaggaaaggcggcggcggctggaaggctggcctgaacaagttcctcctcagcttcagcatcaaggtgtgatctatgcgtggacgagagaagggggtcgtttcttggtgtcgaggcaccgcacaacaataaaaatgcattgcattggtttgtctgttttttcaatcaattggtattgtaattcgtcatgcgaatccgagtcgagtcgaggcaaagtgtgattcatcgtatgtttgagtcgagtcgtgtcagttgcttagtttatttggctgttctctttccaaatcatcggatcgggttcctctgatctcttgttaattgttcttcattcaataatccatttgtgcgtgctggtctcactctcttcgtgatcacaaggccctgtttggccgattagctaattaatcggatgatcacgcggcgttgacggccccgtgcctgtttgtttggtttatggcttatacaaaccgctggattattaagtac

SEQ ID NO: 19086 - DNA, 1578 bp, Zea mays
  Clone ID: LIB3136-033-G2_FLI
ccgaaaccctgaccaaatcgcgaggcaaagccgcgtcggcggcggatggcgccgtccttggtcgtctcggcgaggcatgcccacgctgtgccccaccggagaggtcgcaggcagcgtgtggtcgtcgccagttccggtggcgccggtccgccgccgaagctggtgaccttcctcgggaagggcggctccggcaagactaccgcggccaccatcgccgctcagtattatgcaagtgaaggcttcaagacatgcctggttgttcagtcccaagatcctactgcggagcacttgatgggcagtaaaattgggaattctctgaccgagtgtgtggccaatctctcggccataaagctggagactggtaagttgctgcttgaacccctagaccgactgaagaaggtagacgcccaggtcaattttactcaaggaatccttgaagggattgtaggagaggagcttggagttttacctggaatggattcgatctgtttagtcttagctcttcagaagctccttaatttcttttcatctggaaggagtaattcacaatcagaatttgatgtgatcgtgtatgattgcaacaatacagaggaaattctacggctgataggtgctgctgaccgggcaagatcttacttgaggtatgtgagggaccttgctgagaagactgacatcggaagacttgcttctccttcattactgaaactaatatatgattctgcaaggccaaatggcaaaattagtgaggggagacttagtacagagatatggaatgaaattgaacaactacttgagaaaatctcagtatggtttgccgatccttcaaaacttgcatgcttccttatcatggatcctaggacatcaatctctgtatcctctgcattgcggtattggggttgtaccactcaagctggcggtcaaatatgtggggcatttggatacactgaagacccttctgaaatgcaccgagaagttgctcaaaagttcgtgccgttgtctttgtcttttctgccatttctcccgaatgattcttccgtggattggagcagagcactaagctcattgagccaaaatacaaaggaacagctgaggaatgcgtccacctgggtgtacccttcagtcagttttgattctgttcagaaatctgtaaccctcttcatgccaggctttgataagtctgaaatcaagctatatcaatatagaggtggatcagaactgttgatcgaagctggagatcagaggcgcgtcataaaattgccacttacgatgcagggaaaggtccaaggtgccaaattcgttgacaggaacctcgttgttagcatccggtagcagaatcgctggcgccggctgccggctgggattggagcaccccacttcagattggcagtttactgccgactaatgagcaggaccatcgggattgcatgtctgtttctgttcgtagcctgaattttgtggtgctgttcgtttcaactttcaaccagagtgaagctgcatagtcctactatttttgaaggggttcgcgatactcgagtaaatagtaaactggcagttttttgcactgcttttgtgatcagg

SEQ ID NO: 19087 - DNA, 1194 bp, Zea mays
  Clone ID: LIB3136-033-H6_FLI
tcggagctcaaggcaatgcttggcggcagtggcgcgcggtgccggtggttccgctacgaggagctctacgactccaccaaccacttctccgcagagaacctgatcgggaacggagggaacagcagggtgtacaggggcagcctcgcctgcggccggcaggtggcgatcaagctgtgcaaggcgtcggcggaggcgtccaaggacttcctccgggaggtggacatcatcaccaagctgcagcaccaccggatcgtccccttgatcggcgtctgcgtggaaggccgcaacctcatctccgtttaccgctacctccccaggggcagcctcgaggacaacctacacggggaaaggtcaaagccggcgctgtcgtgggagaaccggtacaaggctgcgctggggatcgcggaggctctgagctacctgcactccggcagctcgcggccggtgatccacagggacgtcaagtcgtccaacatcctccttacagaagagttcgagcctcagctatccgatttcgggctggccatctgggcgccgacgaatccgacgtccctgacgcacagcgacgtcgtcggtacattcgggtacctggcgccggagtacttcatgtacgggaaggtgaccgacagggtggacgtgtacgcgttgggcgtcgtcctgctggagctcctgtccggccggaagtccatcagcagcgacgggtcgtcacccaagggccaggagagtctcgtcatgtgggcaactccggtgcttagcagcggcaacatctgtgacctgttggacccgaggctggacgtgaagcacgacgaggtggaggtcaggcggatggcctctgccgcgtcgctctgcctccggaggtcggctcgactcaggccgccgatatcgcagatactgagtatactacgaggagaaagcgcggcgagcatcgccgaccagggcgcgacggagccggactgcgtggacgacgaggcgtaccccgccgcgaacgtgaggtcgcacctgggcctcgcgcttctcgacgtggaggactcggagtccatctccagcacggagcacagcagcggcctcagcccgttggaggagtacctgcgagaacgttggagccgatcgtccagcttcgactgatgattcatgcccgcgctgcgattttgtttgtgggcatgtgttttagtttttttttccctctccgccggt

SEQ ID NO: 19088 - DNA, 657 bp, Zea mays
  Clone ID: LIB3136-035-C12_FLI
gcgccgcagccgcggcttccatccatggcgccgcagcttccatcaatcgacagcgcgccctccacaatcccagaaatcatcgccaatttgattgttgacagagagtttgcaagggagatggtgcagcggcagaacgcgtggaggtgggttgtggcacgcgcggtggaggctggcattagcacgccaggaatgactgctagcctttcgtacttcgatacctacagatcaagtcgattgcctgcaaatctgatccaagcgcagagggatctgtttggtgcacacacctatgagcgcattgactgtccgggttcattccacaccgaatggaccaagctggcgaggaggagcaatggcgcagccatttgaggaattggttggtatgagcagggatgttttctgctttgggtgatttctctctgtgggttatctttccttttactattgttatctttatgcttctagatccaagtcgagtacttcgaataatgctgtactgtatggttggcaagtgaagaacattgtgtagcttcagttttactgtgatgtaggtacacacagtttgattctcttatttttggtatgcaattgctatgatgcctctcaaaccacaatgttgtgtgtttaaagagttatctgaaatgtgttgaaattgctact

SEQ ID NO: 19089 - DNA, 635 bp, Zea mays
  Clone ID: LIB3136-035-E9_FLI
agaagaagctgaaggagatggagacagagagggaaaggctcctggagtctggtatggtggacccaagggagcgtgcgcctaggccggaggtggacatacaggtggtgcaggacgaggtccttgtacgagtgatgtctccaatggagaaccatccagtcaagaaggtcttccaagcgttcgaagaggcagaagtccgcctgggcgagtcaaaggtgacgggcaacaacaacaacgggacagtggtgcattctttcatcatcaagtgtcccggcactgagcagcaaacgagggagaaggtgatagcggcgatgtctcgtgcgatgagcagttgagcagagcagcgtaggatcagattggcgcggtagagatgtggcagttgatcctgtttggttgcgagcaaaaacaagaggcggcggcgacagcagcccttgacatggtcgataggagatctgtaggtggagagaagcaagatgagattcttctgacttttttagcaacgcaacaacaaaagatggggctcgagttaagcagccgttgtacgttaggtttcttttggttggtaatagtgttcctagtgtaagcttgatgatgcagcagaacaatgaacagcagtacatgttttttcccttattttc

SEQ ID NO: 19090 - DNA, 1202 bp, Zea mays
  Clone ID: LIB3136-036-A4_FLI
ctcgtggccagggtcgccctgcagagcgaggatgtcgagctcgtcgccgtcaacgaccccttcatcaccacggattacatgacctacatgttcaagtacgacaccgtgcacggccaatggaagcacagcgacatcgccctcaaggactcgaagacgcttctcttcggcgagaagccggtcaccgtctttggcatcaggaaccccgaggagatcccgtggggtgaggctggtgctgagtatgtcgtggagtccaccggtgtcttcactgacaaggacaaggctgctgcacatctgaagggtggtgccaagaaggttgttatctctgccccaagcaaagatgcacccatgtttgttgttggtgtcaatgaggacaagtacacctccgatgttaacattgtttccaatgctagctgcaccacaaactgccttgctccccttgctaaggtcattcatgacaactttggcattattgagggcttgatgacaactgttcatgccatcactgccacccagaagactgttgatggaccctcagccaaggactggagaggtggcagggctgccagctttaacatcattcccagcagcaccggtgctgccaaggctgtcggtaaggttcttcctgaattgaatggcaagctcactggcatgtccttccgggttcccaccgtggatgtgtcagttgttgacctcactgtcagaatcgagaagggggcctcttacgaggaaatcaagaaagctattaaggctgcttctgagggcccactcaagggtattatgggctacgtggaggaggatctggtttccaccgacttcaccggtgacagcaggtcgagcatcttcgacgccaaggccgggattgccctgaacgaccacttcatcaagctcgtctcgtggtacgacaacgagtggggctacagcaaccgcgtcgtcgacctgatccgccacatgttcaagacccagtagagagagcctccctatcgagggtcgtccccaatggcctttggtcgcagaccatctttgctgcttgcctgcttgtctatgctgagaataaatgtgaacggtgcccctggacgctggatccatgctggttttggacactttgtctttttgtgtttaacttatctgctgccgttctgtaacgaattcgataagttttagttcttttgtgctttgttaagaatataaacaatgagggtttt

SEQ ID NO: 19091 - DNA, 482 bp, Zea mays
  Clone ID: LIB3136-036-B1_FLI
ctgccttaaatgactacaaaaggctagattacatccagcgccacatctcaactctcaaggagtcaatagacttgggagcaaatgtgcatggctacttcgcttggtctctgctggataactttgaatggtacgccggctacaccgaacgttatggcattgtctacgtcgaccgcaaaaataactacacgcgctacatgaaggagtcagccaagtggttaaaagagttcaatactgcgaagaagcctagcaagaagattattacgccagcttaaaaacatgggacctcgtgatgtgggtacggtgccacccatgaaataaaaacctagtgtgtggtttgaaacctaaatttttctttttcttttttgcaccatgagagaggtagtggaggcatattctccagcaccgtggctaataatgtattgttgcagtacaatctagccttgtcgtcatgcaataaataaagcgactggtttccctatttc

SEQ ID NO: 19092 - DNA, 2082 bp, Zea mays
  Clone ID: LIB3136-036-E8_FLI
agacggcacaacccttgctgccgtcctggtcgccacacggccacaccaacccaacacctcttcttcctccgctctcagcttaccccaccacaggcgagggaggcgactccttcctcgcggctacccgctccggccccgatcgcatctcctttgcacgccacggcccgcgcgcagtgtccaccggcacggccgtcctccgtgtgtgggggcgcatctggtgctagcttgccgggctagggtttggcttggcctcgtctaccgccccgtctcgtctgataggcacaggttccgtgcacgcgatcgtcgtctctccatccgttgtgactgcttgccgtcccccgcttgcttcgtcctgctacgggagggccactgctgccatcgcgtccaccgacgaatttccccacagagcattagagcaattatcttggagttgcagatctgcacctgaagattcatattgaaatctggaagcttctgctgttgagtacagagaaatatttcttgccttttgaggaagactgcagagcccctaaatgtgaaacttgtttcttttcttgtctactcctgaatgctgacgaactcagcctctcacgttacttagctgaaggtcgtactggtacagacaccgaggatggagcaagcaacaggtgtaagtggtcctgaacacataattgatattccaagggaaattggtcctcctgcttcggtttctcgtagtgctggtagagagaaccatgaagaatcgaatcctgtggacaggccttcaacaagagctctagtacctgccttgcaggcaccatcagcaataggtgctgtacctattacagggcatacttcaggcactaggagaaatgacaactatgttcgtcggcacagaagcccattgaattctggactgtggatttcaattgaagttattgttaactttagccagattgttgctgccattgttgttctttgtgtgtcaagaaaggaacacccacaagctccattacttgagtgggtcataggttacactgttggttgttttgcaacgttaccccatctctattggcgctatatacaccgtaatattgtaaatggtgagcatgagtcatcacatacacctcaagggtccgctcataacaactcaaatgaagcgactcatgctgcaagtgcatcagaacgccgtagaaatgctgcccgaaatgctgtgcttgctaatcctaggatcaatgcgctgtttgaccacttcaagatggccctggattgtttctttgctgtctggtttgttgttggaaacgtgtggatatttggtggccgttcttctgctgctgatgcaccgaacttgtacaggttgtgcattgtgttcctcacttttagttgcattgggtatgccatgccattcatcctatgtgcaatgatatgctgttgccttccctgcattatatctgttatgggttttagagaagatacaaacaatacaaggggtgcttcctcagaatctatcaatgctttgcctacatataaattcaaaatcaagaaacgtcgccatggttcaggcagtgaaactgaaggccaggaaggagggatattggctgcaggaactgacaaggagcgatcactctctgctgaagacgcagtttgctgcatctgtcttgcaaaatatgcgcacaatgatgagctccgtgaacttccatgtgcacactgtttccacaaggactgtgttgataaatggctcaagataaatgcactttgccctctgtgcaaatctgagatagtgagctcgtctggtacttctgatgcccgccaatcagaccagaacaccgttcctgtgcaggagatcgaaatgcattaggttggtctgttcccgcagcttatcacataaggatacatctgatttgtggctctcaatcttcatgtataaagttggagattgatgtatggattgtagagacgcgtaggtttttttttgtatttaacactgctatcttggagaagttacagctattctcgctgtcacccaactatggcaagccaatactacccaggttttcccccatagcgtgggctgcaccttatgttctgctcttgatggcattg

SEQ ID NO: 19093 - DNA, 622 bp, Zea mays
  Clone ID: LIB3136-037-C2_FLI
gccgtcgccgccctacggctcagatcttcgtcgtcatcttctccggcaacgagcacccaaagatggtggtccttcaaccagatcggttcctgagcgagctgacgagcatgtacgagcggagcacggagaagggctccgtctgggtcaccatgaagcgatcaactctcaagggcaaggcacagttgcggaagatggagaataaggggcaggaggtagagcacaggtgcctcgtccgcgcctccaatggcaagaagaacatctccacctcggtttctctaaaggagtacacaaagtttcaagcttcatacgcaacagttcttaaggcccatatgcatgctctgaagaaaagggagaggaaagacaagaagaagactgcagatgctgagaaggcaattgagaccgcacccaagaagcagaagaaagcatcttcaaagaaatcttcagggtccaagtcataaggcgctcacagaactcagtgtgtcttctcctttatgttgtttaccgccagactaattagagtgtcgtgaagttttacttatctggtttttattcgaattcgtgtctggaagatgaaagcctgtgaatacacctttatagagccgtgtcatcgatgctaacattt

SEQ ID NO: 19094 - DNA, 586 bp, Zea mays
  Clone ID: LIB3136-037-D8_FLI
gacgacttgtttcattgattcttgaagagatcgagcttcttttgcaccacaaggtcgaggatgtcttgcaactgcggatcaagctgcggctgcggctcaagctgcaagtgcggcaagaagtaccctgacctggaggagacgagcaccgccgcgcaggccaccgtcgtcctcggcgtggccccggagaagaaggccgcgcccgagttcgtcgaggccgcggcggagtccggcgaggccgcccacgcctgcggctgcggtagcagctgcaagtgcgacccctgcaactgctgatcacatcgatcgacgaccatggatatgattattatctatctagcttgtggtggtggttgaacaataataagcgaggccgagctggctgccatacataggtattgtgtggtgtgtgagagagagagagaaacagagttcttcagtttgctatctctctctctgcatgtttggcgtcagtctttgtgctcatgtacgtgtgtctacatgcatgttggttgatccgattgcgtctgctgtaaccatatattaattggtccacgatgatatgatttgatactatatatatatatatact

SEQ ID NO: 19095 - DNA, 439 bp, Zea mays
  Clone ID: LIB3136-037-E1_FLI
catagtcacctgcctatctatctagcgagagagagagaggaaagctagctagctagcatggagtgcggcagcaagaaggcagcaggcggtgtgttggcgctgctgcttctccagctggtgttagctccgacgacggcgacggcccgcctcctgcaggcggatacctccaccgtggttggcctggacatcatcgcgagggagtttggccatccagtgagaggcatcctctgtggtgaaacctgtgtcttcctaccatgctatacggcagccatgggttgccaatgcattggccaaatctgcatgatgtgatatctggactagcgctatttgtaatttgtgttgggagaaacacaaggacggtacggtggtgttcaacttattgcatgtgtatggtgatctaataagtaaagtataataaaaagggatatgttggatgtgt

SEQ ID NO: 19096 - DNA, 1561 bp, Zea mays
  Clone ID: LIB3136-037-E4_FLI
caagaagtatcctaacgggtctaggacaaatcgtgccacaccaaatggttactggaagactagtggaaaggatagaataattatgcttaactcccgcaccgttgggatgaagaaaacattgatatttcatgaaggcaaggcccctaagggtgacagaactgattgggtgatgtatgaatacagaatggaagatgaggatttggtttctgccggtttctcaaaggatgcttatgtactctgcaaaattttcaagaaaagtggccttggtccaagaatcggagagcaatatggggctccatttaatgaagacgaatgggataatgcagaagtcgaaacttctctgtttcctttgttttgttcagaagtgaatccaacagagggacaacgtgctcagcctactgtcctggctggtgctcttctggaacccgaaccacctctacataattcatcttctacatgtgctggagaggaaccatcatttggtcatgccactgcagaggacttaacttttagctatactgttgctagctctgctatccaagatacacctgctcggatgtcaggagacggtgtggtttctgtgaacaacatatccaatgtggccaatgacatgcgtagtccttgtgactgtgatgaatttctatcggagttgtctagatttatgaatgattctcctctgcgtaacactcctcttggagagtgctctggtcttcctccgatgtctgaagctgaggctcatgcttttgaagtcaactcttttggcctctacaatgaattatcagagcttgttgagttaggaggcgcggataacaacttaaacaccagcaatgtggaaactacagattacctcatgttgccacctgacagagaactgtcggctaatgattacatggaactaaacgatctccttgctcctgacccaagcttccccagtgaattttctgctcaggacaatcaatatatgcagcatcctcttgctcagtacaatggacattatgatctgtcaggtccttcggagccaacaatgcctagcattttcgatgtttttcctcccaataatggagtcctcgcaacagatgatccagccaactacttggacccagccatgcagttccctttctcatgattggttaccagttgtcatggaggtacggatgtttatacctgctctttttgtgcttgaacttgtctggactgcttcggtgttgcaacttgcagctcgctgttgctacaactctatccaccctgaacgtcaaggacgtcattgatgtcatgcctgggcccatgaaatcgtctgttgctcttctgaaccaagccgaccttggctggtatttcttggaagcacggtgcttggaacaatctgcatcgactgctgtatgctcccaactggttgagctaacggccaatctcggctcactctgctgaggagatcatagcctgtaaatctttgattatgctattacttgtgtgtatcgcaacctgcctgattaccattgtcttgtgttttgagttttgacaatatgcaaaccataataatgtcgtaatatggaactcgtttatc

SEQ ID NO: 19097 - DNA, 856 bp, Zea mays
  Clone ID: LIB3136-038-A8_FLI
gccgcgtgctgcggccctacctgcagcacctcgagtccgtcgccgacgagatggaggcgcgccgccgcgagctgcgggtccacgccaacgccggcggtggcgcgccgcggtgggcgtccgcgcccttcacgcacccggccacgctcgacacggtggccatggaccccgacctcaaggcccgcgtccgcgccgacctggagagcttcctcaagggccgcgcgtactaccaccgcctcggccgcgtctggcgcaggagctacctgctgtacggcgctcccggcacgggcaagtccacgttcgccgccgcgatggcgaggttcctggggtacgacgtctacgacgtggacctgtcccgcggcggctgcgacgacctccgcgccctgctcctggacaccgcgccgcggtcgctcatcctcgtggaggacctcgaccgctacctgcgcggcggggacggagagacggcggcggcgaggaccgcgcgcgtgctcggcttcatggacgggctctcctcgtcatgcggcgaggagcgcgtgatggtgttcaccatgagcgggggcaaggacggcgtggacccggccgtgctgcggcccggccggctcgacgtgcacatccacttcaccatgtgcgacttcgagggattcaaggctctggcgagcaactacctggggctcaaggaccacaagctgtacccgcaggtggaggaggggttccacgccggcgcccgcctcagccccgccgagctcggcgagatcatgctcgccaaccgcgggtccgcgagccgcgcgctccgcaccgtcatcagcgcgctgcagcacgtggccccgtcaccgcctccgcagcggaccgtcaccgcggc

SEQ ID NO: 19098 - DNA, 696 bp, Zea mays
  Clone ID: LIB3136-038-F9_FLI
catgggtctgcatgaatccgctagctctactggcgcagaggagctgaaccatcatgatgtcgtccagaacggatcgccttctggtaaggaaccggcagctgaagacagttctggtcagcaggagttgcaataagacagtggctcgccttcacaccatgactgcaggggttttgtgccagagcacaaatgatagtttcttctttttttttcgggtttttggggttggttgggggggggggggtttggacgaggtgtgataatgactcatgaggggcgtgttagactgacaggcgaatgtgtttaccgggggtcaggtagataagattttgctttaccttgtggtattcaggcggaggggtagggcagctggtgaagcagcagagaaggaaggcggtggttacatctggaggcgcctcagatgacatggaagactgaaaaaacaagtctattgaagactgaaaaagaagtcaattgaagactagcgtagcggccctgggcggctttgttttcacaggatggtattctggtgttgcgatgaactagtcttcatcgggatggatgttgtaggaccttcaggtttttttttttattttttttatggaggagctgaaagtttctgacttgggagagtgagggagtttgacttgttttgtttttgtggtggcgttaagttaaagtaagaagaagatgttagat

SEQ ID NO: 19099 - DNA, 1277 bp, Zea mays
  Clone ID: LIB3136-040-A3_FLI
agggagaagaaaatggtcgcggcggcggcggaggtgtcgacggcggcgacggctagcagtagccccccggcggaggagggggagcggcgggacgagagcgagagcgacggggagatggcggggctggcggccgtgctggacttcgacatgctgtgcgcgtccgtggcgctgtcggcggagaggaggaaggccggcgcggcgctggcgggcgcggccggcgactgcggcggtggaggcggaggggtgcagaggatgtgggagggcgacgtcgtgctggattgcctagacgaccggcgaatcgcgctcgagacgtcctgctgcccatgctaccggtttggtaagaacatgcggagagccaatctcggatcttgcttccttcagggaatggtttactgcattctgttggctgctgtcctaatcagcctaattgccttttctgtaacaaggcatcatatatatttatatatgggaattggctctgtcctcttgatagcggtctatactggttatttccggagaagaatcaggaagcaattcaacattcggggtactgagagcagtctggacgattgtgttctccatctcatatgtccttgctgtacgctgtgccaggaggctagaactttggagatgaataatgtccagtgtggtgtctggcatggccgaggtgataccatttgtttagggagcaacggtgcaggaaacaaggctttcgctgccctgaacaaggcctctctcgtgcctataaagtccccggggatgtgtggcatggatagatcgtcaagcgcagccgacgagcagcagccgcttgtcccaccggaccaactggagcaggtttaggtattctctgtcgccacgacctctgcactttcctagaagggcttggacagcgccgacggaaaaaaaatcgttctctgccggattattaggcgcctgcatccattggtcccgagaactggactttgcaactaccgtacatgggtgatgggcgcagtcgacctgctgctgctgctgttgtaaaactcagtgatagattttcacgtgcagtcgaattgtttaggtcgaagactgtatcttcagaatgtcacgacacgtgctcaggccttttgcctgaatccaactgtaaatttcagatccaatctagcagttcgagttacatagacaggaatgagatggtaatgttctcttcaccggccgtgcttgctccctgtatctttcatacgctgccccttgtcgttcctgttctcaggagcttgattaacactgttttctttacg

SEQ ID NO: 19100 - DNA, 821 bp, Zea mays
  Clone ID: LIB3136-040-B6_FLI
gacagccactactaggaattgccgagcgagcgagcttgcgccgtgcgcgatggagggtgacgagaagtcggcgggcggggcccctgcttactggggcctgggcgcgcggccctgcgacgcgtgcggcgccgaggcggcgcgcctctactgccgcgcggacgcggcgttcctgtgcgtcgggtgcgacgcgcgggcgcacggcgccgggtcgcgccacgcgcgggtctggctctgcgaggtctgcgagcacgcgccggcggcggtcacgtgccgcgcggacgctgccgcgctctgcgcctcctgcgacgccgacatccactcggcgaacccgctcgcgcgccgccacgagcgcctccacgtggcgcccttcttcggcgcgctggccgacgcgcccaagcccttcgcctcggcggcgccgcccaaagcaaccgacgacgacgggagcaacgaggacgaggcggcgtcgtggctcctccccgagcccgaccacgggcagaaagaaggcgccacgacggaggtgttcttcgcggactccgacccgtacctcgacctcgacttcgcgcgttccatggacgaaatcaagaccatcggcgtccagcagagcgggtcaccagagctcgacctcgccggcaccaagctcttctactccgatcactccgtgaaccacagtgtgtcatcgtcggaggcagcggttgtgcccgacgcggcgtctggcatggcgcccatggtggcagtggtcagcaggggcctggagcgggaggcgcggctgatgcggtaccgggagaagcgcaagagcaggcggttcgagaagacgatccggt

SEQ ID NO: 19101 - DNA, 1051 bp, Zea mays
  Clone ID: LIB3136-040-D5_FLI
cttgtatccctcctccccttctggccgacgaaaccctacgcgcgcgcgctgccaagccctcgccgccgacgcctactccgactccgacgccgcagtcgtgatgtacgccgacaggacctcgggcaggaaacgctctgtaatggaccgcctcggctcgggcggcggctcgcgctcgcggtccgacgacgcaaaaaggttttgccaggatgatgggacatggagacgtgagctttataaggattctagaggaactcagacttcatctgaacctacttccagaaatctggaatcgaacaaaaaatcccaagtgcagcaaaaggttgtgaagaaattaccagtttcagatcttcgtgggaagttatctggtgtcgcgagccagcgccctcaacttagcagtactgttcaggtcccaaaacctgtaaaagaggttattaagagcaacaaacctgttcaaaagagagaccccgctccaactactgcccctcctgacatcaagaaacccagtgcacctgtaccagcaccatctgcactaccaaagcaatcccagaacaagattgatgcttcgcttgacagtttactgaagtctcttgatctagagaagtatttgataaatttccaggctgaagaggttgatatgaaagcattggtttacatgaatgaagaagatatgaagtctttaggaattccaatgggtcccaggaaaaagatactatcagcattggctcacagaaagaacaagtcctcgaagtcattgcctaccagtaccagttgaggcatctttaagcttgtgtggtagctagacaacttgttgatcttggatatgtgcaagtgcatcatcgacctgcagagttaactccactgacgagcaagattcctatccatcaaggctgatgcggtgtataagtagagaactccgtgatgttggtagttgaaggcaaccaactgattgttgatgtccctcctattctgtgatctccggaatatttgttgatcattgggtgttaattcatgatgatgccttggggattgtttccccttgtccggcaaaccc

SEQ ID NO: 19102 - DNA, 1488 bp, Zea mays
  Clone ID: LIB3136-040-G2_FLI
acgagaacatcgttgtcttcatgtacgatgacatcgcgcatagcccggaaaatccgaggcctggtgtcatcataaatcatccccagggtggcgacgtctatgctggggtgccaaaggattacactgggcgagaggtcaacgtcgacaatttcttcgctgttctgcttggcaacaaaactgctctcaggggtgggagcggcaaggttgtggacagtggccccaatgatcatatatttgttttctacagtgaccatgggggtcctggtgtccttggaatgcctacgtatccatatctctatggtgatgacctcgtagatgtcctgaagaagaagcatgctgccgggacctacaaaagcctggtcttttaccttgaagcatgcgaatctgggagcatctttgagggcctcctgccgaatgacatcaatgtgtatgcgaccaccgcgtcaaatgcagaggagagtagctgggggacgtactgccctggcgagttcccgagccctccaccggagtatgacacttgcttgggagacctgtatagtgttgcttggatggaagacagtgatttccacaatctgcgaactgaatctctcaagcagcaatacaacttggtcaaggataggacagcggttcaggatacattcagctatggctcccatgtgatgcaatatggttcattggagttgaatgttaagcatctgttttcgtacattggcacaaaccctgctaacgatgacaacacgttcatagaagacaactcgttgccatcattctcaaaggctgttaatcagcgcgacgctgaccttgtctacttctggcagaagtaccggaaattggcagacagctcacctgagaaaaatgaagctcggagggagttgcttgaagtgatggcccacaggtctcatgttgacagcagcgttgagctcattggaagccttctctttggctctgaggacggtccaagggttctgaaagccgtccgtgcagctggtgagcctctggtcgatgattggagctgtctcaagtccacggttcgtacttttgaggcgcaatgtgggtcgttggcgcagtatgggatgaagcacatgcggtccttcgcaaacatctgcaacgctggcatccttcctgaagcagtgtcgaaggtcgctgctcaggcttgcaccagcattccttccaacccctggagttctatccacaagggttttagcgcctaagaatcataaggtgaggcgaaatatttcagccgctccaccgcaacgaactggtttacattaccagtcctcaggggggtcctagttcttgaaccataggtgaagcagacttataccactattatagctgttccaccgtcgttccagattacatagctatgcccaatttccggtgtacatatatagtcggaaagttatttggcaattgtattggtcgttgctgtatatattccctatagtttgttagcagatgtgtagtttgtaattccataaaaatgaa

SEQ ID NO: 19103 - DNA, 914 bp, Zea mays
  Clone ID: LIB3136-043-A12_FLI
tcttgtatagtgtttcctgatcaacctgaaaaacgtagggcatcagagttgttcaagacagctatagacacgattgagggtgtaaccatcagctccctggatgatttacccactgaccctgtcaacagcttcttcaaatcaataagaaacaccctggattttgacttctcagatgacaatgaaggtagatggaaatctgatgaaccaccatcgttatatatcttcatcaacagcagcacgcgtgaccttgcttctatagagaagtatgtggaaaagtttgccacatctgttccagcccttctattcaatctcgaactagatacattgcgttctgacctggggcttctggggttccccccaaaagatctgcactaccggttcctttctcaattcaccccagtattttatatcagacagcgtgactattccaaaacaatcgcagttgctccatacatagtgaattatagtggagctgtattccgccaatacccagccccctggcaggtcatgctgaagcaggctgatggttcctatgcatgtgtcgctgagagcgaagctcggttcactttgggacaggcgaaagaagaactattgagagttattggtttacaagaagaagagggaagctcccttgaatttctcagaagaggatacaagaatgctacctggtgggaagagaacgttgatcaggagacgtcgtctgcctggcgaacttgagatgctatacttgctggatggatgcttttctaacctggaactgggaatggataatttggccaacgagtgtccatgtcttgttgtatggaactaaaaaatctgaaattacaaagagagaagtccatgtacagcgtaatagcattgactgtgatgatcgtattattattattattattattattattattattattatt

SEQ ID NO: 19104 - DNA, 1301 bp, Zea mays
  Clone ID: LIB3136-043-D10_FLI
ttggctccaagaccgtcatccagattaggagtcatgcacaaaagtactttttgaaggttcagaaaaatggaaccagtgaacatgtcccacctccacgaccaaagcgaaaagctgcccatccatatcctcagaaagcttccaagaatgaaccaaactatggcctcaagacagattcatcttccatacataggaactctggcatgaatgtgtctgtttcttcatggcctcataggtctatcccgcaagctgttgcttcgtcgatggtgaaagatttaggtgctggaacaccaggtccaaacaatttttgctcaagcagtactgaaggccctccaagaacttggcaacctggtgaaacaaatggtccaataaatcaaattccgtcactccgccttatgccggattttgcgggagtgtacagcttcttaggtagtgttttcgatccaagcacaagtgatcatctgcagaaactgaaggagatgaatccaattgatgttgagacggcgctgttgttgatgaggaatctctccatcaatttgaccagtcctgattttgaagatcaaaggaaattgttgtctttatatagcgcttctgatggacctgagctagggagctccaggagttcagctctagcaactagtgcacctttcatgtaaggattaagggtggatagtgtggccaggtctgtccgcatataatttcagttggacagacctcaggatggtgccctggcgtagcaccgatgagtgacgaaggaggcgccttgaccttttcgcttctcgctagcttcaggactgctgattgtgtaagggtgcggccatgaaaggtgagattggtctgcggtcatgaaaggtgagattggtctgcggcctgatgtgtatataaaatttttgccacgaaggaggcgcctgcacctattctatcccaaaagctcggccatctagggcattggatgctgcttcagttcagataatcaaggctgtccttggaaatgggacgagaggaaagatcccttccccattcgttgagttcagttctctgattggttcttgctgccctcttgatacggggacctgtgcgccatgtggccgtctcgctgtttatgtgggcaagtttcacttgaggagttgagagggcttgaggcgatcgtggttttgtagagcaacgagtgcaccttccgaatattccttgttcctgtgtgaatcgtctatattgcatcaggcgtcgttgccattgtgtaaaagggaaataaaatcacaatgtaaaggatacactaccatttgaattgtattcagtatcgaagc

SEQ ID NO: 19105 - DNA, 1771 bp, Zea mays
  Clone ID: LIB3136-044-A1_FLI
atgttaggagatctcccagtatacgcacattctggagaaaaccaccaaggctgcccccacgcctccctccaaatgaaatctacaaaaataattctctgcttcagcagtctccatctgagtggacatcgaggcagaagaaagttaaagaagcatttgaacatgcatggtctggttatcaaaagtatgcaatgggttacgatgagcttatgcctctgagccacagaggcacagatgggttaggtggtctaggagctactattgtggattctttggatactgcgataataatgggtgctgatgatgttgtttctgaagcatcaaaatggattgaagacaacctaatgaaaagaattagtgagaaagggcaggttaacttatttgagactaccatccgtgtcttgggagggcttcttagtgcataccatttgagcggtggtgatcatccaggggcaggtgactccggagtaactgtaacatataaaaaggctaatccagagcgacttttggaagtttcaaaggatttagccgacaggttattattggcttttacatcaagcccaacagctatacctttaagtgatgttattcttcgtgaccatactgcacatgcagcgcctgatggcttaagcagcacttcagaggcttcaacgttgcaactagagttcagttacctcagtaaagtattaggggatcctaagtacgacagggcggcaatgaaggtgttagagcatatacatacactcccaaaggtggagggtctggtgcctatttacatcaacccctcctctggtcaatttagtggtgagaatattcgattaggatctcgaggggacagttattatgagtatctgctaaaagtgtgggttcagcaggaggaatatcgtcacagtagtttaaagtatctatttgaaatgtatactgaggcaatgagaggggtcaagcatcttcttgttcggaaaactgttccaaatgggttggtatttgttggggagcttccatttggacgaaatggtgggtttagtcctaaaatggatcacctggtatgcagttgtcgctgagcatctgttttcttgcactcagattcttagtctcttctttatctggccaagattttgtgacctttcttgtgctgtggtagcactgaatttcttcatattgcagcttgctgaagatcttgccaaaacatgtgttgagatgtacttcgtgacctctaccggccttgctcctgaaatagcttatttccacattgagggtgatacagaagggggggctgatggtgggaataaaagctccaaatatatcaatgatatcgtaataaaaccacttgaccgtcacaatcttctacgcccagagactgtggaatcactatttgttttgtatagaatcacagaggattccaagtatagggagtggggttggcagatctttcaggcttttgagaagtacacaaaagttgattctggtggttacacatcattggatgatgtcacaagcctacctccttccacgagagataaaatggaaactttctttcttggagaaacattgaagtatttgtatttactgtttgatgaaaacaataccctccccctagataagtatgtgttcaatacagaggcccatcctcttccagttatgcggtctgcagaacaggcttcacattctgtgtagtttcccaagtttatagctgttgtactatggtgagaagtacaaatctgtgacaaatatacttgacaacatagttgagaggaatgagaaattgagaatccct

SEQ ID NO: 19106 - DNA, 347 bp, Zea mays
  Clone ID: LIB3136-044-A4_FLI
gcttccaccatcgaccatccatcacctcacctccaagctccaaggaatctaccctcgttcttctcacaaagcgctgcagcggacagcagcgcagcacgagagagccgagcgcgaggtgcaggaccgcaaaacagaggcgaagcgaaggacctaacctacgtagcaacgctccgctccgcggcgatgggccacgaggggtcgtgccgctgcgagctctgcggcgcgcccgcggccgtgcactgcgcggcggacgaggctttcctctgcgccgcctgcgacgccaaggtgcacggcgccaacttcctcgcgtcgcggcaccgccgcacgcgcctccgcctcgcggccgc

SEQ ID NO: 19107 - DNA, 519 bp, Zea mays
  Clone ID: LIB3136-044-C11_FLI
tgaagttatcattccttgcaattatataggctttgtctgtggaaacaatggcagtgaaattgaagaaatagagaagatgtcaggtgcttcaattacagttcatgatcctaaagctggcgacgcaaactcaaaagttgttatatgcggggatcccgaagaaacaaagaaggcacagagcctgattcatgccttcatattctgtggtctgtatcaaacataattgatgacttgatcactgtgcagtaccatcgtcgtttatgttcttgaatctagagtagttcccatgggcagatttcagcccttgattggatgtacatgtaccgtcgctaccggggtggatgtaggtagggctgatgcatgccttgtacaaacaacgccgatgtacatttctgtagtcctgtgttttagtttgggggaatggcaccatggaatgtgatgggttggctgcacggacctctgtggaatgtttaaccccatgccatcattggttttcatgatttcatctcttgtttgggaggc

SEQ ID NO: 19108 - DNA, 845 bp, Zea mays
  Clone ID: LIB3136-044-H10_FLI
ctcttcctctcctttgctccgagctctgtcatcccggtctgcttcctgcgacccgccgttgcagatcgacgggatcgtggcggcggagaaagccaccaggagctgcgtcgaatgccgcgccaccaccacgcccatgtggcgcagcggcccgaccgggcccaggtcactttgcaacgcctgtgggatccggtaccgaaaaaagaggaggcaagagcttggcctagaccgcaagctgcagcaacaacaaaataatggcgaggcgaagacggaggaagcaaaagacagctctagcaacagtagcagcgggagcagcaacttgcaggtggtgcagaaacggaggctgctaatgggagtggaggaggctgctctgctgctgatgaccctatcttcttcgcccacatccacgttgcttcatggataaggaccctccaacgccagatcagcagtgtacatacaacgtaccccctgcacagtgactgccgaacgattgcaggcctatctcagggttgtgtgatcttgtgattggggcggattattagtgccaagctaatcactccgttgatcgtcttgtcctcctctgttttcgccgcacccgtagatcttgatgccagccagccatatatcttctacgtgatttgtggtaggctccattatcagagggctgttgatcccattcgccccgcacattttttttttctcttgtctttttttctctttttggttttttgtatgtactttgatgttaccccttttgtgagggatgggtgatcaaaaaggagacgccatcccttctcgttctggaataatggtccaaataataaaggatttgagttgttttgttttga

SEQ ID NO: 19109 - DNA, 595 bp, Zea mays
  Clone ID: LIB3136-045-G11_FLI
ctagtccatgacggatgctctggagaaccaagtgaagagcaaggttactgtcaagggtcacctgcacacctacaggttctgtgacaatgtgtggaccttcatcttgacagacgcaagcttcaagaacgaggaggccacggagcaggtgggcaaggtgaagattgtggcatgtgattccaaattgctcggacaataggcctgtgtaccctcgaggtcaaggaaggaagcttttaagtgcggcggggcggggtctgtctgcgcgtcagctgtacacgcctaggctaccgcccgaggcggggtctgtctgcgtcagctgtacaagcctaggctaccgcccgaacggcatttcatttgccttcttcgtactgtatgtgtatcttcttttttccccttgtatacaatctgctgcagctataccggccagagtatggcatggtatggcggcaggcagccgcaaacttgtttttacctacttggtgtagcgcctgtgtaacagttttcgatcgctcttgcttgttgtgttgtcgatgctaataccgcagtgtaattgacgaaatgactaaaatgaagagtagtgtactagatgtccaactat

SEQ ID NO: 19110 - DNA, 387 bp, Zea mays
  Clone ID: LIB3136-045-G6_FLI
atgaaagccatgttgatagtgaaactgtgaaaacatgatcaactatcatggagggggttttgttagctaagagacgtttcagacgactaaagaagaaatatgggatgccatccgctttggtgcctactagctccttgatgacttcatgaaatatagctacgaaggaaatagttttacatctcgctgttctaggcagcagaagttttgtttgcaaaactgtacatcttcctcagctctctcattgtaaccccttttctttctggtttctttcatttatttaccagcttggaattcagattatttatactagttgtgtatagttagcacaggttctttgcatgtgaacagtaatcatatggacaatataagattgttcttgttataagc

SEQ ID NO: 19111 - DNA, 737 bp, Zea mays
  Clone ID: LIB3136-047-H2_FLI
ctaccggcgccgccgcgccaccgaccgcagctgcttctccgcagctggctgccacgttgcctccggtttcctccccgccactggccgctacgccacctgtctctgctacccctccagccacgctacctcccgtcgcatcgcctaccgtcgccgtcgctgcgccagccccggcgactccggctccagtcgcctccccgcccgtagcaatgccaccggcggcgcttgccccggccacgctccctccagcgatggctccgacaccacttctcgctgcccccgtcatgcctcccatcgcgccacctgtcacggctcccgcaccggctcccgtttctccggctccaagtccaagcgtcgccccgaccccgtctccgacagaagctcccaccccgtcgcccacagaggccccgaccccgtctcccacgcaggcgcctacactcgcgccgttgagctcggtgtcggtgagcccgtcgctggcgccggggcccgcgctcgctcaggaggacgagtcggcggcgccgagctcgcgcactggcgtcgtcgcggccctggtggccgccgggctcgtcatcgtcttgttttaagaagtagagctgtggcgtttattaccgctatacgtccgtaccgttcctcgcacgggtctcttgttctcctgttggttggtgttctcatggattgatgcacgcacgaaccattcttgctgtacaacacattgataattaattttccatttattatgt

SEQ ID NO: 19112 - DNA, 1014 bp, Zea mays
  Clone ID: LIB3136-048-F4_FLI
gcctgtagcttcatccgttgcgctgcgcccggttccctcgcgcagtgcggaatttaacatggccgtgccggaggtggtggtcgacggcgtcgtcttcccgccggtggcccgcccgccgggctccgccggctcgcacttccttggcggcgcaggcgtgcgaggcctcgagatcggaggcaacttcatcaagttcacggccatcggcgtgtacctggaggacgcggccgtgcccgcgctggccaagaagtggggcggcaagacggccgacgagctcgcctccgacgccgccttcttccgcgacgtcgtcacgggcgacttcgagaagttcacgagggtgacgatgatcctcccgctgacgggcgagcagtacgcggagaaagtgacggagaactgcgtggcgttctggaaggccgccggcctgtacacggacgccgagggcgtcgccgtagagaagttcagggaggtgttcaagccagagactttcgcgccgggcgcctccatcctcttcacgcactcgcccgccggagtcctcaccgtcgccttctccaaggactcgtcggtgccggtggccggcggcgtggcgatcgagaacaagcgcctctgcgaggccgtgctggagtccatcatcggggagcgcggcgtgtcgccggccgcgaagctgagcctcgccgcgagggtgtcggagctcctcgccaaggagaccgccgcgcccgccgacgcgccgcaggcggagcccgtctccatcaccgcctgaggcgaggagcgggcgggcgagcgaacgaaccgcgaggagaaagaaagcaaccagacggttgggcggcacggcgtctcacacctgccgcctgcgcttgcgtgctccggaccggagagatgccgcgcgggtgcagtgcagccgtcgcgtcatgtctgtccgcgctctggcgtcgtgttcctgcctttctggtcgcgtagttgtcttgtgttcgctgttggtcgttctgggtaacatttgaataaaacaagcggatttgttgc

SEQ ID NO: 19113 - DNA, 491 bp, Zea mays
  Clone ID: LIB3136-049-A5_FLI
ggcaggaaaagagggcgaatcagcaactgcttcaaggccaggggggcgatgtttctcaagagaaagacaaggatgcgactaatggcaaaccagggtcacagaaacaggcaacgagcaaggaaggcactcctgctgaggtggcggcggatgcctccaaaccagtagctgaaagtggaatatcaaatgacaactaagcatcatgcatactggtcggcaccataccggtgcaaatgctgcaggttttgcggtatctgcaaatcaaaacctattgattctgcctgaattctggacttctttcggtactggagttcgtgagatggggctcatgggagtgaatcagattttacttattgtcgctttgctagttgtgtgactggtttttggtgtcttggaacccgtgttaggcttcttacatacccttgtgacgacaccgagtttgttgtaacccttgctttttttgcctttttgttttagttctatcattgttaacg

SEQ ID NO: 19114 - DNA, 796 bp, Zea mays
  Clone ID: LIB3136-049-B2_FLI
cctggcgtccatcgcggtggccggtctggccgtcgaccgctacggccgccgctccctcctcatgctgggaagcgccgttctgatcctctcccaggtggccatggcgtggatctttggcgcgcagctgggcaccgatggcggcaagtccatgccgcgtgggtacgcggtcgcggtggtggcgctggtgtgcgtgtacactgccgggttcggcgtgtcgtggggcccgatcaagtgggtggtcacgaccgagatcttcccgctggaggtgaggccggcggcgctgggcctaggtggcgccatatcgggggtgctcatcttcgtgcagtcacagtcgttcctggagatgctgtgcagcttcaagtacggcaccttcttgttctacgccgggtgggtggttgttatggcggcggccgtggccgcgttcctgccggagacccggggcgtgcctatcgagtccatgggcgtggtgtgggagaagcactggtactggaagcgcttcgtcaagctcaggccgtcttccgcgcccaccacagcgatggcaccagcaaaacaggcggatgggcccgtatgagttgggaattacggcggttcacggcgaaatgaaaacattaagggtctgttcggttgtaccggaacgagccaggattcattctagctcgtcaaaatctatataaattagagaagtaatccggctaggaattaatccggggctccaatccggaacaaccgaacagggcctaagacagatgtgttctgttgagtagataattgtgagcacatgcataattttaacttt

SEQ ID NO: 19115 - DNA, 1235 bp, Zea mays
  Clone ID: LIB3136-049-C11_FLI
ccgaagtgaaaagtcgatcgggattgggccgttgggggtgcgatacccctcgcctcgaatgcgagctccgtaggtccgcccccccggcggatggccgagctgggccgccgccgccgcccgctgggatgaggcagcgtgaggagtcgcgctcgcggcttccctgcccccaggcctccgctctgaatatccccgacgcgacggtaaccgaacaagcctcagttagaaaggctaagatcagagcatctccgtgtctccacaacacatcctggattcgcaattattgaggtgcctccactataaaaggccaaccatcctcaaggaatgaacacagccagccagcaagcaagcagagaacaaggataacacagcaactgaaaaccttattaccaagaacaaacaactacaagaggctttgcaagttcacagaggcagctgttcactgcgaatgaacaaccagaggaagcctggagactggaactgcaagaactgccagcatctcaacttcagccgccgtgactactgccagcgttgccgtgatccacgccctgacttgcagttcggcgacggctatagcacggttggtgtgctgacctccctggacatccgcccaggtgactggtactgcagctgcggctaccacaacttcgccagccgcagcagctgcttcaagtgcggcacgatcgtcagagacttcccagcggggcaaggcgcagccggtgctgagggtgactttgctggtggacgcgacagcgccgcagtccgtgctgggtggaaagctggcgactggatctgcacgaggcctggttgcaacgtacacaactttgcgagcaggatggagtgctataggtgcaatgcaccaagggaggcagcaggcaccgggaggtaagaggcgactggggtgataccaagagcgtgagatgtgacgagctggccgagcagtggaacctactgccgtcacacactcaccatcaggcatccaggaaggatgagtctactacgtacacgactatattgctgattgccgcgcgtagtgccgctgctgtggtttgcgtgggtggagaagtacccaagcgcaacacctgttacgtgtgttgtttgctcctttttgaggttgtgttgattcagtgacagctgagttgtacggcctgatgatgtactcgcattgtgtatttgtcttaaacagcatatataattatgtaataataagtgcttgcttatctatgctctgctgatgc

SEQ ID NO: 19116 - DNA, 700 bp, Zea mays
  Clone ID: LIB3136-049-D4_FLI
attcaacgcatcacctccttcctcgctcctgtggtacccggaggcggaggcgccttgtgacgtcttgtcccgaccgagaacgtgggacggttccgcgcgggctcgcgcggctctctggccaccggaccatagaggatctctccaaggtcacttcctcgctcatgttacctaagggcgaccaagtctaggcggaggaggcagcaggtcgagggtcaccgaagaggtgatgaatggtgtgcgcccccgtctggaacaacttcgtgctccgtacacagaggacaatgtgctgtgggtggtgttgtcggccatgtacaacatgaggtgtgtgggcatagggttgtccgagaacgacctcattgtgggagtcgactgcgtggtgtaggaggcagtggtcctaggagacttcccaagaattcgccacccaccttcacacaagaaattccagcttttcacatttgatacaagaccgcaagagacacgcaacccccgaatcctctgcatccagcacctcatcaaccatcccggaatcataaaagcatatggaggaactatgtataggctacaaagaagcataagaagcatttttatagcagaagccaagtgttctgatgattttgttttttcaattgtgttttctgttattggttcagcatgcacatatattgacatgatttatggcatggcatctgccatctttgtt

SEQ ID NO: 19117 - DNA, 1121 bp, Zea mays
  Clone ID: LIB3136-049-D5_FLI
cggtgaggccggctgtggaggagcctttgccggcgaaaaatcaccgtcgtcgacggcatcgtcgtcgcaggaggctgagagccggcgcaaggtgtccaagaagcactcccaagggaagaagaaagcaaaggtggattggacgccggagcttcaccggagattcgttcaggcggtggaggagctgggcatcgacaaggcggtgccgtccaggatcctcgagatcatggggatcgactccctcacgcggcataacatagccagccatctgcagaagtaccgttcccacaggaagcacatgcttgcgagggaggtggaggcagcgacatggacgacgcaccggcggccgatgtacgctgcccccagcggcgccgtgaagaggcccgactctaacgcgtggaccgtgccgaccatcggtttccctccgccggcggggaccactcctcgtccggtgcagcacttcgggaggccgctgcacgtctggggccatccgagtccgacgccagcggtggagtcaccccgggtgccaatgtggcctcggcatctcgccccccgcgccccgccgccgccgccgtgggctccgccaccgccagctgacccggcgttctggcaccatgcttacatgagggggcctgctgcccatatgccagaccaggtggcggtgactccatgcgtggcagtgccaatggcagcagcgcgtttccctgctccacacgtgaggggttctttgccatggccacctccgatgtacagacctctcgttcctccagcactcgcaggcaagagccagcaagacgcgctgtttcagctacagatacagccatcaagcgagagcatagatgcagcaataggtgatgttttaacgaagccgtggctgccgctgcccctcggactgaagcccccttcggtagacagtgtcatgggcgagctgcagaggcaaggcgtagcgaatgtgccgcaagcttgtggatgatccccggggctgcatagctgctagctcgtccctgcacgcagtgcaacaaaagaaatttgtcgacatgccttttatgttttgaattcccgtgaaccgtttatggagcactcacagctcgttcagggtcagatgaacagaacattataggagt

SEQ ID NO: 19118 - DNA, 1819 bp, Zea mays
  Clone ID: LIB3136-050-D12_FLI
agagggggagagaaaggttaaggaatccgagctaaggcgccgtttcttctcctcctgcttttttcttctcggcaccgtcactggagggagaggattcacgggacgaggcgacgcggaagggatttcgtcgcttgtgtgggcggcgcgtccgctggttgctttgcttccatggagagggatttcctgggtgcgatcgacagggcgtggaagtgcggcgaggcggcgaaggaggagagccgatcggagccagacagcccggcggcgacgcggtggcagtttgcggcgaggtccggcgtcgcgccggcgttcatgtcgttcaggacggaggcgacgggcgagggctctgaggcgttctcggtctccgagctccggccggccggagacgccttcgacggcatcaagaagcagagctccatgctttcgatctaccagcagcagaggcagtttggccacaacagcagccaggccacggcacagcagcagtaccctgcagcggcgcacaggcagcgctcgcaggcggcggattacggcgcggcggcaccgcatcgtctccctggtggtggtggtggtggatgcaggctagtgcagccggtgtcggtgcgccaccctgtgccgttccatcaggccaacctgatggtcaggtcatcagtgtcgcagagcttccacaaccagcagcagcctttcaccatgagcaacaacgggtttggcggctctacggccggcgtgtacggggcgaggaacccacggaaccaggcctcgacgcagctcacgatattctacaacggctcggtgaatgttttcgacaacgtcccggtcgacaaggctaaagagctcatgatgctggccagcagggcgtctgttcctggtgctaccccgtcaagtgagccggactcgccgcctgttcctgcccctgcccctgccaaggtcaacgtggccgaggtcttccctggtgctagacagatcgcagttcagaaaccggagccctgcgtgccgcatctatcaagcgcggcaactgcaagcccagtccgcatcgtcgtgccgcaagccgtggctccctccaggagcacgtctcactgcgctacagaggcctgcggttccaagcctgctgctgctcctaccagccagacagtctcgtcgtcccggcagttggcagctgcaagtgctgctgcagctgttacgccaagagctgtccctcaagctcggaaagcgtcgctcgcccggttcttggagaagcgaaaggaaagagtggctagcgtcgagccatacctgacgtccaactccaagagcccgctagagagcagtgacgccgtcggcagcgctagcgctccaacgaaatcgtcatccacagacgtcgccccggcgagcagccacaacggcggcggcgcagagcttgtgcgccatggcggatatcccaggagcatcagcttcagcacaaatttgcagatctgactctggtgttgctgtccatagactaccactaccactacgactccgtgtccgtgagcgcgcccctccctacccatcgacacgaaagctggatagctgtcttgctttgcatccggatgaggcgggaggtataggaagatacgatgagatgagagtataaagatgctgagtgctagcctagccgcccgctgtatagcttttgcagcgcgctgctgacaagatcgagggccgtgacctactcgtttcaggctcttcttgaatggtttttttgtcgtggtccattgttgtatattattcaacttgagaaacagagagtgctgctctgtctctgataaaagtttatatgaaattgataaaaagtttctgctttttc

SEQ ID NO: 19119 - DNA, 617 bp, Zea mays
  Clone ID: LIB3136-051-H1_FLI
atgaccccagacgggatcttgaaggtgattgacagaaaaaagaacatatttaagctgtcacaaggggagtatgttgcggttgagtacctggagaaagtgtatggcttccctccactcgttgaagatatctgggtatacggggacagtttcagatcaagtttagttgcagtagtcaatccacaccaagaaaacacaatgaagtgggcagagtccaatggctacaagggttcttttgatgaaatctgcaaacttgaaggactcaaagagtacatcctgaaagagctggcagccgttgcgcagaagaacaagctacgaggcttcgagtacatcaaaggcgtagtgttggatcctgtgccttttgacatcgagagggatttggtgactgcaacaatgaagaagaagagaaagaatatgctgaactattaccagtctgagattgacacaatatacaaaaagctggaggcgcagaagaatgctgccagaactaagtgaagagatgtgccctattcgatcatcagctgaaaacaagggaaacgacaccgttgtaaatttcacattaatattgcgaagtaacaactcagggctatgagtaaggaataaaatgtatattgtgcctt

SEQ ID NO: 19120 - DNA, 542 bp, Zea mays
  Clone ID: LIB3136-052-A8_FLI
cttcacgactggaagaatggcctgatcgactactgtcccgccattctgtagagggaagcatagattgaacaagcagccagaattaaacagcatgatgctcgtttccctgcatcattgttacctgtctcctggcataatactatgtgaaaatgaacatgatttgtttttgagtcttttgaaattaaatatccttttgtaaggactcgatttggttggaaacaattttcacctatgaactgagatttggaagcccagctcttgtgatcatgcggctgctgagaaaactagagtaggtcgagaaggattgattatagattgtttagaaggtattgccgtctaaggaacgaagagtttggccagaagcaacatgctctgagacagctataaacatctggattgtaatgactactattcttccagacttcatagacattttcataggaattactctttccattccagaaaacaggacgtataaatttttcacgaatattagtgcaggtatcgatgctcagtgataaaataatgtataagttttgtgc

SEQ ID NO: 19121 - DNA, 1286 bp, Zea mays
  Clone ID: LIB3136-052-C9_FLI
ggaggtcgggatggggcgtctgggtacggcgatgctggcggagaggatgtgaggggggcgggcggcgactcatcggggtgagcgatctgggccctaggatttctgaacattaatgatgtaggtcaaaaggagatatattatttttgctttctgcaggaagatttttgtcggaggcgttgcttgggagacaactgaagaatcattctccaagcattttgagaagtatggggcaataactgattctgtaattatgaaggacaagcatactaagatgcctcgtggatttggattcgttacattttctgatccatctgttatagacaaggttttggaggatgaacacgttatagatggcagaacggtggaagtcaagataacagttccgagggaagagatgaataccaaagatggccctaagacaagaaagatcttcatcggtgggctacctccatctcttactgaaggttgaaataaagaaggctgaaccaaagaaacatggatctgatcacatcggtaatgggagatcaagccaagggggtggaggttaccgcagtacttaccgtggtggtggtggagctggtagtggcagcagcggcagcggtgggggtggttatgggtttggtgatgcttatcgatctgctgcagcgagttatggatatgatggtggcgcaggagcaggatatggctatggtagaggttatggctatggaggcaatgctggctttgcgtctggttttggtggtgggtatggtggatccatgtatggaggcgcatatggtgcatatggggcatacggtggtggtgcatatggagggggtgcctatggaggtggtgcatatggaggcagcgcctatggtggcgccccaggtggtggttatggcactggcggatacggcagttacggtggagcaggtggtactggtggtgggagtacaggtgctcggggttcgagcaggtaccatccatatggaaaataagctacaagttcaatcaagttttctgggtctcgggagtttctctggtcctcctagttcagttttcatgccatgtccacctaaacaggggcattggagcatagttgggttgaacacgtcaccactggaacaactgtgtaattgcagctgctgagcctttgcttgctgtacaagctacacatgaaacctgtgttgtattctttagttcggtatgcagagtttagaaccctgagaaacaagcattttatggtagggacagtatttggtccggtagaactatattctgtgctgtaacttgccgttgcaagtttt

SEQ ID NO: 19122 - DNA, 1137 bp, Zea mays
  Clone ID: LIB3136-052-G5_FLI
aaaatcaactgttctggggccaaaaggaacttcaggttcaattaagtggatccttctgaaaaaagaaaagtaatactctgtatttctagcatccttggtgtgctaatttatctgtttttttttcctttcagatattgttgttacttctggctttgatcgctgttccatggatgctcttcccaaaaccttttatcttgaagaaacttcataaggagagatttcaaggtcacacttatcgtttcctagggacatctgaaatggatccagattctgaacctgattccgcccgagcacgtcatgatgatttccatttcagcgaagtttttgtgcatcaaatgatacattccattgagtttgtacttggtgcagtttcaaatactgcatcttatcttcgactttgggctctgagcttggcgcattcagagctgtcaacagttttctatgagaagttgctgttacttgcctgggggtatgacagtcttatcgtgaagtttgtggggcttatagttttttcttttgctactgccttcatattgctcatgatggaaacactgagtgccttcctgcatgcactgcgtctgcactgggttgagttcatgaacaagttctatcatggggatggttacaagttcaagccattttcatttgctctgctagcagatgacgaagattgatgcatgtgtagttcagcacgtaaacagattggttcatttcttacaaagttttggagcacaggtgtcaaatttcgtgggcaagatgggcttttcctgatacacagcattttgtcagaccgctagactttttcctagcgcatgagtgcagttgtcgttgagattgccagccttgtggaaggagattttgtaagtttacagcaatattgtagagggcaagttcatcgtacagttcctccaacggagatgcagattatagttgctaacaaaaaaaaggatagaaatgtagacttgtccgcgtacttttgacttcaaatttatcagcatgactgccccttaccacttatgaatgaaaaatatgtatttggccattcattcaaccgtcgctggaagaaagacatgcaagctattgtactgtattgttttacaaatcaaataaatagctctaatcgtgctaattcttttc

SEQ ID NO: 19123 - DNA, 1402 bp, Zea mays
  Clone ID: LIB3136-052-G6_FLI
cagaaattgcgcagtgtaagttcgtatgtgggtgtgttattaacttactattattatactttcatttttatgtgtttcagtttatgactattaatgctcttctgtgatagatacttggaagtggtatgtccaacaaaatgtgggatgcccttgtggaacatgcaaagacttgtgtcttaagtgggaaatattacatatactattctgatgagagcagaagtattggtgctattttcaacaacatctatgcattctgtgggttgatttctggcgaacagttctattcatccgagagtcttgatgatagccaaaagctgtttgctgatgcattggtaaagaaagcatatgataactggatgtatgtcattgaatatgatggcaaaggtctattgaaccttaaaccaaagaaaaaggctgcatccactggtcaagctgagacgcatgcttctgcgggtggttcgacttcgtatcaacaacacctctcctcaacgagcatgccagggtcatcaccatcaggtggaactgattccgtagggtatggtgtcgaccaatcagcaacacatctatctcaactccagagttcatccaccaatctccagacgccatacgatgacacattttcgttcctaccacctaacctgctgacagggtctgcaaacgatgccatgggtctggaactgggccagttgcaccaagtaatttctcagggccagccaattcagccagcaaacgtgggatacgttgactggcccaggaaccgcgacagccagtacgccgacgacttcacagaggacattcgcgtgaagagccaccagatgctcgagagcgaggacatgcagcagctgctgagggtcttcagcatgggtggagcctccgggagtttgtcagacgacacgttcaacttccagccctacatgccctctcccttgcccaaccccgggttcgaaagcgagcgcagccattcatccggcaaagctgtcgtcggctggctcaagatcaaggcggcaatgaggtgggggatcttcgtcaggaagaaagctgccgagagacgggcgcagctcgtcgagctggaggattagcgtcgtcgtggctttacaacggtcaaggctgcgttgtaaattactagtagtcatctgtgcccccacataccctcttgataccccattgaaacaggtttctgaaactgttctgaaatgtacaacgagtagttctgctatcttgtacagattacagaattctccttgcttgcttgtgttagtggtgtaacatagctctgctaagtttgacacatgactggaccagcttgtgtatctttattttttcccttccctagctcttcagtgcagaatataccgttacagtgcgaattaatccagagattgtgtgtgtgtgttgctttttc

SEQ ID NO: 19124 - DNA, 954 bp, Zea mays
  Clone ID: LIB3136-054-A10_FLI
cacacgtttgtcccagtcactcggaagggatactggcagttcaacatgggtgatgtcctggttgatggaaagtccactgggttttgtgctggtggctgtgcagccatcgcagattctggaacttccttgcttgctggccccacagccataattactgaaatcaatgaaaaaattggtgctgctggtgtagtcagccaggagtgcaagactgttgtttctcaatatggacagcagatcctagatcttttgctagctgagacacaaccagcgaagatctgttctcaggttggtctgtgcacttttgatggcactcatggtgtcagcgctggaattcggagcgtagtggatgatgaagctgggaaatcaaatggtggtctcaagagtgatccaatgtgcaatgcctgtgagatggctgtggtatggatgcagaaccaacttgcccagaacaagacacaggagctcatcctgaactacattaatcagctttgcgagcgtcttccgagtccaatgggagaatcagccgtggactgtggcagtcttgcgtccatgcctgacattgcgttcaccattggaggcaataagttcaagctgaaaccagagcagtacattctgaaggttggtgaaggacaggctgcccagtgcatcagcggattcacagctatggatatcccaccaccccgtggccctctctggatcttgggtgatgttttcatgggagtctaccacaccgtcttcgactatggcaagctgagggttggcttcgcagagtcggcctagggatatggtttggcagcaacccgtccagaggcaaacgcgtaatttgtgtgtttatgcggccggcgatgtgtgtatatatgctactacatgtttagtgatgctttccgagacctgagacaacgcccgtctgttttaacgtggcgcaagaataattctggttctgcatgtattctccgt

SEQ ID NO: 19125 - DNA, 1927 bp, Zea mays
  Clone ID: LIB3136-054-E3_FLI
cgccaggttccggcgccgcacggcgacgtgcagggccagcagcggcggtggcggtggccggggcggcgaaaatgatggcctcctttggctgccccggcgggacgtgatgctcaacggcctgtccagtgtcgccgccgggctcgcctggtacccgggcgtcgcgtccggcgtggatgcggtgtgcaccagggccgacaaggtgaacgagaagaccgtgcagtgcacggacccggccgggcagcttccgtgccctctggtgtcgccgacggaccccgtggacttcaagccggaaagcaaggtgacgcgcatccggcagccggtgcatctcctgagccgggagtaccaggagaagtacaaggaggccgtcgcgaagatgaaggcgctaccggaagagaacccgctgagcttcgcggcccaggcggccatccaccaggcctactgcgacgcctactacaagtatgacccgacggccaaggacgcgccgttcgacgtgcacttctcgtggatcttcgcgccgtggcaccgcatgtacatctacttctacgagcgcgccctcgggcagctcatcggcgacgacaccttcgcgctgccgttctggaactgggatacgccggccggcatggtggtgccgccactcttcaaggactccatgggcaacccgctgtacgaccccaacaggaacccgtcgaacgtcgacgcgctggtggacttagactacctcaacgacaggaatgcggagcccatccctttcaagggcccacgggacgaaaagtacaaggaacttgtgaacaagaacctgtgcaccgtatacacccagcaaatacgtagcggcaagggcgccgagtcgttcctgggcgagaagtactgcaccgacatcgggtcaagcacgagcagcatgggttcgctggagcggatggcgcacactgccgtgcacgtctgggtcggcaaggcgggcccgacgccttcgtcggaggcgtgcagtgccgctaccggcggcttcccgaaccacaccaaaggcgggtacagctgcaacaacgacatggggttcctggggtcggcgggacacgacccgctcttctactcgcaccactccaacgtcgaccgcatgtggcacatctggtcgaccaggctcggcggcgggcagggcatcacggaggcggactggctcgacaccagcttcgtcttctacgacgacgtcaagagcccgcggaaggtgcgcatcaggttccgcgacgtcctggacacgcgcgacctcggctacacgtacgacgccgagtccgacaaggacctgccatggctgcgctgcaagatctcgtcgctggtgccccacggcaaggacagcccgccgaggtcatcgtcggcgaggaaggcggcggcgccggcgttcccgctcgccctgaccaagggccaggtggtggaggtgccggccgtgcctgtgccggccaaggacccggggaaggagcagctgctggtgatcgagggcatcgagtacgacccccaggcgaacaataagttcgacgtcgccatcaacctgcccgcggacaaagcgttgcaggtaggcccacagtacaaggagtacgccggaagcttcgccgtcgtgccgggctccggcgccgggaagacgcggaaagtgaagctctccctgtgcatcaccgaagtgctgttcgatatcgacgctgacggcgataaaaccgtcgacgtcgttatcgtgccgcgcacaaatgctaagatcacgctcaacgctcgccccaccatcaagaatcggaactaggagctagctgctactagtgctcatcaagcacactgtacgtacgtacgtatgtactcgatcgcgtggtcattcatcgaccatcatcgtttatatgctgtcacgcacagtgcgggccggtagggtgtctgcaataataaacccggccagtgttgcatt

SEQ ID NO: 19126 - DNA, 1381 bp, Zea mays
  Clone ID: LIB3136-054-E9_FLI
cccgaggccccgatcccccctttcatttcaactcgcatctcccgcgccgcgccgccccagcccggcagcccccatggacctgccagtggtagatctcacgccgtatctcggggccgcagccggcggcccggccgcgtcgggcgtggaggagctgcgcgcgctgtgcgccacagtgagcgctagtctgcgggacacgggggcgctgctggtgatggacccgcgctgctccgccgcggacaacgaccgcttcctcgacgtcgtcgagcgctacttcgcccgatccgccgacgcaaagcgcctccaggaacggccccacctccactaccaggttggtgtcacacccgaaggggtggaggtgcctcgcagtttggtcgacaagaacatgcaggagaagatcaggagcatgcctaaggactttaggccagccactcctaaagggccggacccgaaatggcgatacatgtggagagtgggtcctcgccctacaaacacccgttttaaggagctgaactcagaacctgttatccctgagggattacctgagtgggaagagatgatggattcctggggttctaaaatgatttctgcaattgaggttgttgctgagatggctgcaataggctttggcctatcgaaggatgcatttacttctttgatgaaagagggaccacatctcctcgcaccaactggaagtgacctgcagcgtcatggttctgagggcaccgtttttgctggattccactatgatcttaatttcttgacgatacatggccgaagtagattcccaggccttaacatctggttaaggaatggtaaaaagatggaggtgaaagtccctgttggttgccttctaattcagtctggaaaacagctggaatggcttactggtggcgattgtttggctggaatgcatgaggtagtggtaactaagaggacactagaggccatagcgctagcgaaagaacagaatagaagcttgtggagggtttcatcaacactgttcgcgcacattgcttcggatgcaattcttaagccgctcggccactttgctgaaacacctgatgctcattcctatccacctatatgcgccggggattatgtcgagcaggagctttcagtgattaacctgaagggaaaggattaagtatagactctatgcagctggtgcatctggatatcttatgaattgacagatatcaggatgcaacactaaatcaccccaactgacaattgggtatccgtttccaaatgctgctgtactgaaggtggttaagttggcccgaagacatgcttgttcattgcttgctcttgttaagatagtggatacccttctttgtgaaccacatatcacttatgaaaataaaatgtatagcttcctcat

SEQ ID NO: 19127 - DNA, 1823 bp, Zea mays
  Clone ID: LIB3136-054-G4_FLI
gcaaatagaatttgaatctctatgctctagttttgatggacatcagaatgtgggcaggcgtatcttgaatgatttctcaagggcgtctgctgatcttgctgctactgctgctgatttgaaagttagacttcagatttacaaggtccgtcttctactgctcactaggaaccttaaggttgcgaagcgagaactcaaagtactaatgaacatggcacgtggtagggattcatctacagagcttctcttgaaatctcagctggagtatgcccgggggaattataggaaggctgtgaagctattgagcacaccaaataatcggactgaaccagcaatgctagccattttccacaacaacatgggatgtatactccaccaacagagatcgtatcacgcctctatatggtgctttagcaaagcgctgaaatacagcttatcatttcgttcagagaaaccaatgaagttgtctacattatcacaagacaagtcttgccttatttcatacaactgtggtatccaacatttgatgtgtgggaagcctttgttagcagcttcttgttttcgtgaagccatgccgctcttctacaagcgaccccttttctggctccgtttttctgagtgcagcctgctagctctagaaaagggtctcctgtgtgcaaatggtgcttcctcattcaacgatgagattgaaatcaatgttgtggggtcaggacaatggaggcagttgattgtcaacccagtgaactcgagaagtaatttagattctgcaggtgtgactttaggcgaacataaaaatttggtttcacttggatttgctagacagtgtctacaaaatgcgctgctattattggatgctactgagaaggaaaattgggtaatcgcatctgatacagaggattgggaccaaggaaccgtacatggatataaaagctcaggccagaagaatactacaagtacagattctaaaacaccttcaggcccaactctagctaatgtaaatggagaacaaaagggcacaagcttgaatgctaccttgcagagttctcttgctttctatgacgagatccgtagaaaagagtacatcaaaatcagacaggctgtcctggcgaacttggcatttgttgaattgtgccttgataatcccttgaaaactttgacgtatgcaaagtcagtactgcaggtgacagactgttccaggatgtatgcgttcctcagccatgtatacgcagccgaagctctatgtactttgaacagaacagaggatgccgccgagaatctatcagtttatataagagatggtaatcatgtcgagttgccttatagtgtggagaattctgaaaaggccttggttgagaaagacagtgatggtgaagacttggttgctcctgcagtgacaaaactcgccacagaagaacctgagcagctcaggccggaggaggcccgtggtgtcctgtatatcaaccttggcatgattgctgcaaggcagggagaagttgaaaaagccaactacatggtgagccgtggcctggcgatgttgcccaacaacccccgggcagtgctagcatcggtttacgtagaccttttgcaagggaagtcccaggaagctgtcgtgaagttgagacggtgtaggaatgtgagatttagacccgctagcatagcagccagcagtcagcagtcgagcttagaaaagcctcccctttcatgatttctgtagtttacaattaccgttataatcttttttggaccctgaccccaatgtggatgatcaaagatggtaatgcttctcctgtgtaacatatataagaaatgaactctaactccccttc

SEQ ID NO: 19128 - DNA, 1204 bp, Zea mays
  Clone ID: LIB3136-055-C12_FLI
gcgcagcggcagccgatggtgtcgatgagctcgacgccgcaccctctggatccgtccgtcccggccgtcgtggggggcggcaaggaggaggaggaggcggtggagtcttgtgccgccgccgcgcccttgccgccggttgggatcgacgacgacgaggagggcccccggagagtgcgcaagccctacaccatcaccaagtcgcgcgagagctggaccgaccccgagcacgacaagttcctcgaggcactgcagctctttgaccgtgactggaaaaagattgaagcatatgttggctccaagacagtaatacagattaggagtcacgcacagaagtactttttgaaggttcaaaagaatggaacaggtgagcatttgcccccacctaggccaaagcgaaaggctgcccatccatatccacacaagtcctcaaaaaaggcccttcaagttgtcttaccacaacaagtttcgcacataatggagcaaggctgtggtacacctatggatgtagctactgttgctacagactctagtgtaaataatgcttttcctgttcaacatttcagtccgaggcatacacaagccatgccagactttgctcgtgtatacaacttcctgggaagcatatttgatccagagacaaatgggcatttgcagaagttgaaggaaatggatcccattgatgctgaaacggtactgttgctgatgaaaaatctgtcaatcaacctaactagtccaaactttgaggagcataggaggttgctctcttcggatgcctcaagcatggatcaaaagtcgggctcttcccgggttcatctcccgttcatgataacgagcaagtgagagaagcagctggctggcctgaaggcaagaaggtcgtttggagtcgtcacactcaggagcaaggcgatgcgtatgtacatatatcttaataagcagctttaggatagcttggtttgctcgaccgacatgttgcaagtttatgcgcctttttctttattctctgcgcccctccagttttgcccattgtagtatggaacttataacatgtgtgttttatgccgcatcttacatttttttgttccatcacaaggatgaacgggtggggcatgtgtgtgtgttttttgccgtgtgtgtatgtatatacagcatgcggctgtatgtgtagatcaggctatatatataacatactgtgtgctgttctatt

SEQ ID NO: 19129 - DNA, 1967 bp, Zea mays
  Clone ID: LIB3136-056-B10_FLI
cccggccgagcgaattgaagaagctccccctctgaactgaagcaatggcagacggcaatgccggtggcgccgctcgagtcctgttctccatcctcggcctggcgctggcgctgccgctgccgctgctcgtggccggcgacgacccgtaccggttcttcacgtggacggtgacctacggcgacatctacccgctgggcgtcaagcagcaggggatcctgatcaacaaccagttcccggggccgcagatcgaggccgtcaccaacgacaacctcatcatcaacgtcttcaacaagctcaacgagccgttcctcctctcctggagcgggctccagcagcggcggaactcgttcgaggacggcgtggccgggacgacgtgcccgatcccgccgggctccaacttcacctacatcatgcaggccaaggaccagatcggcacctactactacttcccctcgctggccttccacaaggccgccggcgggttcggcggcatccgcgtgctcagccgcccgcagatccccgtcccgttcccgccgccggccgccgactacaccgtcctcatcggcgactggtacaaggccaaccacaccgacttgcggtacgtgctcgacagcggcgtggcgctcgggttccctgacgggctgctcatcaacggccggggcttgaatggctacacctttaacgttcagcccggccggacgtaccggttccggattacgaacgtggggctggccacgtccctgaacatccggttccaggggcacaccatgaagctggtggaggtggagggctcgcacaccatgcagaccacctactcgtccctggacgtgcacctgggccagtcctactccgtgctgctcaccgccgaccagccgggctacgactacgccgtcgtcgtctccacgcgcttcacgagccggatcatctccaccacggcggtcctgcgctacgccaactccgccggcagggcgccggggcccctccccggtggccccaccatccagatcgactggtcgctcaaccaggcccgctcgatccggtggaacctgacggccagtgggccgcggcccaacccgcaggggtcgtaccactacggcctggtgccggtgacccggaccatccgcctggccaactcggcggcgaccatcagcgggaagcggcgctacgcggtgaacggcgtgtcgtacgtgggccccgacaccccgctcaaggtcgccgactactacaagatcggcggcgtcttctccgtgggcaccatcgccgacagcccccccgcctacggcggcgccgcctacctgcggacgtcggtcatgggcgccagctacagggactacgtcgaggtcgtgttcgagaacggcgaggacgaggtgcagtcgtggcacatcgacggatacgccttctgggtcgtcgggatggatggagggaaatggtcgtcggcaagcaggcagggctacaacctgagggacggcgtttcgcggtacactgttcaggtgtaccccagatcgtggacggcgatctacatgcccctggacaacgtgggcatgtggaacgtccggtcggagaactgggccaggcagtacctggggcagcagttctacctccgcgtctggacgccgtccacgtcgttgcgcgacgagtaccccatccccaagaacgcgctcctgtgcggccgggcggccgggcgccggaccaggccgctgtgagagtgagactgccgccggatcattcacagcttttgtcatgagaggatgacacggtattggtttggtctttggagaagagcagggacatacacaagtttatataccctcaactgaagggaggttcagaggaacgaaagtgttgcttgccgattttttttcattttagtttttttttcctttaaaatttcatatttacgtctccgctgaactaaaaccgtgttggaatttatgggtcaacactataactcatactcccttcatccc

SEQ ID NO: 19130 - DNA, 2264 bp, Zea mays
  Clone ID: LIB3136-056-C4_FLI
gtaggattggttgctgagcatggctggaccggagaagactgttgtttggttcaggagagacctcaggatcgaggacaacccggccttggcagcggcggcgaaagggggctctgtcctccctatcttcatatggtgcccctcagactacgggcagtactaccctggaaggtgctcccggtggtggctcaagcagtctcttacccaccttgggaagtcattagagctgctcgggtgcccactcgtgctgatccgtgcggaggacagcactcttgcagctcttttggagtgcgttcgttccatcagtgccactagagtggtttacaatcgtctctacgaccctatttcacttgtgcttgacaacaaaatcaagaatgagcttccagcccatggaatttctgtccaaagtttcaatggtgatttactttacgagccgtgggatgtttatgatgagaatgggcaggcatttacaacctttaacaagtactgggagaaatgtatgaacctacctattgagatatcacaatatcttgcacctacaaggctggtggcagcgccaggtctagcaaatgttcgctgttgttcgattgatgatctaggtcttgaatctagtaaggatgtggaatcaagcaatgctttgctaagcagggcctggtctcctggctggcgcaatgcagagaacatgcttgaggaatttgtgtcttatggtcttctagaatattcagaacatggtatgaaggttgggggaagtactacgtcgttattgtcaccgtatctccatttcggggagttgagtgtaaggatgatttatcaacttgttaaaatgcgtcaagtcaagtggcaaaatgaaggaaaatctgaagctgaggagagtgttcgattgttcctacgatcaattggttttcgagaatattcacggtacttatgctttaactacccattcacacatgagagatcatttttaggtaacttgaagcattatccctggctattggatgagggccgtttcaaatcttggagacagggaatgactggatacccattagtagatgctggcatgagggaactctgggctactggttggacacataatcggataagagtgattgtctcaagtttcgctgtaaaatttctacagataccctggatttggggaatgaagtacttttgggatgtgcttctggatgcagacctagaaagtgatattcttggttggcagtacatatctgggagtttgcctgatggacatgagctcagtcgtcttgataatccagaggttcagggtcaaaagtacgatccggacggtgaatatgtaagaacttggattcctgaacttgctagaatgccaacagaatggatccatagtccatgggctgcgccaaactctatattacaagttgctggagttgagctgggctttaactacccaaagcccatagtagaacttcatatggcgcgggaatgtttagatgacgccatctccacaatgtggcaattggacacagctgcaaaacttgctgaactagatggtgaagttgttgacgacaatctgaataatatcaggaattttgatatcccaaaggtggttttgaacaagaaattatcaccaagcacttcatccatggagcacagggtgctgtctactaatggcaaggacgaaaagtcgcagcctactgaagtgaaggccctgtacaaacagattattcgagatgatatgatgaatgactcaaacatggatgatacatgctctactgctaacttgaaagtgacaaggaaaagatctagcaatgatagtgcgttcaatgttccctcatgttcatcctcattagtcatggaatcacggattcatcataatgaacctagttctgttctgtattcaggctacttccagaagacagcagacagagatggcactagtaaggttgaagataatgacagtgaagatagtggtacgagcatctctaggccatccaagaaagctgcttagcattagcgcattgaagatgttgcaaatcttcaatgagaaatatttaccgtcacatgtaatttagttggtgcgtttgtagtgatcatgcaaaagctgttctatgaattataattagttttacacggcctatccttattccgatagaaggcaatttttgtttggtgaaaaaacatcgctcacggacaggccatagtttgctgtcgctgctgaacagcctaaagcctggtgtaaatgactcatcaacgttacgacattattagcgctggttggttttgctatc

SEQ ID NO: 19131 - DNA, 1185 bp, Zea mays
  Clone ID: LIB3136-056-D11_FLI
cggcaagcccggtggcacaacggtcggcgtcggcaagggcggagtgggcgtcaacgtcaatcccggcaaaccggccggtggtgccggtacaaccgttggcgttggcaaaggcggcgtgggcgtgggcgtcaatcccgggcacggcaagccgggcggcaccacggtcggcgttggcaagggcggggttggcgttcacgtgaacccgggaaagaagcccgtccacgtcaacgtctcccctttcatctacacgtacgccgcgtcggagacgcagctgcacgacgaccccagcgtggcgctcttcttccaggagacggacctccggcccggtaagaagatgaccgtccagttcgccagcaccgggacgaccggcaccaagttcctcccgcggagcgaggccgaggccatcccgttctcctcacagaaggtgcccgagatcctcgcccgcctctcggtggacccggactccgtcgaggcggcggagatggcgcagacgctgcgcgactgcgaggcgcccgcggccaagggcgagaagaaggcgtgcgccacgtcgctggagtccatggtggacttcgccaccgccagcctcgggaccaggcacgtgagggccgtgtcgaccgtcgtggcgaaggagggatcgccgaagcaggagtacacggtgaccggcgtggagcgcgctgccggcggcaccgacgacgacggccgggtcgtggcctgccacgcggagccgtacgcgtacgccgtgttcgcgtgccacctgacgccgcagacgcgggcgtactctgtgtcgatgctcggcagggacggcacggccgtggacgctgtcgcggtgtgccacgccgacacgtccggctggaaccccaagcacgtcgccttccaggtgctcaacgtgaagcccggcaccgtgccggtctgccacttcctgccgcaggaccacgtcgtctggacccgcagcggctgagtctgctggatggccgccgtttgctcgcgtcgcgccgcctggagtgatttgttatgttccagtggcctctaggcatactgtcatattattattataccgaggtatcacgagtttgcttatgtttccagtacttgatgcttgtatggatatggtgtagccagctcagcaagtatcaacccacctgcttaattctgttgtatagttttaaataaacagacaacctcttt

SEQ ID NO: 19132 - DNA, 943 bp, Zea mays
  Clone ID: LIB3136-056-F11_FLI
gcggcgcgcatcatgtcgttttctcagaagggtccacgctcggtctgcatcctctctgccaacgggtcaatctctaatgtaacactgaggcagccggatgcatctgggagcaccttcacctacgagggccgtttcgagatcctgcagctgatgggctccttcacaatggccgaggaaggccggaggagaaccggcgggctgagcgtctctcttgctggccctgacggccgcgtagtcggcggcgtagtggctgggatgctgcgtgctgcaagtcctatacaggtgatcgtcggaagcttcctgcccaacagcctgaagcagcaccagaggaggaggatgagcatgcagcagccttcccccgttccggcgttaccagcacccgtggcacccccgccgccggtgcttaccgcggccaccccgatctcgcaggcaggtcccgggaacgggttccacgcaccgccgccgccgcactccgcagcacctccccagccccacgccaacgccatgaacctgaacgcgacgacgacgggcttcaccatggtcggctggcctgcaagctcgccgcagcccatggcgtacagggcttcacctgacatcaacgtcagcttgactccccaggagtaggatcgctgggctcgtcttcttcctttttctttcttttttttttctttccctgggctgacacgttttgggtgggagagaggaaacagagcgtggctgatgctctgaatgagattatggactaatctggtgttaattttagggtagggcgtgccaacttgtttgggttgctgctttcggccgtcatggctgtggatgttgatttagttctagttctagtcagtcagtcctattcagtttctgtctttctgcgctgcagctatttagcatgtcctgttattggtgaatcttttctgatgatagagggaggaatcatcttctg

SEQ ID NO: 19133 - DNA, 1073 bp, Zea mays
  Clone ID: LIB3136-056-F7_FLI
cgttgacagatcctgatccagtgtgatatttgggctgctcacagcacaattgggtccaataaagcccagccgggacgcagaggaagaagacccggagctgcgtcttccttccgtttcagcaccgcgcgcaatcggcctctcatcccctcttcctatcgcccgccgccgccgccgccgccgcccgtccgcttcagtacgacgtcgagcaaggggaggtaaaagttcgtttggcgtgcgccatgtttaagaagttctcttcagaagatatatctggacagaatcaagttaaggcttctgtacaacgaaagattcggcaaagtatcgctgatgagtaccccagccttgaacctttgctagatgacttgctcccaaaaaagtcacctatgattgttgttaaatgccaaaatcatcttaatcttgtagtggtgaataatgttcctctatttttcaatatacgtgatggtccttacatgccaaccctgcgtcttcttcatcagtatcctgatatcatgaaaaagttccaagtggatagaggtgctatcaaatttgttctatctggcgcaaacataatgtgtcctgggttgacttcacctggtggtgccttagacgacgaagtcgaggaggaaacaccagtggctataatggctgaaggaaaacaacacgccctggcaattggatatacaaagatgtcagcaaaagacataaggaccatcaacaaaggaattggtgttgacaatatgcactatctaaatgatggcctatggaagatggaacggctcgaatgagtagaattctctgaggggttcataacttgcggcagatcgtattgatggacatatgaaaccagcaggaccctatttgcacagctggtatcgttttaaagatgaagtactaagaagctttatttacctgaggcaacttgagcttactccgaccctttggtgtggagtgcatgtcagaaacaggattatgaatgctgtgttcagtgcttttcacaaattgttgtattttcaccagaacaatttgccctcaattggaagtgaggaaatccataacgatctataagttatttg

SEQ ID NO: 19134 - DNA, 793 bp, Zea mays
  Clone ID: LIB3136-056-F8_FLI
gcctaagattgctgtggctattgaccatggcagtgaccggggtgacctcccattttcacagcacttcatgaactgcttccagtcttgtatgttccttctcgactcacttgatgctgctggcactaacgcggatgctgccagtaagattgagaggtttctgattcaaccgagagtagaggatgcagtacttggccggcggaaagctgaaaacgcaatggcttggcgggcagtgtttacatcggccgggtttgctccggtaccgctcagcaacctcgcagaagcacaagctgactgcctgttgaagcgcgtgcaggtccgaggattccatgtggagaagtgtggaatgggtctagcactctactggcagagcggcgagctcgtgtctgtctcggcatggcggtgctgatcatacggaccccatccatcaaccatcatgacacctacaccaatttgcaggcatgtttaaccctggtaatgtgcattttgtcttgcaatttcaaacatcgtgaagaaaactattgtatttgttgttacacgcctctgattgctttgctgatgttggagtaccgcctctctaaaatgtaacatgttggtctagggtctcataactctgttcttgctctcttcttggttagccagaggataatttggcaaatctgtggcaatgatgttgttattttactaggtaattcagatgaaaactgacatggactgaaatggttgggtatattaactttcttggcctcatattccaagattgatgtatagatttctaaagcgtggatcatggttt

SEQ ID NO: 19135 - DNA, 594 bp, Zea mays
  Clone ID: LIB3136-056-G1_FLI
cgttctgggccagatcaaaacggagtaaccatcacagagagatcaaacatgggcacaacctgggtcttctcgtggcctgtagccgatgggccaacacctgatgcgaacatcgtcggccaactccagggcactagtgttcaagtagccaatactcccgttgtggtgtaccactactccctgggattagtgttcgaggataaaaggttcaatgggtccacactccaaatacaagggacctcccaaataaatggcgagtggagcattgttggagggacaggacaacttactatggcaatgggtactgtcaaacgcactgaagttgtgtacaaagacaataccaggatctcagaactcaaaatacatgcctatttcgctccagtgaattaagcctactacaactagtgtttatgaggctactgcatccgattaacctccccaaggcgtgagctttatgcagtcatttagcctggagtttgtatccgtgtcacctagtactttacggtaataataagagactgtatctgtatgtttcggtaaactagagttctggtcacctcttgtactcttttgtattttaatgaaatttagaatccg

SEQ ID NO: 19136 - DNA, 1886 bp, Zea mays
  Clone ID: LIB3136-056-H11_FLI
cgacctcgtctttcccccccagccagcctcgcctcaccgactccccgatccggtccctcccttcgccagctatgcatccctcctccggcgcgggggactacgccccttactacccaccttatccctccccggccgcgccgcctcccgccgcctacccgtcggtgtccgccccggcttctgcgcccccgtactcgtcgtaccccgcggacttcgcccccgcgccttcgtaccccgcgtacccgcccgccgacctcccccactacgcgccgccgccggctgcgcccgcgcccccgcagccgtactacccctacgagccggcgccggcgccaccgctgccgccgtccccgcacaacccggttccctctccgtacccgtcgctggatcgggcggggagctacggctacggatccggccctggctccgggtacggccaggagctgtacccgcccaagccggcgggcgggtggtccgacgacggagcgtacgcttacaacggcggcgacgcgccggagccgtacgggtccaggggcaccgcaccgaggccgggctcgggatccgcgctgtttgatgactacgggaggtccattggctcagctgccgataggggtggccgtgggggtagcgcggccagccccaaggtggtgagggccgtgcccaaggcagagacatcagaggacgtcaggggtggggtgcagaagttcagggtcaagctgctgccggagggcgctgggagccccatggatgtgctctgtcaggttggtctggatggaattcggatgcttgatcccaacactggtaggacactaagaatatatccccttgaaactgtaactagatgtgatgtattagattcctctatttttgccttttggtccaagagttcagtagatgttgaaggaaaaagaataaggctgaaatcaaacagctatacatccaacaccattcttgacactgtcacagctgcgactgtgcagttcaaggagatgggtgaaagcagcatttcaagaagtagagcaattgctgatgcatccaagcccgctgagcagcaaaatgagaggaagaaaaatttccttgattggaggaatttaatgaagcctatgaatgaggagaaagatcactgggtcccagatgaagctgtcagcaagtgcacagcatgcgcagcagatttcagtgctttcaaccgcaggcatcactgtcgaaactgtggtgatattttttgcgataagtgcacccagggaagaactcctctgactacagatgcagatgctcaaccagttcgagtttgtgacagatgcatggctgaagtaacgcaaagacttaacaatgcaagggaagtggctaatcgacctattgttcacagccacgaggatcttgccaaaaaacttcaggaagccatggatataaataaaaggtcgtcttcaggaacaaggtcttcagatgtttctggcaagcggatgcgggaggtcgcatgccccaacctgcacggtccatcttcaggtcgaggttccagcttctggttcggagacgatagagtgcggcgtatgtcagaaccctttcctcgtcagcgcccgttgaaccgagttcagcggcttcaggcaccgtgcggcggagtcttctcggattcgcaagcgaagagtcggtcctgttcaatcgagcctggcgctgaattccggctatccctgtctgtctgtaccctaattctgcacggaagtctgtcactgcaagttgttagtaagttatatggatgagttgagtcgtttgcaagttgttagtacagttgtgagtttgctttgagaagcaagcagggtcatgtgtttgtactgccaacaactaactttgctgttgttacatgagaaaaaaaaaacggtgtaaactttgctgttgct

SEQ ID NO: 19137 - DNA, 978 bp, Zea mays
  Clone ID: LIB3136-056-H7_FLI
gcggccgcgctcttctccacctcgctctcgccccgcttcctcgccctatcctccccgaagccggccgcgcccgcggcctcggccttcctccccttcacgctgccgctgcgctctgtgtcggcgccggcgccagcgaggcgggtcttcgagcccgttgccgtcgcggtgtcgtcggagtacgggaccgagggcgcggagcagcaggacggggagttctccgaggacctcaagctgttcgtcggtaacctgccgttcagcgtcgacagtgcgcagctggccgggctcttcgagcaggcgggctccgtcgagatggtcgaggttgtatacgatagaatgactgggcggagccgtggatttggattcgtgacaatgtcttcagctgaagaagccggggctgctgtcgagcaattcaacggttatacatttcaaggaagacctctgagggtgaactgcgggccaccgccacctagagatggatccgcaccaagagcaccaaggggtggtggtggtggcggcggcggcagcagctttgtcgattcagggaacaaggtatacgtggggaaccttgcatggggcgttgacaactcgactctggagaacctattcagtgagcaaggacaggtgctggatgctaaggtcatctacgacagggatagcggcaggtcaagggggtttggtttcgtcacctatggctctgccgaggaggtcaacaatgccatatcaaaccttgatggcatagacttggatggtagacagatccgagtcacggttgcagaatcaaagcccaggcgtgaattttgagattttgttaaggtggtttagaggtcaatagcgtgtgttcacaagttctagtttgtagcgtctattctttcttccgtatgagtaacaagaagatgctgataatgagagactggaagtgaaactgctgtccacaggaagatatttttcccaacccttctatactcgtcgcgccttcat

SEQ ID NO: 19138 - DNA, 1749 bp, Zea mays
  Clone ID: LIB3136-057-A7_FLI
ataggctcggtcagcccaccccagacctttccccttccgtccccggccggcgccaacgccactccagtgagccgagggcggagacggtcacggtgggcagagtgacacgccgcacgcctctccgccccgctccgctccagattgcgcgcacccacccatggcgctcgccgcttcccaccacggcttcctgcccttcgcccccgctgccacgcctaccccgtcacgggggcacctgcgcttccgcgccgcgcgccttctgccccgccccgcccggagaatttgttgccaatctatcaactcagctaatgtgttgggagcttcttcaacgacatctgatgaggcagtcccagtcccagttgtccagatagatcaggactcagaccgtgatgcgaccattgtgcagctaagttttggagatcgtttgggggcgctacttgacacgtgggcgcaaggttgaggaccctgacatgttagaaaggattcggctaaccatcatcaacaaccttctccagtaccatcctgaatcaagtgagaagttagccatgggtgaattttttgggataaaacctcctgagaagaaggcaagtgcaatactgtaaggtgccgtttggttcacatattggtaacgtaatgggtaaccaataagtcaataatgttacatcatgtttgtttaagtccaaccgtaatcatatatcacactaaaaatggataccgtccattcaaacttgttaccgctggtactcgaatgtgaatcattattattactatttatgttacatttcgtgaaccaaacaacacttaaagtgtaatgcattcccattctgtaatttcagatgctgttctgtatcgtgttatctcggtttggccatctttttaactatgatctgtgagttatcactattttaggaaatggaaatttataaacagttaggctacaaatttactttgttatgctattggtttgtgcttcgacctttgatacattattaagcctgaatttgcattctttgatttatgaactggtaggtagatgttgatattgcaacacatatagttgttgaagatgacggaccaaaaagaagcatactttacatagagaccgccgaccggcctggcctacttcttgagataatcaagatcatcgcggacacaaatattgatgtggaatcagctgagattgatactgaaggtttggttgcgaaggacaagtttcatgtaagttacagaggtggaaaactaaacagctccttatctcaggcgctgaccaattgcctgcgttattacctccgaaggcctgagacagatgaagacagctattgattgttgtgtttgtcgaaccttcctatagtgcattagaatcagaaactttggcttcagttccttcgctatgggccccttgtactgctgcaaatggagttttccattgtagctgataaagtgccgacaaggtgcatccatatgtgcataggtggcactgaatcggggctcactggaccagtttgatattgtagtaatatatatacagctgggagcaacataatttaggtttcgatcatcattatcccatttgattcctgttataagggatcacattggaaaaccctcacatgattgatgttgtctgtattctgtaagttggtgcaatccatttgcatgtaaaactcagctgcgtactgtggcgttctatgtagtggaataaataaaagagcattacgaaatcaccgagcagcttgctcctgctttccaatc

SEQ ID NO: 19139 - DNA, 1213 bp, Zea mays
  Clone ID: LIB3136-057-C3_FLI
aggcttttcacttcttgggccttccttgctacatagaagacaatgaaattgtaattttggagctggaatagttctgcaggaccctctcagaaatgaagacttttactgtgccacacgttcacgtactcagtattcatacaccaatgatggacgtcagaagtgcacaagatttctgtgcgtcatttgggcattggtgcatgaactttgaaacaacttgttggtctacatttgtgtgctttttgcaggtactgggctgttcctgagctgagaagatgggcatgtgcagaagcacaatggtgactttaaggatttggcttgataaaaaggaagcgaaaagacagcttcgtcagagatagagctctagtcctacgggagttgcactctgctgcacagcgcgagtcttgcattgggcaacaagaaattctggaaagagagaacctaccaagagctgagacgtctattcatggaatcgtgacaaacatcgatggttgcagctttctctttccagaaagacctgatctgaagtctgtagtgcttaaagagcaaccattctctttgcagagggaaacatcgatgaacaaaccatttttcatgctgttgacattaaatttcagtgatggttgcagctgtttgagctcctcaattggatggcctgttgattttcagaagcgaaaagacagcttcgtcagagatagagctctagtcctacgggagttgtactctgctgcacagcgcgagtcttgcattgggcaacaagaaattctggaaagagagaacctaccaagagctgagacgtctattcatggaatcgtgacaaacatcgttaggtatgacactgaagatgaaaagttggctccacccaagaatgatttgatgaatcacagccgcagcaaccctgcaaaacggcacgtggaaggcactgattgccactcgtcattgccaaagaaactgaagtactttttgaaagacaagaagctgaactgctaaaagtgtaaaaccgtagaaggtagatagagaatgctgtaggtttgtttattttggttattagacgagttatacatagcatagatgcatgggaagttcgcatgctaaggttgaactcttctgctgcataggaaagttggctgacttcttatattatgcgagcctagcttaggtacctcctgtggggagaagcgattgcaatacatggtagcatgttgtagagctcctc

SEQ ID NO: 19140 - DNA, 546 bp, Zea mays
  Clone ID: LIB3136-058-B3_FLI
ccgaggcgcgcgcgcagctggggttcgcggtgccgatggtgctgaccagcatggcctactacggcatcccgctggtgtcggtgatgttctcgggccagctcggcgacgtccacctcgccggcgccacgctcggcaactcctgggccaccgtcaccggctacgcgttcgtgaccggtctgagcggcgccctggagacgctgtgcgggcaggcgtacggcgcggggctgcaccgcatgctgggcctctacctgcagtcgtcgctcatcatgtcggccgccgcgtcggcgctcgtctccgcgctgtggtggttcacggagccggtgctcctgctcctgcggcaggagcccgaggcgtcccgcgccgcggcggcgttcgtccgcgcgcaggcgcctggcctcttcgccttctccttcgtgcagtgcctgctccgctacctgcagacgcagtccgtcgtgctcccgctcgtcgcctgctccgtggccccgttcgcgctccacgtcgcgctggcgcacctcatggtcaacgtgctcggcctgggcctcacgg

SEQ ID NO: 19141 - DNA, 292 bp, Zea mays
  Clone ID: LIB3136-058-H12_FLI
gatcatcaaacaacaaaacaattgaaatctatatgtaatgattggggcattaaacaaccaaaatagcacaaaacatagacactacagttctgaagcatggaacgatccatagaagaccggaccatgctcctaaaccatccggctacaaaacttggtacagcaaggttacaaacaaaagtatcacagtttgatgattttgagaaatgggacttcgctgcaccgcagcaccttacgccttgagcttgccaaagaacctctgcttctcatcggtagtctggaagcgaccgtgccc

SEQ ID NO: 19142 - DNA, 1225 bp, Zea mays
  Clone ID: LIB3136-059-A2_FLI
cccgcaccccaccgcagcaggagccgaagcccgcggtcctacgctggcgcccacccgtccgcgtgacctcggagtttgacagcgaacgacggctcttctcccaccgcctctcctgccgcgtcctcgacggcctcgccaagctccgcctccgcattagccatggtgctgggggaggagggattctctggggcccgactgatgtggggctcctggcgcggaacttctccgtcgtcgtcgaccctgcaacccgaggcgccgtgctgcgcggcgccgccgacctcgccggctcgctgcgactgcgcgcctcgcacaacaccaaagagcaacaaggagaagtggcaattactgcaaatttgagggattcaccatgcaagattgaactgtcatctctggttcctcctaatggaccgccaagagcaacttttttctttccaaatggtgaagtctcaattaaagagaagattttggatgagcgtgacagaattttgtcagtaaatggcctagtgaagtcacgtgttctgcatggagtttgcacagctgtgtacaatgataatgtaatgagcattaaataccgctacaaggatgatgaggtatcgtttatccccagcatctcattaccatccaattctctgtcatttgcattcaagcgccaattaacgcctttggacaagttgagctattggtacaattttgacacaaactactggggcgccatctacaaacacaaggctcacaagcatctcaagtggaaagctggctatgagtcagacaacaggcttggatgggcatcgctttgggttggagatgctggcggcagtacaaaggaggcgcctttgaaagccaaaattcacctcacgcttaaagtcccccaggacaatatacagaattcagttgtagtgttccatgttaagaaaagatgggatttttagtttctatttgtgagctcagatggtgttacgtcatgcgcacataagcaagcgtgtacagatggagagccaataagagatggatgcaaatttgtgatgtggtctgcaaaattgtttcatgcaaatgctagggagaaatcatgtaatgttagtcctcttttataggttccgtttggttcaaggtcttgttaagggaatgctaaagagctcaaccaaacaaaagtattggtaactactagaggtgtaatccgatcgaatacagatgaatatcactgaaattaaatttgttattcggatcc

SEQ ID NO: 19143 - DNA, 635 bp, Zea mays
  Clone ID: LIB3136-059-F9_FLI
ggccgccagaagttgatgcaggataagaggtcgaaacagcagcagctccaaaagcaggtctgggacactaggacccccgtttctgtcaccggtgagcgaccgcaggaacctgctaatgggaagcccaatccgtccgtaccagatggtgtcacggcagaggtgaaggcggtgaaggctcccgcagagaacggcatcactgctcctgttgtttcctatgcagcaaaggtggcccagacagcaccagagaagcccgtcctctccaacggagtcgccaagaccggttaactcgatcgtgcaaccagagctccatagccaggatgcggtgcaagggaactggtgaccaaccaaggcaggctgtggaactggcagcatggccccataagcgttgctcgatctcctcatcgctactggatggagagcagttggctagttgttagcggtttccctagtttctcttcctcttgtgttcctcgtttcagtttgcttatagccccgaagactcttttctcccgtagtgtcggaatgccagggtctgtccctgtgggtgtgttgcgtaactgggatccgagtataccctgctgtgttcgtcgttacattgaatggatctgaatgaaagtgagttagattggagcttt

SEQ ID NO: 19144 - DNA, 1227 bp, Zea mays
  Clone ID: LIB3136-060-B7_FLI
accggcaccgcggcggcagttcagcatggtggcagcatccgtagccgagcgggcctatgaggcggcgacgcggtccgcgctggtggcgctggagcgcaacctcatcccggacgcggtgacccggcgcctgacgcggctcctgctcgcgcagcgcctccgccagggctacctcccctccgcgccgctccagctgcagcagctcctccagttcgtccactctcttgaagagatgcccattgccattgaaacagacaaagctaaagcccaacactatgagttgccaactacatttttcaagctagtgctgggaaagaatctcaaatacagttcctgctatttccctggtgattcaagcaccctagaagatgctgaggttgcgatgatggatctgtattgtgagaggtcgaaactacaagatggccaaagtatcctagatgttggatgtggatggggatccctttcactgtacattgcaaagaaatataggaactgcagtgtaacagggatatgcaactctactacacagaaggcttttatagaagagcaatgtagggataacgagctgtcaaatattgagataattgtagccgacatcagcaagtttgagatggagcgctcttttgacaggatcgtatctatagagatgtttgagcacatgaaaaactacaagtcacttcttaagaagatatccaggtggatgaaagaggatggcctactattcgttcacctcttctgccacaaagcatttccatatcactttgaggataaaaacgatgatgactggatcacgaggtatttcttcactggaggaacaatgccatctgcaaacctacttctatactttcaggaggatgtatctgtggtagatcattggcttgtcagtggcacgcattatgctagaactagcgaggagtggctaaaacgtatggacaagagcatcacttcagtaaggctgatcttcgaggaaacttatgggaaggaatcgactaccaaatggatagcttattggcggacgttcttcatctcggtagctgaactttttggatacaacaatggagatgaatggatggttgcccattacttgttccgaaagaagtagaggctactgcttggaagtacccaatcaaaaatcaatgttttcagtaattttgtcatgtacactgacgaacaactccttttctggcacgtagttgtatctcgtaccgacttcgtagtggtttcaaaaac

SEQ ID NO: 19145 - DNA, 579 bp, Zea mays
  Clone ID: LIB3136-060-D4_FLI
tggtttggcaggagctcggacttggcccgtcagtgcctctccacgttgtcctccaagactgggtcagacacgccgacgggaagctgagcttcctggggttcatcaagctcttgcacggggtctcgtcgcgctcgatcccaaaggcctagcattgtacaccatccatccctgcatatctatatccatcgaccgagggagacgagtgatggctgagccagtctctggctgcaggtgcgtgcgtgtgtgttcagtgttctgttccacggtggacggcctgaaaccaaacgcaaagaccaagagaaatgcctgacgatagtcctgtgtaagaagagtaaggcagcacagggtctggtgcctgtgcaccacttgtaccacatcccttgccacgtggatagatgacgtcgtcgtcgtcgttgttgtagttgtactgaagtaaagctggttgtgtagacgagtgtacagatgaggatagggaaaagaaatgaacatggtggaagactggaagggccgtaagatttgcggctgctgtttgtcaatgccaaattgccaatgcctgcagctgcagtagctgtgtctggc

SEQ ID NO: 19146 - DNA, 448 bp, Zea mays
  Clone ID: LIB3136-060-E4_FLI
attttatttgagttggacggttacatactaaaaaatcgaaataggctagtttggtcggtgtgcgtccatgtgctgtcccagtggagcagcagcagtgaggcgtacagcatttgctgaaggtgaaagcagtcttacagatctgtagaaaatgttgtgcatatccatgttagcagccgaactaggttatttggtgttacagtgctacacatggcggggaaggaaactaagaggcgaattggggctcggtgttaactagttgactgcagtccgctggttgtttaatttgtgtcacccaagccgagagtcgagactcgaatagttttgtactgctgttgttttggtatttgctgtgggcattgagcttgtgtctaagttccatatgcttgcgaggcttgtttttatgagaacatatctggtgtatatgggagtttggtgtacatattaaatc

SEQ ID NO: 19147 - DNA, 592 bp, Zea mays
  Clone ID: LIB3137-001-A5_FLI
gcgcccccaattcccgctccccacgcacccagacacgccgagcgggagaggaagcgacagccagcagccgaggcggccagcgccagcgcaggcatgaccactcccactcccagtgccgacggctcgcccccgggctcctccgacctcgtgcccccttcctaccccgagatgatcgtcgccgcgatcaccgcctcgccgatgagaacggctccagccaggccgccatcgcgcgccgcatcgaggcgcaggcccgcggcgacctgccggcctcgcacccggcgctcgtcgccgcccacctctcgcgcatgtccgccgcaggggagctcgtcgccgtcgcgggggggaagtacgcgctgcccccgccgccggcgcagccggcgccggagtcaccggctgacgacggcgaagacgacgacgacgacgacgactgcgccgacgaggtggacgaggaagaggaggcgccggagcctctgctcgtgcccgtgcctgtgccgcagccgcccgccaagcgcgggcgtgggaggcccccgaagccgcggcccgcgggcttccccatcggcgtccccggagccgccgcgtcccccgccgccgc

SEQ ID NO: 19148 - DNA, 1045 bp, Zea mays
  Clone ID: LIB3137-001-B5_FLI
gcaagcccaagtgcccaatcaacaaacccagaccgccagacggcaaccgttgtcatctctcactccacggcgccggccatcgtcactcacacgcccagcaccgcagcacgacaccatcgcgccctggccatcctcccgttcacgtgcacctaccgcacgcaccaccgcggaaagtaaccccgagatccagcgccatcggcacgaccaggcctgtccagggatggggcggagaggggagccctactacgtcgaagcggcgccgccggtggacgtgaacaagaacacagagtggttcatgtacccgggcgtctggaccacctacatcctcctgctcttcttcgcttggctcctcgtcctctccgtctctggttgctcccccggagcagcctggaccgtcgtaaacctcgcgcacttcgccatcacttaccacttcttccattggaagaaaggaaccccttttgctgctgatgaccaaggcatctacagcagattgacatggtgggagcaaattgacaatggtcagcagcttactcggaacagaaagtttttgactgtggtacctgtggtgctgtatctgatcgcatcgcacttgactgactacaagcagccgatgtttttcctcaatacaatggcagtttttgtgctagttgtggcaaaattgccaaacatgcacaaggtccgcatatttggaatcaatggagacatctgaggaccactgcaggaagtacatggatgcaatgccatgatgtgatgaagagctaaacagaacaagcagtgtgtttctcaaacttgacacaactgtctgtaatatatgtacaggtttaggaagaactgtaaatgttactctaccatagaagctttgccagcggactggcctgtgttgttgccgttgctgctttcttttgagtttcactggaaggggaaacggtaactccggtaaacaaccaccagcatgtggataagaaataaggaagtgtgtagcagatgctatttggtatctggttcgattgaaccaagaaatcagttaagttcatatttttgtctt

SEQ ID NO: 19149 - DNA, 1542 bp, Zea mays
  Clone ID: LIB3137-001-B9_FLI
gaccgagtgccccttcgcgcacccgggggagaaggcgcggcggcgcgacccgcgcaggtaccactactcgggcgccgcctgcccggacttccgcaagggcgggtgcaggcgcggcgacgcctgcgacttcgcgcacggcgtcttcgagtgctggctccacccggcgcgctaccgcacccagccctgcaaggacggcacggcctgccgccgccgcgtctgcttcttcgcgcacaccccggaccagctgcgggtgctcccgcccacgccgcagcagtctagcgccagccccaggggcgccggcgccctgcccgagtcctacgacggctccccgctgcgtcgccaggcgttcgagagctacctcaccaagagcatcgtgtcctcgtcgccgaccagcacgctcctgtcgccgcccaagacgcccccgtcagagtcgccgccgctgtcgccggacggtgccgccgccgccttccgccgcgggtcctggccgggcgccgggtcccccgtcaacgacgtcctggcctcgctccgccagctccgcctcggcacggccagctcgtccccgaccggcgggtggggcggctacccggcgtccgcggctgcctacgggtcgcccactgcgggcgggctctacagcctgccctccaccccgagggccacgccgacagccctcgccaccgccaccgcctccggctacatgcccaacctggagccgcttgacgtcagcttcggcggcgacgaggagcccgtggagagggtggagtccgggcgtgccctccgcgccaaggtgttcgagcggctcagcagggagggcgctgtttcctgctacccagctgccggaaccggtggccccgacgtcgggtgggtctccgacctcatcaactgaggcggcggcggcggcgggtcggtgctgccatagcagtggagaaaaaaggtggtggtaactggtaagccgtaacagagaaggatggcataaaaaaatgttcccctttggttccagataattccgctaattaccctgtacatagatatctatcgccctgtgaatattctcggctggttgggtggagggttgatgctagggggtggatttgttttggggttcttgaggtagcggaaaatttccaaggaaaagaaaatatgtaaggaagtgtagatgtcgtaggcggcggcggcggtggtttgtgccctcttgtgtgctgcgaagcatggcgagggccgacggtgacgacgaagactggccggatttccagctttggtgttcctgtgattccgcagcaagttcagtttgatgttgtttcaagttcttccgtcgtctgtgcactatgcatccggctagttggcgattgcaacctgcttgtggattactacccccattttgttgttgatgttgatgtgatctgtttattgagacccagcattcccctacagcttattttgttgtacttgctatatatctttagtaggtgccgaaatctcagttcacccgctattggaggtgaacttgccgtgtaatctttggatcaagtaaatggtttaatgtct

SEQ ID NO: 19150 - DNA, 1256 bp, Zea mays; identical to SEQ ID NO: 13822
  Clone ID: LIB3137-001-E2_FLI

SEQ ID NO: 19151 - DNA, 995 bp, Zea mays
  Clone ID: LIB3137-001-F5_FLI
tttcgcttttcccccgtggggtctcgactgcctgagggggaggaggacatggatttggcgtcggtcaacgaggagctggccgagatcgacgggcagatcggcgatatcctccgcgtattgcaaaatgggttccagaagctggagaagatcaaggatgccaaccgccgcagcaggcagcttgaagagcttacagataagatgcgagactgcaagagactcatcaaagacttcgagcgagttagcaaagctgaggctgagcatactgatccagcaacagcaaaaatgttgcatgacagaaagcagtcgatgatcaaagaattaaactcctacgttgctctaaagaaacagcaggcaagtgaaaacaagagaatcgatctttttgatgggccaagtgctgaagatggctttggtgaagaaaatgtcctgttagcatcaaatatgacaaaccagcagttaatggatcaaggcaatcaactaatggatgaaactgatcaagctattgcacgatctaagcagactgtccaagaaaccgtcaatgtgggcacagaaactgcagctgctctgaaagcacagacagaacaaatgagcagagttgttaatgagttggattccatccatttctccatcaaaaggcatctcaattggtgaaagaaatcggtcgacaggttgcaactgatcgatgcatcatggccatgctttttctcattgttgctggagtcatagctataataattgttaagattgtgaacccacacaacaaggacattcgcgacatccctggcttggcaccacccgtcagcaggcggctgttgcgatagaggacaagtgaattgcatacctggtgtaaaaattgatgtggcgcggcgccttggcaagcccatctgtattctacgtcttgtaaaacgctgctccagtcatgtggtatattgctgtaaaacttctcatgggatccactcctactccttggctacacacagtgcgtatatgttcctcct

SEQ ID NO: 19152 - DNA, 1229 bp, Zea mays
  Clone ID: LIB3137-002-C4_FLI
ctttatattctttgttgtatcatactgctggaggcaaaaataaaaaaagtacagattcaaccaaacattgtacgttttcatcgtccaataaacccaaaaagaatataaagaacgagcatatgatacaaccacttgaccagttgacctctacagcacaggatggtaaaccttccattccattccattcaccatcgattcaccgagctagttttcacttataacggtagagcgatttcttcgccaccgatctcacgtcacgcgcctgcaacctgaatcctcctcttctcgtgcctctcgcagtctcgcccgcttctccgtttctgaatctggaggaagatcggccgcaaacagcacaggcaagcgcagcgcggcgcggcgcgacgcgatcacgcgaccctccttagtgcgccatggcgtggccggtgtggtggaagcccagcctctgcgcgtgggcgagcgccgccgtcttgcagtgcgccgccggcggcagggactgcctctgcgtggtggggagcgagtgcgcggacacgacgaggcggcggacgccggagcgcaccctgtagaggacgtggccccagccccaggtgcccctgccgtggcggccctcgtcctcgttcatctcgaggtcgcccgcggaccccggcttccgggacaggagccagccgacgacgccccgccgccaccactgcctcagggagccgcctcccgcggcgagggagggcgccggccgggagcgccggaacgcccactcggccgacgcggaggagatgggctggatcttgctcgagaaggcggacagccgcttccgcaggcccgtgaggtggctctcctctctgccgccgccgccgccgccgccgaaggttggcagctcgtccttgagcggcctgggcggcaggagcctcgtcttctggatggtctccaggattgtggccatggctgggccggacgagtagaggcaagcaggcaaggcaaacagagagggcgcgcggagaagctcgctctggagcccgccttcaaggggcaatggtcttctcctcctgctctctcgccgcccacccccacccagatggccagatctctctttgcttctccttttaatttggtctggtcgtctggacagaggatggtggagagatggtatgtgtacccagtgtttgtgtcgcagccacaacagcttgcctccgcctggacagactactggctttattcacgcagacacgaaccaggtg

SEQ ID NO: 19153 - DNA, 1268 bp, Zea mays
  Clone ID: LIB3137-002-D11_FLI
cggtctagcccatactccgcatgcaaacaacctctcggcctcatcaggcccgctgccctccgcctccgcctccgccgatcccctccgctgaatcgaatagaagaatcgagcgccgctactggcgaggggctagcggtcggcgcacagcgcggtatggcgagcggcagcagcaacggggagccaagcacggcaccgcaggcgaaccggtggtacgacctccggctgggctcttcctgccgtgacccctcccccaccgccaagttctgcaccctccgttatgaatttaagccagcatcaattgacaagacacaagctgggtctctgcaaagcaccaaagataaccgggttactgtggaattccataataatcagcctggcaagccaaaggtgacatttgagggaagccaagaagagtacaaggataatgatggtgtcttattttttgatggtgagacctttcgcttagagaggttgcatagggctgtcaagaggttaaggcatgtccgagttccaggagagtctgcagcacttaatttggctggtacaactactggagtgggtgcagaatcacagtcctccattacctaaagtcagcaagtcacagaccatgagcaaacctgctgttcactcagttccagttgaggttgagcgtattgacattggtgaaccagaaaatccaggcccgaaatacaacagcaggagtacatatcaacctgttagcatagacccatttgccctttcacctgatccaaatgagcaagagaaccttgacatatttggtgatgatgatggcaatgcttcaccgaataacttggcctccggagaaggggcacctactcgtggttttgacgtcaacttaccaaatcaagacaatatggatgatgaaattgctgatgtagatgtaaatgatgaggcagatgaggggctcaatgcagccgatgcgctgcgagctcaagtgaacgcagaggggcagcaggggcaggacagctcaagctctagtggaaccagcagtagcagcagcagcggaagtgggagcggcagtggaagtgggagcagcagcagtgacagcgatggtagtgatgctgattcagcaagctccggaggtgatgttgatatatgagcttgataatgcaagcttttgttttgacagatgccttgcttcacaatttttggttcacaagggaggtgtagggtatgtatatgttcagctaatattgttccggtcagtgagtgcattaaatttccgcaattcatggcgggcttggtct

SEQ ID NO: 19154 - DNA, 2402 bp, Zea mays
  Clone ID: LIB3137-002-E2_FLI
ggactggacccccaacccaacaacagcagcaggaacaggaaaaagaaaaaactctctcccattcccatctcgcctcccacctcctccgcctcgccgccgcggcaggcaccgccaccaatcttctcttccgccccctcgttcgttcgctcgctcgctcgccaggagatcgactcgaggcgaggccatgaagtacgtgctggtgaccggcggcgtggtgagcgggctcgggaagggcgtgacggccagcagcatcggcgtcgtgctcaaggcctgcggcctccgcgttacgtctatcaagatcgatccatacctcaacaccgatgctggaaccatgtccccatttgagcacggcgaagtgtttgttttggacgatggtggtgaggtggacttggaccttggaaactatgagcgatttctggacatcaagttgactcgtgacaacaacataaccacggggaagatataccagtctgttattgacaaggaacgtagaggagattacctaggaaaaactgttcaggtcgtgccacacatcacagatgaaatacaagattggattcaacgtgtggcaatgaatccagttgatgacaccgaagagccagccgatgtttgtgtcatagaacttggtgggactataggggacattgaatcaatgcctttcatagaagcactaggccaattttcgtaccgtgtagggcctggaaacttttgcttggtgcatgttagtcttgtaccagttctaaatgtagttggtgagcagaaaacaaagcccacccaacatagtgttcgcggacttcgaggacttggactcatgcctgatattttggcatgtcgcagtacacagccacttgaagaacacgtgaaagtgaagctcgcacaattttgtcatgtcccgataccaaatatcattaatctccatgatgtcgccaacatttggcacattcctttgttgctcagagatcagaaggcccatgaagctattttgaaggtgttagaccttcagtgcgtgagtaaagttgctcgagaaccccaattgtctgaatggactgaaagagtcagcagatgtgacagattgaaatctccggttaggattgcaatggttggaaagtatactggcctgtcagattcctacctatctgttataaaggctcttttgcatgcgtcggttgctttggacaggaaacttgtggtggactgggttccttcctgtgatcttgaagattctacagcaaaagagactcctgacgcctatgaaaaggcatgggagtcgttgaagggtgcagatggtgtgttggtgccaggaggttttggagacagaggagtccaagggaaaattctggctgcaaaatacgcgcgagaaaacaacgttccatatcttggcatttgcttgggcatgcaaattgcagtgattgagtttgcacgctctgtcatgaagttgcacggtgctaacagcacagagtttgatccaaccacaaaaacaccatgtgttgttttcatgccagagggatccaaaactcatatgggggcaacgatgcgccttggatcaaggaggacctttttccaggccactaactgcaaatctgctaaactgtacggcaatgcttgctacgttgacgaaagacaccgccacagatacgaggtgaatcctgacatggtcccagaatttgagaaggcagggctttctttcgttggcagggatgagagtggcgaacgcatggagattatcgaactaccaactcataggtttttcgtcggagcacagtttcaccctgaattcaagtcaaggcccggcaagccatctccgcttttcttaggattggtagcagcgtcatcaggccagcttgaccacttgctccaacgtggccttaccagttcagtaggcagagacatctgcggcaaagggggagcgcagaaaccaaaagcttgccagaacgggcatgtcatgaagccactgaatggcctggtgcacgggcactattcagcgactcgctgcaatggcgtcattcccatctagcagcacagatctgcgaggctgttttcgcttgttctttttctttccgttctacctaccagggcaaccaggaagagaagggctgtttgctctacagcgacacggcagccgtttccgatgttttaacgaggaagcatttggcatgcaaagctgtcgcgcgcattaagaggcaaatctagcagcttattagctagggttcgattagtagtagtagtaaatccgatgttacgttgctggtttatttgttcgtttgtttgctaagaaagattacaagggctagtgatgtgcagctagctccagtgtagcctgccgtctcgccccatttgtacattgtaaaacaaccgctactctccgtgattgactgaatggatgagtataaacgtattggacc

SEQ ID NO: 19155 - DNA, 1126 bp, Zea mays
  Clone ID: LIB3137-002-H8_FLI
ttgacaaggagcaagcctgatcccagaaccccacggtcgtgagaccctagctgccgtcgccgccgccgccgccgccggtgaccggcgacggcgatctagatgggggcgtcggcctccgtgctctcgttcccaacggccgccgcgttcccagcagccgccaccgccgtcgccggggccgccggctgcttcgcgctcggctacctcctggccttcacccgcctcccgcgccacgccgccggcccaggttcgggagggacctccgatgacgattccgaggatgactcggaagaagatgatgacgaaaactccggccgcagtcgcgcggcgaagcgggcgggagggcagaagagggccgggctccggctgctctactgggcacggaacgtggtgaccaagtccgactctgccagggaggcggaaaggtcccggtctcaggccgcggccagtcccctggagatcgagaaccttgctgagataatagaagatttcaaaatggtgttggttgtgaggaatgatctgaagatggggaaggggaagattgccgcacagtgcagtcatgcaactcttgggctattcaaaaaactccaacagagagctccaaaatcactaagaaggtgggagcggtgtgggcaagttaaagtggttgtgaaaatagaaagcgaggaagacatgctagttttacaagggagagcaaagtctttaaatctgccaactcacataaccatagacgctggaagaacacagattgctccaaattcaaggacagtcatggctattctggggccagctgatatggttgatgatgttactggcggtctgaagcttttgtagaaaaccaccttgtcagcattttcaacttgggtcttcatagagcagtgctgggactttgcaggccacagtggtctctgcacttgtactgatgtgcggcagaagaatgaaccttggccccgttggttgacctgagtttcttgtccatgaatttatttggaaggagagcttgcattcttttttcacttgtaccgaccgttatctttggagttgtgatgttagcagttcgaattctggtgttgacaacttatagaccatcatttcttctgtaacatagataagaaaatactatttgact

SEQ ID NO: 19156 - DNA, 1277 bp, Zea mays
  Clone ID: LIB3137-004-D1_FLI
cgcttccaggcttactctccgctgggttcgtcagagaagaacctagcacacgacccgctcgtcgaaaaggtcccttactactacagttgaacccaagctcctaaactaaaactacatgctgctgttcctaggtctgactccaagcgtttaaaccacaggtagccaagaaactggacaagaccccggggcaggtgctcctcaggtgggcgctgcagagggggacaagcgtcattcctaagtcgaccagggacggaaggatcaaagagaacatccaggtgttcgggtgggagatccctgaggaggacttcagggccctgtgcggcatcaaagatgaggtgagtgagggatgccattgtccttggggtttaggctttagcgataactttagcatgacttggttatcagtatgtcctatgcatgtaggttatgaagctaagagtaaaaatgaaaactagtatgggaagttttcttatctgatacgtaagacttattggcatcaattgagcttgttaagttgttacgccacttatgacaggctacagcctattgccctagtggaataatgccattttttcacactcaaaataggggggtttgaatgcaatagagttaatagttagttaactaaaaattgatagtgtatctagctaactactatgttggatatttcggctaatttgagcaactaattatcaattaactattagttctagcattcaaacgtggtctaagataagaattatagtttccagatttgaggcacagagtcgtttgatccgtctactgctgtactgcatcactcgtttgtgtgtgtgtgtgtgttgcctgatctgcagaagcgcgtgctgaccggagaggagctcttcgtcaacaagacccacgggccgtacaagagcgcaaccgaggtgtgggaccacgaggactgagctgagctgccgtgccgccggatgcctcccactcccacctgatgaaccagaataaaggataccgacgcacctgtcagtcacctccttccccgtgccttgtgagagcggcagcctctcgcacagggaagatgctctgtgagagcagcagcctcgcacgagaaagatgtagaagagtgtgtgcgcaacacactcctgtactgtacgatagactgaataataaagaagaaaacgatccacatctcatgcaaactgcaatctgcagagtgcaacgcagcgccgaaccatgtttttgtaggatcgaaatgtgctgtctcgcgcaccaaagcactatgtttggactttggaccactg

SEQ ID NO: 19157 - DNA, 601 bp, Zea mays
  Clone ID: LIB3137-004-H8_FLI
gggagaaggggtgtgctggcaagtatacactactcagagatgaagaaaacccacggtggacaatctttgagaggcggcttccttgctgtggttgtgggataggatggtcttcttttcttttagggttcttgtgtcctttgatttggtactttgcagccactctttactgctgcaagtactacaacaaggatcctcgagagcgccctgggctagctgcatcagctgttgcggcactcatcttcacagtcctggcactcatcgctctctctgtggcactgataatctatatataaaacgaggaatgaacttgcgcttgcttgaaatgcgtactcaggcactcatcttcacagtcctggcaaccatccatagctctctgtggcacagacatctgaaacccaaagcgaggaaaacgcggtagctggacctggcattcagaaggaacttgtaattttagtgatagtagcatatctttgcaatcatcctttcatgtatcactatatcaagttgttgatttaaatgctgcatcggttgacctgtcggctgctgttgtctatcaacgaggatgatcattgctctatcgcaaactgcgtgctccgtgatc

SEQ ID NO: 19158 - DNA, 1394 bp, Zea mays
  Clone ID: LIB3137-005-A5_FLI
gccgtgcccgccctgccctccaccttctcccggcgcaataaacaagtcgagtcgaggcgaggcggcggcggcggcggcggcggcattgccgagatttccgtgattcttgcgcttgttagttgtgctgtgtatagttgggccggccgggggtggttccgtacttccgttcagttccttctctgttggagtagtcggcggcgatgggtatcctcgcgctcatcaccggcaaggcgggcgccagcgggtttgggtcggcgtccacggcggagcaggtcaccgacggcgccgacgccagtcgcctcaccgtcgctatcacaggaggagctagtggcattggtctggagacctcaagagtcttcgccctgagaggagcccatgtggtcatcgctgctagaaacacagaggctgcatcagaagcaagaaagaccatcatggagaagaacccaacggcacgtattgatgttctgaagctagacctcagctccctcaagtctgtcagggcttttgtggaccggttcaactcgatgaaactccctctgaacatcctgataaataatgcaggcgtgatgttctgcccttttcaactgtctaaagacggggtcgagatgcagttcgcgacaaatcatctaggacactttctgcttaccaatctcctccttgataccatgaaggccactgccaagtctacgggtatcgagggccgcattgtgaacttgtcatcagtcgcccaccaccatacgtatccgaagggaattgacttcgataacctcaacgatgagaaaaaatacaacgacaaaatggcttatggacagtctaagctggcaaacttgctgcacgcgaaggagctctctagaaggctgaaggaagaaggagaaaacatcacagttaacagtgtccatcctggattgatcatgaccaatttgatgaggcactcctttgttctcatgaaggtgcttcaggttgccacttacatactgtggaagaatgtaccacagggagctgcaactacttgctacgtaggactgagccctcaactcaagggagtgacaggaaagtactttgctgactgcaacgtggagaagacgagcaaaatggcgaggagcgaggagttggcgaagcggctctgggacttcagcgaggagctgatcaagtctgcgaaatgagagccgaaagagctggatcagagaaaatgttgtggtcctgcttggcatctagtggtacaagtgatgactgattagtatatagcacggaggaacctgggcgatggctggacctcatggtgttcaggaataaaatctgcttgctttcgtacattaattagtccggtgtggcaaacatcaatttgtagtgctgtcaatatctgttcaatatacgtgcagctcagttctgacttg

SEQ ID NO: 19159 - DNA, 1748 bp, Zea mays
  Clone ID: LIB3137-005-A9_FLI
taggctcggtcagcccaccccagacctttccccttccgtccccggccggcgccaacgccactccagtgagccgagggcggagacggtcacggtgggcagagtgacacgccgcacgcctctccgccccgctccgctccagattgcgcgcacccacccatggcgctcgccgcttcccaccacggcttcctgcccttcgcccccgctgccacgcctaccccgtcacgggggcacctgcgcttccgcgccgcgcgccttctgccccgccccgcccggagaatttgttgccaatctatcaactcagctaatgtgttgggagcttcttcaacgacatctgatgaggcagtcccagtcccagttgtccagatagatcaggactcagaccgtgatgcgaccattgtgcagctaagttttggagatcgtttgggggcgctacttgacacgtgggcgcaaggttgaggaccctgacatgttagaaaggattcggctaaccatcatcaacaaccttctccagtaccatcctgaatcaagtgagaagttagccatgggtgaattttttgggataaaacctcctgagaagaaggcaagtgcaatactgtaaggtgccgtttggttcacatattggtaacgtaatgggtaaccaataagtcaataatgttacatcatgtttgtttaagtccaaccgtaatcatatatcacactaaaaatggataccgtccattcaaacttgttaccgctggtactcgaatgtgaatcattattattactatttatgttacatttcgtgaaccaaacaacacttaaagtgtaatgcattcccattctgtaatttcagatgctgttctgtatcgtgttatctcggtttggccatctttttaactatgatctgtgagttatcactattttaggaaatggaaatttataaacagttaggctacaaatttactttgttatgctattggtttgtgcttcgacctttgatacattattaagcctgaatttgcattctttgatttatgaactggtaggtagatgttgatattgcaacacatatagttgttgaagatgacggaccaaaaagaagcatactttacatagagaccgccgaccggcctggcctacttcttgagataatcaagatcatcgcggacacaaatattgatgtggaatcagctgagattgatactgaaggtttggttgcgaaggacaagtttcatgtaagttacagaggtggaaaactaaacagctccttatctcaggcgctgaccaattgcctgcgttattacctccgaaggcctgagacagatgaagacagctattgattgttgtgtttgtcgaaccttcctatagtgcattagaatcagaaactttggcttcagttccttcgctatgggccccttgtactgctgcaaatggagttttccattgtagctgataaagtgccgacaaggtgcatccatatgtgcataggtggcactgaatcggggctcactggaccagtttgatattgtagtaatatatatacagctgggagcaacataatttaggtttcgatcatcattatcccatttgattcctgttataagggatcacattggaaaaccctcacatgattgatgttgtctgtattctgtaagttggtgcaatccatttgcatgtaaaactcagctgcgtactgtggcgttctatgtagtggaataaataaaagagcattacgaaatcaccgagcagcttgctcctgctttccaatc

SEQ ID NO: 19160 - DNA, 509 bp, Zea mays
  Clone ID: LIB3137-005-C2_FLI
cgggtgccgacctcgccaaggtgcaacgtgccgtgtgcatgatctccaactccaccagcgtcgtcgaggtgttctcccgcatcaacagcaagttcgacctcatgtacgccaagcgcgcgttcttgcactggtacgtcggcgagggcatggaggagggggagttctccgaggcacgcgaggacctggccgccctggagaaggactacgaggaggtcgccgcagagggcggcagtgatgacggtgacgaggaggaggaatactgatctgcttgcatgaatctgtttggctgtcgagccaggttgtggtgttgaaaaacctttgtttgtgtcctggcccccctgggtaatgtttgggtgtttccttccatcatcacttgctgaactgctctagtatttgcatttgtaattgaagtctgtcgctttaagcactcttggttctaaagatctctgtgcttttggggggtgtttttgcattgccccagattccaataaactcaccaaattcgggtc

SEQ ID NO: 19161 - DNA, 1214 bp, Zea mays
  Clone ID: LIB3137-005-F5_FLI
caggcgataccgtaccgagagagttgaagctgagaaagaatggcggggctctacgagaagcagtcggagacgtacgccaagaagcgtccgcagtaccccaaggagtggttctccatgctggccagcctcaccgcggggcaccagcgcgcctgggacgccgggtgtggcaccggccaggccgccatcagcatggcggagcactacgagagcgtggtggcgacggacgtgagcgaggggcagctccggcacgccaccgcgcacccgaaggtgcggtacctccacaccccggagcacctctcggaggacgagctggtgtcgctggtcggcggcgagggctccctggacctggtcgtggtggccacctccatccactggttcgacgtcccgctcttctacgccgtcgtgagccgcgccctgcggaagcccggcggcatgctcgccgtgtggggctacaactacgagatccacccgttcgaggacgcgctgcacggccagctctacccggccctgcggccgtacctggacccgcgggcgggactggccatggagcggtacaggtccctgccgttcccgttcgagcccgtcggggtgggcgccgagggcgcgcccgccgacgtggacatcgaggtggagatgacgctggaggacctggtcgggttcctgaacaccggctctgtcgtgaccacggcgagggccaagggcgtggacctggaggcggtcacgagggccgcgctgaagcgtgtggaggagcagtggggcggcgcgcccaccgtgccgaggaagctcgtgttcaaggcgttcatgctcgccgggaggcccaagtgctgaagtgataatgccgaataagtgtttgcttgtcagtcagcgtgagattgagatgagatcacagactacaatacatcatatagccagccactggattatgtctggcgatctaatgacatctgaagccactacatccaacccaggtagaggtagcaaactgcgtattcctttcatgctgtatgcagaatgaagaagaaatacctatttccattgcctagtgaattcccattagtatttcttctttcactggattatgttgtatgcagaatgaagaagaaatacctattttcattgcctagtgaattcccattagtatttcttctttcactggattatgttgtatgcagaatgaagaagaaatacctattttcattgcctagtgaattccc

SEQ ID NO: 19162 - DNA, 1515 bp, Zea mays
  Clone ID: LIB3137-005-G1_FLI
acttgagctcacacaatcacgctacagagcgcagagctgcacgctccaccggcgaactcacctcggccgccctcctctgccagatagcctccctctactattcaagcccaaaccctaaatcctcggttcccaaatggcgacgccgccgactgcgctgctgttgctcctcgcggcggcagcggcattccacggcgcgacggcgaagacgacgatcgagccgtgctctggcgcggacgcgtgcccggctcttctgggctacaagctctacgcggacatgaaggtgtccgaggtggcggcgctcttcggcgccgacccggcagcggtactggctgccaacgcgctcgacttcgcctctccaggcgccgccaaccgcatcctccccgcgggaacacccctccgcgtgcccacccgctgcgcctgcgccgacggcgtccgcaagtccgtcgccatccgctacgccgcccggccttccgacacgctcggctccatctccgaggtcgtcttcgccggcctcccctcggccgaccagatccgcaccgccaacgggctcgccgccgaggaccccgacgcgccgctcaacccgggccaggagctcgtcatcccgctcccctgcgtctgcttcaactccaccgacaacaacctccccgctgtgtacctctcctatgtcgtgcaggtcggggacaccgtggaatccatcgccgccagccacacaaccaccgtcactgatatcagcaatgtgaacgccatggggagccccattgtcgcaccaggcgacatccttgccataccattgtctgcttgtgcctcagcatttcctaactctgcttcggactatggattgcttgtggcaaatggaacctatgcactgactgctggtaactgtgtggagtgcagttgtgggccagcgaatctcaatttgtattgcatgccgtcttcactatcagcatcatgttcaagtatgcaatgctctaatagcagcctaattcttggtaatgtgactgcacaacccaccactggtggctgcagtgtctcatcttgcaactatggtggctatgtcaatggaaccattgcaacatcgctatcctcaggtcttcaacccatgtgtccaggaccgcatcaatttcccccactcacggcggtgccaactgcggcaaaccatgggtcttattccccatcacctgcaccaggacctggagatgctggtggtgccaccccaggaggttccagcctttctccatcaaatgagcctgctgggaacagctcacaagcggctgcgataaatcaaccatgccgtttcctcctcattttcattctttctgtgacattgtccttgcgggtgtggattcctgtgtagagtattgttttttttaaaaaaataactatgtagagtatttgttggctgtatttgtattgagcgtggaaggccttattggggccaggtggaacctgaatgaagaatgcagtagcctgtcttcgttagtgtccggtgaaactttggtatgattttggttctcc

SEQ ID NO: 19163 - DNA, 1159 bp, Zea mays
  Clone ID: LIB3137-008-A2_FLI
gctcgagcggcaccgcgttcatcgcgacgccgacggcgatctccccgccgccgtgaccgccccccttctcgcgcacccaccgtcgccggctgagccttggcctgcgaactttggttcatcggagataaccgacgaggagatcgacgccgcctccgccgcctgctgccgcatctgcctcgaatccgagtccgagcctggtgatgtgctaatatctccatgtatgtgcaaggggacacagcagttcgtgcatcgctcctgccttgaccactggaggtctgttaaggaaggaactgccttttcacactgcacaacatgcaaggcgcgattccatctacgggttgaatttctggaggatgacatttgtcgtagaatgaagtttcggatgttcgttgcaagagatgttatcattatattccttcttatacaagccaccatcgcagctataggtggtatggcatattttttggacaaagacggaaacttcagaaacaaattttctgatgattgggaacggtttctgtcaaagcatccagtgcccttttactactgtgttggtgtggttgtgttctttgtaatggttggatttttcgggctaatactacacctctcctcttacaacaacaacgatccgtgcctggttggctcccgtgattgttgctttgggtgtggtctggtggacttaccggcttcaatggaagcttgtttcgctttcgctgtcatatttgttattatgttggccatccttggagttgcctacgggtttcttgcggcgactgtggccatccagaggatctggcagcggcactatcacatacttaccaagaaggagctcacgaaggaatatgtggtggaggacctccctgggggttacacgccgccgaagatggatccagagcatgagcagcggttgaaggtgttgcagctcatgtagcttgcactttcgcaggtgatggacatgaagtatcgcatcttttttgttgcattgcatgtatgtacttttgcatgctgtgagtgttattagttggggtaaacatgtattctagtgacggaagtccatgtgcttataatgtacaaatatagaaccacggttaccagtcccaggtggggaatcacatacaggctaggaacaatgcaagttaaattgatcgactgtttcgct

SEQ ID NO: 19164 - DNA, 739 bp, Zea mays
  Clone ID: LIB3137-008-A4_FLI
cagacagcaccagcagtctgcgcgcactccgcagtcggtcgtggagctctcgagcaaaagcgcgcgacatcgtcggagctagctacgcgtgcgctgcgcgctccggccggcggatcggattggatggcgtcgtccaaggcgctcctcctgttggctgccgccgccgtcgctgcggcgtgcctggtcggcgccgcggacgccaagttcggccggctgggacggctcgtcatcaccggcgtcgtgccctgcaacaccggcagcctcatcgacatcgccagctcccccgccttcccgaacgcggacgtggagctgcggtgcgcgggcagggtggtggcgggcgcgacgaccaacaccaacggcaccttctccatggagctggacatgaccaacgcgctggccgcgttcatcggcggctgcacgctggtggtggacacgccgctcgtcaagtgcaacgccgacctcaccgacgtcggcagcctcgtctcctacctgcagggcccgctcacgcgcctgctcggcggcatcttccacctcttccccgccggcttctccttccacgtccgacgagcctgacgtcgtatctagctagagctttgtacgtacgtactactggacaacacaatcaaactttaaacatgctgctggtgctgggagctatatatatagctacaactacaaatgtaaaatgtttctagacatgtgtaatgctacgtacaaactgagacgagaagttgaaatg

SEQ ID NO: 19165 - DNA, 1767 bp, Zea mays
  Clone ID: LIB3137-008-C5_FLI
gccatggagactctgctcatctcggaggagcgcaaccaccagctccaccacttctcgggtcgccggaagaaggcgttagcagcgtcgcctcagtccacgcgcagctaccatgcgggcaactgccgggcgttccactccggcatcaccgtcggcatcctgccgtccccgcccgcgcagagggttgcactgacccactcctctcctgagcccaagacaccgaaacatcagcttcaccatgggaaaaagcgcagccgagcaatctctataaacctttcgacgtcccctccctctcgccctgagctctgggctggcccggggttctgcaattcgccgcctcccagctccctcccgatccccaagttctcactccaccagaagcgcagtgtctcacttgaatttccacctgctgaccggtcagacgacgaagaggtgcccgtgcatgccaagtcggcaccttcatcgccgactgcaggctcaggtgttaccttcttcagtggtactgatgctaccattgccaccgagaatctgaggaggatccttaacctcaaaattgaggataactgaatggcggttgggtagttctgtgtacatagtttaactacaactgacctttgtagtatgtatagggtaaccggggataaccactgtgtacctggcggtggttccttctgcagcagtactgtaggcggttagcaagcacagcgaggagtttaggaagtttggaaatgcagtgagaaggatgttgtggtaatggagatttggtggatttgcatatcactgcagtttcagagtcacctttgttccttgtaccttgtagttgcctattagtagtccaatactccatttagatgttatagtatttgcatcttccctgcccatcattaaccagtagccacagccttcatatcataatccttgtcatgtagttcatctcaggcagggcattgtaggctagctagtactgttcaagttctgtcatatatgtagtcttctgtaggattgctgcatcccttgaaacttgcattctgtatcacattgcatcctgctgactcacctcccttcataacatctccctgtgttatgcaaagcgcacaaggatctcccctctggcacttctgttttttggaatgaagatgctcagaggagttgttatgaagtcccgatccaatgttctttgtcctccatgtctgtactgactttagctatgcatctcctttgtcaccccagtcccattgcatgtgccatccaatccgtttcgaaccattcatctcaaaaattgcatttagtggtggttttccttcgtcttattatcttttgtgcctcatgatcctggagcatgcccaggattctagtctcctccatgtattctcataaaggacttcatgtatcagagatctgcgaatgctcaaccctgaatatggtttgcttgtccgatgccacttcgcctcatccatacctggagttcagaattggcgaagcacctatcacttagctatctgtttcttagtcagtattgtgtcagactgttgtttttgtgcaatatttgattggctactagtctgtttgtgttactgttcaagtttatggtactgatcatatatggcggccggagtgttccacgtcgatgctgtggcattctgttgctttcaagtaaaactagtcaatgttatgtaccttcatgttattttttggtcctgtttctgtatgctccattttccgtttctgcctacaagtatttattctgggttgccattccagttcgttgct

SEQ ID NO: 19166 - DNA, 1981 bp, Zea mays
  Clone ID: LIB3137-008-D8_FLI
gtaggtagtcttatgtttgcatctccctggcaaccggtaattggtgacaagcatcagagactgtgtgtaactccaattgcagttgattgttcttcgtcagtaaaattctctgtgaaaggtttcaatatagttcagccaaccacaaaattactttgtgtgtttgatgaaaaatatttaattcaagaagagacacaaatgctacttgaagattcaactatgcagcaaggccctcaatgcctgaccttctcttgttcctttccttgtacaagtggaagaggattcatagagattgaagactatgatcaaagcagcctttctgttccctttgttgtcacggacaaagatgtatgttctgagattcggatgttggagcatggattggatttagtttcatttgatcaaacctccaaaagaatagatgatctgatgatttatcgcagtcgagcattacattttttgcatgaaatcggatggcttcttcaaaggagccatgtgcgagctacgtctgagcagcgacaatattgtcctgaccgcttccctgttgcaagatttagatggctgctatcctttgcagttgatcaggaatggtgtgctgttctaaggaagcttctgaacaccatgttccagggtgatattgatgtattgtcaccaattgaatttgccttgggagaaaatctattgcatactgcggtcaaaaaacgctcaaagcctttagttgaatttctattaagatacaccacaacaaatattgctccagtgggcggtggagatggtgctccagttcagttcttgttcactcctgcgatgactgaactgtcaaatatcacacctcttcatattgcagccacaatcagtgatgctattggtgttttagatgctttaactgatgatcctcagcaggtaactactctaaattgccatgttcttacctgttgtagcctgctttaactaaaaaaaagcacatctacattcaaatttcaaagtagcagatttccgattcttagtgtaaaacagttaaaataaaaactaagaccaccatttattgttagaacctaagtctgcacctgaaatattttcatctgaaatgcattatgtacatatcaagaaaaagaaaggacttccatcaaaacattggtttgtgtattacattgattgttgaatagatcgtgtagggtgtataatatcacatcagagttccgcatgaggtgtagtatgataaaaattcatttaccttaaaaacattttcttttacttttgagaatttgtgcaagcactgaaacatttgctgtctggcttctttctgcctaaatgtctcagttgggaatcaaagcgtggaagaatgctcgtgacgccactggcttcactcctgaggaatatgctgcaaagagaggcaacatatcctatattcaaatggtacaggacaaaattgacagaagggtgaccagagctcatgtctcggttaccatccccagcacaattgatactgtcggaaagcatggtagccgaatgaagcctgccgatcaaatcacatttggtgttgagaaaaaacaactaagcatcaaccaaacattgagctgcagacagtgtgtccagcaggcccagcagcttgcattccatccccggacaaataggtttctgtctaataggactgcgatgctttccttggtctccattgctgccgtctgcgtctgtgtgggattgatcatgaagagcctgccacaagttggttgtatgaagcctttcctctgggacaatatacgttggggccccaattgatagactgcagaagagccagcccgattgtatcagtgtatgatgaagatgtttgcgccgagcgaagctagtttcttgtaatgtacatgtttcttatactaaatgtctaacttatttctgtttatagtaaaacctgtgaacttgcctagcttgtaactccattgcatttgcatcctgactgaagtaaagcttttacttgttttggttg

SEQ ID NO: 19167 - DNA, 1467 bp, Zea mays
  Clone ID: LIB3137-008-E5_FLI
ctccactctcactgactcagaggcgacccgcggccgaccatgcgggcagcagcggcgtccctggtgttggtaccccgcctcgtcctcttcgtcctgctgctgtccggctccggcgtgccgactgccctgtcgaagtcaacgctggagtgctgcgcctcctccagcgcctgcccggcgctgctctcctacacgctgtacgcggacctgaagcttgcggagctggccgcgctgttcgcggccgacccgctggccatcctggccgccaacgccatggacttcgcggtcccggacccgggggaccgcatcctcccggcggggctcgcgctgcgcgtgccggtgccgtgcgcctgctccgacggcatccgcaaggccacctccgcgcggtacgtggcgcgggcgggggacacgctggcgtccgtgccggcagcgtctacggcgggctcaccacggccgactggatccgcgactccaacggcatggccgaggaggaggacgccgccctcgacgccgggaccacgctgttcgtgccgctgcactgcgcctgcttcggcggcgccgacagcggcgcccccgccgtgttcctgacgtacccggtggccgagggcgacaccgtgccggccatcgcgcggaggttccgcaccacgggcaacgacctgatgagcgtcaacgacctggccaccgccgacgtcgccgccggggacatcatcgtcgtgccgctgcccgcgtgcgcctcgtcgttcccggcgttcgcgtcggacgccggcctggcggtggccaacgggacgtacgcggtcaccgccaaccgctgcgtgcagtgcagctgcggccctggaaacctggacctgttctgcgtgccggcgccgctggccgactccacgtgctccagcatgcagtgcagcaacagcagcatgatgctcggcaacttcacgctcctcatgaccagcgccggctgcagcgtcacctcctgcagctacggcgggtacgccaacgggaccatcctcgccacgttaaccacgtcgctgaaaccccagtgcccaggcccgcaccagttccctccgctgatgccgccgccgacgtcgtcgttcttcgagacctacctcggcccgtcgccgacgccgatggcgtccgaaggcggcatgggtccgcagatggctggcatggcgccgacaagcagcccgccggtgagttcagggccgccgacggcaggttcacacgtcggcattgcacaggtcgcttatctctgcctcgtcgccagcctgctgtggtagactggtagatgggctgcctgcgagatcggaaaggggattcttttgtacgggagcagtcagttatttttctgcgcggcgtgtaattttttttgtcatccttcgttctatctgtcgtccatcatgtattatcgcgaactcatgcaaatacggagtactgtattcgtctacgaaggaaggtgacaatggccggggattgtgt

SEQ ID NO: 19168 - DNA, 1330 bp, Zea mays
  Clone ID: LIB3137-008-F2_FLI
cccgtctttaaaaagtacaccctcgactcgtcctccgcattccccgtttgccttgtttaccattcctccccaaaacacatcctgcgatcctcgaagcctccgccgagcatcgatcatgtcggcctactgcggcaagtacgcggatgagctcatcaagaatgctgcctacatcggcacccctggcaagggtatccttgctgctgatgagtcaactggcaccattggcaagcgcctttccagcatcaatgtcgagaacgtggaggagaaccggcgggctctccgtgagctcctgttctgctgccctggtgccctccagtacatcagcggtgtgatcctcttcgaggagaccctctaccagaagaccaaggatggcaagccttttgtcgatgtcctcaaggagggaggcgtcctccctggcatcaaggtcgacaagggcaccattgaggttgttggcaccgacaaggagaccaccacccagggccacgatgacctcggcaagcgctgcgctaagtactacgaggccggtgcccgctttgccaagtggcgtgctgttctcaagattggccccaacgagccgtcacagcttgccattgacctgaatgctcagggtctggctcgctacgccatcatctgccaggagaacggtctggtgccaattgttgagcctgagatccttgttgatggccctcatgacattgatcgctgcgcttacgtcactgagacagtccttgctgcctgctacaaggctctcaacgagcaccatgtcctcctggagggtaccctcctgaagcccaacatggtgactcctggctccgactctaagaaggtgacacctgaggtgatcgcccagtacaccgtccgtaccctccagaggaccgtccctgctgctgtgcctgctgttgtcttcctctccggtggacagagcgaggaggaggccaccctgaatctcaatgccatgaacaagctcagcaccaagaagccatgggccctgtccttctccttcggccgtgccctccaggcgagcaccctcaaggcctgggctggcaaggtggagaacgtggagaaggctagagcggccttcctcgccaggtgcaaggccaactccgaggctaccctcggcacctacaagggtgatgctgccgccgacaccgagagccttcacgtcaaggactacaagtactgagttgcttctctttgcgatcccgttgttttggaactcctgcctgcgagtaggttgctgagtgttgtttgcttgttagagcttttatattcggacatgaaaaaaacatgcttcctatgtggatgatggttatctttatattcgtatatt

SEQ ID NO: 19169 - DNA, 1164 bp, Zea mays
  Clone ID: LIB3137-009-E10_FLI
ccgcgacatcgaggtggccaccatcgacgtcgccataggcaacacgtacctggccctcgcccgattcgacgaggccgtcttctcgtaccagaaagcgctgaccgtgctcaagtctgcacgcggcgacgaccaccctaccgtcgcgtccgtctacgtccgcctcgccgacctctaccaccgcacgggcaggctccgcgagtccaagtcctactgcgagaacgccctgcgcgtctacgccaagcccgcgcccggcgctgcccccgacgagatcggcggagggttgatggagatcgctgccatctacgaggcgctcgacgacctcgacgaggcgctgaggcttctgcagagggcgctgaagctgctggaggacgcgccggggcagtggagcaccgtcgctgggatcgaggcgcagatgggcgtcctgtactacatggtggggaggtacgcggagtcgaggagctcgttcgagagcgcggtcgcgaagctgagggccagcggcgagaggaagtcggcgtttttcggcgtgctgttgaaccagatggggctgggctgcgtgcagctgttcaagatagacgaggctgcgcagctgtttgaggaggcgagggcggtgctggagcaggagtgtggcgcttctcatcctgacactcttggcgtgtacagcaaccttgctgcaatctatgacgccatgggaagagtggacgacgcgattgagatcctggagcacgtgctgaaggtgagggaagagaagcttggcacggcgaaccccgacgtggaggacgagaagaagcggctggcagagctgctgaaggaggcggggcggtcgcggaaccggaagcagaagtcgctggagaacctgttcggtaccaactcacagcgggcgaagaaggaggccgggaggaggtggtccaacttcgggttcaggagctgagctgaggtgccctttttgtttgtaacattaaaaaaaaaggcacgtgtaaagatgttgctgtaggtgagtagtattgttagcaaggtgggtggtgattatgctgtttgcttggcactgcattgctgttactgttttgggttattttcgagttaaaatttgtttttttattattaactgcgagctgagctgctgtacccggatggatggagaaagagtctttgtggtgttgactggtg

SEQ ID NO: 19170 - DNA, 2252 bp, Zea mays
  Clone ID: LIB3137-010-A12_FLI
gcccccttctccagcgtcaagcgccttctcatgggcgccacggggaggcacccggactcctccctactccgcgacctgtcccgcctccccttccccgctgccgtcggtggcggcgctgtcgtccacgccgaccacatcggccgccgcatcgcgctctcgccgacccacctcctctccatgctgctggcctacctcaagcagctcgcggaggccgacctcggcggcgcccccgtagccgactgcgtgatctccgtgccctgctacttcactcaagcgcagcgccgagcctacctcgacgccgccgccatcgcggggctcaggccgctccgcctcatgcacgacctcgccgccaccgcgcttggctacggcctctaccgctccgacctcggcggctccgggggtcccacctgtgtcgcgttcgtggacgtcggccaatgcgacacacaggtcgcggtcgtctctttcgacatgtcggggatgaaggtgctgtctcacgggttcgatgcagacctcgggggcagggacttcgacgaggtgctgttcgagcatttcgccgaggagttcaaagacaggtacatgattgatgtcacaggaaatgtcaaggccagtatgaggttgagggcagcctgtgagaaggcgaagaaggttctgagcgcgaacgcggaggctgtggtgaacattgagtgcctgatagaggagaaggatgtgaggggggtgatccgaagggaggacttcgagaagctatgtgccaggctgctggagagggttgttgaaccttgcaacagggcggtgacagattcaaggattggattggagaggctgcattctgtggaactcgttgggtcaggttctcgtgtgcctgccattgccaaggtgcttaaggaattcttcagaaaagaacctagtcgcacactcaattcaagtgagtgtgtggctcgggggtgtgcattacaatgtgcaatgcttagtcctacgttccgtgttcgggaatacgaggtgcacgatgcaatccctgcttccataggattttatactagtgacggcccagtttcaacattgtcaagtgatgcattgttccggagaggcctgccctttcccagtgttaagatcattactctacagaagaacgacagttttagttttgatgcctattatgtggatgcgaatgaattgcctcctggtacctcaacagacatcggtagttttcagattggcccattccaagcacatatggaagcttctaaagtcaaagtaaaaattcgtttgaatttacatggtttggtttcagttgaatctgctgctttgatagatgattatcaaaggaatgcaacttctgctgaccatatggaggtggataccagcggtgatgacatgggtcacaagtcaagaagtgaaaggtctatccagcggcaggagttgccaatcactgagtacatctgttgtgcaatgagcaagcaggaactgctggaagctcaggagcaagagcaccaattggcttatcaggataaacttatggaacggacaaaggacaggaagaatgcattagaatcttatgtatatgacacccgtaacaagctttctgagaggtaccggagctttgctactgattcagaaagggaacaaatctcatttaatttacaacagactgaagattggctttatgaagaaggtgatgatgagacagaagtggtttacagtagcaaacttgaggagctgaaaaagcttgtagatccaattgaaaatcgttgtaatgatgacgaagtgagagctgaaatcgcaagggagcttttgaagtgcattgttgaccacagaatggctgccaagtcattatccgcacctgaaagggatgctgttgacaatgagtgcaataaagctgagcagtggctaagtgaggggtccaaacttcaagaatccttgcccaagaatgtggacccagtactttggtcctgtgaaatcaagggaaaggaagaagagctggatatgttctgtcgaaacataacaaggcacaagggctccccagcaaggacagatggcagcaggggttcagatcacatgcctacacctgatagagattagatatattcacaaggtttcttcactgtacgactgataacaccgtcatataattgactctgtaccacactaggcccgcattaggtgaccgcttcttggttctccagggtgttgtgcagttttcacttgagagcctactaatcatggttattgatacctgttaattctttttctgtact

SEQ ID NO: 19171 - DNA, 1518 bp, Zea mays
  Clone ID: LIB3137-019-G9_FLI
ctcctacttcatggcagcatgattcgcgaagctcaagctcaccccaaccacttcctcttcctccaggttccccatgcttgccttcctcttctctacagtggaagaaggggaagttgctaggtagtgggacgtttgggcaagtatacatgggattcaacagtgaaggtggtcaaatgtgtgcaattaaagaggttaaggtcatttcagatgattctaactcaaaggagtccctcaggcagctaaatcaggaaatcgtgctgctgagtcagctgtcacatccaaacattgttcagtactatggcagtgatttgtgcaatgagacactctcggtctatctcgagtatgtttctgggggctctatccataagttgcttcaagaatatggtccgtttggggaggcagtgcttcggaattacacagcacaaatcctttctggccttgcatacttgcatgggcggaatacagtgcatagggatatcaaaggggcaaacatacttgtagatcctaatggtgacatcaagcttgctgattttggtatggcgaaacatatatcagcatatacatctatcaaatccttcaaagggagcccttactggatggcaccagaggttattatgaatagcaatggttacagcctttcagtagacatttggagccttggctgcaccattcttgagatggcaacagcaaagcctccttggagtcagtatgaaggggtggcagcaatattcaaaattgggaacagcaaagacataccagatatcccaaataatctttcttctgaggcaaaaggcttcctgaaactctgcttgcagcgtgatcctgctgcccgccctacagctgctcagctgatggatcacccttttgtcaaggaccaggctacagtcaggagttccaggtccagtatcacaagggatatgtttcctaattcaactgacggaaaaaacagcagggtgaaaattgaaacttcgtcatacagaagtttatctcctttaagagatcctgatatccttggaagaaacttgccaggaccaacatcccctattccttcgacatcaagtcgcaggatcgcagcattgaacacatccaatgttcggatgaacatgtcgctgcctgtctctccctgctctagcccgctacggcagtacaggcagtccaaccgaagttgcttgcgctcccctccccacccagcctattcagctggagcagccaactacaatcctatcaacaatgcactctacccaacgcgaccaagcagcggtctcacagatccatggctcgaaatctctcaggtgaaaacgcaaacttttgattctccaagaagattgtagagattccaaaaagaagcaatactttgtatacaggcagggaaagaagtgtttcattatttatgttgttagagacacaaaggaacaccttttttttggtgtttcgccctttctgtatgtatctttcacccaggatgcagttgcatcgcctttgtacaaattcagagaagagctagtcaaaaagagtagc

SEQ ID NO: 19172 - DNA, 1287 bp, Glycine max
  Clone ID: LIB3139-087-H10_FLI
agttcatccacatccaccccatgtcccaaaacctcatccaaagcctccagtgcatccccatccaccttatgtcccaaaaccaccagttgtgccagttacaccaccatatgttccaaaaccaccaattgtgaaccctccctatgtcccaaaaccgcctgttgtgccagttacaccaccttatatccctaaaccaccagttgtgacaccaccatatgtccctaaaccaccagtggtgccagttacaccaccatatgtccctaaaccaccagtggtgccagttacaccaccttatgtgccaaaaccacccattgtgaaaccaccaattgtttatccaccagttgtgccaaaaccaccaattgttacaccaccttatgtgccaaaaccacccattgtgaaaccaccaattgtttatccaccagttgtgccaaaaccaccaattgttacaccaccttatgtgccaaaaccacccattgtgaaaccaccaattgtttatccaccagttgtgccaacaccacctattgtgtatccacctgttgtaccaactccaccggtggttactccacccgtggttacaccaccaagtcctccaagtgaaacaccatgtccaccaccaccaccaccagtggtgccatacccaccaccagcacaaccaacatgccccatcgacaccctaaaactgggggcatgtgtggatgtgcttggtggcctcatacacattggcataggcagcagtgcccagcagacctgctgtccggtgcttgcagggcttgtggacttggatgctgctgtgtgcctctgcacaaccattagggctaagattcttaacatcaatatcatcatccccattgctcttcagcttctcattgactgtggcaagaccccaccagatggattcaagtgtgcagatagttagttaatatataattaattattatggaattgcataactcatgcatgaataaaaacaagttgagaagatcgatgtagtgaaggaatggtctttcgtttctctttcatcaagttgttgtatacccaaaggccaaggacaacataattgtactatgactctatgagggccaatattggtatacttgttcaaactacataattttctgatctgccttgtatacaaagtcatgcaatattgccatagcatctttttaattattttctctgtttttctttgtctattgcatgtgtggttctgtgtgcatgtcagcctgtgtaagctttcccgtgagtacgttgggaaatgtacaagttagcgaagctttagatttttcttag

SEQ ID NO: 19173 - DNA, 559 bp, Glycine max
  Clone ID: LIB3139-088-F8_FLI
cgaaaatgatgatgtaaatagagcagtgacccaaagattgcttcagaaactaggttgtgttgtaactcctgttgcttcaggatttgaatgccttactgtcattggacctgcaggatgttctattcaagtcattcttttagatcttcacatgcctgatttagatggctttgaggttgccacgaggattcggaagtttagaagtggtaatcaacctatgattgttgccttgactgcaagtgcagaagaagatttgtgggaaagatgcatgcaagttggtattaatggagttatccgcaagccagttttgttgcatggaattgctagtgaactcagaagaatcctcatgcagggaaataatgtcctttgagaatggaatggagggtgcaagttgtaacacttaagcatctcaagtatttaagttattattttaagtcacattcttggtagaattagaacacagcactctttggctcccacttgctagcaatttttagcttagagatgttattatacaaacgattttcataaggaagaaaaagatggtatacagattagttcc

SEQ ID NO: 19174 - DNA, 894 bp, Glycine max
  Clone ID: LIB3139-089-G3_FLI
ggcttgagctttaacgcgccaaattacaatcaccatgtcctcttcctcttcctccttcttccccgcccatatcaccaccgaccaagaattctccctcatcgttgccgccctcaccaacgtcgtctccggctctacctccagctcctccgtccctgaattccgcttcccgcactcctccccgcctctttcttccgccagccttatgccgccacccccgcctagcatccacacgtgtcgcgagtgcaacatcgcaggatgcctgggatgcaactttttccccgaggaacaaaggaagaaatacagaggagttaggcagaggccttcgggaaagtgggccgccgagattcgcgatcgtcatcgttcggcccgggtctggctcggtacattcgaaaccgccgaggacgccgcccgggcctatgacaaggcctcgttcgagttacgcggcccacgggccaagctcaatttccccttggtcgacgagtcgctcactctccagccggagatggctgcaacagaagagcagattaacaacgaggataatctcaatcaaggcatgggaatggactcgcacgaattctgggacaggatcaacgaagctgattttcatccgttcatgatgatgatggattttactggagattcttcagactctgctgccactgggtacactctcagttcctgaaattgatattcaattaaaccaaataattagttttgttaatgtgcgtttaacaattgtacaactcggctaagcgtatttgttaaattagcatttgctagctccactgcaatacattacactacatgtatttctgtaatatctttcttccgctaggtttttttcgtgaggaagttgctgcatagtacaaatcaagagttttaatgtttcatttc

SEQ ID NO: 19175 - DNA, 799 bp, Glycine max
  Clone ID: LIB3139-090-C11_FLI
caaaaattgcgcaacagctgccaggcagaacagacaatgaaatcaagaactattggagaacaaggattcagaaacaagcaatatatgcgaaatttgaggatcacagaagagcaggatttgtagaatttgtcaagggtctacagatgacaagatgtcttcataaatcacaagaatcatctccttcggccatgtcaacccaagaccaagcaattcctttaccttttgatggtgttactgttcctcattattcatcatttgggattgggacaacaccaacaatacaaatcacttgccatggagatctcaatcatttgaatcagcatgagcagaactcagactctgaacaccacaatagttcatgcatttcctcttcagaatcagcaaatatcccaaatatgagtcagccttttggatacactactagtcaatttcaggccttagataactgtgactttggcatgtgtttatatgatggctatagcatagataacaattcctatgacagggatgccttgaacctgacaaccacaatggttgctgggaatctggaactcccagtgtttgattgccaaacattagaaaccaataggctaaacaaggaatttgcaagtagcacatggagcatggatgaattatgacaatttaggaacatacaaagattatcatttagattctagagtatctttttagaaccactcactatctcttttataatatgtagtgcttgtcattagataatcgattattcaatagcttagctataaatataaatgtaaagactaaagagtagttgttttat

SEQ ID NO: 19176 - DNA, 647 bp, Glycine max
  Clone ID: LIB3139-094-C12_FLI
cttctggcttctgctgttaataacaaaaaaaaaaaggaagacataataacaaattatgcttatgatgattgatttaatgaaaaccctagttattatcagaaaaattagaagacacatattccctcacttccctcgcgatcacatccatcatcgctgcccatgcccggtacggtaacaggtgggccaccatagcccgattattaccgggccgaaccgataacgccgttaagaaccactggaactccacgctcaagcgcagagccaagggtattaacgttaatgttaatgatgccgacaacgaggatgacccgttgaccgcattgactcttgctcctcccggtattgctaatgccactttgaccgaagacgccgtaccggaccaccgggcctcgccggagagtgcggcggaggggttttgggatatgatgagggatgtgatcgcgagggaagtgagggaatatgtgtcttctaatttttctgataataactagggttttcattaaatcaatcatcataagcataatttgttattatgtcttccttttttttttaggcaaattattctgcaatttgattttgccttactggactttggaatcggatcagggaaataaattaaaacccttctggcttctgctgttaataac

SEQ ID NO: 19177 - DNA, 812 bp, Zea mays
  Clone ID: LIB3150-009-D1_FLI
gagagaaggaaaaatatccccaaaccctagctcccgatctcgatggcgaaccctcgcgtcttcttcgacatgaccgtcggcggcgccccggcgggccggatcgtgatggagctgtacgccaacgaggtgcccaagaccgcggagaacttccgcgcgctgtgcacgggcgagaagggcgtgggcaagtccgggaagccgctccactacaagggctccaccttccaccgcgtcatccccgagttcatgtgccagggcggcgacttcacccgcggcaacggcaccggcggcgagtccatctacggcgagaagttccccgacgagaagttcgtgcgcaagcacaccgcccccggtgtgctctccatggccaacgccgggcccaacaccaacggctcccagttcttcatctgcaccgtcgcgaccccttggctcgacggcaagcacgtcgtcttcggccaggtcgtcgagggcatggacgtcgtcaaggccatcgagaaggtgggcacccgcaacggctccacctccaaggtggtcaaggtcgctgactgcggacagctctcctagatctctctgatctggtctgttcggccgccctccctccgtcatcgtcgactccccctgcgtccgttcctttggatctgaataagatggtggtgatctgagtggtggtcttagtttatcatgtatcgctcgcagtttaatttagcggtttaggtgtggatctgtgaaccccatggcgcctctgcttgattcgtgtttcacctgttatgttctgagattcatgataatgctatgagaactgaaattcccgtttc

SEQ ID NO: 19178 - DNA, 846 bp, Zea mays
  Clone ID: LIB3150-009-E1_FLI
atggggaaggcaaagagcaagggccctaaattcgcggcggtgaagaagattatcaccaagaaaaccatcaataaatacaaggaggatgtgctgaaccacaagaagaaggacgtggacaaggagaaactcggccggaatgtgccgcaggtttcgtcggcgttgttcttcagctacaacacagcattggggccgccgtatcgggtgattgtggataccaacttcatcaatttctcgatacagaataagctggatttggagaagggaatgatggattgcctttatgcaaaatgtaccccatgtatcacggactgtgttatggctgagcttgaaaagctggggcagaagtatcgtgtggccttgagaattgccaaggaccctaggttccaaagattagcatgcacacacaagggaacctatgctgatgactgcattgtggagagggtcactcagcacaaatgctacatagttgctacttgtgatagagatttgaaaaggaggataagaaaggttcctggtgttccaatcatgtacatcacaagacataggtattcgatagaacggctccctgaggccacaattggtggagcaccaagaatctgatcggtgcagacatgagatgttctgggatgtaatactatggcggtacttgtccatctgaccaagtcactatttcatgtttcagtccacgacaaggactaggataagaacgctgctttctaggttgagcttactgtaactactaagaaatttttattatgtaccaaccttatcatttctacaatgttgcgggatgtctgaagtaattctttgttaaaagatcgggtatcctgctcccttttgcttctc

SEQ ID NO: 19179 - DNA, 773 bp, Zea mays
  Clone ID: LIB3150-009-G10_FLI
gaaattttcttgggcgttcttcggcttcattgtcacaaggttcgagttcgtcaccgtctagtacgactgtgcgagggaggaagaggcgaggagaagatgcagatcttcgtgaagaccctgacggggaagaccatcaccctcgaggtggagagcagcgacaccgtcgacaacgtcaaggccaaaatccaggacaaggaagggattcccccagatcaacagcgactgatattcgctggcaagcagctggaggatggacgcacgctggctgactacaacatccaaaaggagtcaactcttcatttggtcctcaggcttaggggtggaaccatgatcaaggtcaaaactctcactgggaaagagatcgagatcgacattgaacccactgactcgattgacaggatcaaggagcgtgttgaagagaaagaaggcattcctcccgtgcagcaaaggctcatctatgctggtaagcagcttgctgatgacaagaccgcaaaggactacaacatcgagggtggatctgtcctccatcttgtccttgctctgaggggtggttactagtctaaacctgatgaactagcagtcagataaactgttgtgttggctgcgaaatgtgcaggcctgatgttgaacttgcaaggagataataacaaattatcagctttgcgcctgtgcccagtggaaggggctgtcttccaagttattgtctgatatggaattgttccagattatcatgtctcggcgtttacccattattattatttgatttgaacctt

SEQ ID NO: 19180 - DNA, 890 bp, Zea mays
  Clone ID: LIB3150-038-A7_FLI
ctctccttcccggtctcctccgcccgttgccttcgtcccctccatctccggctgcgacgccggcgagcccgacaccgcgaatcggatccgccgacaaggcgagagggaagagatggggctcacgttcaccaagctgttcagccggctgttcgccaagaaggagatgcggatcctgatggtgggactcgacgccgccggaaagaccaccatcctctacaagctgaagctcggcgagatcgtcaccaccatccccaccatcggattcaatgttgaaactgtggagtacaagaacatcagcttcactgtctgggatgtcgggggccaggacaagatcaggccactgtggaggcattacttccagaacacccagggtctcatctttgttgtggacagcaatgatagggaccgtgttgttgaagcaagggatgagcttcaccgaatgctgaatgaggatgagttgcgtgatgctgtgttgcttgtgtttgctaacaagcaagatcttccaaatgctatgaatgccgctgagatcactgataagcttggactgcattcacttcgccagcgtcattggtacattcaaagcacttgtgctacaacgggtgagggattgtatgaaggcctggactggctgtccagcaacattgcaaccaagtcctaaattgtcaagcaaggtttggatcatctaggagcttttggatgatgatgatggtgctggatatttagggttgggttggtatttccgtatgtaagatgtatgcccctgagctcggcagtttttgagctctgcttaagattctcacagttaaattgttttatgtaatttgggccttgagatgtttctgaaccaaacagctaaaagagttcagttgagttaactggttgccattatt

SEQ ID NO: 19181 - DNA, 1224 bp, Zea mays
  Clone ID: LIB3150-038-B8_FLI
ccaccacaagatccaccgattcgagcagggcgacgtggtggccatgccggccggcgcccagcactggctgtacaacgacggcgacgcgccgcttgtggcggtctacgtcttcgacgagaacaacaacatcaaccagctcgagccttccatgaggaaattcttgctggctgggggcttcagcaaggggcagccccacttcgccgagaacatcttcaaagggatcgacgcccggttcctgagcgaagccctgggcgtcagcatgcacgtcgccgagaagctgcagagccggcgtgaccagcgaggcgagatcgtccgcgtggagccggagcacggctttcaccagctgaatccgtcgccgtcgtcgtcgtcgttttcgttcccatcgtcacaagtccagtaccaaacgtgccagcgcgacgtcgacaggcacaacgtctgcgccatggaggtgaggcacagcgtcgaacggctggaccaggccgacgtctacagccctggggctgggaggatcacacgcctcaccagccacaagttccccgtcctcaacctcgtacagatgagcgcggtgcgggtagacctgtaccaggacgccatcatgtcgccgttctggaacttcaacgcccacagcgccatgtacggcatcaggggcagtgcaagggtccaggtcgccagcgacaacgggaccacggtgttcgacgacgtgctccgtgcggggcagctgctcatcgtaccccagggctacctcgtcgccaccaaggcgcagggagaaggcttccagtacatcgccttcgagacgaaccctgacaccatggtcagccacgtcgccgggaagaactccgtcctgagcgacttgccggccgccgtcatcgccagctcgtatgccatctccatggaggaagctgcagagctcaagaacggtaggaagcatgagctggctgtgcttactcctgctggcagtggcagctaccaacaaggtcaagctggcagcgcccaacagtaggcacaacctcagagtgatctgcctgaataagtactcgtagactgtaataattaaacaaagcttgctcatggttaaactgcgtgttgattagtctttcaactacatagctctaaagtttttgatacaccgagtgatttgccaggaaaaaaatgagcagattgttgtaagcaaaacatgtttgttatggctaaactgcatgtctacctggatttgtattttttttc

SEQ ID NO: 19182 - DNA, 732 bp, Zea mays
  Clone ID: LIB3150-038-E8_FLI
ggcaaaagagcgcttggtgcctgtgaaaggcctcgcgaaggtggtccagtgggtgaaagaccacgggtacaagcgcgcggcggtgaccaacgcccccaggatcaacgcggagctgatgatctcgctcctgggcctctcggacttcttccaggccgtcatcgtcggaggcgagtgcgagcagccaaagcccgcgccgtacccttatctcagggccctcaaggagctccaggtgtccgcagagcacagcttcgtcttcgaggattcgcctgccggtatccgggctggcgtcgcggcagggatgcctgtcgtcggtgtggcgacgaggaacccggagaagtccttggtggaagcaggagccgcgttgctcgtcaaggactacgaagatcctaagctctgggcagcgcttgaggagatcgacggagaggaagctaagctgaagaaggccagcgaatgatctgatatgacgatgagccattgattagatttattgcagattaaatctgcctccagcatgattctgttcctagttatgcgctgcggagagagctcatctcatcagggtatttatgagattctagcttcgtatattgtttttcttcttcttgattgaactgagatcaaataagacaaagctgctgtgccttgttgtgtgccatctgtgtatgaacttttcggttcagcctccagcagtctttaatctgaaagaaagacgaggtaggaattctctccctc

SEQ ID NO: 19183 - DNA, 1274 bp, Zea mays
  Clone ID: LIB3150-038-F3_FLI
ggaaggaaaggaggtgcttcaatatgaaggcgctcattcttgtcgggggttttggaacccgccttcggcctttgactcttagcttcccgaagccccttgtggattttgcaaacaagcccatgattctgcatcagatcgaagctttgaaagaagttggggtcacagaggtggttttggccatcaactaccgcccagaggtaatgattaatttcttgaaggactttgaggataaacttggcatcacaattacatgctcccaagagactgagcccttaggaactgctggccctcttgctctagcaagggacaagcttgcggatggatctggcgagccattctttgtcctcaacagcgatgtcataagcgaatacccatttgctgaactcatcaaatttcacaagtctcatggtggtgaggcaacaattatggtcactaaggtggatgaaccatctaaatatggtgttgtggttatggaggaggcaactggcagggtggaaaggtttgttgagaagccaaaaatatttgtgggcaacaagatcaatgctgggatttacttgctgaacccatctgtccttgaccgcattgaactgagaccaacatcaattgagaaagaggtcttccctcaaattgcagctgatcaacagctctatgcaatggtccttcctggtttttggatggatgttggtcagccaagagactacattactggattgcgtctttatctagactcgcttaggaagaaatcggctgccaggctagctgctggagcacatgttgttggcaacgtgctggtgcatgagagcgccaagattggagaaggttgcctgatcggtcctgatgtcgcaattggacctggatgtgtcgtggaggatggcgtgaggctttcccgctgcactgtcatgcgtggtgtgcgtatcaagaagcatgcctgcatctcgaacagcattatcgggtggcactcaactgttggacaatgggcacggatagagaatatgaccatcctgggcgaggatgttcatgtgtgtgacgaggtatacagcaatggcggtgttgttctcccacataaagagatcaagtcaagcattttgaagcctgagatcgtcatgtgagagttctccagttttaactacagtacattcttaagttcttcgactaagtgaggattgcagatccccttttataagtgatatctattggtatctttggcctaattcaaacagcttcagacatgttcgcttgctaaactgttgacaatgtatccttgttctttgttg

SEQ ID NO: 19184 - DNA, 2357 bp, Zea mays
  Clone ID: LIB3150-041-E7_FLI
gccgccgcctggatctggcctagccgagcctcggctgctctgaatcccgattcggttcggctcccttgctctgccgtcgcttccgaggcgtgctcggatctcgtcggagtagagggcctcgcggctcgcttcgggggcgagatggatcatgtggtcgggggcaagttcaagctcggcaagaagatcgggagtggatcgttcggggagctcttcctcgccgtgaatgtgcagaccggggaggaggtcgccgtcaagctggaaaatgtcaagacaaagcacccgcagcttcattacgagtccaagctatacatgcttctccaaggaggaactggcattccgcacctcaagtggttcggcgtcgagggggactacaatgtgatggtgatcgaccttcttggccctagccttgaggacttgttcaactactgcagcagaaagttctctctgaagactgtgctcatgctcgctgaccaaatgattaaccgggttgagtacatgcatcaaaaggggtttcttcaccgtgatataaagcctgataatttcctcatggggcttggtaggaaagccaatcaggtctggtcctatatatgtgcttaattcttgctgtccaactcgttatatttgaaccaaaagtttttacatgcattctgcctcttgctttgcttgtgctgcacttgaggatccccaaagatcctgcactactgatttggatgggtggggtttagtgcgttatgtgatgtattgcttacattcgatgatgatttcctttttaatgtgcctgcattttacagtctgctacccataatttatttcttttatctttggctaatgctgtatggtttccttatctatttagctgctattatgttatgttccagaaaacacctcttctctggaattgagatctcttggtactaattgttgttgaacttttactggcttttgtggcaggtatatataatagactatggactagcgaaaaaatatagggaccttcaaactcataagcacatcccgtacagagagaacaagaacctcactggaactgcacgatatgcaagtgtcaacacccaccttggtgttgagcaaagcaggcgagatgatttagaatccctcggttatgttcttatgtacttccttaggggcagcctaccatggcaggggctgaaggcaggaaccaagaagcagaaatatgacaagatcagcgagaaaaagatgctcactcctgtggaggtactctgcaaatcgtacccatcagagttcatctcctacttccactactgccgttcgttgcggtttgaagacaagcctgactattcttacctgaagagactattccgcgatctctttatccgggaaggataccagttcgactacgtgtttgactggaccattctaaagtatcctcaaataggctccaacccacggaccagggccggtgaaagaactagtggcgctgctggaccctcaatggataggattgagaagaccccaggagaagcgtccggtagaaggaaccctagtggtcctgtgaatcagagcgacagttacgcgcaacggccacgcgagaccgtatccatgtcgctaaaggagattatgcatagcactgaccggtctggggaaaggactgtggagagaccacgcacgtcctcacgcacaggcagcgcatcccgcagagccgttgcgtcaagcagcaggccagcaacctcgtccatggaaccaagcgagcagcagtatagccgggcgagcagactgttctctagcaacagtggcagccggccatccagcgcccagagagtcaaccctgcgccgggcgagtctagggccacctccctttcgcgggcagcggtcgcgagaggctcccgcgacgagccactccaccgcagcctggagctcctttcccttggcagcggcaagaggaaatagcgggaaggaagccgatctgatagcggaagggaaaagaatgcctgttggcgactctgtaaatgacggggcatgtcacctgttcttcgccagcagttcttcccctggggcatcccgtaatttcatggtgcccgccccggccttttaccatggctccgtagatagcaataattcgttgttgaatgtgcgtgctgtgttgcagtcgcgttagggccaagtcctagcctttgtggtgattagatttagggggtggtcaagattcacatatttatgtttcttaaccctctcctggacttggcgactcttttttttaccccctcccgagacaagtgcccgtgcgtttcttgttgaactctgaatttgcttattcaacagaagttgataatgataataaaagaagaggcatcctgtgtaaatcgatgcctcattttctt

SEQ ID NO: 19185 - DNA, 1040 bp, Zea mays
  Clone ID: LIB3150-041-H3_FLI
tcagctgcagcgtcgacaacaccctgcgggcccgcttggcccgcttccgcagtcatggcttctccgccgcgcagatcagcgaattcgtccgcgtggccccctgcttctttcgcaaattcaacatcgacgtcaagctcggcttctggatgcccttcctcggctcgcccgacaggttcctccgcctcgtcaagcgtaacttctacctcctcagctccgacctcgacaaggtggtgaagcccaacatccagctgctccaggagtgcggtctatctatccaggagattgggagcctgtgcgtggctaacccgaggctgctcaccagcaagccggacagaatcagggccgtcctcgtgcgtgccggtgagatgggcgtgccccgcaagacgcttttgttcaggcacgctgtgaccgcggtggcgggcctctgtccggagacctttgcatctaagctcaagatgatggccaatattctcgggtgctcagaggctgaggttgccagaatggtgcaaaagaacccgttggtgctgaggcgctccatggagacgattcagcgcgcctgtgagttcctgatcaatgtggtcggtgtcggtaccaacttcattctggacaagcccacaatcctgatgtacagtctggaacgccggctggtgccccggcattacgtgatgaaggtgctccaggacaaaggattgatgcgaaaagatcatagcttctacactttggccgctattagtgctagcgtgttctgctccaggtatgtacatcctcataagaatgttcttcctaatcttgccgctgcatacgcatctggttgcaatgggaaaatagccatctgaggcgcgcgattccagcaaactggctatatgggcagcagctgcagttgtatcttgcatgtcattcttaacacattcagataccctgatgtgtactctgcgaggctgcagctccgtacttggctcatagcttcagaattgcagaaattcagcataacaagtttaagaactcatgaatgaccaaagcacgatgttgtcaatttcata

SEQ ID NO: 19186 - DNA, 694 bp, Zea mays
  Clone ID: LIB3150-041-H6_FLI
caccaatcgccgccgcccgagccgcggagctctccactcctctcttacccttcctctcccaacccacgcagcctcactagggtttagcggcggcggcgagatggtgcagcgcctcacgtaccggaagcgtcacagctacgctacgaagtccaaccagacccgagtcgtcaagaccccaggcgggaagcttgtgtaccagtacaccaagaagagggcgagcgggcccaagtgccccgtcaccgggaagaaaatccaggggatccctcacttgaggcctgctgagtacaaaaggtccaggttgcctaggagccgcaggactgtgaaccgtccttatggtggagtactctctggaattgctgttagggagagaatcattcgtgccttcttggtcgaggagcagaagattgtcaagaaggtcctgaaaatacaaaaaaccaaggacaagacagccgcaaagtaaatctccaggaatggggaagcctagccctgttttgtacactgcgaaaagtaattttggtggatggaaaatctaggtgccttgttgagcatttagcatgtgtgagtttagagagtctggacactgaatccaccctttcacctttgaattgttggaatatcgggaatctgttcccctagttgcgtttattatgaattcagatccaatctgggtaagatcaaccttctggtttgtaac

SEQ ID NO: 19187 - DNA, 493 bp, Zea mays
  Clone ID: LIB3150-049-B6_FLI
ggccccatcaacgaatcctatttctctgtgaagatgatggaggggatcattgcaacatcgtacaatgaaggcgacaagttctatatcgacccaatgaaattgctgccgctctcacgcttcctgccacaaccaaagggacaatctcaaggagcacctagaggtggtgggcgtggtggaggaaggggttttgggcgaggccgtggtggtggttctttccgcggtggaagaggaccaccaagggggggtggtcgaggtccaaggggtggaggccgtggcggttttagagggcgaggaaggttctaggtgcagtttgagtttgatgatgttttccccttgaagcatcatagctgcacaattggaaacttccatgttattgtaaccagatatgtttaaggtagcagagcactttatctgtggaacttggattctcaattgaaacaaactgtttgtacttgttccgttcccaatggccattatgtgcttccttgttctg

SEQ ID NO: 19188 - DNA, 1251 bp, Zea mays
  Clone ID: LIB3150-050-D11_FLI
cccagacccagcagctattgtggtcgtccctcagccgcgtcgcaccgcatcgcattctacgattcgaagctctctctgctcgcagccatggcgaagaattacccaaccgtgagcgccgagtacagcgaggccgtcgagaaggccaggcgcaagctccgcgccctcatcgccgagaagagctgcgcgcccctcatgctccgcctcgcgtggcactccgcggggacgttcgacgtgtcgtcgaggaccggcggtcccttcggtactatgaagtgcccggcggaactggctcacggcgccaacgcggggctggacatcgcggtgcggctgctcgagcccatcaaggaggagttccccaccctctcctatgccgatttctaccagcttgccggagttgtggccgtcgaggtcaccggtgggcctgagatccccttccaccccggcagggaggacaagcctcagccgccacctgagggccgtcttcctgatgccaccaagggttctgaccacctgaggcaagtctttggcaagcagatgggtttgagtgatcaggacattgttgccctctctggtggccacaccttgggaaggtgccacaaagagcggtctggttttgagggggcctggactacgaaccctttggtctttgacaactcttacttcaaggaacttctgagtggcgacaaggagggccttcttcagctcccaagtgacaaagccctgctgagcgaccctgtcttccgccctcttgtggagaaatatgctgcagatgagaaggcattctttgatgactacaaagaggcccacctcaagctctccgaactggggtatgctgatgcttaaatggtccatatcctggagcgggacacaaactgctgcctgtatggactcgtgcgattcagggtgaaccatcagattgtctagtgtcttctttgtaataaatttatctgttcttggtactttgtctatggttgaatcggaacccattttccgtttgcctagattcttaatttctggtgctgtatccagctgaaactagtagatctatgatcttgtggctgcagcatgttcttgtcacttttatctggtctccgttggttcggttcacaggttgtgtgctttaaaaggctgtgcttaagtcctgcaattcgagtccaccaaactgtagggtgcaagtcgagattttattagtgatgcaagttgctggtattggtgcattatcgggctaatacgcttgcgttgccttctgatttt

SEQ ID NO: 19189 - DNA, 1217 bp, Zea mays
  Clone ID: LIB3150-050-D8_FLI
cggcgggctgagcggcttgcggccatggccgcacgcgctattgctgagcgcgaagatgctgttgcgaggctcgagggggagaaggcggggcttgagaagctgctcgccgagcgtgagaaggagcaggctcaggaggcttcagagttgcagactagtatgattgaaacattggaagcagtggagatagagaaacagagacatcacagcactagaatggaagcccttgcacgtttggctagacttgaggttacaaacggtgagcttgcaaagtcacttgccagggaacaatggaatctggaagttcaagtagatcaagtggcgcagcttcgagaggaagttgaattgaagaaacttactcaagataaatacagaagaaagctaacaaagatacaaaagacaagtgcccctccggttgatgaaatagaatctttgagaaggttcaagctggaggaagaaattattgatgcagaatacactctgacatgtgacagaattgtgagcttgaaggacaaggcaaggaagattgaagaaagcattgagctgactagaagagacatggttcatcctacagaggtggaaattgagctcaagaagaggcttgatcaactaactgatcggttgattcagaaacaaatgcaggtggagtccctatcttcagagaaggcagctctgttaatgagaatcgagtcacgaggttgcttgacaatagcacctcatcatcagcttcctcaaactcatcaagattggacattgaagctggtgcatggcaacaatcacattcaccaaagcttcgcgacagaatacgggctggacagcagcaactgggatctgcaatccgacagctcgattcgatcttttcagccgggcatatcttcttgaggcggaatccgaaggcacaggtttgggccttggtgtacctggtatgcctccacttatgggtactgtacatactaacatcacacccaacagtgtcggaaactcgctctggggcaaccttttctttggagacattaaacaagactagcacttgattgctttttcctggcatgttctgatgttatattctggctgtacacatgaggcatcatacctttttctggttgagaaaaatcttagcatataatgcctcgtgcattttgttttggtacctgtccctatccccaattaaagtgtaacggtggctggttgcatacatgaagttggaattacttttggac

SEQ ID NO: 19190 - DNA, 750 bp, Zea mays
  Clone ID: LIB3150-050-H8_FLI
gaggaaagcaaactgagactacaacaatgggttacaggttcttggtgcggagcataatgccagttcacaccggaaatgtcgaatcacaaccagaaaacagaagagtgatcctgccggggagcaaccaacgcggcggagggagatggaacaagcaaaggagcacacgctaaaaaaaatccagatctccttgctctttcgttcccccctccttcaccaacagcttgagcagctactgacaaatctaccatatgtacacagagacggccagacagagaacgggctacggcggcggcgcaacccaccggagctggccgcgcgcgcaccaaccctaggaggagcgtgcgaggcgcgacgcgatggcggagtggtacatggcgtcgtggaaggactccgtctgcgccatccgcgcccgcagctcccgggccttctcctccgtcatcacccccacgaactgcctccgcggcgcctcatcctgcgccggcgccggggcctccaggtagtcggccttccccgaccaccccagcagcggcgcccaccacttggctccctccgccgaccccgcgacagcgtggaccgccccggtgcccgcggcggcgcggggcccggccgtggacgccgccgggcgggcggggaacgagacgacgcatgctgcggacggtgccatcgccattggattggatctgtttggtcgcgcccctctttgcctgcacttgcagggttgcttttcgattgctttggtggttgattgcg

SEQ ID NO: 19191 - DNA, 627 bp, Zea mays
  Clone ID: LIB3150-051-A4_FLI
aatctccccagcaatccctagcagaagccttccatcctcactcgctcgatggcccgcacgaagcagacggcgaggaagtccaccggcggcaaggcgccgaggaagcagttggcgactaaggcggcccgcaagtctgcccctgcgaccggcggagttaagaagccccaccgcttccgccccggtaccgtcgcgctccgggagatccgcaagtaccagaagagcacggagctgctgatccgcaagctgccgttccagcgcctggtgcgggagatcgcgcaggacttcaagaccgacctacgcttccagagctccgctgtctccgcgctgcaggaggcggctgaggcctaccttgtcggtctcttcgaggacaccaacctctgcgccatccacgccaagcgcgtcaccatcatgcccaaggacatccagcttgcccgccgcatccgtggggagagggcctaagcatcgtatattctgtcatcagtgcccgatcagaagatgtagagatgtgctgggttctgtagtttgggttactgtcgaatcatcgagtagttggttgttcactgctgtaacttattatcatgatgcatatgaaatggcaatgaactatgttatcagttctcgaatttc

SEQ ID NO: 19192 - DNA, 784 bp, Zea mays
  Clone ID: LIB3137-010-C9_FLI
gtgcattcttatgttttgcgcaactgacataccaagcaatgccgagagctagacgcaacaataataccattcctcaaagtagatctttactattatgccatgatatattcaaatcatcttctcaagaaagattgtgctaaacactttaaaggggtcaagagtcacgcatacggtgaagagatagaaaagagtttcacaaagctgcttgtagaagaactaaaacaaagagaagaggaggcaacacaggctcaacaagaggctgatgttaagttgctcgaggccaaaaagttagcttcacagtatcagaaggaggctgacaaatgcagctcaagcatggataacctatgaagaagctagggagaactcagcggaagcattggtccaacaaaagaaactgacttctttgtgggagcaaagggcttgggagcttggatggagacccgagaatgtcaaggcacttctaaagtagtaaaaccagtggaaggtgttggatactatgtgtagcaatagatcttattgcaaatacgggcccactaagagctcgagacgatgaggaaacaaatgtgtttctggttgagcggactcgactcacttgacatgccaaggggcctacttgtccatagtaaatttatattcaatttgtagtataattccattgttgtttgtgaacactgttgtgtgttgggatggtcataggattacattgttcattttttctgggtgttctaaaaggagaaaagtttgtctaggggtggtgacaataaagaaattatctgcagttctt

SEQ ID NO: 19193 - DNA, 1605 bp, Zea mays
  Clone ID: LIB3137-010-H6_FLI
ctcgtctcgtctcgtcacgtgccgccgccatggctgctctgggccgtggcctgcccctcctcctcctgctcctcctcctcgccgtagcgggggccgccaacgccgcggcggcgcccggcggcatgtccatcatcacctacaacgaggagcacggcgcgcgggggctggagcggacggagccggaggtgcgggccatgtacgacctctggctcgcggagcacggccgcgcctacaacgcgctgggcgagggcgagggcgagcgcgaccgccgcttcctcgtcttctgggacaacctccgcttcgtcgacgcgcacaacgagcgcgccggcgcccgcggcttccgcctcgggatgaaccagttcgccgacctcaccaacgacgagttccgcgccgcatacctcggcgccaggatccccgccgcccgccggggagccgccgtgggggagaggtaccgccacgacggcggcgccgaggagctgccggagagcgtcgactggagggagaagggcgccgtcgcgcccgtcaagaaccaggggcaatgcggaagttgctgggctttctctgcagtaagctcagtggaaagcgttaaccagatcgtcaccggtgagatggtgacactgtctgaacaggagctcgtagagtgctcgactgacggagggaacagcggctgcaacggcgggctcatggacgccgctttcgatttcatcataaagaacgggggcatcgataccgaagatgactacccttacagagccgtggacgggaagtgcgacatgaacaggaaaaatgccagggttgtgagcatcgatggctttgaagacgtgcctgagaacgacgagaagtcgctgcagaaggcggttgctcaccagccagttagcgttgccattgaggccggaggccgggagttccagctctacaaatcgggtgtcttcagcggaagctgcaccacgaaccttgaccatggtgtcgtcgcggtcggctacggcgccgagaacgggaaggactactggatcgtccgcaactcgtggggcccgaagtggggcgaggctggttacatccgtatggagaggaacgtcaacgccagcactgggaagtgcgggatcgcgatgatggcgtcctacccgacgaagaagggcgcgaaccctcccaggccgtctccaaccccgccggctgcccctgacaatgtctgcgacgagaacttctcgtgctccgcgggcagcacctgctgctgcgcgtttggcttcaggaacgtctgcttggtctggggctgctgcccggtcgagggcgccacctgctgcaaggatcacgccagctgctgcccgccgggctaccctgtctgcaacgtcagagctggaacttgctcggtgagcaagaacagcccactgagcgtcaaggccttgaagcgcaccctcgccaagctgagcaccgcatgaggacctcgatctgggactgcccagtgcttttctgatcaccaagagcaagatttcatagattatctatatgtttgtataagtactgttaccgccccatgaatccgctgtaaataactagtacctctgattaaaaggataatattatttgtcacggatggagtttttcgagccc

SEQ ID NO: 19194 - DNA, 980 bp, Zea mays
  Clone ID: LIB3137-011-C8_FLI
caaagcaatacaaggctggactcagcgtcctggaagatgacatattcgaagtggatcagccaaaggacctgttcctctactgctactacggagggatgatttacattgggctcaagaagtttcctaaagctttggagcttcttcacaatgctgttaccgccccaatgtcaacattgaacgcgattgctgtagaagcttacaagaagtatatcctagtttcactcattgtgaatggacaggtcccatcatttcctaagtatacatccatatcagcccaaaggagtatgaaaaaccatgctcagatttattttgagctttctacaagctatagcaacggtcgctacactgatttagagacatttgtcgaatcaaattcagcagcatttcaatctgacaacaacctagggttggtgaagcaagtgctctcatcgatgtacaaacggaacatccaaaggctgacccagacttacttaactctttcacttgaagatattgctaggtctgttcaacttgaaacaccagaggatgctgaaatgcatgtacttcgcatgatcgaagatggagagatccatgcaaccataaaccagaaggatggaatggtcagctttcatgaagatcctgagcaatataaaagtgttgagatggtggagcatattgactcgtctatccagaggttaacggcattgtccaagaagttggcttcaattgatgagaacatgtcatgcgacccttcatatttgttgaagacgggaagggatcgtggaagatttgactacgatgacttcgactctgttccacacaagtatttttgagatgatccgagccctacgtgattctgaagtacgatcatcaacgtagcagccattttgtaaagttgtctttagttcgatcgattaatggcttttgaaaattttgaaaaatcttgtttaaagaatgggtctgctagcatatttctcctccaatttggagacaagatttca

SEQ ID NO: 19195 - DNA, 715 bp, Zea mays
  Clone ID: LIB3137-011-D3_FLI
ctccccgccggcctccacctccacggcggggaggaggcggtactcgtgcatgacccagtcggtgcgggcgccgccgccgccacggcggcgcgggcagaagacgagcgtccgcttggtgccgacggggcgcttgcagcgcggcgacacgacgacggtctccttcccggacggcctccacctccacggctgcgccgccaacgcgcctccgcccactaatgtgagctcccatggcggtggcgcggcggcggccgactgggtggtctgtcgcattttcaggagggccaggccagcccaccgcgcccgccttggtgacgcgcaagaagaagaagaagagcacgcggcggtggagagcgcgtcgtccacgtcgtcgtgcgtcaccgacgcctccgggaccatcggccaggacgatgacggcgacgaagggatcagtggcagctgcagcgtcgcctcctctaattgagaccgactagaagaaacaagagttggctagcccgcccgtcgaccaaatcacgggcgccgtgtcctaattgccgtagcaccctctcagtctcagtccctagtagcaatcaatagagagaagaagcttgagctccaacaaaccgacaacaacatcataaaaaggctaagcgctttgctgccatgttatgttgttgctggagctcgtcgcgaatccagagtgttaattagcgagaaaatcaatcagttcccttccagc

SEQ ID NO: 19196 - DNA, 916 bp, Zea mays
  Clone ID: LIB3137-011-H10_FLI
acgttataaacacactatattatggatagctgcactcgtacgagatcgcagttcacaccggccccgcacggccgcaccggacggacacacacaccgaccgacaacattattctactatactatacacagatggacgtgtcttaaaagcggtacagggcggaacccatacaggcgactgaacccagagacttccccgccaaccacccaaagaagcactccatcacgcgagcttggtcttctcctccggtgacttccctttctcacctccgactgggacgagctcctcctcgccggccacgatccccttggtgtgcttcgcgagcccaaccaccgtcgcgcccaccgcctccaggacgtcgcccactaccgtcgtgttctcgtcgccgccacccttcgccttcgtcgtcgaagcgccaccgccggtcttgacggtccctgacgctctctctttcaactcccctgcctcctgctcagcgcgccaagtgacgtcctccgccttgtcaccggcctgggcaccggtgtctctcgacctctgcgccatgccgccggccgcatcccacgccgtgtccttggcacgtacggcggtatcgcccgccttctgaaccatggatacggccgtgtccctcaccttgtccttggcctgtacggccgtgtccgcggccttacgcgccatgtcgccggtggtgtccttgtgctgtccggtgatgtcgcgagccttattgtccgccgtctgggacgccggttccttggcctgcgcggttgcgccactccctggctcctccacctcgtcggcggcgcgggccgcgcgctccttgccttgctccgccttctccttggcgtactccgccaccttgcgcgcggtgtcggccgtcacctccgtggccttctgcgccacctgcgcgcccgtggagaccgt

SEQ ID NO: 19197 - DNA, 558 bp, Zea mays
  Clone ID: LIB3137-012-B3_FLI
gggagattcgctctcttcccgcgatttaacagagtcaactagctgcgctgagagccctcgcctccctcagatccaaccctgtacagattcacgaactaaggtgtctgagatcgatgtcaatcgggagcctgctgtcacagaaactggtccgacaagggaccaacctgccgaggagcctccccacgtagcagctggggtgaacgatggcttctggcagcagttcctcaccgagcagcccggtcctgatgtacaccaggaggcccagtcagaaaggagagatggagatgatgataagggcgatcagacgaggataggggaccgagaaaatttttggtgggggaagaagaatgttgagcagatgagagagaagctggggcgtctcacctcggtggagaaaacctgactgtatttcttgtagctggaaaaaaaaagttagcacagaaacacatataggacgctggtgcctctgactgacatgtactttgcagtgtatcatatatcttcgccaccagatatgctgactgacatcgacctcgtagtcgtacttcttccacctgt

SEQ ID NO: 19198 - DNA, 1562 bp, Zea mays
  Clone ID: LIB3137-012-G11_FLI
gctccactcttcttctgcggtcggatcccccggcgggtcggactgcggagcacgggctccggcgagccgctgacgagggcctgtgcggcgaccgagctcgtggcgggagaagatggacgaagcgagcacctccgcgtccggcgccgcgacgaggcgcggcttcgtgcctgcgagatcgggagttttctataggttcacccagcagaacctcccagcttggaagccagcaatgacacctggatgtataatagcaatgttcttgattatcggaataattttcatacctttcgggcttctttgtctccaaacttcaaatcatattgcagaaatcatctaccgctatgatgttgactgtgtgcctgatgcttacagaggaaataggcaagcttatattaaggacagctcgatttctaagaactgtactctggaagcgaaggttctggaatacatgagagcaccaatttatgtttattatgaacttgagaatttctatcagaatcaccgcaggtatgtcaaaagtagaagcgataaacagctgcgttttggggcaaaatacacggccgactcgtgcagtcctgttgagtgggataataatggttccccaattgttccctgcggcttgattgcctggagcttattcaatgatacatatggttttactcgtgggtccaaggaaataaaggtcaacaggaaaaacatttcatggaagagcgaccgggagcataagtttggcaaacatgtgtttccttccaactttcagaacggaaccttgattggaggggggaaactcgaccctactgtcccactgagtgaacaggaagaccttattgtgtggatgaggacatccgctctccccaaatttcgaaagctctatggtgtgattgaagacgacctgcatgcggatgagaccatagctattttcgtaggaaacaattacaacacctacacttttggtggaaagaagagcatagtcctgtcgactgcgtcctggctaggcggcaagaacgacttccttggacacgcttatattgtcactggttcgttgagcatcatcatatcgattctctttgctctgatccatgtgaagtacccaaggccgcaaggtgaccccaattgcctatcctggaacaggaaaaacagcaatagctaaggggccccgcctgtatctaccatctatgagggcgcctccacatgaatcagtattacacatctgtatctgaaacatgtcagacactgtgccgcaaggttaatcccagatgacgaaaagaaactgcgtacaccatgtccatcagaaatactagttccaattccgacacatgcgctgggcatcaaggtcaacaccgggagtttttattattattattccagaatgcgcacggtaatttgaaaatgaaattgtggtggaaactgtggaatccgctaatccggtgcggatctgcacagagaaactctggtggctgctgtgactaatgaaaagtggttattctggcttggccgttgtccatcgagggagatgtaatacctgatcagccctgaaatcttaaaaggctcccttctttcac

SEQ ID NO: 19199 - DNA, 640 bp, Zea mays
  Clone ID: LIB3137-012-G5_FLI
ctgaggaagtacgggagaggggactggaggaacatctcgcgcaagtacgtgacgacccggacgccgacgcaggtggccagccacgcgcagaagtacttcatccggctcagctccggcggcaaggacaagcggcggtccagcatccacgacattaccaccgtcaacctccccggcgacgccccgcgctcgtcgccgcccgcggtcaccacggccaccaccaacccctccgccggcgccctggtggtggacgtgaagcccttcgtgccgcacccctacggccacgtgaagctggagcccaagagctcgctcgtcgtggccggcctgggcttcaacgactcatcagtccacctactgatgcgctgcggacagttgtgagtgacgggcctgttctcgcggggagaaccgctcccgctccagcaccaccaccgcggcaccgcccgtgtgacgagcatgaagagtggcgcagcctcgtcgtccagctgccagctcgcggcagctccgagcgactgcgttcatcgagaacaagacgccatgggcggcggtatccgtttcagttcagtgtacataattcggcaagtacagagcccaacaacttccacgtaaaaggtactgaataataataaagcattcgataaaagcc

SEQ ID NO: 19200 - DNA, 925 bp, Zea mays
  Clone ID: LIB3137-013-A5_FLI
cgtggccatggcctctcgcgacggcgccaccttccaagtgtaccgggccatgcccgcgccgacgccgatgtctctggcgtccgccgctccagccgcagccgccgccgacgccgcggcgccgaagaaggcgggcgcgggcgcgggaaaggaccggcacagcaaggtgaacgggcgcgggcggcgcgtgcggatgccgatcgtgtgcgcggcgcgcgtgttccagctgacccgcgagctggggctcaagtcggacgggcagaccatcgagtggctgctccggcaggccgagccctcgatcctggcggccacggggtccggcaccacccccgccgtcttctcctgctcctccgcaccgtccacctccgcggccagcgccggtgccggcgccggcgccggtgtctccctcccgctcctcgggaagcgcccgcgcgaggagcacgagccggcggtggcggtggcagtggcgccggcgccgttctgggccaccctgcaggcgcggcccgtggcggcggcgtgggggctctcgccggcgcaggaggcggcggcgcaggcgtacgcgtcggtggcggcgcagggacaccacctcaacctgctctccgtgctctccggcgccgcgaggcagtcggaggaggagtcccggtgactgcctgcatgccgccgccgccgcactgttgctacgtaatcgcatgcgtcgacgcgtggtggcatgccgcgcgcatgcgtctcgtttccgtgcatctccggggggtgcgttgcgcgtgttttccctgtggttttgcggtgtgagaggaacgcggcgagctggacaaggaggatccagagcgcgagatcggatcggggttagcggctgtagatagcattcgtcaggttcgtgtttgtgataatgagctcgccgtagcgcgcgcggtggttatgtggtgtggtt

SEQ ID NO: 19201 - DNA, 935 bp, Zea mays
  Clone ID: LIB3137-013-B7_FLI
ttcttcgacgtggtggaccgcgccaaggcgtccctggaggcgcggtgccccggcgtggtgtcctgcgccgacatcctcgccttcgcggccagggacagcgtcgtgctcaccggcggcctcggctacaaggtgccgtccggacgccgtgacggccggatatccaatgccacgcaggccctgaacgagctgcccccgcccttcttcaacgccacccaactcgtcgacaacttcgcctccaagaacctcagcctcgaggacatggttgtcctctccggcgcacacaccatcggcgtctcgcactgcagcagcttcgccggaattaacaacacaggcgaccggctctacaacttcagtggctcatccgacgggagcatttgcccgtcaaacagcggccggttcttccccaacacgacgacgttcatggacctcatcacgccggccaagttcgacaacaagtactacgtcggcctcaccaacaacctgggcctcttcgagtcggacgcggcgctgctgaccaacgcaaccatgaaggcgctggtcgactccttcgtgcgcagcgaggccacgtggaagaccaagttcgccaagtccatgctcaagatggggcagatcgaggtgctcacggggacgcagggcgagatcaggcgcaactgcagggtcatcaaccctgctaatgccgccgccgacgtcgtccttgccagtcagccagattcatcaggatccactggagtggctgcaagctgatgtgtttggtgtgggatgtgatatatattgcaataatctagaaaactgaagaagaagcaggtgatgaccacactctgtagtgcatcacgcggtgcgtgttcatttaaccttggcgtttgattgtgacgatgaaataaaacacatgtatgaccatatctgattattagtgatacaaaaaagcttgattaaac

SEQ ID NO: 19202 - DNA, 1809 bp, Zea mays
  Clone ID: LIB3137-013-D9_FLI
ggaattcgaagatgaagaagacaatgatgactcagtacctgataacaaggatgaatcagaggaagaagagcctatgaatgatgatgtatatgaatttactgaaggattaagaggcagaaaagctaataggatggaagaagctggttcaacaggctcttcttctggaagcaggagattaccaccacctgtaccttcctcatcttcaaaaaaaattgcggtctctatctgcattagatgcccgcccaggcactttgtcaaagagaactccggatgacctagaggaaggtgagattgcaatgtctggggactcacatatggacctccagcagtcagggagctggaaccatgaacgtgatgacggtgaggatgaacaagtactacaaccgaaaataaaacgcaaacgaagtattcgtcttcgtccaaaacctaatgcagaaaagcaggaagatagatctggagaaggggccttccctcagcgtgctgccaggcagcaagacgcggttcatcctatagtgaaacagaagcgcaacatgtcatctaggaaggtttcaccggcttctaggtctgggaaattgagtcacttgtctgggtctggtgaggggtctgctgaactctccaaggaaaattggagcagtaaggccattgattccactgcccctgagttcggtggcacaaagatgtctgacagtatgcaaagaaagtgcaaaaatgtgataagcaagctttggaggaggattgacaaagaaggtcatcaaatgatacctaacatatcttcttggtggcggaggaatgagaattcgtcgttcagaggtccggctggtagcacacttgacctacaaaaaatcgagcagcgagtcgatgggttggagtacggcgctgtaaccgagttcatagcggacatgcagcagatgttgaaaagcgtggtccagcacttcagctataggcatgaggtccggatagaggccgagaccctccacaacttgtttttcaacataatgaagatcgccttcccagactcggacttcatggaagctaagaacgccatgtcgttttcgaatcctggaagcggtgctgccgctgccccatcatcgtcaaagcacgccgcaccatcccttaagcgcagcagagccagtgccagtgccagtgccagtgaagcagagcagcagcatggctcgggacacagcagcaggcacaatcagcctagcgaggcggtcccgcccagccggtcccacagctccaggtcagagagagaccccagacatggcggcagcagggatcagcacctccaggacggcgccgctgggttgctgcaccctagcgacatgttcatcgtgaagaagaagaggcaagagcgcgcgaggagcggcatcgggtccccttccagctcgggccgaggcgccggacctctgtcgccggccaaccctgggcgtccgggccctgccccctcgcccagaggtgccaggacgccgttccagagggatccaccgccacacccgtctcagcagtcgatgcattccgctgggtctggatggggcagcggcggtgcgcattcggatcatcaagcgggggcaagctcgtcagcacccggcatcggagacatccagtgggcgaagcctgccaagaggctgaggaccgacagagcaggcagaggcggccgagcctaacggttggttcttctttagcgtcatatggatgtgtaaatgcatccacgtagcggatggaggcgtttgataataatcgtcagtgtatttagttcatcgtcctagcaagtcaaactttgctggcagtttttaaaacagttttttaagg

SEQ ID NO: 19203 - DNA, 1207 bp, Zea mays
  Clone ID: LIB3137-013-F4_FLI
ggtgttgaacgcgacgtcgtggtcgggcgggcgtcgtccccggcgcgaggcgtacgcgacggttctgcactcgtcggacacgtacctgtgcggcgcgatcgtgctggcgcagagcatccggcgcgcggggtcgacccgcgacctggtcctcctgcacgaccacacggtgtcgaggccggcgctgcgcgcgctgtcggcggccgggtggacgccccggcggatcaagcgcatccgcaacccgcgcgcggcgcggggcacctacaacgagtacaactacagcaagttccggctgtggcagctggccgactacgaccgcgtggtgttcgtggacgccgacatcctggtgctgcgcgacctggacgcgctgttcgcgttcccgcagctggcggcggtgggcaacgacggctcgctcttcaactcgggcgtgatggtgatcgaaccgtcggcgtgcacgttcgacgcgctcatgcgggggcgccggaccgtccgctcgtacaacggcggcgaccaggggttcctcaacgaggtgttcgtgtggtggcaccgcctgccgcgccgggtcaactacctcaagaacttctgggccaacaccacgggggagcgcgcgctcaaggagaggctgttccgggcggacccgcccgaggtctggtccgtccactacctggggatgaagccatggacgtgctacagggactacgactgcaactggaacgtggcggaccagagggtgtacgccagcgacgaggcgcacgcgcgctggtggcaggtgtacgaccagatgggggaccacatgcgcgggccctgccgcctctccgagcggaggaaggtggagatcgcatgggacaggcacgtcgccgaggagctcgggtacaccgaccagcactggaagatcaacatcacggacccgcggaaatgggactgatccacgactactccgtccgtcgcctgctgcattttcgtacataataccccacacgtagctggtcgagagccagatcgctaggcgcgcagcattttggttcgtgggtacatttaggccagctcagtttcataagtggagctgttgttccgaggtttttagcttcacgtacgaacagcttttccgatgaagctgaggggttttcgtgatcttatttggcaaatcagctttgcattggacaataaacaaataaaatgaccgtaatgctctctgcttttgtttccttct

SEQ ID NO: 19204 - DNA, 1110 bp, Zea mays
  Clone ID: LIB3137-013-H10_FLI
gccaaacacacgcgaagaaaaggagatagagtacaggttacagacaggcagagagcaaagatgtgtggtggtgcgatcctcgccgagctcatcccgaccacgccggcgcgccgcggcggcgcggcgtggcccgccggcaagtgcaagcggcggaaggcgaacgacttcgaggccgcgttccgggagttcgacgaggactccgaggaggaggaggaggacgacgagggggtggtggagagcaagcccgccttcgtcgtccgcgcctcgtccgcggcgacgcagcccagggcgcgccaggagcagcggagccggcgccgggcgcccgaccagcagtacaggggcgtccggcgccgcccgtggggcaagtgggccgccgagatccgcgaccccgtcaagggcgtccgcgtctggctcggcaccttcccttccgccgaggccgccgcgcgcgcctacgaccacgccgcgcgccacatccgcgggcccagggccaagctcaacttcccctcctcctcctccgcctccgctgccggggcccccgccagccgcaagcgcgcccgcaccgccgacgccgacgccgtcatcgacctcgaggaacaagagcagcgtccggccgcggcggccctgaagcacgaggccgccgagtgctccggatccgacgcgctcccggacttctcgtggcaaggcgtgtcggcggcgtacgacgaggcctccgcgccgcgcccggccttcgacttcgaggcgcgcccggagagcgccgcggacgaggcgtcgccccgggcctccgactccgagtcggacgcgatgttcgactcgctcctcttcggcgaccagttcgccttcttcgacgccggcgcgtacgagtcgctggacagcctgttcagcgccgacgccgtgcagagcaacgccgccgccgcggcggaccaggacatgccgctgtggagcttcgacgacggctgcctcgtcgaggacaacctctcgttttaagcttcggcgactgttgctgtgtcttgagttttgtaaattacgatctgtttttttttttttttgagtttctgcttatgtatatctgtatcgatggtgagctgaatgaaatcatccttctcaggaagt

SEQ ID NO: 19205 - DNA, 983 bp, Zea mays
  Clone ID: LIB3137-013-H4_FLI
caaaaccccacgcgagcacccattcccatccatggcgaccaccacctcttcctcctcgctgaccactcctctcctccgcccgaaccccaataccaaccctgctcccagatctctccaactcctcaggagcaggaggtgcgctcgtgccgtaactaccgccgtagccggaggtgcggtgccttacggggctaatccgcggcgcgggatttggtcgatcagggatgacttggtggtgccaaggtcgccctacttcccagtggagtccgcggcggggcaggagcgtgggccgtcgcccatggtgatggagcggttccagagcgtcgtcagtcagcttttccagcacagaattattcggtgcggaggccccgttgaggatgatatggccaacatcattgtagcacagctgctctacctcgacgctattgatcccaataaggatatcattatgtatgtgaattcgccaggagggtcagtgacagctggaatggctatatttgatacaatgaagcatatcaggcctgatgtatccactgtttgtattggactagctgcaagcatgggagcttttctacttagtgctgggaccaaaggaaagcgatacagcttaccaaactcaaggataatgatccatcaacctcttggaggggcccaaggacaggagactgatcttgagattcaggccaatgagatgctgcaccacaaggcgaacttaaatggataccttgcataccacactgggcagcccctggataagatcaacgtagatactgaccgtgactacttcatgagcgcgaaagaagcaaaggagtatggccttattgatggagtaatcatgaatcccctcaaggcccttcaaccacttccagcttccagttagtcatgaagtgtgctagaactccgtcaaacatttttgttgtatcaatgtgtctgttggaagccctggctacgtaatattctacgtccaaatgcatcaaagattgtac

SEQ ID NO: 19206 - DNA, 614 bp, Zea mays
  Clone ID: LIB3137-014-A1_FLI
cccttagctcggagtcggacacccacccgccacgaccaccagaccactcgcttccccgaagcttcagctccgcgcttctctgttcgagctagccagcctccagcaagagcgagcgagcgagggcaacgggcatggcggcggctgtgtccttctcccgggtgcgagctctcccgacgtggtccagctccgtgtccggcgacgaccaccaccgctcctactccgcggcgctggccatgtcggtgtcggtgcggccccggtgtcgcgcgcggtcgccggcgcggatgatgggcaacgtgaacgccggcaaggggctgttcgcgccgctcgtggtggtggcgcgcaacatcatcggccgcaagcgcttcaaccagctcagggggaaggcaatcgcgctgcactcgcaggtcatcaccgagttctgcaagaccatcggcgccgactccaagcagcggcagggcctcatccgcctcgccaagaagaacggagagaagctcggattccttgcctgagacgaccatgttctacgcacatatataagtatataatctataagtactacatcatcaagtagtggcggacaatgataattatattgataccttcttccttgctcc

SEQ ID NO: 19207 - DNA, 1639 bp, Zea mays
  Clone ID: LIB3137-014-E7_FLI
cctcaatccgcagcagttgacaaagcaactccagttcgcccaaaatctccagccattgataaagcaactccaattgctcccaaatctccaccagttgataaagcctctccagctctgccaaaatcattatcaggtgctaaagatgcgctttttccttctaggtcgctgcagattgataagtttactccagccgccccaaggttatcacaagatgataaggctgctctgccttcttcagaacagtcacatatatctccagctactagttctgaagctcaaggggcaactactaggaaggtcacaaccaccacctcactttcagaggctgctgcagcatggaggccttcaagtgctcctgtgttacccacaccaagatcaaccgggccagctgcttcacatattcaaacttccacattgctttcccgctctatgagtgaagcagctgggagaaggccagtaaatgatccttcattttctgccccatcttatactccacagacctaccggaatgcaataattggtaagtctggtctgtctatgacctccgcaagccttgcgtatcagccgtcttctctggatcaagacactgctccttcacggcctctatcagcatatgcatcaagtacagtcatgatgcctcctgcaggaagatctgatcagtcatcagctaggcatggattcaagtctgggcctggtaagttagaagcacatgacggctggcagcagtggaaaggtgacagtaatgttgatatgcatctctggagggaccacgctccttaccaacaaatgaccaacagtcaagcatatgagcagtctcggagggacgatacttatcagcaagcatgcagcagaggaacagaaaagttcagcaggcatgcaggactgcaagctaggcagcagttccaaaccgagacacccgccagtcatgtatggcatcaaccgcaggggccagtggcagaagaatttccacaccttgacatcataaacgacttgcttgaggaggaccagatcaacggcagtataccggagtcgtttcgtcaagactacaacgtgtttggcctgccgttttcaccgagaggaaacttgtcagacatggaaatggcttctgttagaagtcccgctcggttcaattcacccaagtacgatggtggattgtcgggggcttatgacatgaatgctgtcaatgggttgagggaacggcagtttccctcgttggatatctactctaatggcctgtctgacgtgagtgcttctaagccttggctgaatggctctgccagtccatcggtgagccttggggtcaacacaaatggataccacccccaggtgggtgagtacctgggaggtggggtgaacggggtctccttgtggcgccgccatgccaacggccgctggtaatgcgaggtgcctgtatacaatcatacagtcggaataatgttttgttgtaacagatggtttcgggcctgagctgatgcgccatgtaattaaaagtttttaagttttaaaagggaaagaaagagatacaccctgtaaagtctgcgcctttattaggataatttgagtgcttttctggttgaagttgaacactgacctaactttgttaaatttcaaagctaaatttggcggtggcctgtgggag

SEQ ID NO: 19208 - DNA, 1945 bp, Zea mays
  Clone ID: LIB3137-015-E1_FLI
gtccaggaaaagcactcccgctctcggaaagaaggcgccgctctagcagaaacagcacctgcgcagcggaaatcatactcctttcgactgttctcgtgccaaggcgatataagcaggaacgtgatcagccatcccaaagcagcgaagaaggaacccgtggtgtctgtcgagaaagagctggacagcagcgagctagctcctgctgtcgtgcctctgctggaacgagcggtttccgtggtatccagttcggacagcctgagtcagtgcgaggacgccgtgcacgaggtcgccagagcatgctcggcctgggacccgagcctcgtgaacctgctgtcgtgcgcctctttcatccaaggccttctcgaggtcacgctgacctccaaagacgacgccgtgctggagtcggccatgtcgatcatggggaagctggttctggggaacgaggtgatcagacagctcgtgctcaacgcggacccgcagctggaggttttcctgaggctcctgaggagcagcgagctgttcctcaaggcggccgtggtgctctacatgatgaagcctaaggccaagcagatgctgtccctggactgggtaccgctcgtgctgcacgtactggagtgcggcgacgaggtgcagtctctgttctccgtaagatgcgcccccaagatcgccgcgttctatttcctggaccagctgctcatggggttcgacgttgacagaaacgtcgagaacgcgaagcagatgatcgctctcggtgggctggacctgctgatcggcaggcttggcgctggcgacgctcgcgagagcaggcactgcatcgctctcctgaccacgtgcgttcaggccgatggcagctgcaggcactacttggctgatagtctgaagaaggagcctctcgttcagcttcttgctggaaatcagaggaaagccagtgccgcgtcccttaacctgatgagtgaactcgtctgccttaacagaacaagcaaaatcgtggagttcatcaaggagctgaagaacagcgggtgcttgaacacgatgcacgttctgctggtctacctccagcaggctcctctcgtccagcacccgctagcagctaccatgctactccagctcgatctcctgggtgatccttcgcagtacagcgtgtacagggaggaggcgatcgaggccatcgtagccgctctggagcacagctcgcagagcaggaaggtccaggaacagtgcgcccgagctctcctaatcttggcagggcggttctcgtcgtcaggagagcccgtagcagaagcgtggctgctaaagagagcgggcctagacgattccctctctgagtccttcaggagatcagaagtattcaaagacaagagtgttcgagcggaggaagagaagctagtggaagaacggcagaagagcctcgccttgatgctactgaagagcgggggcagaaggttcctcacggcgctgtcgagctgcatatccgatggaaccccgagcctcagccggtcgtgcctcgtcagcgtggcatggatgagcagctccctctcgccgctgcgtggatgcaacgacttccagcccctggcatgctccgttctcgcgtctaagcttttggacagcttgagctacgacagagtcctggaggagagggtgctcgcttcgctgtcgcttctgaacgtcgtgagacacccagaatgcatggagaaggtcttcccgctgaagaaagaaaccatcgagtcactccaagatctcgcggaggtgacgtggactgcgaaggagctcctctttgcctgttgcagatgagatgcaagaccagatcgtcctcagcgatgaagaactagacaccagcatgtaattggaagtgattgttttgggagaagagtgatcgccactgctgtacacagattgtttcgtacttccgttgatatgtgaagccctacagatcctttccctcgtc

SEQ ID NO: 19209 - DNA, 1666 bp, Zea mays
  Clone ID: LIB3137-015-H12_FLI
cagtaatacattgccttcttacacagtactactttactgagtggttatttgaaaacaggttttcccaccagtaagcaagatggatcctgcaatctatggcccgccagaatcatcgatcacagaagcgcacatcactggacagctcaatgggctcacagtacaacaggcggtggacgaggcaaagctgttcatattggactaccatgatgtatatctgccattcctggaccggatcaatgcaatagaggggcggaaggcgtatgcaacccggacaatcttgtttcttaccaaagctggcacattgaaaccgattgctattgaacttagccttcctccgagcaaggcaggcgagccccggccaagcaaggtccttacccctcccgctgatgctacctccaattggctatggatgcttgccaaagctcatgtcagctccaacgacgccggtgttcaccagctcgttaatcactggctgaggacacatgctgtaatggagccgttcatattggcagcgcatcggcgtatgagcgcaatgcacccagtcttcaagctcctgcatccccacatgcggtacacgctggagatcaatgcgcttgcacggcagagcctgatcagcgcggacggtgtcatcgagtcgtgcttcacccctggtcctgtctccttcgagatcagcgctgcatactaccgcgaccactggcggttcgacctagagggcctcccttctgacctcgtccgcaggagagtggccgtggaggatgcgtcgcagcctcatggcatcagactcctcatcgaggactacccttacgcaaacgacgggctcctgctgtggtcggccattcgcagctgggtggagtcgtatgtgcagctctactacccggacgccggcaccgttcagtctgacgacgagctccaagggtggtaccacgagacggtccacgtcgggcacgccgacatccggcacgcgacctggtggccctcgctctccacgccgggggacctcgcgtccatcctgaccacgctcatctggctcgcgtcggcgcagcacgcggcgctcaacttcgggcagtacccgctgggcgggtacgtcccgaaccgcccgccgctgatgcgccggctgctaccggacccggagcgcgacgccgccgagtacgcgacgttcatggcggacccgcaccggttcttcctgaacgcgatgcccggggtgctggaggccaccaagttcatggctgtggtggacacgctgtcgacgcactcccccgacgaggagtacctcggcgaggagcgcgacgagccgtggacgggcgacgctgccgccgtggcggcgcacgacatgttcacggccgacgtgcgccgcgccgaggaggccatcgatagtcgaaacgcggaccagctcaggaagaaccggtgcggcgctggggtgctgccgtacgagctgctggcgcccagctcgccgccgggggtcacgtgccgcggcgtgcctaacagcatctccatatgaatgagtgcatcgttcgttgtttttccacatttttttctacgggtattatgtattggttttcaagcaaattcgtgcctacgccagcacttgtagagaatacactacctatatatatcgaaaataccaaatctgccaagaatgaggattgaacattcttggcctcaaaac

SEQ ID NO: 19210 - DNA, 1671 bp, Zea mays
  Clone ID: LIB3137-016-A8_FLI
ggcgtgcactccctctctctgggacgactacggccgccgccgcagccgcccccacctacgccaggtgccgaggcattcgttggcctcttcgccggtgacgagaacctaccagacttggagcaagcctctcaacatgtcgtgggccgcaatcgagaatgatcctggtgtttttacggaactgttgcagcagatgcaactgaagggtcttcaagttgatgaactctactcacttgacctggatgctctcaatgatcttcagccaatatatgggctaatattgctatacaaatggcgacctccagaaaaggatgagcgtcctgtcatcaaggatgcaatcccaaaccttttctttgccaaccagataattaacaaagcctgcgcaacccaagctatcgtttcggttctcttgaactctcctggcattacccttagtgatgagcttaaaaagctcaaggaatttgcaaaggatttgccacctgagctcaaaggactggctatagtcaactgcgcaagcattcgtatgttaaacaattcgtttgcgaggtcagaggcctctgaggagcagaaaccacctagcggggatgatgatgtataccatttcataaactacgttccagtggatggtgtcctgtacgagctcgatgggctaaaggaaggaccaataagcctagggaaatgcccaggtggtgttggtgatgcagggtggtggcttaggctagcgcagcctgtgatcaaagagcacatcgacctgttctctcagaacgagataagattcagcgtgatggcgatcttgaagaaccggaaggagatgttcacggtggagatcaaagaactccagaggaagagggagggcctcttgcagcagatgggcgatcccaacgcaagcaggcatgttgagcagtcactcgcggaggtggcagctcagatcgagtctgtgacggagaagatcataatggaggaggagaaggtgaagaagtggaaagcggagaacctgaggaggaagcataactacgtgcccttcctgttcaatttcctcaagattctcgaggagaagcagcagctgaagcccctgatagagaaggcgaaggcgaagcagaagtcccacggccccagctaggtgaaaagccgcaatgcacctacgtactgtctcttttagttggggttccttgggcatgtttggtacctagcctaagccgccgtcaccagccacacttttcccgtcgcagttgtggcggccaattcggccgccacaacttaggcgtggcgtgtggcgccacacaccaaacacaccacttgtaagattggagttcgcgtatatgctttctgtttttagtttaggacaattgcaccaatagggtgcaactgcagatttatccctgtttttttagactttgcgtgcgtgcctttagattttttgaaacgaaactgctgtatgtctcttccgttaaaccgttgtatgtctctacttcggttagtcgtatttagtatttaacggtgtcaagtcttgataatacgtcaagggataattatgttagtgtccctgttttagggtagaactgtatatctacccttgttttttagactttgcgtgtttgcctgtacaattattatgcttaacatgatgaggatgttatgctcttattatgttaaaaacatagttaaattgttgac

SEQ ID NO: 19211 - DNA, 702 bp, Zea mays
  Clone ID: LIB3137-016-H12_FLI
attcgttccaactcctgagcactttctcctcgtccccgacaagccaatcgaagccgagatacggccatggactccaccggcaccggagcagggggtaaggggaagaagggagcggccgggcgcaaggtcggcgggccaaggaagaagtcggtgtcgaggtccgtgaaggccgggctccagttccccgtcggccgcatcgggcgctacttgaagaagggccgctacgcgcagcgtgtcggcaccggcgcccccgtctacctcgccgctgtcctcgaatacctcgccgctgaggttctggagctcgccggtaatgctgccagggacaacaagaagactcgcattattccgcgccacgtgcttctggcgatccggaacgacgaggagcttgggaagctgttgggcggcgtgactatcgctcacggcggtgtgctccccaatatcaaccctgttctgctgcccaagaagacggcggagaaggcgtccagtggcgggagcaaggaggcaaagtcgcccaagaaggccgccaagtcccctaagaaggcatagactgactgtccggagtgatctgatgtttagcagtaccttgttaccagtatgcggtgatgcgtaggctgcagatgggacgaatgtgcttgtatgtgtatgtgtcctgctgcaagttgtcctttgctatttagaatggaagaagaaatgccttgtttc

SEQ ID NO: 19212 - DNA, 1701 bp, Zea mays
  Clone ID: LIB3137-017-B2_FLI
ccgctcggccaccagctttgaccgcctcccctcccctccgctccgctcctgttcctccataccccactcccccgcaggagcggcgcggcggcggcaaaggcaaaggcaagatgttcgggcgcgcgccgaagaagagcgacaacaccaagtactacgagatcctcggggtgcccaagtcggcgtcccaggacgacctcaagaaggcctaccgcaaggccgctatcaagaaccaccccgacaagggcggtgaccccgagaagttcaaggagctcgcacaagcctatgaggttttgagtgatccagagaaacgtgagatttatgatcagtatggtgaagatgcccttaaggaaggaatgggtggtggtggatcccatgctgatccatttgacattttctcatcattctttggaccctcttttggaggaggtggtggaagcagcaggggaagaaggcaaaggaggggagaagatgtagtccactcacttaaagtttctctggaagatctttacaatggaatctcaaagaagctctctctttcgcgcaatgtcatctgctccaagtgcaagggcaagggctcgaagtctggtgcttcaatgaggtgccctgggtgccagggctcaggtatgaaagtcaccattcgtcagctggggccttccatgatacagcagatgcagcagccttgcaacgagtgcaaggggactggggagagcatcaacgagaaggaccgctgcccagggtgtaagggtgagaaggtcgttcaggagaagaaggttcttgaggttcatgttgagaagggaatgcaacacagccagaagatcaccttccctggtgaagctgatgaagcgcctgataccgttactggagacattgtattcgtcctccagcagaaggaccactccaagttcaaaagaaagggtgaagatctcttttatgagcacaccctgtctctgaccgaagctctatgtgggttccaatttgttcttacacatctggacaacaggcagcttctgatcaaatcaaaccccggcgaagttgttaaacctgaccaattcaaggcaataaacgacgaggggatgccgatttaccagaggcccttcatgaaggggaagctctacattcatttcacggtggagttccccgactcgctggcaccagagcagtgcaaggctctcgagtcggtacttccgccaaagccttcgtccaagctgacagacatggagatcgatgaatgcgaggagacaaccatgcatgatgtgaacaacatcgaggaagagatgcgcaggaagcaggctcatgctgctcaggaggcgtacgaggaggacgatgagatgcctggtggagcccaaagagtgcagtgcgctcaacagtaagcagactaccataatgggattcaaggcactttggttgctcttcaattatgcgagtgcgcctgtggactgtatggttctatggttttgctgtcgctgagctacgaagtaggaagctgatgcgcccctggctctgcaagcgggggaatgtatcctttttttgctgcaactggaaaatgctacccaggcatagctggctaccttataacttttgcttgtgagatttgctagagtgacgattttaatttataggtggacttaatgtttgtgtaaggctaggcataacatcatgtctcaatggacgttgccgttgcacattggtgcattttatttt

SEQ ID NO: 19213 - DNA, 1720 bp, Zea mays
  Clone ID: LIB3137-017-C1_FLI
agtgctcacactcgagcacgtcgagctcaaaggtgaggccgttagccaggaatcccggcaacaatgacttccctttcctccgccgtggcactgccgtcctcgtgccgggcccggccggcggggggaagccggagggcgcggatggtggtgacgcgcgcggcggcgtcgagcccgaagctgccgaacgggcggcggctgcgggtggcggtggtgggaggcggccccgccggtggcgccgcggcggaggcgctggccaagggcggcgtggagacggtgctgatcgagcggaagatggacaactgcaagccctgcggcggcgctatcccgctgtgcatggtgtcggagttcgacctgccgctcgacctcgtggaccgcaaggtgaggaagatgaagatgatttcgccgtccaacgtcgccgtcgacatcggccgcacgctcgcgccccacgagtacatcgggatggtcaggcgcgaggtgctcgacgcctacctccgctcacgggcacagtccgtcggcgcggaggtcgtcaacggcctcttcctaaggtacgaggcgcccaaagagccgaacggctcgtacgtggtgcactacaaccactacgacggcagcaacggcaaggtcggcggcgagaagcggtcgttcgaggtggacgcgatcgtgggcgcggacggcgccaactctcgcgtggccaaggacatgggcgcgggcgactacgagtacgccatcgcgttccaggagcgcgtcaagatccccgacgacaagatggtgtactacgaggagcgcgcggagatgtacgtcggcgacgacgtctctcccgacttctacggctgggtgttccccaagtgcgaccacgtcgccgtcggcaccggcaccgtcacgcacaaggccgacatcaagaagtttcaggccgccacgcgcctccgcgccaaggacaagattgagggcggcaagatcatccgcgtcgaggcgcaccccatccccgagcaccccaggcctaagagggtgtccgggcgggtgacgctggtgggcgatgccgcggggtacgtgaccaagtgctctggcgagggcatctacttcgcggcgaagagcgggcggatgtgcgccgaggccatcgtggcgggctccgccaacgggacgcggatggtggaggagagcgacctgcgcaagtacctggccgagttcgaccgcctctactggcccacttacaaggtgctggacatcctgcagaaggtgttctaccgctccaacgcggcgcgcgaggccttcgtggagatgtgcgccgacgactacgtgcagaagatgaccttcgacagctacctctacaagcgcgtcgtgccgggcaacccgctcgacgacatcaagctcgccgtcaacaccatcggcagcctcgtcagggccaccgcactgcgccgggagatggagaaggtcaccttgtgagccgccgcccgcgacgtcattgccgtcgaaatggtgtcgcagctgatcggccggtgtattagtagagatttgcggctgatcgggttaatttaggccaacatgcgtgggcagtgggcgcggagaggaagagaaacaagttgtgcaagtgcagcaagtagatcaaaagtgctgcctgtttgtatcgatggatcctgcaacatatagcatctggtgatgttgagaattcggagcagttcatcgactggattctgacgccggcaagcatcgacgtcaatgaatgtct

SEQ ID NO: 19214 - DNA, 1246 bp, Zea mays
  Clone ID: LIB3137-017-C4_FLI
ggcagcaggagcagtagcgtccgtccggtccgcgcgcgttcccctccccgaccggcaggttccccgtccacgcccggccattcatccgtttcccactgctcctccgtggctcagctctgctccctgtatctctgggtctgcccctctgctctcccggtctctcctcttcccgtcccgcccagcgcgtcccccaaggaagccccgacgccacggcatggggatcgtggaggaggcgcacaacctgcgcgtggtgggcgaggggaagcgcggggtcatcgtgctggcgcacggtttcggcaccgaccagtccgtctggaagcatctggtgccgcacctcgtcgccaactaccgcgtcgtgctcttcgacaccatgggcgccggccccaccaacccggactacttcgacttctcccgctacgccacgctcgagggctacgcgctcgacctcctcgccatcctccaggagctcggcgtccagtcctgcatctacgtcggccactccgtctccgcgatcatcggcgcgctcgcgtccatctccaggcccgacctcttcaccaagctcgtgctcctctccgcgtccccaaggtacctcaacgatgtggactactatggcgggttcgagcaagatgagctggatgagctgtttgaggcgatgcaatcaaactacaaggcctggtgcttaggttttgcacccctgtgtgttggaggagatatggaatcagtggcagttcaggagtttagcaggacactcttcaatatacgtccggacattgcacttaatgttgcccagacgatcttccagagcgatgtgcgcagcctcctcccgcacgttagtgtcccatgccacattgttcagagcaccaaggatctcgcggtgccagttgtggtgtctgagtacctgcacaggcaccttggtggcgactccatcgtggaggtgatgccctctgaaggccatcttccccagcttagctctccagacattgtaacccctgtcttactccggcacatccagcatgacatcgcagtctaggttggccagtcgttccaacaagacaatgagcactcgaagctgtctactgcctgtttgtatgatatcccgcttaattgttcaacgtaggattgcatctatttgatgctctaagaagatttcaaaggtgttatgtagtgttggctgtggaaattgtagcatatatgaccatgtaatttattgttcgtctaatgtaggataccgtgttggatgctcttg

SEQ ID NO: 19215 - DNA, 691 bp, Zea mays
  Clone ID: LIB3137-017-D7_FLI
agcctgatgacgccgccggctcgcccgccgcctcctcccagtcgtccccggagatcttccgcggcagcaagctgttccaggtgtacgtggtggtgggcacgacggtgggcctgttcctgccgctggcgcacgtgctgggcgggttcgcgcgcggcgacgatgcggcggtgcggtcggcgacgccgcacctgttcctgctgtcgtgccagatcctgacggagaacgtggtggggtcgctgggcgccttctcgccgcccgtcagggcgctggtgccgctgctctacaccgtgcgccgcgtcttcgtcatcctcgactgggcctacgacgcgtgggcctccaccgcgcaggacgccgcctgggtgtggttcggcaggtgcctcgccgccgccaacctgctctacttctccgccaacctcttcgtcttcctcatcccgaggttcctgccccgcgccttcgaaaagtacttccgcatgcgcgacgagctgtgcgccaagacggccgaggacaagcacgcgcgcgagggtgtcgtcggtgcggccaagtcggaggtgtcgtccaagaaggcggactgagagctctcggctctcgcagtcgcagactcgcagtcgcagggcggcgtgtaaattcggtagctgtggtgggccggatgtaatttctccctgcgttatgtttaattgtcatcggtttgacc

SEQ ID NO: 19216 - DNA, 1454 bp, Zea mays
  Clone ID: LIB3137-017-D8_FLI
tccgaagcgaactctccctccgcatccactgccaccatgagccgcgatcgctacttccaccgcctcctcgacctccacctccacgccaacgacgacctcttcttccccttccctacccctgcctcgtcctgcccctacatcaccgcctcctccgcccaccaccgcttcctcctcgacgaccaccccttctacccaacctcctgcccgctcggcatcacctcccgctccccgatcgacgacaccttcgacctcgacctcctcctccccctccccctccacgccgccgtctccgcgcccccgtgcgcggccttcgacttcgaccccttcctcctcgacaccctcggccaccgcatctccgtcctcgagcgcgcgctcgccctcgccccaccccgccgcaagtacacctacgccgccgaggccaacggcaggaagctcaagtggaccgccgaggacaggcccgccgggggccgcaacctcaagtgggaggccgagctcaggaccccgcacaccgacggcttcgaccgcaagtggaagtgggagtccaaggagtccgccaccggttccaccaaggtcaagtgggccaaggagatcaaggggaagggctgcctcgagccttggtccaactcctactccgtcgaggagacctacggtgaggatgaccatgccgacgacgacagggagaagaagaaacccactggcgtccagaagaaagtcaagggggaaaacaagcagcagcagaagaagcagggcaatgtggagatcgtcgagatcgaggacaacactgccggatgcgtcgccatcagaaaggcttttgaaatgaaccactgcaagggcaagaggaaggaactttccccacaggatgccgcactgctcatccagatgaactacagggcgcacctggcccatcgctcccaggtgctccgttgccttcgcgacctcgccgtcgccaaggccaagctcaaggagatcaggtccttcttctacaacatcacataccgccgccgcatcgcatatgacaatgaagagcgccagaggtttgctgagaagatcattgtcctgctactgacagttgatgcccttgagggaccggactacatggtccgcaacgcaaggaggtccatgctggaggagctggaggggatgctggagatcgtggagcctcagccgccggggaagccgaggacgcttagccgcaggaggttcgatctcccagaaggcggagccatcgaaaaggagacgagggaggagggcaagtgaagtgcatcggtgggtggtggcatgcttgggcagtttggtatgcgcgatgcggactatagagtttgagtttgtgctgctaccgaaccgtggaccaccttaccccgttgagatgtttgatagctggactttttgtgctgttgtatttgtagaccagaacgttgttctttgtaataaattggcgtgtgctgctttttgct

SEQ ID NO: 19217 - DNA, 1481 bp, Zea mays
  Clone ID: LIB3137-018-E6_FLI
aacactcccccctccggcccggctaaccgcacggcgctggaggcggcagcggaggccgacaaggcggcggcggcgtctgggaacccgcagagccacgtcgtggtcgggaggcacgggattcggatccggccgtggccgcacccggaccccgtcgaggtgatgcgggcgcaccggatcatggagcgcgtgcaggaggagcagcgccgctggtacggcgtcaaggagccgaggcaggtgctcgccgtcaccccgacctactcccgcgcgttccaggcgctccacctcaccggcctcctccactcgctccgcaacgtgccgtacccgctcacctggatcgtcgtcgaggcaggcggcaccaccaacgccaccgcgtcaatgcttgcgcgctctggcctcactgtcgtccacatccccttccctgaccgcatgcccaccgagtgggccgaccgccacgctactgagaaccggatgcgcctccacgccctacgcgtgatccgtgagaggaagatggatggtgtagttgttttcgcggacgacagcaatgttcataccatggagctgttcgatgaggtgcagaaggtccagtggatgggtgctgtgtccattggaatccttgcgcatactggaacggcagaccaacttcggctcagcgaggaggacaagcagaatatgcctctcccagtccagggccctgcttgcaactcctcagggcatctggctggatggcacacgttcaacgcattgcccttctctgggaagaccgccaccgtggttggtgaggcggcccctgttctccccaagggtttggagtgggctgcctttgtgttgaactcgagaatgctgtggaaggaggctgaaggcaagcccgactgggtgaaggatcttgatgctgttggcgagaatggagaggagattgagaatccacttactctgttgaatgatccatcctctgttgagccactggggaactgtgggaagaaggtcctactgtggtggcttcgtgttgaagcacgggcggatagcaagtttcctcaagggtgggtaattgagccacctttggaagtcgtcgtccccgcaaagcgcactccatggcctgaaaccaccaccgagcttccatccgagttgttggatgacaagcaaaagccggaggataggcacttgtcaagaggcaacaaatcgtctcagcccagaggcaccacgaaacggaagggcgaccctcaagggcaagataactgatggagaacgcactggcattgtaatgtatatctcttgcaccctgcaagaacacggtaggaagcatatcgggttactctggcggtggcggtgtttaatttttctttctgatgtttttgctcatgtggcgatggtccacgcttgggtgtgttatctgtagagtgcacatttctaaagtagctgcacctgttgtgttgtaatgtaactgtattgggaactaaaaaaatgggggctggattctggaagcc

SEQ ID NO: 19218 - DNA, 1489 bp, Zea mays
  Clone ID: LIB3137-018-F11_FLI
gtccgctttcggcgccgtcgccactcgccaccatctccaccgcctcctctcgacaagcatcccctcccatacccatggcaactgaccgtctcctccaccttctccgagcgccgacaggctctccggctgccgcggccaccacccgcgcggtttgttggggtcgtccacggacgcagcgcgtcgacgtcttgcagggtgcttcggggattcgccgcgcgtccgtgtcctgctcgagcactagctctggcgggcaggggggactaacatataaggatgcaggcgtggacatagacgccggcgccgagctcgtgcgccgcatcgccaggatggcacccgggattggcggcttcggcggtctcttcccctacaatgacgattatcttgttgctagcaccgatggggtggggacaaagctgaagcttgctttcgaaactggtattcatgatacaatcggcattgacctggtggcaatgagcgtcaatgacattgtaactctaggtgcaaaaccattgttcttcctagattactatgcaacgagcaagcttgatgttgatcttgcagagaaggttatcaaggggattagggatgggtgcgaacaatcagattgtgctctcctaggaggggagacagcagaaatgcctggtttctatgcagagggtgaatatgatctaagtggttttgctgtgggtgttgtgaagaaggataaagtcattgatggaaaaaacattgttaagggagatgtgcttataggtcttccttccagtggtgttcattctaacgggttctctcttgttagaagagtactggagaaaagtggactttctttggatgatcagctcccaagaaacgatggcataacaaatacggttggtgaagctctaatggcaccaaccttcatctatgttaagcaggtgcttgagattattagcaaaggtggcgtgaaaggactagcccacatcactggtggtggctttactgacaatatcccaagagtattcccctccggatgcggggcaaaaatttttactgggtcatgggaaatacctccaatcttcagttggcttcaacaggctggaaacattgatgatgcagagatgcggcggacattcaatatgggcattggaatggttcttgtggtaagtcgagagacagcagacagaattattgaagacacccatggatccagtcctgcttatcgcattggagaggtgattgagggtgatggggttcagtatgtctgacctcgtatgccttttatagtggcttgagacttgttggtctgctctgcaaagcagcagagtttatgtaacaacataatcttgtggtgttaagttctgcaccactactcccgctagaaagtgaagggtaaccaaataattatttgattggatccacgggaacttctctaaaggcttaccagaggaggccattagggggaaatacagttgttgagaatttttcatggagagcggtattgttttcgttgagt

SEQ ID NO: 19219 - DNA, 933 bp, Zea mays
  Clone ID: LIB3137-018-G11_FLI
cgcgttcatctcgcccgtacgccgacgctgccgcctggctcgcaccgcccgccggcagtgcctcagtccagatcaagcctccctcttcccagatcgggtcctagttgggctaccgcagccctacgccaggtgccgagtccctcgccgatttcttcgccggcgaagagtgcccaccagatccgcccctgatggacaacgtcgagtctgcccctgactcgccggcgcaggcgccgccgtcatccgcctcttctctccccaaggagcaatcgcaggtggagttggagctgaggctgcttcaggctcttgagttctaccctccatcaaaactcaaaggcattcaccggcattttgttctctatggcctcatggaatatttgcgaaaaagccttgaccgacagttctcttctgacgaagttctacaactcttggaccgcttctttaacctagaaatgctgttgggtcacaactcacaagttttacttatgatgatgattgataaatgaagaaaccagaggatgatgagaaggataacttccgtcagggcgaagaattttcgttgccagagagttttctcaacaaggaagaataatatctagtaacctcgtactttgggtgtcctctggaagagaaatcagaaggctggttcttagtgattccctatttcttgtagcattgtcatctggaacatcggctgcggggagacactgaacactgaagtaaagaaacacatttcctaagctgtggttgtctttactgactgtacagctagcttttgtagactagtgtaatcgaaaataggttgaactgtgtggttgcctggagcgtgaacaaaaagcaaggaggggcaattacaaaagctgctgctgttttacctatcaaacttctctgataatgactataggtgcagtcctataaagcatccataattccatg

SEQ ID NO: 19220 - DNA, 918 bp, Zea mays
  Clone ID: LIB3137-018-G5_FLI
gggcggcgtggccccgcctgcacgaggccgtgcttgaccccgcggggcccgagccgttcgcgcgcgccaacgccggggtcaccgcctacgcctactacggcaaggaccaggacgccaaccgggtcatgctccgcgccatggcgggggtatccgagcccttcatgggtgccctcctcgacggctacggcgccgccggcgggtttcgcggcgtcgccacgctcgtagacgtcgggggaagctccggcgcctgcctcgagatgatcatgcgcagggtccccacaatcaccgagggcatcaacttcgacctccccgacgtcgtcgccgcagcgccgcccatcgccggagtgaggcatgttggcggagatatgttcaagtccatcccctccggtgatgccattttcatgaagtgggttctgacgacgtggaccgacgacgagtgcacggccatcctgaggaactgccacgccgctctgccggacggcggcaagctcgtggcctgcgagccggtggtgccggaggagacggacagcagcaccaggacgagggcgctgctggagaacgacatcttcgtcatgaccacctaccggacgcaggggagggagcgctccgaggaggagttccgccacctcggcgtcgacgccgcaggcttcaccgccttccgagccatctatctcgaccccttctatgctgtcctcgagtataccaagtgatctccactccatccgcccaaatctccttgcgagttgaatagcagaataacgaacagataaataaagctattccattcacgttggaatccgaatctctgcctactgtactcaacgttagcttctgtaaccaggatatctctttcaagcatttccaagcttttgatgacaaaatcataattttgagctcattattcaagcattatattct

SEQ ID NO: 19221 - DNA, 1305 bp, Zea mays
  Clone ID: LIB3137-019-E5_FLI
gagttccactccactctcccataatgaggataggggcaggggcgaacatggctgcgtgctcctccgttccctgctctttccccgcgaagcctgaccctcaccgccgaagccccagcggcatcttaagctctcatctccctcggctccctgctacccagtttcgtcggcttcgatcactctctgccgccgcctcgccgccggcgagtcgcctccgcccacgagcctccgtgtccacgtcgcccgccccgtctaaggactacgagttcactgacgggaacggagaggtggagctgagactggacatccaaaagctcggcatagcgagttcaaaagatgttttcgttgatgtcgatgacacatccctactcatcagagccaagtctgacgggacactgaggactttgatgaacgtccaaacactgtttgatgggattaagtcttccgagaccatatggttcatcgatgaggaccagttggtggtgaatctgaagaaagtagagcaagagttgaaatggcctgatgtagatgaatcctgggaatccctcacttctgggatcacccagctactgacagggatcagtgtgcacatcgttggtgattccacgcacattaatgaggcagttgctaaagagatagccgagggcatcgggtaccttccggtttgcactagtgagctgctagagagcgccactgagaagtcgattgatacatgggtggcttctgaaggagtggactcggtagctgaagcagaatctgttgtcctggaaagccttagcagccatgtccgcactgtagttgcaactctggggggcaagcaaggagcagctagcagattcgacaagtggcagtaccttcactctgggttcacggtttggctatcggtgtccgacgcaagtgacgaggctagtgcgagagaggaagcccgaaggagcgtgagcagtggaagcgtttcttacgcgaaggcggacgtggtggtgaagctcggcggatgggacccggagtacacgcgggctgttgcgcagggctgcctcgtcgcactcaagcagctcaccttagcagacaagaagctagcagggaagaagagcctctacatcaggcttggttgcagaggcgattggcccaacatcgagcctccaggctgggaccctgaatccgacgcccccccgaccaatatctgaaacaatcctccgcccagttgtattctaggagaattctctgcatcaccattccggactagttttttcagtgtaataaataagagaggaacttgtcatctgtctgttgatgcataaaatgaactcgcct

SEQ ID NO: 19222 - DNA, 1152 bp, Zea mays
  Clone ID: LIB3137-019-E7_FLI
aaaaaagaggattgcctcctttgccccactgggttttctgccaacatggctgcaattacagccctggggagtattacctctcttttgtcccctggaagaaaacctgcagagcacgagagaattgccatcttctcagatgcgctgaaccatgcttcaatcattgatgggattcgccttttggagcggcagcaagaagcattagtgtttgtgtacaagcactgtgacatgtttcatctcgatttcctgctgtccagttgctcattggaaaagaaagttgttgtcacagatagcctgttcagcatggatggtgatttcgctccatttcctgaacttattaaattacgcagaaagtatggttttttgttggtcatcgatgatgctcatgggacacttgtttgcggtgagaatggtggtggtgcagctgagctgtttgaatgtgaaaaggacattgacataggtgttggcaccttaagcaaggctgccggctgccagggtggttttataacatgcagcactcaatggaaaaggctgattcagtcgcgaggtcgctcgttcatattttcaactgctttgccagtgccagttgttgcttctgtgcatgcggcactctatgtctcgagtaaggagacatggcggagatcagtgatctggaggcatgtgcagtattttgcctctttgaccaagctcgagataactagtcccataatttccattgtggttggaagtgaagcaggagcgctcagggctagcaggtatttgctaagatctggatttcatgttacaccaatcagaccacccacggtgccacccaactcatgcaggctgagaatcactcttagtgcttcccattcctcggacgacatcaaaaggctggttgatgcactcacaccatggctccctgtcaaatatggtaatgggagctatgctacagcttcgaaactctaacccatcgaaggagagtctggtatcctgcggaaagaggcggcatgctagtgggtggttgacgcgtacgcatttatatactagaactggaggcaaagcgtcagctatattggactcatgcatcttaaattcctatgtattgtattactactggtacaatttgtagtgttacactgatgatgtattgatgatggctgatgagcaaacacc

SEQ ID NO: 19223 - DNA, 1797 bp, Zea mays
  Clone ID: LIB3137-021-G4_FLI
tctctctctctctctctctctctctcggatccgaattgccagcgcaccagtcgagctcgcgggacctcgccggcaccggcgatggcctccgccctactggccggacagggcggggcgcgccaccacggctggggggagacgcgcgccccgctcgcgcccatacctcccaaccctaaccccagccagccccacccacgcgccgacgggtccaagtccaagccgcgggcggcagcctcctcgccggcggccggatacgtgacgttccgcccggcgtccctgggcccgcgcgaggcccgcgcgctccgggaccgcctcgcgggggagctcacccaggtgcgcgccctcctctcccgcatcgacacctggcagcagcagggcccgccgcccgcggggctccgcggcgaggtgcggaagcggtgcgggcagatcctcaccaggctgcgcaaggacaagcggagcgtgtggttcaacgcgcccgtcgaggtggagcgcctcggcctccacgactaccacgccgtcatcaagcgccccatggacctcggcaccgtcaaggagggcctcgccgccgggaggtacgcctcgcacgacgacttcgcggccgacgtccgcctcaccttcaccaacgcgctgcggtacaacccggtcggccacgaggtccacaccttcgctggcgccctcctcgcctacttcgagaggatgtacaaggaggcgctcgcttgcttcgaggaagactgcaaacgccctgagccgccaaggccagtgccgcctcaattgacacctccacccgcagctgagcctgttgaggccaaggttaagccgagggcagggaatgtgaggatgcggaagcccaaggccagggagcctaacaagagggagatgagcctggaggagaagaacatgctcagggtggggctggagagtttgcccgaagagaagatgcataatgtgctacagattgtgcgcaagaggaacaacaatccggagatgctgggggatgagatcgagcttgatattgatgagatggatgttgagacacagtgggagcttgatcgtttcgtaactaacttcaacaaggcgctcaagaaatctcagcgtgctgtgttgatgaatggtggcgctgctgatgtaaccagtgctgctgtggctgagaatgacactgcacctgtcagcaatgtgcttgcgttggttgacaatgatgatgtggagagagagaaacctgtgaggagcgctacaatggctgagcaggtggatgagtatgttgatattggggatgagatgccaacagccacttaccaatccatggaaatcgagaaggacgctgaaggtgcgactggctctcgtggttctggcagtggctcttcgtcgtccagtggttctgagtcgaggagctcaggggacagtgcctcaggagctggcaatgctcattctttggcttaggggaggttgttaacaataggatttgaaaatttggatgatccgagttctgttgttgggtgatttacgtagaggtagtggtaattgtaagtatgtagctctttctgagacgtgggtttgcgtaggcgtggattacacagttagtagtagataacaaactggctttctgggtgtctgttagcaccatgtgtatgtaagctgggggtggaaggtgctggggtgttaaaagtagttgatcgaccttctggtatggagggggccagggctagtgtttgtgttctttgtagtacaattgttctggtgcagacctcttatgtaattaatgatttgtgcatgacattaaagtatggttgtataagtaac

SEQ ID NO: 19224 - DNA, 996 bp, Zea mays
  Clone ID: LIB3137-023-A11_FLI
tcctccccgctagggttttgccagcatggccgccgccgccgcccggaggctcctctcccgccgcgcctcctcgtcctccctctccgcgctcctccgtcacggcgctgtcccggagcagtcgctggtgttgcgcccggctgttgtcgcggcggcctcccgcctcggcttccagcgcgggatggcgcggcggcctggcggggacggctacgtctcgacgcggtctggcgcgggcggggaccgcgcgcccatggccacggagatggcgccgctgttccccgggtgcgactacgagcattggctcatcgtgatggacaagcccggcggggagggcgccagcaagcagcagatgattgactgctacatccagaccctcgccaaggtccttggaagcgaggaggaggcgaagaagaagatctacaacgtctcgtgcgagcgctacttcgggtttgggtgcgagatcgatgaggagacatctaacaagctcgaggggctccctggtgttctctttgtgctcccggattcgtatgttgatgctgaatacaaggactacggagctgaactcttcgtcaacggtgagattgttcagaggactcccgagaggcagaggagggtggagcccgtgccacagagggcagcagacaggccgaggtacaatgacagaacccgctacgcacgcaggagggagaaccagcgatgaactttgcgataaaatcataaaaaataccacagcaacaagtcccaggtggtttcagctctggaattcaaggatcaccgagtatcgcctgtattaaattggcaatctcactttacgtgcagtctagagtatcgtttctatgtgctcagcttggacgtattgtattctgtaattacagctacttggagatttggaaggacctggcttgcaacgtagtatatctctagtcttttttctctgtggcaatgtataattgctatgaataccagattgagatggttgcatactgttcgcagctcaat

SEQ ID NO: 19225 - DNA, 1093 bp, Zea mays
  Clone ID: LIB3137-023-A6_FLI
cctgaagtggccaaagacattcattgttgtatcacacgcaagggagtttttgaatacggttgtcaccgatatccttcatctgcatggtagaaaactacatgcttacaaaggtgactatgacacatttgagaggacaagggaagagcaccttaagaatcagcagaaagcctttgaaacaaatgagaaggccagacagcacatgcagacattcattgacaagtttcggtacaatgcaaagagagcatcacttgttcaatcaagaatcaaggcattggagcgaatggaacatgttgatgcagttgtcagcgatccagactataaatttgaatttccgaccccagatgaccgccctgggccaccaatcatcagcttcagtgatgcctcatttggttaccctggagggcctaccttgtttaaaaatttgaattttggtatcgacctggacagccgcatagcaatggttggtcctaatggcattggcaagtccactatactgaaactaatttctggggatctgcagccaacttctggaacagtatttcgctctcccaaggttcgcatggctgtattcaatcagcatcatgttgatggccttgatttgacggtgaatccccttttgtacatgatgaagtgctatccgggtgtgccggagcagaagttgagggcacatctgggttcgtttggtgtttcgggaagccttgccctccaatctatgtacactttatcaggtggtcagaagagtagggttgcattcgcgaaaataaccttcaagaagccgcacatcattctccttgacgagccttctaaccatcttgatctggacgctgttgaggcgctcatccagggtttactcatttttcagggaggggtgctgatggtgagtcacgatgagcatcttatcactggaagcgtggacgagctttgggtggtgtcggaaggcagggtgaccccgttctcgggcactttcaaggactacaagaagatgctcaagtaacaaaaacatgtattatcgaccatagcctatatatctatatgcttgctattacgttgtattaccgtataaattttgggagtaaagcatcgaaattattat

SEQ ID NO: 19226 - DNA, 1958 bp, Zea mays
  Clone ID: LIB3137-023-B11_FLI
cgcttgccctgttcgcatcttcgcgcgtggcgcacaccgctccagctctccttcgacgggcacggccgagccgccttcgtcttggccgcagcggtgcgcgctctccatggcgtcctaattagcctagccgcaacgccgcgcccgtgcctgcggcatggatgaaccccttcttggcaatggtcttaagaccagcgggaaaagagagagcctggtagtggccgaggtcagaaaacagatgtaccttgctgggccactcatcgctgcatggatcctacagaacattgtccagatgatatctatcatgtttgtcggtcaccttggtgagcttgccctctccagtgcctccatcgccacctcctttgcaggcgttactggcttcagcttattgtctggcatggcgagcagcttggacacactgtgtgggcaatcgttcggggcaaagcagtactatcttcttggcatctacaagcagagggcaatccttgtgctcactctagtcagccttgtggttgcgattatctggtcatacactggacagatccttctactctttggtcaggatccagagattgcagctggggcagggagctatatccggtggatgattcctgcgctatttgtgtatggtccactacagtgccatgtccggtttctgcaaacgcagaacatagtcctcccagtgatgctgagctcaggtgccacagcactgaaccatctgctggtgtgctggctgctggtgtacaagattggtatgggcaacaagggtgctgccttggccaatgccatctcatactttaccaatgtatcaatcctggcaatttacgtcaggcttgcaccagcctgtagaaacacctggagagggttctcaaaggaggcttttcatgacataaccagcttcttgaggcttggtattccatctgcgctgatggtttgcttggagtggtggtcatttgagctcctggtacttctttctggacttctccccaatccaaagcttgagacatcggttttgtccatttccttaaacacaggctctttagcgtttatgatcccttttgggcttagcgcagccataagcacccgtgtttcaaatgaacttggtgctgggcgaccccatgctgcccatctggctacccgtgtggtcatggtgctggccatcgtggttggcgtattaatcggactagctatgattttggtgcgcaatatctgggggtatgcatacagtaatgagaaggaggtggtcaaatacatctccaaaatgatgccgatcctagccgtgtcattcttgttcgattgcgtgcagtgtgttctttcaggtgttgctaggggctgtggatggcaaaagattggggcttgtgttaatcttggtgcatactaccttataggaattccagctgccttctgtttcgcctttatgtaccatctaggtggaatgggactttggttgggaataatctgcgcactcgtcatacagatgctattgcttctcacaattaccttgtgcagcaactgggagaaagaagctttgaaggcaaaggacagagtatttagtacatccgtaccagctgacatgatgacatgatatttctgaagatatttttttgaaggaaatgcccatgaaactttgccaaggaacatactaagaattggttgttcagattcaaggcctttctccatgccatcagaatgatgcttgggtctagtaatagctcctgagcagtctgttttttacttttggtcaatactcaatacatggaagatgtttggtttgaagaaccacgccatcctagatgaggtggtatattataagttgatataacggctccatactagttattgaggaatgagacgatgattatctcatgtaataataatgcttttccccctctagttattgatgtaagacaattgaggcaaatgaacaaaatgtcacatttgattaaataagttgcattgtc

SEQ ID NO: 19227 - DNA, 1377 bp, Zea mays
  Clone ID: LIB3137-023-G12_FLI
gctagcaatacatcgctagctcacttgatatacatattgcatcggcataaaaactgaatttaccatggcccacttgatctcttctgcaatcgcaggcgcgggcaacttggtcgctgatggaatcagtggtgtcactggcgtagcgtcgcaggttgtagaaggcgtagaggacactttaggcagtatcgtagaagcaatcgaccaaggagtcaaggatgaggaccaactggatttgcccaagtacgtgtgtttcaagggagataatggtctgtacctgagtgctcgaacagttgaaggccacccctacctgcagtttgcatcggaagacattggcgacccaagtgtgaggttcatcacctacaaccacaaggtgaacggcaaacgggtggtgcgcttcaagtcgaaccatctcggcaagttctggaggcggagccccaactggatctgggccgacaccgacgacaccagcaccaacaactccgacaccctgttcgaggtcatcaagatcgacgaggatggtgtgtacgcgctccggaacctcggcaacaaccacttctgccacaggctgacctacgacggcaaggagagctgcctgaacgccacaattccgaccatcaggaaggaggcgcacatcaagatcgaagaagccgtcctctcccgaaagatctccaacatcgagtaccacctcaagggcgccaagatcttcgacaagaaggccaagaccctcatcactcgagaggcggtgaacggcaccagcacggacagcaagaccaccatcaccctcaagtacagcgtcatcaagggcaagctatgggattcgagcaagtccatgaagctgggggtcaccaccaccattgaagctggggttcctgtggtcttacccgcaaccattgaggtccagagcgagttcaactccacctacagctggggcgagtccatcatcgagaaagaagagtactccaacgcctacgaggtcgttgtgcctgcatactccgtcgtcacggtcagtgtactcgccacacagggcatctgccaagtccccttctcttatactcaagaggacgttttgactaccggagagaggaaggttttcaagtttgatgacggcatcttccgtggtgtcaacagctttggtttcaagtccgaggtcacggaaaggaagctctccaaggacgacgactgagcgatatatcgtccatagtctctcgataaacttcgatcggtgtgatttataaataagccatattaatgtaataatgctttaataagcagttcagtatatgtgtgtcgtcaaaatcacgtttttatactactatgtgtgcatgcatactttatgtgtaatgctttacttgtaatttattgcgaataaacaaagag

SEQ ID NO: 19228 - DNA, 848 bp, Zea mays
  Clone ID: LIB3137-024-A7_FLI
ggccgctccgccacctcgccactcgcctcttctcgctctcgccaccgggccagggaagggaccatccgatcggctccgtcatggctggagctgctgctctcaatgagggtatcctttcttccgtgtccgagaaaaatgttgctgctcacccatggcatgatttggagataggaccagaggctcctgaagtgttcaattgtgtggttgagattcctagaggcagcaaggttaagtatgagttggacaagatatctggtctgatcaaggtggatcgtgtcctttactcctctgttgtttacccacataactatggtttcattccacgcacactctgtgaggatagcgaccccatggacgtcctcgtactgatgcaggaacaagttgtccctgggtgtttcctgcgagctcgtgctattgggctcatgcctatgatcgatcagggtgagaaagatgataagatcatagctgtctgtgctgatgaccctgaattccgtcactacaaggacatctcggacctccccccgcatcgccttcaagagatccgccgcttttttgaagattataaaaagaatgaaaacaaagaagttgcagtgaatgatttcctcccagccgaagatgccatcaaagcaatcgagcactcgatggacctgtatggctcgtacgtcatggaaagcctgaggaggtgatcttctgctgcttgattgtggatgctacgtaattttctcaacagctcatcgagagtaccgtagtccgtagtacggcaaatgttaacacgcacgaactggaatcatgaccaagggatattaccttctgttcatgctgaaacgatcagcagtttctttctttgc

SEQ ID NO: 19229 - DNA, 639 bp, Zea mays
  Clone ID: LIB3137-024-C2_FLI
gaggcagttggctatgctcttactgcaccagcaggtcaaatggatctctctctgtgggagcgattttatttgcagggtatagattcactaatgactttgtatgagctggattattggcctccccaagacaaggaagtgaaccagcgtagcctaacactgcccgccgtggggctgctccagggctgcgttggactcaggaagctcttcgtccatggcaccacgcatgagcatttcctgacctttttcttgaaggtgccaaatctgagggacatgcagttacgggaggactactatcccgcaccagagagtgatatgatgaacacagaaatgcgagccgagtcttggctccggttcgaggtgcagctgaacaacaggctaattgaggattaacggtgaatttggtgagctgtgagagcatcagatgaatacagagaggtgctgatttacttgaaccaagtggagttgatgccggggtggtgctgtgcgatggatgatcacggaagtagcaagggtagctgccgtgcttgtgtatccgacaaatatcggtgatctttactagttgcttttccttttaaaaataagagtgtatgataagggagttgatgcagaattcagatatttgcatgagtttggacgatt

SEQ ID NO: 19230 - DNA, 1442 bp, Zea mays
  Clone ID: LIB3137-024-C7_FLI
cacatacacaagcacaagcgcactctagcaatggcttctgaggttgtccgccctagcgacgccgagctactaaaggcacaagccgacatatggcggctcagcctctcctacctcacgcccctgtcactgaggtgcgccgtggagcttggcatccccacggcgatctaccgccatggcggggctgcctcagccgctgagctggtcacggcgctgtctctcccctccactaagctgccgttcctccgccgcctgctgcggctcctcgccgcgtcgggcgtgttcaccgtcgacaagcagagcacggaggaggagcggtaccgcatcagccccgtgtcctacctcctggtggacggcatccctcacgaggaccacatgaaccacaccgctctggtgctcacctgcacctcgacgcgctacatcgaggcggggatagggctggcggagtggttcaagagggacgtggtcacgtcaccgttcgaggagctgcacggggcgactctgttccacgagagcatggggagcctcgacgcagatttccacgacatggcgagcgaggccttggacgcccacgacaacttcggcatcgagatagctatgcgggagttcagggacttgttcgaggggatccagtccatgacctactgctgcggtaacttcggtgatgacaagggtgccagggccattgtcaaagccttcccacacataaaatgcactgtgctggcccctcccaagatcattgccaccaaaccggccgatggagcgaagataaactatgtcgaaggtgacatgttcagtttcattccacctgctcaaactgtcgtgctaaagcttgtgctgcaccacctgaccgatgaggagtgcgtcaagctcctggctcaatgccggaaggcgattcctccacggaaggacggcgggaaagttataatcggtgatattatgattgaccactctgggcttatgctggaaactcacctcctgatggacatcggcatgatgaccatgacaaaaggacggcagagagatgaaaaagaatggagcgagctcttcaccaaagcagggttcagcgaatacaagatcctgaaggaatttggagctcgtgttgccttcgaagtctatccgtgagatatatatatatatttacatacatatgtatgtgtgtgggtgccttgcgtggcttggcgtgatgatgtcataaataaagagggtgggtgtgcttgcggtattcatggatggccatggatctgagcacatgacgttggatgctttcttaaggctctcgtggatcttctatatttggaagaagctgtaaaataatatatcgccatctagtgttggcgttggcttgtatgtactttgtacctgctttattattttgtgcaatatcgagtaacctaatgtatacttgcttactactatcactaccgaaatctatctctttgccg

SEQ ID NO: 19231 - DNA, 1496 bp, Zea mays
  Clone ID: LIB3137-024-E10_FLI
cacactccaccacacaccgcgcagctagctgtcaccggatcgagcaagaaggaagaaaaatcagcggcaccgataatcgatcgacgacactcgcgcgaggtgggaagcgaaataaaaggtggccttttcgaagccgccggacggagtgtagtgtagcgctagctccgcaggccggagaggaggacgatggtggggcgacgcacaggaggaggaggaggagcggcgacggccctcgtgtgggcggtggtggcggtcgcggcggcggtgtcgcgggcgcagcagcagcagcagctgctgcaggtggggttctacgacacgctgtgccccgcggcggagatcatcgtgcaggaggaggtgagcaaggcggcgtccggcaaccccggcgtcgccgcgggcctcctgcgcctccacttccacgactgcttcgtcagggggtgcgacgcgtcggtgctgctggactcgtcggcgggcaaccaggcggagaaggacgcggcgcccaacgccagcctgcgcgggttcgaggtcatcgacagcgccaagacgcggctggagcaggcctgcttcggcgtcgtctcctgcgccgacgtcctcgccttcgccgcccgcgacgccctcgcgctggtcgggggcgacgcgtaccaggtgccggcggggcggagggacggcaacgtctcctcggcgcaggaggcgggcgcgaacctgccgccgccgacggcgagcgcgagccagctgacgcaggcgttcggcgccaaggggctgagccaggccgagatggtggcgctgtcgggggcgcacacggtgggcgcggcgcgctgcagctccttcgcgccccgcctctactcgtacgggcccagcggcgcggggcaggacccgtccatggaccccgcgtacctggcggcgctggcgcagcagtgcccgccgcaggggaccggcgccgccgacccgcccctgcccatggaccccgtcacgcccaccgccttcgacaccaactactacgccaacctggtcgccaggcgcggcctgctcgcctccgaccaggcgctgctcgccgacccggccaccgccgcgcaggtgctcgcctacaccaacagccccgccaccttccagaccgacttcgtcgccgccatcatcaagatgggtgccatacaggtgctcaccggcacagccggcaccgtccggaccaactgcagggtggctagctagctcatccatgatttacgtctacctgtagactcatgtgcttatataaaatcatacgacgaaactgtacgtacggcgtagagtggtgtggcggggtccaatgattcagatcagattgtacgtgtccatcgatccaaactgtagttgtgtacgcagtacagtacgtgctagctacggatgatatatatagcttgtgcgtttttttacaacttttttttttggtccttttggtttatacatatttattagcagatacggatcgaatacaaatattaaaaatggttcgttcttttttt

SEQ ID NO: 19232 - DNA, 1163 bp, Zea mays
  Clone ID: LIB3137-024-G9_FLI
ctgtggcaggcaccttgaccatggtgttctccttgttggatatggtgcttctggtttcgcccccattcgcctgaaggacaagccttactggatcatcaagaactcgtggggcgagaactggggggagaacggatactacaagatatgcaggggttccaacgttcgcaacaagtgcggcgtcgattccatggtctctaccgtgtccgcagtccacgcctcgaaggagtagactctggtcagcggtgataatcgtgattccatatattgtagaactataatccctgctagtaatccatttgtgctgtttatgtatcgaaggcagcaaagatgtgtgaagcggcaatgggatgcttgctgtaaggtaatatgtttggcttgctaggcatgctacacgctatttggatgtagcaacgttatcaccagctgtatacgctttttaatcgacaacatttgaataatatgtacataacagcaagcatcccattgccgcttcacacatctttgctgccttcgatacataaacagcacaaatggattactagcagggattatagttctacacccttacgccttcgctcgcgccgccgccgccgacgccgctacgccccgcacctcgcttcatttcgtgtcgccaagatgacgaagcgcactaagaaggcaggaattgttggcaaatatggaaccaggtatggtgctagcttgcgtaagcaaatcaagaagatggaggtatctcagcattccaagtacttttgcgagttctgtgggaagtttgctgtgaagaggaaagcagttggaatttgggggtgcaaggactgtgggaaggtgaaggctggtggtgcttacaccatgaacactgctagtgcggtcaccgtcaggagcacgatccgccgcctgagggagcagactgaagcatgatatagctctttatattattggggtttcctgtagttgctcttgtcaggcatgttgtgggggccttatctagtggaaatgtggaatcactgtactggctgttttgccgagacaatgctccttatatttggtttatgctctaggatctcaaagttgtgttgttgagatttgccctcggttaccgttctgaatctgacaaatgatatttgatcctgtgccatcattgacgtcgaatttggttgtcgttttct

SEQ ID NO: 19233 - DNA, 1442 bp, Zea mays
  Clone ID: LIB3137-024-H1_FLI
cttggacttccattaacgctgcgaaagataaccaaggatcaggcgcagccaattattgacaaatttgcaaatcagcttcctggatggaaggcagacttgatgacaagggctgggagaacagttcaagtgcggtttgtgcttactgggatgctcatctacttagtaatggcaattgatctcccaacttatatcacaaaagcaatcgataaaatccgaagaggctttctttggagaggtcgcaaagagctaaatggggggcattgtcttgtttcttggagcaaagtttgtcggcctcttgatttgggtggtcttggtatttcaagcattaaggagctgagttgggcgctgcggatgcgttggttatggctgcaaaaaacggagcttaaccgaccttagtcatccttgactattcgagttccggacaaggtccaggccttcttcagtatggcgatgcaaacggaagttgggaatggtgctaatacacttttttggaaggatcgatggcttcaaggacagagggtggcagatattgcgccaagacttcttcaagttgttccgaaaagaaaaatcaatacaaggacagtccaagaagctattactggaagagcatggatgtcggatattcgaggggccctatctgtgggggcaattgttgattatcttcacctttggaacttattgttaactgctgaattaaggccgaatgttgaagataagcacatttttaggatggctgccaatggaaaatattcagcgaaatttgcttacgaggggttattcattagctcgattccttttgaaccgtacgagaggatatggaaaacctgggcgcctcctaaatgtcggttttttatgtggttagttgctcaaaaaaggtgttggacagctgatcgtcttgcaaaaagaggattggatcaccctgatagttgccctctttgtgaacaagaaagtgaaacaatagaccatcttctggtctcttgtgttttctcaagggagtgttggttccttttgttgagacaatttggactgcataatctatcccctcaaccagaaaatgacagtttcctggactggtggaggacaataagtgaaatggcagctggacaaatgaagatgaggattaactcccttgtttttcttggtgcttggatcttatggaagcaccgtaatcagtgtgtcttcgagggcggcagtccgagtgttgctgctgttctggagcaggttggagaagagcgaaggttgtgggagatggcaggggctaaggggcttattttcctagcagctaaccttcctcacggctaatttctgttcaagggttttgttgtttttttatctgttttttgaggagtttaaacctcagtgttatggtttgtaagggcttcggccccgacttttttcttcttcttaaatataatgatatgcagctctcctgcatattcgag

SEQ ID NO: 19234 - DNA, 1225 bp, Zea mays
  Clone ID: LIB3137-027-A10_FLI
cctcaccggctccattcgaccattccatcctttccttatcccctcccgcttcgtctcccttcctggcttcctttcttcgccatggcaaccatgtccctccgctgcctcgccatggccatggccgacaccgcgctcccgcccgcccacaagctcctccccacagtttccctcccgctcctctcctcgtccacccgcgccgcgccgctcctcctcttcgccaggcgccgcctgccgctcgcgcccctcgttacctcctccgacgccgttgaggccaagtcggcagacgaggaggaggagaaggccggagagcccgtcgaaatggaagctggggagtttgaggaggtgctagcctcaggcggcgagggtgaggggcagtacgccgcggtggagccgccagaggaggccaaggtctacgttgggaaccttccctacgacgtcgacagcgagggactcgcgcagatcttcgaccaggccggcgtcgtcgaggtcgccgaggttatctacaacagagaaactggccagagccgtgggtttggttttgttaccatgagcactgttgaggaagctgacaaagccattgagatgttcagccgctatgatattagcgggaggcttctgaatgtaaacagggcatcttctaggggcactcgcatggaaagacctcagagacaatttgcaccagctttcagagcttatgttggcaacttgccatggcaagttgatgactctaggctggtgcagttgttcagcgagcatggagaagttgttgatgctaaggttgtctacgacagagaaactgggcgctcacgaggattcggttttgtatcaatggtgtcaaaggaggaactcaatgatgctatttcggccctagatggacaggaattggacggccgccctcttcgagtgaatgttgcagcagagcggccacagaggggcttttgatgcggttgtatgagagagatgactgtttgtttgtaatgagcatggagacacagagacacaatggaggagcaatggtacaaattagcggaagcggatgctgtcacaagttgctagatctttctcccttagcttcctgacatttggttcttgccacagctttttgatgcttctcttggcagctggacttaatggtttgctattcttgtcgacatcacgagttgaattgtcaaactagtctcttatgttctatgctgatttgccttaaccagattctcagcatggc

SEQ ID NO: 19235 - DNA, 1210 bp, Zea mays
  Clone ID: LIB3137-027-B7_FLI
caacctcgcctcgcggtcgcagcctcgccccgatttattaacaggcaaacaaatgtcccgtccgttccctcgagaaaaggccacttctgcctgtgtgcatcgcttgccagcttccgcctttccatgaccacgccgctcctgctgtgattctaggacgacgtgccgcccgggccggctgccttctcacgccgggagggttggggaacgagcgccgcagccgccgccgccaccacgaactcgcggaagaccatgccgagatccaggggcaacgagccgccgctgcggacgtcgcagcgcgcgccgctgcacctcaagacgacggcctgctccgaggcgaatggcgcgcaccaccgccccgtcgccgaccggagtagccccagggtctcgccgcgcagccctctgcccgagaagaagcgtgcggcgggaacacgtgttgcggagctggagggcaagctggggaaggtgcaggaggagctcaagaagctgcgggagcagctcgcgtccgccgaggccgccaagaaggacgcgcaggtcgcgctcgaggaggccaagaagcgcgtcggtaccaagggaagcccagcctccaccaccaccaccactcctctctcccccccttcgcctggggtcgaaatcgccaagaagaccgaggagctgaagctgcctcagccggcagccgaggaggagagcagcataaacgccccggcgaccgatgtgttcgaggtagtccgggccgagtcgggggacaaggagaaccagagcgcggccgaggactgcgaggtcgtgagctgcggcggcggtaaggcggcgctggacgtggccgagaatgaggagacggaggaagaggagactaagaaaatgatcggggaggacagcagcgcggcggtggaatctgacggcgctgacaaggagaacccggacgtcgtggagctgaaggcgaagctggcggagaaggacacggagatcgctgccctcacggcggaaaacgctgcgctgaagaagcaggcagaggaggccgcggaggcggcgaagaaggccgaagaggggcccgcgtcgagggcggccaaggccgagcacgaactgaaggagggcgcagcgcgggaggcccgggtgggcgagcagctgcgggcgtcggaggccgcgcgggaggcgctggacggcgagctgcggcgcctgcgcgtgcagaccgagcagtggcgcaaggcggcagagg

SEQ ID NO: 19236 - DNA, 1535 bp, Zea mays
  Clone ID: LIB3137-027-C1_FLI
cagaggagagcgaggagccgaggaggcgtgcgattgcttgctttgcttccgagtttcgacacgcgtgcccaggaatcggtcggattccccaatcccgtcaccatggccgcgccgccttctccttcgtcccgctccccgtccagcgaggttgccgtccacagattcagcggcaccttggatgtatcatcatcgccctcaaggaccgagttgttgagcatggtgaagaagcactcacatttgattgggtggacgattattggtgccgaggatgatgcatcagatgtgggaatggatgataaattctggcatgaaatgcttgacctattctttgtgcgtggcaggcaatcaaaaagaagtgaagaggatgaccttgtcttctttgttaataacatgaaattgcatggttatggtttcaatgataacatggaagatccacctcccttttttgtacggagatgggctcccacgcttgaaaagatcagtattaatacagtggaggttgattgggagcgttcattctatttgaatttaatcgctcacacgtcgtacactgtcactgttgcaatatttggaattgaagatcttcgcaaccgtgcagcgaaaaacaaacagttgcctccagtttataaggttacaaaaaatgtatacgcgtctcctagccgtgtaaattttcatcttgacagaagaaaggctgtagaaacactaccggcatatcccaacatctttttctctgtagacgacttcgatgatacttttgatgctgtggttttgtcagatcctgaacactgctattgtgtgattcttaacgcacatgatggggcagcatttcccgaagaaagtgagtgcaagaatcctgtttcaaatacacagcctggagtgagctgtggtagtgcccaagaaaaaccaccaaagagaactctcttctcagcttatgtgggctaccaaaatgttcgtggagcttatgatgcttgcagatcaaaatttgggagtttcctctcacttgggcatgaccacaataagctcgacagactttttatgaagggcccagaaggacgtggagaggtggaagtagctgtctctggcattgcagatcaaagcagtgggaagtcgaagaaagatccaggagatagctttcgagtccttgttcacagagcagcttctgctgcatcaaagctagtgaagcatgcttatgagtcttcatctgctaacagacaaatggatgatgagcttgtgcctctgaagtgttgcttgatgtctgtgtctcttccttgggactacattgcccacgatcttttgcacaaggacacacctccgatggatctgtgatagcaattccagatcttcactgccagtcatgggaggaatccaggcgtgatgagatgcaaggtaaagaatcgaagtggaattaggatgtagatgcttttagaccaaatatgtgaagtgtagggtttgtaatgtgcttgtgcacaggtaaccatacaatgtaaatacaatgtacatatcatgcatgccttacagaacttgattgtattaac

SEQ ID NO: 19237 - DNA, 1314 bp, Zea mays
  Clone ID: LIB3137-027-D2_FLI
ctcattggaaggcccgcgactgcggctgcgcctgcgcccgaccaaacgtaggagacccatctcctctcttttctttccaagaaaagtcttctcttctctgtctcagcgccgacgcttcccaactccttccaatcgattcttcgtctcgtcctcgtgtaatccccagcttgccctcctcgctcttccctctcaaaaccctacgcctccctgaccaagctccggggacgaatggacggaggagccggcttccctggcacgccggtcccgcgctcgccggaggacgttttccgggactaccgcgcgcgccaggccggcctaatcagggcgctcaccaccgatgttgagaagttctacgtgatgtgcgacccagagaaggataatttatgtttatatggacttcccaatgagacatgggaagtaaacttgcctgctgaggaggttcctcctgaactcccagagccagctctcggaattaattttgctcgtgatgggatgaatgaaaaagattggctatcacttgttgcagtgcatagtgattcttggctaatgtctgttgcattttattttggagcaaggtttggattcgacaaggaatccaggaaacgtctcttcaccatgatcaataatcttcccagcatatatgaggttgtcacaggaacagccaagaaagagtccaaagaaaaaactcctaaaagcagcaacaagactaacaaatctggctcaaagccttcacgccaggtagaacccaactccagggtcccaaagatgccacctccaaaggacgaggagagtgaaggggaggaaggtgaaccacaggaagaccatgagagtgcgctgtgcggcgcatgtggcctaggttatgacgacttctggatctgttgcgacttatgcgagacatggttccacggcaagtgtgtcaagatcaccccaaataaagcggagcacatcaagcagtataagtgcccctcgtgcacaggaagcaagagggccaaggcttgattctatctatctacgatatagatatgaattgcggacaatgctccaagaaccgaggagcctttgacgagagttgtaagatgaatcttccgggtagggcagctaatagatttgaatacttcgtgtggatactgtcggcattggtgcttgagatgcctcaaaatatagtgtcagtactgatcaactgttaactgttgtagtttgtggggccctcaggcatctatgttctgtagtctactgtgtggtggtttagataccgtctatgccatttgtgatgaagcagtcgttttaaagttagatcccagtaatttccctact

SEQ ID NO: 19238 - DNA, 1315 bp, Zea mays
  Clone ID: LIB3137-027-D3_FLI
cccaaacaaccacactgacatctcatcttgatccatccagctttgcctcgatcgccggccggtagccatgtcccccacggaagaagccgctggtggtggtggcgacgactatgaccgcttgagcgagctgaaggcgttcgacgacagcaaggccggcgtcaagggcctcgtggacgctggcgtcacgaccatccctgccatcttccgcggccatctccttcaggaagggccgaaggtatcgtcctctagcagtagcagcagtactagtcttagcattatcccggtcatcgacctctcggcggcggacgcagtcgcacgggaggaggtggtcgcccagttgaaggctgcagccgagacggtggggttcttccagctggtgaaccacggcgttcccagcgagctcctgtgcgagatgctggcgtcggtgaggcggttcaacgaggagccccacgaggtgaagcggccctactacacgcgggacgcacgtcgcaaggtgcggttcaactccaacttcgatctgttccagtcgccggcggccaactggcgcgacacgctcttctgcgaggcagcgccggagccgccgcgggcggaggagctgccggtcgccgtcaggcacgtgatgctggagtacggcggcgcggtgcgggaggtggcggcgcgcgtgctggggctgctctcggaggccctggggctgagccccgggcacctcgcagggatggggtgcgcggagggcctcagcctggtgtgcaactactacccgccgtgcccggaaccggacctcaccctgggctgcagcaggcactcggaccccagcttcctgaccgtgctgctgcaggactcgcatgcgcagggcggcctgcaggcgctcctcgcatccaggtggctggacgtgcctccggtggccggcgcgctcctggtgaacgtcggagaccttctccagctggtcagcaacgggcggttcaagagcgtggagcaccgggtggtggctaaccggagcagggacacggcgagagtgtcagtggcgtgcttctgcaacgcggacatcgcgagatccacgaggctgtatggacccatcgcggagctcatcgccgcggacgacagcgacggcgcgggaagggcgctgtacaggaacgtgacggtcccggagttcctagcgcactacgacaagaaaggcctcgacggtcgcccggcgctccaccgcttccagctgcttcaataattttacatcacatcagtcctgactctggtgatatcatgtcagtatgtcactgtgggctactccggtactctaatacagttatggatggatcagatc

SEQ ID NO: 19239 - DNA, 759 bp, Zea mays
  Clone ID: LIB3137-027-D5_FLI
gctcctctatataatcacctgcaggtggtcttcaaagaaaagaataagaagaaaaacaggcgcaatatagcatcctgcatccaatccacagtagccgcggctactagctagctagtctgctccacgctgcagggcttttagcttaatggccgggctaagcgttctcctggagaaccacagcaagagctacaccgggaaggcggcggcggcgcagatcatcagcaaggccaccctcgtgacgacgacccacggccccaaccaccaccagcagcagcggaagatccctgtctctgcggcggctgcgggctccttcctgcagcgctgctgcctgtgccacaaagagcttgccgagggcatggacatctacatgtacaaaggcgaccgggcgttctgcagcgaggagtgccggtgccggcagatcttcatggacgaggacgccaccaccgtgcgcggcaggcggccagtcaagacaagacaaggatgggaacgtgaatgggagacgtagcttaggtggtgcaccagatgaccagatcttcttcatggaaacatggatggggagacggagacaagacaaggatgaagatgatgaacacagtgtggaagtgtctgccagctcatcccccgtggggtccgtcgcatgcgcagcacactagtagtacgtgcgtggcatcttgctggacccactggataagatggccgcacgacttggagccgctctttgggccccacctcatgaattggatcaggatccgaccgagt

SEQ ID NO: 19240 - DNA, 631 bp, Zea mays
  Clone ID: LIB3137-027-G12_FLI
gcggcgcgtgggggaaagcgtcgctcgcccggttcttggagaagcgaaaggaaagagtggctagcgtcgagccatacctgacgtccaactccaagagcccgctagagagcagtgacgccgtcggcagcgctagcgctccaacgaaatcgtcatccacagacgtcgccccggcgagcagccacaacggcggcggcgcagagcttgtgcgccatggcggatatcccaggagcatcagcttcagcacaaatttgcagatctgactctggtgttgctgtccatagactaccactaccactacgactccgtgtccgtgagcgcgcccctccctacccatcgacacgaaagctggatagctgtcttgctttgcatccggatgaggcgggaggtataggaagatacgatgagatgagagtataaagatgctgagtgctagcctagccgcccgctgtatagcttttgcagcgcgctgctgacaagatcgagggccgtgacctactcgtttcaggctcttcttgaatggtttttttgtcgtggtccattgttgtatattattcaacttgagaaacagagagtgctgctctgtctctgataaaagtttatatgaaattgataaaaagtttctgctttttcc

SEQ ID NO: 19241 - DNA, 498 bp, Zea mays
  Clone ID: LIB3137-028-A4_FLI
gcgctctggaggcgccaggaggaggaggaggaggaggaggagaagaggccagccaggaccaggagcggcagctgcacgcgctcctcgtcgcggccgacaagtacgacgtgccgttcctgaggcgggcatgcgaggcgcggctggcggcgggcgtggcgccccggaacgcgctgcggacgcttgaggtcgccgagctgagctccagcgccgcgctcatggagcgcgccatgggcgccgtcgtggagcacgccgaggaggtcgtgttctcggcggagtacgagcggttcgccgcacggaacgcggggctgtgcgtcgagatcacccgcgcgctgctggccaggatgccgacgccggcgaggagtgatggcccgtgcttagagcttggaagcagctgatgcatgcagttgtattgtatatttgtatcagatgatggatcggaaagaatactcttgtttcagtttcgagtcacgacaatatgtaaacgcataagttcttctg

SEQ ID NO: 19242 - DNA, 602 bp, Zea mays
  Clone ID: LIB3137-028-C10_FLI
ggagaaacaagtaccttgagctcctgctctcggttgctgagaagtataaaaagagtccatacagttttgtctggacagctgctggcaagcaagctaatctcgagaaccaggttggagtgggcggctacggctatcccgccatggttgctctcaacgtgaagaaaggtgcatacgctccactccgtagtgccttccagcgcgacgaaatcatcgagtttgtgaaggaagcagggcgcggtggaaagggaaatcttcctctgaacgatgcgccgacagttgtcacttccgagccgtgggacggcaaagacggagaggtcatcgaagaggatgaattctcccttgacgagctcatgggcgacagctcctcagtaaacgatgagttgtagttctgacgattctgtaactgatctgcatgccgattagcctgaatgtaaatctgaggaactctgatgttttaaaaactcgttaaattttcagattttggatgctagaattagaatggttaagattaaagagaactgatgtgataggcacatcttttttttgtccctgaaataaagtcagttgtgggcgttgcttgccgcaacaaatggtgtcgcttt

SEQ ID NO: 19243 - DNA, 1254 bp, Zea mays
  Clone ID: LIB3137-028-C6_FLI
gtgctagcgctgctgtctttatcaagaaactgttccttcctaggctcaagtcttggatccgcaatgttgtagcagaaggtaatggcactgaaggcaaccagcttaagcctaggattgatgatgaaacggccgatgctgtaaaggcttctgcttcggctgtttctgctattgccaaaacaaaccaacaactgcttgcttcaaaggatgaagcagaaaagaagatactagtgacgttgacacaagctctagattcccaagccaaggagttaaaatccttgaccgattcaatcggtcataccagggaacccataaatattaccagggatgataggttttctcagtaccgcccactggaagaccatgcccctactgttataaggaatggggcaattaacagttcatggagagcctctcagcaaactaacatgtatggtgtgtcaaatggcgactttggttccgtgaggtcttcatttgcgccagcacctgttgaacctacagctggatcattttcaagatcctatggcgagcagccgatgtccactgcacaacgaagcgataggtcttctggcagtaagccatgggagatgcagcagtattcacaacagaggcctggttatggatccaactcccagttgagtgaggaaggatcatactctgatgcccaggacagctatgctccttcctatcaccagaatggaaaggcccctgattttcaagcggatgaacctaggcctttgacttacaacactggagttgaggaaagaccgccaccgcagcgccgctgggtgccccctcagcctccaggtgttgcgatgccagaagcagcagctgccatacgtcaaccaaaggcccttccaaagcagccctccagcgatgcctctgaggcagctggtgagatgcaggtgaatggttcaagtgcatcggatgctgtgactgaggttcctgttaatggtgctactgcaagtgatgctggacgcagtgagatccaagaacaatcagtggcggcctaagtgaaaccaagaccagctaagaactgggaagcaatctaagagagattcaggatctctagtacatctgggcggtttgtcatacatctctgaataacgtctgtatcagaacagcggggcaaccacgccgatgggtacccgtaataatgcaataagtagcagatagtttctgcatttagattaatgctacttgtacacaggagaacatatcaataatatttctatggctgttcgattgagggtgctt

SEQ ID NO: 19244 - DNA, 1519 bp, Zea mays
  Clone ID: LIB3137-028-E3_FLI
cctagtcgcacactcaatgctagtgagtgtgtggctcgggggtgcgcgttgcaatgtgcaatgcttagtcctacgttccgtgttcgggaatacgaggtgcaggatgcaatccctgcttccataggatttaacactagtgacggcccagtttcaacattgtcaagtgatgcattgttccggagaggcctgcactttcccagtgttaagatcattactctagagaagaatgacagttttagttttgatgcatattatgtggatgctaatgaattgcctcctggtacctcaacagacatcggtagttttcagattggcccattccaagcacataccgaagcttctaaagtcaaagtaaaaattcgcttgaatctacatggtttggtttcagtcgaatctgccgttttgataaatgattatcaaaggaatggaagttctactgatcatatggaggtggatagcagtggtgatgacatgcagggtcacaagtcaagaagtgaaaggtctatccagcggcaggagttgccaatcactgagtacatatatggtgcaatgagcaagcatgaattgctggaagctcaagagcaagaacagcaattggcttatcaggataaacttgtggaatggacaaaggacaggaagaatgcattagaatcttatgtatatgacacccgtaacaagctttctgagaggtaccggagctttgctactgattcagaaagggaacaaatctcagttaatttacaacagactgaagattggctttacgaagaaggtgatgatgagacagaagcagtttacagtagcaaacttgaggagctgaaaaagcttgtagatccaattgaaaatcgttgtaaagatgacgaagtgagagctgaagccatgagagatcttttgaagtgcattgttgaccacagaaatgctgccaagtcattatccacacctgaaagagatgctgttgacaatgagtgcaataaagctgagcagtggctaagggaggggtcccaacttcaagaatccttgcccaagaatgtggacccagtactttggtcctgtgaaatcaagagaaaggaagaagagctggatacgttctgtcgaaacataacaaggcacaagggctctccagcaaggacagatggcagcaggggttcagattacatgcctacacctgatagagattaaatattttcacgatcacgaggtttctttactgtacggccacacatgtcttagaccttgttcgtttacgtcggattgcacccggaatcgttccagctaatcaaagtttatataaattagagaagcaatccggctaggaatcgttccgacccaccaatccggtagaaacgaacaaggccttaatcattttgtagcatatatatgaatgaacgagttcctgctaacaccgtcatataatcgactctgtacaacactaggcccgccattgggtgaccgcttcttggttctccaaggtgcagttgtcacttgagagcctactgatcatgattgtcgatacctgtga

SEQ ID NO: 19245 - DNA, 990 bp, Zea mays
  Clone ID: LIB3137-029-B8_FLI
cgcgcgcgcccgacggtcgaggtcttcaggggagtcgacgcgttcctgcgtctcgccctgccttctgcgctcatgatgtgtcttgaatggtggtcgtttgagctccttactctcatgtcagggcttctacccaacccagagctgcagacctcagtgctttcgatctgtctcacgagtgtaacattactcttcactataccttttggccttggagctgctggaagcacgcgagtggcaaatgagctgggcgctgggaaccctgacggagctcgatcagcagtccgcgtggtgctgtccatggcggggatcgacgcggtcgtcgtgagcggaagccttctggcggcccggcgcctcgtgggcatcgcgtacagcagcgaggaggaggtcatatctgcggtcgccgccatggttcctctggtctgcatcaccgccataactgactgcctacaaggaatcctctcaggcgtcgcccgcgggtgcgggtggcagcacctgggcgcgtacgtgaacctcggctcgttctacctgctggggatcccgatggcgatcctcctcggctttgtgctgcgcatggggtcgagggggctctggatgggcatcgtctgcggctccctgtcgcagaccacgctcatgtccgccatcacgttcttcaccgactggaacaaaatggctgagaaggctagagagagggtgttcagcgacaagcagccacaagagccggggccatgatttgtacgccgactagcggcagctgcacatttttccagaccggttttgcaggggatcggaaggcgtttgcttgttattccgtcgcattcacgaggagggagggggtcatgcctccctcctgcaaagtttctcacaaggcaaatgggttcttgctttgagcttcgccttcctacgtttgatttttgtatcatgtaaagtggagaggaacatggaacgaacaaattggacctcatatatgactaacaaggcgaaaatcatctc

SEQ ID NO: 19246 - DNA, 466 bp, Zea mays
  Clone ID: LIB3137-029-H9_FLI
ccacaagttaaagaagcgctgaaagcagacaaggataacagtgcttcagctacttcgaaccaaaacaacccagaggtgcccaaagtagaagaatatgctgatgccagcaaatcttattcagagccattggaccttgcaaagtatagttcagctgcagaattggaggtgcttggtctggagaagataaaaatagagctgcaatctcgtggattaaaatgtggtggaacttttacaggagcgagctacccgactcttccttctgaagacaactccattggataagttaccaaagaagctgcttgctaaggccgctattgggggggaagtgagaagctgtataaacaagtactgatggtgcaatgcttaagtttttctttgacaatgtatggaaatctgttgtggtgtaatcacgtgttacaagcccttggtgtggcattgacgattaatgaggtgtctgtatctacgt

SEQ ID NO: 19247 - DNA, 1030 bp, Zea mays
  Clone ID: LIB3137-030-B4_FLI
tataattgcgtgtgtctttgattacgatgttttgctcacaaagttgctactgctttccaataattcttgacagcgtcaacgagtttgtcagtgcaaagaccgacccaatgataccagtgtatgaattcttaacttgattctctcatgccaggccagcagaaccatggcccatggttccccttatcagtgtctctctctctctctctatttttttttggctgactttgctgcttgcagaagcaaaaggagacatggatcttgcagcttctcgcggtggatcagatcaaaattgcgcacatgcttttcatgcctgtgctgctggtgccactgcttgccgaagcccaatgcgccaagctgcttcagctgttcttgttgcacctgccgcgacacgcagtgctgtactccgatctgccgctgttcaaagaccccttcgtgcagccccggctgctgcacctgcagccttcccagctgcagctgcaagacgccaccaggctgcggccattgccgaccccagtgcagcagctgctgctctagtggttgcagctgcgcggactgcccgtgctcctgctcctgccccccgtgctgcagctgccccggcttcttctcctgtgaggggtgctcggctggctgcctcggcgctctcaaccggtgtctcggcggcctgtcgtcgtgctgcagtgagatgcgaccttcctgctgcaagtgccagtcgtcgtgctgcgaggggggttcgtcctgccgcggcaccggcacgggagcgtgctgccgcggttcgtgcctcggtgccccggcgtcgtcgtgcccggagtgctcctgcggctgcgtgtgctcctgctccaggtgcaaaggaggatgccgctgcccgtcctgtggtagtaatccctgctgtcccggtggatgcttgtgctagatcagagtattatattactactagctagtgtgtctgttgctcttcttttcctgttgtggatgatttggcgtttgatttggatggaacctcgctagtgcataatattcactgtcatgaatt

SEQ ID NO: 19248 - DNA, 1797 bp, Zea mays
  Clone ID: LIB3137-030-E2_FLI
aaccgaggcggccaggctccctcctccctcctcctccctgcaaatcgccaaatcctgcaggcaccaccgctcgttttcctgtgcggggaacaggagagaaggggagagaccgagagagggggaggcgcggcgtccgccggatctgctccgacccccgacgcagcctgtcacgccgtcctcactctcagccagcgaaaatgggtgccggaggcaggatgaccgagaaggagcgggaggagcaggagcaagtcgcccgtgctaccggcggtggcgcggcagtgcagcggtcgccggtggagaagccgccgttcacgttggggcagatcaagaaggcgatcccgccgcactgcttcgagcgctccgtgctgaggtccttctcctacgtggcccacgacctggcgaccgccgcggcgctcctctacctcgcggtggccgtgataccggcgctacccagcccgctccgctacgcggcctggccgctgtactgggtggcccaggggtgcgtgtgcacgggcgtgtgggtgatcgcgcacgagtgcggccaccacgccttctccgaccacgcgctcctggacgacgccgtcggcctggcgctgcactcggcgctgctggtgccctacttctcgtggaagtacagccaccggcgccaccactccaacacggggtccctggagcgcgacgaggtgttcgtgccgaggaccaaggaggcgctgccgtggtacgccccgtacgtgcacggcagccccgcgggccggctggcgcacgtcgccgtgcagctcaccctgggctggccgctgtacctggccaccaacgcgtcgggccgcccgtacccgcgcttcgcctgccacttcgacccctacggcccgatctacggcgaccgggagcgcgcccagatcttcgtctcggacgccggcgtcgcggccgtggcgttcgggctgtacaagctggcggcggcgttcgggctctggtgggtggtgcgcgtgtacgccgtgccgctgctgatcgtcaacgcgtggctggtgctcatcacgtacctgcagcacacccacccggcgctgccccactacgactcgggcgagtgggactggctgcgcggcgcgctcgccaccgtcgaccgcgactacggcgtcctcaaccgcgtgttccaccacatcacggacacgcacgtcgcgcaccacctcttctccaccatgccgcactaccacgccgtggaggccaccagggcgatcaggcccgtcctcggcgactactaccagttcgacccgacccctgtcgccaaggccacctggcgcgaggccagggagtgcatctacgtcgagcctgagatccgcaacagcaagggcgtcttctggtacaacagcaagttctagccgccgcttgctttttccctaggaatgggaggagaaatcaggatgagaagatggtaatgtctccatctacctgtctaatggttagtcaccagtctttagacaggaagagagcatttgggcttcagaaaaggaggcttactgcactactgcagtgccatcgctagatctaggcaaattcagtgtgtctgtgcccatggctgtgagctttgggtactctcaagtagtcaagttctcttgtttttgtttttagtcgtcgctgttgtaggcttgccggcggcggccgttgcgtggccgcgccttgtcgtgtgcgtcttgcttttgtgtgcgttcgtgctcccttgtttttgtgtgcgttcgtgctcccttcgtgttgttgtaaaacactagtctggtgtctttggcggaataactaacagatcgtcgaacg

SEQ ID NO: 19249 - DNA, 856 bp, Zea mays
  Clone ID: LIB3137-030-F10_FLI
gaagatcaagatcgagatcaagatctcgttcaccatcccattctaggcgtcatggccgtgggatacatgctgaaagcaattattggagcaagcaaaaggctcctagggttgaatatattactgaatttggaggttccgatgataccagtgaaccaaaagtttcagggatctctccgccttcgtctccaatacgaattgacatacctaaccggttgtctggtggtcaaattcttgaggcacttcacagtgatcctgcctcttctttgtctgtggaacaggaaagaactgcaaaacttttgaaaccttcccccagtacatcatcagcattagctaaactaagcaaggttgcttctgggggaactggtaaaactccccagactgaaaagaaagaaacaccacaagaaagacttaagaggataatgagcaaacagcttaacaagcaaattaaaaaggacacggctgctgagattgccaagaaacgagaacaggaacgacaaaggcaggaaaaacttgctgaagttggtcgatacaagcgtcgtagccgcagtagaagtcttagccgttccccaccaagcacagaaggcggcgatatagcagaagccgtagtaggagcagaagcccaagaaggtaccgatcccgctcgctctccagttcccggtcgccctctcgctctccaaggtaccgaagcaggtcaagacactgaaaatatccaggcagccactaacaaagtgccttgccatgttgtagttaatttattttatagactttttcattcctgcagcgatgtgtactcatgagaagcctccgtttttgttttcttagtcctattatcgacagtgtgtgttccttgtgtttc

SEQ ID NO: 19250 - DNA, 796 bp, Zea mays
  Clone ID: LIB3137-030-G3_FLI
atctttatggtccaggacctactcgatctgaacagacatttgagtacactcctccagaggcactccttaattcaaactggtttcaaggatcaagaagtgcaaggcttaagtatgacatctggagcgttggagttgtcatgctagagttgatgatgggttctccccatgtttttcagataagtgaccgtacacgcattttaatggatcagcatctcggagggtggagtgaacaaacaaaggagcttgcatacaagttgaggtcatacatggagttgtgcattttagtcccagggatttcctcgcaacatcatggcagtggtagcccagaacagggtcaatttgggttagcttcctggaaatgctctgaagaatcatttgcacatcaagtgaagatcagagatcctctcaagattggttttcctaatttatgggcgttgcggcttgcacgccagctacttgtgtggcatcctgaggatcggctaagtgtcgatgaagcactaaatcatccttacttccaggagccaatgtaatgtaaggagaggagattagtgataactaaccgacgaatcttcagctcggtcctttcaagttcaagccgcgtgtatttggttagaggaattcatgaatcgtttgtaatttaccatcctagctgtgtcataagatgttgtgaatataacatgaagtaaaagatagtagcatatgtgaaattacatgtgtaacgactttgcccttacaagccacagcattaggccagactgcctttggttgcaatcactaatgaggaagaacgttatct

SEQ ID NO: 19251 - DNA, 1687 bp, Zea mays
  Clone ID: LIB3137-030-H3_FLI
cggccgttttctacgggcggtgcagtggacgggagtagtaccctttctttctcttcgaagaaaatgcggcggcgtgtggtataaaccccgcccgtcacgccgggccgtccgtgcgtttccttttgtcttcgcttgcttcctttcgaaagtccttgcgtcacactcgccgatcgatcgagtctctccggattccagagaggcccaactgccgaagccatcgatcgccgccacctcttcgagcagaatagttgagaatggctgacgaggatatccagcctatcgtatgtgacaatggcactggaatggtcaaggccggtttcgctggtgatgatgcgccaagagctgtcttccccagcattgtgggaagaccacgccacaccggtgtcatggtcggcatgggccaaaaggatgcctacgtaggtgatgaggctcaggccaagagaggcatcctgacactgaagtacccgattgagcatggcattgtcaacaactgggatgacatggagaaaatctggcatcacaccttctacaacgagctccgtgtttcgcctgaagatcaccctgtgctgctgaccgaggcccctctcaaccccaaggccaacagagagaaaatgacgcagattatgtttgaaaccttcgaatgcccagcaatgtatgttgctatccaggctgttctttcgttgtacgctagtgggcgaacaactggtattgtgatggattccggtgatggtgtgagccacacggttccaatctatgaaggatacacacttcctcatgctattctccgtttggatcttgcggggcgtgacctcaccgaccacctaatgaagatcctcacagagagagggtactccctcactacgagcgctgagcgggagattgtcagggacataaaggagaagcttgcctacgttgcccttgattatgaacaggagctggagactgccaggagcagctcctctgtcgagaagagctacgagatgcctgatggtcaggtcatcaccattgggtcagaaaggtttaggtgccccgaggtgctgttccaaccatcccttgttggcatggaatcgcctggcgtccatgaggccacgtacaactccatcatgaagtgtgatgttgatatcaggaaggatttgtatggtaacgttgtcctcagtgggggatctaccatgttccctgggattgccgatcgtatgagcaaggagatcacgtccctggctcctagcagcatgaaggttaaagtgattgcgccacctgaaaggaagtacagtgtctggatcggtggctctattttggcttctctcagcacttttcagcagatgtggatctccaagggagagtatgacgaaactggtccgggcattgtccacatgaagtgcttctaagtttttttgggaaatttttccaaaaaaaaaaagaagtttctggggaagttcgacatggtacgtcaggcgttaccggctcattgtgaaccaatacatgaactgccatgataaggttataagcagaaataacagtagcactggctccaattcctgaagatgagtctggtgctccctgctgtatgaaatggatcccactcgtatattcgtcaccgcgccgcactggtgtaacgtgttgcctcagagtttgcttttagctggttccttttttaaaaataagtactgtttttggttggctaccagtc

SEQ ID NO: 19252 - DNA, 1834 bp, Zea mays
  Clone ID: LIB3137-033-A12_FLI
gtcttccccaccgaagcagggtgatgcggagggcgtcgccttcgctgtctccggcgaggggcccggcggtcttcgccgccgcggtcgtggtgtttctgccggtcttattccccgggttgttctcccctcttggccacgctttcccttctgtcttctcggagtggaatgcccctaagccaatgcatccttctcttttgaatgaggccttgcgatggacagctacagacggacaaaagaaagatctatggtcacccttgccatatcaggggtggaaaccatgcttaacgccatcagtttctcacaaattacctctggaaccaagtggatacatccaagtatttcttgatggtggattgaaccaacaaagaatggggatatgtgatgccattgcagttgcaaagattcttaatgctactcttgtgatcccacatcttgaagtaaaccctgtttggaaggattcaagctcatttgaagaaatttttgatgtggatcactttatcaactccctaaaagatgaagtttccattatcaaagtgcttccaaaagaattttcttggagcacaagagagtactatggcacaggcatccgtgctacaagaataaaaactgcacctcttcatgcctcagcaaattggtatttggagaatgtcagtcctatcctgcaaagctatgggattgttgcgatcgctcccttttctcaccgccttgcatttgatgatttgcctgtggatcttcaacgcttgcgttgtaaagttaacttccaagctctggtcttccgttctcacattatctcacttggagaaacacttgtgaagcgcttgaggtctccggtccgggttcattccagtaaatctatccatcaagttgtaggagacacaaatcaagctgaaaaatatgcagttttgcatctccgttttgataaggatatggctgcacattctgcatgtgactttggaggtggcagagctgaacagctagctcttgctaagtacaggcaagttatatggcaaggaagggtattaaattcacagctaactgatgaggagcttcggaacacaggacgctgcccattgaccccagaagagattgggctgttactggtagcccttggctttgacaacagaactcgactctatcttgcatctcacaaggtatatggtggagaagccaggatctctagcttgcgcaaactatttccgttgatggaggacaagaggagccttgcatctgaagatgaacttgctaatgttgaagggaaggcttctgttctagcagctcttgactattatatcagcatgcatagcgacattttcatatctgcatctcctggaaacatgcacaatgctttggtggctcaccgaagctatgagaacttgaagaccataaggccaaacatggcactgcttgggcgcacctttgcgaataagagcatggagtggccagagtttcagcaggttgtacaggcaggacacaaaggaagatacgggcaaatccggttgagaaaggcaacgcaatccatctacacttatcctgcacctgactgtatgtgccaaggataggctactggtttcaaaatttcagaaaaccaatcggttctgcagcaaatgaaggtcgaggatcgccgtctcaaatgttgcattgcggttagtacattccagctgccactagatatgcaagtttgatttttttgggacagctgctatgtactggatctcttctctctctctctctctctctctctctctctctctctctctctctcttcacaatacagtttggtgcagatgcagtttatagatattctcatattcgtggttgtgacgggtgttaagat

SEQ ID NO: 19253 - DNA, 1352 bp, Zea mays
  Clone ID: LIB3137-033-H11_FLI
gcccagctcgctcgtcccagctgatcaggtcgagcacctagtagcgacctgctcgatcatcagtgtagagtgtcggtaggtgtctgtctctcttggtggctggttgcaacggtcatggcgacgtcgtctcgtcgggtgcccttgctgctgctgtgcctgggcgtgctggtgtcctgctccttcgcggcgggcagcttggaccaggagctggacatcacgtggggcgacgggcggggcaaggtccttgacaacgggcggctgctgacgctgtcgctggaccgcacgtccggctccgggttccagtcccggcacgagtacctgttcggcaagatcgacatgcagctgcggctggtgccgggcaactccgccggcaccgtcaccgcctactacctgtcgtcgcagggcggcgcgcacgacgagatcgacttcgagttcctgggcaacgtgtccggcgagccctacacgctgcacaccaacgtgttcacgcgggggcaggggcagcgggagcagcagttccgcctctggttcgaccccaccgccgacttccacacctactccatcctctggaaccccaagcacgtcatcttcatggtggacgacatgcccatcagggacttccgcaacctggagagcaagggggtggcgttccccaagagccagccgatgcggctctactccagcctgtggaacgcggacgactgggcgacgcagggcgggcgcgtcaagacggactggtcccacgcccccttctccgcctcctaccgcgggttcaaggccgacgcttgcgtcgccgtcgcgggcggccggacccgctgcggcgccaccgtcggcaccgagggcaccggcgcccccgcctccgccgccggcgccggggactggtacaaccaggagctggacctcaccctgcagcagcggatgcgctgggtgcagcgcaagtacatgatctacaactactgcaccgaccccaagcgctaccagcagggcctccccgccgagtgctccatgcagtagcgcccggttattcctcgcccgtccaacaatggcgcgcgcgcgcgtgtgtgtgcatgtggtccgctctactgctaccgctacgacgatcggtgtcgatcaccggatcaaggcaagacgaaaggcatcgaaacatggtagataaataaaggacttgacgatttgtaacgcagtagctggtgcgtgcgtggtgtggtggtaagaaattcttctgctgcctgtgttcttgtagcctcctcgtcctcgcccaccctgttggtacgtgtacggtgtacgtagtctgccgccgcgcgctgttcgtgttcgtcgtgtctcgtgtctgtattatactcgtcctccccatc

SEQ ID NO: 19254 - DNA, 774 bp, Zea mays
  Clone ID: LIB3137-036-F1_FLI
ccacgcgccggatgtacaccgcgaggaagaagatccagaaggagaagggccttgagccctccgagtttgaggactccgttgcccaggctttctttgatctggagaacgggaaccaggagctcaagagcgacctcaaggacctgtacatcaacaatgctatccagatggatgttaccgggagcaggaaggctgttgtcatccacgtcccataccgcctgcgcaaggccttcaggaagatccatgtcagactcgtcagggagctggagaagaaattcagcggcaaggatgtggtaattgttgctacaaggaggattgtgaggccacccaagaagggttcagctgttctgcgccctcgcaccaggactctgactgctgttcacgatggcatcttggaggatgttgtctacccagctgagattgtggggaagcgtgtcagataccgtctggatggttccaagattatcaagattttcttggacccaaaggagaggaacaacactgaatacaagctggagacctgcactgcggtctaccgcaggctgtgtgggaaagatgtggtctttgagtaccctatgaccgaaaatgcataaatatgatgccctctggatatctccactctatttcgttgattctgaatgttatgttgggtctccctatgtacttcaaaaaacatagttttgatgctaaagttgcctaggaatttggtacggggaagtggcagtggacgtgaacaatgtttagttttgagcatttaaattaaacctttgccctgat

SEQ ID NO: 19255 - DNA, 226 bp, Zea mays
  Clone ID: LIB3137-036-G12_FLI
ccttggccgggtgctgcttctgatgcgcggacgacgcccggacgacggccatccgggtcgccgaacgacggggcgcgagcgcgacggcccggcgcgacgtcgcgttcctgccggcgcagagaggcttcccgagaccctgcgccacggacagagacgccgcgacggcggtgacggccatgggtcctgggctccgctcaggcgctgctctcgggacgtgtgatggcag

SEQ ID NO: 19256 - DNA, 1540 bp, Zea mays
  Clone ID: LIB3137-039-A10_FLI
ccccctgccccgcaagccgcacccgccgctccctccgccatctgcgctgcgctgctctgctctgcggtgccaggctgccagccagtgccggcgcgcgcccgctgccgccccgacgggcccaccgttctcttctctccgcgctgcgcgccggctgggctgcaggtctgaggtcagttaatgcgcccgtgacaggcggcgtcggggaggccaagggcggtgccgggttaatcccgccgtctctcgaggcggcgcccgcggaggaccaggcgggagggggagacggtgaggcgcggccatggggggcgccaaggcggaggacaaacccgccgccgccgctgcagaagattggtgctaccaatttggaaacaaggacgcatttgacttgaagcccccgaaaaaatcaccgatcgcgttgagaacggttgtctttgctatgactatgttatgcgggatatctatttgctcaatgtgcatgaagcaactagggagtgatggctggtcaagagttgtcaagattgaagttgtggaacaaccatgtaataagtccattgctcctctttcagaggctcaatttgtgcgctatcctcaaccgataacttacagcagggaggaatgcaagtgcaatgctgtccggtcctttgcaattatatcatcgcagcgatctggaagtggctggtttgaaacacttcttaacagccacatgaatgttagctccaatggtgaaattttctctagaaaagaaaggaggagtaacatttcctctatagtagataccctggataaagtgtacaatttggactggaatagtagtgcttccaagaatgagtgcactgcagctattggcttcaagtggatgctgaatcagggcctcgtggcaaaccatgcggacgtagtcgactacttcaaccgaagaggagtctctgcaatatttcttttcagaaggaacctgctccgtcagttggtatcacaagtagcgaacaatcacgacaggttacttaagcaactaaacggaacgcacaaggcccatgtccacacgaagcgtgaggcccatatactggcaagatacaggcccaggctcaacacgacgtcactgatatggcagctgaaacgagctgacgagtacactcgcgacgctcttgagaacctaaacaacacccggcacatgagcgtctactacgaggatgtcgtccgcaacagaacaaagctcttggatgtcctggatttcctcggagtgccgaggaggaagctggtgagccggcacgtgaagatacacacgaagccgctgtcggagcagatcgagaactgggacgaggtctacggcgccctcaacggtacccagtacgagggcttcctgaatgccgctgactatctagtataacatcacgtttctggatgtagatagtgtgcgtgtgattctttcgtttcttgtttgtttctggcagaaattttgatgcggggtaggcgccttttgccgtgcatggttgcattctcggtaacctgatgctcctgtaactaaccctccagcttctctggtctttgt

SEQ ID NO: 19257 - DNA, 1211 bp, Zea mays
  Clone ID: LIB3137-039-C5_FLI
ccgtttacggtttagccgcgtgctctctctgtctccctcggggacaattcggctaccgctgccgccctacgccaggttcccagctcttcgccaggcccttctcccgcgacgagcacccaccaggccaccagttgacacttaatactacctgaatctaatgcttatcaatatgcctaatattttctggcgaagctttactttgtgcaacacatattctccatctaatcaactacaaggaggttgtactcaaagaatggatttatggattacttcttgttcacaagcagcgagacatcatgcaaggacaggttcagttgattttcctgttaagaagaacgtgaagtcatctcaactgcaaaacacgacatgttttgttggtttagtgcggcagttgcagtgcagacggtcagcaaaaagccatatcctgaatgtaaagtctgatacagtatcccaccaaaaggtttctggtgtaagctggagtttggaaaatacgccacgaagaataggatgtgtagtctctggactaggttttgcagcgtatgggctggcgagtgctgagggtcctgtcaacaacaacatagatagcactgaatctgccatgtcttcaacaaatttatctcatgggaaagaagttcacacagactattctgttactggcattcctggtgatggaagatgcctgtttcgttctgtggttcacggtgcctacattaggtcaaggaagcccatacctaatgaggatcatcaaagaaggctagctgatgagttgagaacaaaggtcgcagatgaatttatcaagaggcgggcagagactgaatggtttgttgagggggacttcgacacgtacgtatctcagattaggaagccacatgtctggggaggcgagccagagctgttgatggcttcacatgttcttcagatgccaatcaccgtctacatgcacgataaagccgctggtggtctaatagcgatcgcggaatacggccaagagcacgggacggaagctcccgtccaagttctttaccatggctatggccattatgatgcgctgcagataccaggagagggtggtccgaggccaagactgtaacgttagtagctctgaatctaaatggcaagttccggttcgatactttcttcctttgtacatgtacgtgcatgcatacatcgatcagagttttgggggggttaaaaagcaggtcgtagtttgc

SEQ ID NO: 19258 - DNA, 771 bp, Zea mays
  Clone ID: LIB3137-039-F2_FLI
aagatcagatgatgggggtcctctggtcaccaatcagatatatgtgcacagtaaattgatgattattgatgatcgcatggcattgattggctcagccaacataaatgatagaagcttgctgggatctagggattctgagattggtataattattgaagataaagaggttctcagttctataatggatggaagaccttgggaagctggaaagttctccctcagcctacgactttctctatgggcagaacaccttggtcttcttccaggagaggttagttgcattatggatcctgtggatgattcagcgtacaaaaacatctggatggccacggctaaggagaataccgtgatctaccatcaagtattctcatgtgttcccaacgatcacatccattctaggtaccaatttcgccaaagttttgctcatcgtaaggagaaaattggccacacaaccatagacttgggtgttgccttagaaaacctggaaacgcaacagcagggagacctggcatgtgccaatccaatggaacggttgcaggacgttcggggtcatattgtttgcttccctttggagttcatgtgccaagaggacttgagacctttcttcagtgagagcgagtattatacatctccacaagttttccattagggcttgttcgattatttcaattccatgtgacgtggtgtgtattagaatgagttgggatgaattttgacttgctatggatttaaaccgactcaataccatctaatccacatggattaatgttg

SEQ ID NO: 19259 - DNA, 796 bp, Zea mays
  Clone ID: LIB3137-040-C8_FLI
cacacacacacacacagacaagtggtttccaaagccaagtgtgtgtactagcaaccagctagctcgggcggcagcaggcagccatcatgtcggaggagaagcaccaccacttcttcaaccaccacaagaaggacgaggagcagcccgccggcgagtacgggtactccgagaccgaggtggtcactgccaccggcgaggccgagtacgagaggtacaagaaggaggagaaggagcacaagcacaagcagcacctcggcgaggccggcgccatcgccgccggcgccttcgcactctacgagaagcacgaggcgaagaaggaccccgagcacgcgcacaggcacaagatcacggaggaggtcgctgccgcggcggccgtcggcgccggcggctacgtattccacgagcaccacgagaagaagaaggaccacaaggacgccgaggaggccagcggcgagaagaagcaccaccacctcttcggctgaccgtagtaccggccggcgcgcgaccgagctagctagctccggcgcacacaaccacacacctgtttaattctgtactgcatgcgtgtgtaatttgatggttcacaataatgagtccctctccggaccttggtagctgcttgcttgtggtgagtgagagtgtgagactgagggagaagaggtggtgggcgtggggctacgtcgagagaggcgtgttcctgtaatcctgtactcgcttcgttttctctgcatgcgtctataattgtgttcaataataagtgagagcggtgtgatgtgtggctccccttgtcaggctc

SEQ ID NO: 19260 - DNA, 1633 bp, Zea mays
  Clone ID: LIB3137-040-F10_FLI
ccctttcaatttttttaatctccgcttccactgttccaccaaaccaagccgagaaatttctcctaaatttcagatcaaatcctcctcctcctcctcctccccctccccctctccgaggattctgcccagcagcgcggcgatccgcctcgatccggaatggagcgcgtcttctccatggaggagatccccaacccctactgggccccgccgcaccctcaaccggcggccggcggcgctgttgctgcaccaggtggagtaggaggagcgggggacgcggcgggcgcgatgaaccggtgcccatctgagtggtacttcgagaagttccttgaggaggccgtgctcgacagtccgggtcccgtcgccggcgtgggtagaagcagcggacaagctggagttgaggcggcggagagcaagccgctgggcgccgcggcgccggcgtccgtctcgagctcggtcgttgaccccgtcgagtacaacgcgatgctcaagcagaagctggagaaggacctcgctgccatcgctatgtggagggcttctggtgcagcacctccagatctttctgcgactgctgcttccttgccaagtgtcggtgttccgcatgcagctcctcttaaacccgtcggaggtactgaaagtctagttcaaaacatgctagctggtgctccagtaggggggtcaggtccacatatagtacaaattgctgatatccctgttaagcaaaccactagctcttcctcacgagagcagtcagatgatgatgacatggaaggcgatgctgagacaaatggaaatggaaaccctgttcaacaaagacaacagagaaggaagcaatccaatcgggaatcagccaggcgttcgagaagcagaaaggcggctcacttgaatgaactggaggcacaggtagcacagttaagagtcgaaaactcttcgctgctaaggcggcttgctgatgttaaccagaagttcaatgaagctgctgttgacaatagggtgctaaaggcagacgtcgaaaccttaagagcaaaggtgaagatggcagaggactcggtgaagcgggtaacaggcatgaacgcattgtaccctgccgtgtcggatatgtcttccctcagcatgccattcaatggctccccttctgactccgcctctgatagcaccgtcccggtacaagatgacctgaacagttacttcgccaacccaagcgaaatcggaggcaacaacggttacatgccagatatagcctcctcggttcaacaggacgacaatttttgtcaacgggtatcaggctgctggcaagatgggcagaacagactcgctgcagcgggtggcaagcctggagcacctccagaaaagaatgtgcggaggcccggcttcatccggctcgacctcctaggtttcatatgaaaaagtccctggtgcctaacggcaagaatgctaaattaacaatttcaacatgctttgtactggacattgataatcctgcgatgcgcattagtgcgttatggacttgtgggtcaattgctatttggcgtgtgctggctgctcactgtagtgagcagaacaagttccagtttctatcgaagagcaacctctccttttcgctagtgacttatgaatggtcgatggtttattagcc

SEQ ID NO: 19261 - DNA, 980 bp, Zea mays
  Clone ID: LIB3137-040-F2_FLI
gatcccctttcccccaactccccccccaagcagccgcgaagagagatcccgcgctcaaccaccgcttctcggccgcggcccccttcggtcctccttccctcctttcctccggtggccgccggggacggggagcgaagaagcctccatcactcctttcctccgttggtcgccggggacggggagagaataagcctccctccctccttccctccggtggttgccggggacggggagcgaatcctccattcctccttcctccctccggtggtcgccagggacgagggaccgggatcgaagatgttctatggggccatggtttgggatccgtggctgatcgtgtcgcagatcgtgtgcctgcagtgcctctactacctgtcgctgggcgtcgccatggcgctcctcgtcggcacccgcgtcccgcgactcacccttctctacttcttcgacttcgccacgctcaccccgcgcacccccacgggttggtgcgccatcgcatcattcattcttgccgctgtcgcaggtgctgggttcatgctttatgtgattgagagagccaagaagtgcctggactttgcagcaacactctacataatccatctcttcatttgcattgtttatggtggatggccagcttccattacatggtgggttgttaatatcactggtttggcaatcatggctctcctaggtgaatacctatgcatccggcgggagttgaaagaaattccaatatcacggcttcgtgcaagtgtttaatctcacatggtaaaagagtacaggtgtttcaaattgtgttgcccctggaggtgtttgttaatatgttacttaaggaatacaatgaatgccttgttccgtggtttgcaatttgatacttagcaaacttcccatagagcgttcatctgatacccaatctcccagtaggccatgataaactgattggtctcagagttcccaccaacggaaatggcacctcagtttct

SEQ ID NO: 19262 - DNA, 1291 bp, Zea mays
  Clone ID: LIB3137-041-B12_FLI
ccagcaaggaccaagacagagcacagcgcagctcgtcggcctctcgacgccggttgctgcaaccaccgcctttattgcccacgcgggccgtgcggaagaagcaagaagacacgccaatggaggtcgccgcagcatcggcagcgggctacggattcaaggccgacgacgacgttgacagcctcagggcgacggagctcaggcttggcctgccgggcacggaggaggaggaggccgaggagtcccagaacaaggcgccgccgccgccgccgtcgacgcccagaggcaagaagcgcgacgtcgtcgccagcagcgggcccgaggatgcgcccaagaagcgcgactgcgagaccgacaccgatgccgcgccgccgccggccgccaaggctcagctggtgggatggccgccggtgaggtcgtacaggaagagctgcttccagcagcaggcggcggccaagaacaagccggcggcagcgctggcggaggaggccccggccgccggcgggctgttcgtgaaggtgagcatggacggcgccccctacctcaggaaggtggacctaaagatgtacaagggctaccgcgagctgcgggaggcgctggaggccatgttcctctgcttctccggcgccggcgccgccgacgcgcccgccgtcaacccctccgacttcgccgtcacctacgaggacaaggacggcgacctcatgctcgtcggcgacgtgcccttcggcatgttcatcagcacctgcaagaggctgaggatcatgaaggggtcagaagcgagagggctcggctcggtcaagaacaactgatgatgaaacgtctatcgcatgcttgtgctgtgcgtgcgtgcatgcgccagcaaattcttttgttcttttggggtcttatttcttctccaaggcgtccctgcatgggtgtgggcgtgtggtgttgagtattatgtaccttctcccctagcattgtctgtgccaacaatggagcagcagctagcagcaaaccagagacatggcgaggagaaagatgaagctgcttgcttggaaggagggagggagagagagagagagagaggaaagctttgtgcatgcgtggaatgatgtgtggtcgctttgttctttttcttgtgcccctagtaggggtcgtgtgtgtgtgtgtgtttagcaagacatgcaaaaggagtggagagtcgagttgaatctccatgatgcgtggttgtacaaagccaaagatcactcttctttcttgtctatcagtctattgtctatctatcgatcagcagcctggtcgttgcttctgt

SEQ ID NO: 19263 - DNA, 685 bp, Zea mays
  Clone ID: LIB3137-041-B5_FLI
gggcgatggtcgtcaaagaaaaaacaagattaaagggtgcgtagaaggaggaagtggtaagaaagccaatgaaaatgaaaatgtcacaagtaagaaaatgattcgtgggaggtttaagtgtccaaactgtggtgaatttggccacaggaaagcaagctataaatgtcctttcaatggaacaaagaaaagaaaaaggagaccaaggaaaaatgtgactaaaggttggtttccaaaagatttcgaagcttcgtcgcagctcgtcctgcaagagaacgaagtgcatccactagctacttaactacctgcaagagaacgaaggcgagggtgagggcggcaagggtgtcgaagagaagcaggaggtagcgtggcgtcgccatggaagcatcggaggcttgggattaggtcggaactcagtagcgaagaggacccataacaggtgtgtgagatataggagaatgtgattgtgtttggccttttgttttgtgaaatttgtacgcgatgaaggcaacatgaaactaaaattaggggatgaattttgggagagaatacagaccacatagttgtcgttctgactgctagacagttcggtaagatcccttaggcatcatatgcatatgcatttgtatggttttcatattagaattataattactgaaagcacatctgaatgatgcagattgttttg

SEQ ID NO: 19264 - DNA, 2737 bp, Zea mays
  Clone ID: LIB3137-041-C2_FLI
ctccctacttcccagccaccccatggctcgcttaacccccacgaagtccaaatcctccaggaagcccaagccctcctcctcctccgccatgggcgccggagcggagccggatgcgatgtccacgcggcggccgaagcgtggcaagtcggtgggcggcgtcagcaagaagtccaagtcgggcgggttcgagtcgatggggctctgcgaggaggtgtaccgcggggtgcgccacaaagggtaccgcgtgcccacgccgatccagcgcaagaccatgccgctcatcctcgcgggcgtcgacgtcgctgccatggcccgcacgggctccgggaagaccgccgcattcctggtgcccatgctgcagcgcctccgccgccgcgacccgagcgccggcgtccgcgcgctcatcctctcacctacccgcgacctcgcgatgcagacgctcaagttctccaaccagctcggcaagttcacagacctaagaaccagcataattgttggtggagatagcatggagagtcagtttgaggacctgtcagagtgtcctgatatcataattgccacgccaggcaggctcatgcaccatttgaatgatgtcaaggacatgactcttcgctcagtggaatatgttgtgtttgatgaagcagattccttgttcagcatggggttcgccaaacatttgcacgatattctgaagaagctaaatgatacacgacaaacattgctctttagtgccactttgcctagtgcccttgcagattttgcaaaagctggtctgcgtgatccgcacattgtgaggctcgacttggacaaaaagatcagtcctgatctcaggatggtgttcttcacactgcgccaagaagagaagcttgctgccttactgtatttggtcagggaacgcatcagctctgaggagcagacaatattttttgtttcaaccaagcatcatgtggagttcttgaatgttttgttcagagaagaaggtttagagccttccctatcctatggtgctatggatcaggaagctcgtatgattcatatttcaaaattcagggcaaggaagaccatgctacttattgtgacagatgttgctgcgaggggcttggatattccgttgctggataatgtagtgaactgggactttcctgcaaagcctaagttatttgttcatagagttggtcgagtggctagacaaggtagaagtggaacagcttatacatttgtcacttcagaggacatgccatatttactggacctacatcttttcctttcaaggcctcttagacctgctccaacagaggaggaactcctaaaagacatggacggtataactatgaaaatcgatgaagctattgcaaatggggaatcagtttatggacgatttcctcaaactgtccttgatcttgcctctgatggactaaaagaagttattactggatgtacggagttgatagcattagaaaagccatgtgctaatgctttccggttgtatctcaagactcgtcctatgccttcaaaagaatctatcaaaagggtaaaagatttgcctcgtgagggtcttaatccaattttcagggatgttctccggtcagatgaactttcagctcttgcattctccgaacgcctgaaatcatttcgaccaaagcagactattttagaggctgaaggtgaagctgctaaagcacgaaattcgaagggttctaatcaatggttagatgtgatgaagaagaaacgagaagttcatgaagggattataaatttagttcaccaaaagagttctgaggatccaaggccagaggttgaagaggttgttgacatttcaaattgggagaaaaaagaagtttgtggcaagaaacggaagttacagagctttagagatgaggactactacataagttcagtacctcaaaaccatcatttggaagctgggctgtcggtgagggacaatgaaggatttgttgaaaataggttggatgctgctgttcttgatttagttgatgatgaagcttctggtatgcaagcgcagaaaactcgatatcactggatgaagaacaaatttgtcaagttgaatgcaggggatcgtgtcactgctacaggaaagattaaaacggaaggtggtgcgaagataaaggcatcggcaacagggatatataagagatggcagcagaagacacataaatcaatcaacattggtgggaaatctggcaactttgcagacgagggcacatccagttcaggcgggtaccagagaggcaacaagaagcatttcacgggccatggccgcagatctataccaaatgccaacgtgccctctgaaataaggaatcacgagcaaatgcagaagggcaggcagcagaaggcaatggaaatcacgcggttgaagaacaaatctgcgaaggacggcaaattccagaacaagttccagaagagcaggcagcagcctgataggcacggtaaggggaggggtagtgggaaagggaccggaaaagggtttagcaaaggggctggtggaagaggagggaaaggtaagggcaagggcgggaggtgattgatgttttcgaagcagaatgatggtctaagattgatcgagcgttgatgatgttcagcagacaccacctttgcttctcgcagttttgtttatctgttgcagtggagagaccatagcgtctccttcctgtttgcaaccagactggtgtttaattatactcggctggataatctcagagcattaattttgtgg

SEQ ID NO: 19265 - DNA, 2323 bp, Zea mays
  Clone ID: LIB3137-041-C9_FLI
acttcctcagcaatcaatcagctttccagcgatcggcagctcctcgatcgtttcgaagctccaatccgcccggccgcctccgcctgttgccactagctaggtgatcgatcgaatggactgcggtggcgcgctgcagctcccgcctgggttccgcttccaccccaccgatgacgagctggtgatgtactatctcctccgcaagtgcggcggcctgccgctcgccgcgccggtcatcgccgaggtggatctctacaagttcgacccatggcagctcccagagaaggcgttcggtggggagaaggagtggtacttcttctcgccgcgcgaccgcaagtacccgaatggctccaggcctaaccgggcggccgggacagggtactggaaggccaccggcgccgacaagccggtagggtcgccgcgccccgtggccatcaagaaggcgctcgtcttctacgccgggaagccgcccaagggcgtcaagaccaactggatcatgcacgagtaccgcctcgcggacgtcgaccgctcggccgccgcacgcaagaagaccaacaacgcgctcagggtaattcactacaccatgacctttctcaggagaacatatttatctccccgaaatactgacacttgcagttagagggaaaaaatatagagagaagtaaaaaaaaaaagattgatgtttgattttaccaatgctgcaacaagaaacagtggatcgaatcgaaatgtgttgttaggcttgcaactatatatgcagattcttagttaagaggaattgaaaaaggctctagagacatgtaaagcgcgggcggcgtggcgtcacggctcacgcacgccgcgatagagacaagcgcggcaaccatggtccatggccggcgcagagccgccgcctgatcttatcgcccgcgcacaaattaccacatgcgcggcgcgcaccggatccgacgtcacgtcgacctcatctccaagcctcttccaaacactccaatgcgtactggatgactgggtgctgtgccggatctacaacaagaagggtgttatcgagcggtacgacacagtggacgacgacgacggcgacggcgccgtggccgaagacgtcaagccggtgccggcgccggcggcgtcgaagaacccgcgtgccagtgcccgcgtaggggcagcagcggcggcgccgatgaaggtggagctccccgagtacggcggcggctactacgactacgacgacctggagacgccgtcggcggggatgctgtgcttcgaccgcccgtcggccccggcgcccgcggaccgcgactcaaacaactccgtgccgtggacgacgcaccacacgcacacggacaactccagcagcggctccgagcgcgtgctctcgccgtcgccggacctgcccgaccgcgaccacgccgagagccagcccgccgccgccgccgccgccgccgggtggtggcctgtcggaggcgactggggcagcgccgccgaggacgggttcatggtcgacgtcgacgtcgacgacgggagctcgctgttcgggccgctgtccccggggctgttcgcgcgcgtcgacgccgccgcgttcggcttcggcgacatgctcgcgtcgtacctgcacaaaccgttctgatgcaacgcgacgcgacgcgagcgcggccaccccgcgcctgcgtgctcctctaggccactgaccactgacatggacattctggtcgtcgtgtagctcggttcaggacgaatcgagagccggccggtctaggtgtagtgctgcgaaaccaacaccaccgtgcaggcacactctccgcgggcggcagatcgacggacaatcctgcgcccgtaggtatataccggtcgtcgatcaggtgttcatcagttcttcattcattcaggtcgacgtgcaactggtaattgtacaagatcttgggcagctgccgtatggagatcgatgagtgccgagttagcatggaggacgactggtggtcatggttggtacagagctagctagccgtccgatcgggtatcggattaatctgattgccagttttgtttttttttggtcgcgtcaagtagctgacatcttaagaatgaagcctactggattcagaggcctgttgatggtaatggtatggtgtatgtatatcgtctagtttagtctagcctagctgtacttagaattggttcaggttggtggcaagcagagcgctgtaatttttgttgagtgtttatgcactataattgcaacgtcatgtattagagtcgctctcagcggtcgctttctcgtgatcgaaaattctgcgatgcaaattatcctaataaagttgttgtaagatgt

SEQ ID NO: 19266 - DNA, 1255 bp, Zea mays
  Clone ID: LIB3137-041-E11_FLI
cgcaatcatacttcctaccctccccacctcttccacggttccaccccgtccctctcctctcgagaagcacccgcaccatacatcttccggcgcccgacgcggacggcgagccgctgctgctgctgccgccggaggaggaagggcaccagggccagcgggtgcaggaggaggaggagcagcagcaggccgccggccgcttggggctgtgccacatgccgctctggggggccgccgcgtccgcggcgccggcagccgagggcgacgccgcccgcgcgccgtcgggatccggcggcggcgtcaaggtgatccggtcgctgctccccacccggcgccgcctccgcctagatccgcccgccaagctctacttcccatatgagcccggcaagcaagtccggagcgcggtcaggatcaagaacatcagcaagtctcatgtggccttcaagttccaaacgactgcaccaaagagttgcttcatgaggcctccgggcggcgtgcttgctccaggggaaagcatcatagcaacagttttcaagtttgtggagcatccggagaacaacgagaagccgatggacaagtgcaaggttaagttcaagattgtcagcctgaaagtcaaagggccggtggagtacgtccctgaactgtttgatgagcagaaggaccaggtcgcggttgagcaaatattgcgggtagtattcttggatgctgagcgcccaagcccacaaatggacaaactcaagcgccagctagctgaagcagaagcagcccttgaggcacgcaagaaacctccagaggacaatggtccccgtattgttggtgaaggccttgtgattgacgaatggaaggaacgaagagagaggtaccttgctcgccagcagattgaaggtgttgattcggtgtagacacgaggcagccctgtaaactatgcagaatgaacataccgttttatgggcacgcactccagctgtcaaatggatttgaagcttgattttgcgaaggttcggatttggagcaatcaagcaacaatgaggcttttgtgtatttggggttcacgctgaacttctgtcctgggtttgggtgtgtgtagataagcagccactgcttggtaatagtacgtccttcagccatgtactcgtgttgttgaatgtgggtctctatgtgaatgtgatgcattctctagctgctgtcctgtcaacattaaaagtgtaattgtaatgtcaaaaggcacactccaaggtgattcagtggtagttctgcc

SEQ ID NO: 19267 - DNA, 1576 bp, Zea mays
  Clone ID: LIB3137-041-E5_FLI
gcgagccggcgccggcgccaccgctgccgccgtccccgcacaacccggttccctctccgtacccgtcgctggatcgggcggggagctacggctacggatccggccctggctccgggtacggccaggagctgtacccgcccaagccggcgggcgggtggtccgacgacggagcgtacgcttacaacggcggcgacgcgccggagccgtacgggtccaggggcaccgcaccgaggccgggctcgggatccgcgctgtttgatgactacgggaggtccattggctcagctgccgataggggtggccgtgggggtagcgcggccagccccaaggtggtgagggccgtgcccaaggcagagacatcagaggacgtcaggggtggggtgcagaagttcagggtcaagctgctgccggagggcgctgggagccccatggatgtgctctgtcaggttggtctggatggaattcggatgcttgatcccaacactggtaggacactaagaatatatccccttgaaactgtaactagatgtgatgtattagattcctctatttttgccttttggtccaagagttcagtagatgttgaaggaaaaagaataaggctgaaatcaaacagctatacatccaacaccattcttgacactgtcacagctgcgactgtgcagttcaaggagatgggtgaaagcagcatttcaagaagtagagcaattgctgatgcatccaagcccgctgagcagcaaaatgagaggaagaaaaatttccttgattggaggaatttaatgaagcctatgaatgaggagaaagatcactgggtcccagatgaagctgtcagcaagtgcacagcatgcgcagcagatttcagtgctttcaaccgcaggcatcactgtcgaaactgtggtgatattttttgcgataagtgcacccagggaagaactcctctgactacagatgcagatgctcaaccagttcgagtttgtgacagatgcatggctgaagtaacgcaaagacttaacaatgcaagggaagtggctaatcgacctattgttcacagccacgaggatcttgccaaaaaacttcaggaagccatggatataaataaaaggtcgtcttcaggaacaaggtcttcagatgtttctggcaagcggatgcgggaggtcgcatgcccaacctgcacggtccatcttcaggtcgaggttccagcttctggttcggagacgatagagtgcggcgtatgtcagaaccctttcctcgtcagcgcccgttgaaccgagttcagcggcttcaggcaccgtgcggcggagtcttctcggattcgcaagcgaagagtcggtcctgttcaatcgagcctggcgctgaattccggctatccctgtctgtctgtaccctaattctgcacggaagtctgtcactgcaagttgttagtaagttatatggatgagttgagtcgtttgcaagttgttagtacagttgtgagtttgctttgagaagcaagcagggtcatgtgtttgtactgccaacaactaactttgctgttgttacatgagaaaaaaaaaacggtgtaaactttgctgttgct

SEQ ID NO: 19268 - DNA, 717 bp, Zea mays
  Clone ID: LIB3137-043-E11_FLI
cagtctcggccgcggccatggcggaggacgcccccaacgccgtcgccgagggcagccagcccgcggcctccgagggatccgccgacgccgccctgccggctgccgcgggcgccaaggccgcggaggcgctgctcccgtcgctcagtatctggccgccgtcgcagcgcacgcgcgacgccgtggtgcgccgcctcgtgcagacgctcgcggcgcccagcgtcctctcccagcgctacggtgccgtcccggagcccgaggccgagcgcgccgccgtggccgtcgaggccgaggccttcgccgccgcctccaagtccgccgccgccgccgccgagtgcccggcctccgtcgaggaggggatagaggtgctccaggcctactccaaggaggtcagccgccgcctcctcgagctcgccaagacccggtccgccgctgctgcggcggcgcccgcgcccgccgaggggagcgcgcaggcgcaggagtccgcggaggcctcgtcggcgactgctccacccaccgaggaggctgccgtaaacgaggagtaaggcgtcggaccgcgctttgatccaccgacaattgctgttattttggcatttcgtcggaatgttatttatcgttccccctgcctatgttttaagtacatctattatctatctattagagatgagatgcttgtgacaagagggactgatgtttgtttcatggatatgatatttctcg

SEQ ID NO: 19269 - DNA, 1377 bp, Zea mays
  Clone ID: LIB3137-044-B7_FLI
gaaaaaaagagtgtcacaaacaactactccctccggtttcctattagttgtcgttttggataaggttcgagtcaaacttataaaattttgactacaaataactatttcgttatttagttttggaacataatatttatatatgcaccaatttgtcataaaaagtacttttataaaagtataaatgtattaagagttaatttgtattttaacaaaaaaacattggtcaaagttatattttggagaccatgtcgttgttctaaacgataactaataggaaaccggagggagtatattttagcggaatgattaataatctaatggtatacatgacgtatgggcttctaagcaagccatgtgcggaaatgcagaatcggcgcatagcctgcatcggcggacctggacatgttgggctggagtcctaagatgacctttttgcgagatatttgactcaaacaatctaaccaactcaactaaactagatacttttggctcttttatttcttttcacgaaacttttgtcaacgtaggtttttagtttggtatacttattaaacaaggaaaatattgaaaacataacatcaggtgaaagtaactaaacttttcatgatccacgcttatagaagatatatacgcaagctgggaccgtagcctgaataatggatctggttgcgctgtgtgttattttttgtgaaataaaaatctagatggttgtgtttatgatagatgttactatacggtcgcacttgccgtcaattcaatttttatttgtgcaggaatcggggatgttgataccaaggagacacctctacccatggaggatgccttaaatgactacaaaaggctagattacatccagcgccacatcgctactcttaaggaatcaatagagtatgaatctacactagaacttatctctagtatatatttcgcctccgttttttattgctctttgttctgttgcaatcatttatatgtggcgcatgcatggttcaatcaagataatgcttgaattaatggatctgttcatgcagcttgggatcaaatgtgcaaggctacttcgcttggtctctgctggacaactttgaatggttcgccggcttcaccgaacgttatggcattgtctacgtcgaccgcaacaataactgcacgcgctacatgaaggagtctgccaagtggttgaaacagttcaacgccgcgaagaagcccagcaagaagattcttacgccagcttagaaatcgggggcctcatgatgtgggtgcagcccataaaaaactggtgtgtagtttggaaccgaaaattttctctgtttttgcgccacgagaggttctggaggcatactctccagcaccgtggctaataacgcattgttccaattc

SEQ ID NO: 19270 - DNA, 1561 bp, Zea mays
  Clone ID: LIB3137-045-B6_FLI
cgcgcacagaaacacaagcgagtaccagagcagctaggagtggtcagtaatggcgcagcttagagcagccgccgacgagcagcaggaggcggcgatgcacggcgtcgcctccggcgacgggaacgagagcaacaagaaggcgcgcgcggggctctgtggcctgctccgcgagcgcaaggtggtggacctggcgcgggccaagcggcggctggtggaggttccctacaccgcgacgctggcgcacacggccaacgcgctcctggcagcgcgcgtctctgccgtggccgtggctgcgccaccgggccactggatcggcgccggcggctccatgatcctcgagtccgacccggccaccggcgccgtccgcaagcactacatcggcatggtgaacatgctcgacatccttgcccacatcgccgaggccagcgacgacgacgaggcggccgacctcgaccgccggatggccgtgccggtgtcctccgtcatcggacactccctcgagggcctcactctgtggacgctccacccgagcaccagcgtggtggactgcatggagacgttcagcaagggtgtgcaccgcgcgctggtgcccctggagagctcggcggacaacgtggtggcgctggagctggtggagtcggcgccggggtaccggatgctcacccagatggacgtggtgaggttcctcagggcgcacggcgcggagctcaggggcgtgctgttgcgcaccgtgcgcgagctcggcgccgtgaacgacaccgtgttcgccgtctctggcgttaccaaggtgatcgacgtcatcaaggcgatgcgggcggcgtcgctgaccgccgtgcccgtcgtggacgccgggagcgggcaaagggcggtcgagacgttctcggcgacggacctgcgggactgcccggtggcgcggctgcaggcttggctggggatcagcgtgatggagttcaagaggaaggtggctgagtaccgcgccagcaccaggcttgtggtccccggcgccgacgccacggacactggcacccctgtcgccgggtacgccgacacccccgcggctgccgccgccactgacgaagagcagagcgagcagcaggagtcggcgctggtgacgtgctcccaggagagcaccctcggcgaggcgatcgaggcggcgacatcgaggcacgtgcaccggctgtgggtggtcgacgaggaagggctcttgcgtggggtcgtgtcgctcaccgacatcctccgggcagtgcgggaggccgcgctcggcgaggacctggagctgcacagcatcgtgccgtgagcccgtgggccgtgagtcgtgacgtccaagaacaagctcgtagctgtttctgcccatagtgtccgtccacctgtcgtgctcctgcagaggagggggaaaagggcgatcgagacgtgttggcgacggccgaccggcgaccgccgccgagctcgttttgccttgttgctttgtttgttatatggccctggctccgatccgggcttcgtatttcgttgacaggccttcatcgtgacgccttattttgcatcgttttattgatcaacc

SEQ ID NO: 19271 - DNA, 883 bp, Zea mays
  Clone ID: LIB3137-045-F10_FLI
gtggacgagggctttagcgacggtgctgttcgtggtcgtggcaggcgccgcgctgctcggcgtcggcggcgccagcgcgcagcagggcgtgtggagcatcatcacccggcccatgttccagagcatgctgagccaccgcggcgacagcgggtgccagggcgccttctacacctacgacgccttcatcgaggccgccagcaagttccccggcttcggcaccaccggcgacgagcagacgcgcaggcgggagctcgccgccttcttcggccagacgtcccacgaaaccaccggtggatgggcgactgctccgggtggaccgtttgcctggggatactgccgggtgaaggaacagaacccgacggacccaccctactatggacgaggacccatacagctaactcatgagtacaactacaggctcgccgggcaagcgctgaacctgaacctggtgggcaacccggacctggtggcgagcgaccccgtggtagccttcaagacggccatctggttctggatgacgccgcagtcgcccaagccgtcgtgccacgccgtgatgaccggcgcctggacgccgtccgccaccgaccgcgccgccgggaggctccccggatatggcctcacctcgaacatcatcaacggcgggctagagtgcggcaagggccagtccaccgacggcgccaaggaccgggtcggctactacaagaggtactgcgatatgctccgggtggggtacggggacaacgtgccctgcaaggaccagaagccttacggaggatgaggacgtacgtggacaacaataattatatggttgctgcaagccttcacgtgtttttgttgcctctctacctactaagaataaatcaagctagcagcaaacaggggc

SEQ ID NO: 19272 - DNA, 1581 bp, Zea mays
  Clone ID: LIB3137-049-H12_FLI
caacatcttccccaacctcgtacgagccggctgcgagatccaacgacctccgcacggcagttccattagagatgcctctagggaagagatccacacgactatcctagaaatccgaagcggcctcctcgctcggcaaattctccgccgacgacagggagaaggtgctcactgccgttggagtacacacgacgatatctattgcacaacctacttcccagatacaggaggagggtgataaccacactgggaatcaagaaatcataccaaggtcaaatagaatgggcaggcaacttgaatcgttaagcagaggactgggaatcaagattccaacccaaatcactgaagggaacaaaagccagagccacctattcaagctactaagtttgcattagagggatggtcgccaaggccagggatttactgtcgaggtgtacaagtccatggcagtggctgtttgtgcagattagaagctgaggagggagtctcgtagcagaacttcaatgttgagatatggaaaagctacctatgtatcaagatatgtgaagactgcccgcctcaaacaagaggagtattttggtggagcgaagtttatgaagggcatggaggtactgctggtaacaagttctgaatgtcattaggtctaccattgatagctactatgaattgtgctggtaacactggagccaagaacctctacatcatttctgtgaagggaatcaagggcgccttaacaggcgtccttctgcctgtgttggtgaccatggagaatggaaagcctaaccttaggaagaaggtgatgccagctgtcattgtgaggtagcgcaagccatggtgctgaaaggatgacgtctacatgtactttgaagaagcaagacaaatataaggatgctgaacctagtgcaatagatctttttaaggagatgcattgcagcaaaaagaaaggttttagcaaaaatgttcagaaagctattgttgatatggaagaaatggtggcaacatcagttcaagatggacaacaaccaaaatatcctacagaagttgtttatagtgtgcaactgggctccagtgtgttcttatgcaatcttggtctttagtccgtctccaagaaaatctcaacatcaatagtttctataaaggttcaacaacttcaggatcgactggaggccaagaagcaagaaaaagatagactttgggaagaagtgtaaaccttaaatgctcaggcagtcatctcaggagaccattgatagtatgaagaggtcgaccgaagaaaataacaatctccttagtcaactattaagcttcaatagaggccaagtgcctccatctcaagtctacttaaccattataggatctgcagccttatggttgctatagtagctagttacaatagctctggatttgaagagtagctctggatttgaagttataggattattttcaattaagcttaatgtttaattccttgagttgaagttataggattttctttggatcttatgtaaaaggatttgtagatatatgttttgaagctatatgattcttggttggatgaaatatttgtgttaaacaaattcataagat

SEQ ID NO: 19273 - DNA, 1072 bp, Zea mays
  Clone ID: LIB3137-050-C2_FLI
attttgcgaagaacgcccttgtgaaaccagttactgtcaatgtgggaagagctggagcagcaaatctagacgtcattcaagaagtcgagtatgtaaaggaagatgctagaattatatacctccttgaatgcctccaaaagactccacctcctgttctcattttttgtgaaaacaaggctgatgtcgactacatccatgagtaccttcttctaaagggagtggaggctgttgctatccatggaggaaaagatcaagaggagagacagaacgcaattgactccttcaagactggtaggaaggatgttctggtggctactgatgttgcatcgaagggtcttgattttcctgacattcagcacgtcattaactatgacatgcccgccgaaatagagaactatgtccaccgaatcggtcgaactggtcgatgtgggaagactggcatagcaactaccttcatcaacaagaaccaaactgagaccacgcttctcgatctcaagcacctgctgaaggaggcaaagcagaggattccaccggtgttggcggagctcaacgatccattggatgatgaggaaataattgccaaggagagtggtgtcaaaggttgtgcgtattgtggtgggcttggccatcgtgtcagtgactgtccgaagttggagcaccaaaagtccatggcaattgctggctcgagaaaagactactttggcggcgggggttaccgaggagaaatatgattgctctaggttgatgcttgcgtgtggttatcaggagctaagatgctgcaatttcaggtcatacatgtcacatgtatcagctagccaaggctcctcccccatcgttgaagggagacggtttgcgttaacgaacttgtgatatgctgctgggtatgacactgcttgctactgacctaccatgtatcttgtttgaaggacgcaagttgattatcctgccctgttgtaaaatgtaaccagaacaattgctggcgtatttcttaagcaccagttttagcccctttctgtaagcagtcgacatttcagttcaactcatgtatgtatattttgatcttgtatacagt

SEQ ID NO: 19274 - DNA, 918 bp, Zea mays
  Clone ID: LIB3137-050-F9_FLI
ggctcaggtgaggagaacaaagatcagtgagcgaatccgaaagctgcaagaactcgttccgaacatggacaagcaaaccaacacatctgacatgctagatttggctgtcgactacatcaaggaactccagaagcaggttaaggtaagcaatccagtaagttctctgcagatgagcacttgtcaggccctgtttggaacctaggtctaatagttagccggctaacaaattgttagctgggctgagccaactaatgagctctagaggttccaaacatggccttatttagaaagacaaccagccctaagcagtaaggtctaaaaccaaactatacttacttgttgcccttcaactgaaaggagaaagtcacatacagcgttctgttaaacttatctgaaatagacactctaaaacagactttgagagtccctttctgttctgtggtctgttcattgaaggtgttaaaggagacccaagctaattgcacctgcccagcaagcaagagccagcagcactcttgctgaagccctgatgcacgctatacatgacctgcagaactcgaaagcatcttcacttgggatagaaaaagatgtaagacagctctcattttttttgtgggtttgaactgtagcatttgaggcttatctaccagacagtgtgtagctttatatgagcacaggggaatggaacaatggcatcatcctcaagcattcaagtgatagggagaagggtaaaattggggagatatataggagaaacaactgtatagtttcgttgtagctttgctatatgtatactacactttcggtataaagtggttaatttacctctattgctagttgtagcagctgtaaatgtgccgcagataagttgtagaaaaacttggatgcgttcaatgcgagcgatagtgtttcgactca

SEQ ID NO: 19275 - DNA, 709 bp, Zea mays
  Clone ID: LIB3137-050-G12_FLI
gagtatatgatttagaatgcgactgtacgaacgcaacaaaaacagaacaatactcaacatatacaaacggaatacatacacgagtaagaaaacatgtggatacacgatcacaccaccacgtaaaacccaaaacgtaccacgtcgaacacaaccagcacgtttattccagctgctactccacagcacaacccacatcatccacgtgtacacaaacctgacacagtaatcagagagcagccgtgctctcctcttgcgtatcacttcagatggcattcgtgttcagcttcgcgccgccgatctccttcccgcgggtcacgggcgcctccgccgcatacccttccttcacgtcttcccctgtggttgtggttggctgtacggtctcggagacccggttcccgccggtgagcgacgcgacggcctggccgggcgccggcacgcgctgcgctaccgtgcccccagcgtcgtccttgcgccgctgcactgcgccggagatcgcctcgctcagcgcgcggtcctcgtcgcccggccggagcttctcggcgatgtaccccgtgacggtcacccccttgtcctgctcgccggcgccgggggtggccgtggcggcggcacccgtgtcccgctgcgcgccgaccccgggcgtcgccgtgccggccgactgcgtggcctgctggaccttgcccgccacggctgtgccgacgccggcgacctt

SEQ ID NO: 19276 - DNA, 1545 bp, Zea mays
  Clone ID: LIB3137-056-B9_FLI
tcacttcgccacgaacaaaagcgcatcgatctcgctgtcgtcactcctcgtcacccagccacgaacagaggcaccacccagcatggccctgcaggcggcgctcctcccatccaccctctcatccgtccccaagaagtgcagcctcgccgtcgcggcgaaggacacggcattccttagcgtatcccagaaggtcagtgatcagctgcatctgcatgctgcactcgcagtcacaatgcgcttgaattgaacgtgtcactcactctgtcgtgagcatgccatgcgtgcagaaggtgcaggcggcgtcgctgtcggtgagaacgcgggtggcgacgacggcgcctgtggccacgccggggtccagcacggcggccaaggatgggaagaagaccgtgcggcagggcgtggtggtgatcacgggcgcgtcgtcggggttgggcctggcggcggccaaggcgctggcggagaccggcaagtggcacgtggtgatggcctgccgcgacttcctcaaggcggccaaggcggccaagggcgccggcatggcggacggcagctacaccatcatgcacctggacctggcctccctcgacagcgtgcggcagttcgtggacagcttccggcgcgccggcatgccgctcgactcgctcgtctgcaacgccgccatctaccggcccacggcaaggacgccgacgttcacggcggacggatacgagatgagcgtcggcgtcaaccacctgggccacttcctcctggcgcgcctgctcctggacgacatgcagaagtccgactacccgtcccgccgcctcatcatcctcggctccatcaccggcaacaccaacacgctggccgggaacatcccgcccaaggccgggctgggcgacctccgcggcctcgcggcggggctgcgcggccagaacggctctgccatgatcgacggctccgagagcttcgacggcgccaaggcgtacaaggacagcaagatctgcaacatgctaacaatgcaggagctgcaccggcggtaccacgaggagacgggcatcacgttcgcgtcgctctacccggggtgcatcgccaccacggggctgttccgcgagcacatcccgctgttccggctgctcttcccgccgttccagaagttcgtcaccaagggcttcgtgtcggaggcggagtccggcaagaggctggcgcaggtggtcagcgaccccagcctcaccaagtcgggggtgtactggagctggaacaaggactcggcgtcgttcgagaaccagctgtcgcaggaggccagcgatccggagaaggccaagaagctctgggagatcagcgagaagctcgtggggcttgcctgagctcgccggcacggcgacagcgacatgatgaatctgtcgagcagaggagctttcgcttcgttgtattatgtgtaccattagcatccattttgtttgtttctagaagttggtaatgaccgtcggagaagagcctgtaattgttcgatcatgtattgcttacaatttttttttaaaccgatgaaataaaacaatcaggcttaac

SEQ ID NO: 19277 - DNA, 662 bp, Zea mays
  Clone ID: LIB3137-057-A4_FLI
acccaatcagcttcttttgacttttcactgggatttcgcgtgtagctcggttcaggtcgaatcgagagccggccggtctaggtgtagtgctgcgaaaccaacaccaccgtgcaggcacactctctgcgggcggcaagatcgacggacaatcctgcgcggctgcgcccgtaggtatataccggtcgtcgatcaggttcgtcagttcttcattcattcaggtcgacgtgcaactggtaattgtacaagatcttgggcagctgccgtatggagatcgatgagtgccgagttagcatggaggacgactggtggtcatggttggtacagagctagctagccgtccgatcgggtatcggattaatctgattgccagttttgttttttttttggtcgcgtcaagtagctgacatcttaagaatgaagcctactggattcagaggcctgttgatggtaatggtatggtgtatgtatatcgtctagtttagtctagcctagctgtacttagaattggttcaggttggtggcaagcagagcgctgtaatttttgttgagtgtttatgcactataattgcaacgtcatgtattagagtcgctctcagcggtcgctttctcgtgatcgaaaattttgcgatgcaaattatcctaataaagtttttgtaagatgt

SEQ ID NO: 19278 - DNA, 1127 bp, Zea mays
  Clone ID: LIB3137-057-D9_FLI
cttgtggttgggagatcagttgtaccagaagaaagagcaaaggggaaaggttcgcttcttgtggcatcttgctttccttcgagtgccatggccgatccggcggaggagaacgttgtctcgccgccaccgacccctgcggccccagccgtgggcgcctcagacccgcccctgcagcctgctgctgacagcgcctcaacggagaaggtgtctgctccggcgccggaggtaaggtcccggggattcaggcttcttggagaggacacttccgtgcacaaatcccttgggggcggtaaaactgctgacgttctcttatggaaagacaagaaaacttctgctgttgtaataggcggcgcaactgtcatctgggttctgttcgaagtgcttgattaccacctcctgaccctgatatcccatgtactgattggtgtgcttgccaccttattcctgtggtccaaagcaaccaccttcatcaagaagagtccaccagatattccagtagtgcaggtatctgaggaccttgttgtgaatgtttcacgggcattacggaatgacatcaacagagcgcttcacttgttccgtgagatcgcaatggggcatgatctgaagaagtttttgggtgtgatcgtggggctgtgggttctctccggagttggaagcagctgtgacttcctcacgttgacatacattgccgtcctgatgctccacacggtgccaatcttgtacgacaagtaccaggacaaggtggaccatttcgctggaagggcacacaccgaggccctcaagcagtacaaggtgctggatgccaaggtcctgagcaaaatccccaggggtgcggtcaaatccaagaagcagaactagttaggataagccgcagattgtgaatgcccgtatcctgagtatcgggcttgtggttttgcatggcatatgtcaatctgtctgttggcttcagcttggttcttctgcgactactttgttgatgttattctagtcctatgtatgtcactgtgtacatgacagagatgttcgaatgctacgtctagactactgctgtagcttgtaaattccagtggtgcgttgctaagcacgatgctccccttgttttatgtggtgttggactaatgattact

SEQ ID NO: 19279 - DNA, 1944 bp, Zea mays
  Clone ID: LIB3137-057-E1_FLI
gaaaaactcagccgccggccgctgcccctctcggctgcacgacgtccgtgagggcgtgccccctggccccgtcccttgtcgcctgcccgccggtgcccgcacaggctgccagtgccatactgccatccctccgtccggccgtctgcccaggctgcctgcccggcgccctggcctcccggtcgctggctctctgcccaggcgccaggccgcaggtcccaccgccccagaccacccgcgaaccagtccgctgcaggctgcaggccaccgtccctccagttcgccggtcagattattaaccattcagataccccagctccgcctagacgcgaatcctccgccactatggtggcagcggtgtccctgccgagccaagcacaggccgtgcttcggagccggctctgcgacccggtcttcatccactccgccctcagtagctccctggacactaattacagcaagctgaagtacctcgtcgccagctcggtctccgaggcctgcaacaattctgtcctcctcttgggtccccgcgggtgtggaaaagcagcggtggtcgacatggttcttgatgatctgaaggaggagcacccagatgcgatttccgtgatcagactaaatgggatgctacataatgacgacaactgtgctatgaaggaaattgccagacaactttgtttggagcatcagttatcattttcaaaaatggcttcttcagatgacaacactgagttcatgattgacatgttacgggagtgcggactagctcacaagacaatactatttattctagaagaattcgacctctttgctcagggtaaacagaggttgctttacagcttacttgatgcaatgcaatctctaacatcccaagctgttgtcattggtgtgagttgccgcttggatgcagatcaactcctagagaaaagggttagatcccgattctctcataggaaacttttatttatttcgccttcgttggatgatatacaacggttggtggagcatttgcttatactggccaaagactcaggtttaccatcaaagtatatcgccgattataactcaagacttactagcatttttagtgataagaaattcaaaggttgtctcaactccctcatggatgctgatgcaacaacgagcaacattcaaagatttcttttcagagctgtgtcatatatggacatggaatctggattcctgtcggtagaaagcttcctaaaggccctttcttccatgcagaggcaacctaagatggacagcttacaagatctctcgattttggaattatacattcttgtgtgcatgcacagattagaaagtaaggagcaaacctcatacaacttcaccagcataatgaaagaatacagatccatacaagacgcctataagacttctgataaatatgcaagcaccgtttgttttagggcctttgagcaccttttggatcgtgagctgattagttttggtgacaatagatggagaaaccaggcgcttgaataccgacctgttaagctcctcatatcctcccgcgagctcgctgagtccctcaagctgaacaccacctgccccgctgtactgcagaagctgtttgatcgtgaaagatacatgtagaatctcctttcagatggccgcgcttcacctgacttgagtcgccgctttcatgtttcaccgggttgtcaagttcatgtttcactgtaaaccggcgattgtattagtatcttgtccactgttcgctggaaaaggtgtgggccgtgtggccaactgcccagcgtgagtcgtgacctgcctgtcaatcgcttgagtcttgaccataggccacacggaattagatatctgtggtgcactgattttgggctaacgacccgatttctatctcgcacaagtttagcagcgtggtgacagtattttggtagctttgaaatgaatgcgctattcggagtttac

SEQ ID NO: 19280 - DNA, 1227 bp, Zea mays
  Clone ID: LIB3137-058-E12_FLI
cccggagattgaggagctcctgtacagccaaaccgagaacacggagcacaagttcgttctgaacgacaggaacaagccaatcatcttctccatggctcgtctcgaccgtgtgaagaacttgactgggctggtggagctgtacggccggaacaagcggctgcaggagctggtgaacctcgtggtcgtctgcggcgaccatggcaacccttccaaggacaaggaggagcaggccgagttcaagaagatgtttgacctcatcgagcagtacaacctgaacgggcacatccgctggatctccgcccagatgaaccgcgtccgcaacggcgagctgtaccgctacatctgcgacaccaagggcgccttcgtgcagcctgctttctacgaggctttcgggctgacggtggttgaggccatgacctgcggcctgcccacgtttgccacagcctacggcggtccggccgagatcatcgtgcacggcgtgtctggctaccacatcgacccttaccagggcgacaaggcgtcggccctgctcgtggacttcttcgacaagtgccaggcggacccgagccactggagcaagatctcccagggcgggctccagcgtatcgaggagaagtacacctggaagctctactcggagaggctgatgaccctcaccggcgtgtacgggttctggaagtacgtgtccaacctggagaggcgcgagacccggcggtacctggagatgctgtacgcgctcaagtaccgcaccatggcgagcaccgtgccgctggccgtggagggagagccctccagcaagtgatgcgcgacggcggccacagacctgatcgatcgatgagcgagagggagcactcggagtgtcgtgtcttttcccttgccatttctttctttttttcccttcccggaggcgaaaaaaagagtctgcttttgctaggcggcgggcgttcgttgctgctctttgcttcaagagttaaatttacctaccttgtcaaggtcttgttccatcattgatccgggtgtcgcttttttagtagtctgatggactgttagtagtttgcgttgcgtcggttgagagggaacgttggtggtggtggtgtgtgtgcagtcaggcgtggtgctccctttgtttcctggatgggatgttgctccttgaataataatcgtagtggccttggagcccttttcctgaaataagagcagcatcctagtgcttacctttgcagctgt

SEQ ID NO: 19281 - DNA, 1720 bp, Zea mays
  Clone ID: LIB3137-058-E9_FLI
cgaaagctcgaggactgtactcgctcgcaaaccctagccgccggaccggccggtgaccgtgcggcgctgaggcgcgcgctatataaacagagccatccattcctcccttaccgttcagtcccacctcgaccgcctcctctcccctcccccggctctgtctgttgacttaccccgtcgagctttctagtcagctgctcccgttgccatggggaaggagaaggttcacatcaacattgtggtcattggccatgtcgactccggcaagtccacaaccaccggccacctcatctacaagcttggaggcattgacaagcgtgtcatcgagaggtttgagaaggaggctgccgagatgaacaagaggtccttcaagtacgcctgggtccttgacaagctcaaggccgagcgcgagaggggcatcaccattgacattgccctgtggaagtttgagacaaccaagtactactgcaccgtgattggtgcccctgggcaccgtgacttcatcaagaacatgatcaccggcacctcccaggctgattgtgcggtgctcatcattgactccaccactggtggctttgaggctggtatctccaaggacggccagacccgtgagcatgcgctccttgctttcactcttggtgtgaggcagatgatctgctgctgcaacaagatggatgccactacccccaagtactccaaggctcggtacgacgagatcgtcaaggaagtgggttcctacctgaagaaggtggggtacaacccggacaagatccccttcgtgcccatctctgggttcgagggtgacaacatgatcgagaggtcgacgaacctggactggtacaagggccccaccctccttgaggcgctggaccagatcaacgagcccaagcggccctcggacaagcccctgcggcttcctctgcaggacgtgtacaagatcggcggcatcggcaccgtcccggtgggccgcgtggaaactgggctcctgaagcccggcatggtggtcacctttgcgcccacgggcctgacgacggaggtcaagtcggtggagatgcaccacgagacgatgcaggaggcgctgcccggcgacaacgtcggcttcaacgtcaagaacgtggcggtcaaggacctgaagcgcggttacgtggcctccaactccaaggacgaccccgccaaggaggctgccagcttcaccgcgcaggtgatcatcatgaaccacccggggcagatcggcaacggctacgccccggtgctggactgccacacgtcccacatcgccgtgaagttctcggagctgctcaccaagattgaccggcggtcgggcaaggagctggagagcgcccccaagtttctcaagaacggtgacgccggcttcgtcaagatgatccccacgaagcccatggtggtggagactttctccgagtatcctccactggggcgcttcgcggttcgcgacatgaggcagacggttgcagtcggcgtgataaagagcgtggagaagaaggacccaacgggagccaaggtgaccaaggcggctgccaagaagaaatgatgatgattctgcatgtaatccatggttcctggtttctttgctggtcggagtattttgttgggtggtgctagtagtagttaacaaaagaataattttcatgggttcattgtgtaggtttggactgttgtgttcgtgattgcgtaccacactatatatattgggttttgcttc

SEQ ID NO: 19282 - DNA, 878 bp, Zea mays
  Clone ID: LIB3137-058-H6_FLI
ccaaaccttctggcttctgcactgctctccaccacccctcaacgaagcctctggtgcctcggccaccgcagcagcctggccctgacccggcccccgggcgtggtgtcaggtctcaggtgtggtggcgctttctcctctccggcacggtggccgcgtcatcccagctctcccgcgcggcggcggccgtttcctctcctgcgctcctcctgccgcacacagccagaaaattgcagctgaagtttgtttgaggataggcgacagctttgcgagtccttcgtgttgaaggagaaattgtagctgaagtgaaaaaacagcagggaacgatggcactatcacgaagtatgagagcatgtttgcacagtggaagacttgcacttcttgccatattggtctctggtggaattgtattgcaaatcttggcttgtgctctctataacaactggtggccaatgctaacagttctcatgtatcttatcctaccaatgcccctcatatttttcctgggttctgatacttcctccatgatgtccaatgggggagacggctgggtgaacttcacgaaattcttgacgggcgcatcaatagtagggagcatcgccattccgtcgatcctgaagcatgcgggcgtcattggatggggagccctgacgatggagctgtcatcctttgtggtctttggcgtggcaatcctgtggttcctccagatgaacggtgaagacgagtacagcggagtgttctaatccaaacctgctgctgctggttctcttgccagcgtggcactctgtgcatggtagttgtgaactgggctgtactgctacaacaggggaagcattgccctgggacctgatttactgacaccagtacatgtttggtctgcg

SEQ ID NO: 19283 - DNA, 1819 bp, Zea mays
  Clone ID: LIB3137-059-F9_FLI
ttttctcgattcctcagcaagagtttgtcagcgccaaattgacagataaattggagcaacaaatgcatgatccattagtttcaaggtcttgctgcctgcctttatggtgcattgaactgatgtctgcatgtcctttcttattttcatttgaggcgagatggaagtatttccagttgacggcatttggttctttgaaaaatcatcatggccacatgatggatgcaagtgttaacagtgttgcggaaagggggtcttcccactcacggaaaaagttcaaagttgatcgtgatgatatactggtttcagcagcaaaaatgatgaagtcccatgctaagagcaatgctctacttgaagtagaatataaagaggaagtgggcactggtttaggtcctacaatggaattctatacattgataagtcatgaatttcagaagtctggtctaggcatgtggagaggggaacttccttgtaaatctggtacccatgatactcatgtttctagatttgtggttgcctctaatggacttttccctagaccttggtctgcttctgaagatcctgcttcctttcaagaagtgagcgagcgattccacttacttggtctggttgttgcaaaagcaattaaagacaacagaattcttgacattccattttctaaagcattctacaaacttatccttggacaggagcttaatatatatgatatccagtcattagattctgaactggccatatgccttgtggagtttcaagcgcttgcttgtcagagaaaatatgcagagtccaatttgacaagggactgccagatatcagatttgacttatcggggttgtagaattgaggatcttgctattgagttcgctctcccaggatatccagaatatgtgctctcgccaggaagtcgctctgactgtttgaatgctgagaatttggaagaatatgttcgtcatgttgttgacgcaacggttaaaagtggaattgcaagacagatggaagcttttaagtcaggatttaatgaggtatttccgctaaaaaaactccaggttttttcagaggacgaactagagagattactttgtggtgaacaagatacatgggatgtatgcatctatcttctgttggcatctgttcatgttttgttattattttattctggttgctgatttcttggtctgaacagtttgcgaaacttgtggatcacatcaaatttgatcatggctacacttccagcagccctcctgtcattaatttgctggaaatcatacaagagtttggatccattcaacgtagagctttcttgcaatttataacgggttcacctcggcttccaccaggcggcttggctgcactaaatccaaagttcacagttgttcgaaagaataacagcaatgatgttgatcatgacctgccgagcgtgatgacttgtgccaactatcttaagttacctccatactcttcaaaggaaaagatgagagagaaactcctctatgcaattacagagggccagggatccttccacctatcttaaccaataagcgataatgatacttcgcatgcaacaggagtttctctttgtaagtatctcgtaggaaaggaaagcacggtgtaaatgtgggtggttcactgcttattttagctgacagcacgatctggtggagctgattttaggagagaaaaaaacggctaccgctctttgtacatactaggtttcaggtgtgatcaagcagatcactagtgtgcctagttcgctactcttttgttcaaactttcggtgtacatatgcgtgcctgcctgatagaaagtgccagtgctatctttc

SEQ ID NO: 19284 - DNA, 1546 bp, Zea mays
  Clone ID: LIB3137-060-B1_FLI
gtcacttcgccacgaacaaaagcgcatcgatctcgctgtcgtcactcctcgtcacccagccacgaacagaggcaccacccagcatggccctgcaggcggcgctcctcccatccaccctctcatccgtccccaagaagtgcagcctcgccgtcgcggcgaaggacacggcattccttagcgtatcccagaaggtcagtgatcagctgcatctgcatgctgcactcgcagtcacaatgcgcttgaattgaacgtgtcactcactctgtcgtgagcatgccatgcgtgcagaaggtgcaggcggcgtcgctgtcggtgagaacgcgggtggcgacgacggcgcctgtggccacgccggggtccagcacggcggccaaggatgggaagaagaccgtgcggcagggcgtggtggtgatcacgggcgcgtcgtcggggttgggcctggcggcggccaaggcgctggcggagaccggcaagtggcacgtggtgatggcctgccgcgacttcctcaaggcggccaaggcggccaagggcgccggcatggcggacggcagctacaccatcatgcacctggacctggcctccctcgacagcgtgcggcagttcgtggacagcttccggcgcgccggcatgccgctcgactcgctcgtctgcaacgccgccatctaccggcccacggcaaggacgccgacgttcacggcggacggatacgagatgagcgtcggcgtcaaccacctgggccacttcctcctggcgcgcctgctcctggacgacatgcagaagtccgactacccgtcccgccgcctcatcatcctcggctccatcaccggcaacaccaacacgctggccgggaacatcccgcccaaggccgggctgggcgacctccgcggcctcgcggcggggctgcgcggccagaacggctctgccatgatcgacggctccgagagcttcgacggcgccaaggcgtacaaggacagcaagatctgcaacatgctaacaatgcaggagctgcaccggcggtaccacgaggagacgggcatcacgttcgcgtcgctctacccggggtgcatcgccaccacggggctgttccgcgagcacatcccgctgttccggctgctcttcccgccgttccagaagttcgtcaccaagggcttcgtgtcggaggcggagtccggcaagaggctggcgcaggtggtcagcgaccccagcctcaccaagtcgggggtgtactggagctggaacaaggactcggcgtcgttcgagaaccagctgtcgcaggaggccagcgatccggagaaggccaagaagctctgggagatcagcgagaagctcgtggggcttgcctgagctcgccggcacggcgacagcgacatgatgaatctgtcgagcagaggagctttcgcttcgttgtattatgtgtaccattagcatccattttgtttgtttctagaagttggtaatgaccgtcggagaagagcctgtaattgttcgatcatgtattgcttacaatttttttttaaaccgatgaaataaaacaatcaggcttaac

SEQ ID NO: 19285 - DNA, 1215 bp, Zea mays
  Clone ID: LIB3137-060-C2_FLI
cttctgttgagggcatagatgaaaagttggggcagcaagagccagaaacaccggaaccaagagcatcagccaaattaatctcagacggttctcctaatcaaagcgatgaaaagcaagagaggcccagtccagtatctgttcttgagtcatccttcgaagatattggcagtccagactgcataaacaagaaagagtgtgagctgcatggtctccaaaggaccctgtattttccagataatgaaccagacgttaatgtcctttgggaggacaagaatgtcaggttggactacataaagctggtgctagaactctcagaactgtgcgcagaacaaaatctagaggtatggtacctagaagacgagttgatcagcccctgcttgtttgaagaactacagagccagggtgatcagacggatgatcgaatgcttctgtttgactgtatctgtgaagctctaacagagatccaagagagatattttagactctcctcttggctaacttttctaaaacacgacatacggacacctccgacaggagagaacctaatcacagaagttgataggtacgttaacgggtatattatccagtacagtcttccaagtactctagagcagacaattaaaagggatctggaagttcagacgtggatgaacattagatcgaaaaccgaagggattattatggagatgtgggagtttgtattggatgagttgatagatgagactgtctccgatttgtggatttgaagttctgattaggcttcgtccatggtgcctctgtggcgagcatagtgagtaggatacaggagttctttcgtgctgaaaaataaccagttctatgcggcagaatagcatgggctaccgctagccaagtgtgtaactgcagtggagatcgttctcgtgtagtcgtgtggaggagaacagaagtctaggttcagcagatctccagagctgtgaagtttgcgtggatgaagttgggcacggtttgtctcacagccatgcctctgcacggcgaagtgtacagcagtctgaagcgcattgcgattttcctctttgcccgttgagatttgggagcttgtgtgtgcatgtgtgatgcgtgcacttttcagcgtgatcagatcgcgcttgtttttttttataggtttgttttgtgtgtaaatgtgaaaaaaagagagaaagcaaacatacatgattaatcaaatgacatgttttatgt

SEQ ID NO: 19286 - DNA, 1059 bp, Zea mays
  Clone ID: LIB3137-060-D9_FLI
cataagccgcgcccgcctccgcacgccccgctccgatggcagccgcggctgtgaccctgccctcctcgggcacgcccttcgccgtcgccacaaccgcctcttcctcatccgcccgccgctgcctgctcctgccctccgcggctccccgccgagctctccgcgtcgtggcctccgccgctaccgaggcgccgcccaagcccacgcagccgccgacatcgccctccggcatcgtgctcgtcgacccatccgaagcccagaaggtgcaccggctcaaggccgtctacgaccagaaggtcgtcccgctcatcaccgaggagttcggctacaccaatgtccaccaggttcccaagctcgagaagattgtggtgaactgcggtctgggcgcggaggcagggaactcgaaggggctggatgccgccatgaaggacctggccatgatcaccgggcagtggcccgtcaagaccaaggccaggaagtccgtggccagcttcaagatccgtgagggaaacaccatcggtatcgcagtcaccctccgcggcaggataatgtacaacttcctggataggctcatcaaccttgggctccctaggaccatggacttcctgggtgtcaaccccaacagcttcgacgggcacggcaactacagccttggcctccgtgaccagggcgtgttcccggagatcccgtacgaggtgggcgggaagaagaacggcatggacgtgtccatcgtcaccagcgccaagacggacaacgaggcgttcaggctgctggtcctcctcggcatgccattctcggagaacatcaagaccgacgtggtgatccggaagaagaggttgaagcgccaccacttcctgagcaagggcaaggggaagggaggacgacggtgaggagaggaaccagccagccagccagcccatggttgcacacgctctgttcagcttgttttaattccgatctttttgcagaatttggcttacaaattcgatgctgttgttgtctgtcaattatgtaacttgtgcacctatgaaaaaggtttgcaatgatcatgtccgttttgct

SEQ ID NO: 19287 - DNA, 1469 bp, Zea mays
  Clone ID: LIB3137-061-A1_FLI
cgtgtcctccttcggcgccgaccagttcgacgagaacgacgagcgggagaagaagagcaagagctccttcttcaactggttctacttctccatcaacatcggcgcgctggtggcgtccacggtgctggtgtacgtgcagacgcacgtgggctggggctggggcttcggcatccccgccgtggtcatggccatcgccgtcggcagcttcttcgtgggcacgccgctgtacaggcaccagaagcccgggggcagcccgctgacgcgcatcgcgcaggtgctcgtcgcgtgcgcgcgcaagtggaacgtggccgtgcccgccgacaagtcgcggctgcacgagacggtggacggggagtccggcatcgaggggagccgcaagctggagcactcggagcagctggcgtgcctcgacagggcggccgtggtgacggccgaggacggcgcggaggcgagcccgtggcgcctgtgctcggtgacgcaggtggaggagctcaagagcgtgatccggctgctgcccatctgggccagcgggatcgtgttcgcggcggtgtactcgcagatgagcaccatgttcgtgctgcagggcaacacgctggaccagagcatggggccccggttcaagatcccctcggcgacgctgtccatggtggacaccatcagcgtcatcgtctgggtccccgtgtacgaccgcgccatcgtgcccctggtgcgctcctacaccgggaggccgcgcgggttcacgcagctgcagcgcatgggcatcggcctcgtcgtctccatcttctccatggtggcggcgggcgtgctggacatcgtgcggctgcgcgccatcgcgcggcacggcctgtacggcgagaacgacatcgtgcccatctccatcttctggcagataccgcagtacttcatcatcggatgcgcggaggtgttcaccttcgtggggcagctggagttcttctacgaccaggcgcccgacgccatgaggagcatgtgctccgcgctgtcgctcaccaccgtcgcgctcggcaactacctcagcacggtcctggtgaccatcgtcacccacatcaccaccaggcacggccgcatcgggtggatcccggagaacctcaaccgcggccacctcgactacttcttctggctgctcgccgtgctcagcctcctcaacttccttgcctacctcgtcatcgccagctggtacaagtacaagaagacggccgatgattaccctggcgccaaaggggagcacggtacagagcactgatgggcgagagatggcggaaatggagtgatttctatgtgtggttagctgtctgtcgacttgttttgccacagtttgggtgcttaaacgttaacgtaagtactagttcaatataggtgtctggggggcgaattggttgtttacatgtcatgtgttggttttatatatgcgcaatgttcgatcttagtggaataagtcaagcgctcttatg

SEQ ID NO: 19288 - DNA, 1665 bp, Zea mays
  Clone ID: LIB3137-061-C2_FLI
gacgaaaccctaggacttgagatccagcgcacggctcgggtcctcctcaccgttcccggcgatggaacggcggcaggagctctgcaggaacttccagcgcggcagctgcaagtacggatcgcactgcaggtttgtgcacgcctcctctcagcagcagcagcagcagcagcagcagcaggcgaagcccaacccgtttgggttcggcttagggagtaggcagcagcaacagcagcagtcttcgtttcgtgcgcagttccagcagcagcagcagcagaagcccaacccgtttggatttggagtgcaaggcggtgcggctgcacagtccagaaacgctcctggccaggcaaagccatttcaaaataaatgggtaagggacccctcagccccaacgaagcaacaggaagcggcacagccaccagcagcagcccacacctcctgtacagatcctgactcctgcaggcaacagattgccgaggattttaagaatgaaactccactctggaagcttacgtgttatgctcacctcaggagcggtccttgtgacatcacgggagatattagctttgaagagctgagagctaacgcgtatgagcaaggcaggcaagggcatcctctgcagtcaatagtagagggtgaaaaaaaattgaaaaatgcaaagctgacggactttaataatttcctgaacatgccacgtctatcggtatcacaaactccaagctttccaactgtggcttccttccctgaagtgaaaaataactcagcatttggggtttctcaaaataatggaccaccagtgtttagtagtttcagtcaaattggagtaacaactaatatgggacctgggtccagaactacaccaggagtcccaaccaatactctttttggtcaatctacccaaccaagccatccaacatttcctgcacctacttttggtcgttctgatatgaaatttggagtttcaggtccatttggaagccagatatcacaacaatcatctgggagttttcaaggttcaaacatgtccagttttggcaatttctcaaagcctcatgccagctaccagcagtccccttcctcctctagccatcacagagacattgataggcagtcacaagatttacttagtggaattgtggttcctacaagtgccacaaacgaagctcctgttgaggacaataaaaatgaaaatcaggatgatagtatctggttgaaggaaaaatggtcaattggagagattccgctgggtgaaccgccacagaggcacgttagtcatgtgttttagcaacattcttgtatttctgtgtcgtggaaccactgtcaagtcagcttcactgtctccttccatattgtcgggacaccatcttacaatttctcctccaggttcataaccataacacgtcaaattgggggcataaaatgcacctgaaatgctgattgggcagcgtagaaacttcttgtatcctgcatcacatactctgtctctattgttttcttgttagctccatgtacttcgtcacattcagggctcgtaatatcccggtttcttgttttagggtttgttgagtttagctgtgggttttaaaaagccgttgcagctgtgttttttttgcggaaattgtaccatacatggaagcagtagtctttgaagaagcggaattttggttc

SEQ ID NO: 19289 - DNA, 889 bp, Zea mays
  Clone ID: LIB3137-061-C6_FLI
gggagcaaattattcttaataatgttcatgaccgctggaagtacatttggggatcggacaaattctcgtcccaaaaagcttacagatctctcatgggccagatgcagactcatcctatctacaaactagtttggaaaagtaagtgtcagcctaagcatagagtcttctattggctgtggctcaagaacaggctaaacaccagaaatatgctgagaaggagaaacatggagatagattcctattcttgcgaaaactgcctttggcaaagagaggagaccctttatcatcttttcctcagatgcaacttcgcgaaagcctgctggaactcaattggcattaccccacccagaatttccaaccctgaagaggcatctgtgaacctcaaacaccagctcaacgttcccttctctatggagatcactattcttatgacttggagcatctggaaaagccgaaacgagtggctgttttcaaacagagatccctccgtgctccgctgcactcaggaatttagtagagaattgcgactaatcattcacagagcacagggagaattcgacacctcaatcccgaactggctaaatttgtggcaaatatagaaatagctcttcttttttcttctttttctcttctttttattgattgtaaaaggaacagggcctaacctttaattttcgctttctaataaaatgcgcagtaggggtttccccctcctgatccttcaaaaaatcacctacagcccagctccagtctcatctgcgctgatactgttcgcacatagcttctgcaggtcaatgtagccaatgatcgtgtcctcgaacacgacatccccgatcgtcctcaaaggtcgaccccgacagaaccgtgtttctgaagatcgtcctcaaag

SEQ ID NO: 19290 - DNA, 1091 bp, Zea mays
  Clone ID: LIB3137-061-E7_FLI
ccacaacccccgagctcagcttagctccactccagctccaatcgcagtcgtgaccagagcgcgagagctagctagagggccgtgaaaatgccgatcaataggatcgccctggggagccaccaggaggtgtaccacccgggcgccctcaaggcggcgttcgctgagttcatctccaccctcatcttcgtcttcgccggccagggctccggcatggccttcagcaagctgaccggcggcggcccgacgaccccggcgggcctgatcgcggcggcggtggcgcacgcgttcgcgctgttcgtggcggtgtctgtgggcgcgaacatctccggcgggcacgtgaaccctgccgtgaccttcggcgccttcgtgggcggcaacatcaccctgttccgggggctcctgtactgggtggcgcagctgctggggtccaccgtggcgtgcttcctgctccgcttctcgacgggcgggcaggccacgggcaccttcgggctgacgggcgtgtcggtgtgggaggcgctggtgctggagatcgtgatgaccttcgggctggtgtacacggtgtacgccacggcggtggacccgaagaagggcagcctgggcaccatcgcccccattgccatcggcttcatcgtgggggccaacatcctggtgggcggcgccttcgacggcgcgtccatgaaccccgccgtgtccttcggccccgccctcgtcagctgggagtggggctaccagtgggtgtactgggtcgggcccctcatcggcggcggcctcgccggcgtcatctacgagctgctcttcatctcccacacccacgagcagctcccctccaccgactactaaaagccgaagccgaccgacctaggggtgcgcagcgcagctagcgcatccagctctctctccccgctcgccgccgtttagtttctctcgtgcacgtgcatgcatcgtcgactgtctcaggccgccgctgcgccggcgccgctcgcatcgtttgcttttccttggatcagcagtcgtcgccgtcaggttgagctgcttgtaaccgtgaattccggacccgtttgcttctgtaagatttgtgcatttgcctgagt

SEQ ID NO: 19291 - DNA, 672 bp, Zea mays
  Clone ID: LIB3137-061-F6_FLI
caaagtgtcggcactgatggcgctgctggatcaggtggaccgcaagtacaggcactaccaccaccagatgcagatggtgatgtcgtccttcgacgcggtggccggcgccggcgcggcgaggccgtacacggcgctggcgctgcagaccatctcccggcacttccggtcgctgcgcgacgctgtcggcgcgcaggtgcagtcgctgcggcggagcctgggcgagaaggacgggtccgcgcagggaggcgggctgccccggctgcgctacatcgaccagcagctgcggcagcagcgcgccatgcagcagttcggcatgatgcagcagccgcagcacgcctggcgcccgcagcgcggcctcccggagtccgccgtctccgtgctccgcgcctggctcttcgagcatttcctccacccgtacccgaaagattccgagaagctgatgctcgctaggcagacaggcttgtctaggggtcaggtgtccaactggttcatcaacgcgcgcgttcgactgtggaagccgatgatcgaggagatgtacagggaggagttcggggcggagatggactcgcactcgtcgtcggagaacgcggcgggcaacaagggcaaggacgaggcgatatcctcggaggaccacgaggagttccagagcccgtcgagcgccgccgcggccgc

SEQ ID NO: 19292 - DNA, 1619 bp, Zea mays
  Clone ID: LIB3137-062-G6_FLI
gcgcaccgcacacctcactgccgctcccttctcgtctcgtctcctctcctctcctcggcggatccggcaccgacccaccgcccctctgctcgttccttccgccggaatcgctgctcctctctgtgtgctgtcgatttgtgcggcgactgttagtttggttcggtcccatccttctgttgatcaatggctgacggtgaggatatccagccacttgtgtgtgacaatggcactggaatggtcaaggctggctttgctggtgatgatgcgcccagagcagtgttccctagtatagtcggccgccctcggcacacgggtgtgatggttggaatgggccagaaggacgcctatgtaggtgacgaggcacagtcaaaaagaggtatcttgaccttgaagtaccccattgagcacggtatcgtgaacaactgggatgatatggagaaaatctggcaccacaccttctacaatgaactgcgtgttgctcctgaagagcacccagttctgctgacagaagcacctctgaacccaaaggcaaacagagagaagatgacccaaattatgttcgagacattcaatgcaccagcaatgtatgttgctatccaagctgtcctttccctgtatgccagcggtcgcacaacaggtattgtgctcgattctggtgatggtgtgacccacaccgtgccaatctacgagggatacgcgctccctcatgccattcttaggctggatcttgctggtcgtgatctgactgactgcctaatgaagatcctcacggaaaggggttattccttcaccacgacggcagaacgggaaatcgtgagagacataaaggagaagctggcctttgtcgccctagactacgagcaggagctggagaccgctaagagcagctcctccgtcgagaagagctacgagctgcccgatgggcaggtcatcacgatcggcgcggagaggttcagatgcccagaggtgcttttccagccgtcgctgatcgggatggaagctcccggcatccacgagaccacctacaactcgatcatgaaatgtgacgttgatatcaggaaggacctgtacgggaacatcgtcctcagtggagggacgaccatgttccctggcatcgctgacaggatgagcaaggagattactgccctcgcaccgagcagcatgaagatcaaggtcgtggcgcctcctgagagaaaatacagtgtctggattggtggctcgatccttgcgtcgctcagtacgttccagcagatgtggatatccaaggatgagtacgatgagtctggccctgctatcgtccaccgaaaatgcttctgagcttagctatctgccgcgcctttcatagcgtgtcaagctgttgagatctgcgttgttgagttgagtgtctctatggagtatcacatactttctgcatgaggggggaagagtatacccaactaagcgcatgcctttcggatgccctgcttcgtgattcagatgctgctttctttcaagtgatatgtcgatgtagtgtgcgagcaatgtatttggtttggctacagctgttctgtcgtctgtgcgtaaaacatgagctatgtatctatccatatctgcatatttgaatgtatggtcgttttctc

SEQ ID NO: 19293 - DNA, 645 bp, Glycine max
  Clone ID: LIB3138-001-D6_FLI
ggctatgcagttttgaggaactggattaagtggaaacggtggaaggtacagaggcagctccagcaacaaaggcaagcggtgagtgatgctgaacctcaggtggatgatgagattgaagatgttccagatggacaattatgtgtgatatgtctgatgaggagaaggcgttctgtcttcattccctgtgggcatcttgtgtgttgccaagggtgtgccatatcagttgaacgtgaagttgcacccaaatgtcctgtttgtcgtcaggagattcgagattcagtgcggacttatgaatcttgaacagacacagactgatttttctgttcactctgcggcaggaaacttttatgactgctattgagaagagtgtttgttttttactatttctataagatctggaatatggagttttagggaaaacttgcctctgctcttgtttcctgtgaacttattactttatctggtgtagatatttgaacttggtttagataggttggtcgaggttaattcgtagtctcctcacttctcactctgcaaggtcttttggggaaccttgtaggattttccaattatcccagttgctgtgtacataaacatttaattttgcctaacacctatagaatgaacactgatatgttcttgtgc

SEQ ID NO: 19294 - DNA, 574 bp, Glycine max
  Clone ID: LIB3138-005-B3_FLI
aaaagagaatagagagtgacttttggattaattttaagtgcgggaaaacatattattacatgtaagacgattttgagaattgaattggtcttatttgtgtcataagacaagtgagttttgcaggcaaccgagcttaagtgtgggagtttagtagtggcatgcactttcgaccatcgcatagcagatgcctactctgcaaacatgttcctggtgtcatgggccgagatagcccagtccaacaagcccataatatcaatccagccctcttttgctcggtcccttttcatcccacgaaatccaccttccttccattcttcacttcacgacttgtacgtctccatctcggcgtcacctcgaccgtcagatccaaaacccgagttccaatctgagccactcattaaccgcatatactacgtcacaggtgaaaacctcaaccttatgcagaaactggcaagctcaaacggtgtgaagcgcacaaagctcgagtctttctctgctttcttgtggaagatggttgctgaagctgcagcggctaaggttaagggtaagaaaaacctcgttgcgaagatgggtg

SEQ ID NO: 19295 - DNA, 1046 bp, Glycine max
  Clone ID: LIB3138-010-F7_FLI
tccaaacccaaacccacttacctcttcacttctttttcttcttcttcttcttcttcttcttcctttttctcttccaccacgccaccgcgatccaccatgctgcaccacgaccctcttgtctctgacgtctacgccaccgccatttccggcgtcgttgccctgtccttcctcagattgttccaagaaactgcaaaacgagacctcttcgaccagaaattaaataggaaacttgtacatataagtattgggctgatattcatgctctgctggccgctattcagtactgaaacttgggcatctttctttgctgctctcattccgggaatcaatatatttcggatgcttgttattggacttggaatattgaaagatgaggccacagtgaaatcaatgagcagatttggagattacagggaacttcttaaaggaccactgtattatgccgcaactattactttggcagccataatatactggagaacttcacctatttccattgctgcaatatgtaatctgtgtgcaggagatggcatggctgacattgttggaaggcgacttggcggtgaaaagataccttacaacaaaaacaagtccttcgctggttcaattgcaatggcaactgctggattcttaacttccattgggtatatgtggtatttttcctcatttggatttattgagggaagctggaaattggttctaggttttctgttagtgtctattgtgacagcatttgtcgagtccctgcctatcagcacagagcttgatgacaacctcacagttcccctcacttccatattggtgggcagtatcattctttgatatgaagcatattgcagtaaaacaaatcagacactaggaatcagttctctacatctttcaatctagttagaaaatgtttattatgcatctagttaaagtagtctgttttgttggcagaaaaattgactgatgtttgtagtgtatgctctcgatcaatatggaaacagaacaatttgcagtcttgtgttctttctattggatgaatgctcacaatttttgttcac

SEQ ID NO: 19296 - DNA, 1383 bp, Glycine max
  Clone ID: LIB3138-010-G7_FLI
cagccaataacttcggactccgtctctaacaaccaccgcaccactcatcggcgcgatgccggaaataacggcctccggcatcgcctcgttcggcaagaatctttgcgcagaaatatcgaacacgtcgccgcggaaacctacttggtttctcgtctcgccttcacgcttcttcgctatctcgggattggttaccgttggattacacaattacttgccctaggatgttatgccatgctacttatgcccgggtttttacaagttgcatattactatttcttcacaagcaaagtaaagcgaagcattgtttatggagatcagcctagaaacaggttggatctgtatctacctgccaatattggtgaacctaagccagttttgatatttgtaactgggggagcatggattattgggtataaagcatggggctcccttttaggactacagttggcagaaagaggcattatggtggcatgcattgattacagaaattttcctcaagggaccatcagcgacatggtaaatgatacttcgcggggaatttccttcatcatcaacaacatagctaattatggaggtgaccctaataggatttatctaatggggcaatctgctggtgctcatatttcttcttgtgctttactggagcaagcagccagagaatcggaaaaagaagatagtgtttcttggagcatttcccagttaaaagcttatcttggtttatctggaggatacaacttactggatttagtggatcacttccacaatcgtggcttggatcgttcgattttcttaagcataatggaaggtgaaaattctttgaaggaattttctcctgaaatcaaaattcaagatccatgcctcaaatcttccattcctcactttccccctgtatatctggtccatggaactgcagattattccataccatcagttgccagtgagcggtttgcggaagctcttaagaaggcaggggtaagagctgagttgattttatacgaggggaagactcatacagatttgtttctccaagatccgctccgaggtggtaaagatgacctatttgatcttgcagttgccattatgcattccaatgatagtgatgctcttgcaaacgatgccattgcacccccaagaagacggtttgttcctgagattttattaaagttggctagaaagatcagtcctttctaagcttgtaactgtcagggaaaatgtcatctctataagcttgtaagcatagtgattagaattttatgattcctgattcgaatcctacattccgataaaattcagctacttattgattcatattattaatattagacgaatctcaatttttgtatcttacggtacatgaatgaatctgcacaatttcatatcatc

SEQ ID NO: 19297 - DNA, 2520 bp, Glycine max
  Clone ID: LIB3138-011-B1_FLI
aaaatattataggaagagagggagaaactaatagagagtcctatgctgggggactcagcagtgttgggaacaggaggaggaggctctggtgatgcagtggcagcagcaccacctgctgcatcaggaggagcacatgatggtggtgttgacggcggtgacggtggcggtggcggatcaaattcaggggatgatagagttgaggaaggtgagaggagctttggtgggaacaggtggccgaagcaagagactttggctttgttgaagatacggtcggatatggacgtggcttttagagatgcaagtgtaaagggtcccttgtgggaagaggtttctaggaagctggcagagcttggctacaacagaaatgccaagaaatgcaaagagaagtttgagaacgtttacaagtaccacaagagaaccaaagaaggacgaagtgggaaatcagaaggcaaaacttatcgcttctttgatcaattacaagcccttgaaaacaaccctgcaattcatggaaagcaatctccaacacctccaaagccgccaccacaaacaacagcactatcagcaacaccagtgtcaatagtggtaacaacaactacaactacaccatcatcaataataatgccacttccattgccaccagtgtctaataacaacaacaacaccactgttccatccacaacatcacttcctatgcctcaaagcattctcaacataacaccaccatcaacactgaacatcacaatcccttcttttccaccatcaaaccctacaacatacttcccaacacaaacaccaaaccctactagcaacaacaacaacaaccctccaagcaccatcaccccaccttccttccccaatttccccgccgatctcttgtcgaattcgagttcttcatcgacttcttcggaggaaacaccgacgacggaggccagagggcgcaagaggaagaggaagtggaaggacttctttgagaggctcatgaaggaggtgatagagaagcaggaggagctgcaaaggaggttcttggaggccatagagaagagagaacaagagcgtgtggtgagagaggaagcgtggagaatgcaagagatgcaaaggatcaacagggaaagggagattctagcacaagagaggtccattgccgcagcaaaagatgctgctgttatgacatttttgcaaaagatagccgaacatcagcaacaagaaactatcaatcttgaaccagcattgaataacaacagcatcactgttgttccacagcaaccagtgccacaagcaacaccaacatcaactccaacaccacaacaagcacaaacaacaacagttcctgaggccccacaagtgcagccattggtcccacaactacaacaacaacaacaaatagtggtgagtaatgtggaaatcaacaaagctgataataacggtgagaatttgatgatggaagcaagctcttcaaggtggccaaaagtggaggtacaagcactgataaacctgaggacaagcttggaaacaaagtaccaagaaagtggaccaaaagggccactgtgggaggagatctcagcgttgatgaggaaaatggggtacaaccggaacgccaaaaggtgcaaagagaagtgggagaacatcaacaagtacttcaagaaggtcaaggaaagcaacaagaagaggcctgaagattcaaagacatgtccctattttcaccagttggaggctctatacagggagaagaacaagggagaggggcagatgaagccggagagcatgatggcgccgctcatggtgcagccggagcaacaatggcctcctcaaacaacgcttgtggtaccgccagaagtaaccatgggagacacccagaatgaccccatggaccggcagtaccatgaggagaatgaggatgacgaggacgacaaggaaattggagatgaagacgaggatgaggacgacgaaggaggtgataattatgagatagttgcgagcaaaccagccacagctgatgcttccggagagtgagaggaaaaaatattgaccaaaaagggcatcaattaaagaatgatggatcaatttgaattcacatattgtcggaaaaatggtggtgttgggatgaaatttggtattgatggtggatggtgatgtgattgtattgaagattttgaaaatgcacgtacttcagaatgacacatgggtataggggtagccagtagggtgggggaatctgggttggaagtacttggtacaatagcagcatatagtcagtaagattatatgttttttttgttttgaaagaagaaataattaattattttttgagctcaataaataagttgatgagggagaggggaagggttataagatagagaaaaaacttcagacttgcatgagaggtgaggttcaacataaaatgaataagcaagaaaccttgattaatgttatggtactagctatataggttttttgtactaaattttcatgttcatgttgatgtaaatgcgagaaacgattaattgtgggggggtttgtctt

SEQ ID NO: 19298 - DNA, 1498 bp, Glycine max
  Clone ID: LIB3138-011-B12_FLI
gaaaataaccatgataaaatagaaaatctagagggttctcctgcggatcaggatgaagcaggggacaaattagcagatgtacttgatgatgatgatgatgatgatgatgatgaagccagtgatagtcatgggagtgaaggatctttgcataataaagtggaagagaatgcaaaagaagctgaggaagaacctattgttaaatctgaaactgatataaaggtcagaaacaaagagtcttctgatgaaatcatcaataaggggaatgatgcatctgaaaatactgagggattatcaagggaagaattgggccggcttgttgcttcacgttggacaggagaaaatactgataagccaagtgctgtacctgatacaacattagacaatgaagatcgggaagatccaaaggggagaaataatgaggaatatgaaggctatgcttctgaaactgatgatgacaacaacaaatatgatgatgacagccacaaatacgacgatgaagatgaagttgatgatgaatatcgagaggatgagcatgatgacctttcttcctcctacaaatctgattctgataatgaaccagacttgtcagataatccttcttggttagagaaaatacagagaactgtacgcaatatttttcaggttgttaatttattccaggctccagtgaaccagacagatgctgctcgtgtacgcaaggaatatgatgaatcaagtgccaagttgtcgaaaatacagtctagaatatcaagtctgaagcaaaagctaaaacatgattttggtccagcaaaggagttttattcattctatgatcattgctttgagggcaaggagaacaagtacacttacaaagtctgcccctataagcaggcttctcaggaggagggttattccaatacccgtttggggagctgggacaaatttgaggattcgtacagagtaatggtgttttctaatggtgataaatgctggaatggtccagataggagtttgaaggtcaagttaagatgcgggttgaaaaacgagattactgatgtagatgaaccaagccgttgcgaatatgtagctgtattatctaccccgaccctttgccaagaggaaaggctgaaggagttacaactcaaactagaccttttgaattcggaaataccagcaaaccatgacgagttgtgaacaaccgggacagattttaactggtagtatgatgatcatagagcaaatgaagaagtggtgccctaagttttgtatgctagagcttacacaaatatgatatcgggtgaggttagggagaggctagaagctgatttgacttggggttggtaatccttgtggttgtccaagtttgcaacattctaatatgactcatcccgcacatttttcctttattgaactcaattacgaaatggtctgtgtgcctctccttgaaattgtccattccataccaaaggatggatatttatactatgcaagatactggacagtcagaatttcttgagcc

SEQ ID NO: 19299 - DNA, 2109 bp, Glycine max
  Clone ID: LIB3138-019-D4_FLI
cagcttttgaagacatgccttggtgttttgctctgttgaaagtagaacgcatggttttgagttttggtagctgagtagcgaatagttgtgggcaaatgctgctgtgactgtggttacaatgattttgtgagactttaagaagctcaattcactgcaattttaaaccatggaacttatacgtgtgcgcagttacaaaggaagggaaacataaagagaattgaagttatttgaatttttaagtgaaatagagagaatgggaaagcagaatagattaaatgaaagaaaatggaaaaaaaatgatacgacaatgggttagggaagaagacttggcaaaggacctcaaattacacacaaaacaacttcgtcgaactctgcggttttttgaagaagaaaagatcattactcgggatcataggagagagacagcgaaaggtgcaaaaatttatggtgctgctgtagctgctacagctgatggtcaacagacagcaaaagagggagaagaaaaggtcaagctgcacacacactcttactgttgtctagattatgcacagatatacgatgtgattaggtacagactacatcgcatgaagcataagctgaaagatgagttggagaacaaaaacacacttcaggaatatatatgttcaaactgtggaaaaagatacaatgctttggatgctctgcggttagtatcgtttgaagatgaggacttccattgtgaaagttgtaatggaagactagaggttgaaagtgataagatagctgttcaagaagggggagatggagatgataatgcaagaagacgacggcgtgaaaagttaaaggacatgcttcaaaagatggaggttcagctcaagcctttaatggaccaactcagtcgggtaaaagacttgcctgttcctgaatttggcagtcttcaagcatgggaagctagagctagtgctgctgttcgtgcagctaatggagatatcaatgctggtgattctaaaatttcgcagctaggatataatggagtgccttacagtggagacactaaggttgtagttgacttcaatactgaaggcaaaggagagggtgttaagtctgaaactgacagtacatctttaaaggttttgcctccatggatgattacatcaggtatgaatcttacaaaggaacaacgtggagaggtgaagcaggaaacaaagatggatgagacttcaacttccacagcagtgcagtacacagatgacaagaagttaacaattggacatgacaataatcaaaatatacaggatgagtatattaaggcttattatgctgctttacttaagcaacacgaattggaagaagctgcaaaaaaacaattgccaaatacacttgctgctgatgatccttctagcagtacttccaatcgccaggttggcatgaaatcaaaacgtgaggaagatgatgattgtactgaatgggaggaggctccaattgcaggcaatggaaatggaggttataaggttgatttgaatgttgaagctgaggaagttgcagcagatgacgacgatgatgacgatgttgactgggaggaaggctgatgaaaaattatctgatcagtataatgtaatggtctattctgatttgcaatggccagtgctcattaataataccgcttcaaattatgtaccacaaaaccagaattagctgctcctattattgcctgtgcatcttattgtggtgttatgcgtcaacggcttcagataaggtgcgcagttgactttttagttgctaatcatcagtattcgtcacatattgaatgaacaacagctctactttgacacttagccgtccaaaaatagtgtctctaactttatttcattgtgatcacatactatttaccaatggatacctagatttgtgagtaatgagccatcccaacgttttacttacctgtggtgtcgctcacaccaatgaagaaaatggtgagccctgaattatatctcctctgctatttccaacaaggctatttccaactcatcctagttgtccatttcccgaaaatgtacaaaaagctgtaatgagagatgggcaatgtgttcgttgcctggcatcttcaattaaagtcaaagtttatatccc

SEQ ID NO: 19300 - DNA, 820 bp, Glycine max
  Clone ID: LIB3138-021-B8_FLI
gaagaaccggggtatcaatctgagaagaagcgtcgtctaagtgtggatcaagtgaaggctttggagaagaactttgaggttgaaaacaagcttgaacctgagaggaaggtgaagcttgcccaagaacttgggttgcaacctagacaggtagccgtatggttccaaaaccgtcgagccagatggaaaaccaaacaattggagagagattatggtgtactcaaagccaattatgatgctcttaagcttaactttgacaccctcgatcaggacaacgaagccttacgaaagcaggttaaggaattgaaatcgaggctgctgcaagaagagaacacaggaggaagcggtgtttcggtgaaggaagagataataacgaggcctgcagactcagaagacaaaacgatggaacaaagtaagagtgacccatcttctgaaacctcaaatattaatcctagttcggagtcggaggaggatcacttgaactacgagtgtttcaacaacaacgacgactgcgtcggaggaaccgccgcatcgctcttgcaagtggacttcaaagacggttcttccgacagcgacggatcaagcgcgattttgaacgaagacaacatgtactctcccttgaaattcaacaattgctccatatcaacctcgccgtcatcgtcttcgatgatgaactgttttcagttccagaaaccgtatcatcaccacgcgcagtacgtgaagatggaggagcacaatttcctcagcgcggatgaggcctgcaatttcttctcggatgaacaagcaccgacccttcaatggtactgtccagaacagtggagct

SEQ ID NO: 19301 - DNA, 1457 bp, Glycine max
  Clone ID: LIB3138-032-A11_FLI
ctcactcagtaaacaatgggcgacttcacggttgcgttaaaccctcccaaaaccttccgcgccgatattctcctatccaccaccaacaaccgcacttccccggcggcgcgtggctttcaaaccgtactcgcgttcaaaccaccgcgcgcttttcgaggaatccgcgcttcggtgatgccaagagagggtcaacaagcgtctctcggagacgcccttgtcaacactccgcgccgaagcgacttcgttgaggccatcagaagaaccgccgcactctccagctgcctctcagaaacgagcctccacgccaccgttcccggcctcgagtccaaaacccgcggcaaagttcgagatatatacgacgctggggattacctcgttttggtgaccactgatcggcagagtgcgtttgatcggattcttgcttccattcctttcaaaggccaggttctcaatcagacgagtttgtggtggtttgaaagaactaagcatatcgtctctaatgcggttgtattggctccagataacaatgttacaatagctaggaaatgttcagttttcccagttgagtttgttgctagagggtttgtcactggaagtactgatacatctctatggacagtctacaataaaggcgttcggaactattgtggaaatgtcattccagatggaatggtaaaaaatcagaagttgcctaaaaatatactcactccaacaaccaaggctgcagatcatgatgttcctatcactccagatgagattatagacaggggactgatgactcgagctgattatgtagaagttagtgaaaaagcattatccttgtttgaatatgggcagcaagtggctttggagcatggcctcatattggtagatactaagtatgagtttgggaaggcaaatgatggttcaattatgttgattgatgaggtccatactcctgattcaagtagatattggatagccaattcttacctggagcgctttcaaaatggtcttgagcctgaaaatattgacaaggagtttttgaggctgtggtttataagtcactgcaacccttatgaagatgaggtccttcctgatgctcctgaagatcttgtctgtgaattagcctggcgatacattttcttgtatgagactataacaaaatcaaagtttgaggtgccatcgactgaggagcctatacatgaccgaattacacgaaatgttgcatctgcactgtcatccctaaagtagcctgggaaattagggccgtgctgtaattctgtattttaatctttgtataaactatatcaaaaacttaaattaatggagaacttctccaagcaattttttatttttccaaagtataacataaagcagaaaggcaaaacaacagattcagaaatttgacaccttgtccttgtgattccttctttttttttttttttttttaagaataaagagctgtttctggaagc

SEQ ID NO: 19302 - DNA, 1881 bp, Glycine max
  Clone ID: LIB3138-035-A7_FLI
ggatactgcatactcgctggatctcccaatctggcttcaaactcaacaatggcatacgccgcacctccgctggacccgccaggaataggcacgaactcgccttcgtctcagaagaagagagtggcttatttctatgacagcgacgtcgggaactatgcctaccagtcgggacatctgatgaaaccccatcgaattcggatggcgcattcgcttgttatgaactatggactgtacaacaagatggagatttaccgggccaaaccagcgtcaaaatacgagatgacacagttccatacggacgaatacgtggactttttgcagcgtgtcactcccgacaatgaacatcttctggctaaagagtgcgccaagcacaatgttggggaagattgtcctccgttcgacggcgtctttgagttctgcgcgattagtgccggtggcagtatggaaggagcggcaagactcaatcgtgccaaatgtgatatggcgatcaattgggcgggcggactgcatcatgcgaagaaaaacgaggcatctggcttctgctatattaatgatattgtcctcgcaatccttgagctgctccgcttccatgcacgagtattgtatatcgacatcgatgtgcatcatggcgacggtgtcgaagaagccttctataccactgacagggtaatgtgtgtctcgttgcataaatacggcgaattctttccaggaactggcgaccttcgcgatattggaatcgggcaagggaaacattactcagtcaacgtaccactgcgagatggtatcgacgacgccagctataaagacgtcttcgaatcggtgacgacgtgggctgtggagttctttcaacctggggcgatcgtcttacaatgcggagctgactctctgtctggggatcgccttggtgcgttcaacttgagcctggctgggcatgcgaactgcgtcaacttcgtgaagaaattcaacctgccgacgcttttcctgggaggtggtggctatacaatacgaaatgtcgctcgagcatgggcatatgagactggacagatagttggtgttgagctgtctcgctcgatgccatttacagactattacgagtactactcgccagacttcgaactagacgtcaagccgagcaatatggacaaccggaacagtgctgaatacctggcgaagatcaagtcatttgtttataccaatcttcgtcaagcacaaccggtcccctctgtgcagcttcaagacgtgccgcggtatccagtcggcatgagcgaacatattgacgatatggacgacagactggatgatgaagatgctgacgaggagacctccaaagatcaacggctcacggaacgggtggaagatcggatgattgaggatgatatggatatgtctggcttggaagacgcgagaggagtggactcgggagcagatgctgatcacggaagcccgtccatagtgggtgagggtggcagcgggtgtaaggttttgtcaagcgatcatgatacagaccagataactgagccggtcccatcgattgacccaggcaacgatcctgaacctgacagaacgacaatgatgctgcaggaagcgattcgtgacgagagcaacgaagtttcccagcccacgaacgttgaacaaacagtagtccagagggacgcccctgcggaacatgtcgagatcatcgcacagccgtcaatcgttctggaatcagcgccaatgcagcccgagccgcctatcgtccaatgtatgaacagagtagacagtcacacgcttgggcttagtgacgctgcagaagctgtggaagctatggagaacaatcacaaaggcggaaacgagaatatcggtctttcatagaggtacaaatatacacttgaagcatttttg

SEQ ID NO: 19303 - DNA, 1580 bp, Glycine max
  Clone ID: LIB3138-042-C2_FLI
aagtagtaccattaggcactttgttttgtgtcttcaatttttttttcctttcaaccttatcaaattaaccccctacacatttatttagctagctagccaatttattaattaggcacataatgggaagcccagaatccaatttgccacccggttttaggttccacccaaccgatgaggagctcattcttcactaccttagtaaaaaggtagcatccatacccttgaccgtttccattattgctgaggttgatatctacaagttagatccatgggacttaccagctaaggccacctttggggagaaagaatggtatttcttcagtcctagagaccgaaagtacccaaatggtgcaaggccaaacagggcagctgcttcagggtattggaaggccactggcactgataagaccatagtgacatcattgcaaggaggagcacaagagagcgctggtgtgaagaaggctttggtgttttacaaaggaagacccccaaagggtgtcaagaccaattggatcatgcatgaatatcgccttgtagacaacaacaaacccatcaagctcaaagactcctccatgagattggatgattgggttctttgccggatttacaagaagtccaaacatgctctaacttcaacagaggcatcaataggggtgggtgaggtagatcaagcagaggagcacttattccaagagacccttttgccaatctcaaaatctccagcacctccacctcaaaacacattgatatctcagaaatctgtgtccttctccaacttgttggatgccatggactactctatcctaagtagtttcttatctgagaatcataccaaccacccaccaggggttggatcaagtgctggattcaacactgggaatttggatcagcaatgctctccaatcaataacaacaaccctaccaataattacatgtttcagaagaatccccaattgaacccttcagtctccaacatggaaaacatgatgaggccaaagcgccaagtttcaaacatggatgaggaaacgttgtacccatcaaagaaataccttagttcctcttgcaacttccctactaacatcagcaaccaatacgagaacccacaatggaactacctcatgaagcagtctttgatgaatcagcggttaatgcttggtcctcatcttcaatttcaaggataatccaaaaatatcaaaagattaaatgaaataggaaaattaaagtaaaatattcagaagctgagcacaccaaagaataccaccaatttgatcattagataaggaatagtagctaggggtttagtacatagcaattatagtgttttctttttttatttctctttaattaatttgtgattgaaaatgaagaatagaatgttagcttggaagcaagaactatttggtagggaatcaaagaaagattccaccattcaaggatcaagaaactgttaaaacaaaatatccaagtttctatgacaaattagaaacaatttgtgtacaaaaatgttaatttgtacatgttgttggggtttgtttggaggttagttttataatatactttgtagataaggtattgtcctt

SEQ ID NO: 19304 - DNA, 1292 bp, Glycine max
  Clone ID: LIB3138-045-D4_FLI
gtcatatccagtgttatgcaatctttatcgtccttggatgtgcccacttgcaagacttttatattttttgatctcatttgttactgtcctcattggattctatgatttatacaaaaatgttcctgttctcaaggcaactgcatctcgtatatgtgggcctcttcttgattggattgaaacttgggagatggtttcaagggtcaaatacttaggcacaatgctgtttctacataacttccagaaggctgttaggtggtttcttgcctttacacataccatgcgatcatttttttcctttcttgttcaacctcttgtagagtcattggtggagatttttggatttcttctcccaagcttcaagtttttgtttgaattagctgaaagcatcttttctgtcatttggctcgtagtggatacttcttttgatatagtgggaaatgtactggagctgctcttttcaccattttggtttgtcctcaatgttgtttggagcattgctacttgtatcttatatcctttattttgggttctctgggaattcctatatgctcctgttcgtcttgtcctggtgatattcggttttgtggcttccatatgttcacacatttgtaatatgcttggcaacacgtggcagtttgttagtaggattttccagtttgcagcatcttctgaagcaacagtcagtgcttctgaagtttctatgtggcgaactctttggaatgaccttttttcccagattttccgtgctctcaagagcatactctatgggtttgttgccttcttcacagcctgcaataggcatcgactaagcatttataatcatgtacaggagttcgtccaaagattatatggtacgtgccaaagatcaaggcaagacgactctagagacaatggaaaaacttgcttgccgctgaatttgacggaagaaaagaagaacgtttgattgtattgtgtcttttcagagacagcactctgtattggaaaacaaatttggtaacttttacaaatctaacatcaacacgtcattttcagcaaactcaattcgattaccgttgcaattttaagattatttctctgtaacaaattttgattttaccttttcccctctctttagttccccaagtttacttctcacagttgtctatttatgatgagttttatagtccaatatgtacaaagtatgtacagtacacttgtaaatttcctcaatgtatattcaaaattgaacaattgtaaaatgcaccagttttgtacaatttacagtcactaattttaaaattacttacgggcat

SEQ ID NO: 19305 - DNA, 1244 bp, Glycine max
  Clone ID: LIB3138-047-H4_FLI
atcgggaggacgctgaagccgcacgagtacatcggcatggtgcggcgcgaggtgctcgacgcttacctaagggaccgcgccaaggagaacggcgccaacgtcatcaacggcttgttcttgaaaatggatattcctaaggataataactccccctacgttctgcattactctagctacgacgggaaaaccaatggagctggtgagaagcgtaccttggaagttgacgctgtcattggcgccgatggggccaattctagagtcgccaagtctatcgatgccggtgattatgagtatgccatcgcttttcaggagagggtaagaattccggatgataagatggtgtattacgagaatcttgcggagatgtacgtgggggatgatgtttctccggatttctatggatgggtgtttccgaaatgtgaccatgtggctgttggcactggtaccgtgacacacaagggagacatcaagaagttccaactagcaacaaggaaaagagcagaggacaagattttgggaggcaagatcatccgagtggaggctcaccctatcccggaacatcctcggccgcgaaggttgtcgggaagagtggcgttggttggtgatgctgctggctatgtaaccaaatgctctggagaggggatctattttgcagccaagagtggcaggatgtgtgcagaggcaattgttgaaggttctgagaatggaaaaaggatggtggaagaaggggacttgaggaagtacttggagaagtgggacaagacttattggccaacttacaaggtcttggatattcttcagaaggtgttttataggtccaaccctgcaagggaagcgtttgtggagatgtgtgctgatgagtatgtgcagaagatgacctttgatagctatttgtacaagacggtggtgcctggcaatccattggaggatctgaaattggccattaacaccattgggagcttagtgagagccaatgcaataaggagggagatgaagaaacttaatgtatgacaataatagtctcagtttgactctcatatatttgccattcatttttgcattgcgtgtttcctagtggacatgatctccttataattaagtgataattaactatatatgtgtaagcaaaaaaggattgaattttcatgcaatcccataccggtatgtataccttttatctacaatgatgtaagcgaagcaaggggttgattgaaatactaggtactagcaaaagtttacttctc

SEQ ID NO: 19306 - DNA, 1306 bp, Glycine max
  Clone ID: LIB3138-057-D6_FLI
atcacaatctgatttgatttcggagctgtgggttttattgaaagaaaaaaaattagaagcaaaaatgatgcagtcgttgatgagcatgaaggcttacgtgggtacgaggttaccgattttaacgaattccgagacgagtacgaggaagcagcgcgtgaattgtccgaaccgtaggaatgtgatggtttcgtgcggttcggagaggaatgggaacgaaggaataggttcgaactcaggttcgtttatgtctccgagccataattacgcgatcttgaagcaccggatggagaaagcggccaagtccgaggttagtgtttttgtttttttttttttttaaggaaggaaaatgttttttttttcttttatattattaatgaggttcgttggtggttcctcgggttttggagaggggcttcttattttatggaatttgaaaaacggtagtattacgaagaggcttcgaggattcgtgactcgctcaagtgcttcgaagatgagattcctgttctgcgtctgaggagattgttgaaggaagccgttgctgatgagaggtttcaggacgcagctagatatcgtgatgagctaaaagaaattgctccacattctctcttaaaatgctcaagtgatgcgacaaccttgggaatccgggtccaagtgaagagtgcatatatagagggcagaagtcagccttcagaggaggtatattcctttgaatatagaatcaaaattaccaataacacaaaccgccctgttcaacttctcagaaggcattggattatatctgatgctaatgggaaaactgaaaatatttggggaattggagttgttggtgaacagccagctatctttcctaggagtagttttgaattctcttctacatgcccattaagcacacaaaatggtagaatggaaggtgactttgagatgatacatgttgatcgagtaggctcaagagcatttaatgtcgccattgcccctttctcgctctctctactaggagatggtgatggtgaaactacttaagatagaacggtagcatcaccttctcagattgttccaaataagcattcagaacatgtcattggaagatgttctcacagccatattaagaaattaaagctggctatttgcatcatctggttgttgtgaattagtgattgtaaatgttttgctgtacaattttctttgtttattttattttcttttcttgttttggggccagaaccttacagatatatgtatgtatgttgttgttgaatggtgggtagagaaccccataaagaaatcaattttcatgtgtgtatat

SEQ ID NO: 19307 - DNA, 949 bp, Glycine max
  Clone ID: LIB3138-059-C12_FLI
ggaagttgacgctgtcattggcgctgacggggctaattctagagtcgccaagtctattgatgccggtgattatgagtatgccatcgcttttcaggagagggtaaaaatcccggatgataagatggtgtattacgagaaccttgcggagatgtacgtgggcgatgatgtttctccagatttctacgggtgggtgtttccaaaatgtgaccatgtggctgtaggcactggaactgtgacacacaagggggacatcaagaagttccaactagcaacaaggaaaagagcagaggacaagattttgggaggcaagatcatccgagtggaggctcaccctatcccggaacatcctcggccacgaaggttgttggggagagtggcgctggttggcgacgctgctggctacgtaaccaaatgctccggagaggggatctattttgcagccaagagtgggaggatgtgtgcagaggcaattgttgaaggttctgagaatgggaaaaggatggtggaagaaggggacttgaggaagtacttggagaagtgggacaagacttattggccaacttacaaggtcttggatattcttcagaaggtgttttataggtccaaccctgcaagggaagcgtttgtggagatgtgtgctgatgagtatgtgcagaagatgacctttgatagctacttgtacaagacagtggtgcctggcaatccattggaggatctgaaattggccattaacaccattgggagcttagtgagggccaatgccataaggagggagatgaacaaacttaacgtatgacaataatagtcattatcatatttatcattcatttttgctttgtgtttttcctagtggacatgatctccttataattaagtgataattaactatatatgtgtaagaaaaaggattgaatttcatgcaatcccataaccggtatttgtacctttt

SEQ ID NO: 19308 - DNA, 794 bp, Glycine max
  Clone ID: LIB3138-059-D3_FLI
ttcaactcccaatgtgttggttcagtttgttctgtatgatcacaataatttgatgttccctcgccttatgctatttgcgatggagagcatccctccgatgagagagctcagccttgattatggggtagctgatgagtggacaggaaagctctctatatgcaatgaatgattttgaaagtttcatacactttataatatactgaagctgactttcgggcattgtttgcagagatagtcaagttgatgcagcacaagttttcaacactgccaatttacaaagagcagtagtagaattgcttgctatacgacggtgtcaggaaatcaaaattcaaatataaagaaatgtctattacgttattctggtttttatctaactgtcaatggctagtacacggtgctcctctggtgaggaaggtcaagaattgaagttcccatttctgcttaatcttgaagacttcagtagttttctcacttgttgatgccatttgtttgttctgtaattgttgatgtcttcctcagctcggcgaagcattttcaaatcacatttttgtaagcaataatagtgcaagctgtattaactctttcttcttttggagaacttgtttgtatatagtataatttcaaagcttgtaaaggttttataatagtgactggtatcggatgcaacattttaattaatttagaagcgggtaaattgggcatctggatattaagattactaggatatagccattgttgctaatgatcttgtatgaggaaaatcaaattatgatgaaatggacaatttggttgtt

SEQ ID NO: 19309 - DNA, 1696 bp, Glycine max
  Clone ID: LIB3138-060-C7_FLI
ccgaggagggcggcgatcggcgatgagcagcggcggcggatcgtcagaggcggcggcggcggcgaaggagaaggagaaggagaaggcgcgtgtgagtcgaacgtcgctgattctgtggcacgcgcaccaagacgacgccgcagcggtgaggaagcttctggaggaggatccatcgctggtgaaggcgagggattacgacagccggacgccgctacatgtggcgtcgctccatggatgggttgaggttgcgaattgcttgatcgaattcggtgctgacgtcaacgctcaggatcgttggaaaaacactcctctggctgatgcagaaggagctaaaagaactgccatgattgagcttttgaagtcacatggtggcttgtcgtatggccagaatggaagccattttgaaccgagtcctgttcttcccccattgcctaacaaatgtgattgggaagttgacccttctgagctggacttctccaattcagtttgcattggaaagggatcttttggtgagattttgaaagcccattggcgtggaacacctgttgctgccaaacgtattcttccatctctgtcagatgatagattggtcattcaggacttcaggcaggaggttaatttacttgtgaagcttcgacaccctaatgttgttcaatttcttggagctgttactgacagaaagcctcttatgttaattactgagtatctgagaggaggtgatcttcataagtacctcaaggacaaaggtgcacttagtccttcaacagccatcaattttggcttggatattgctagagggatggcttatcttcacaatgaaccaaatgttatcattcatcgagacctaaagccaaggaatgttcttttagtcaactccagtgctgaccatttaaaagttggtgattttggacttagtaagctcattaaggtccaaagtgctcatgacgtatacaagatgacgggtgaaactggaagctaccgctacatggctcctgaagttctcaaacaccggagatatgataagaaggttgatgtgttctcctttgcaatgattctgtatgagatgcttgaaggtgaaccccctttttcaaattacgaaccttatgatggagccaaatatgtggcagaaggacacagaccttcttttaggggaaagggttatatccctgaactgcgagagttaactgagcagtgttgggatgctgacatgaagcaaagaccttcattcatagagatcattaaacaccttgaaaagatcaaggaaaatttgccttcagatcatcactggcacttgttcacttcatgatttttaggagcattggtgccgtgaaattcagatgattatctgctattaccattccagcgggttgccttatctactgtcgcgggtttttgaacagagccgacttggaaaacctagctaaggtcatgagcattgctttgaactgttagattcaaatgagcataacaggtttatgctgattgcctttatctggtgtttacattcaattactgttttttgtctcattaaaattcttggcgaattctattcagctatttaagtgagcagatactagttgttgcttgagtgtaatatgtagggtacaaaacccattgaggaaaaatataacacatcatgcaatctagtgtttaatattttatcttatgattaaaaattaatagcggttttcatttc

SEQ ID NO: 19310 - DNA, 522 bp, Glycine max
  Clone ID: LIB3138-069-G10_FLI
tcaaccgcaaacctcaccgttctggtcgtaggaagaaaaacaaaagaaggtgggaccccaattatccaaagccgaataggagtggctataacttcttctttgctgaaaagcattacactctcaaaactctctacccaaacagagaaagggagtttaccaaaatgattggccagtcatggaacagtcttagcccagaagaaagaatggtttatcagaacattggcttaagagacaaagaaaggtacaagagagaattgacggagtacaaagagaagatgaagcttaggcagacctcagaagttggacgtccatagaatctcattggtacccgtttgtggaggcgaaagaatggcttagaaaatttttataatctgttgacttttacgtgcatattgttgtggataatggtccactggactgtggtctacagaactattgtttttttcttttcaaaagagaaaactagtgtctattgttagtcagagaccctttcatttcgtttaatcaattaattatcctccc

SEQ ID NO: 19311 - DNA, 1002 bp, Glycine max
  Clone ID: LIB3138-072-E12_FLI
gtttaaaccaagcctcaactgatgaaggcaagttccttctttctgcacgcaagtgccgacgtgcaactcacactgactatattatctctctaaactgtgatgatgtatcaagagggagtagtacctatattggaaagttgagatcaaactttcttggcaccaaattcacagtgtatgatgcacaccctccaatttatggagccaaagttacaaagtctcgttcctccaggctagttagtctcaagcaagtttctccaagagttcctgctggcaactatcccattgctcatgtgtcatatgatctgaatgttttgggctctaggggccctagaataatgcaatgtgttatggatgccatccctgcctcagctgttgaacctggaggtgtggccccaacacagactcaatttcttcatagcagaattgatacttctccatccatccctttctttagatcaaaatcaacccggatggacaatctcccaacagtacctttgacttgtcaaaatgaggggacactggtattacgaaacaagtccccaaggtggcatgaacaccttcaatgctggtgtctgaacttcaatgggcgagtgacagttgcttcagttaaaaatttccagctggttgcttctcccaaaaatggagtttctgagcaggctcaggaaaatgtaattctacagtttggaaaagttggaaaggatgtattcaccatggattatcagtatccaatctctgcctttcaagcatttgcaatatgccttagcagctttgacaccaagattgcttgtgaatgattgctggcatagacagatgttaaccagtcgtgctgctgattggaattgcagaaacagtgatgcgggtcaaataccgactatagatttttctgcttttctatttagtacaaccaagtttcagaatccccctccccttccctttctttttatctattgtatatatggttgtttgtgtgcattatatttaaccagcgctgatttgtatgtt

SEQ ID NO: 19312 - DNA, 757 bp, Glycine max
  Clone ID: LIB3138-074-E12_FLI
gaacaaaccataccaaaaagagagcagcagatgaagccgtttctcatcgtgtgaggggtccctatcatcatcctttagatgcaatagagagtttaaatacacacagagtagtacacgaacctcaggcattttcttctttcagagaacgcctataccacttgcagagaaccgaaaatgatcgggtttgctttggtagatcaggcatacacggatggggcctctttgcacgtagaaatattcaagaaggagacatggttcttgaatatcgtggtgaacaagtgaggcgcagcattgcagatttgagggaggcacgctatagattagaagggaaagactgctacctgtttaagataagtgaagaagtggtggtagatgccactgataaagggaatatagctcggctgattaatcattcttgtatgccaaattgctatgccaggatcatgagtgttggtgacgacgagagccggattgtactcattgctaagactaacgtggttgccggtgatgagttaacgtatgactacttgtttgatcctgatgagccagaggaaaacaaagtcccgtgcctatgtaaagctccaaactgccggaaatacatgaattaggaaggattatacaaatgaaatgaaaatcagatgacaagactcaagagtattgtttcttctccgcaaggagcactaaccccccatcccctcttctgcagggaatcaacagttacaccaaagctgtattttttatcaaaccaaaagaagag

SEQ ID NO: 19313 - DNA, 976 bp, Glycine max
  Clone ID: LIB3138-082-D7_FLI
ctggaagatgagttttctcgcgggaaggttagctgggaaagaagctgcgtactttttccaggaatccaaacaagccgtgggaaaattagcccaaaaaaaccctcttcccaagaccaacaacaacaaccttaactttcacgaaggatatgatcatgcggatgtacttcccgaggttctaaggcactctcttccttccaaagtgtttagaaatgatgaagccacctccttttccttctctgcctccaaatgggtccttcattccgaccccaaaacccaatcttccgtatcccctgatgctctcaatcctctgcgtgcttacctttccctgccccaagtcacctttggccccaaaaggtggcaactgcctgaagcagcaaacacggtttcagcctcaacagctaatgaatcgcgtctagacagatatgccacccatgttaacccggagaagttgaaagctgcaggtgaagggcttgcacatgttggaaaggcgtttgctgttgccactgcatttgtatttggtggtgctgcattggtatttggtatggtggcctccaagttagagctgcagaatatgagtgacatcaaaactaagggaaaagactatgttgagccaaaactagagaatatcaaagagcaatttgttcccttaaagatatgggctgagaatatgtcaaggaagtggcatgtggaaagggacgatgttaagcagaagactatcataaaggagctttcaaaaatttggggtgaaaaaagaacagattgagatctacaattttatttgttttcctcttactttagttgctttggaaatagtggcatggacatccaaacatagataatttggatgcagtatgcctctggcggttcttgtggctctgtaaatgttgaagcatgcaggagagtaaaaataatgcaaaatagtgtgtatgtcaataattaagatagtaataaattgcggaatgtggttgttttggtt

SEQ ID NO: 19314 - DNA, 912 bp, Glycine max
  Clone ID: LIB3138-082-G11_FLI
aaacaacagcaacaacaacaacaatagctacaaccatgtataacaacaaccaagtttcttcttcttctttttcttcagatgaaaccaacaataccaaagacgacaagcactatagaggggttagaagaaggccatgggggaagtatgctgcagaaatccgtgaccctaatagaaaaggctcaagggtgtggcttggaacctttgacacagccatagaagctgctaaggcttatgacaaagctgctttcaagatgagagggagcaaagccatattgaacttccctttggagattggatcagatcagtctaaagaagagtcatcatcatcatcatcatcagtttcaagcagcagcatcgtcatcaaggttggtgtgaagagagaaagagaggaagagagtgaaaggaagaacaactatgagaaaagtgagtttaacaacaatagtaatagtaataagcatgtgaagaaagaagagtgccctttgactccatcatgttggaaaggcttttgggacactgatgttatgggaacaatctttagtgtgcctcctttgtcaccactatctccactaatggttgtttgagattttgtggaacttttgctctttcaatgatgttttgaggtaaccaaactaaggggagagagagagatgatgctggtgattgtcctctctgatttaggttgctaatttgcctaaatcaaaatggtagtactaattaatctactaatagattaatttgcaagtgaatatatatatggatttgtataatgtaaatataggatagtactatgaagcaagatctttttgtttgttgaaaaaaaaaacaaaaaacccatgcttatcttcttcctttaggtaaaaaaatgtactgtacttgaagcaatattgaaatttgtttattcgtttattggag

SEQ ID NO: 19315 - DNA, 773 bp, Glycine max
  Clone ID: LIB3138-090-F6_FLI
gataaacttaattcattttactatcttctttttcgagtgtttattgaaaaatttattcttacatgacctaaattttgtgtttatggagcctaaattgatatatatcttgacctttcaattttcaggaactactatagatgcactcacaaatttgaccaaggttgccaagcaacaaaacaggtgcaaagagttcaagaggaaccaatcctatacaagaccacctactatggcctccacacttgcaagaacttggcaaaccctgagatcatacttgaccctatgtccccttcatcctcatccaagttccttagctttgacaactccttcccaaccccatcaaagcaagagtgcccctttctctcatcttctaatttgccatcatcagtgaaaggggagtgcaaggaggaggtccctccctcaacttcctccaatcattatctcatctcttctgacctcacttttgatagctcaccaaggcatcatgtcactctatcatcaacacttgactcagagtacaagagtgtggacatttcggatgtcttgtatgattctgctcagcttgatgatgcctttgaacccttccttgaatttagatgagcatgtccttgtttggtttgtgattttttttatataatttttactttagtgaaggcagtacaaaacaaaattgtctaatatttagtagtacttttcttagataaatgtaatatccgtgcttttattgtaaattttgtcattttcaatgaatgagaaatgatcataatgtttcaatg

SEQ ID NO: 19316 - DNA, 626 bp, Glycine max
  Clone ID: LIB3138-105-F7_FLI
ctggagctctgtggaagttactatggacacaagcaggtctgagggaaaaagggtcatgaggtacaaagaagaagatgatgataatgatgatgaagaagaagaagaggtggtgagtgagatgggttttgaagaagatggaaggaggaataagagagtaataagagatctctatggaaagagagggtccaaaggtggaggctcaataacaccttcttgccaagtggacaattgtgatgctgatctgagtgaagctaagcagtaccacagaagacacaaggtttgtgagtaccatgccaaggctccttccgtacacatggcagggctgcaacaaaggttttgccaacaatgtagcagattccatgtgctatcagaatttgatgactcaaagaggagttgtagaacgcggttggctgggcataatgagaggcgtcgcaaatatgcagttgactagctaccatggacaatgatttcttctatgggatggacattaataatcattgaggcaagcatgtgattaatgaaattaaatttcccattcaaatcttcataaatcattgttgctggtctctaaggatgctctctatcttctgtcaagattttcatatgcaaagatttttctgttagtt

SEQ ID NO: 19317 - DNA, 854 bp, Glycine max
  Clone ID: LIB3138-124-B7_FLI
gcttcttggaatgagccttcacaccacaaaagacagcgaagtagtaatgatgagttactttctgattctcaggatggagaactaggaaatcaagttcaaacactttcgcatcatttgagtttgccaagaacgtcgtcggatatgtttgctatggatagtttgcttcagttttcagattctgttccttgtaaaatcagagctaagagaggctttgctacacatcctcgaagcattgccgaaagggtgagaagaagtcggatcagtgaacgaataagaaaattgcaagagcttgttccaaacatggacaagcaaactagcacagcagagatgttggacttggctgtagactacataaaagatcttcagaaagaattcaagactctgaacgataaacgggctaaatgcaaatgtataaacatgcagaagtcagaagcagatcaagttgcttgagtttcttttgtacaggtaataaaaaggaactacgccaaacatgaataggacccgggttttatattttgacgtgctgaaaaatcaatagaacaaagttaatatgcagaatgccagcttttaactcttcatgccacattgtgtattttgagttaacgggagttccagccacacagacaataaatcataattttgtatacaaaaattctaatgaattaattttagcttatttttccccgtgctcctaaacttatcaaagacttcccagagtttggattaggaggaaaatttgtggtttctttctttttattattacaaaacaatttagatgagttggatttcaggaactcaccaagctaaacagcttttaagactcaaagaatgagatatgaatttgtttttttatc

SEQ ID NO: 19318 - DNA, 438 bp, Glycine max
  Clone ID: LIB3138-126-A1_FLI
gtttcgtggagcagaggaaacaacagcttcgttgtgtgggatcctcaggctttttccatcactcttctccccagatacttcaagcacaacaacttctccagctttgtcagacaactcaacacctatgggtttagaaaggtagatccggataagtgggagtttgctaatgaagggtttcttagaggacagaagcatctattgaagaacataaggagaaagaagacattaactaatcaacaacaagctcttccaatagaccattgtgttgaagtggggaggtttggatcattagatggtgaagttgatgcattgagacgtgacaagcaagttctcatggtggagctagtgaagctcagacaacaacagcagaacacaagatcctttctccattccctttgttgaaccaattgttgcaagaagttggggttcctagatcgc

SEQ ID NO: 19319 - DNA, 1378 bp, Glycine max
  Clone ID: LIB3138-126-A8_FLI
atcagcatcttattctgtttattaatttcttttgctgttgtatattttatagtgcaacaccaccacctctccaggcaggaacattctcacgtggtgtagtgactatgcgttgtgatatatcaacatgtagttctgctcatatatcacttttggggtctggtagtgcagacacttgttttaatgatcaggcatgggtgaatttgctgccagtgtttgacattttacatatatgatcttttaaactttttacttacctatcacttattttgggtatatcctcagcttttggagaatcatattaaaaaagagctgattgagaagagtcaacttgtccaggcatttcctaatcatcaacaaagtaaagcaccttcatccgagcctcgaagatcagcctcagtagcgtgtggatctagtgtgtttgaagtttgtatgcgagttcctgcatgggcttcacaggttaattgttgtttctcaaggtttcgtctgtcggatatagctttctaaaatataatttaatggatcttaaaaattatttttaatcaatgaaagggcctagatggaggcttttgctaaagatatttgtgacttctgctttgccattatattttccagttgactggtttatgtattttagtccaattgttaggcctataacagtagtttgtttactttgttattgttccaattgttctgtttttcacggaagtgacggaacatatgaaaatagcctccacattgtattggcttgatcttttagcaatttcatgctgtaatgacatgacccttgttagttccttttttctttttgaataatgaaaccttatcttttgattaatggtttttgatatttgtgcacaggttctgagacagcttgcacccaatttggcataccgcagccttgttatgttgggaattgctagtattcaggcattgccagttgcatcttttagtaaagatgatgccgagcgccttcttttcttttgtactaggcaggagaaagaaaactgtcctaaggatcatgttttctctggtattccaagttggctgaagcctccaccacccagtcgaaaaagatctgaaccatgctctagttcaaagtctattaatgctagtggccggggagttgaagctattggcagtcatagacagaaatttattgttgcttctatgaggccaatccctcactctaatagacacaagattctccccttttctggattgtctgagggtacaagatatgatggagaccatggaaaatcaaatctaccacttgctcttattaagcataatgtttcaggccctacttcagttacaaataggaaatctgtgtcgaattcatttcaagctcaccagattatttctttgaatccactaccta

SEQ ID NO: 19320 - DNA, 943 bp, Glycine max
  Clone ID: LIB3138-129-C11_FLI
aacctcaccacgccatcgccgttttccctcgacacaaccgaagcgctcttccatcgacacctccaacacctccaacactctcttgaacagcagcaatcatggccaactacctcgcctccatcttcggtaccgagcaggacaaggtcaattgctccttctactacaagattggcgcctgccgtcacggcgaccgctgctccagaaaacacgtcaagccgtcgtactcgcagactatcctgctgcccaacctctaccagaacccggcgtacgaccccaagaacaagatgaacccgcagcagatgcagatgcactttgatgcattttacgaggacatctggtgcgagctgtgccagtatggacttgctgaagagttggttgtttgcgacaacaacaatgaccatctcatcggcaatgtctacgtccgattcaagtacgaagaagacgcgcaaaaagcctgcgacgccctcaactcgcgctggtatgctggtcgtcccatctactgcgaactctcgcccgtgaccgatttccgcgaagcctgttgtcgtctgaacagtggcgaaggctgcgtccgcggcggcttctgcaactttattcatcgcaaggaaccaacggccgagctggacagagagctggacatgtgcacgcgcaagtggttgaaggagcgtggcagggacgcgaggagtatgtcaaggagtcctacaccgcctgcgacgaagaacaggttctagggtagatatagagtgggaagcgtgagacacgggctgaatacgaagggcgttttggtgttatacatgctcgcacagtttgggacatgttggttgatacctcgatatccgtagcgggcatggcgttgcaaattggcatttgtaaattagctttggtaaaatagtgaagtgtggataataggctagactaggctacgcaaaagcgatcatgtcagttc

SEQ ID NO: 19321 - DNA, 850 bp, Glycine max
  Clone ID: LIB3138-130-B4_FLI
cgagagctaagtaatgttgaaagtgatggcggtgtaactgacctaagttttggatagatcagccgcgagatgatcgagctgcagggcggcgaaatcggcgtcagatctcgacctggaaaaggcgctacattcgccttctacatcgccgctcgcactgcagatgcgccgccgccgtccgtgcaacaaagtctctcttctccggcgctaatgtcgggaagacgaccgtcggagaataccagagccagatattccatcctggtggtggaagacaacctggtcaaccagaagatcttgagaatgcagctccaaaagctcggccacgaggtgcacgtcgtctcccacggccgcgaagccctggatttcctggaaactacttcctgctgggaaggcggtactgccagtcacacgcacgtttcgattatactcatggacattgagatgcccgtaatgaacgggctggaatgcacgaggagaatccgagaagctgagagcgaaggccgcgttaagcggcatttacctattatcgcggtgtctgcgaatgcccgtgagggccaggtgcgttatgcgatggagtgcggagtggacgacgcgattagcaagcctttccgcgtggctgatctgatgccgattatcgagcgattggctttggtttagaaatgatgaaaagcgatattccggacggcgaaagcgatgcgcccttgcagtcaacgcgtgcgtacgattgtgcgcagctgcgcacaatcttgtatacaaaacaacgcgtcggtatgcattgggaggaaatacatttgctggtggtagaccatcaggcacagacatagatcacgaatccatatacgacttttgagag

SEQ ID NO: 19322 - DNA, 1628 bp, Glycine max
  Clone ID: LIB3139-006-D8_FLI
cttagaaggaaggggcagagagtggttgtaagaaaaggaaatgaagaagaaggaaataatggtgatggttccgtatccggcacagggacacgttagtcccatgcaaaagctaggctgggaatttgtgaggcaggggttcgaggctgtgattgtgatccccaaatttattcacaggcagatagcagagcttcagaaaaatgatgagaatgagatgataaagtgggtggctctgccagatcatgaagaagaagaaggaagcaacccaccagaagatttcttcgccatagaatcggccatggagaacagcagcatcacaactcacttggaagcactgctccatagcctggccgcagagggaggtcacgtggcctgcttggtggttgacttattggcatcttgggccatacaagtatccgataggcttgccatcccttgtgctggcttttggcccgccatgttcgccacatacctcttcatttctgccatacctcactttctccaaactcgcctcatttcaaactctggacttccacaacacgagggaaaatttagccttgaacctgagctgccggtgatttcaactgaggatctgccatggcttgtgggaacagacgctgcaaggaaagcaagatttaaattttggaaaagaactttggagagatcaagtgctctgaaatggctcctggtgaattcctttcccgatgaaagcaaactggaattggcaaacaacaagaagtttacagcttgtcgacgagtgttgccaataggccctatttgtaattgtaggaatgatgagttgagaaaaagtgtgagcttttgggaagaagatatgagctgcttgaagtggctagaaaagcagaaggccaagtcagttgtatacatctcattcggaagttgggtgagtcccattggggaagcaaagttgaaaaatttagcactggcactcgaggcttcagggaggcctttcatttgggtattgaggtccacttggcgtcatggcttaccacttgggtttatggaaagggttgtgaagcaaggcagaggcatgatggtttcttgggcaccacagaatcagattttgcagcataactctgtggcttgttatatcacacactgcggctggaattccatattggaggctttacagttccaaaagaaattgctttgctacccggtggcaggggaccagtctgtcaactgtgcctatgttgttcaggtttggagggtaggtttaaaactcaatggccttgaaccaaaggatgttgaagaaggacttgtaagggtcatacaagataaggaaatggatacccggttaaggatattgaatcaaagaatcatgggtaccaataataagacgggggctctcatgttgaaaaccttcctccaagatctcaagaaggcaagctctacagcaactacatgaattattactccatgcaggtctttctgaagaccctcacccaaaaaattatttctctatgttaaggcattgtaaaaatcagaagaataatcgacactccaccttgtctttaggctctgtgatcgccatgtctagttaactcactagaatctacgcatatttttatgagttattataataattttctcttttcaagtgtatttttatc

SEQ ID NO: 19323 - DNA, 1481 bp, Glycine max
  Clone ID: LIB3139-011-C4_FLI
atagaagaatatgtggtggctgcaaccaagagataatgtatggaaattgtttgggctgcatggatacttattttcacccaaattgttttcgctgtcactcttgtggttaccccattacagagcgtgagttttccttgtcagggaagcatccatatcacaagtcatgttttaaagagttgaatcatccaaaatgtgaagtttgcttccaatttattcctataaatgctgctggtttgattgagtataggtgccaccccttttggtcccaaattattgtccatctcatgaatatgataatacagctcgctgctgtagttgtgaaagattggagcctttgaacataaaatactatagactagaagatggacggagtttgtgtttagagtgcatggaatctgctataatggataccggtgattgccagcccctttaccattctatcagagattactatgaaggaatgcagatgagaatagatcaacaaattcccatgcttctagttgagagagaagcacttaatgaagctattgtaggggagaaaaatggttttcatcacttttaccagaaacaagaggcttatgcctttcagaagagcagactgtcaccagtatacatagaagaccaagaattggaggccatcgactaatcgggatgcgaactcaacctcaaaaactgactagaaaatgtgaagttacagcaattcttgttctatatggtcttcctaggtaactagtggacaatggaaactttgctttttgtccccttcgaattacagctgattgattcccttttgaatataattgtgagttcagatatttttccaatacccataagacacagtaccaatgacagactataatgttactttcttctcattgatgatgttcaaacttcattataggagttctcatattttaatgggatgcaggttactcacaggtgctatacttgcccatgagttgatgcatgcatggctacgccttaatggttatcgcaaccttaatcctgaagtagaggaaggcatttgtcaggttctttcgtatatgtggcttgagtcagaagtaatgcctagctttcaaaacatgccatcaacatccacaagtgctgcctcttcctactcctcctcaaagaagggtgcaaagtctcatgttgaaaataaattgggtgaatttttcaagaatcagattgccaatgattcttccccagcttatggtggtggctttagagctgctaatgaagctgttaatagatatggtttgcgtagaacacttgaccatattcattggactggttttttcccagtgtaataagtatggatagaagtgctttgttttcattttctttggttctacaagtggatggaccaggaccaattcaaagtaaagacagaagcttggacaacttctgatatttgggtcctacgaggaagtccaagtctaatttgaccaaaaaataaataaatgcatgacaagttcgtattc

SEQ ID NO: 19324 - DNA, 1182 bp, Glycine max
  Clone ID: LIB3139-020-D12_FLI
tctgcatccatcggaaaagcgcaggccagcgagttcgggactcactctattgagtcctccggcaacgagttcgccgcgttctccggtggcacaaccggaaccttgtcgctcgccgttgcactgagctccgagaaggccgttgtcgcggcggagtccaatagctcgaagaagatcgtggataccttcggccagcggacttctatttacagaggtgttactaggcaccgatggacaggaagatatgaagcgcatctatgggacaatagttgcagaagggagggtcaagccagaaaagggcgtcaagtttatttgggtggatatgataaggaagaaaaggccgcgagagcttatgatttggcagctctaaagtactggggtcccactgctaccaccaacttccctgtttccaattattcgaaggaagtggaggagatgaaacatgtaacaaagcaagaatttattgcatcattgcggaggaaaagtagtggtttctccaggggagcttccatatacagaggtgttacaaggcatcatcaacagggtaggtggcaagcaagaattggccgtgtagctggaaacaaagatttatacttgggaacattcgcaaccgaggaggaagcagcagaggcatatgatattgcagccataaagttcagaggtgcaaacgcggtaaccaactttgagatgaatagatatgatgtggaagctataatgaagagttctcttccagtgggtggggcagcaaaacgcttgaggctttcccttgaatcagagcagaaagctcctcctgtgaacagcagcagtcagcagcagaatccacagtgtggtaacgtgagtggtagcatcaatttctcagccattcatcagccaattgcttcaatcccttgtggaattccgtttgattcaacaacagcatattatcctcacaaccttttccaacattttcaccctaccaacgctggtgcagcagcgtctgctgttacttctgccaatgcaaccgcactaactgcactgccagcatcagcagcaactgagttctttatttggcctcatcagtcttattgatctaatcaaaactagaatcaaaatctttttctaatttcctggttatgctaacaaatcaaacgccatagtctctggcacagtttagctgacccccctcctctattattaacctaaact

SEQ ID NO: 19325 - DNA, 692 bp, Glycine max
  Clone ID: LIB3139-021-F4_FLI
gcgcttcctcccaacgggaaaatcgccaaggacgccaaggaaaccgtgcaggaatgcgtctccgagttcatcagcttcgtcaccagcgaagcgagcgataagtgtcagagagagaagaggaagaccatcaacggcgacgatttgctttgggctatgaccactttaggtttcgaggagtatattgatccgctcaaggtttacctcgccgcttacagagagattgagggtgattcaaagggttcggccaagggtggagatgcatctgctaagagagatgtttatcagagtcctaatggccaggttgctcatcaaggttctttctcacaaggtgttaattatacgaattcttagccccaggctcaacatatgatagttccgatgcaaggccaagagtagatattgatcctctccttcagtgtttgacatgtgtgatctaaatgccagtggaacttttatgtcaatatgtgcccttggtatattgaatgcattttatgttatgtaaacactacatgcggggatgttggttcttgtgaccagatattatttattaagacttacatttatctttggaaaagaatcattattcataagttatattgtaaattctggaacaatgcttgtctgattccatcaatcgtcctggtaacgattttatgtacctgattggaagcataaattggtatattctttcc

SEQ ID NO: 19326 - DNA, 1896 bp, Glycine max
  Clone ID: LIB3139-022-A3_FLI
ccccactttctataccattgccgtattgaccttttttgtattacaaccggccgaacacgacaacagcgccaatacaactttactttatacctaaacaccaaagtggaaacctacactacagttcaatcgaatctaccttgagctgtgctggatctcttcttcttcttcttctttcaccttaggctaccgagttaatggatccgagaggtgtactgatattagtggcggttctagttgcggaaattggctctgtcgccaacggaaatttagtgttcccggtggagcgtcggaaaaggagcctaagcgctgtcagagctcacgacgttcgccgtcgcggtcgaattctctccgccgtggatctcaacctcggcggcaatggtctccctaccgaaaccggtttgtattttacaaaacttgggcttggctctcctccgagggattattatgtgcaagttgatacaggaagtgacattctttgggtgaattgtgttgagtgctccagatgtcccaggaaaagtgatcttggtatagatttgactctttatgacccgaagggctccgaaacttcagaggtggtttcttgtgaccaagatttttgctctgccacgtttgacggtccaattcctggttgcaagtctgaaattccatgcccctacagcataacttacggagacggaagtgcaactactggatactatgtccaggattatcttacttataaccgtatcaatggcaatcttcgtacttcgccacaaaatagcagcattatttttgggtgtggtgctgtacaatctgggacattgggttcatcttctgaagaagcccttgatggaataattggttttggacaagcaaattcttctgtgctttcacagcttgccgcatctggaaaggtgaaaaaaatattttcacactgtcttgacaatgttcgtggtggtggaatatttgccattggggaagtggtggaaccaaaaatcagtacaactccgttggtaccaagaatggcacactacaacgtggttttgaagagtattgaggttgatacagatattctacagcttccctcagatatatttgattctgtaaatgggaagggtacagtaatagatagtggaacaaccttggcttatcttcctgccatagtttatgatgaactgattcaaaaggttttggcccggcagcctggactgaaattatatcttgttgagcaacaatttcgttgttttctgtataccggaaatgttgatcgtggatttccagttgtcaagcttcattttaaggattctctttctctgacagtttatcctcatgactacctgttccagtttaaagatggtatctggtgtattggctggcagagaagtgtagcacaaacaaagaatggaaaggacatgacccttcttggagatttggtgctatctaacaaactagtgatatatgatcttgaaaatatggtcattggatggactgactacaattgctcttccagcattaaagtgaaggatgaagcgactggaatagtacatacagtggttgcacacaatatttcttcagcttcgaccttatttattggaagaatattgactttctttttgttgctaactgccatgctaaacaattaaattaacttggtcttgatataatagggatgacattcattcgattttgttgtaccataattcctgtgcagtgtggttgatatggtatagtcaatcattactcgtgtagatagaattgaaaaaggggcaaatatttttaagtttttttttcagtatttttttgtattattttttaaattgattaccaatgaatgtattgccttgactttttatgacgatgacgatggatattgctgttcattcaaaaggtagttaaataatacaatttacttgtagc

SEQ ID NO: 19327 - DNA, 609 bp, Glycine max
  Clone ID: LIB3139-022-C10_FLI
cttctttttctttcttctttatctcaattgtttgtggttactgtgcagattaatggggaggttgtttgtggtgaatctggaagggaagatctatagctgcaaacactgccatacccatcttgcgctttacgatgacatctactccaggacattccattgcagacatgggaaagcttatctcttcaataaggttgtgaatgtttctattggcgaaatggaggacagaccgatgatgactgggttacataccgtggctgacattttctgtgtgggttgtggatcaatcgtgggttggaaatatgagactgcctatgaaaaaaaccagaagtacaaggaaggaaaatcagtgcttgaacggtacaaagtgtcaggtcctgatggaagcaattattggatcagcaatgaggcacatgttggtggaagtgatgcagatgatgcttagtcatcctaccattcccaattaaccgtatttggatgaagaaagcctttcaagtgccctgtctctgactctctctcactctcttaaatggaatgtattgaaataaaagactgctgaaaaaaatgtattataaccaaaactttgttggttgaatttactctagtttcttc

SEQ ID NO: 19328 - DNA, 1004 bp, Glycine max
  Clone ID: LIB3139-024-B9_FLI
aagttactcaccttcaccttcaccttcaactgccaactgcaaacatctaactactttcaggttcacttagccgagaatcagagactaatcactagagataccgagacctacttttcctcacatcaccaccaacatgcgttccagcaacggtacatcaagcagcagggcctccaacggtaacacagggcgccaccctgtttaccgtggagtgaggcgtaggagtagtggtaaatgggtttctgaaatccgtgagcccaaaaaacctaacaggatttggttagggacatttgccacccctgaaatggctgctattgcctatgacgtggcagcgcttgctcttaagggtaaggatgctgagctcaacttccctaactcggcttcctccctccctatccctgcatcatctgcagctcacgacattcagatggctgcagcactagctgcaaccgctgtcggagcagcgaatgatgcactggaaggaagccaaggaggaaatgtttcggtttcattggcggaagagttttcagggggaaacttaaatcactttgtggatgaggacttgatctttgacatgccgaatattctggtcaatatggctgaaggaatgctactcagccctcctcgttttgataattttgctgctaccgactatgaatacatggatgaagatcctaccctctgggggttccctaattactagttactacccatgggataattaaaagactttttatattactaatgcaaaaatcttaagaaggaaaggtaagtaagctgtaataataaattatgggagaactcttacatccagactttgcttagacaccaggaaagggtatggtgtgtgtgtggaaagtgtatctttctttccatatgttttttttccacctagtgtacagtggtaccttctagctatagtgaggtttgctgctgttgcacctcaaactcaaatatgtatgtaatgtttatataatgtgttaattaaataatcttttttggtcatt

SEQ ID NO: 19329 - DNA, 806 bp, Glycine max
  Clone ID: LIB3139-024-G11_FLI
gacacagatgactcaagtctcattggatatgcctggcacctttggagtgagcagagagtaatggagcttgttgatccttcccttggtgattcaattcctaagactaaagcgttgaggttcatacaaatagggatgttatgcgtgcaagattcagcatctcgtagaccaaacatgtcatctgtgttgttgatgctgggaagtgaatcaacagctctacctttgcctaagcaacctttgctcactacttccatgaggatacttgatgatggagaatcttatagcgaaggccttgatgtgtcaaatgatttgacagtttcaatggtgacaacagggagatagaagtgttaattacattttttggtttttcccattctgtttagctttgtttagactcttttcaatctacataagttcacagcaaaaagttttccttttaattttacctcccatttgaaacaagcctcttaatattgagtctattgtatatactataatttataaaccaaaatatcttttgagagtccaaaaaagtgccttgattcctggtcattgaaagaattcttctaggttgaaggttctcatgtgaggagatcattggaaaagtagcggaatctgtggttagcagttgcattttgattagttttttgaggcgtgattttgatatactatcatgtataaagttgtatattgttcacaattattatattcttgggagagcatcttcatttttaaatgtctctttgttgaactcttgtatgactagtttcgtacatgtctccaaatggcatttgtattttgattttttt

SEQ ID NO: 19330 - DNA, 1194 bp, Glycine max
  Clone ID: LIB3139-027-B1_FLI
ctcaatttgcttaattatagaggtgtgaattgttgtttgaaagtcacaagcaatggtgaaggacactgcgtattatgacatattaggtgtcaattatgatgcatctgctgcagagatcaagaaagcttattatgtcaaggctagaattgttcaccccgataaaaatcctgaggatcctaaggccgcagaaaactttcagagattccatgatggaccctacaactgtatttggaatgatttttggaagtgaattttttgaagaatatattggacaacttgcactggcttctttagcatctatagaaattgaggaagactcacaggatcctgaagttttgaggcagagaattcaagaaaagatgaaagcttggcagaaggaaagggagcaaaagctttcaacatttctgaaagatcgcctgcaaccatttgttgatggtcgagaagatgaatttacagcatgggcaaaatcagaagcacgtagtctttctaaagctgcttttggagaagccatgctacatacaattggttacatctacacacgaaaagctgcaagagaacttgggaaggatatacggtatatgaacgttccctttttggcagagtgggtgcgaggcaaaggacactgtataaaatcacaagtaacagcagcctcaggagctgtctccctaattcaaatacaagaagaactcaagaagctaaatcaaggagaaaacaaagaagaaagcatagtcaaagctattgaagataagaaggatgccatgattaattctctatggcaaatcaatgtgattgatattgaatcaactctgtcacatgtttgccaaactgttcttaaagatcctagtgcctccaaagatgttctgaagtctcgggccaaagcattgaaaaagttaggaactatctttcaaggtgctaagattgcttataacagagaaaacagcctacgcagagaaagtggcaaaacaccagatgctgcttcctcatcatagtcatctgttcagtttgtctgatatggttatgtattgagtagtattcttatgaccttctggctctcagtggattctgaacattgtttcttacagtgctgttagtaggcattgtatgtaatttcacttggactaacctgccataattacacgcgtttgtacttaattattatcatctagtgataattgatctcattttactcttttt

SEQ ID NO: 19331 - DNA, 1980 bp, Glycine max
  Clone ID: LIB3139-031-H3_FLI
ctccaaggtttttccataactccaatccctcatcgcccaagtcgccatcgagtttttcacttctcaaatcaactctacgactatccaaaagtcgatgtggaatctgtatgcagagcgcgaggagtgggcaaggaacagcaattttcacagcggaatgctctcacacgtttcacttcccttgcatagtgaagaagcacccgatcgtcacgtgccccgtgtgcaacactagctggaaggagcttccggtgctctccatcaacaacaacaacaacgacaagagcgacaagagaggcttcaaggtctacaacgacgacgagcctctcatgtctccaacttcactctctcgcttcaatcctattcccgagtcagaaaacgaagacgaagaacaagaacaagataacattaacacggagtttaagggctttcatgtcaatccacttcccaatttacattcaacgacggtgattaggaggaacctccagctatcgttgctgccggaggcggccattgtcgccgccaaccgaaactacgagagttacgtcgtcgttttgaagctcaagccgccgcacgtgacgaaaacgtcgcgtcgtgctccaattgacctcatcgccgtgctcgacgtcggtggcgccatgtccggcagcaagctccgtctcatgaaaagctccatgcggcaagtgatctcgtcgctccgtccaaccgatcgtctttccatcgtcgcattctcggccggatccaagcggctgcttccgctgcggcgaatgaccggtggcggccagcggtcagcgcggcggatcgtcgacgcgctcgccgcgattgatcaaacaagagaaggaactccggtgaagaacgacgccgtgaaaaaagccgcgaaagttctcgaggatcgccgcgagaagaacgccgtggcgagcattgtagtcctctccgatctgaacgactcacgcgctggaaacaacatgcacaaaccctcgcttgtttccaccacgcggcttgcccacctcgaagtcccagtgcacgcggtgcggttgggagagtgttcccacgcgctctcagacgacgcgctggcgaatttcgtgggaggtttgttgaacgtggtggctcaggacgttaggattcagttagaggtggtgtcgcgatcccgcgctgtggagattgctggcgtgtattcattatcgggtcgacccgtttctctcgggtcatcggattggatccgactcggtgatctctacgcggaggaagagagagaattcctcgtggaactcaaagtgcctgcggcttccgctgggtcccaccacgtcctgaccgtacgatcctcctatcggaaccccctcactcgtgagcctttgattcccgttgagcaggcaatgctcgttccgcgtccccacgccgtacgatcctcgtgcgccaagatcgaacgcttacggaacctccacgtcactgcgcgagccgtggccgaatcttcccggctcgctgaacataatgatctctctggagctcatcacttgctctcttcggctcgcgcgcttctcttgcagtcaagtaagccggaagaggagtttctccgctggctcgaagccgagcaagccgagctgcaacggcgcagacagaggcaaacacagagaaacagtcgtgttgaagagaaggtggagccgcttacgccgacttcggcttggcgggctgctgagaggttggctaaagtggctatcatgagaaagtctatgaacagagttagtgacttgcatggatttgagaatgccagattttagttgtaatttttattttaaaaatgttattgtgcatagatgaaaaggaattattaatagagaattgttttttagaaatgagcatgagacaaggagtagtactagacgactagaacctttctgggttaataaggaaaggaagcgatagtgatggcaaagtgaacccacatacatgtatgacttgattgggcattgtggctagctgtttcttctc

SEQ ID NO: 19332 - DNA, 1331 bp, Glycine max
  Clone ID: LIB3139-034-E11_FLI
aaatatttatatgtacgtatatacatacatacacacagagacatggagaacaataatcatcatgccatggctgcaggtgctagtagtgattcaaacactagtgatcacaccaccccaatatcttcttcttgtgttaatgataacaacaacaataagttatacaaaggggtgagaaagcgaaagtgggggaaatgggtttctgaaatcaggcttcccaatagccgtgaacgaatatggctagggtcttatgactctcctgaaaaggcagcacgagccttcgatgctgccctttactgtctacgtggccgccatgccaagttcaatttccccaacacaccttgcaacatggacactgctaccaatgctcctcctaaccaatctcttaccccacaagagattcaagaggttgctgctaagttcgcaaatcaggtgtccccgctactacaaaaacctcaagaacaacctcaacctcaacgtagtagtgatggtggtggcggtggtgctaattcttcatcgtttggatcaaagttgttatgtaaatcagacagcatagcagagagtagtactactagtactactactaattgtacccccaccaccactgcctcgtcatgttctgctactatgtcctaatgtgatggaacggagcaagtggaccgtggggacatgatggattggacattcttgaacgtctttgatttctccaatgaggtggtgcttcctgctgttggatccgactataatgatctctataattctgagctacacaagatgcactcagattcaggtgagttattgtattctactccttttgagggttacgaacaattaattgaagctgatcatgatgatgatgatcctttttctcaccaatcattcctttggaattggaacttttgatcatcatatcatcactcgctactgcatgtgctgctagaatatgatgactactagttaaaattacttgccccagcctaaatatataataaagcatccttgatcttttgtatatatgatatgtatatgggggtggctccaagtatataacaataacaagggcaagacaagacacaggctatgtcagaccatatatatattccttaccataattaagtatatgcctagctatatggctagctagtgacctcggtttttctagtgctatctattccatagattagcacaggctaccaactatatagtatcgatcgatagatgttgtcttactatatgtttccccttggcaataaaatatttgtactttataggttgttttatgtatactggttcaagtatatatttatacctaagtatatatatattgatctgtg

SEQ ID NO: 19333 - DNA, 1173 bp, Glycine max
  Clone ID: LIB3139-037-B3_FLI
cgagcaccagttttcccatcattgcaattgccataataggaataatggccacagcattcttgcttgtgagctactacatctttgtgatcaagtgctgcctcaattggcatcgaattgatgttctgagacgtttctctccatctagaaggcgtgaagatccaccaccaacatactcaccagccacagatactcgtggactagatgaggcactgatccggttaatcccagtgactcaatacaaagcacaacaaggggatgatagagactttggagagagaagattctgcgaatgcgctgtttgcttgaatgagtttcaagaagatgagaagctgagggttataccaaattgcagccatgtgtttcacattgattgcatagatgtttggcttcagagcaatgccaattgccctctttgtagaacaagcatttccttgacaagcagattccacattgatcagcttctcaccctaaggccttcttcttcttcttaccctcatgatcaaaccccacctagggaaaacctcattggtggtgatgaagattttgttgtgattgaattgggtagtgatcatgatagaagccagaatttgcaagaaagaggcaatgctttggagttaccaacatgtcctattagtccttcttcaccaaggaagctattggaacatagaaatgtgcagaagaagaaagcaatgaaactgcagaaagtgacaagcatgggggatgagtgtattgatattagagccaaagatgaccagtttttctcagtgcaaccaatcagaaggtctttctccatggactcatcaggggatagacggttctatttagcagttcaagaagctctgaggaatcagaactggcaagtcaatgaggtcaactccattgaaggttgcagtggaattggtagtagagctaagaggtcattcttttcctttggacatggaagtagatccaggagttctgtgcaacctgtttctttggacccctgaaatttctcttttgtccctcgtcccccctttccattatgtttgcaacttgcaaggttcttaggtctttaccttttttctttttattcttttggtgaggatgagatagagatgttactatgttagatgtatgaacaggtcataggattgtataacacacaaatattcaaatggatttaattcttaactt

SEQ ID NO: 19334 - DNA, 1082 bp, Glycine max
  Clone ID: LIB3139-039-C10_FLI
ccacaaacaacaaggttggttcaacttgtgtgaagggattggaacatggaaaatcttggtggttctagtcgtaggaaagcaattgaggagcttcttagagggcgtgattctgcccaacaacttaagagtgtcatcaatgggacttatgatgatggatcagccaccccatttgctcaacaacttgtgaaagaggtgctcatgtccttcacaaactccctcttgtttttgcacaacaaccccacttctgaatcacatcatgtcttcaatgttcaagtatgggactctcccaagtctgaggactctcaagagagcaattgcaaaagctccaccattaaggaaccaagagggtgctacaagagaagaagaactgaacaaacatgggagaaggaatctgaagctccaattgatgacggccatcactggagaaagtatggccaaaaggagatcctgaatgccaaattccctaggaactactataggtgcactcacaaatttgaccaaggttgccaagcaacaaaacaggtgcaaagagttcaagaggaaccaatcctattcaaaaccacctactatgggcaccatacttgcaagaactcggcaaaccctgatatcatacttgaccccatgtccccttcatcctcttccaagttccttagctttgacaactccttttcaaccccatccaagcaagagtgcccctttctctcatcttccaataatttcccatcatcatcatcagtgaaaagggagtgcaaggaggaggtccctccctcaatttcctccaatgattacctcatctcttctgacctcacttttgatagctcaccaaggcatcatgtcactctatcatcaacacttgactctgagtacaagagtgtggacatttcggatgtcttgtatgattctgcccagcttgattttgtctttgaacccttccttgaaattagatgagcatgtccttgttttggtttgtgatttttttttttaaatttaacctttacttcagcgaaggcagtgcaaaacaaattgtgtaatatatagttgtacttttcttagataaatgttatatccgtgcttttgttgtc

SEQ ID NO: 19335 - DNA, 2485 bp, Glycine max
  Clone ID: LIB3139-040-D1_FLI
ggagccgggaagaggagcatgaaagcagatctggcagtgacaacatggatggtggttctggtgatgattttgatgctgccgacaacccaccgaggaaaaaacgctatcaccgacacactcctcagcaaattcaagagcttgaatcgctcttcaaggagtgtcctcacccggatgagaagcaaaggcttgaactcagcagaaggcttaatttggaaacgaggcaagtaaagttttggttccaaaatcgaagaacacaaatgaagacacaattggaacggcacgagaactcgctgctaaggcaagagaatgacaagcttagagctgaaaacatgtctatgagggaagccatgagaaatcccatatgctcaaactgtggaggtcctgctatgatcggtgaaatttcactcgaagaacagcacctcagaattgagaatgctagattgaaagatgaactagaccgtgtttgtgcactcgctggcaagtttctgggtcgacccgtttcttctctaacaagctcaattgggcctccaatgccaaactcaagtttggagcttggtgttgggagcaatggttttggacaaggtttaagcactgtgccttcaacaatgcctgattttggggttggaatatcaagccctttagccatggtgtcaccttcaagtactagaccaaccacaacagcattggtgactccttctggctttgacaacagatcaattgagaggtctattgttcttgaacttgctttggctgcaatggatgagttggtgaagatggcacaaactggtgagcctctttggatcagaagcttggaagggggaagagaaattctcaaccatgaggagtacacaaggactatcactccttgcattggcttgagacccaatggctttgtcactgaggcttctagacaaactggaatggtcatcataaacagcttggcccttgttgaaacattaatggactcaaatcgttggtcagagatgttcccttgtatgattgctagaacctcaaccgctgaagttatatctaatggaataaatggaactagaaatggtgcccttcagctaatgcatgctgagcttcaagttctttctcccttggttcctgttcgtgaggtcaattttctacgcttttgcaagcagcacgcagaggggttatgggcagtggtagatgtgtccatagataccatccgagaaacttctggagcacccacttttgtgaactgtaggaggcttccttctggttgcgtggtgcaagatatgccaaatggttactctaaggtgacatgggtggaacatgcagaatacgacgaaagccaaattcaccagctctttagacccttgttgagctcaggcatggggtttggtgcacaacgttgggttaccactcttcaacgccaatgcgagtgcctagccattctaatgtcctcagcagctccctctagagaacattcagcaataagctcaggtggaaggagaagcatgttgaagctggcacatcgcatgacgaacaatttctgttcgggtgtgtgtgcctccacagtgcacaagtggaacaagctgaacgcaggaaacgtgggggaggacgtgagggtgatgaccaggaagagtgtggacgacccgggcgagccgcccgggatcgtcctaagcgctgccacctcagtgtggcttcccgtctcgtcgcagaggctctttgacttcctccgcgacgagcggctccgaagcgagtgggatatcctctccaacggtggacccatgcaagagatggctcacattgcaaagggacaagaccatgctaactgtgtctccctccttagagccagtgctataaatgcgaaccagagcagcatgttgattttgcaggagacgtgcaccgacgcgtcgggctcgcttgtggtgtacgcgccggtggacattccggcgatgcacgtcgtgatgaacggcggcgactctgcttacgtggcgcttctcccgtcagggttcgccatcgtgcccgacgggtccggcgaggagcaaggtggcgcgtcgcagcagagggcggcgagtgggtgtcttctcacggtggcgtttcagatccttgtgaacagccttccgacggcgaagctcacggtggagtcggtggagacggtgaacaacctcatctcctgcaccgtgcagaagataaaatcagctcttcattgcgagagctgaaaccttttggggctgtctattattattattattattattattattttctttttgagaatttaggtgacattttgtacttaaaagtggggataggtggcgcgtgttaaggacccaaggggtgggggtgtttagtcaaaaacgaaccgcgcgtgggtgaaaaaagtccttgcatggtgatgaggatccgagactttttcgggtcgggtttggatctttaacacaaagcaagggtggtggttcgggtattgactcgggtcgaccccttttgtctgctctatactagtagcagcagt

SEQ ID NO: 19336 - DNA, 1083 bp, Glycine max
  Clone ID: LIB3139-041-A5_FLI
ttcaaatcctcctttctattaatctgaaacaagttattagtcatgaagatccagtgcgacgtgtgtaacaaacagcaggcatcgttgttctgcaccgccgacgaagccgccctatgcgacggctgcgaccaccgcgtccaccacgccaacaagctcgcctccaaacaccaacgcttctccctcagccacccctctgcaaaacattttcctctctgcgatgtttgccaggagagaagagcctttgtgttttgtcagcaagatagagcgattctgtgcaaagagtgtgacgtgcccgttcattctgccaacgacctcaccaagaaccataacaggtttcttctcactgggattaagttttctgccctcgattctccttcaacacctcctaagcctgcaggtggaaactccctaacaaatcaacaaccacaacaacaaactggtttcacaggtagcagcatatcagaatacttgataaacactatcccaggcatggagttcgaagatttcctcgattcacattctcttccctttgcttgctccaagaatagtgatgacatgatgttgtcgatgtttggtgagggaaacatggtttcgttctcagccggagggatctgggttcctcaagcaccatcttcagtacaaatggatcagcagagtgggtacaaagacacatgggaaactagcattagatcaagttttggggatgatagtttattagttccacagatgactcctcccagcaatgtgtttaataataagagatccaggcttctatggtaaaacagttacagctagctatcaagctaaccaccttatgtggcttttaatttcactctattcttaatttggttttctttgtttttttgtccctctcctccttcctgagtactacactactcttctagctacttaattccctcttgcgttctcgataagttgatgtatctcttccaaattgtaaatgtctatgttttaagagctctctgggttcagattaattgtttctgctacatgttaaaagatgactcaagtcttaattaacattgcataaatgaaccggaagaagacttaggcgatatcttc

SEQ ID NO: 19337 - DNA, 1550 bp, Glycine max
  Clone ID: LIB3139-043-E6_FLI
aacaaggtcttgatcttctctccactggggttccctccgtttcttgagcccctttttttcttttccgggcctttgccaattctcaatggaggttccagaaatggaaggcaagactgaaagtcatatgacatcagcagcagcctttgtggaagggggggttcaagaagcttgtgatgatgcttgcagcatatgccttgaggatttttgcaaaagtgatcctgccactgtcactaattgcaagcatgagttccacctgcagtgcattcttgaatggtgtcagagaagctcccagtgtcctatgtgttggcaacctatcagcttgagggatgctaccagtcaagagctgcttgaggcagtagagctggagaggagcttgagagatactccatcaagaaatgctgcgatttttcatcatccaacacttggtgattttgaattgcagcatttacccatgggtgtgaatgaggccgatattgaagagcgaataattcaacatttaactgctgcagccgcaatgaggagatctcatcacctcagccggagggaaggccatcgaactaggccatctgctcatggccgtccacacttcttagtatactcaactcagcctagtgcaccaccatcagctgcaggagggggaagtgaaccagctgcaattcctgtaggaagtccatctaccccacttacatttgatggaaatgagcaatcatcactacagcagatcccccatgttcaaactcagagttcttctttaacttctgcctctactgtctcaacaacaaatcttcaaggagttcactctgatgatagaagttttgcctctcattcttttcctgcaagccaagacagagcacagccatcagaacaatcattctctgattctctgcgctccagatttaatgcagtatccatgagatacaaagattcaatttcgaagggcacaaggggatggaaggagaggctcttctctcccaattcttctatgtcagaacttggttcagaagttaggagagaattgaatgctaaaattgctagcgtgtcccgattgatggagcgccttgaaacaagagaaaataatagtgctgcaggaacttctttatcaaatcatttggtgaaccgttccattgcagagacaagcaaccaaagcaatgtggaagctcgtggagagaactctttgcatggcaataatactccaactactttttctgcaagctcagattcaaaatgatctctagtttgcttctgtgaaggcatctttgctcaacgtatcatgtttgaaggctaactgtttgctcagacatgacatgatgaggaatatatgctcatggcagttgttggatttcaattaaaaaagtagaatctgacacccgtgtgtagagctaaaaactttttcttttgtgtatatattatatatgcggggaactgtagggagaaagtatttaaggagtaatccaagggagaaagtgttctgaaattccatcagacttgtgtccacaatctgtccctgtgatttactttttggagtcaatggaaatatagatcaaggtggc

SEQ ID NO: 19338 - DNA, 1688 bp, Glycine max
  Clone ID: LIB3139-044-F11_FLI
agttgatgcacatttcatttttcatcttaactgcaaaactcaagggaaatcctctttctcttcttctctgattttataagtgaattaaaatggtctcagattcttgcccccctcttaaggaacctgaatcagataaaaaatgggaggaaaagggtccccctcgcaatgccaaatggtggtactcaacttttcacgctgtgacagccatgattggtgcaggtgttctcagccttccctatgccatggcatatctaggatgggtgccagggaccttgattttgttgatgtcttggtgcctgactttaaattcaatgtggcaaatgatccaactccatgagtgtgtcccgggaaccaggtttgatcgttacattgatcttggaagacatgcttttggaccaaagctagggccatggattgtgctgccccagcaactgattgtccaagttgggtgtgatattgtttacatggtcactggtgggaagtgcctgaagaagttcatggagattgcatgcaccaattgcacacaaatcaaacagtcctattggattctcatttttggtggcatccatttctttctttcccagcttcccaatttcaattctgttgccggggtttctctagcagctgctgtgatgtcactgagctattcaactatatcctgggtggcttgtttggctagaggtcgtgttgagaatgttagctatgcatacaagaaaaccacttctactgacttaatgttcagaattttcaatgcacttggtcaaatttcatttgcatttgctggccatgcagtggcccttgaaattcaggccacaattccatcaacccctgagaagccctcaaagataccaatgtggaaaggtgctattggtgcctatgtcatcaatgctatatgctatttcccagttgcacttgtaggatattgggcctttggaagagatgttgaggataatgtgcttatggaatttgaaagacctgcatggcttattgcctcagctaacttgatggtgttcattcatgttgttggtagctaccaggtttatgctatgcctgtttttgacttgattgagagcatgatggtcaaaagatttaagttccctccaggagtagcacttagacttgttgctagatctgcttatgtagcttttacattattcgttggggtcacattccctttctttggtgatctgcttgggttctttggtggatttggttttgctcctacttcatactttcttcctagtataatgtggctgataatcaagaagccaaaaagattcagcaccaactggttcatcaattggatttcaatatacattggagtgtgcattatgttggcatctacaattggtggcttaaggaatattgccactgatgcttctacttataagttttacacctaaactattttatattattgcaaaaatatgtagcatgagcaattaatctagttaattagactggagttggtgaatgtctagttgataatgtcctttgttcctataagcaactagccttttagtcttctttctctccttttattttatcttagtgagatgttaatttattaatagaacaaatagttttaattggcttcatagtggtttataatttacattatcttaagcaagtggtgaagaggtttaattttcatatatgtggatagaaaaacatatgttaagaaaagt

SEQ ID NO: 19339 - DNA, 780 bp, Glycine max
  Clone ID: LIB3139-045-B6_FLI
caacacccaattaccgtcttcgtcacagtcacacaaagaagcgtcaccgccgctgaaactatcacacaggtgcaccgtttgcaacaaggcttttccttcttaccaagcactcggtggacacaaggccagccaccgcaaggcctcgtcggaatccaacaccaccgcctccgccgtcgccgtctctgccacagccaacgacagcgtttccgcttcgaccgtcggcggcggaaggatgcacgagtgttccatctgtcacaagagtttccctaccggtcaggccctgggtggccacaagcgctgtcactacgacggcggaaacaaccacagtaacagcaacgccaacggcaacaacagcagcggcgtcactacctccgacggcggcgctgcctcctcctcctcccacgcgttccgtgggtttgacctgaaccttccggctccgctgacggagttctggtcgccggcggggtttgatttcggaaagaagaaggttggcgttgaacaagaggtggaaagcccgttgccggtaaccgccaagaggccgcgtttgttttcgggggaagataatgaagaggcgtagatttgttcacagaatgtttattttaatttgattgaaattgaatttgttggtacggtgaatatgaattcacaccagttaatttaattttcattttatgttttttttttttgtttgtttttagtatatatataggtgggatcgggattaggttcggattttgtttctgctcctctgtacagacaaaatttgttcattgcttttgg

SEQ ID NO: 19340 - DNA, 1150 bp, Glycine max
  Clone ID: LIB3139-048-A2_FLI
tgaagattttcagtcagtcttgacaactttcacacgctatagccgattgagagtcattgcagaactaagacatggggatatatttcattcagcaaatatagtgtcaagcatagagtttgactgcgatgatgatttgtttgctactgctggagtttcccggcgcatcaaagtttttgacttttctgctgttgtgaatgaacctacagatgctcactgtcctgttgtggagatgtctacacgttcaaaacttagttgcttgagttggaataaatatgctaagaatcaaatagctagtagtgattatgaaggaattgtgactgtttgggatgtaaccactcgaaagagtttaatggaatatgaagagcatgaaaagcgtgcatggagtgttgatttttcaagaacagatccctctatgcttgtatctggtagcgatgactgtaaggtcaaaatttggtgtacaaatcaggaagctagtgttctaaatatagacatgaaagcaaacatatgctgtgtcaaatataatcctggatctggcaattatattgcagttggatcagcagaccatcacatccattattatgatttgagaaatatcagccgtccagtccatgttttcagtgggcacaggaaggctgtttcatatgtgaaatttctgtctaatgatgaacttgcttctgcatcaacagatagtacactgcgattatgggatgtgaaggaaaacttgccagttcgtactttcaaaggccatgcaaatgagaaaaactttgttggccttacagtaagcagtgaatacattgcgtgtggcagtgaaacaaatgaagtctttgtgtaccacaaggaaatctcgagacctttgacttgccacagatttgggtcccctgatatggatgacgctgaagatgaggctggatcgtacttcattagtgctgtatgctggaagagtgatcgccccactattctaactgcaaatagtcaaggcaccatcaaagtgctggtgcttgcagcttgaacacgagaaaaaagaatagaatgtggaattggtattatcttttcccatgctattatgattgtatcatttattaattgtacatagttttcaagtgtatatggcaggctttagggatcttaatgagatattagttgagtgctt

SEQ ID NO: 19341 - DNA, 1104 bp, Glycine max
  Clone ID: LIB3139-054-A7_FLI
gattgttaaagatggataccaatggaggaaatatgggcaaaaggtgaccagagataacccttgtcctagagcatatttcaagtgctcttttgctcctagctgccctgtcaaaaagaaggtaaatatatataatcaaccaagtgctaactagtaactaggaaatggtttggtttggttactcacatgttagtagggaaatggatctcaagctaagtttgttttgtttttggtttggttattcaggtgcaaagaagtgtggatgatcaatctgttctggttgctacttatgaaggggagcacaatcatcctcagttttcttcccagatggaagcaacatcaggttctggccgtagtgtgacccttggttcagtgccctgtaccgcatctctcagcacttcaacaccaacacttgttacccttgacttgacaaaatctcagggaagcaacgattccaagagcacaaagcctaaaggagattcacctaaagtacctcaggttttggtggaacagatggctacttctttgaccacggatcctaattttagagcagcacttgttgctgccatctcaggaagattgttgcacaataattaaatggaattttggtgaagtgttgctaatttagtgtcaattgtttaagtattccataaaatagagatcattctttagagcaaggggtctctctatgtaaatacaacatggaaggctgggacatatttgatcctttaaagtggaaataaagttccactaaggatgacatgttgagctgattaaacaacagaaaatcaagctctgcaccaccctctgcctcatcatgatggtaaagatttagcaagtcttttttggctaatatatctaggatacctcaaattaaatttcatagtaggttgtagcacacattctcggaaagatctttcataaagtgcatctctacggcaatttaatttctcccttttcttctctcactactctctctggcaagccaactctatatctagtcctagttttagaatttcatttcagaaattatattatacattgatcaagtattataagtgatggaatgtaactcaaaacatggaaaaatgaaaaaagggggtccgc

SEQ ID NO: 19342 - DNA, 1662 bp, Glycine max
  Clone ID: LIB3139-055-E11_FLI
cgagaggtacttactcacagatatattttttttttttgtctccatcattttctcgagagctttcagtttgtgtggttcatctttcttcttctccttccctcccccctctgtaacaccccgcttctctgaatccctttctgttaatcatctgtctttcaagctaagattttcgggtttgtctattaattcaccaagaagcaaacttagaaggatttttcgaaagccaggtgttttcagaaacgagatccaggttttattgtcgaatttcgctagtcaaattaattttcataattatttttttctttgaaaccagccaagagggttatttttgatccctcaaagctaatttctctctctctttttttatttccgggactgaagaggttgtctatttgaaatctccttcatcctttcctttcttgtagaaaactttttaaatttttttgtcagtgggtgttttaattaaccacctgttcttcaagttttagaaagacgcaggttgaattaattagtatcatggcagctttgatggatttttacagcagcagcccagagtttcaacttcactcagatccattcaggggagaactaatggaagttcttgaaccttttatgaaaagtccttctcccaactatttcccttcctccccctccctccctaatctttactcaaacgggttatccagcaacacccaaagcttaattggcttcgggcaagcgcaacccacatctcttgtgggcctgaaccacctaaccccatctcagatctctcagatccaagcccaaatccagatccaggcccagcagcatcagaatcgcagcaacaccctgagcttccttgggccgaagcccatccccatgaagcacgcgggcatgcctccgaagcccacgaagctttacagaggggtgagacagaggcactggggaaagtgggtggctgagatcagacttcccaagaaccggaccaggctgtggctgggaaccttcgacaccgccgaggaagccgctctggcatacgacaaggccgcgtacaagctccgaggtgacttcgccaggctcaacttcccaaacctgcgacaccagggttcctccgtcggtggtgatttcggggagtacaagcctcttcattccgctgttgacgccaagcttcaggccatttgcgaaggcctggctgagctgcagaaacaggggaagaccgagaagcctccgaggaagtcgcgttccaaactcgcggagaaggttgtttccgacaaggagaacaacaactcttgtaaggtggaagctgcgtcctggtcgtcggaaggttcttcgccgctttcggatctgacgtttgctgacgtgagcgaggctcagtgggaaggtgattcggataattataatctccagaagtacccctcttatgagatcgattgggattctctgtgaagtgtcctattatgtatggtctagtctaggtcttagtgtctcttaggtggctgctactgcaatggagtttttggcaattgcagggctagtactattctgtgtataatctctctaccttgctcacagctggtttttttcttgcttgaccagggagaattagtccgcttaatatgtttttcaagtgcatcgctgtaatctacttcaatttcatcatcttataaaatatattattctact

SEQ ID NO: 19343 - DNA, 1223 bp, Glycine max
  Clone ID: LIB3139-059-A2_FLI
ctagaattagtcctgctgttctattcatcatagtggttcttgctgtcttgtttttcatctctggcctcctccacctgcttgttagatttctcataaagcacccttcttctgcatctgctcaatccaacaacagacaccaagaactttcccatctgatgctcttcaaaggcagcttcagcagctcttccacctccatgactctggcttggatcaggctttcattgatgctcttcctgttttccagtacaaggagattgtggggttgaaggagccttttgactgtgctgtttgcttgtgtgagttttctgaaaaggataagctcaggttgttgcctatgtgcagccatgcctttcacataagttgtatagacacatggcttttgtcaaactccacatgccctctttgtagaggaacacttctcactcaagggttttccgttgagaatcctatatttgacttcgatgatcttatggaggatgagatgtgtccttggaatggggagaatggattcaatacccggcagaaaacagttgtggttgaagaaagtgtggagaaagagaaaggtgttttccctgtgaggcttgggaaattcaagaagctaagtagtgtggaggggggtggggagagtgaagtgggagagacaagtagcagtaatttggatgcaagaaggtgtttctcaatggggtcttaccaatatgtggttggaaattcagacctaagggtggctttgaaccatgatgaaattagtaaaggtcaagtcacaaggctcaacaaaggaatggaacttgatgatgggaagctttcagtggaggatgtggaaggaaagaagattagtagtgtcagtaaaggtgacagtttttctgtgtccaaaatctggttgtggccaaagaaggggaaattgcctacttctttggatggtcaaattggcatgccaatgccatcttttctaaacacagattttccaaggatgagggatacagaaggggcatgaaaggtatccatccacatgttttttaattattttttttacttcttatttcacttgaattcgtttcaatccattgattaaaactggcttcccctccttacttgtcttacaattccaaaaaattttggtgtgctaattttgacattgtgatgactgattgtgccacatactattgatgtattatgattgtactttatgaagatataagaaacactgcatctgtttttcttttatc

SEQ ID NO: 19344 - DNA, 1311 bp, Glycine max
  Clone ID: LIB3139-061-A8_FLI
gtggcaattgggtacaccatagcagcttccataagcatgatggcaatcaaaaggtctaattgttatcatagtagcggggggaaaaatccatgcaaaatgaacagcaattggtacatgatttcatatggtgtttcggaaattatcttctcccaaattccagatttccatgagttgtggtggctctctattgtagctgctgtcatgtccttcacatactcattcattggacttggccttggtattggtaaagttataggaaacggaagaattaaaggaagcctaactggtgtaactattgggactgtgacagaatcccaaaaaaatttggagaactttccaagcgcttggaaacatagcctttgcttactcctactcaatgatccttattgaaattcaggacacaatcaaatcccctccagcagagtcagagacaatgtccaaggctactttaataagtgttttggtcacaaccgttttctatatgctatgtggttgctttggctatgcttcttttggagatgcaagtccgggaaaccttctcactggctttggcttctataacccattttggctcattgacatagccaatgctggcattgttatccaccttgttggtgcataccaagtttactgccaacccctcttctcattcgtcgaatcaaatgcggcagaaaggttccctaatagtgattttatgagcagagagtttgaagtaccaatccctggttgcaaaccctacaagctcaacctcttcaggttggtttggaggacactttttgtgattttgtcaactgtgatagccatgctcctaccattcttcaatgacattgtagggcttattggagccattggattttggcccctcactgtgtatttaccagtggagatgtatataactcaaactaagataccaaagtggggcataaaatggataggcctacaaatgcttagtgttgcatgctttgtaattactatattagctgcagcaggttccattgctggggttattgatgatcttaaagtttacaagccatttgttaccagctactaattcaataggataattacttagtgatcatgatcaccattgtcagagatttcattagcaacaagaaaaaaaaaagaaggtaaattgttgcaaattgaaatcaacaggaaggtggtcttacttgtttattgcttagtaaccttgtatcttctgtatctttgtttttttttgtttgtgtgtgtgtgttctcttactttgtaacttgctctgtatccctaatttgcaatgagaaatggaggaaatgaagcagaggctttcaaatt

SEQ ID NO: 19345 - DNA, 1036 bp, Glycine max
  Clone ID: LIB3139-062-C12_FLI
atcaattctcccttcataataaacccactgatcgcttctctttcctcttctctctctcagtagaaagcctacaaccttcttttatctgcgtttcctctctctctctctcgatcagtgctagacaaggactggtaaccaaaaattccaagaagggtacattaattcatggcctttgaggagcactatgtttctcaggaattgaaaaccatccccagctccatgacagtgacagaaaatttggatgggtgttttgattgcaacatctgcttagattttgcacatgaaccagtggtcaccctttgtggccacctatactgctggccctgcatctacaagtggctccatgtccaaagtgcttctcttgcaccagatgagcacccacaatgccctgtttgcaaagatgacatatgccacaccacaatggttcctctctatggccgtggccagggcatagctcatagtgaccatgatggaaaggcatcatcctatagaggcagttgtataccaccaagaccacctgctttgggtgctcaatcgctcattgcaacatcatctcaaagtgttccatatcgcaacacttatcaaaatcagcatttataccaagaagaggatgcatcatcatcacaaatgctgaaccctggtgccaccattttggcaccagggttcccccaccttgtgtttgggatgtttggagagatgttttataccagagtctttgggaactcggaaaatttatacacccacccaaattcttatcacctgggggaaagtaataatagtcccaggttgagaaggcaagagatgcaagcaaacaaatcattgaacagaatttcaatttttctgttttgttgtttccttctgtgtctaatcgttttctgagcaagaaattggattattattctctattgccctgttgtataattttaaagaaacacgggtgttagcttgagaatgagatagattgagcaattgtatgtagggtaaaagaactggtgttcttcatcatttactataatatatttgagctcgatttttc

SEQ ID NO: 19346 - DNA, 1258 bp, Glycine max
  Clone ID: LIB3139-065-E3_FLI
taaaaagtaggtaaagtgcatagtagcactagctaaacagtacgtagtgatcataagcaagcatactgatgattaatatggcaaccatggaagacatgagcaacatgagtggtgaaattacacttccagggttccgattccacccaactgaagaagagcttctggatttctatctcaaaaacatggttgttggcaagaaacttcgttacgatgttattggtttcctcaacatctatcagcatgatccatgggatttgcctggtttggcaaaggttggggaaagagagtggtacttcttcgtgccaagggacaaaaaacatggaagcggtggaaggccaaaccgcaccactgaaaaagggttctggaaagccaccggttcagaccggaaaatagttaccttatctgatccaaagcgcataattgggttaaggaagaccctggttttctatcagggaagagctcctaggggatgcaagaccgattgggtcatgaatgagtaccgtttacctgacaattgcaaactacccaaggaaatcgtgttatgcaagatatatcgaaaggcaacttcgttgaaagtgctggagcaaagggcagcactagaggaagagagagagaagaagcaaatggttgataattcccctgcttctcctccttcctccacggacaccatgtcctttagcagcccacaggaagagcaaaacgtgcccttgcccttgttgcagcatgttcttaagaaagagtctgaaacaactgaagacatggtagtgtcaaaacaagaaaaaacaacgaaccaattgaccttaaaagacaccaaaagcacttgtggcacatcacttcaaatgccctttgggaaagagaagctgccagaccttcagcttcctatgctctcggattggacccaagataccttttgggctcagttgaatagtccttggctccaaaactttactcccaccaatattctaaacttctactgactccactctatgtgcatcattactcaaatataatatatcaactgcaagttaattagtcaatattacctatttattttggaatgtatatgcagtgaattagtaattaataacgtttttattatattaactcaattaactagacatgttttcatgcacatatatgttttttcctatcaagttcagtctagctggaacttgttgtcaaccctttacccctgtcccttgaagatgtttcactctttcaatgaatgttcaagaagtaaaattcatcagcagattca

SEQ ID NO: 19347 - DNA, 621 bp, Glycine max
  Clone ID: LIB3139-067-A6_FLI
tcgagcttattaagggttcaatagatatgcttccctaccagtaaaaatcagatgactctcaaaggcttggtatcacttgtcatcaatttaattggcctagctgagggaacaaggaacaatgatgccccccctttaccttgttacatgctatctagccatatacaaaataacaagcaacaatcatctgaatcagcatcagcatccaattttaatgaggatagttggtgttgtgtgtgcttgtcaaggttaaaggccaaagatgaaatccgtgtccttccttgctcgcacaaattccataagatttgtgtaaataaatggcttaagggtcgccacaagacgtgtccactttgccgtttctcaatgggagccgaggagaagtctcatcgtgccgaaatgttcactgaagagatgttaatatggttttcttctttccatgtagctggtatgtaatgatctaagtttccccagtgaatctatttgtagttttctacaagcagagccttgctttgctttcaagttttgtttaaggcttgtgaatctgatttcgtgcaagctgaaacaaattgttatggcttatcatgcctgctatatatgaatgaaaatgtcgatgttcataagggg

SEQ ID NO: 19348 - DNA, 960 bp, Glycine max
  Clone ID: LIB3139-069-E11_FLI
cacttctcaccatgtccttgatgcccaattctagggttcctcttctcctcttcatctcttccatattcttcacctcttttcccgggttgacgtttggtgcaattgtgtcgctgagatcaattgagatttttaaaacgcacgagtggctgaaagccactacaacggtgtatttcctatgcaaaggggagaacgagacggtgcttccagatgtcaagaaaccccacgccatttatgctttcaatggtcaagaatcttggcagcctttaagcagcttttcaagtaaaaaatgcaagcggtgtggattctatgaggaggacagcattacttcggatgatgcatttgacgaatgggagttttgtccttctgactttgctgcacccaacggtgaatatattcggttcaaggaaaaggaattcaatgctactttcctgtgccctgagtgcttatctcttgctggtgttgatgagcatgatgacggaaaaggaatgcatatagctgttgtcgttttgctgagtattttggtttcagttacactgattcttggagtggtgggtgcatataagttctggcgaaagaagttaagggaacaggaccaggctcggcttttgaagttatttgaagatgatgatgacattggggatgagctgggccttggtagtgcaatttgatataacgatagtgaagaaaatacctccttcacagtataggtcaacctcaaaattttgtttatgaaaaagaatgagaaattattttcttctggtttaacatgcgactatgccgattataggaaatattcatcaaagcgggaagaaaggtgtgccaatgttcatatacacctgtacatgaaatagagctacgttgtacttcatattttaggtttgctcggcaatttagtagaaacagaacagaaaaagaaataaatggtgtacttcatctttaagttatgctcagcaattttgt

SEQ ID NO: 19349 - DNA, 1141 bp, Glycine max
  Clone ID: LIB3139-069-G7_FLI
cgaagttgagagtcatgcaaatggcaaagtgactggttctcaaggggctagttcccgctgttctgaagagaggagggaaggagtgaagaggagttctaatggagacgttgcacctggttcccgacaccggagaagtttctcattggacagctccataggaaatttccatattggagatgaatcgcctaagcttcctccttcacaaaaccgatttggtcaacactctcccagcagttcaatagatggtaagacatctgaaacaagcatggagtttggaaatggtgaattcagctcagaggagctaaagaaaataaaggagaacgataaacttgctgaaattgccatggccgatcctaagcgtgctaaaaggattttggctaatcgtctatcagctgctcgctcaaaagagaggaagatgcggtacatttctgaattagagctcaaagtacaaacacttcagacagagacaaccacattgtctactcagtttaccaaattacagatggataattcagagctgaaaagtgagaataatgagtacaaattgaggattcaagccttggaacagcagtcccaactaaaagatgctctgaatgagaccttggatgctgaagtgcggcgtttaagacgcacagttgcagaacttggtggagagtctcttctctcaagtcgcatggctcaacagcttgctattagccaacaagtgttccagttacagcaccagcagcaccctaaccagcttagacatgttcaactggacaatagccattcccaggagcagacacagactcagtcacagtgccacaatggcaaagctactgcctactgattagcactctgataccatgtatgctcaatgtttgtgatatgaatctgaataggatattgcatgaccaaacaagctcaagtaaaaaaaaaaaagactcgattctaagagaggacccgttaacaaaaagaaaagttcaaaagatacaagaggcaaaaggagtctgtgaatgcaattcctatctaataaggttgtagttcgacttgtgcaagcccaaggatatgattatatgaagactcaaaatagtgtataattgttaactttattgcctaagatttgtagttattatttgtaaatctaatgatgatttgagat

SEQ ID NO: 19350 - DNA, 1645 bp, Glycine max
  Clone ID: LIB3139-071-G5_FLI
gttaactagttaagagttaaagagcaaatgttgcaaagatgttagttgagtggttgggcggattcaggtatatatatatatggctctccttccaaaaccctagattcgtaactgtaccttttcctcgtcccattcaagtgaaaccttgatggctgaagtggatcagtacacgggcggtgagcatgaggttgaggaaacgattgaggttgaggcggaggaagaaatgcacggtggtgaagaggcggttgttgttgcggagaagaagtggccgggttggcccggggagagtgtgtttcggatgttagttcctgcgcagaaggttgggggtatcattggacgcaaaggagagttcattaagaaaattgtcgaggagacacgagctcgcgttaaaattcttgatggtcctcccggaactgtgcaaagggctgtaatgatatcagctaaagaggaacctggttcctctgttcctcctgctgtggatggcttattaagggttcataagcggattattgatggtttagagagtgattttacccatgctccttcaggtgtggcggggaaggtttctacaaaacttctagtgccagcctcacaagcaggaagtttgattgggaagcaaggagggactgtaaaatctatccaagaagcatccaattgtattgttagagttcttggagcagaagacctccctatttttgcccttcaagatgacagggtggttgaagtagtaggggatcccactggagtgcataaggcattagagttaattgcctcccacctaaggaagtttttagttgatcgcggtgtaattccaatttttgaaatgaatatgcaaacagctaatacccaccatgcggagcacatgccaccccaccaatcttggggtccacctcagggtcttcctccaaatgttggtggaggttctggttttggacctccttctcaatacatgccacctccacgacaacttgatagttattatccaccagctgaaatgcctcctccagtggacagacagccccatcaaggtatatctgcttatggaagagatgcttcaataggtgttcatgcatcttcaaatactcaatctgcaccttccattgtcacacagatcacgcagcaaatgcaaattcctctatcttatgctgatgctgttattggaacagctggagcaagtataagctacatcagacgagctagtggggctactgttaccatacaagaagcaagaggtgttcctggggagatgacagttgaaatcagtggaactgcttctcaagtccaaacagcacagcaactaatacagaattttatggctgaagctgcagctgcagctgcagcaccagcacagccgcaaacaactgtgcctgctgcagaccaaggatacaattcttaccctgcccatggttctctctatgcgtctcctccttccaatcctggacatgctggaggctatagctcagtttatggtgcaaactatgggtactaggctggactgtgcaactaatgcctgctattattgaaatgtaaaatgctgggaacggaattactgtaataatttaagaaatattagattattgtctgacccttgtgttttgttgtacacgtagtcatttggaaaggtaaaacatactattcgtggcct

SEQ ID NO: 19351 - DNA, 1406 bp, Glycine max
  Clone ID: LIB3139-072-A12_FLI
ctacactttgctctctaccctctttctttctctttctttttcccttccctcaagtactatcatacacaaacacaaggtacttcacatacccacatacacacacataagcaaaaactcttacttccctttttcaagttcttaaactcatcactacttaactcaggagtgtgcatattttcgttgtatggatggatccttctagtggacaacaccagcaaatgtctagccagtcattggagaacatgttggcatgttcaaaagcccaccaagagagaaaaccaacgcctcagccagaacaagctctaaagtgccccagatgtgactccaccaacaccaaattctgctactacaacaattacagcctttcccagccaaggtacttctgcaagtcatgcaggagatattggaccaaaggaggtacacttaggaatgtccctgtgggaggagggtgcaggaagaacaaaaggtcatcatcatcatcttcaacatcaaagagagttcaagatcaagcattcacaccaaatgttaaccctctcactggccttccttcattaatgtcttatgactccaatgacctcactcttgcattggcaaggcttcaaaagcagtcatgtgggcaattagggtatgatgatcatgatctttcaatgttggggaaccaccacacaaacaccccatgtggtgataatatccttggcatgcatcaccactcatcatcctcatccacaaacccagggttcttggatgccctcagaagtgggttccttggaacacaaagtaataataatatgcatcagaatatgtactatggatatgggaatggggacatgggggaggtggacaatggtggtggggttggggttagtagtagtggagagatgatgatgatgatgatgccttataataatgatcaagaaatgagtattgcatccacacaggcagtgacagtcaccaccatgaagcaagagatttgcaacggaagggaacaaaaggtgttgtggggttttccatggcaactcaatggagacacaaacatgggtgaacttgactcaggaagagctagtaattggaatggcatcaattcatcatggcatggacttctcaacagtcccctaatgtagacaacaaccacagggcctctactactgataattttatttccttaatttctcatgttttgttttactaaaaatgttattagtctaattaggattttcaatatccttttgagtgctgggttaattaattacaggggtttggttgattcccttgaatcatctcttttctttctttcttgtttttttttcttctctttttgccccttaaattgtcaaattttttgtactactactgtcttttaattggtgaatagactaatgaaatttcagaaaggttgtttgctaacc

SEQ ID NO: 19352 - DNA, 1019 bp, Glycine max
  Clone ID: LIB3139-072-D10_FLI
acaactcaactaagcgcaaaccaaaccaacacaaacaaaaacatctctcagcaaatgaatattctcggacaatcactccaccaatcaaacaacggcagctactcttgttcgtcgccggagactgcaaactcctctaaccttccgaccactccgaaagccgttcactccgacgaggaagtgaacacattagcatcggctcatcctaagaaacgtgcggggcgtcgaatttttaaggagacaaggcatcccgtgtacagaggagtgcggcggaggaacaacaacaagtgggtctgcgaggttcgtgttcccaacgacaagtccacgaggatttggctcggaacgtatccaacgcctgagatggccgcacgtgcgcacgacgtcgccgcgctctcgcttcgaggtaagtcggcgtgtctcaacttcgccgactcggcgtggcggttgcccttgccggcgtcgaccaatgcgaaggagattcggcgcgtggcggcggcggctgctgtagcgattgcggcggaagacagccgcggcaagcagttgcggactaatgcgattgatgccgttgctgattgcgaagttagcagcagtgacataggcgtcgatgaaaattgcaataacaataaagcttcgcagaggttttgtgatttggatgaaattacaatgccagatgcaccggtttttgaggacatgcatgagtggcttcagactatggctgctgaaccattaagatcacctacttttgtaacatatgttaatgttagggatgtctggaactttgtggaggatgatgctgaggtttccttgtggagcttcaccgtctgaagagcatgcaatttaggctttaggtgtatttagtgtgtttagctttctttctcttcttttggtttttgtacataattaggaacggaggactacgaaaatgtacaaagaccgaaacgatataaggagatagctatctaggtaggaacataaaagtgtgaaacattgtaacttttctcattcggttgtttttgtaaaat

SEQ ID NO: 19353 - DNA, 1233 bp, Glycine max
  Clone ID: LIB3139-072-D11_FLI
gaggaagttgcccttaagaggaagtacaatgaggaagccagaagcgtgtaataataatactaaaaacaatagcaacaagaagcttagaaaggggttgtggtcacctgaagaagatgacaagctcatgaactactatgctaaaccatggacaagggtgttggagcgatgtggcaagaaatgctggcctccaaaggtgtggcaaaagttgtcgccttcgatggatcaattacttgaggcctgatcttaagagaggtgcattctcaccccaagaagaggaactcatcatccacttccattcccttcttggaaacagatggtctcaaatagcggcgcgtttgcctgggcgaaccgacaatgaaataaaaaacttttggaattcaacgataaagaaaagactcaagaacatgtcgtccacgacgaccacaacctcaacctcaccaaatgcaagcgagacctcaatatccgagcctagtaataaggacctcaacaacatgggagggtttatttccacactacataataaacatgcaggttttgttcctatgttcggttcatctccatcaccatcaatgatgcaaaccagtacagttttcaataacatgattgaaaggtttcctatgctggagcaaggactgattaacatgccagcttctggagggtacttcgaaggcacaggtagtactccttgcttttcgcaatgtgaagttcacaacaataaaggttcttgttatttagaaaacgaagtgtttgagagtgtaaatatcggggtagaaggggatatgtttgttcctccccttgagaatgttacatgcaagagagaagaaacaactaacagcagttactttgacgatgacataaatagtatccttaataactgcaacaatattggcatagctgaaaataaggctcatcatggggtggagaatttgtttcagcaagagttagccactgccacaggagaatgggactttgaagagttgatgaaagatgtttcctcctttccatttcttgatttttcatactgatcaatgaaccttatttggcacactgcagggtgatatattcttcacatagagccttgtataatagtatactggtattttttacccttataccgaattcacaagttaacaatcaggtataggcctcaaataaaagtccaatatatatatatatacatataaattcttgggtatccattggtgatcgagtatttagtcttgcagattagtt

SEQ ID NO: 19354 - DNA, 823 bp, Glycine max
  Clone ID: LIB3139-072-F12_FLI
ctcgagttccgttaacgctctccaatacaaaataaccactcactgaatattcggtcgaagatgtccgccgccgaagaagctaaagttcccgccgtcgaaaagccggtggaggaggtgaaggcgccgaagcttgccaaggagaagaaacctaaggctccgaaggaaaagaagccgaaacaggccaaaactgcttctcatcctccatatctccagatgattaaggacgctttgattgctctgaacgagaaaggaggatcgagtccatatgcgatagcgaagtacatggaggagaagcacaaggcggtgcttcctgcgaatttcaagaagatactaggtctgcaactgaagaaccaagctgcgagagggaaactcgtcaagatcaaggcttcgtacaagttagccgaagccgcgaagaaggtgaaggagagcaccgccaaagcgacgaaggaatcgcgtccgaaacgaaacaaaatcgcaaccgccgttgctccgaagaaaaccgaggcggttaaaaagcccgcgaagaaggtcgggccgaagaaaacgaagaaagtgtcgacgcctgcgaagcccaagcagcccaggtccattaggtctccgaccaagagggcccgtaaagctgccgtcgctgcggcttgatgtttgatgtttttcttgtttagttaaaactctggcatataatatatgtagatatgaaaaggtgtgtgttaaccttgttgcacaatcttgaatatagttgtgtggtttaggatcgtagatagtttagtgttctgcaatgttcgctctaagaagtgatcaattggagatgaattttactgttatc

SEQ ID NO: 19355 - DNA, 2544 bp, Glycine max
  Clone ID: LIB3139-075-D1_FLI
ggatgttcatgttcgagcaaagatcttttgtgtgtgtgcagttactgctttgacgttttggattttcaggttgtccagatgagtgttgatggcgacagcaaagagctgaaagaactgaatcagcgcttacgagatgggaagaagattgctggtggggagcatggtttatgcgaggaagtgaaatgtaatggaattgctgaagaagttaaggttgaacagggggggactgtggagtcctcctctgtccagcagcatataccacagcctcaaggggcaataatttgttgggagaggtttttgcatattagatcccttaaggtcttgcttgtggagattgatgactctacccgtcatgttgtcactgcactgcttcgcaattgtagttatgaagttattgaagcagcaaacggattgcaagcttggaagatattggaggatttaaccaatcatattgatcttgttttaactgaggtggcaatgcctggcttatcaggcattggacttctatacaagattatgggccacaaaacccgcaaaaatattccagtagttatgatgtcatctcatgattctatgggtttagtctttaagtgtttgtcaaagggtgctgttgactttctagttaaacccatacggaagaatgagcttaaaaacctgtggcagcatgtttggagaagatgtcacagttctagtgggagtggcagtgaaagtggcacacaaacccagaagtctataaaatcaaagagtcttgagaagtctgataataattctggaagcaatgacgaagatgataatgaaagtataggcctgaataatgtggatggaagtgacaatggtagtggcactcagagctcatggaccaaacgtgctgtagaagttgatagtcataaaccagtttcccagtgggatcaaatagctgagtgccctgacagtacctgtgctcaagttgttcactccaatgctgaaatgggtgggaacaaggtggttcctctagctgcaaaggattgtgcagaacagaatgaacaacttgtcaaaactgcaggttctcaacatagcaatgcacctgatgtcggcccctctaaattcagtgagcaaattaatagaggacaactggaccttaattgtgaaaatcaatctagcaagctaaggtgcaaaggtttatcactgtctgatgccattactagtacttgtgattctcagatgcatagtggagaatttgaagccctaaataaaaaacccaagtcctcagatattgaaaataaaggtactaataatgatgaagaattgccatctcttgagctcagtttaaagaggcttagaggagttgaagatgctgatattacaattcaggatgaccggaatgttttaagacgttctgatcagtctgctttctcaaggtacaatgcagcctctaacactaagaaatctcccactggatgtgttggaagcaattctccttataataatagcttagaagttacaaagaaagattcatctcgtgatattcaatctcattcttgcggcaatcctcctaaccaaaactcaaatggtgctagcaataacattgatatgggttccactactaataatgcttatgctaaatctgcagttatgagtgagccagcaggggcatcaacaacaaaatgtttgtaccaaacatctgctttccagcctgtaaaaaacagccttgtttgtacctctcaacaagttgtcttaaataatactgaagatatgtcggcaacaattctggcaccacctaaactagacagacataaagattctgcagctctggacttccatctccattgtgaaaaccataactgtattgctgacaacatgaagcatcagctgccacctgatcatgatgctgaatctataaagaaaatggctactgctgctccacattgtggatcatcaaacgtggaagaagtgctagttgaaggtaatgttggaaaccacagtatcaatagaagtgtttcaggcagcaacaatggaagcaatggacaaaatgggagcagcacagcagttaatgctggagggacaaacacggaaagcaacaatggactcactgggaatagtggcagtggtgatgctagtggaagtggaagtgccaacagagtagatcaaaacaagacttctcaaagggaagtggccttaactaaatttcgccaaaagagaaaagagagaagggagaggtgctttcataaaaaggttcgatatcagagcagaaagagattagctgaacaacgacctcgatttcgtggacaatttgtgcgacagacctctaacgaaaatgcaagtgaggcaacaacagatagctgattcagagcattggccacaatggcataatgatggggatatgcgaaaaaaggttgaggagtcttcatgtagaatttgggaattattctgtgtgttgtgttaatgtataaagaccctggttattccaacttgttcatttggaacctgaatcaatttatgtggaaagagattgttatgccgattgatgctcggataacttactgtaatttaagttactttttcctc

SEQ ID NO: 19356 - DNA, 1004 bp, Glycine max
  Clone ID: LIB3139-076-C2_FLI
cttttcagtttaaagcttcagatcacaaccgatccaccattcaccactttctcttcacaagctcaagttactgacaggcaaatctaacaagaaaagtagtctctgaagtcgatccagtgccttgtgaatttggaattggtggtgaatttagatctaaaagccatagcaatgtcttttatcggtacccagcaaaagtgcaaggcttgtgagaaaacggtttatcccgttgatcagctttctgctgatggtactgcttatcacaaagcttgcttcagatgctctcactgcaaaggaacattaaagctgagtaactattcctcaatggaaggtgttctttactgtaagcctcactatgagcagctcttcaaggagagtggctccttcagcaagaacttccagtcacctgcaaagctagctgataagacaactcctgagctgacaaggtctcctagtaaagctgcgagcatgttttctggcacacaagaaaagtgtgccacatgtggcaaaactgcttatccattagagaaggtaacagtggaagggcaggcctatcacaaatcatgtttcaagtgttcacatggtggatgtcccataacgccatcgaattatgcagcccttgagggcattttgtattgcaagcaccacttctcccagctttttaaggagaaagggagctataatcatcttactaagtctgcatcagtcaaacgggcagccgcagccacagcagcagcaacaacagctgcctctgttccagaatcttgaatgttggttccttcaattgccttttctttttcaaatacattttggtttgtgaagcaggtgtttgtatgtgtggcctttttggtttttgattgttctctcgtgactttgatcatttctgatatttttacttacacatgcgtggcgtgcaaatcttgtgtggtttattcatataatggacatttagtaaagacgagactaatgagagcgtgatttgcaagatatatcattccaggttgatg

SEQ ID NO: 19357 - DNA, 1196 bp, Glycine max
  Clone ID: LIB3139-080-B12_FLI
gaatcttcttatcatacatatctcccaaaacataaaactttgaaccaaaaagattatcctggtcgtgtatgacaagaagattcttccatttttctcctttgccatggaagtccggaacaagccctccattgatgattatgtcaatctttggaatgattgggagagttcagtggaacaattgtcatatgacaagtgctataagttctggatgtttatgttgaaacatttcagcacagaaactaagaaactttccaattgcttggtgaagctaccggcaacatcaggcaacaatgaaatagttttgttagataaaaacgatgttttcattcctgataaccttcatctgaagaagctttttcagcaggagaaagtctttgtctggtatcctcagaacctggcaccattgtccaggtgtgagttgtttgacgtgtacaggaaaattggtgctcgaaatatctctgaatctatatgcatggaagagccgtccttgctcaatggtgttgaactcaagcaagttgatcctggtaatatttgtaatgtgaaggtgttggctaagcttattcttagttttctttcttcttctagcctaaaaatggaaccaaacaagaggcgtgaagctgttcaaggtctactcaacttgagtttctttgagacaaaggaagcagtcaatgtaagttacagtttgtcactatcatccggggccatcattaccaaaaaggcagacagaatggtacggtggcaagggcaaagttccaagtttttcactcaaacgaactggcaaagtggaaatgcaagtttaataaaatatgctacatatttctcagaagccatctcagagggtgttttgcgtgagaatcatgatcatgttcctgcactctctgagctcatcacattggcttttgtgctgaaattcaacaatgagacaattgaatttcttatggagtccaagaacttgcactgtgaggatgaggagttcctcagttctgccttcccttctaactaagtcttctccatagatttttaaatgttttaattcaggcttgcatgcttctatatactatgcatatgcctattaataaattatgtttatgaggttttttgtgaccttgtctatcagtggtgcgtgattactgaattacctaagtaaagtgtggtattggctgttaagatttgaagaattataagttactcactcc

SEQ ID NO: 19358 - DNA, 926 bp, Glycine max
  Clone ID: LIB3139-082-D4_FLI
tttttctttctcttctctttatctgaacgaaggagagtgaaagatccttttttgcgttattggatcgaaaatggatcagatattcaataaggtcggatcctattggttcaaccagaaagcctccagccagctcaattccgttggtgatgacatcaattcgatgacaaacagtattgaagggggaaccaaatggttggtcaacaaaataaaaggcaaaatgcaaaaggcattgccagagttactaaaggagtacgatctaccaataggaatctttcctcgtgatgcaacaaactatgagttcaatgaagagacaggaaagctcgttgttttcattcctcaagtatgtgaagtaggctacaaggattcatcagtcttgcgtttcttcaccaccgtgaccggttatatggagaaaggaaagttagcagacatagaaggaatgaagaccaaagtgttgatctgggtgaatgtgacgacaattttgtcagagggatcgaagctctatgtgacagctggcatgaagaaaagaaggagtagggaagcatatgaggttacaagagatggtgtatgtgtagataagttctaaaactaatagttttataatctgtaaaacccctctgtctgttattttgatctcctttttcatgattgtttattgcaagtagtgttcaaatatgtacttcaaatattgcccttgtattggaatcttgcaatttggctaaagtccttgtcgatgatctaggctatgcttgtattttaattgggagacctccagcatctgttcaaaaagtaaaactgaaaaaatctcgattggtgttgagtttgattgtaaactgagttttgtcttaattttgccttgaacctcagcttaaaatgatgttcattgacttaagtttgcaaacttcaattcgagcatacagttagtagtt

SEQ ID NO: 19359 - DNA, 3236 bp, Glycine max
  Clone ID: LIB3139-083-A7_FLI
agtagttgctctgcttcatcatcttctctctatctttgttgcaaacttacaaacacagtactgagtttaagtgttcaccaaaaaaaacaatggatgatgatattgtaggactcggttttcgtccaacagaacaagagcttgtcaacttttacctcaaacacaagttgctcggcgatgatccccgtgtccacgtcatccctgtcattgatctttgcgatgtggaaccttggaatgtaccaggtaactaactcaacacccctttgtcctttttcttcctcttctctttacttcactgttgtttgtttgattctttccttgttttcaaaattagtgatattagcatcgtcatcagctatacgatttggtgacccagattggtttttcttcagccctgttgatttcaagtacttgaaaagcaaaaggtttaacaggacaaccaagtgtggattctggaaagccactgggaaagaccgtgacattaggacaggggacactgataacactgtcattgggactaagaagactcttgtttactatcaaggccgtgtttcctgtggtgtcaagtccaactgggttattcacgaatatcatgctgttacctttcatgaaaaccaggttcgtttcttttattcaataaattttaacactgcttgaaaataatctttctactaaattataggctttgatgttagagggccatatatgttgtactagtttgtactttttaggctttgatattagaggttttttttttttttttttaatgatacaagaatgagaggaataaatctagacatataatgatacttggattataaaggtttaatatcatgtgaccatttaaaaaaagttatgtgattatttttaaatctcatatgacttgtatgttttaattgtggccaatatttattctttttacactcatatcaaaaaggtcatctcactagatatgtctccttatttgcaatcctattggttgttctgagttctgactttagcagattgctgttattggatactttgtttgaatctcatttattttttttgccgtctcatattgctgttcatggcccaattttctacatttagggtcttgcttgatgaatgatgacaaagggggcatgaaagaaatatttagcttataaacgtgactgatgaccttcctataacctctttttaagcttatttcaatgaattttacatgggagcttatcaaaacaagttctttttagtttatcaatgagctcctcgacaaagcttatggataatctcatgtgatttattggataagtgtttaattaaatcttttatctaagcactctcaaaattcatcatcagtgttcatcaaagactgtcaatttcttctgtataaattagtctgaatttccttgttcttttatttgtgtgaattgcatcaaataaatgctgattatactcaaaaaattatgcagaggacttttgttttatgttgcttgatgaagaaacctgggaaaacaactgaaggcggaactgatcccctgatctgtgatgaaggggagcccagcagaagcatgatttctgactatgaaaatcagccaacagcagaaggaattgcatctgtaagatgaagcatcctttgtggacatatttacactctgccatgtgaaacatgctgagaactgatacttgtttcgtatatttttttttctttttcaggaaggtacttttacaggaatagaggcaatctttcaggcaaccccttgggcagagaattgcttctccccaatacaacagtctccgactcttattgagcaggaaggagcatcctttccaaactatgcatttaacaatgcctattttagaaatgaagacaacattatgcagactccatttgaaactacaaaggaagatgaattcctaaatttaatcttagccgatgaaagtatagtgatcaatgaagaaaataagcatgattttgtcaatagctctacccaatcagagtcattgaaaagggtatactgtgtaagcagtgatacagatgctgaagtcatctctaaactggtaaagatttatcaagttcaaataatactggggagagtatctccatttgtttctgaagtggcattggatctataggttaaaattgtagtgtgcattgtggttatgtgaatgttgccacatttttgcattggatctataggttatgtcatgttttgttgtgattcatgatcatgaatgattcacggctgatactttagagcatgcttggatgaagggaatagttaggaaagggaacaaaatggagataaaccaatctatttctgtacccatttttacccttccttgcatctcttccctaacatacatcctaggatttcagaatcacaagtactcttttcttaggtttctgatatttgtttagtttattttgagctcttcaagaattgaattcatctacttactttcttctgaaatcattacaggatgacaatattgtggatatttcaacagcatgtaatgattatcctaattcagatgaatactattcatcaaaaaggtttaaatcatcacatgatgctgtccatggtggaatatgttttctaccttctaaccttgaagcaaaccaagagaaaaacgagagtatgtttcaagatagtttctggggagcagagacatcatcttgtgactcgacactagataaacctttggagatcaattatattgatatttctagttctcctttcactccatggagatgagaaaattaatatcattgaagaccagtcaatttcgtatgatgggaactaagatctaagttagctccattagattggtagtagctattttggagtatgtcataaaatatgactagttctacaatagcaaatttattagaaaacaattctgtattagaaattgcataatggtagttatgcataaaaaataactatgggcagttatgtattaagatttaggagcttatatcctaacagtaaatctattagaaagtattaaaaactgcatgatagcagttatgcatagaaaacagccactagtagttatgtattaagagcatatatgtgatggtattagtagattgtgtaattaggaagtatgtgtagttgtttgcagtttatggacagagaatactctatgtaggagacttttgtctctaggacaacaagtgtattttgtatcaatgtattttgtgtgattttagtatttcaataatatatttcattagtttttggaaggtg

SEQ ID NO: 19360 - DNA, 364 bp, Glycine max
  Clone ID: LIB3139-084-A1_FLI
cgaaggagttgcatgatcagagtgctatccttcgtgataacctcaccctttggacctctgacatgcaggatgatggagcagatgaaattaaagaagcagcaccgaaacaggatgaccagtaaaaatattttactgctaattagaattgaacttctcctccatatctttttgaagggagaaggtgtttgttgctaatatctctttggtactgagattttaggcattcatgtttgttatgattgtggatgtactgggccgtttttagtttgtccttccattttcaagtgttttccaaattgcctattttattaaggacgctgaagtttttattatatggaattggaattttaagattcttctcttc

SEQ ID NO: 19361 - DNA, 1490 bp, Glycine max
  Clone ID: LIB3139-099-E6_FLI
agttagtgagtgagtccacccaaatgctggtaattcttggactcattggtggaagtgtgtccatgaagaacgtagtagccagtaacaccgtaatgtctcatctctctcactcgtgacactttcttcatccctaacccattgtcatgagtgccctcaatttgaacgcatggccacgccccagatccagatccagatcccgatccccaacctttcacgccgtcaataagttacccttcttcaccgttaccaaacggagagcattctcgctctctgcggtgctcacggtcgagacggaagagaagccaccaatcttcgacttcaagaactacatgctttccaaagcgtccgcggtcaacaaggccctcgacgactccgtttcgctccgcgagcccaagaagatccacgaggcgatgcggtactcgctcctcgccggcggcaagcgcgtgcgccctgtgttatgcgtggcggcgtgcgagctcgtcggcgggcacgaggccacggcgatgcccgccgcctgcgccctcgagatgatccacaccatgtcgctcatccacgacgacctcccctgcatggacaacgacgacctccgccgcggcaagcccaccaaccacacggtcttcggcgaggacgtcgccgtcctcgccggcgacgccctcctggccttcgccttcgagcacatcgccgcctccacccggggggcctcggcgccccggatcctccgcgcgatcggcgagctcgcgcggtcgatcggctccgagggcctcgttgccggccaggtcgtcgacatcaactccgagggcctggccgacgttggcctagagcgcctggagttcatccacgtccacaagaccgccgcgctcctcgagggtgcggttgtcctcggcgccatcctcggcggcggcaccgacgacgaggtcgaaaaattgagaaaattcgctcgctacattggtctactctttcaggttgttgatgacattctcgatgttactaagtcttcccaggaattgggaaagaccgctggaaaagaccttgtggctgataaggttacttaccccaagcttttggggattgagaagtctaaggagtttgctgcgaaactgaacaaggatgctcaggatcagcttgctggctttgaccctgttaaggctgctcctttgattgctttagccaattacattgcttataggcagaactagattattgttcttgtctctactttacaaacaaatcattgtttgttttaggaatatttagttttttatgaaatgaaaatcattggatttacatttatttacatattgcaatgcaactagggattattaaacagtagcctcccctgcccttcttctatgtgcctgccatagtcgtcaattttgtatgatgaataaatataaatattagaatacctttaatttgtaattagatattatattatattatatccttctacctatattaagttgagtaaaagcatataagtttattgaatg

SEQ ID NO: 19362 - DNA, 2118 bp, Glycine max
  Clone ID: LIB3139-099-E9_FLI
ggaaaagacagaaagagcaacgtcagagagtttgccgtagggttctccttggtttgtggtttccggtattgttttgcactgcttcagatacagagagaagggaatccttcttctctctctctctctttctcttttcctgagtttgaacttggagtaactgagtctatatttttgttcatactagtgtggtcatcactggattttcttggtatatataaaaaaaaaacaaaatattgtctcttgggttggttccaaacaagtagaggaaactatcaattaagtttatagtattttgcttcacagatgtacagaactctctccacttttcattttttttattcccgcagattattttttctttgttggggtttcaaagagtaaatattgttaagtagttaagttgtatatcaattttgcctctttgttctgttcttttctcactagtccagttccagctttttcctttttctgttttaggtgaggattgtcctcagatcccagaagctatccagacttgttacatacgaaaaactcagatctatgtctcatgacaattcacaaaactccaaatatgagaaaagatgaagggtttgaatatttgatgttccaaaaaccatgtctaatttgacttctgcatccggtgaagctagtgcatcttcaggcaacagaaccgaaattggcactgattactcacaacaatactttgctccaccactaagtcaagcacagcctcctccactaaagaaaaagagaaaccttcctggcaacccagacccggaagctgaagttgtcgccttgtctccaaagactctcttggcaactaataggttcatttgtgagatctgcaacaagggatttcaaagagaccagaatctccaacttcacagaagagggcacaatttaccatggaagctgaagcagagatcaagcaacgagattataaggaagaaggtgtatgtgtgcccagaagccagttgcgtgcaccacgacccttcaagggctcttggggacctcactggcatcaagaagcacttctgcagaaagcacggcgagaagaagtggaaatgtgacaaatgctccaagaagtatgctgttcaatcagattggaaagctcactccaagacctgtggcactagagagtacagatgtgactgtggaaccctcttctcaaggagggacagtttcataacacacagagccttctgtgatgcattagcagaggagagttcaagatcagtgacaggcataggcatagtagccaactcaacttcaactcaaccaactgcagcagcagcctctcatcaacaagacatcatccatggtaatagtaacaatttctcattgaagaaagagcaacaagcaggtttcagaccaccttggattggacaaccatcaccctcttctgcttcatcattcttggtctctcatcaagaaaaccctaaccctagaggtggtggtcctggtcccactcttcttcctccttaccaaacagctcctcacatgtcagccacagcgttgctgcagaaagcatcccaaatgggtgcgacgatgagcaaaaccgggtccatgattgggacccaccaacaacaggctcacgtgtctgccaatgccgctttgaatttgtcctcacgtgaccaccagatgacccccactctccatggcttggtacctttcgggaataaagctgttcctgctgttggtaatggtgtttctccttcactccttcaccatatcatcgactctttctcttcaccctttgaagggacttcttttgaggacacttttggtggtgctggtggcgatgccatgacgaaaacaaccaccgccgatgacggtgccagaggaaacaataatgaagccctgacaagagatttcttgggtcttagacctctctctcacactgatatcctcaacattgctggtatgggaagttgcatcaactcctcccaacataaccaaaccccaaacccttggcaaggttagctccatatgtcttatacatatttggtttttctttttctttatttcattggtatatatatacatttattttagcctactttttaattttgcttttgtttatgaattatgatatatattgtcaatcttcccaaagtg

SEQ ID NO: 19363 - DNA, 1346 bp, Glycine max
  Clone ID: LIB3139-100-C9_FLI
gcagtgattcttcttcacttctacatcaacatcatcatcatcaacagcagcatcagcagcaccagcagcaacttcttcagtattggagtgacgcgttgaatctaagtccaagaggaatgttaacaagattgggaccagatggaaggccattgtttaggcttccaacacagcccataaacacaacaaaactctatagaggagtgaggcaacgccattgggggaaatgggtcgctgaaatccgtcttccacgaaacagaacgcgtctctggctaggcacatttgacacggccgaagacgccgccatggcctacgaccgagaagccttcaagctacgaggagagaatgctagactcaatttcccagaattgttcctcaacaaggacaaaaaagaagaacaacaacaacaagaacaagaagcttcttcgccagttctttcagctattgcaaagcagcatgaaccttctagtgaacaccgtgacgtccccatagaagagtctaatgagaatgattcgggtgacgccacggtgagcgatgaccaggttcatgctactactgagagttccgaaggagtttctcaggaaatggtttggggagaaatgtctgcatggttcaatgctattcctgctgcttggggtcctggtagtcccatgtgggatgatttggatgccaccaataatcttctttgccaatcacacattcctttttccaatcccaatcaacaagaactcaatgatgctgagagacaagaacaaaacactggaccaggttacttgtggaaggatcaggattgaaatttgaagttaattttctatataccttgcttctttctcttcctggttgcatatccatgattatcatttatccatcatccactccttcattacattttaggacactttgatggttccttagttacttacttctcactcactggttgcagatattttcaccacacaacctgtgaaccttgcctactactactcctatattcatttcctttttaacttcttttctgaaaccttctgctgaactaaggctccgtgtatttcaaggccttgcagcattttttttcttttacttgactattttacactatttttgcttttgtttttttttaatattttaatgtagtaagtaaaggtagattggcatgaccagggaagaaggagacggttttgtgatttccttctcggttgctccatccgttatgagctatgtttttcagctccaaggatggttcatatatatatatatatataatcatattacttcatttgtagtttgtacgctatcatgttatgtatcattttttttgttgttatattacatatccagcactttacagt

SEQ ID NO: 19364 - DNA, 1615 bp, Glycine max
  Clone ID: LIB3139-100-D12_FLI
ctccttttatcctttagattgatttctcttctcacatctcgatcaaacggataaaattttccaaattgccaccttttttctcatcttattgcatagaaaaagaaactattgttttctggttacaagtgctttcaaggggtgtcttttaagatatgggtttgagttctaagcaggtttctaatagaggacttgattggaaccaaaccttgttgcaggctcaaaacttggaactcccaaatcctcctcctatgaggaaacaacaacaaactcagccatcagagcctttgaagtgtccaagatgtgattctattaacaccaaattttgttactacaacaactacaacaagtctcaacctcgacattactgcagagcttgcaagaggcattggactaaaggtggaactctacgcaatgttcctgttggtggtggaaggaagaataagcgagtcaagaaatcaaccactccagcgatagccaccacttctattagtaccagcacctcaaatgccaacatggatggtgagttgaataaccccatcaccattccttctctagcagtggatgatcacaaaaccacaccttcctctctctatcaatatgtgtgcctgccccaacagaatctgatgagtaccaaagactcagaagaaggcaaagactttggtattggtaatggcatcttcctgagttcaactgtgccttttcctcaaagccaaagccttctgttccccttcacaacatcaaactcctttgacccaaacctatgtgcaatatcatcctcttttcgatcctccagtgtgtataactatggtgaagagtttaaaataatggaggagccaaccctcaacagcataatgcccaacactagtggaagcaccaacacacaaccatgggagatagctgcaacaagttctggcatggaaatgtcaaattattggacttgggaggacattgattcgtttgtgtcaactgatccaaatgttccttgggatgattctgatatcaaaccctgacaaaagaaaagaagaaaaaaatgaaaatagtaacccatgtccttagattagttattaattaattgtggcgttttgtgtttcacacggattagtaagtgttcttgttttcagatggattatatttcgatattatgccacactttgatggtttgaggagatatctgcaaatcacaaaaccatgagaggaagtagcagatggatcatactatccattgatgtttcttcacttgtaagtctacaaagagaagtatttggagctgtcttattttagtttcagcttcagattcaagcaaggggggtccaattaactgtaacccaatgagtttgcctgttcatctctctatcatttcctgtaataaaatgttacattagttttgtatgcaagtagtttagcattattcacaagtatagggaattttgtttatttgttttgtatttctttaattaatggtttctgagtgccttgtgttggggatgactattgacatggggtctgctccagcagagctgaactgacagaatgtgatggaagattcttgtggatatgtatatgtgcatgtgttggaaattggaatgatataacatggatttgattggccaagatt

SEQ ID NO: 19365 - DNA, 732 bp, Glycine max
  Clone ID: LIB3139-100-H10_FLI
aagaaaatttgaagaaactgaaagaggtgaataggaatcttcgtaaggagattaggtatacagatctttcttcacttcgatcgatctccttgagaatgggagattgtatgaacgatctaggcatagaagatctcaagctccttgaggaagaaatggacaaggctgccaaggttgttcgtgagtgtaagggatatcaagtgtgctaatatactggttgatgtaagtgggcaagtcaagcttgcagattttgggttggcaaaggcaacgaaatttaatgatgttaaatcaagcaaaggctctccatactggatggcccttgaggtttttaacttaaagaaccaaggtggttatgggctagcagttgatatatggagcttagggtgtacagttttggagatgttgacaaggcagcctccttattctgagttggaaggagtgctgcctcctatagcacaaaagcacgtgattcaactcatactttctcacgaaagaaacttcagggctgatgagctaatggagttctacaaaatttgaaactctaagaaattcttgcatataattgaggattcccctgttttccctgttatatgacagtaagaggtaatagccttctcagaatattgtgaaaacaaatttgtcattgaaccagttgaagttattttttctgatggtaactcaaacatataccctgatttatctgtctacaatatggaagtttctctatcttacatt

SEQ ID NO: 19366 - DNA, 794 bp, Glycine max
  Clone ID: LIB3139-105-E2_FLI
tctattctttgaaaccaaagttcaaactctgtcttccctgggttctatttcgaaatcaacgacgatgagttccacagaggcagcagccacagagaagaaaggtggaagagggaaaccgaagacttcaaagtccgtttcccgttcctccaaagctggccttcagtttcccgtcggccgtgtcgctcgctacctcaaggccggtcgctacgcccagcgcgttggctccggttcccctgtttatctctccgcggttctcgaatacctcgctgccgaggttcgtcattttcttcctttaattttcgatttgtcttttttgtgtattgtgaccttaatgtgttttggggctttaggttttggagcttgcggggaacgctgcgagggacaacaagaagacgaggatcgttccgaggcacattcaactggcggttaggaacgacgaggagttgagcaagctgatgggatctgtgaccattgccaacggtggtgttctgcctaacattcaccagaatttgttgcccaagaaggtcgctggcaaggggaagaccgagattggatctgctagtcaggagttttagatttaaggctcttgttttcgtatgtagttggttgccttatatagtaagattaggattgacattggatgatgtatagtcctttaacatttgaaaataattagttgttttctaacatggttcctgcatagttttcatttatttgagtttctcgtgaatcgagatatctattctctttttatttgtgtgtttgggcataattttagtgtggtgtttatgttg

SEQ ID NO: 19367 - DNA, 820 bp, Glycine max
  Clone ID: LIB3139-106-C7_FLI
gtgtaagcaaagatggacaaatccgccacttctttcacaggccatctaaagcgtacacaaccggaacaaggaaaagaagaaaggttcacactgataaagaaggaagcgagacaaggtggcacaaaacaggaaaaacaagaccagttttcgtaggtggtgctgtgaagggtttcaagaaaatccttgtcctctacaccaactatggaagacaacagaagcccgagaagaccaattgggtgatgcatcaataccaccttggtactagcgaagaagagaaagatggagagttggtggtttcaaagattttctaccaaacacaacctcgacaatgtggtaataattccattataaagcaggatctttatgatgaagaaagattgatgtctaaccaaattagtgtccataatgatgatgacaataatataatacctagaagtaataatgcaagtgctctcatggactactacaatccttctttcataaattatgaccaattaggtggtcgtagtaatagggaaagttcagctcaacttattccaaatttggccatgcaaggtgatagctcttctttcattcgattagcaatggatgcaaccaaagccatgctggacagaaaatagctccaattgatgaaagaactttcttggtagaattctatagtagtgacaatgaccatatattgatgttgatgttttttatattaatttcaatatacgtaatagcatgtatttattctatatatgggatgataaggtgaaagaaataataagacatgacttttattattattattattattattattattattattattatt

SEQ ID NO: 19368 - DNA, 871 bp, Glycine max
  Clone ID: LIB3139-106-D11_FLI
tgggatttttagtccattgaattggatatatttatcctcatacatgatcttaggagacatttgtttttggtaaccactcgtcccaagcctaaataagttaaaacacagaagaaaatgcagaagcggagggcagggaggaagaagttccacgagacacgacacccggtgtacaagggagtgaggcagaggaacgggaagtgggtaagcgagctgcgacaacctaacaacaaaaacgcgcgggtgtggctcggaacattcgcgcaccccgacatggctgctatagcgtacgatgttgccgccttggctttcaagggcgacagtgcttccttaaacttcccgaacgccgccacctcgtttccccgccttaactcgcggacgtgttccgttagggccattcagtttgcggcgacgcaggcggcggagaagcatttttcttgtgtagagtctcaacaactccaaagggagggatcaggctccggaagcttctctttggacgatgattcttcggagttttcgtcccaaggaaggttcttttgggatgaagaggaagtgtttaacatgccggagttgctgaactgcatggcggaagcgctgattatcacaccgccggcgttggaaagagggttcaattgggttggtggcgaaacgactgtggatttgactctgtggtgaaactgatgaccacttaggttctctgcaaaccagagaggaacttgcaatttcgatctgttgcaaaatattatatatactaatagtctaaagatgtagttcatcatatatactagtactgatacattcaaaagttatatagcgtttgctgtatggttgagattttcgtcaaaaacaagctgtatcataaatcttttctgtt

SEQ ID NO: 19369 - DNA, 1998 bp, Glycine max
  Clone ID: LIB3139-107-A10_FLI
ccttctcacaccaactgccatccattgccttcatcatgagcggcgccaccactcctctgccctccggcgtgagcaccccggacatccgcacccgcgagctcaagcagcccatggacgtggcggagtacctcttccgccgtctgcaccaagtcggcgtccgctctgtgcacggcctgcccggtgactacaatctggtcgccctcgactatctgcccaagtgcggcctcgactgggttggtaacgtcaacgagctcaatgccgggtacgccgctgacggctacgccaggatcaagggcatctctgccatcatcaccaccttcggtgttggtgagctgtctgccatcaatgccattgctggtgcctactcggaatatgttcccgtcgtccacatcgtcggctaccccaccactgccgctcagaagaacaacctcctgctccaccataccctgggcaatggcgacttcaactccttcgccgacatgagccgcaaggtctcttgcgccgtgtcaatgctcaacgacccccatgaggctgcgaccctgatcgatgatgccatcaagaagtgctacgtcctctcgcgtcccgtctacattgctttgccttcggatatggtcggcaagaagattgagggcgagaggttgaagactccgctgaacctcgagttctctcctaaccacgaggagaaggaagactacgttgtcgatgttgtcctcaagtacctccacgctgcgaagaatcccgtcatcctcgttgatgcttgcgcaatcaggcacagggctctgaaggagaccgacgagtttatcaagaagaccggcattcccactttcgttgctcccatgggcaagagcgctgtcgacgagaccctgcccaactacggtggtgtgtatgctggcgatggctccaacgccggtgtccgtgagcgtgtcgagtctgccgatctcatcatcagcatcggtgctgtcaagtctgacttcaacaccgccggcttcacctacaggacttcccaacttaacaccattgatctgcacagctatggcgtcgccgtcaagtactcggaataccctggtgttcgcatgaacggtgttctcaccaaggtcaccgccaagctgggcaagctcaacattgagagcgggcccgtccccaacaacaccgtccccaaggagcacgctgactcttccgaccctaccatcacccaggcctggctctggcctcgtgtcggccagtggctgcgtgagaacgatatcgtcatcaccgagaccggtactgctaacttcggtatctgggagactcgcttccccaagggtgtcactgccatctctcaggtcctctggggctccattggttacgccactggctgtcttcagggtgccgccctcgccgctaaggagcttggtcgcgagcgcaccattctcttcactggtgacggttccttccagttgaccgctcaggaagtcagcacgatgatccgcaagaacctcaaccccatcatcttcgtcatctgcaacgacggctacaccattgagcgttgcatccacggctgggatgccgtctacaacgacatccagaactggaactacaaggacctccctgctgccttcggtggcaagccggagcagttcgacacctaccaggtgaagaccaaggaggagctcaacaagttgtttgctgaggagagcttcaacacgagcaagaagctccggtttgtcgagctttacatgcctcgcgatgatgctcctgcagcattgatgctgacggctgaggctgctgccaagcgcaaccttgagggttaaactattgtttgcttgtattatgaaaagcggattgtcagtggagttcggtaatgattgggggtttcggtttttcttttctcattcccacttacctccttccttccaccatgaggtcacgaagttttccatggtattaaataggagctaccagagccggaaaatgggctgtaaatagaatagaatatcaatggcaccttatgtcctgggc

SEQ ID NO: 19370 - DNA, 1073 bp, Glycine max
  Clone ID: LIB3139-119-A12_FLI
agaaaagattagtgaggttgaaatgtcgcaacgatcggtgccggcgccgttcttgacgaagacgtatcagttggtggaggatcaggggacggaccaggtgatatcgtggggtgaaagtgggaacacttttgtggtgtggaagcatgcggattttgcaaaggatttgcttccaaaatatttcaagcacaacaacttctccagctttgttcgacagctcaatacctatggattccgaaaaattgtgccagacaaatgggaattcgcgaacgagcatttcaagcgagggcagaaggagcttctctccgagatcaaacgccgcaagaccgtgcctcaatcgtcggcacatcccccggaggccggaaagtccggcggcgacggcaactctccgttgaactccggcagcgacgacgcgggctccacctcaacctcgtcctcgtcctccggttccaagaaccagggatcggtggaaacaaacacaacgccttctcaccagttatcgagcgagaacgagaaactgaagaaggataacgaaacgctgagttgcgagctggcacgtgcgaggaagcagtgcgatgagctcgtggctttcctcagggaccgtctgatggtgggtcccgatcagatcgatcgcatcatgcggcaaggaagttgcggatctgaaaacgtggtaggtgaaggcggtggaggagactgtttgaaactgtttggtgtttggttaaaaggggatacgctaacagacaaaagaaacaaccacaaaagaggccgcgaagaccaaatgggcttcggtgggcctcgcctcaaggagtcaaagcccgttgttgactttggagctgtaaatatcatgatgaagagcaacagggtttgcaactgaatgaggctctcacctcgccacgtaatcttttaagcaattaaagaaggaataggataatgattagtgaaaaaagaaaaggctaagcgataattattttgggtaaaagaccaaatgcactagcctatgctttctacacatgttgaggttgtgtaatttgtaatgtacgtaggtcaatgcctctatgaatattgattaggaaatt

SEQ ID NO: 19371 - DNA, 618 bp, Glycine max
  Clone ID: LIB3139-119-H6_FLI
cttcccacattaaataccaactgtgtagtatagtactacttcaatgttaactatgttcttctttttttgttctcatctccacaccatgtcctaatctttctgcaccatcgttctccatttttggctttacaaaaccactgtgtctgattaagggttctttaatatttccaatatttcttgtagtgaaaaagttgttagctaaaagaagaccaagtttttggtgttgtagaaggaagagaagaattaacatgaaaattcagtgtgacgtgtgtgagagagctccagcaacagtgatttgttgcgcggatgaggctgctttgtgtgccaaatgtgacgttgaagttcatgctgcaaacaagcttgcaagcaagcaccaaagacttcttcttcaatgtctatcaagcaagcttcccacatgtgacatttgccaagacaagccagcattcatattttgtgttgaagacagagcactcttctgtcaggattgtgatgaaccaattcattcagccggaagcctttccgcgaaccaccagcgcttccttgctactggtatccgagtggcctcgagttctaattgcaccaaagacaatgaaaaaagtcactcggagcctcctaatg

SEQ ID NO: 19372 - DNA, 1323 bp, Gossypium hirsutum
  Clone ID: LIB3145-011-C10_FLI
ctaagctgagctctccctagaggaaaaaatccaatggagaattcaactcaggaatcccacctccgatccgataacgccgtaacctacgaatcaccctacccactctacgccatggccttatcttccacgcccgccgtcacccatctcaactaccaacgcatcgctctcggcagtttcatcgaggattacactaacagagtccacataatctctttcgaccctgaatcacttaccctcataacccacccatctttgtcgttcgaccacccttacccacccaccaaacttatgttccaaccccaccggaaatcccctttctcttcctcctccgacctcctcgcttcatccggtgactacctccgtctctgggaagttgggcactcttctatcgaacttatctccgttctcgacaacagcaaaaccagcgagttttctgctcccttaacttccttcgattggaacgacgttgaacccaatagaatcggaacatccagcatcgacaccacctgcaccatttgggacattgaaaaaggcgttgtggaaacccaattgattgctcacgacaaggaggtttacgacatcgcttggggtgaaggtagagttttcggttccgtttccgctgatgggtccgtaaggattttcgatttaagggacaaagaacactcaactatcatctacgaaagccctcaaccggacacccctttgctaagattagcttggaacaaacaagatttgaggtatatggctacgacactaatggatagcaataaagttgtgattttggacataaggtcgcctactacgccggtggctgagttggatagacatggagccagtgtcaatgcgattgcttgggctccccagagctgtaagcacatttgctctgcaggggatgatacgcatgcccttatttgggagttaccaactgtagctgggcctaacggaatcgatcctttgtctatgtactcggctagttccgaaattaatcagttgcagtggtctgctgctcagcctgattggattgccattgccttctccaacaaaatgcagcttctcaaagtttgaggttccctgcttgaaatgtattcaactctcatttttgttgcatatactgctcacgcttgtaattaggtgggagttaaaaactgtagaatcagttttattggctgataattttgttagtactttgtaagaccagctttaatctacaattatttgttaggtcctcacaacaaatatgagactcgaatgcatatttggattttgattgaatttggttattgatatcatatatatatataacgctaatctggctaaacttct

SEQ ID NO: 19373 - DNA, 633 bp, Gossypium hirsutum
  Clone ID: LIB3145-029-C10_FLI
taaacaaaactcctataatggctacatcctcgggttcatcagcaacacaaatcaactcaggctcagaagaagcattaatggacgaaaggaaaaggaaacgaatgatatcgaacagggaatcagcaaggagatcaaggatgaggaaacaaaagcatttagatgatctaatgactcagttgactcagttgcagaaacaaaaccatgagatcatcacaaacataaacttcaccacacaacacctcttgaatgttgagtcagagaactcggtgcttagagctcaactcaatgaactcactcataggttacagtccttgaatgaaatcatcagcttcttgaatgatgatcatggcgatgacgacgacgatgatgataaaacaagcattgacttcactcagcctgctgtagctgatactgccttccttaatcctttccatttggctttcttgaatcaacctatcatggcctctgctgataacacgtttcagtattaattttctataatgccataattttaatgggatttttaatctcagtttatatatatatatatatatatagttgtacaagcagtagtatgaaataaaatatgtgaaaatcataaagctatggtatggttaatggtagatttttttc

SEQ ID NO: 19374 - DNA, 1264 bp, Gossypium hirsutum
  Clone ID: LIB3145-037-A6_FLI
tgagctctccctagaggaaaaaatccaatggagaattcaactcaggaatcccacctccgatccgataacgccgtaacctacgaatcaccctacccactctacgccatggccttatcttccacgcccgccgtcacccatctcaactaccaacgcatcgctctcggcagtttcatcgaggattacactaacagagtccacataatctctttcgaccctgaatcacttaccctcataacccacccatctttgtcgttcgaccacccttacccacccaccaaacttatgttccaaccccaccggaaatcccctttctcttcctcctccgacctcctcgcttcatccggtgactacctccgtctctgggaagttgggcactcttctatcgaacttatctccgttctcgacaacagcaaaaccagcgagttttctgctcccttaacttccttcgattggaacgacgttgaacccaatagaatcggaacatccagcatcgacaccacctgcaccatttgggacattgaaaaaggcgttgtggaaacccaattgattgctcacgacaaggaggtttacgacatcgcttggggtgaaggtagagttttcggttccgtttccgctgatgggtccgtaaggattttcgatttaagggacaaagaacactcaactatcatctacgaaagccctcaaccggacacccctttgctaagattagcttggaacaaacaagatttgaggtatatggctacgacactaatggatagcaataaagttgtgattttggacataaggtcgcctactacgccggtggctgagttggatagacatggagccagtgtcaatgcgattgcttgggctccccagagctgtaagcacatttgctctgcaggggatgatacgcatgcccttatttgggagttaccaactgtagctgggcctaacggaatcgatcctttgtctatgtactcggctagttccgaaattaatcagttgcagtggtctgctgctcagcctgattggattgccattgccttctccaacaaaatgcagcttctcaaagtttgaggttccctgcttgaaatgtattcaactctcatttttgttgcatatactgctcacgcttgtaattaggtgggagttaaaaactgtagaatcagttttattggctgataattttgttagtactttgtaagaccagctttaatctacaattatttgttaggtcctcacaacaaatatgagactcgaatgcatatttggattttgattg

SEQ ID NO: 19375 - DNA, 1265 bp, Gossypium hirsutum
  Clone ID: LIB3145-037-G9_FLI
ctgagctctccctagaggaaaaaatccaatggagaattcaactcaggaatcccacctccgatccgataacgccgtaacctacgaatcaccctacccactctacgccatggccttatcttccacgcccgccgtcacccatctcaactaccaacgcatcgctctcggcagtttcatcgaggattacactaacagagtccacataatctctttcgaccctgaatcacttaccctcataacccacccatctttgtcgttcgaccacccttacccacccaccaaacttatgttccaaccccaccggaaatcccctttctcttcctcctccgacctcctcgcttcatccggtgactacctccgtctctgggaagttgggcactcttctatcgaacttatctccgttctcgacaacagcaaaaccagcgagttttctgctcccttaacttccttcgattggaacgacgttgaacccaatagaatcggaacatccagcatcgacaccacctgcaccatttgggacattgaaaaaggcgttgtggaaacccaattgattgctcacgacaaggaggtttacgacatcgcttggggtgaaggtagagttttcggttccgtttccgctgatgggtccgtaaggattttcgatttaagggacaaagaacactcaactatcatctacgaaagccctcaaccggacacccctttgctaagattagcttggaacaaacaagatttgaggtatatggctacgacactaatggatagcaataaagttgtgattttggacataaggtcgcctactacgccggtggctgagttggatagacatggagccagtgtcaatgcgattgcttgggctccccagagctgtaagcacatttgctctgcaggggatgatacgcatgcccttatttgggagttaccaactgtagctgggcctaacggaatcgatcctttgtctatgtactcggctagttccgaaattaatcagttgcagtggtctgctgctcagcctgattggattgccattgccttctccaacaaaatgcagcttctcaaagtttgaggttccctgcttgaaatgtattcaactctcatttttgttgcatatactgctcacgcttgtaattaggtgggagttaaaaactgtagaatcagttttattggctgataattttgttagtactttgtaagaccagctttaatctacaattatttgttaggtcctcacaacaaatatgagactcgaatgcatatttggattttgattg

SEQ ID NO: 19376 - DNA, 577 bp, Gossypium hirsutum
  Clone ID: LIB3145-042-F2_FLI
ttttgtatttcatactcatttagcccctttcattagcatcgaaatcactccagttttctttatcactgaaaaatgtcttgctgtggtggaaactgtggctgcggttctggctgcaagtgtggcagtggctgtggaggatgcaagatgtacccagacctgaacgttgccgagatgaccacaactgagactctggttcttggtgtagcaccccagaaagcacactttgagggagctgagatggaattcggggctgagaacggctgcaagtgtggagacaactgcacctgcaacccttgcaattgtaaatgattagagaccaaagccaaagctccctggaagcagagacgcctttgtctttaagaaataatatgttttgttgtttatgtgtttttagaataaagtagccatggcttgtcgtaggttttgcctgttgccgccacggttacttggtgcttgccaatagatagagtgaagtactaatatttacttgtttttctgtccagtgtgagcatctctgctatctcaggatatattgtgactattacataattaatgtaaggaagtgagtcagattcct

SEQ ID NO: 19377 - DNA, 614 bp, Gossypium hirsutum
  Clone ID: LIB3146-010-H6_FLI
atctcatggcacaagtttcccagctacaaaatgaaaatcaccagattttaacaacggtgagtatcaccacacagcgttacttgaacgtggaggctgagaactcggtgcttagagctcaagccaacgagcttagccacaggttacagtccctcaatgatatcattgattccttaaatggatgcaataacaatattggtggtgctgacggtggtggtgattgtggtggttttaatgttgcaacgattggtttcaatgagatggttgatcatagctttattaaccctttcaatttggcttacttgaatcaacctatcatggcttctgcagataataacatgtttcagtattgatcttcatgagcttattgatatatatatagatatatctgatcaaagggggttaaagtggaggagatttcaatagaggaaagatcatggtgtttttaatgtttttttggggtttggtttttagagtattttcaatgattattagtagtaggggaattgtgcttattggggtttaatttgtataacctatccaatgcaaagcaaaatattattaatgtattttgaggttttagtttttttttaattttcattttttaaattataatt

SEQ ID NO: 19378 - DNA, 895 bp, Gossypium hirsutum
  Clone ID: LIB3149-029-F9_FLI
tcttctttcactcagttcgacaacaccaaggccggttccaaagccaagaaccttgaaaaagtggcaaacgagacgactcagaagacaagccgagggagagagaaagaagggaagactcagcgaactcgaaagaacatttacagaggaatcaggcaaaggccatgggggaaatgggcggctgagataagagatcctcacaaaggtgtccgagtctggctcggtacatacaacacggctgaagaagcggctcgagcctacgatgaagccgccaagcgcatccgtggggagaaagccaagctcaacttccctcaaactccacacctaactcagcctcctgctaagaaaaggtgtatgatggctcctgagttgactccgccgagttctgaaacaaagagcccaccaaccccacaactttttatgggttttggttacgagaatggagtttacagaccgagtgaagcaatggaaagcgagatggagctgaaggagcaaatctcgagcctggagtcgttcctgggtttggagcctgatgagacaacaactgagttgagtggaagtgctgagcctgactcagtggacctttggatgcttgatgaccttgtgacacatcatcaacaacagcctcagctcttttattagaaattaaaaagttttaattagggtaatgttatgtttgatatgattatgcttaagactttaatgtttgtattaatgaagggtaaatagttgtgacaataaaaagattggccacccagttttaatttatatttatttctaatttgggtgacatgtaaattggtttcgagaaacattgaagtacccataatgttggttcatgtatcagatatagtaaacactttggattaataaaaaaacctcctaatattttattttc

SEQ ID NO: 19379 - DNA, 415 bp, Gossypium hirsutum
  Clone ID: LIB3149-063-D10_FLI
gctttatttctggtgttcttcttctcttcttcctgtttcttatttcctcttcccatttatctgctcgttccctagcaaacaaacaaggaaaagaagaggtagagcttactcaaacagcggatatggaagacaatgaactaatgaatcagctattgggggtagaagcttgtgatgctggagatgatgaatgcttgaagagaagaataatctcagaggctcacttggactacatttacacccagcatcataagccttgaggactattccttgtatatattcttgttaagttgttccatgtataattaagttgtctgggaacctccagaatggattatggttaaggttaatgaatatgtatgttagtataaacttaattatgattattaatgtaagtgttaaacctaattatgtagct

SEQ ID NO: 19380 - DNA, 942 bp, Zea mays
  Clone ID: LIB3150-001-B6_FLI
agcgccggcgcctccatttcgttttcctcactctctcctccagctcagggtccggcggcgaagggaaggcaagatgtacaccgcgaggaagaagatccagaaggagaagggtcttgagccctccgagttcgaggactccgttgcccaggctttctttgatctggagaacgggaaccaggagctcaagagcgacctcaaggacctgtacatcaacaatgctatccagatggatgttaccgggagtaggaaggctgttgtcattcacgtcccataccgcctgcgcaaggccttcaggaagatccatgtcagactcgtcagggagctggagaagaaattcagcggcaaggatgtggtaattgttgctacacggaggattgtgaggccacccaagaagggttcagctgttctgcgccctcgcaccaggactctgactgctgttcacgatggcatcttggaggatgttgtctacccagctgagattgtggggaagcgtgtcagataccgtctggatggttccaagattatcaagattttcttggacccaaaggagaggaacaacactgaatacaagctggagacctgcactgcggtctaccgcaggctgtgtgggaaagatgtggtctttgagtaccctatgaccgaaaatgcataaatatgatgccctctggatatctccactctatttcgttgattctgaatgttatgttgggtctccctatgtacttcaaaaaacatagttttgatgctaaagttgcctaggaatttggtacggtgaagtggcagtggacgtgaacaatgttaagttttgagcatttaaattaaacctttgccctgataacgttgcgagttatttaatttcttgctttgttcgcggcttgtcagtctgttaaactgtttattttatttggcatagcctgaaggagtgaaatcaacagttgtcgt

SEQ ID NO: 19381 - DNA, 1230 bp, Zea mays
  Clone ID: LIB3150-001-D6_FLI
agccaaagcaagttgctaggtcctttgaaccagcaactgaagcttcctcgtctcatcatcgagaccagtaagcaacatggcggctaatctcaagtgggctcctgttctagccctcctcgtcgtcgttgctgccatggttggcaccaccagcgccggcaacatcgcagtgtactggggccagaacggcaacgaaggcagcctggcggacgcctgcaactccgggctctacgcctacgtcaacatcgcgttcctcacaaccttcggcaacggacagaccccagttctcaacctcgccggacactgcgaccccggctccggcagctgcaccggccagagcagcgacatccagacctgccagtcgctgggcatcaaggtgctcctctccatcggcggcgccagcggcagctacggcctctcctccaccgacgacgccaacagcgtggccgactacctgtgggacaacttcctgggcggcagcggctcgtcccgccctctcggcgccgccgtgctcgacggcatcgacttcgacatcgagaacggccagtcggcgcactacgacgacctggcgaacgcgctcaagggcaaggggagcgtgctgctgacggcggcgccgcagtgcccctacccggacgcgtcgctggggccggcgctgcagacgggccagttcgacaacgtgtggatacagttctacaacaaccccgggtgcgcgtacgccaacggggacgacaccaacctggtgaacgcatggaacacgtggaccagcagcatcaccgcggggagcttctacctcggcgtcccagcgtctccccaggccgcgggcagcgggtacatcgaccccggcaccctgacgggcacggtgatccccgccatccgaggcattggcaactacggcggcatcatggtgtgggaccgctttaacgacgtgcagaacaactacagcagccaggtgaagggcagcgtctgatgggcatatgaagcttcaagctacagcacctagccatgcatatatatatagtggctattcgtcaagttatcggactagatatacaaatataataagagcggatcatcgggagacaaagacgcatgtcagctattgtctcgttttctaagcaacgagcgagagctgcatgcgctggttagatttaatatggatattgcccatacattatgtaattaaatcaaataaatgttaagttcatactgaatgtgtctcttcagggtttctat

SEQ ID NO: 19382 - DNA, 917 bp, Zea mays
  Clone ID: LIB3150-001-H4_FLI
ctccggtcctcccttctctccgtagaaacatttcccgacgggtgtttcccacgccggaatggaccagccggcaccataagcccaagattcgtttgatgagtttgtacgatactggctctacagttaggagaacacatttaatctaccttcactagcattcagtaatgcctttgcctaaatcagacctggggtcataactctttagtagagaaccaagaagatgcaggcatctagggcaaggcttttcaaggagtacaaggaggtacagcgagagaagtcagctgaccctgatatccaattaatatgtgatgattctaacatattcaagtggactgctcttatcaagggcccttctgaaacaccttatgaaggtggtgtgtttcaacttgcattcgcaattccagagcagtatcctctgctgcctcctcaagttcgatttttgaccaaaactttccacccaaatgtgcatttcaagacaggtgagatttgtctggatatattgaagaatgcatggagccctatatggacccttcagtctgtttgtagagccataattgctctgatggcccaccctgaaccagacagcccacttaactgtgattcaggcaatctcctgcggtccggtgatatcagaggctatcaatcaatggcccgcatgtatacaaggctggcggccatgccaaagaaaggttagccgtagaacatgtgccaggccaagagcctattgtccatgcatggctacatgttgtcaggtctgccttgtgctgtctgtatgaactttgtggttcttgattcatgaaatactaaccgttcgtgtgttgcgtgtgtgtctggggtaatgagaggacactcgggttctcgatggtgttggtctgtgatgtatttagtaataagaaaataaaaaatgatttctcgat

SEQ ID NO: 19383 - DNA, 543 bp, Zea mays
  Clone ID: LIB3150-001-H5_FLI
cagggagttcacctcgctcggtgtgcagtgagcgactagattgttgactgcataacaaaacccatcgtcgtcggatcggagatgatgagttccgtcgtcgtggatgctgctgctaccagcagcagcgagaagaagacgtcgtggccggaggtggtgggcatgtccatcaaggaggcgacggagaccattctcaaggacatgcccaacgcgtacatccaggtgctgcctgttgggtcgcccgtgacgctggaccttcgccccgaccgcgtccgtatcttcgttgacaccgtcgccatgactccgacagttgggtgatacacaccaaatgcaataaacaaaccctacttttttattttatgtttccagttaataataaaccaggccttagcttcttggttgtccttccttggttggtgttagcttctaagctactagtacaccattaaaaaaaaggaggacctcatgtatggctaccgtgaaaaatgtgatcttgatggaataatatatcataaataagcaattaatgatgatatgcaaccatct

SEQ ID NO: 19384 - DNA, 710 bp, Zea mays
  Clone ID: LIB3150-002-E6_FLI
cgctgcgccgccgcctccgacatcgtcccttcgtccccacgagcaaccgataatccgccggcgttgagatgttggtttatcaggatctcctatctggcgacgagctcctgtcggattcattcacctacaaggagctcgagaacggcgtcctgtgggaggtcgagggaaagtgggtcacccaaggtcctgttgatgtggacattggtgccaatccatccgccgagggtggtgaggacgaaagcgttgatgacacagctgtgaaggtggttgatattgttgacacattccgtctacaggagcaacctccttttgacaagaaatcatttgtgtcttacatcaaaaaatacatcaagaatctcactgctgtgttggagccagagaaagcggatgagttcaaaaagggtgtcgagggtgcaaccaagtttctccttagcaagctgaaggacctccaattttttgttggtgagtccatgaaggatgatgcgtctgtggtattcgcctattacaaggatggtgccactaatccgacattcctctatttctctcatggtcttaaggagatcaagtgctaggcgtgcggcgaaattagttacccatgttgggtactatctatgtactattattatatccaaaactatagttgtcctggctgaattgaactcaaaagggtttgtttgagaaaaaattgtcccaagattggattgcttgtt

SEQ ID NO: 19385 - DNA, 1177 bp, Zea mays
  Clone ID: LIB3150-002-H3_FLI
cctctctcccgcaaaccccgcgaccgcagtcccagccgcccctaatctcctctctccacaccccaaatcgccgcccacagatctcgccgacaccagcgcagtgacccagcccccgccttccccatcgtgatagcagcgtctcctagacgccccctccccttggcctcggcgcgatgcctgcacagctcctgtctgccgcgtgaggaggcgccacgacacgtgcttgtgtggctgtcgacgcgaaggcacccgtgatctgcgtcgactctgaggaggagcgccgcctccttgagatccaggaggtcgaggtggctacggcgcgtactcgtacggtggtcgagagtgccgagctcgcgacggtcagaggtccgcgctcgtaccccagagattgctccctcccaaaactgctaggctggatgagcgggctgataaaggagatggtgcgtgtcgagtatcgcgccgccgggagtcaacgacgcggctcggtggcgggggtacaagcttccagaggcagtcacagcacaccgtccgctgcaacaaccatgaattgaacgcccctatcgggtacaagaaacacctcgaggagtttgagccatttaataaaaatgaagttttatttgaagactattgcaactctatgttaaaggatgggacttggactggccacatggagttgcaagctgctatgcactcacagttttaaatattgagttagattcatacaataattagtcaaatcgatcgtggagctgtccgtgtttggcattccaagtagtgacaagaaggggagggaacatgcctcgaatgctgctggtttaggggttcttcgcgcgcatgtttggccaggcctcgaaagtcaatggccatggctcactgtcgccatcacttcttcctcatggttgctactgctccagactgactctacaagttctagccctattctacaactacataacgagagagaaatggaaaccttgcacaagaggtacaaatgcttgcacaaaaacttgagaatgagctgtagaaactaacaggaagggagaagcaatgcgccagaattaattttggagtggtgatgctgatgtattccttttgcggttatttctgaataaataatgctagattttttattggaattactttcgtatgattattttttaaataatgtatcattttt

SEQ ID NO: 19386 - DNA, 734 bp, Zea mays; identical to SEQ ID NO: 17228
  Clone ID: LIB3150-004-B5_FLI

SEQ ID NO: 19387 - DNA, 1238 bp, Zea mays
  Clone ID: LIB3150-004-D9_FLI
aagcagcagcagcagcagcagccacagcaggcggcagcggcagccaccggcgtgtggaagacggtcaagcccttcgttaacggcggggcctctgggatgctcgcgacctgcgtcatccagcctatcgacatggtcaaggtgaggatccagttgggtgagggctctgctggtcaggtcacaaggaacatgcttgcaaatgagggtgtccgttttttctacaagggtttgtccgccggattgctgaggcaagcgacgtacacgactgctcgtcttggatcctttagggttctaactaacaaagcagttgaaaagaatgaagggaagccattgcctctaattcagaaagcttttattggtctgactgctggagcaattggtgcttgtgttggtagtcctgctgacctggcactcattagaatgcaagccgattcgaccctgccagttgcacaacgacgcaactataagaatgctttccatgcactctaccgtatcagtgctgatgagggagtcctcgcgctttggaagggtgcaggtccaactgtggtgagagctatggcactcaatatgggtatgcttgcttcctatgaccagagtgtcgagctatttagggacaaatttggcgcaggagaaatttctactgttgttggagccagtgctgtttctggattcttcgcctcagcatgcagtttgccctttgactatgtgaagacacagattcagaagatgcaacctgatgcgaatggcaagtacccatacacagggtctttggactgtgctgtgaagaccttcaagagcggtggcccattcaagttctacactggtttcccggtgtactgcgtcaggattgcaccccatgtcatgatgacctggatattcttgaatcagatccagaagtttgagaagaagatcggcatataggattcccatcggacggatacagggttgaccgttctatgctattactgcttgactctgtaataacattccagctgctttcgcaccatggtagttggttttggtagagacaagtctgttacaatttttttaccttagctttccaattattgtgttgcaataatcgaattaattgttgctgggggatttttttttggggggtgggtgggtggcatgcttttgttggctgggatgtagccataaggagagggggatactacctagttatgtcattgaatggaattggaccatattttatacagatttttaccttcagttctttt

SEQ ID NO: 19388 - DNA, 657 bp, Zea mays
  Clone ID: LIB3150-005-H6_FLI
gtcgacggtgagccgtgcgtccctcgaccagaagctcgccctcgccaagcgctgctcccgagaggcgaccctcgccggagccaaggcggcagccgtggcgactatcgcctccgcgatccccaccctggccagcgtgcggatgctgccatgggccaaggccaacatcaaccccaccggccaggcgctcatcgtctccacggtggctgggatggcctacttcatcgccgccgacaagaagatcctgtcgctggcgaggcgccactcgttcgagcaagcccctgaccacctcaagaacacctccttccagggcaccggccgtccccacccggctttcttcaggccgtgagacgtggccttcgtccagagctagctacctacctctttcagttcgatcgtcgtcagtgcaaagcaccaccaatgcctgaataaatttaactacgaggctagctgctgaacatcgatctgctactgctagtattactacggcgaggctgctgaacagcgctgtagagtagtattggtgctcagttcagaatgtataatgttacttctaccgattaaactgttaaaaaaccctagtacgcttatgtggtcaaataccacttatatctgtgagcagtgtcgcatctctatataaaggaatatgtatcttctcaa

SEQ ID NO: 19389 - DNA, 966 bp, Zea mays
  Clone ID: LIB3150-006-A5_FLI
gttttgctgctctccgaccccgagctccgaaggccgcagcatcaggcgcggcccccctcgcgtgtgaccgagatggcgctgccgaatcaggggaccgttgattaccccagcttcaagctcgtcatcgtcggcgatggtggaactggtaaaactacatttgtgaagaggcatctcactggagagtttgagaagaaatatgaaccaaccattggtgtggaagttcatccgttggatttcaccactaactgtggtaagatcaggttctactgctgggataccgcagggcaagagaagtttggtggcctcagggatggatactatatccatggccagtgtgcgatcatcatgtttgatgtaacctcaaggcttacttacaagaatgttcctacgtggcatagggacctgtgcagggtctgtgaaaacatccccattgtcctctgcggtaataaggttgatgtgaagaacaggcaggtcaaagccaagcaggttactttccacaggaagaagaatctgcagtactatgaaatttctgccaagagcaactacaactttgagaaacctttcctgtacctcgcaaggaagctggctggtgatccgaaccttcactttgttgaagctgttgctcttaagcctccggaagttaccatcgacatggctatgcagcagcagcatgaagctgagcttgctgcagcagctgcacaacctcttcctgatgacgatgatgatctgattgagtagaaaggatcatgagtcttgaacttgagcaggagttgtgccttgcgtgttttaagttgttctagggtgaactcttgagttctcattgtctggatcatctttttctccttggatgtgttgcatcttttgagtgtggaaatggatggtactcctcgccatgaatttgctggctactttatacattgctttgtaactctgtttgatgataaactttgttgtggcaatcctctt

SEQ ID NO: 19390 - DNA, 636 bp, Zea mays
  Clone ID: LIB3150-006-C9_FLI
cagctcagggcgaaacaaaaccctcctccctaactgccccctcgcagacgagacgcgtgtagctagggttttggcctcgccgcgcacgcctcctgaagcttctagacgttcgaggaggaggagaggctcccgccgccgccgcagccatggcgtccaccaaggtgcagcgtatcatgacccagcccatcaacctcatcttccgtttcctccagagcaaagcgcgcatccagatctggctcttcgagcagaaggacctccggattgagggtcgcatcatcggattcgatgagtacatgaacttggtcctcgaagatgctgaggaaatcaacgtcaagaaaaacactaggaagacactgggccggatactcctcaaaggtgacaacataactttgatgatgaacagtggcaagtgaaagttcttatggcaggaacgatgtttggtgctcgcgttgagtatttctggcacgttgtactccatccattcagacttacatgtatcatgtcattgtggattagtgagagagttgtacctgctgttaatgacctgagtaaaattatgctagatgctggtcacttgtgtgtgccatattggcatcttttctgtttccatgttcagcttgacctgaagttttgctc

SEQ ID NO: 19391 - DNA, 1055 bp, Zea mays
  Clone ID: LIB3150-006-G10_FLI
gtccttcctcgcgagaacgagaggctagaccgcatccagtggtggggctcggtatgggcggaagcgaatgcgccctgggcgacgccgctataggcgaggaaaccctaaattacgacggcgatgacgttgagatggccgacgccgactcggatacggaggaagcccgagcagctgaggtctccgctgcaactggaggatccgccggaggtgttaggcaggcggagaaggacggaccggatggaaagaagaagaggaagaagaggaggaacaaagggaagaagaacaaagggaggcaagatggggcgcccaccaacatcgcggacattaatcgatttgttcttaacacttgcaagcgcttgaaggagaagaagtcgtaccttgtctggaatgctgttggctgccttggtgtcactgctgtcaatgatcttgttagagaggtggaggctattcagaagtgtggtgggcagactattgctgatggaagccgctttcgcactggcggtggaattctctggaacatcttaaagtcgcgggaacccaaggcttacaaggaaataatggcaaagggaaaggaacttgagaagcagtttaggtgtacgaaacgaccacagattagcagaaacgaagatgcaagttcacagggcagtgctttaattgatgatgaaattgaagcgcgagaccaaaaggaaacattggatgaccctgagcaattggatgatgtggaggtacacgtatcagacaataaagctcaacgcaaaccactggcggacagaattcgcgctcctgttgcatatgatgatctgtttgaagagggggagatacacgacggagaaccacgtagttagcatttcaaagattatgcctcgtcatgagtgcccaaaggaatgtcacataattgcaagagcatgattatgatttaagaactaccactgcaatgtagcagtttttcctctaaacatcatccccgtgaacttgcagcgatggagattttgttgcgttcggtgaaaccattgttgggcctgaattcagtggtcaatggaaatcatggttaaacg

SEQ ID NO: 19392 - DNA, 959 bp, Zea mays
  Clone ID: LIB3150-006-G8_FLI
ggcaaggccaatcccgagcagtggtgcgaaacctcgagcgctcgcgccggtgaccataacaaagaggaagccgcggtagcactggtagcggcagcagtaagggggagatgtcgtcggcgttcagcggcgatgagaccgcccctttcttcggcttccttggcgcctccgctgcgctcgtcttctcatgcatgggggcggcgtacgggacagccaagagtggcgtcggcgtggcgtccatgggtgtcatgcgcccagagctcgtcatgaagtccatcgtgcccgtggtcatggctggtgtgctcggtatctacggcctcatcatcgccgtcatcatcagcactgggatcaaccccaaggccaagccatactacctctttgacggctatgcccacctgtcgtctggccttgcctgtggtcttgctgggcttgctgcaggcatggccattggcatcgttggtgatgctggtgtcagggcgaacgctcagcagccgaagttgtttgttggcatgatcctcatccttatttttgctgaagcgcttgccctctatggtctcatcgtcggcattatcctctcgtctcgtgccggccagtcccgcgcagattagaggcacgtttcagatgtcaacaccgtgccgccgacagttgcctggtcgtagctgggtcatgttctatatccatgagacaagaagctggagcactttgactctttgagaggcttacttttatgctgtctagttttccatcttctgttgagtcgagaaaacaagaaaggctgtgtagccaagggatgacttttacccttgtgccattcttttccctgtcgtggtggggggtgggttgcggttgatgcttatttatgcacagtttttgcttgggtcggggctggggctgggacgttggtgtaatgtggtgaataagcgagtgcatgcaacgcaattggaacttaagacatttttggt

SEQ ID NO: 19393 - DNA, 1397 bp, Zea mays
  Clone ID: LIB3150-007-B5_FLI
ggcaggcggcaagggtcagccgcccaagaacgccgccggcaagggccagggccagggccagaagcagcagcagcccaagggtggagcgggcggcgccggcgccggcgcgaaagtggtggcgctgccgcactcgcagccgacgccgcagcagctgatgcagatgcagcagcagatgcagatgaacgggatgaagtttgctcatccggagctcatggccatgggcgcaggtcgcatgccgatgccgatgccgttcccggcggcagcgcaggcgcaggcgcaggccgccgcggccaaggaccccaagaccgtcaagttcgacctcccggggggcgaggagttcggggacgacggcagcgacctcgacgacgagttcgacgaactagacgacgtggatttcgaggacgacggcctcgacgacgacgacgacggcgacctgtacgacggccccgggatggtgatgaagcccatgggcatgcccccggccgctgctgccggtggcggcaacggaaacggcggcggcaagaagggtggcggcgggaacgaggtcccggttcagatcaatgggaacgccagcaacggcggcggggcgaagcagaacgggggcggcaaaagcggggccaagaacggcaagggcggcggcggcggcggcggcgtcgttgccccgggcggcgggaaccaggctgggcagggcaagccgaaaggcggcttccccggcggcgccggtctcggcgggccgatgatgggcggcgcgccgccgccgcatgcgggcatgatgatgaggccgccgaacatgatgggcggcgcgggcggtttccccggcatgggccagatgggcggccacccccacatgggtggcggcggcatgccgcaggcaggcgggggcgccgcgcacggcatgccggctggtggcagcatcagcatggccgctggcggaatgcctggggccgggttctttccgcgcggcgttggcggcggcatgccggccggcgcggagatgctgggcatgtcgcagctgcctccgcagcagcagcagcacatggcggcggtgatgcagcagcagcagcagcacatggctgcgatcatgcagcagcagcagcaacagatgatgatgatgaacgggcacggccacggccacggccaccatggccacggcgggtacgggtacgggcgcccggcgatgccgcagtacccgccgccgccggcgtactactacccgatgccgcagcgccacccgcacgacagcatgttcagcgacgagaaccccaacgggtgctcggtgatgtgaggcgaggcgcggcggcggcctgcggggggctccggagaaagtgaaccaggcaaccagccagccagccaaccggaaggagggagctcgggcccgtcaggtcggaggcggccgc

SEQ ID NO: 19394 - DNA, 1730 bp, Zea mays
  Clone ID: LIB3150-007-B6_FLI
gcgatgcacaaggccaactacgctagtagaatctgccactcctgcaacccaaactgcgaagcaaaagtgacagcagtgaatggtaaataccagattggagtttacacacttcgaccaattgcagaaggcgaggaaatcacttttgattacaattctgtaactgagagcaaagaagagcatgaagcatcagtctgcctctgtggaagtcaagtatgccgtggcagctatttgaatttttctggtgaaggagcctttgagaaggtattaatggaattccatggtgtgctcgataggcatagcctgctgctacaagcttgtgaaatagactctgtctctcaacaagacttaattgacttgggtagagctggtcttggtacctgtttgcttgctggtttgcctggatggcttgttgcttacacagctcacctggtgcggtttatataccttgagagacagaaactccctgatgagatcttaaggcacaatgtggatgagaagcgccagttccttatagaaataaacatggattctgagaagaatgatgctgaggttcaggcagagggagtattaaattcaagattacagcaaatagtgcatacacttgacaaggtgagatatgttatgagatgcatatttggagacccaaagaatgctcctcctcctcttgtaaggttgtctgggaaaagtctggtatctgccatctggaaaggggacagttcaatagttgctgaactcattcagtcgatggaacctcatgttgaagaagaggtacttagtgatctgaaggccaaaatccgtgctcatgatccgtcagagtctgaagatattgagggaggcacccggaattctctcttgtggctgcgtgatgaattgcgaactctttcatgcacttacaagtgccgtcatgatgctgctgcagatttgattcatttgtatgcttatacaaagtgcttcttccgagtccgggattataagacagtaaaatctccaccagttcatatcagtccgcttgacttaggccccaaatatgctgataaactgggaccaggctttcaggagtactgcaagacatacccagaaaattattgcttagcccagcttatctattggtatagccagaattcagaacctgaatctagattaacaagagctagaaaaggttgcatgtcgttgccagatgtctcatccttctatgtgaagtctgcaaagccatcacaagagcgagcttatggaaacagaactgtgagattcatgttatcgcgcatggaaaaacaggcacaaagaccatggccaaaggataggatatgggtgttcaagagtgatccgagattctttggtagtccaatgatggacaccgtgttgaataattccccgcttgacaaggagatggtgcactggctcaagactagaccaaatgttttcctaggctagtaaaaaaggtttgtaggcagataaggtggtatttggttctttctcctttttggagattttagtctacatgattctttttccgactcacaccttggctacctgatcatggggagtttagcttttagatagcagggtagtctcaccacccccatctgtacattcctctctccctactttccttgtagagatgtatctggttaataactgatagattcgtcattgatttgatgtagtgaattttccccataggaacgctccctcttctgtttcatgtaaatgcagaacaatttcaatctttg

SEQ ID NO: 19395 - DNA, 645 bp, Zea mays
  Clone ID: LIB3150-007-H6_FLI
caaccggcgcaacgatggtggcgagaactataaccggcgcaatgatggtggcaagaacttcagccgcaggaatgacagtggtaccgagaacttcaaccgcaggaatgacggtggcggcgagaacttcagccgcaggaacgatggtgttggcgagaacttcaacgtcaggaatgacggcgttggtgagaacttcaacaggaggaacaacttcagaaatcagaatgacttccctggacgaggacggggttcacctacaccagggaacagttactaccagaacgggaatgggaggttcagtcgcgtgaacaatggcgccaagcaagctcctgtggccgcgtagaggcatcaaggcggtaggcttacatcaaactaggaagcataaggctacattcaagtgagctgagtgcaaggattattcttagtaggagcattgctgtcagacagcttggttatttttttttgtgccgtgttgggtcgctaagagattagtagttgcagtcgtccgtggatggtaggtgaattttgttgccgttgatgagcttgtcaactgggtgttggaccatggttcgtaactttgtgtcatctgccaatcaggattggtgggaggttagacactaatcttatgaagcggtgactgcaaaaatc

SEQ ID NO: 19396 - DNA, 802 bp, Zea mays
  Clone ID: LIB3150-008-B2_FLI
ccccgctctcggattcccgacgacgagctcagagctcctcctctcctcccctgctcggtgttcgacgcaacagctgccgccatgtctgccgccaaccagctcgccgccctcgtcagcaacatgtacgccacgggtttgcttgacgatcagttccagcagctccagatgctccagaacgccagtactcctgacttcgtctccgaggtcgtcacgctcttctgccaggacggcgagcggatcatcggagagctggccaaactgctggagaagcccaacgtggattttgacagggttgacgcctttgtgcatcagctcaaaggaagcagtgcaagtattggtgctcagaaggttaagaacacttgcattcagttccgcgaatcctgtcagcagaagagcaaagatgggtgcctcaagacactggagacagtgaagattaacttctatgacctgcgtgacaagtttcagaccatgcttcagctgcagcgtcaggtcaatggctgtccccccagcaagtgaacaagatggtggagtggagcttcatgttgggatgatgcgtgcatctttcaagttccagaacattctgaataagctcctcaattggcttctaggaagtctgtaatagcttagcagcaagattagcgttgacaccaccgtagcagaagtcaatgtcgtcgtttttgtgtcaccgtcttagtcgtaagtgtccgtgctgggtgatggatctcctgcaagcagttgcaagtggtccatttactatgtagtagtggctctgaataatctatatcttagcaatgaatttggc

SEQ ID NO: 19397 - DNA, 968 bp, Zea mays
  Clone ID: LIB3150-008-C5_FLI
gcgtccggtgtctccggcgaggctcctcctccgcgcatcgtggaggactgcctcgggctcgtccagctcatgagcgacggcaccgtcaagcgcgcgccggcctgcttggcctctgccgacgatgcggcaccggtcggatgcaaggacgtcgtctacgacgaggctcgcaacctgagcctccgcatgtacgtgccatcgtcctccagggcggggaacggcggcgccgagaagctcccggtgctggtctacttccacggcggcggcttcatcgtcggcagcttcgcgtcgccggagttccacgccgcgtgcgcccgcctcgccgccgcgctcccggccgtggtgctctccgccgactaccgcctggccccggagcaccggctccccgcggcgctccaggacgccgacgccctcttctcctggctcggcgcgcaggagcagcaggcagacccgtggctcgccgacgcggcggacctgggccgcgtgttcgtgtcgggcgactcggccggcgccaacatcgcgcaccacgccgccgcggcgccggggcgccgcctcgccgggtgcgtgctgctgtggcccttcttcggcggcgagcggaggacgcggtcggaggcggcctgcccgggcgacgcgttcctgacgctcccgctgtacgaccagatgtggcgtctggcgctgccggcgggggcgacgcgtgaccacccggccgcgaacccggaggcgggcgagctcccgccgctgctcgtcgcggccggcgaccgcgacatgctgatcgaccgcatcagggagtacgtggcgcgggcgcgggcccgggccgccgccgcgggcaacaggcgcgtcgacctcgtcgagttcccgggcgcggggcacgggttcgccatcctcgagcccgatggcgaggatgcgggtgagctagtccgcgtcgtgcggcggttcgtgcatggcggggatgccgccggcccgccgccgct

SEQ ID NO: 19398 - DNA, 730 bp, Zea mays
  Clone ID: LIB3150-010-A5_FLI
cttctcctccccctcttaccaagtcctcttcgggttagggttacttagggttttgtggaggggcgatggcggcggctgatgtggagtaccgttgcttcgtcggcgggcttgcctgggccaccagcaacgagtcgctggagaatgccttcgcctcctacggcgagatcctcgactccaaggtcatcaccgaccgggagacggggaggtctcgcggcttcggcttcgttaccttctcctccgagaactccatgctcgacgctatcgagaacatgaacggcaaggagctcgacggccgtaacatcaccgttaaccaggcccagtcccgtggcggtggcggtggcggcggtggctacggcggcggtcgcggcggcggcggctatggtggcgggcgccgtgacggcggttatggcggcggtggcggctacggcggtcggcgcgagggtggtggcggcggctacggaggcggtggcggctacggcggtcggcgcgagggtggtggtggcggctacggcggcggcggcggcggctggagggactgatgtgtgggcccatcctggcttcggccgagttatcttatctatctatagtatcgtgttaccgttcgcttctgtcaccgtgttagtgtccgttctacctttggattaggtgttggtacccctgttgttccctttggttgctcccgctatgaaacgagacgagagaagaatgagcaaggtttttgttcgcagct

SEQ ID NO: 19399 - DNA, 1419 bp, Zea mays
  Clone ID: LIB3150-010-D9_FLI
cctgccccctcgtggcttctgcggttctgcacacgcgcacttgtccccaaacagcggcgtcggcgtcggcggcgatgagtatctcaggcgagcttcccggcgaaggatctgacggtgaggaggaggtcttcatcgacgaggaggacatcatccacgagataaccatcgacgaagaagatctccccgaccgcgacgaagaagatgacgacgtcggcgacgggattgaagacatcattgatgattctacgtactcatttcttggccacaaagatgaagtcttcactgttgcatgcagtcctacagatgcatcacttgtggcttctggaggcaaagatgataggggatttctgtggaggatcggatcagatgagggtgccttggagctgactggacacaaggatactgtcggcacagtggcttttagttcagatgggaatttgttggcttgtggaagttttgatgggcaaataaatgtgtggaatacagctgcacgaactctcaagggaacccttgagggttctgggtcaggttttgagtggcttaaatggcatcctcggggacatttgataattgcaggatcagaggattgtaatgtatggatgtggaacgctgaccataatgccattataaatacatttgttggacatagtaacacagtgacatgtggtgattttactccagatggtaaacttatatgtactggatcagatgatgcatctttgaggatatgggacccaagaagtgcacaaagcaggcatgttattcgaggccatggttatcatactgatggattgacatgcttatcaatgacttcggattcacaaacggttgttagtggctccaaggacagttctgtgcacgctgtgaatgtaaactcgggccagatcgttggctcactagtaggccacaccacttccattgagtgtgttggtatctcatcaagctatggctgggtagctacagggagcatggatcaaaagctgatcatatgggacctcacacaccaatccagccgatgcacttgtgaacatgatgagggagtgacatcactggcatggctaggttcgtcaaggtatgttgcgtcaggatgcatcgacggcaaggtgcgcatctgggacagcctctctggggattgtgccagggagttcagtgggcatgcagatgtagtacagtcgctggccatcacagctgacggcaacgccatggtctcggtctcatctgatggctccgcccgtgtgtttgacatctccatgttcaagtgaaggaaactgggatggagtagatggttgctgtgtatgctaatgcttgttcgcggtgcatgtgcatgaatgatgatggcatgccatggtaatatgttattctactcatgggaaactcgtgcatttgtattgcatataagtcccgtactctttttttttg

SEQ ID NO: 19400 - DNA, 1066 bp, Zea mays
  Clone ID: LIB3150-011-B10_FLI
ccagccccggctcgccggcgggctggccggctaggaacggcggggcacggcctccggcctggcgcgacgcgggcgcgggtccggccccggcggctcgcggcctcgagccccggcatcggtggcggcgcgggcgcggccccagccaggcgctctggcctagcggccccgacggcacgggcacggcggcgctggcagccccggcgcgcggtttcccgacggctcgggagcggcggcctccggccccgtctgctctggcgcggccctccccgcggcggtccgggcttggctgcgcggagcgcagtcccctggcggctcagcctctgcgtgggcgcatggcgctaagccgcggccccggcggcgcggcagcgagtgcgtggccctatcgagggcgcctctccggcgcgtggacgagcaggcgagcagccccgacgacgtccgcggcgctgcctcaacagcgcgggcgcgggcgtggcctcgacgcggttcctggcggcgcggcccgtggtcccctgcgcgggcgcggccatgccggccccggcgggggcaacgaccccattcgcgtgcgtccctcaacggcgtatcccatgcccaggccttggcggcctcagcagcgcgggtgcgtggactcgacgacgcgcgggcactgcccggtagcgcgagcgcgcggcacctcgggcgcgaggatgctaccccgtcgcctgggcaggcagccccggcgcacaagcacgagcgcggtccccagcagcgtgctggctcgtggccacggcgcgagtgcgctgccatggctgggcgaccaggcatcagcgcaagcacatcccaactcgggttacgccatggcaggggctgcgcccaccgtcgctgttcacttggacgcaaacaagccagggcctgaaggcctcgggagccaacgctggtccttgatggaaaatcgttgtacggcgagcgcaggtggcagaaatgttcattaattatgaacttgataagtttgctattcgtaccttgtataatcagacttctctgatttgtttatttgaacggatgctcttataaattgatgaatttgtcc

SEQ ID NO: 19401 - DNA, 1385 bp, Zea mays
  Clone ID: LIB3150-011-G9_FLI
gccgtctgccttctgcgcctccatttcggcctctgtcccttgcaagttcaatctcacctccaaccatgggtaaagagaagtcccacatcaacattgtggttattggccacgttgactctggcaagtcgaccaccacaggacacctgatctacaagcttggaggcattgacaagcgtgtgatcgagaggtttgagaaggaggctgctgaaatgaacaagcggtccttcaagtacgcatgggtgctcgacaagctcaaggctgagcgtgagagaggtatcaccattgatatcgctctgtggaagtttgagaccaccaagtactactgcacggtcattgatgcccctggacaccgtgacttcatcaagaacatgatcactggtacctcccaggctgactgtgctgtccttatcattgactccaccactggtggttttgaggctggtatctccaaggatggccagacccgtgaacatgctctccttgcgttcacccttggagtgaagcagatgatttgctgctgcaacaagatggatgcaaccactccgaaatactccaaggcacgttatgatgagattgtgaaggaagtctcatcctacctcaagaaagttgggtacaaccctgataagattgccttcgttcccatttctggttttgagggcgacaacatgattgagaggtccaccaaccttgactggtacaaaggcccaaccctgcttgaggctcttgaccagatcaccgagcccaagaggccttcggacaagcccctgcgtctgcccctccaggatgtgtacaagattggtggtattggaactgtaccggttggtcgtgtggagactggtgtcatcaagcctggtatggtagtcacctttggtccaactggcctgactactgaggtgaagtctgttgagatgcaccatgaggcgcttcaggaggctcttccgggcgacaatgttggcttcaacgtgaagaacgttgctgtcaaggatctcaagcgtgggttcgtggcctccaactccaaggatgaccctgccaaggaggctgccagcttcacctcccaggtcatcatcatgaaccaccctgggcagattggcaacggctatgccccagtgctggactgccacacctcccacatcgccgtcaagtttgctgagctcattaccaagatcgacaggcgatctggcaaggagctcgagaaggagcccaagttcctgaagaacggtgatgctggtatggtgaagatgattcccaccaagcctatggtggtggagacattctccgcgtatcctcccctgggtaggtttgccgtccgcgacatgaggcagacggttgctgttggagtcatcaagagtgtggagaagaaggacccaaccggcgccaaggtgacc

SEQ ID NO: 19402 - DNA, 832 bp, Zea mays
  Clone ID: LIB3150-012-A11_FLI
gcccattattagcctaggcaggcagagcagcagaggagattcctttccctttccgttagcaggatagagagggagaggagcagaagagagcagagggccagaggcgcagaaggcagtcgcggacaggaggaagaggaagaagaagcggcagcgagcgaggatgccgtgcctgaacgtgtcgaccaacgtgaacctggagggggtggacacctccgccatcctcgccgaagcctccaagtccgtcgccaacatcatcggcaagcccgaggcctacgtgatggttgttctcaagggttcggtgcctatggcatttggaggtacccaggagccagcagcttacggtgagctggtttccatcggaggcctgaaccctgatgtgaacaagaagcttagtgctggcatcgcttctatcctggagtcaaagctgtctgttcccaagtcgcgcttctacctcaagttctatgactcgaagcgctcggacttcggttggaacggctccaccttctagacttgaggtctgcagctgaaataaaagaaattcgtggaatcatggtacctaatgcccatggctattgcctattaaggacaatgtcataagatgtgtcttaatcggtgctgaactgagaaacagtaactgttgtcgtggaactggaagtggggtgctggcgtgtcagagtgcttgcttcctacctagcatagcatgcctgtgctatcttgttattggtattggcttgatatcagtctatattatcatttatcatggttggtccttcgggtttggtaactgtatcttcaaaccgtgtgttctctgttaacctagcggaaatctgcc

SEQ ID NO: 19403 - DNA, 625 bp, Zea mays
  Clone ID: LIB3150-012-A8_FLI
cccgcctccactcccccctcccaggtgctgcccaggtaagtcggcggcggcgatgacaacgcgcttcaagaagaaccgcaagaagcgcggccacgtgtccgccgggcacggccgcatcggcaagcacaggaagcacccgggaggtcgcggtaacgccggtggcatgcaccaccaccgtatcctcttcgacaagtaccatccgggctacttcggcaaggttggcatgcgttacttccataagctccgcaacaagttctactgccccgcggtcaacatcgagcgcctctggtcgatggtgcccgccgacaaggcggcggaggccggcggcgacaaggccccgcagatcgacgtcacgcagttcggctacttcaaggtgctcgggaagggggtgctgccgcccaagcccattgtcgtcaaggccaagctcatctccaaggtcgccgagaagaagatcaaggcagcaggcggcgccgtcgtgctcaccgcctaggtttcagtccttgttcgcctcctggttttgaaatctatatctgaactgatagtgttttcctgtctcagcaatttgtgttaagaaaacctgtagttttaaaatctgtggttcctgcctgttgggcagtgcttattc

SEQ ID NO: 19404 - DNA, 1464 bp, Zea mays
  Clone ID: LIB3150-012-C10_FLI
cttcgaaataatgacctcaaccaagatgatcctatctcggaggttgaaactgaggccaatgatggtgacgagagcaagttacctttgcagttggcaattgtgggacgtcctaatgttgggaagtccacccttttaaataccttgttgcaagaacagagagttcttgttggtccagaggcaggcctaacaagggactcgattcgggctcagtttcaatttgatagtcgaaccgtgtatttagtggatactgctggttggatggaaagatcagggaaggagaaagggccagcatctttgagtgttgtgcagtctaggaagaacttaatgagagctcacattgttgctcttgtgctggatgctgaaaagattgctaagtccaaaagtagcatgaatcatccagaaatcgtgatagcacggcaagcaatagaagagggccgtggactagttgtgattgtcaataaaatggatctccttagagataaccaaacactgtttaacaaggttatggacgctgttcctagagaaatccagacagtcattcctcaggtgacaggaataccagctgttttcgtgtcagcgctggaggggagggggcggattgctgtgatgcgccaggttatagatacctatgagaagtggtgtttaagattgtcaacatcacggctcaaccgttggttgcgtaaggttatgagcagacattcctggaaagattcagctactcagccaaaagtcaagtacttcactcaagtgaaggcacgaccaccaacatttgttgccttcatgagtgggaagactcagctttctgatacagatattaggttcttgacaaagtccctcaaggaagatttcgacatcgggggaataccgatacggatcatacaacgttctgttccaagaaaagcttatgcaaagcgcaacaacacaaggaacactggccctagggttgtcaggatgaaaacagacaaacggacagcggtatctgacccagccctgtcatagagggtgagcaccagtatcagccgcctaacctgaagaagggaggtcatgtttcgcgtttgagctatatatatatatatgcttctcatggggaaacgggaagtgaatgtttttctgactcgggaagttatacaaagctatgagctagccggtccggctgcctgcaccgcatgctcaagaagaagaatgactgtaagaaacaagcccagcaattcgaaggacagcatcacttctcaacattgggtgcaaggtggtattgatgagcgtcaagcactcaagttcaccccagaactccagatcagatgaagagttgtttttttttcttgcatccctcatgtttatgtaagtagagggactctaactctcatcagaggatgacactatgagttggagcaattttctgtttatttcctcaaacgctacacaatgccatacccttctaagggttgagatacatacttatagccc

SEQ ID NO: 19405 - DNA, 1653 bp, Zea mays
  Clone ID: LIB3150-012-C6_FLI
ctcgccgtcgtcttctgcggttctgccgtctacgcctccaatttggcctctctcccttgcaagtttaagcttcaccttcaaccatgggtaaggagaagtcccacatcaacattgtggtcattggccacgtcgactctggcaagtcgaccaccaccggccacctgatctacaagcttggaggcattgacaagcgtgtaatagagaggtttgagaaggaggctgctgagatgaacaagcggtccttcaagtatgcttgggtgctcgacaagctcaaggctgagcgtgagaggggtatcaccattgatattgctctgtggaagtttgagaccaccaagtattactgcaccgtcattgatgcccctggacaccgtgacttcatcaagaacatgatcactggtacctcccaggctgactgtgctgtccttatcattgactccaccactggtggttttgaggctggtatctccaaggatggccagacccgtgagcatgctctccttgcgttcactcttggagtgaagcagatgatttctgctgcaacaagatggatgcaacgactcccaaatactccaaggcgcgttatgatgagattgtgaaggaagtctcatcctacctcaagaaagttgggtacaaccctgataagattgcctttgtccccatctctggttttgagggcgacaacatgattgagaggtccaccaaccttgactggtacaaaggcccgaccctgcttgaggctcttgaccagatcaccgagcccaagagaccttcggacaagcccctgcgtctccccctgcaggatgtgtacaagattggtggtattggaactgtaccggttggtcgtgtggagactggtgtcatcaagcctggtatggttgtcaccttcggtccaactggcctgactactgaggtgaagtctgttgagatgcaccacgaggctcttcaggaggcccttcctggtgacaatgttggcttcaacgtgaagaacgttgctgtgaaggatctcaagcgtggttttgtggcctcaaactccaaggatgaccctgccaaggaggctgccagcttcacgtcccaggtcatcatcatgaaccaccctggccagatcggtaacggctatgccccagtgctggactgccatacctcccatattgctgtcaagtttgctgagctgattaccaagatcgacaggcgttctggcaaggagcttgagaaagagcccaagttcttgaagaacggcgatgctggtatggtgaagatgattcccaccaagcccatggtggtggagacattctcgcagtatcctccccttggtaggtttgctgtccgcgacatgaggcagacagttgctgttggagtcatcaagagtgtggagaagaaggacccgaccggcgccaaggttaccaaggcagctgccaaaaagaaatgatgcaacctgtcgttaatcctgtatctgcttttgcaatacctgacttgtcactccatcccgaagttttgtatgcggttgttactgttattgtgtactgttaagctctgctgcggcgtgccctgttgtttgggtagcgtcaacgtcgagcgccacttgcgggtgtgcctttgtctgctatcagtagcggcaaaaattgaaagctctcgagacttatgtcccttttgggc

SEQ ID NO: 19406 - DNA, 980 bp, Zea mays
  Clone ID: LIB3150-012-D2_FLI
cgatccgaagctgtgcctcgtaccatttcgatccaatggcgccgacgtcgaagctgtcgacgggcatcaagcgcgcttcgcggtcgcacgcgtaccatcgccgtgggctgtgggccatcaaggccaagaacggcggcgccttccccaaggccgacaaggccgccgccgccgtggaacccaagttctaccctgccgacgacgtcaagccccgcgttcccagcacccgcaagcctaagcctaccaagctcaggtcgagcatcacgcctgggacggtgctgatcctcctcgcagggcgcttcatggggaagagagtggtgtttctcaagcagctcaagtccggcctgctccttgtctctgggcctttcaagatcaatggagtaccgatccgccgtgtgaaccagacctatgtcattgctacatcaaccaaagttgacatctctggtgttgatgtcgccaagtttgatgacaagtactttgccagggagaagaagcagaaggtgaagaagaccgagggcgagctttttgagacagaaaaggaggcatccaagtcactgcctgacttcaagaaggatgaccagaaggctgtggattctgctctgatcaaggctatcgaggctgtcccggagctgaaaacctatcttggcgcccggttctctctcagggatggtgacaagccccatgagatggtcttctaagcttctagttttggagttcgtaggaagctgttttgtctgtgttcttgtacttctgagttttgtaccagtagcgaacgtttcattgtgattgaagtcttcctgccaaatattataagatctaagaaagttctattcgtgttggtggttcagcagtgcactatctgcatttggttccttaggtagtccatggtatcttgaggtcccattttgtttgaattgctgactgtcaggtgtttttgctgttggttggaataaacttggcatgtagcttgccgaaactggaat

SEQ ID NO: 19407 - DNA, 910 bp, Zea mays
  Clone ID: LIB3150-012-D8_FLI
ggccctgcctggcgcctgctttcaccgtttccgcccgtcgccttccacctctcgcactacagctcaagcacagcgcggcaccctacgtccccgcgactccccccttcttccactccactactcgccgcgctccccatgccctccccgtgacgccgaaaccaaatccttttcgctcttccatattactgtcgcggcggcggaggaggtccgcggcattgcgagatatggagaaggagaggaagcaggggttcttcgccgcgctcaaggaggaggtcgtacgggggctgtcgccggcaaggaccagagggaagtccccggcgccgcggagcgcgtcgcccgcgaggatgctgatcccgcgccggcggaaggcgcccgcggctccgccgccgccgccgccgccgccggagaaggtgctgcagcagtacctgggggagcagctcgtcgcgcgctccggcagcctgttgcgccccggcggggaggctctggcgccgctcatcgaagggcccgacgccgagcgcctcgccgccggcgaccccgacggcgaggactcagggcgccgcgaggggttcgggcactgggtccgcggccacctgacgcgcgcgccatccatggccgccgcaggtggtcccgacggctcgttccggcggtccgacctccgcctgctcctcggcgtcatgggcgcgccgctcgcgcccatcccgtccaagccggccgagccgctgcccctcctctccatcaagggaaccaccattgagtcgtcgtcggcgcagtacatcctgcaccagtacacggcggcgtccggtggctacaagctgctgcagtcggtgcggaacgcgtacgccatgggcaaggtgcggatggtggcgtccgagttcgagacggcgacgcgcgtcgtgaagaaccgcgggcc

SEQ ID NO: 19408 - DNA, 939 bp, Zea mays
  Clone ID: LIB3150-012-F7_FLI
ctcctgcgacgccaccaccacacgttcacggtagcgagagcttatcgtcgtcggcggcgaagatggtgtcgctgaagctgcagaagcggctcgccgcgagcgtcctcaagtgtgggaaaggcaaagtctggcttgaccccaatgaagtcagcgagatctccatggctaactcccgccagaacatccggaaattggttaaggatgggtttatcatcaggaagcctcagaaggttcactctaggtcccgtgcaagaagggcacatgaggccaagcagaagggaaggcactctggatacggcaagcgcaggggtaccagggaggctaggctccccaccaagattctgtggatgaggaggatgcgtgttctgaggcgcctgctccgcaagtaccgtgaggccaagaagattgacaagcacatgtatcatgacatgtacatgaaggtcaagggtaatatgtttaagaacaagagggtacttatggagagtatccacaagtccaaggctgagaaggccagagagaagacactttcagatcagtttgaggccaagcgtgcaaagagcaaggcaagccgtgagaggaagattgctaggagggaggaaaggctggcccagggcccaagagaaccaacagcacctgtcgcagccccagctccatctactggggtgccaaagaaagcaaagaagtgaagtatggaaacaaagctgtagctttttggtactatataagcatgactttggagcacctgaagtattttgctgttctatagtttcgtgtctcaatattctgagtcttgtatctctaccgttctgttggataatgcatgccgtaagagttgtttatggagcttttgttgttacaggacccctaaaaatgtttgtttgacagatgtttggaattgtggtcatgtttatgaaaattagtgttgtgggtcttcgtgtg

SEQ ID NO: 19409 - DNA, 1376 bp, Zea mays
  Clone ID: LIB3150-012-G7_FLI
ggtcggcatggcgctcgtattgcatagtggggctggaaacaagaatgccttcaaagcacttattgctgcagaatacagtgggatcaaggttgagttgaccaaggattttgagatgggtgtctccaacaagacccctgagtttcttaagatgaacccccttgggaaggttcctgttctggagactcctgatggccctgtttttgagagtaatgctatcgcacgctatgttgctcgcttgaaggatgacaaccctctttttgggtcttcccatattgaacaagcccacgttgagcaatggatggattttgccgcaacagaagttgatcctggtgttgcatggtacttgtatccaaggcttgggtacctcccttatgttagcacaactgaggaaacagctatttcttcattgaagaggtcgcttggtgctctgaacacacaccttgcctcaaacacataccttgttgggcatgctgttactctagctgacattgtattgacatgcaacctctaccatggaattgcacggatcttgaccaagaccttcacgtctgatttccctcatgtcgagaggtatttctggaccatggttaaccagcctaacttcaagaaggtcattggtgaggtcaagcaggcagagtctgcacctcctattccgaaaaaggctgctccttctaaggagccaaaggcaaaggatgtcaagaaggaggctccaaaggaggcccccaagccaaaggtggttgaggcaccagcagaagaggaagcaccaaagccaaagccaaagaatcctcttgacttgctgccaccaagcaagatggtccttgatgactggaagaggctatactcaaacacaaagaccaacttccgagaggttgccatcaaaggtttctgggacatgtacgacccagagggctactctttgtggttctgtgactacaagtacaatgatgagaacaccgtctcctttgtgaccctgaacaaggttggtggattcctgcagcggatggacctgtgccgcaagtacgcctttgggaagatgctcgtgataggctctgagccacccttcaagctgaagggcctttggctcttccgtggccaggatgttcccaagtttgtaatggatgaggtctatgacatggagctctacgagtggaccaaggtggacatctctgatgaggcccagaaggagcgtgtcaatgcgatgattgaggaccaggagccctttgagggcgaggccttgcttgacgcgaaatgcttcaagtgagtgtgcttgcctggagacagaactgtttagcccttgaatttgtctatggaagagtttgcccttttactagtgtcgatgttgatctggtataccttgctatgaactggttaaagtt

SEQ ID NO: 19410 - DNA, 627 bp, Zea mays
  Clone ID: LIB3150-012-H12_FLI
gcgtggactcgggggctggccggatttctctcattagctattacaaagattaggaccgaaatcccctccgtgattgccgctcgccgatggctacaaggccagccgactgtgtttccccccgcctatcgatctggatacaccaccactcgacgcagaaaaagtcgatggcctcgccatggccatgagttagtaggagagagagtacacgagcgttgccgccgggagagtgctcaacggagtcgcgtactggacgttcagggacttccctgtgcgtgagggtggagcggaccgggaccctcgccgggcgttgaaggctgcgcgggcgccgtcgtccggccgtgtcgcggacctgggcgtgcttcgaagggcaccgcggttcggccttgccgtcttgatcagccgtgaggtcacgaggatttgaagaatcaccctggtaactggaatctcaagtgccaggagaagaacaggtggtttcaagtggagtcaagtatcgaggagcttgatctgatctaggtggcgtttctcagttgactttggcgccaacgatccttagttcgttttatatttattattttattttgtaataagtcttccactatgtaataaatactctgattatattgtgac

SEQ ID NO: 19411 - DNA, 581 bp, Zea mays
  Clone ID: LIB3150-012-H6_FLI
aaagcctccgacccccttcctctctccctccgccgccgctgcgcacgcagggaacaagcgacatgggcgtctacacctttgtgtgccgcaacaacggcggcgagtggaccgccaagcagcactccggcgagatcgaggcttccgccgctaccccatacgagctgcagcgccgcctcgtcgctgccgcctccgcggccgactctgcctacggcgtccagtcgtccttctccatggtcacccccagctccgccgtgttccaggtgatcgtcggtgctgtcggtggtggtgcaatgatggtgagcggaggtggcggcggcggtgctgctgcatctggtggtgctgctgccgaggctcccaaggaggagaagaaggaagaggagaaggaagagagcgacgacgacatgggattctccctgttcgactagagttgtgtgtgtcatctggatctcagaagtggtggtttggtcctgttgccgtagttaattttgctgtcctgtctgtgaacctgaagaactcttggtaattgttacaagcgacctgttccagtttatgtgagaatttgatatgttgtttggaatcat

SEQ ID NO: 19412 - DNA, 236 bp, Zea mays
  Clone ID: LIB3150-013-G5_FLI
gccgccaacagccccgcgacctgcagcagccgactccatgcccctacgctgctgccggcggtgtcccccactgaagaaactatgtgctgtagtatagccgctggctagctagctagttgagtcatttagcggcgatgattgagtaataatgtgtcacgcatcaccatgggtggcagtgtcagtgtgagcaatgacctgaatgaacaattgaaatgaaaagaaaaaagtattgttcc

SEQ ID NO: 19413 - DNA, 2147 bp, Zea mays
  Clone ID: LIB3150-013-H1_FLI
tttgtcatgcatacctactatctctttctcacacaagtctcttctccgttttcactctcttgctagctcctctttgtccttcagatcagatctctcagaagagtagagtgcctgccagtgccatgtcgctgccagtcacacagcccattgcatgagcagaagggcaaggaagcttgggagggtgtaagctgaggatcggtgacgtgcaaatgcggccacggggaacctctctgcaacaaagctccgcatctgctctcggcgacggcgatgcggcgctaccgaagaagaagaggaaccggccaggcaatccgaaacctgatgcggaggtgatcgcgctgtcgcctcgaacgctgctggcgacgaaccggttcgtgtgcgaggtgtgcagcaagggcttccagcgggaccagaacctgcagctgcacctgcggggccacaacatgccgtggaagctgaagcagaaggaccccaaggacgcgcgccggcgggtgtacctgtgcccggagccgacgtgcgtgcaccacagcccgtcccgggcgctgggcgacctcacggggatcaagaagcactactgccgcaagcacggcgagaagaagttcaggtgcgacaggtgcagcaagcgctacgccgtcgagtccgactggaaggcgcacggcaagacctgcggcgcccgcgagtatcgctgccactgcaacgccctcttctccaggaaagacaacttcatcacccaccgcgctacctgcgacgcagcagttcgtgggaccgcccagaagccaccgctggtcgccggcctctacgtcggctcaggcagcgatgataggctcgggctctccgacgccgccgcccagatgcatggcttcgcagatcaaggccagtcctcttcagcagcagaagcctcacagtttgaccatgtcatgccatcgtactcgggctcctccatgttccgttctcaggcgtcagacttctcgttgtctttcttcctcggcggcggcactcctcttatcgaacaagacctgtccgacaacggtggtgatctctccgaaggcagccagggccctctgctccatggcaaggcgcccttgcatggcgtgatgacgcatctccccgagcagcagtatcagccaaacagcggcaacgccaacgttaacctcctggacattgggttcttctctggcaacagtggtggcacgtctggcagccagggccctctgctccacggcaaggagcccttccatagccatgacctgacgcaacttcccgagcagcagcaccagccaggcagcagcaacgcccgcgtcaacctccctaaccttggggtcttctctggcaacagcggtggatggcccggaagcagccatcaggacgcgcgccttgtcatccaagaccaactcaacggcggcagcagcagcaacaccgagcatggtaacgggatggcgtccatcggaagccacttcggcggaggcttcgtcccttccctgcacaactcatctccgtcggccgggctctcagcgacggcgctcctgatgaaggcggctcagatgggctcgacgacgtcgagcaccacccacaaccccaacggccccagcgcgctgctccgcgcagccggcttcgcaggcactgccagcgtccgggagactagtagcagggcagcggaagaagagaagtctcacgaggcatatttccatgatctcatcatgaactcactgccattaacgggaggaggcaccggcggcctctcagggttggcgggcgtggacgacggcaatgtgagcacaagggacttccttggcgtcggcagggacgacgcgacggcaccgcagggcctccacggcatgggcgccccgaatccgacccagatgaaatggtacatgtgatggatcaggtcggaaacgcgaaaagaggaagacaacaagaagatgcaagctaagaagggagtcaataaacagaacagaagatcgtgcactagctagtgagtggcgatcagagagatcgagaaaacttaatctagttttgtttcgtggattagttcacttttctcatatgccgcccgccatgattgatatggctaatagtaacagggctgcaagcaatgcagctgctgaacttgttcattgcttttatttcggtacaattttgtggtgtttttc

SEQ ID NO: 19414 - DNA, 893 bp, Zea mays
  Clone ID: LIB3150-013-H5_FLI
cgagggagctcacgcggcgccatggacgaggaggagcacgaggtttacggccaggaaatcccggaggacggcgacatggacggcgctgacgttgatatggctgcctccggggatgacgcggcgaagctgcaggagctcgacgagatgaagcgcaggctgaaggagatggaggaggaagccgccgccctccgcgatatgcaggccaaggtcgccaaggagatgcaaggaggtgaccctagtgcatctacagctgaggcaaaggagcaggtggatgcccgttctgtgtatgttggaaatgtggattatgcttgcaccccagaagaagtgcaacagcatttccaagcttgtggaactgtcaacagggtcacaatcttgactgacaagtttggacagccaaaaggttttgcttatgttgaatttctggaacaggaaggtgttcaggaagctcttaacttgaatgaatctgaattgcatggtcgccagattaaggtcgcgccaaagaggactaatgttcctgggatgaagcagcgtccaccacgtggatataatccataccatggctacccttatagatcatacggggcaccgtatttccccccatatggttatgggagggctcctagattccggcgccctatgcgctacagaccttacttctgaagtacggggtaatgaagttcaatgcaaaaccagcccatggtcactggtcagtcccgggaataattaactgtatcgtttgcactgttgcggctcaatgctcctgtatcagctgccttttctgacctttgtttcaagtgccgccataagcgacggacatgttgtattggcttgtaatacaggacgtagtaagtgcacacactttctgtaagcgtgctttcccacttcccagggtt

SEQ ID NO: 19415 - DNA, 1433 bp, Zea mays
  Clone ID: LIB3150-014-B11_FLI
cgctgagctcgatcgggctactacatccatggcgaggaagcgcaaggcctccgactccgccgcgggtatcgacggcgtccactcgctgccaccaccgctggctctggcttcaacagacgcgtgtgcatgggcatcgtcgggcggtactagcatggccgcggtggctgaggcggcggcggcgcagcagcagcggcggggaaggaagcggttcgtgggtgtgcggcagcggccgtcggggcggtgggtggcggagataaaggacaccatccagaagatccgcgtgtggctaggcaccttcgacacggccgaggaagccgcccgcgcctacgacgaggccgcgtgcctcctccgcggcgccaacacgcgcaccaacttctggccgcgcccctcgccggcttcctccgtcgcagtagccgccgccgcgcatcccgcgccgcctcctccgacgccgccgccgctgccggggctgatggggtctccaacgcagccgccggctcttccgtccaaggtcaccaacctcctgctcctgcggctcagggcccgcaacaaccagcagcagctcctcctcaacgccaccccagctcggcagcaggaggccgcggcggcggcgctgctgcaggggccgctgtgcgcggaaccgtacggcggcggcgaggagtgcgccttccaagtcgacgacttcttgagctacgactgcggcagcgacgagaacagctcacaagaaatagaggacgaggaagaagaggaggaagaggaggaggaggaggaggaggagctggacttccagttcatggaccagcagaccgcgtcgccgggcgcggggtgcgagggcgggctctgctcgccgttcgaggtggtggcggcagagctcggcggcgcggtggaggccggcggcggcgagccggccacggccgttcaggagctgatgatgagcaggatggactacgagaggaagatctcggcgtcgctctacgcgctcagcggcgtctcggagtgcatcaagatgcgcctcggcgccgccgccggtggccacgccgtgcgtgatcagctctccgggctgagggaggcgtgccggaagaagcagcgagagatagttcagcagcagcacgagcaggaaccatcaatggatacagcagaggatgtcaagccgcctcgtgaggagcgttcacccggtgacggcgccccggaggcgacaagctcgtcgtctgaggcgagccatggtgacagtgacggcgacatgctgctgtggagctccctggacttggctcccatctgttgaatgagacatggttgatcagcttagagattggttgagtttgttattcgtgtacttcgttacgttcatggcagatcactaagatcagaaagccctggtgataacgtgcttacccatttgttttatctaaggaattcctagtaaattatagttcatc

SEQ ID NO: 19416 - DNA, 741 bp, Zea mays
  Clone ID: LIB3150-014-D10_FLI
gctctcccacacagaaaaccctagccgccgccaccgaagcggcctcccaggtaagcaggatcgtccagcccgccgccgccatgaagcgcaatccccgcgtcacgagctcccgccggaagtgccgcaaggcgcactttacggccccgtcctccgtccgccgcgttctcatgtccgcggggctgtcgacggagctccgccacaagtacaacgtgcgctccatcccgatccgcaaggacgacgaggtgcaggtcgtgcgcggcacctacaagggccgtgaggggaaggtggtgcaggtgtaccgccgccgctgggtcatccacgtcgagcggatcacccgcgagaaggtgaacggctccaccgtgaacgtgggcatccacccctccaaggtgatcgtcaccaagctgaagctcgacaaggaccgtaaggcgctcctcgaccgcaaggcccggggccgcgccgccgacaaggctaagggcaagtttactgccgatgacgtcgctgccgccgccgctggtggcgccgccaccggcgcctctctccaggagatcgactagactcttcacggtcatctgatggttgtcgtaccgccttttcctcatctctttagtttttgctaccaattgttatgtgatagaggtcttatgttatttgaaaactgctctgtgcctggatgagagttttggaacataatgtgaacctgtgtgtctgtgacctgagctttgaagatctcattatgtggtt

SEQ ID NO: 19417 - DNA, 1686 bp, Zea mays
  Clone ID: LIB3150-014-F1_FLI
accaaaactgttattgagaagtattgggattgggagctttcaaatgagacacaacctatttggcttcggaaccccaaagaggtttcaactgaggaatacaatgattttttcaagaaaaccttcaatgagtacttgggccctttggcatcatcacacttcactacagagggtgaggtagaatttaggtcaattctttttgttcctgctacaaggaaggaagatgtaactgctgatagtaggaagaccaagaatatcagactatatgttaagcgtgtattcatatcagatgactttgatggagaattgttcccaagatatttgagctttgtgaagggtgttgttgactcaaatgaccttccattgaatgtttctcgtgagattcttcaagaaagtcgaattgttcgtataatgagaaaaaggctggtgcggaaagcctttgatatgatacttggcatttcttgcagtgaaaatagagatgattatgaaaggttctgggagaactttggaaaatttttaaagctgggtgccatggaagataaggaaaatcacaagagaattgctcctttgttgcgcttcttctcttctcaaagcaacaatgaattaattagcttggatgaatatgtggaaaacatgaaacctgagcagaaggacatttacttcattgctgcagatagtatgagcagtgccataaatgctcctttcttagagagactaacagaaaaagactatgaggttctacttttggtcgaccctatggatgaattggctatccagaatctgagctcctacaaggataagaaatttgtggacattagcaaggaagatttggatttaggtgataacaatgaggaaagagagaaggagataaagcaggagttcagccaagcctgtgactggataaagaatcgcttgggtgacaaggttgcacgtgttgacatatctaatcgtctcaggtcatcgccatgtgttcttgttgcagcgaagtttggttggtcagccaatatggaaaggctgatgagagcacagtctatgggtgatacagcctctttggatttcatgcgttcgaggaaagtttttgaaataaacccagagcatgagataatcaaggccttgaatgtggcatgcaggaataaccctgatgatcctgaagccctaaaggctctggatgttctctttgaaactgctatgatttcaagtggcttttcgcctgacaacccggcggagctcagtgggaagatttacgagatgatgacctctgccatcgctggcaaatggtcctcacagccacaggcgcaggcgcaacctgccgacccaatcccacagcacgacgcacctgtgaggtcagacgagccgcttgaagctcaagtggtggaggcagagcccgttgaggctggtcagcagaagtgagggcctgttcgtgcagaatctttgtacggagtagttttgaaccgttgtgcacaacatggctgagaatttcgagtatttgttttgacggcctgtatctgtgtcatgagctgttactggtaatgtaagacgtattggttagaaattaggagattaggaataatcgggtagctggactacttgaactggttcctgaaccatcaggagggttatggactcatggttagcttctactgcgtccttgggggcagtagtaattttgaagccaattcgttgttttgt

SEQ ID NO: 19418 - DNA, 2142 bp, Zea mays
  Clone ID: LIB3150-014-G10_FLI
acggcatcacgcgaagcaaggagaaagaaaatggcgcagctggtggagacgtacgcgtgctcgccggcgacggaacgcggccgtggaatcctcctggccggggaccccaagacggacacgatcgcctactgcaccggccgcagcgtcatcattcgccgcctcgatgcgcccctcgacacttgggtctaccccgaccacgcctaccccaccaccgtcgcccgcttctcccccaacggcgagtgggtcgcctccgccgacgcctccggctgcgtccgcgtctggggccgctacggcgaccgcgcgctcaaggccgagtttcgccccctctcgggacgcgtcgacgacctccgctggtccccggacggcttacgcatcgttgtctccggggacggcaagggcaagtccttcgtccgcgcattcgtatgggactctggcagcacagttggtgagtttgatgggcactcaaagagggttctgagctgtgacttcaagccaacacgtccatttcgcattgtgacatgcggtgaagattttctggctaacttttatgaaggaccgccattcaaattcaagcattccataagggatcactcgaattttgttaactgtatccggtatgctcctgatggtagtaagtttatcactgtgagttctgataagaagggtttgatatatgatggtaaaactggagaaaaaataggagagctttccactgaaggcggtcacacagggagcatatatgctgttagctggaatcctgacagtaaacaggttctaacagtttctgctgataaatctgcgaaagtatgggatatctttgaagatgcaagtgggaaattgaatcgaactttggtttgccctggtataggaggtgtggatgatatgcttgttggttgtctctggcagaatgatcatctcgtgacagtctctcttggtgggacatttaatgtgttctctgcaagcaacccagaccaagaaccagttacatttgcaggacatttgaagactgttagttctttggtcttctttcctcaaagtagcccaagaactatactatctactagctatgatggtgtcatcatgaggtggatattgggtgttgggtttggtgggagactgatgcgcaaaaacaacactcaaataaaatgctttgctgcagtagaagaagagcttgttacctcaggttatgataataagatcttcaggattcctcttaatggaaaccagtgtggagatgctgagtcagttgatgtaggtggtcagccaaatgctttgaaccttgcacttcaaaaacctgaatttgcactggtcactactgattctgggattgtattgctgcacaactcaaaagtcatttctacaaccaaagttaactataccatcacttcatcttcggtgtctcctgatgggacagaagctgttgtgggtgctcaagatgggaaactgagaatctattccatcagtggtgatacacttacagaagaagctctgcttgagaagcaccggggtgctatcacttccatacattattcaccagatgtttctatgtttgcttctgctgatgccaacagggaagctgttgtgtgggatcgggcaagtagagagatcaaactgaagaacatgttgtaccacacagctaggataaactccctggcttggtcaccggacagtcgattggttgccactggctcactggacacctgtgcaattgtctacgagatagacaagccagtagccagtcgcgtcactatcaagggagctcatctgggtggagttcatggtttaaccttcctggagaatgatactctggtgactgccggcgaggatgcttgcattcgtgtttggaaggtggtggagtaataggttactcattattctggtgtgcattgagaatgtctttgctattcattggaataaacttctttctttttctgtgcttgttggtacggttgctattacctgacaggtcatagcatcgttgttgccttctcagcgatttgtgctctaaatttcctttacaattcttttttgagttgtattatttttgcctttttcccagaaagaaagactcctttgtaagtgtatccttgcatctgattttgtcaggagctgtgagaatatagggatactactgttgctttt

SEQ ID NO: 19419 - DNA, 1652 bp, Zea mays
  Clone ID: LIB3150-014-G2_FLI
ctggctcagctctgtgcctctgtcgcccttctccttcctctcggtgtcccctctgtcggtccatgctcgtctgctggctcctgcttgttgcttaggcgttcttggtcaggtgagcagcactggcggcgatggcgaaggagacggagtactacgacgttctcggcgtctgccccgccgcatccgacgaagagatccgcaaggcctactacatcaaggcgagacaggtgcatcctgacaagaatcccaacgacccacacgcggccgagaacttccaggctcttggagaggcttaccaggtgctgagtgaccctctgcagaggaaggcctatgacggctatggcaagaacagcgtatctagggagaacatactggatggtactgtggtgtttacccttcttttcgggagcgagctgttcgaggactacattggccatcttgcaatggcaacaatggcttcctccgagttgacaagcgataacgacacccccgaaaagcttcaggataggctcaagaatgtacaaagggaaagagaagaaaagctagctagattcctcaaggaattcctctctcagtatgttcgtggagacaaagaaggatttgctaatcgtgccgaagctgaggcaaagaagctctcatgcacttcatctgggttggatattcttcgcaccattggatatgtctattctcgacaggcagcaaaggagcttggcaagaaggccatgtacctaggagtgccattcgtagctgagtgggtcaggaacaagggtcatctgtggaagtcacagatcaccgcagcgaaaggggccttgcagctgttgcagttgcaagaggaggcctgccggcagagtagcaaggatggcaatgccaccgagcaggatgtcgacttgcagatgaggatgaacaaggacctgatgatgagctcactgtggaagctgaatgttgtggatattgaaatgactctgttgcatgtttgtgaaatggtgctgtctgaaaacaatgtcaagaaagatgatctgaaggcccgagcaacggccttgaaatttcttgggaaaatatttatgagggaaaaggaggcattgccagggccagcaccagcgccaggtccatcaggaccgtcgaaacgaacggttcttgacgacgacagcagctcagatgacagttcagatgatgacctgactcggacagcgccataccggactcctgcatttacccagggaatcggcaggctgttccgatgcttatgcaatccggcttatgatgttgatgatgattttgagccccacaaatgagtcctaaagaggaaggtaccaataccaatggattttccaaaggttggtgacttttgtcaagcgtatgattcagaacagtgtgaattcggatcatacgttgtgatcctttgcttgccttgaggatacacgtgtagatgctatttcatctctggtgaccagaccaacagctcagagatcctcatttttttcctcccatgaacagtagacttcctctccgtttttttaaatagatccaactgaatggtgttgagcttatgtaatcgcttgctattgttgttgtcaaaaacacaaagaagtgaaagaacaagtgcctgtaaaaatccatttctgatcctgaatcgggaattcagtgtgatgaacatc

SEQ ID NO: 19420 - DNA, 1474 bp, Zea mays
  Clone ID: LIB3150-015-A3_FLI
ccgcccaaaccctagccgccgccgccgccgccgccgccatggtcgccgtcaaccgccccctcgtctccgtgaaggccctagagggcgacatggtaaccgacgcccccggcatcgccttaccgcccgtcttcggggcgccgatccgccccgacgtggtcaggttcacccacaagctgctgtcctgcaacaagcgccagccctacgcagtctcccgccgcgccggccaccagacgtcggccgagtcctggggtaccggccgcgccgtgtctcgtatcccccgcgtccccggcggcggcacccaccgcgccggccagggagcgttcggcaacatgtgccgcggcgggcgcatgttcgcgcccaccaagatctggcgcaagtggcaccgccgcgtcaacatcaacctccgccgcgtcgccgtcgcctccgcgctcgccgccaccgccgtcccggccctggtccaggcgcgtggccaccgcatcgagactgtccccgagatgccccttgtcatttccgactccgcggagtccattgagaagacctcccaggcgctcaagatcctcaagcagatcggcgcccacgccgacgccgagaaggccaaggactccgtcggcatccgccccggcaagggtaagatgcgcaaccgccgctacatcaaccgcaagggcccgctcatcgtctacggcaccgagggctccaaggtcgtcaaggccttccgcaaccttcccggtgtggatgttgccaacgtcgagcgcctcaacctactagaccttgcccccggtggccaccttgggcgctttgtgatctggacccagagcgcgttcaataagctcgaggaggtgtatgggagctatgacgccccgtcgcagaagaagaagggcttcgtgctgccgaggcctaagatgtccaacgctgacctgggcaggatcatcaactctgacgaggtgcagtctgtggtgaagccactcaacaaggaggtgaagcgcagggagaagaggaagaacccactcaagaacatggctgctgtgctcaaactcaacccctacctcggcactgcccggaagatggccacccttgctgaggctgctcgtgtgaaggccaggaaggcgaagctcgactccaagaggaccaagcttaccccggagactgccaaggttaaggctgctggcaaggcatggtacaagaccatggtctcggacagcgactacaccgagtttgagaacttctcaaagtggctcggcgtgactcagtgagcggcaagggtagttaagttttgagtagctcagcttatgttgagaggaaagagaatccatcaatctgttttatcctgcatcatcataacaagttgctacaagtcttgcatgttcgtgttgtttgtgcatttccgcgagaacatagtatttttatattcgaacccgttgtctgaactgtgcttggattttgtgaactgatgctttggcgcaaccttctttgtatc

SEQ ID NO: 19421 - DNA, 895 bp, Zea mays
  Clone ID: LIB3150-015-D12_FLI
gttccacccctttttaatggatgtttctaaagaaactttcccagattggttattttgcaaagcatgtcaaacttcgctgggaaaagctgctgcatctttacttggtcattcattttgtttcaaatattccttcatttgagttttattttcacattaccaagttctgatctccttacatttttgctttcagatccaagtcaccatggaattagagaagaacacccagtcttccttggagagaaccaatgttgtgctggtggcatggattttattaccatgatattcacactgtcagccatacccttcgacataatgccaactaccatagaacaatgtgtttctgttctgaaacccggcggtcttcttctgtttagggattacggtctttatgacatgacaatgcttcggtttttacctcatcaaagaataggatttcgggaatatatgcgatcagatggtaccttttcatacttcttctcattggatactgtgagagaactctttcatgctgctgggctagtagagttggagctggaatattgctgtgtcaagtccgtgaaccgaaagaatgggaagacgatgcggcgggtatgggtccatggcaaattccaaaaaccacctaggtgacaccagttagggcttgttcgtgttcagctcaatccatatgggttggatagaattgtgtgggtttaaatccatagcaagtcaaactcactactaatttttttccaatctcatccaatccatatagtgtagaaataaccaaagggcttagctgttagttttgctcggccactttgttgttgcaacaaagcgctgtaacagttttgtagccacaaacttaaatggcattgaaattatgccctccctcacccccaatagccattctccaacc

SEQ ID NO: 19422 - DNA, 321 bp, Zea mays
  Clone ID: LIB3150-015-D9_FLI
ggcatggacgagatggagttcaccgaggccgagagcaatatgaatgacctcgtgtcggagtaccagcagtaccaggatgcgactgctgatgacgatgaggaggccgagtatgaggacgaggaggagccagctgatggcatgtgagggaggcagttaaatgtgaagcctggtggttctagggaccccgatgagttttgatgtcccctttcgtgttgtcgccatgttatactattacactagcataccaccctcgtggcccattccgtcgatcgtcgctgttgatgcttgtgtttccttgttctatagaaccttgcttttggt

SEQ ID NO: 19423 - DNA, 586 bp, Zea mays
  Clone ID: LIB3150-015-E11_FLI
gcgccggcagtcgccgtcatcgatcgatcgccggaaaactaacccctaacgatgtctggagccggcgaggaggacaagaagcccgcggagggcggcgcccacatcaaccttaaggtcaagggacaggatggcaatgaggtgttctttcgcataaagaggtccacccagctgaagaagctgatgaacgcttattgtgaccgccagtctgtggacatgaatgccattgcgttcctgtttgatggccgcaggcttcgcggcgagcagacccctgatgagctggagatggaggacggcgacgagatcgacgccatgcttcaccagaccggaggcagcgttcctagcaccacctaaaagcctcgttttgctctccgtcctgcgtagtagtaaacaaaagggaaaaagtctttttaaggaacttgtgatgctctggctccttgtgccattgctgagggacatccttagcctttgtttagtagtatggtttggtactttgttctgtcatcactcgtttatctatccctaatacatgccgccatgattgtactcccaatgacgcgcagatcatttgctttgttttgtctgctcg

SEQ ID NO: 19424 - DNA, 1582 bp, Zea mays
  Clone ID: LIB3150-015-E3_FLI
cacccacccgcccgctgcctccgccggatctcgtcggactcggatccgcccgaccaccccgcgccgccgccgcgcagcagcagcagcagatcagagaagatggccggactcgacaccttcctcttcacctcggagtccgtgaacgagggacaccctgacaagctctgcgaccaggtctcagatgctgttctggacgcttgccttgctgaggaccctgacagcaaggttgcttgcgagacctgcaccaagaccaacatggtcatggtctttggtgagatcaccaccaaggccaatgtcgactacgagaagattgtcagggagacatgccgcaacattggtttcgtgtcgaacgatgtcgggcttgacgctgaccactgcaaggtgcttgtgaacattgagcagcagtcccctgatattgctcagggtgtgcacggccacttcaccaagcgccccgaggagattggagctggtgaccaggggcacatgtttgggtatgcgactgacgagacccctgagctgatgcccctcagccatgtccttgccaccaagcttggtgctcgtctcacagaggttcgcaagaatggaacctgcccctggctcaggcccgatgggaagacccaggtgacagtggagtaccgcaacgagggtggcgccatggttcccatccgtgtgcacacagtcctcatctctacccagcacgacgagacagtcaccaacgacgagattgctgctgacctgaaggagcacgtcatcaagccagtcatccccgagcagtacctcgacgagaagacaatcttccacctcaacccgtctggccgcttcgtcatcggcggacctcacggcgacgccggcctcactggccggaagatcatcatcgacacctacggtggctggggagcccacggcgggggcgccttctccggcaaggacccgaccaaggtggaccgcagcggggcctacgtcgcgaggcaggctgccaagagcatcgtcgccgccggcctcgcccgccgcgccatcgtccaggtctcctacgccatcggcgtgcccgagcccctatcggtgttcgtggacacgtacggcaccggcgcgatccccgacaaggagatcctgaagatcgtgaaggagaacttcgacttcaggcccggcatgatcatcatcaacctcgacctcaagaaaggcggcaacgggcgctacctcaagacggcggcctacgggcactttgggagggacgaccccgacttcacctgggaggtggtgaagcccctcaaggcggagaagccgtcttctgcatgaggcgcctcctctgtttcggaagaagcttttggtctggtctgcctgcgctctatcatgcttttttatggctcctacgtgttgtgattcttgatctgccccttgcttatcatttgtactgtactgtcactgtcctaataagtggtacgtgtgcggggtcgtattgtgtctgcttattcacctagaggattatttctggttttgctgcttatgtaatgcttttgaaacgatgaaggaagctacatgctctacagctgctttgagaagtaacggaacctcgtgcattttggtc

SEQ ID NO: 19425 - DNA, 899 bp, Zea mays
  Clone ID: LIB3150-015-F6_FLI
gacggccaaccgcgccaccctgccgcggcagccatggtgcatgttaacttctaccgcaactatgggaagactttcaagaagccaaggcggccgtatgagaaggagcgcctagatgctgagctgaagctggttggtgagtatggcctgcggtgcaagcgcgagctatggcgcgtgcagtatgccctgagccgtatcaggaatgcagctagggagctgctcaccctggatgagaagaacccacgccgtatctttgagggcgaggcactcctccgccgcatgaacagatatggtcttcttggcgagggacagaacaagcttgattacgtgcttgccctcactgttgagaacttcctccagcgccgcctccagaccatcgtcttcaagaatggcatggccaagtccatccaccatgctcgtgtcctgatcaggcagcgccatatcagggtgggaaggcagctcgtcaacatcccctcgttcatggtcagggtcgaatcagagaagcacatcgacttctccctcaccagccctctgggtggtggtcctgccggaagggtgaagcggaagaaccagaagaaggcctcagggggcggcgacgctgaggaggacgaggagtagagggccacgtagggattctgcgaccgcaattggttgaaatgtgaggtggacactttagttgttgtgcctgagtgtgtttgtgttgtaatgaattcagaaattctactgtggtagacaattttgcacccccactactgacactcctgtttaaatttaaacattggcatcgtgtctagacaggatgaattgtattctggtttggccgtttgggtggctatttgctagtttggtctttaggccaatgtttaagactgaaacaaattggtagccaactttactttctt

SEQ ID NO: 19426 - DNA, 1543 bp, Zea mays
  Clone ID: LIB3150-015-G9_FLI
gcggtgcccgcggcggagaggatggcgagctccttctccttcccgctgatgaatccggcggacattgcggaggcgctgcacagctactgcatcgcgcccagccccggcctccgcgccgagcacatcgtcaccccgcagcccggcctcgtcgccgaggtcctcgccctcttcctcgccaacttcgtcggcgacgacgagcccgacgagcagctagagtttcaggcgctgcaggcgatcgacaacccggagcaccacatgcgcgccatagcgctctcgcgcctctaccggagggccaacgccttcctccactccatcctcttccgggacctcacgctccgcgaccttctccgcgccgacggccgccgtgtcgtctacatcctcagcgccataatcaacttcctccactacaggcaggataagctcagctttcttgagcccatcgtccaagagtacagcccccttcaggaacggcacacggagctcagggctaagatcgccgagcttcggaacgcaaaagaagaccatctacttaaggagcagatggaggcgcccgtggtccagcaactcgagaaggaggtcaatgccctcaagcagaggcttcgtgaatacaacaaagagcagctgtcgctgcgcgttgcaacaaaagccatagacgaaaaaaaacaggagttactcggcaagatgaaccaagctgatttcgagttggtgaaagttatgcaagaaaaggaaaggctatcagccaaaattgttcattcccctgaaaagctcctgaggacccttgaggagaagaaagcagtccgtgatgagctaaggaactcagagaaggtggcaatgcaaaaagttcaagagaaaaccaatactcttgagacatatactaaggtttctgagaaactagtgaagcatctctctaaaatttctgctgtacatgaaaaaggcactgttgctaaagcttctgagaaggatgttaaagcacacaaagagaagattggtgatcaaaatttggagataaaggcacttcgcaataaagctgctgagtggcaattgaaagtactcgagaacgagggcattctgaacgcaaaggagaaagaaagggatcaaagagttgcagagaacaatctgaagatgaacgcgttgaaatctgaagtcgaatcggagcacaagtgccatgcggagaaagaaataaaaataaaggaaaagcttgaaaaggttgctgaattatgctctcaagctgattcggttgctgaagctggaaataagaaaatacaggaaatctgtgggaagtataatcaagtttgcgaggctgcaaacatgtacatggatggcatcgatcgttcctttgaagagatcgatgaagctgcagtgagtttgaaagctataggccagagtggtgcttgatgcgtgaagtgaccatcgacgggcaatggatcgtggacaggacagcatagtaaattgtgctagtgttaagctctgtatatatacctccaccgcgtctgtatatgccttcttcccactattttaatttaattagcactaattgccagtg

SEQ ID NO: 19427 - DNA, 955 bp, Zea mays
  Clone ID: LIB3150-016-B1_FLI
cttctcctcacctcttgctaaagcaaagcaaacctgcaacccgcaattattcctcccccgcacgcgaaatccgcccgcagctcttcgtccccggaggaccaagcccgcgcaacagagatgtcgtacgcctacctgttcaagtacatcatcatcggcgacacaggcgtcggcaagtcgtgcctgctgctgcagttcaccgacaagcgattccagcccgtccacgacctcaccatcggcgtcgagttcggggcccggatgatcaccatcgacaacaagcccatcaagctccagatttgggacacggctggtcaagagtcattcagatccataactagatcatactacagaggcgctgctggtgctcttttggtttatgacataactaggagggagactttcaaccaccttgcaagctggctggaggatgcgagacagcacgccaatgctaacatgacaataatgcttgttgggaacaagtgcgatctgtctcacaggcgtgcggtgagctatgaggaaggcgagcagtttgcaaaagaacatggccttatcttcatggaagcctctgcgaagaccgcacagaatgtcgaggaggcatttgttaagactgctggagcaatctacaagaagattcaagatggtgttttcgatgtatctaatgagtcctatggaatcaaagttggatatgcaatccctgggcaatctggaggtgctggtagctcgtcttctcaaggtggtggctgctgcagctaatctgctaacgccgttaacaaatgcattatctgtcgtgtgtcacataccagctgcgctgtgaaaaatagttattgctgctccagggtgccttgttatttgacgcaccaatggatcctgtgcctgatcgacttgagagattcagtttatttacgtcaggtgtttataaactccatgtaaatcactagattcttcactgttttccgtc

SEQ ID NO: 19428 - DNA, 1355 bp, Zea mays
  Clone ID: LIB3150-016-D7_FLI
gtccacagtcaccgccgcctcccccagcgtccagcccgtacgccgcgcagccaacccagcggacacgatgcaggcccacggcatcgccatccgcgcccgcgggccggtggcggcgacgcaggcccccgcgcgccgacggcaatgccgcgtgtctgcggcggcggtcggcgcgcccgccgcgcgagcccgcgtgacgcactcgatgccgccggagaaggcggaggtgttccgctcgctggagggctgggcggcgcggtcgctgctgccgctgctcaagcccgtggaggagtgctggcagccggcggacttcctcccggactcctcgtccgagatgttcgagcacgaggtccgcgagctgcgcgcccgcgccgcggggctccccgacgagtacttcgtcgtgctcgtgggcgacatggtcacggaagaggcgctgcccacgtaccagaccatgatcaacacgctcgacggcgtccgcgacgagaccggcgccagcaactgcccctgggcggtctggacgcgcgcctggaccgccgaggagaaccgccacggcgacatcctcggcaagtacatgtacctatccggccgcgtcgacatgcgcatggtcgagaagaccgtccagtacctcatcggctccggcatggatcccggaacggagaacaacccgtacctgggcttcgtgtacacgagcttccaggagcgcgcgacggccgtctcgcacggcaacaccgcgcggctcgccagggcgcacggggacgacgtcctggcgcgcgcctgcggcaccatcgccgccgacgagaagcggcacgagacggcgtacgggcgcatcgtggagcagctgctgcagctggacccggacggcgccgtgctcgccgtcgcggacatgatgcgcaagcggatcaccatgcccgcgcacctcatgcacgacggccgcgacatggacctgttcgagcacttcgccgccgtcgcccagcgcctcggcgtgtacaccgcccgggactacgcggacatcgtcgagttccttgtcaagcggtggaagctggagacactggagagcgggctctccggcgagggccgcagggccagggacttcgtctgcgggctcgcgccgaggatgcgccgggccgcggagcgcgccgaggacagggccaagaaggacgagcccaggacggtcaagttcagctggatctttgatagggaagccgttgtttaggcacttgttgctgactgtgatatgtgctcagatcatgtcgctagctgtcagtgtctttgtcacaatgtgtttatgtgtttgaaatgcagtaagagtgtttttttcctgctattatcacaaaattctgcagaaatatacgttctag

SEQ ID NO: 19429 - DNA, 737 bp, Zea mays
  Clone ID: LIB3150-016-G3_FLI
gccaaccgcatccagtccaccccatccccctcgaccccgacaaccccgagtcccgacccgatggcgcccaaggccgagaagaagccagcggagaagaagccggcggccgaggagaaggcggagaagacgaccgcaggtaagaagcccaagtccgagaagcgcctgcccgcctcgaagtcctccggcaaggagggcggcgagaagaaggggaagaagaaggccaagaagagcgtggagacctacaaaatctacatcttcaaggtcctgaagcaggtgcaccccgacatcggcatctcctccaaggccatgtccatcatgaactccttcatcaacgacatcttcgagaagctcgccggcgaggccgctaagctcgcccggtacaacaagaagcccaccatcacctcccgcgagatccagacctccgtgcgcctcgtcctcccaggagagctcgccaaacacgccgtctccgagggaaccaaggccgtcaccaagttcaccagcaattgagcagcctccagcgtccacggatttgttaggtctccccttcttacaagggttcttcgtcgtgtcctctacccctcccctccccgcctatgtatgtgctgtgaaatcgttgatgttctcgtcgggtgaacaaaggccagtagctagcttgcctgcttcataaatcgtgccggattgtaatgggcctcttagatttggcgcccctgttttggaatatagttgtatccgtgcct

SEQ ID NO: 19430 - DNA, 1752 bp, Zea mays
  Clone ID: LIB3150-017-A7_FLI
ggcgcaaatatacttgttgataacaaaggttgcattaagctagcagattttggggcatctaagcaagtagaaaagttggcaactgcaactgctgccaagacgatgaaaggtaccccatattggatggcaccagaagtcattgttggaagcggtcacaattgttctgctgatatctggagtgttggttgcacggtaattgaaatggcgataggcaaacccccatggagccatgaatatcaagaggtttctctactttattatgttgggacgacaaaatcacacccacctataccagaacatctctccacagaagccaaggattttctgttaaaatgcttacagaaggaaccagaaatgagatctgttgcatcagacttgttgcagcacccatttgttacacgagtattggaagatttttgtcagcttaatcatgctggacccaaggaaacctccaaaaatgagcttccttcctatgtagtgcctactgttgactcggacttgagtcgccctggcaagctacgcaatctgaattctaacaagttatcagacaccaggccattatgggatcagcgatgtaatgatgatgatatttgtgagtttgctgacgaagataatgtcccaatggttggatctagcttcaatcctatgtctgaaccatctgatgaatgggaaaacaaacttgacataagcccagaacaacaatttagtcagtcaagggagtttggtggactagccaaacttgcagaaagtcagatgtctgaaaacgattttactttcccttgtgagggaagctgtgaagaggatgatgaatttacagaatcaaaaataaaggaatttctggatgaaaaggccacagatctaaagaaactacaaacacctttatatgagttttacaacacagtgaatgctggagtttctcaaggagttagtgatgtttgccgagcaaacaatgtaactaatccccagttaccccctcgagcaactaagatggtgggaggtgcagctttagagcccatttgtgttaatctgaaaaatgtcaatcccaagagttgcacaaggcgcttctcaagaggcagcgtggagagcaatcatgtcttgagagaaatagcttcacctgaactcaacatactcgaggacaaggtccatgatgatactgaagatagtccaagcttgagcttttcggaaatacagaggaagtggaaggaagagttggaccaggaacttaaaagagagcgagaaatgaggtcgggtggctatggtaaagcaccatcaccgtcctcaacgagccggagattgactggaaaacgagatcgcagtcctgtgtattgagtagagaatcagaatacaacccagcaggactcgtatatttgactaacccgcacagtgtcatcgattggtggccattgctagtacagtgcagtgccaaccttcgtatgacctgacagaacctgcttgacgaccaaatccttttggtccttgtaaggtaaattaggttgagcgagccacttgtaagcgcactgtgcatcggaggctatcatgatctgcgatgcctgccttcgcagccctttattgccagcatgaaatcattggggtggcgatttttatgcaatgttcaagctttttgcaattttggatgacaataggtgcatgttgtacaattgtcttctctttatttttcaaatgtttgtaagtttacctgatgaccgagaatccataattcgttgaaccaaaagtatggaagtgttcgtctcg

SEQ ID NO: 19431 - DNA, 793 bp, Zea mays
  Clone ID: LIB3150-017-D6_FLI
attccccagcacccccagtctccagccgtccaaccgagacaccgcgtgcgaaccaagcagaccacaacaagaagaagcgtagtcgtcgccggaaggaaaggcgcggagcaagatgtcgtggcaggcgtacgtcgacgagcacctgatgtgcgagatcgaaggacagcatctcagcgccgccgccatcgtcggtcacgacggcagcgtttgggcgcagtccgagagcttccccgagttaaagcctgaggaggttgctggtatcataaaggactttgatgaacctggtactcttgcaccaactggtcttttcgttggaggtacaaagtacatggtgatccaaggtgaacctggagttgtcatccgaggaaagaagggcactgggggcattactatcaagaaaaccggcatgtccttgattattggtgtctacgacgagccaatgactccagggcaatgcaacatggtggtggagaggctcggcgattacctgatcgagcagggcttctaaaagttcgtcatgttctgttttggtcatttgggcaccaaagtttgcgcctcatttggttctgtaatccgtgagctcgtgcatgtacttggcgtattgcatgcagtgaataatttagcttgggtttgtttgttgggggcagtgttggggacggatttggattggggtttatgcttggcatcgcgtcgtatcgaaactcagctgctgtttcgctgagtaatgtacatttccctggtaatggtacttgtggactctgatgcttttatgggaacgagtgcattttactgc

SEQ ID NO: 19432 - DNA, 981 bp, Zea mays
  Clone ID: LIB3150-017-D7_FLI
gtgcagagtctttcgtcatctcttctccggcgaagaacccccagtcgcccaccagatcacttgttaaactttgttgaggggtgatggcggtttctttcgcaaacctcaacaccgaggcagggcttaaaaagcttgatgagtaccttctcactcgcagctacatcactggctaccaagcttccaaggatgacttggctgtctacacttcgttttcgtctgctccctcgtccaagtatatcaacgtagcaaggtggtttaatcacattgatgcgctcgtgaggctgagcggaattactgcagagggccaaggtgtgaaggttgaatcctcagcagttccttcagccccaactccagatgttgctgaagcacaggccccagctgctgaggaggaggacgatgatgatgttgacctttttggtgaggagaccgaagatgagaagaaggctgctgaagagcgtgctgcagctgccaaggcttctggcaagaagaaagaatctgggaagtcatcagttttacttgatgtgaagccatgggacgatgagactgacatggccaagcttgaggaagctgttaggagtgtccagatggaagggctgctctggggcgcatccaagcttgtcccagtcggatatggtatcaagaagctgcaaatcatgatgaccatagtcgacgatcttgtctctgtcgacactctcattgaggactatctgtgcgctgagccagttaacgagtacgtccagagctgcgacatcgttgccttcaacaagatctaggcgtgactttcgatcagtccttcccctggggtgctggcgatggtggtggctgggcaatgcaccagcctaatttttccatagctatatgtctgctttgtgtggccagtgatattgccgtgagtatttttggatcctattcgagtcgaatgtaccagtaccagagttaatttgctttaattcgaaacaccgttccggttggaattctgtt

SEQ ID NO: 19433 - DNA, 684 bp, Zea mays
  Clone ID: LIB3150-017-E8_FLI
gaatttagaaacacatcaaaccttccgctctcttcccttcctttgcgggctgctctccagttcaggcgtccagcttcgcccagagtccagacacggccaacagttaaacgcgccaccgccaccacgctcgcacgcacgccccacaggtacagctagctcccacccctcaacagcaacagctaagcttctcctagcagacagcaacatgaccgaggaggaggccaagaaggtggaggtggaagtggaggtcaccaaggcggcgccggcgaaggagaacgccgccgaagagaaggccgtcatccccgcgaccgagccgccggccgcccaggagaagccgccagcgccggccgacgactccaaggccctggccatcgtcgagagtgagtacaacttgctctgcttaattctccctctgtgtagtggaaggcttgcgatggaaaggtggtgttggcgtactggtttctgctctaagaattctgagaagctttcctcctccctactctatgctttggttcgtcgtctctgcacttcctggtagctgtacagtgggagtactaggtaggtactcagcacttgtgatccttgacagttggtttgcctttttcttttcatgggtttctggtttgttgttggccaactcatttggtccgactacttttcgcagaaaacaaaaattttcttctt

SEQ ID NO: 19434 - DNA, 823 bp, Zea mays
  Clone ID: LIB3150-017-H5_FLI
ctccatttcgttttcctcactctctcctccagctcagggtccggcggcgaagggaaggcaagatgtacaccgcgaggaagaagatccagaaggagaagggtcttgagccctccgagttcgaggactccgttgcccaggctttctttgatctggagaacgggaaccaggagctcaagagcgacctcaaggacctgtacatcaacaatgctatccagatggatgttaccgggagtaggaaggctgttgtcattcacgtcccataccgcctgcgcaaggccttcaggaagatccatgtcagactcgtcagggagctggagaagaaattcagcggcaaggatgtggtaattgttgctacacggaggattgtgaggccacccaagaagggttcagctgttctgcgccctcgcaccaggactctgactgctgttcacgatggcatcttggaggatgttgtctacccagctgagattgtggggaagcgtgtcagataccgtctggatggttccaagattatcaagattttcttggacccaaaggagaggaacaacactgaatacaagctggagacctgcactgcggtctaccgcaggctgtgtgggaaagatgtggtctttgagtaccctatgaccgaaaatgcataaatatgatgccctctggatatctccactctatttcgttgattctgaatgttatgttgggtctccctatgtacttcaaaaaacatagttttgatgctaaagttgcctaggaatttggtacggtgaagtggcagtggacgtgaacaatgttaagttttgagcatttaaattaaacctttgccctg

SEQ ID NO: 19435 - DNA, 1895 bp, Zea mays
  Clone ID: LIB3150-018-B2_FLI
gtgaatacaacgacaataacatgtattcggccacaacttattgggagaaattcgttgatcaagagaccaagaaagtggtgaacgaggtgaaactgacagccttgttgtcatcgtctcagcacagacagtcaatagtagctcccgacaaggtctcatgggtggagaaaccctggattcgtctgctctccgtggacgcacaccccaccgaaccatggatcataactggtcacgaatgtggacaccttgccattaggaaccatgacacacagatgctactgtgttcgtttaaagtttcacgtggcggagtcttttgtgttaaatttatagcgcagaagcaatggttcatttgcagctcaggagaaggtttcatacatgtgttcagttatgaaacccaagaaatacaaaatgtgaacaatttcagagcttatgacgacaatagtcgctggctccccatatcactggccgttcatccatcccggccctatgtgttgtcgtggtgtcgctacgatagtgagataataatgaagctttgggactgggacaaaggatgggagtgcgcacgcacattccgaagtggaggcattaatgtagatcatatcgctttcgatccaaaggagaccaaccgctttgttgctaccgattgcttggatggcaaagtgatgatttggagcctcgactctcccgaacctgaatatcatctgcctaagacggattttaagggtatcatgttcctggaattcttcacacgttatggtcggcagtgtttgattattgctcatgaagatcataaagcacacgtatgggactttcggttgcgcaaatttgtttctgagaagcgaaaattattatctcgtgaagcttctgtcttcttacgtcctaatgtatcgttactacttacaccttcatctaaaggcacttgccgtttctgggacgctaagaaattcagtttttatggagtcattgacaattctgctggaggagatgtgctgggtatcgcttgtttgatggggtctaaaacaaggtttgtgattggacaatattatgcattaacaatattgcatcttgataatgcattatatcaaaaggacccaaggcaatctattgagccacaattatgtgctcatacaaggcaaggagacacaagttctgaggagaaatatggggaggagatggtttggcatcatggcccaaacttcgattggcagcatgaaccatttgatgccgcaatcatgcgagctagtggtggcgagaacgcacatgaacagtacacgcttttcgacataatgattgactcaacagaggtgagagctcaaaggatgagttcttcattctgtagcatgagcctttcatctcatcagcccaaggagcaggagttggaggtggctaggctgcgcgaggagctgagacagcgtgacgagcatcataaagtgcaacaagactacatgttctctttcatacagcagcaacacgcgattattcaagaattatcccagcaacatggcttggatgtagtcctcccagagtttcgaccgccactgccaccgatgctgccacaattgagtccttttctatctacaatatctcaagctacgactgatgcaagtgggacggaacctactggaatggcttttgtggagtccttcgcctaccctcctcctgcaacagatagcaaccacaactctaataatccatgtagcgattttggtgcctgagtaacattgcatgtttctttgcatttaaacttgtgctttttccaattatgtatgatggtcaatatgaattgaattgaatctctatagtttgttgaacgaaagacttgaatatgtgagatgtgattctggctttgaaaggatatgtgagctatgacgagcattgatgaatttaaagtattatgt

SEQ ID NO: 19436 - DNA, 629 bp, Zea mays
  Clone ID: LIB3150-018-C2_FLI
ttggccccaagctcctgcgcgcgtgtccctggccctctgctcgagctcgcctggtcgcgttccagctcggtcgctcccctggctcggctctgcgcgcgcggtgctctgtccctgcgcacgtccagcaccctggaatctcggatttcgccgcgcgcgagtctctctagcaaccgtcgagcctcgctgtccatcacgaagttttctgctcgccacgaagtgtcgagctttcgcgtcaagtttctctcttccgtgccggttgtccgtctttgatcctcgcctcgatgtcatcttgcgcgtgcaacgcttgcttggtgctcaacaaaacgcctgaatcaggaccatcgtcgttctcgcgatcatcgaattggtttaggtcggtaagctgatctatgattcctgttagctaaattgttagatggatgaaacgaatgatgtgtttagtgggatccgtcggtgtcgcttgtgcttagctgatttttgattgtgtggtaaaaattagctctagcgtaggactcttcggatgttcggtaaaatgggtgaactgcagatcgtcgtcgatatcgtgaatttgagttcagtttagtgtggtaagccaattcattatcattggtcctatgcccgaagtagtt

SEQ ID NO: 19437 - DNA, 980 bp, Zea mays
  Clone ID: LIB3150-018-H3_FLI
tgaagcgtactaacaaaaagcgcccgattcgcctcgcaaaatcgccgccgccatcacctacctactcacagaagttccgccttcctttcctccggcgcgcgccgcgcctgtcgccatggtgaagcgatggcttcccctcgaggccaaccccgacgtcatgaaccagttcatgtggggactgggggtccccgaggacgtggggttctgcgacgtgtacggcctcgatgacgagttgctcgccatggtgccccagccggtgctcgcggtcctacttctctacccccaggaccggagcaaggagtcccaagcttcagctacctcgtcggtggagaccaaggagcccagcaagaacgtatatttcacaaagcaaactgttgggaatgcctgtggcacagttggtattattcatgcactggggaatgctacttccagaatcaaggtgaggggtcatattttgatagattttataaacgaactgctgacatggatcctatccagcgtgctgcatttcttgaggaggacgaggaaatggagaatgctcattccattgccgctactgctggtgacacagaggccaaggacggtgtaattgaacattacatttgtttctcttgtgtcgatggagagctttatgagcttgatggggggacatcacagccaataccccatgggccttccactcctgataccttgttgcaggatgctgcagaagttataaaagcaagaatcgccatgtattcacagtcaaacaacttcaatgtcatggctctttcaggcaaagcgatatagcattatagcactttcagtcataggcactcgatatcccacatttgctttgcagcagccttagtccaacactgcagtatgttctattgttttcttgccttcgttttattatttaaacacgttaaaacaagataaataaaagcgtggctacagaaaagttcccgttggtagcatcacttctcttgaggagagct

SEQ ID NO: 19438 - DNA, 900 bp, Zea mays
  Clone ID: LIB3150-019-D4_FLI
ccttctttcattcgccgccgccgcctgctctctgctgccgtcgccatggggagaaggcctgcgagatgctatcgccagatcaagaacaagccataccccaagtccaggtactgccgtggtgtccctgaccccaagatcaggatctacgatgttggcatgaagagaaagggtgttgatgagttcccctactgtgtgcaccttgtctcttgggagaaggagaatgtctccagtgaggctcttgaggctgcccgtattgcctgcaacaagtacatgaccaagtctgcaggaaaggatgccttccaccttcgggtccgggttcaccccttccatgtccttcgtatcaacaagatgctttcgtgtgctggggctgataggctccagactggaatgaggggtgcctttggcaagcctcagggcacctgtgctagggtggacattggtcaggtcctcctttctgttcgatgcaaggacaacaatgctgcacatgccagtgaagctctgcgtcgcgccaagttcaagttccctggccgccaaaagattattgagagcagaaagtggggcttcaccaagttcagccgtgccgactacctgaagtacaagagtgagggtagaattgttcctgatggtgtcaacgcaaagctgctcggtaaccatggaagacttgagaagcgtgctcctgggaaggctttcctcgaggccgttgcttaagtccaatctacagttggaatgcgaatccagacgttttggtttagcctatcttattttgctttgtgcaacatgaattttaagtgtatggggtattacagtgccttgtgtgaacctgcttatctcgtgctgaacatcgttatgcatggaagtacttatcttttgttctgctaaaaattaaagtgttctgcgact

SEQ ID NO: 19439 - DNA, 844 bp, Zea mays
  Clone ID: LIB3150-019-D9_FLI
gcaacatagaaagtggaatccagtagcaacaatagagcaacaatggcgaccaagatattttccctccttatgctccttgctctttctgcatgtgttgctaacgcgacaattttccctcaatgctcacaagctcctatagcttcccttcttcccccataccttccatcaatgatagcttcagtatgtgaaaacccagctcttcaaccctataggctccaacaagcaatcgcagcaagcaacatacctttatcacccttgtttcaacaatcgccagccctatctttggtgcagtcattggtacaaaccatcagggcacagcagctgcagcaactcgtgctacctgtgatcaaccaagtagctctggcaaacctttctccctactctcagcaacaacaatttcttccattcaaccaactgtctacattgaaccgtgctgcttatttgcagcaacaactattaccattcagccagctagctactgcctactctcagcaacaacaacttcttccatttaaccaattggccgcactgaaccccgctgcttatttgcagcagcaaatactactaccatttagccagctagctgcagcaagccgtgcttccttcttgacacagcaacagttgctgcctttctaccagcagtttgcggctaaccccgcaaccctcttacaactacaacaattgttgccctttgtccaacttgctttgacaaacccagcagcctcctaccaacaacacatcattggtggtgccctcttttagattgcttattagttgtaattcaataataaagttttttggatgatgtatgtggccaaccagaaataagaagttacatttccag

SEQ ID NO: 19440 - DNA, 1453 bp, Zea mays
  Clone ID: LIB3150-019-E12_FLI
tgctctcagaaggcactagcacgcaaaaaccccacgagagagacgaatcttccgaatctctcggtggcgatggcgctctccgaccgctcccgcgagtcgctcctcccgagcttcctctacgcctcctcggcgcgctctttcgctgccacaggagccgccgcgcgcctccctgtctcctccccagcgcctgccacggctggagcaggaggcggcgtgccgttctcgatccaggcgcccaaggagaagatcgagatgtactcgccggccttctatgccgcctgcactgccggaggaatcgccagctgcgggctcacccacatggccgtcacgcctctcgacctcgtcaagtgcaatatgcagattgacccagcgaaatacaagagtatctcatctggatttggtatcctgttaaaggagcaaggggccaggggtttcttcaggggatgggtgcctactttgcttggttacagtgctcagggggcttgcaagtttggcttctatgagttctttaagaagtattactcggacattgcagggcctgagtatgcccaaaagtacaagactctaatctacctcgcaggatctgcatctgctgaggtaattgctgatgtggctctctgcccttttgaagctgtgaaggtacgtgtgcagacacaacctggatttgctcgtggattgagtgatgggctccccaaatttgtccgatctgagggtgttcttgggctctacaagggaattgttcctctctggggtcgtcagattccttataccatgatgaagtttgcttcctttgagaccatcgttgagcttatctacaagcatgctgtgcctgttccgaagtctgagtgcagcaagactacccagttgggtattagctttgctggtggttacattgccggtgtcttctgtgctattgtttctcacccggctgacaaccttgtgtctttcctgaacaatgccaagggagctacagtgggagatgctgttaagaagcttggtctctggggtctcttcactagaggacttcctcttcgtatcgtcatgattggtacccttactggtgctcagtggggaatttacgatgcattcaaagtgatggttggactcccaacaacgggaggtgttacacctgccccagcagcagaggctgaattgaaagccagtgcttgatttttttttctgtgttccctgagatcatatttggtggagtggaattgtatcagccggtcgagagcttagttcccgaatcttttttaatcttaacggaaaatttgtccgtcatccttctgatgagaggaactcattaaacaggcgaaataggtctttttttgcgctgggaaaagtttacgcttgatgcataataatttgtaggacggcaacgctctagagcgcaggttttgttcacctcctgtaccgaggaatgcttaaagttacatttcacattatggtcttt

SEQ ID NO: 19441 - DNA, 1337 bp, Zea mays
  Clone ID: LIB3150-019-G12_FLI
gggtctccagctgcaagcacgcatcagcattccacaagcgaaatggcggcgacggcagccgtgccttcttggcgccgggcattcgcggcgctcttgctggtcctgcagctgcgcggcgcgcggtcggcgacgttcaccatcgcgaacaactgcggctacacggtgtggccggggctgctgtccagcgcgggctccgcgccgctgcccaccacggggttcgcgctggcgccttcggagtcccgtgccgtggcggcgcccgcggggtggtcgggccgcctctggggccgcacgctctgcgccgccgacgccgccacggggcggttcgcgtgcgccacgggggactgcgggtccggcgacgtgcagtgcagcggcggcggcgccgccccgcccgcgacgctggcggagttcacgctggacggcagcggcgggctggacttctacgacgtcagcctcgtggacgggtacaacctgcccatgatcgtcgcgcccagcagcgcctccaccacggcagccggcggcaagtgcgcgccgacggggtgcgccgcggagctgaactccgcgtgcccggcgggcctgcgggtggaggccgcggcggacgggcccgtggcgtgccggagcgcgtgcgacgccttcggggacgcgcagtactgctgcagcggcgcgtacggcacccccaccgcgtgccgcccgtcggcctactccgagttcttcaagaccgcgtgcccgcgcgcctacagctacgcgtacgacgacgccacctccacattcacctgcgccgccggcagcaccgactacaccatcaccttctgccccgccgtgcccaccagcgtgaagtcgacgggacagaaccctcaggccgccgggttaccgcagcagctgaacaacggcaccaccatggtcttcttcggcggcaacacgcagaccagcagcgccgccgcctcttctgccaactctctcttcgcggtcaccgtcaccgtcacagcagccgtcgcgctcgcgctctcgcgctcgactcgcctgtgaccggtcatcatcgctgtcaggtgggccacgcttatcagaaaaccggtgagcatacatacagtatgttgagcccctagcgactgcgacggaacatgagcatagtattctaggcttgtattgtagcttaggtaggacgagtagaatttcttctattgtttttggcttcgaaaatattcttttcttccgttgggcagagactacaggtgtgggggtaattctttcactgttctttctcctagttaggtcgtatgcatcgggaggatgtgttgtaacctcaaaagcgattattggttgattgattcgattggggagat

SEQ ID NO: 19442 - DNA, 754 bp, Zea mays
  Clone ID: LIB3150-019-H6_FLI
ccctagggttctcacggcgccataagagcctctcctctctccccggccgccgcccgccgcccgctgccgctgcttgcgcctctctcgcccgcatcgccgcagggttcgcaaagatggcagtgccgctgctgacgcagaagatcgtgaagaagcgggtcaagcagttcaagaggccacacctcgaccgctacaagtgcctcaagccaagctggcgtaggcccaagggtatcgactcccgtgtcaggcggaagttcaagggatgcaccttgatgcccaacattggatacggctctgacaagaagacgaggcactaccttcccaacaagttcaagaagtttgtcgttcacaacgtctctgagctggagctgctgttgatgcacaacaggacatactgtgccgagattgcccacaacgtgtccacccggaagcgcaaggagatcgtcgaacgtgctgcgcaactggacatcgtggtcaccaacaagcttgccaggcttcgcagccaggaggacgagtgaaatggccattatttccggttgtgatccgctggtgtgcaagatgttgctgagatccgagattcattctctgccatttttttatgcttatgttagacttttccaatggacaaaattctgttataagcggaagagtgatggcgaggaccatctagtttttgaccggacatcatgaagtatatgcagccttgtgcatgtaatggatctgtggctccgaagctacatgcatttttctgaggcgc

SEQ ID NO: 19443 - DNA, 1473 bp, Zea mays
  Clone ID: LIB3150-020-B1_FLI
aaaaacaatggtcttgacgagttggagttggaaggggaggattgggatgacgacgatgaggagatggtggatgcggaggttgacatggaagatattgctgggaaagcaccggcgaggaggaagaacgggaatttggagggtgttctagctaatggagtgcataacggtgtaaaggacatggtcacaccaatcattaggacgagtttggagaagcaaggttacaaaattattggttctcatagcggagtgaagatttgcagatggactaagtcgcagctgcgaggtcgtggagggtgttataagcactcattttacggcatagaaagtcacagatgcatggaagcaactccaagtttggcttgtgcaaataaatgtgtattttgttggagacatcacacaaatcctgttggaaagagctggaaatggaagatggatgaccctcttgacattgtgaatgctgcaattgaccagcatactaagatggttaagcaaatgaagggcgtaccaggagtaaagccagaaaaacttgacgaaggtctgtcacctagacattgtgcgttatctctggttggtgaaccaattatgtaccctgagataaatgctcttgtggatgagctacaccgaagacacatatctacgtttctggttacaaatgctcaatttcctgaaaagattaaggcattaaaaccaatcactcagctgtatgtcagtgtggatgcagctacaaaggagagcttgaaggctgttgataggccactattttcagacttctgggagcgtttcctggattcactcaagtcactgcatgaaaaagatcaaagaacggtttaccgactaacactggttaaaggctggaatgcagaagagatagatgcatatgcgaaactgctagatcttggccagcccgatttcattgaaatcaagggtgtaacatactgtggctcgtcagcaacttcaaagttgactatggaaaatgtaccttggcactctgatgtaaaggaattctccgaggtgttggcatcgaaaagcggtggtgtatacgaagtagcgtgtgagcatgctcattcatgttgtgtcctacttgcaaaggtagataaattcaagatcaacggcaaatggcatacctggatagattatgaccgtttccatgaactggtgacatctggaaagcctttcaatagccgagattacatggccatgacgccctcatgggctgtctatggtgcagaggaaggtggattcgatccggatcaatctcgtttcaagaaggaaaggcgccatggaactgctgccctcagaagttgaagttgatcttattgagaagacatggacctgctactcccgaacactgacctatgttactgctttttagaggcaaaaactttggaagcaaggatttttgaaatgttagcttccaagccatacattttctgtttgtcgtgtgaatcagtttccgaaagttcattttttgat

SEQ ID NO: 19444 - DNA, 2150 bp, Zea mays
  Clone ID: LIB3150-020-B5_FLI
ccgggaaggaggcccgcaggccgcagccagagcagccgccgttccgtatccgtcccgtctccggcgcggcggcgctgacgctaggggttgccgcacccagcgcggagatgcagcaacgtgcgcgggatggcgagcaacaccgcctgctcgacctcgcagtcgagtccggcttcgaccgcgacctcgccgccagctgcctcgcccgcctcctcgaggtctacggggaggatggtctggatatggttactgtcgacaactgtggcaatgatttccttgcatcactggctgatgccacacaacctactgatgactgggacgatctcaaagggattgagaccgaggcatgtggcaacttgaatgatatgatgatgaagaatgtacctgactgcaatggaggagttgctatagacatcagttatacatccagagagccaaatttgtcctctcaacgtgctccgaatcatcttgaagctttcaaatttgcctctgatgattcagattttgaaatggacaaccttcctgacaagtcttctagtatgcaaaggcagacacaatcaagaaactctggaatgcagactcgaagctcagcaaaatccacagtgactagggaaaccagcagatatgagccaacgactcccacttcaaatagagagatgcctccagctgcatttcatcaaaggagagaacttctgagctacgagcaactttgttgcctcgatgatgtcaattttgccaatgctgtcatctttggcaacaaaggctttaggcccctgcagtacgaagcttgcagggctgcaatggataaccaagactgtttcatacttatgccaactggtggtgggaagagtttgtgttatcagctccctgcaacattgcacccaggtgtcactgttgtcgtaagcccgttgctgtcgctgatccaggatcagattgtggcattaacttacaggtttgcagtaccagcagcattcttaaattcccagcaaacttctgctcaggcatctgcagtaatccaggagctaagatgtgggaaaccagccttcaaacttctgtatgttactcctgaaagaattgtcacgaactattcatttatggagaccctaagaggcttagatcagaggggactgctagcaagatttgtgattgatgaagcacattgtgtaagtcaatggggacacgatttccgtccagattaccgtggtctaggatgcctcaaacagaacttccctacggtcccgatcatggctttaaccgcaacagcaaccgaatctgttcgtaaggacgtcctcggtgccttgaggatccccaacgctgtggtactgaagaggagcttcgacagactgaacctcaactacgaggtaatcggcaagacgaaaactttccagaagcagctgggcgatctcctgaaagagcgcttcatgaatgagtctggtatcgtgtactgtctctcgaagaacgagtgtgcagacactgccaagtttttgagggagaaatacaagatcaaatgtgcgcactaccacgctagcctggcagctcgtcagcgaaccagtgtccaggagaaatggcacagcggggaggttaaggtcatctgcgctaccatagccttcggcatggggatcgacaaacctgacgtgcgttttgttatccacaacacattgtcgaaatcaatagaaagctactaccaggagtccgggagggcagggcgagatgagcttccggcacactgtatcgtcttataccagaagaaagacttcagccgtatcgtgtgcatgttgaggaacggtgacaacttcaggagcgagagcttcagggttgcgatggagcaagctaagaagatgcaggcatactgcgagctcaagaccgagtgccggagacaggcacttctgcagcacttcggcgaacagtacgacaggcgaaggtgccgagacgggcctagcccctgcgacaactgcctcaagacatagtttagggtaataaactatggcgataagaatgccatgacgcttggttatgctctgaacttgtgaggtgtgtgttccacagtacattcgtctgtgtatatgtagcatccatagctcaaacaagtggccgcaactgcactgtgtgtaacgatggtctttgttttcagtggattgtgaggttcatgcttt

SEQ ID NO: 19445 - DNA, 773 bp, Zea mays
  Clone ID: LIB3150-020-F5_FLI
acccacgcgtacggttaacgttaattcgatcatgcacactgtaggttttgtcgacgccgaagatatgaacttgagaaaacataaatatagaagttggttaggatactcaaatagcaagctggcacaggtaaaattcagtagcatgcttcacaagaaaattcctgcagaggctggcatcggtgtagtttgcgcttctcctggaattgtcgacacgaacgttgcaagagatcttcctaagattgtcgtagccgcgtaccatttgattccctacttcatatttgacgctcaagaaggttctaggagtgcactgtttgcagcatccgatccccaagtcccggaatactgcgagacgctcaagtcggaggactggccagtttgtgcctgcattaactatgactgtagtccgatgaatgcgtctgaagaagcgcacaatcttgagacctcgcagctggtctgggagaagacactggagatggtcggccttccgccggatgccctggagaagctcatcgccggagaatcagttcagtgccgttacggacaacaggatacaactttttagttagcagtttagaggtggtttgttcggttgttatgtcattttgatcctaaatttgcagggaggaaaacacagggaagggagaaaaagaatttgttgacagctaccaatctttgctctttttctgtatgtgtgcaagatgttgtgaaggaggcgtagaaacacatctcccccattatttgactattcctaatcaatgatatacttgagacag

SEQ ID NO: 19446 - DNA, 815 bp, Zea mays
  Clone ID: LIB3150-020-F7_FLI
gccgccgctccgcctcagcgcatcgcccgccgcgacctcatcgatcaccttcagctttcaatcatggtgagttccccgccaaaactgtatccacctccaagatccacggcgtccttctgactcgcacatgtactaatttgttttgcgcaggcggacgtcgatgtcgaaccggaggttgccgccggagctcccaagaagaggacgttccgcaagtacagctaccgcggcgtcgacctagatgcgcttctcgacatgtccacggacgaccttgtccagcttttccccgcgcgcgccaggagaaggttccagaggggtctgaagaggaagcccatggcgctcatcaagaagctgcgcaaggcgaaaaaggatgctcctgctggtgagaagcccgagccagtcaagacacatctccgtaacatgatcattgtccctgagatgattggaagcattgttggggtctacaacggcaagaccttcaaccaggttgagatcaagcctgagatgatcggccactaccttgctgagttttccatctcctacaagccggtcaagcacggcaggcccggtatcggtgccacccactcctctcgttttattcctctgaaatgagctgttacccggctttgtagtctcccaagagttcggtggcgatgttcattcagcttttctacttgttttgaacaagttaaatgcccaagacattttgttctgttccattccagctcaagaattcaaagctaagcattgcacacttatgctgttttgttggaagtatttgagttaatcatatctaagctgagttgctacgttgtttt

SEQ ID NO: 19447 - DNA, 755 bp, Zea mays
  Clone ID: LIB3150-021-D6_FLI
tcagatctcacgcccctgcagccaaaacaaaatcagcatccggatctccacattccccaccaaaaatcatcctccggacgaaatcagcggcggcggagatgggagcggagtgccggtacgaggtggcgcaggcggcgtacatcaagctggcgctgcacgcactgaagcacccggcgaccgccgtcaacggcctcctcgtcggtcgcctcgtcgagccttcgtcctcaccggccgtcgtctcggtcatcgacgccgtgccgctttctcaccacccgcaccatctgccgctgctccccacgctcgagctcgcgctcaccctcgtcgaggaccacttcgcaacccagggcgaaggcctcgccgtcgtcgggtactatcacgccaacccgcgctgcgacgacaccgaactcccgccagtcgccaagcgcgtcggagaccacatcttccgatacttcccccgctccgcggtgttgttggtcgataacaagaagcttgaggaggccgtcaaggggaagttttctgatgcggtgattcagggattggtcgaacccaggcctccttgactgagttttcatgattgatctcgctatactgttttggaacttcgctagaaatgaggtggtgaagctcgtcctgctgtgctatggatttctctcagtcgcaacgagttgtaagcactaagcacggatttcattttaatgtaaacgagtgattttgtaacaattacagttcaaaatgctaaaattgacgttgtgatg

SEQ ID NO: 19448 - DNA, 1487 bp, Zea mays
  Clone ID: LIB3150-021-E12_FLI
gctcacctgagccttccccaagttgtttctcttctcttgctccgcaaaccagcgcaagcccttccctgacagcggcggcgacatggtgctcgaggcgacgatgatctgcatagacaactcggagtggatgcggaacggcgactacgccccgtcgcggttccaggcgcaggccgatgccgtcaacctcatatgcggtgccaagacccagtcgaacccggagaacacagtaggcgtgatgacgatggccgggaagggcgtccgcgtgcttgtcactcccaccagcgacctcgggaagattctcgcctgtatgcacgggttggaagttggtgctgaggcaaacttggctgcggcaatccaggttgctcagcttgcgctaaagcatcgccagaacaagaggcagcagcagaggattatagcattcatcggaagtcctgtgaagtacgacaagaaaattttggagacaatcgggaagaagctgaaaaagaacaatgttgctcttgacattgttgactttggtgaatccgatgatgaaaagcctgaaaaactggaagcattgatcgctgctgttaacagcagtgatagcagtcacattgttcatgtccctcctggtgaaaatgctctctctgatgtcctcctaagcactcctatatttactggtgaagaaggtggaagtggttttgctgcttctgcagcagctgccgtagctactggagcatctggatttgaatttggtgtggacccaaatgtagatccagagttggcactcgccctgcggttgtctatggaagaagaacgagcaaggcaagaggctattgcaaaaaaggctgcagaagatacatctaataccgaaaatatcaatgcctcaagctcaaacagcgattctgttatggctgaagcagaacttgcctcaaatgctgctgctggtgacaagcaagaacagccaaaggatgatgacgatctactacagcaggcacttgcaatgtcaatggagggtggcgcttcaggatctgcagctgtgactgactccgctatggcagaagctggtgcagttgaccctgacttagcgttggctcttcaaatgtctgtccaggatgcaaacatgtccagtgacactgatatgagtaaggtgtttgaagacagaacgtttgtgtcatctatccttaattcgcttcctggtgttgatcccaatgatccatctgttaaagatttgctggcatcattgcacagccagggagagcaagagaagaaggaagacaagtcagacaaaacagaagacgagaagaactgatgtagccatgttcatgcttccatgctcacaaagaaattgaacattggtctgcattggctgcgcttactctcttggctatgaaatttgcttatcctcatgtaacagtgctttgtttataacttaatgccgagggaatttgtattgtgactgcaacaatcttctcgtcataaatgttcaagtgatttcgtgtttcaagctc

SEQ ID NO: 19449 - DNA, 832 bp, Zea mays
  Clone ID: LIB3150-021-E8_FLI
gccgccgaaggacggaaggagaagagggtacggccgtctccttgcccccatggcccacgagaagaagctgtccaacccgatgcgggagatcaaggtgcagaagctcgtcctcaatatctccgtcggggagagcggcgaccgtctcacccgcgccgcaaaggtgctcgagcagctcagcggccagacccccgtcttctccaaggcgaggtacacggtgcggtcgttcggcatccggcgtaacgagaagatcgcctgctacgtcacggtgaggggcgagaaggccatgcagctgcttgagagcggcctcaaggtcaaggagtacgagctgctcaggaggaacttcagcgacaccgggtgctttggtttcggtatccaggagcacatcgaccttggtatcaagtacgatccgtcaacaggcatctacggaatggacttctacgtcgtgctggagcgtgccggctaccgtgtggcgcgccgcaggaggtgcaagtcccgcgtcgggattcagcacagggtgaccaaggaggactccatgaagtggttccaggtcaagtacgaaggcgtcatcctcaacaaggctcaggccaacacgttgtaaacctcacccgtgggcaaaacagctctctggtctcgtatcctcctccgtgtcaacgcaagaccacccacctcgccagggttttttttggtttaatttgtgttctcagccctgatgtttagtctgctagcactctgtgggtgctgttgtcgcaagatcaccaccatgtgaattatttccgtgcccttgtcgcactctgtgtgctgttgcttgaaaacatgctagtttgatctccct

SEQ ID NO: 19450 - DNA, 748 bp, Zea mays
  Clone ID: LIB3150-021-G6_FLI
cgcgcatcctattgccctcgcgccaccgtcgccgccgccgccgctgcagcgagccaccgccccgccgtcgcttgaggtagacaccaatccaccgccatggggcgtatgcacagccgcgggaagggtatctcttcatcggcgctgccgtacaagaggactcctccgatctggctcaagacagctaccaccgaggtggaggagatgattaccaaggctgcgaagaagggccagatgccgtcgcagattggtgttctgctccgtgaccagcacggcatcccgcttgtcaagagcgtgactggtagcaagatcctccgcatcctcaaggcccatgggttggcgccggagatcccggaggatctctacttcctcattaagaaggcggtggcgattaggaagcatttggagaggaacaggaaggacaaggactccaaattcagactcattcttgttgagagcaggatccaccgccttgctcgctactacaagcgcaccaagaagctcccacccacctggaagtacgagtcaaccacggcgagcactctggtggcctaagtgatatcctctgatggcttggtctttagcacctatgagcttgttctagatatgaatttatgtaattcttgttatgtctggagctggttagatggactaggaacctcaactttttctatgtttacttggagaatcccataaaccatttttggtttcgcaattctgtctgttaaacgtaacatgcattcatatttct

SEQ ID NO: 19451 - DNA, 748 bp, Zea mays
  Clone ID: LIB3150-021-H12_FLI
gagagagagagagagaagagagagagaagagagagagagagagaggagtgggagacccgcgagaggctgccgtgtagggaccgtagactcagcgactgcgaaggagggataaggggatggccgggatcggaccgatcaggcaggactgggagccggtcgttgtgcggaagaaggcacccaccgccgccgccaagaaggatgagaaggccgtcaacgccgcgcgccgcgccggtgcggagatcgataccatgaagaagtacaacgctggtacgaacaaggcggcatccagcggtacatccctcaacaccaagcgcctcgacgacgacaccgaaaacctcgcccatgagcgagttccaagtgatctgaagaagaatctcatgcaagcaaggctcgataagaagctgacacaggcacaacttgctcagatgataaatgagaagccacaggtgattcaggagtatgaatcaggcaaggcaatccccaaccagcagatcattagcaagctcgagagggccctgggaaccaagttgcgtggcaagaaatagctttcctacgagtttgtgtcccggagcatcataatagggggaagacaaggcaagctgtctgcttatttgtctatgtttggtatctcaagtcctgcggactgtttctgttggcacaagagggaataaatgtgttcacggacctgtaatgcttgctccttgtcatatgaccttgctctaaacatttgtgatgaagctgtcaaggt

SEQ ID NO: 19452 - DNA, 468 bp, Zea mays
  Clone ID: LIB3150-022-A9_FLI
gaattctgcccggtgtgtgggattctgctgcagatcgatccgggcaccggaagccaccgcctgcgcctcttctgccccgtctgcccctacgtctgccccatcctgaacaagatcgtgaagaaggcgaggttggtcaaaaaggaggtggagcccatctccagcacggcggatgagatgaaatcggcccctaagaccgcagttacatgccaaagatgcaaccatggagaagcatacttcaagcagatgcagattcgatcagctgatgaaccgatgacaacaatatacaggtgttgcaaagaagaatgccagcatgaatggagagaggactgaccatagcattcgcactttgcttacacttcgctccctgtgcttcttcagttttgagtgttgggatgccctgttgcacatgtaatgcttctaatcagcgtatacttaagtacaaatttttggaaatgtatgttctatact

SEQ ID NO: 19453 - DNA, 751 bp, Zea mays
  Clone ID: LIB3150-022-D11_FLI
cagaagcaccgcgcgcaccatgcggccaccgagagggcgcggcggcggcggccggttcggcggaggtggaggccgaggcggcggcggtggccggttcggcggcggaggccgtggtggccggttcggcggcgggttccgcgacgagggcccgcccgcagaggtcgtcgaggtgtcgacgttcctgcacgcgtgcgagggagacgcggtgacgaagctcaccaacgagaaggtgccctacttcaacgcgcccatatacctgcagaacaagactcaggtcggcaaggtcgacgagatcttcggccccatcaacgaatcctatttctctgtgaagatgatggaagggatcattgcaacatcgtacaaggaaggcgacaagttctatatcgaccccatgaaattgctgcctctttcgcgcttcctgccgcaaccaaagggacaatctcaaggagcacctagaggtggtggccgtggtggaaggggtggtggccgaggccgtggtggttcgttccggggtggaagaggaccaccaaggggtggtggccgaggtccaaggggtggaagccgtggtggtttagagggcgaggaaggttctaggtgtagtttgagtttgatgatgtttttttttgttgaggcatcatagctacccaattggaaacttccatgttcttgtaacctgatatgtttaaggtagcagaacactttgtttgtggaacttggattctcaattgaaacaaagggtttgtacctgttc

SEQ ID NO: 19454 - DNA, 1506 bp, Zea mays
  Clone ID: LIB3150-023-A11_FLI
ccaggagcgagcagccaaggaaacgagtcaagcaatggagaaggccgtcgacaggcagcgggtcctgctgcggcacctcaaccccgccgcggcggggagccccgccccgcccgccatctccgcaagcgcgtgcgcggcgggggacagcgcggcgtaccaccggaggccggccttcgccgacgacgtcgtcatcgtcgctgcttacaggacggcaatctgcaaggccaagagagggggtttcaaggatacctttgctgaggacctcttggttcctgtcttcaaggctttggtagacaagacgaagctggacccaagtgaagttggcgacattgttgttggtactgtcttagctcctggttcccagagggcaatcgaatgcagaatggctgcactgtatgctggtttccctgacactgttcctcttaagactgtaaacaggcagtgctcttctggccttcaggcagttgcagatgttgccactgctattaaagcagggctctatgacattggtattgctgctggtttggagtccatgacagtgaacaaagttagtcttgatggccaagcgaatcccaaagttgagctattttctcaagcacgtgattgtcttctcccaatgggcctcacatctgagaatgttgcacaccgttttggcataacacgactggaccaagatcaagctgctgttgagtcacatagaaaggctgctgccgcagcagctgctggtaaattcaaagaggaaattgtgccagttcatacaaagattgttgatccaaaaactggtgaggaaaagaagatcgtagtctctgcagatgatggaatccgagtggatacttctcttgcagtcctgtcaaaactcaaaccagcattttcaaaggatggcagcactactgctgggaatgcaagccaagtgagcgatggcgctggggccgtcttgctaatgagacgggatgttgctatgaagaagggtcttccagttcttggtgtctttaggacctttgccgctgttggagttgatccagctgtcatgggtattggtcctgccgttgcaatccctgcagcagtgaaagctgctggccttcagatggatgatattgatcttttcgaaatcaacgaggcttttgcatctcagtatgtctactgctgcaagaagttggaacttgatcctgctaaagtcaatgttaatggcggtgcaatggctcttggacatcctttgggtgctacaggtgcacggtgcgtcagtactcttctcaatgagatgaagcgccgcggcaaggattgccggttcggagtgatttctatgtgcataggttctgggatgggtgccgctgctgtgttcgagcggggagacggcgttgatgagctcaccaatgctcggggaatctcgacccacaactggctttccaaggacgccatgtaaagctacacccaccaaaatttgccggaactggtagcattgtttccagatcgctgtatggagcgaattgggcaataaaatgattttgt

SEQ ID NO: 19455 - DNA, 599 bp, Zea mays
  Clone ID: LIB3150-023-A6_FLI
ggtaagattacagatttcaccagcaaacaacaatggctagtcttttaatattatatttactggcctttaatttgtcgccatatcattgcatctgacagcatctttcatatgattttattatagtcagtttttaacatcccgttaaaattctctcctattccatcagattttacagtaatcctagaatgattattcagtagtgtattctgaaattttgaactttgtaggcgttgacatcagcatgaatactcatctgaagactgtgaagctgacactaaaagggaaaaatcctgttacccttgatcaccttagtgtgaggggaaacaacatccgctattatatccttcctgacagcctaaacctggagactttgctggttgaggaaacaccaagggtcaagcctaagaagcctacttctgggaagcccttgggacgtgggcgtggccgtggtcgtgggcgcggtcggggtcggggacgttgagcatgctagctgcttttggaaattgcattgcgtgcatctgcagtgtaacctacattcctatcaattgtacgaagtatgcctttgattatgcaaccatgtatcaattgttttttttttt

SEQ ID NO: 19456 - DNA, 1645 bp, Zea mays
  Clone ID: LIB3150-023-B9_FLI
ctcgccgtcgtcttctgcggttctgccgtctacgcctccaatttggcctctctcccttgcaagtttaagcttcaccttcaaccatgggtaaggagaagtcccacatcaacattgtggtcattggccacgtcgactctggcaagtcgaccaccaccggccacctgatctacaagcttggaggcattgacaagcgtgtaatagagaggtttgagaaggaggctgctgagatgaacaagcggtccttcaagtatgcttgggtgctcgacaagctcaaggctgagcgtgagaggggtatcaccattgatattgctctgtggaagtttgagaccaccaagtattactgcaccgtcattgatgcccctggacaccgtgacttcatcaagaacatgatcactggtacctcccaggctgactgtgctgtccttatcattgactccaccactggtggttttgaggctggtatctccaaggatggccagacccgtgagcatgctctccttgcgttcactcttggagtgaagcagatgatttgctgctgcaacaagatggatgcaacgactcccaaatactccaaggcgcgttatgatgagattgtgaaggaagtctcatcctacctcaagaaagttgggtacaaccctgataagattgcctttgtccccatctctggttttgagggcgacaacatgattgagaggtccaccaaccttgactggtacaaaggcccgaccctgcttgaggctcttgaccagatcaccgagcccaagagaccttcggacaagcccctgcgtctccccctgcaggatgtgtacaagattggtggtattggaactgtaccggttggtcgtgtggagactggtgtcatcaagcctggtatggttgtcaccttcggtccaactggcctgactactgaggtgaagtctgttgagatgcaccacgaggctcttcaggaggcccttcctggtgacaatgttggcttcaacgtgaagaacgttgctgtgaaggatctcaagcgtggttttgtggcctcaaactccaaggatgaccctgccaaggaggctgccagcttcacgtcccaggtcatcatcatgaaccaccctggccagatcggtaacggctatgccccagtgctggactgccatacctcccatattgctgtcaagtttgctgagctgattaccaagatcgacaggcgttctggcaaggagcttgagaaagagcccaagttcttgaagaacggcgatgctggtatggtgaagatgattcccaccaagcccatggtggtggagacattctcgcagtatcctccccttggtaggtttgctgtccgcgacatgaggcagacagttgctgttggagtcatcaagagtgtggagaagaaggacccgaccggcgccaaggttaccaaggcagctgccaaaaagaaatgatgcaacctgtcgttaatcctgtatctgcttttgcaatacctgacttgtcactccatcccgaagttttgtatgcggttgttactgttattgtgtactgttaagctctgctgcggcgtgccctgttgtttgggtagcgtcaacgtcgagcgccacttgcgggtgtgcctttgtctgctatcagtagcggcaaaaattgaaagctctcgagacttatgtcc

SEQ ID NO: 19457 - DNA, 1166 bp, Zea mays
  Clone ID: LIB3150-023-E2_FLI
cgacgacctccattcccccaaaccgcaaagcggagtccggattgcagttccttcggtccatccggccgtcacatcagccacacgccgacgcgccgccagtcgccgcacgagggggcccgtgatgccgaagaagatgggcgtgaactccaaggcggaggcggcccgcgaccgccgctccgccgcggaggccgaccgccgcgaccgccaggagcgcgccaaggaggagcagtactgggccgaggctgagggccccaagtcccgcgctgcgcgccgccgggaggaggacgccgagaagcgcgccgaggccgcggctcgcaaggccgagaaccgccgcctcgccgaggcagaggccgccgccgtcgccgcttccgcatcggcgccgtccaaggccgcagcgcgcaaggcgtcccgcgttgccgctccgccccccaaggttaccgaggccgagctcgtgcgcctccgcgaggaggagcggctccgcctcgagcgggaggcagaggccgccaagaagcgcgccgcgcgggtcgccgaggaggaggagtacgagcgcgtagtcctcgtcgaaaacactaacagggatgattccctcatcgaggccaggtcggttgaggaggctatcgcgcggatgtcggtcgtggatccgcaggcgtccctgcccgctgacaagcatcctgagcgtcgcctcaagtcgacctttaaggcatttgaagaggcagagctccctaagctgaaggaagaaaagccaggtctaacgctgcaccaatacaaagacatgatatggaaactgtggaagaagtccccagacaaccctcttaaccaggctgctgactgaattttgcaaccctactgaatcttatgtgtaattaaaggccaaccttcaaacagcactggattggtgaattgtgttggtacctttttcttggagtggatgcgcactaaaccttgaatcagaaaggtgttccagtctcggctaataatttccaaatcgctggagtgtatgctgtgggaggtgctcttgtttaggccctgtttggtttctttagtcactagactaaattttagtgactaaagtttagtcgctaaagtaccatgtttggttccagtgactaaaccagactaaagagcattaattgctatgaataatgactgttttacccctattaatt

SEQ ID NO: 19458 - DNA, 663 bp, Zea mays
  Clone ID: LIB3150-023-F1_FLI
ttattgagtatcgtggtgaacaagttagacaacgtgttgctgatttgagggaagcacggtaccatagagaaaaaaaggattgctatttgttcaagataagtgaagatgttgtcatcgatgctactggcaaaggaaacatagcgcgcctgattaatcactcgtgtatgccaagctgctatgctaggatcgtgaccgtcagtggtgacaggagccagatcattcttattgcgaagagagacgtctctgccggagaagagctgacgtataactacctgtttgaccctgacgagtccgaagactgcaaggttccatgcctgtgcaaagctcctaactgtcgtggatacatgaactagggtgctgctagaagagtaaaaaccaatctaacaaacaaggactgaggctaactccttacagaagccaaaagccggccattttttttttcctggaattctttcggtagtttctcgttttcttatattactcaccagaagcttacaattcgtgggctgcacaaggtttggaccattttgttcagaaattgcgatttagggcagccgtaggcagtcatccatttgtatattcttccattgctgtgataagatggtaagaatgctcaaaatttttttttggttaaatgaaaataagaaaaactcagtttgattc

SEQ ID NO: 19459 - DNA, 894 bp, Zea mays
  Clone ID: LIB3150-023-F6_FLI
ctgggtcttcagaccattagctttatctactccagagcgcagaagaacccgatcgacaccatgagggtgttgctcgttgccctcgctctcctggctctcgctgcgagcgccacctccacgcatacaagcggcggctgcggctgccagccaccgccgccggttcatctaccgccgccggtgcatctgccacctccggttcacctgccacctccggtgcatctcccaccgccggtccacctgccgccgccggtccacctgccaccgccggtccatgtgccgccgccggttcatctgccgccgccaccatgccactaccctactcaaccgccccggcctcagcctcatccccagccacacccatgcccgtgccaacagccgcatccaagcccgtgccagctgcagggaacctgcggcgttggcagcaccccgatcctgggccagtgcgtcgagttcctgaggcatcagtgcagcccgacggcgacgccctactgctcgcctcagtgccagtcgttgcggcagcagtgttgccagcagctcaggcaggtggagccgcagcaccggtaccaggcgatcttcggcttggtcctccagtccatcctgcagcagcagccgcaaagcggccaggtcgcggggctgttggcggcgcagatagcgcagcaactgacggcgatgtgcggcctgcagcagccgactccatgcccctacgctgctgccggcggtgtcccccactgaagaaactatgtgctgtagtatagccgctggctagctagctagttgagtcatttagcggcgatgattgagtaataatgtgtcacgcatcaccatgggtggcagtgtcagtgtgagcaatgacctgaatgaacaattgaaatgaaaagaaaaaagtattgttcc

SEQ ID NO: 19460 - DNA, 889 bp, Zea mays
  Clone ID: LIB3150-023-G6_FLI
gctcgccgtgcttcatggcgcattgtctcttctattgaacagaaggaggagtcccgtaagaacgaagagcatgtgaaccttatcaaggaataccgtgcgaagatcgaggctgaactgagcaatatctgtgatggcatcctgaagctgcttgactcccacctagtgccttcttctactgctgctgaatcaaaggtcttctacctcaagatgaagggtgactatcacaggtatcttgcggaatttaagactggtcctgagaggaaggaatctgctgagagcacgatgatggcctacaaggctgctcaggacattgcgctggctgagctggcacctacccatccgataaggcttgggcttgctcttaacttctcagtgttctattatgagattctgaactccccagacaaagcttgcaaccttgcaaagcaggcgtttgatgaagctatctcccagttagacacccttggggaggagtcatacaaagatagcactctgatcatgcagctccttagggacaacttgaccctttggacctctgacctcacggaggatggtgctgatgagggcaaagaagccccgaaaggtgaggctggtgacggacagtaatcttgggagagcgcatattgttcgagcccattgttttagatgctctatgctgtcgaagctgaagctgtgccgtgctattattgtagctgatttcctgttccctcacttctttttttatattagtaggctggtagtgttcgaattagttccccattgctttgtgttgccgctagttggcattaagtccgtgtggactggtattattcactggatttgagaagcatgtcagtggttgctctagcgttttattgagttttgaagtcatctccctcatttcggtttc

SEQ ID NO: 19461 - DNA, 966 bp, Zea mays
  Clone ID: LIB3150-026-G7_FLI
atttttcctagccgccactttcttctctccctggcttcttcccccacgtgcagcgacgcccttcttccccaatagcatggagcagcggcttccctctcccagctcggcctcgccatcgcgcagggaagagcagacgcccagctctccctctccatcgcgcccccatccatggcgcccaagccctagtttcttcctcctgctgatttccccatggtgcagcagcccattcttcaccacacccagcagcggtagcagcttccatggaggacgcccagattttttttcacccctccttggcctcccttgcacaggggcagcagcctccatggccgacctctcctcctctgcgcagggcgcccctgttcccctgctccttctccctcgcacaacagcagctcgccccaccttccctcgctgcgcagctcctcagcaaaacgccgctgttcctgcagccacggcgtccaagtccctgcgcccagccctccgatccaaaaacagcagccctgcgtagagccccttcccttgctcctttacgatgtgcgcagggtgctcgacgaaatatgcagcagccccgatggctccgcgtgctgccggcttgttgttttattgcgcagtgagcagcacaccgtgatgcccgtcggtggtttgctatttttgcgcagccccgccgtcgtcgtcgttcaccccggtgagaccgcgatgctccttgttcgattccgcatcgacattatttttctatgattaattatgtatatgtgctgctttgttttgtttttgtggaggagagaaaccccgtgttttgcgtggagaagaaggcaagtcgttcaacgctcgtcaatgtgcggagctatgcacaaatcgaatcgccaacgttcttacaaacaccgattgagtttgtttatgttgagccaatgcatgtcgctctcgattgacttgatttataaattatatagatgtggttgaaat

SEQ ID NO: 19462 - DNA, 728 bp, Zea mays
  Clone ID: LIB3150-026-G8_FLI
ggcttctcctccccctcttaccaagtcctcttcgggttagggttacttagggttttgtggaggggcgatggcggcggctgatgtggagtaccgttgcttcgtcggcgggcttgcctgggccaccagcaacgagtcgctggagaatgccttcgcctcctacggcgagatcctcgactccaaggtcatcaccgaccgggagacggggaggtctcgcggcttcggcttcgttaccttctcctccgagaactccatgctcgacgctatcgagaacatgaacggcaaggagctcgacggccgtaacatcaccgttaaccaggcccagtcccgtggcggtggcggtggcggcggtggctacggcggcggtcgcggcggcggcggctatggtggcgggcgccgtgacggcggttatggcggcggtggcggctacggcggtcggcgcgagggtggtggcggcggctacggaggcggtggcggctacggcggtcggcgcgagggtggtggtggcggctacggcggcggcggcggcggctggagggactgatgtgtgggcccatcctggcttcggccgagttatcttatctatctatagtatcgtgttaccgttcgcttctgtcaccgtgttagtgtccgttctacctttggattaggtgttggtacccctgttgttccctttggttgctcccgctatgaaacgagacgagagaagaatgagcaaaaagtattgttcc

SEQ ID NO: 19463 - DNA, 1248 bp, Zea mays
  Clone ID: LIB3150-027-A12_FLI
ggcctcctcaagattggagcttcaacaagcgcacactgagctttggaacctcacctttagctaccttaagtccatggcacttgagtgtgttgttcaactaaacatacccaatgttattcacaactttggtggcaatgccactctacccagtattctctctgccatccaagttcctgaacataggaagccctaccttccacgcctcatgaggtttcttgtcgtatcaggtatcctttcatttgattctcccaccttaggggaggagggtacttaccacctcaccccattatcacgccttcttgtggatgacacccacattaatggctatgggagcctcggtccatttgtgctctcccaaaccacaaagtaccatgtctcatcggccacgtacttgtctgagtggttcaagggtgaagatggtgcggggcctatggctgcagagatgccattcaagatggctcatggcacaggcccatggggtgcccttgggcatgatcaacaattcaatagggtctttaatgctgggttgggatctaatagtcgacttgtgctagactttgttgtggccgaatatggtgatgtgtttgatggcgtaagctcactgcttgatgttggaggaggggatggtagcacagcgaggacaattagaaaagctttcccacatatcaagtgctcggtgttggatctcccaaatgttatcattgacatacaaccaggtgatggcatggttgactatattgcgggtgatatgtttagctcaatcccaccaactgatgctattatgctcaagtatgtgctgcatgactggaacgatgatgattgtgtcaagatcctacaacaatgcaaaaaggctatatgttcctgcaaaccagccggaggaaaagttttaatcatagatgtagtcgttggatctccattgaaagagatgttcgaagcgcaagtcacatctgatttgttgatgatggtgatagctgggggtaaggagcgtgataagaaagagtggcacaagatattcgtggagtccggattcaaggactacaagataagtccagttctggggtacctctcaatcatcgagctctactcgtagaaaattaaaaaaagtgttattagctggtgagaaacatgtctcgaacaagagggcgctgtgatccatttgccttggtggctttttgccaaataataagtgtccagctgtatggtcatatattcgagaaaataagagcatctccaaggtcattcacgcat

SEQ ID NO: 19464 - DNA, 1009 bp, Zea mays
  Clone ID: LIB3150-027-B3_FLI
gccaccgatcgctcctctccactttccacattccagttccactccgcctccgctgccggtcgccgactccgaaactccgacagtccgaccacaagaaggatgagtgaagaggataagactgctgcttctgctgagcagccgaagagggcccctaagctcaatgaaaggatcctctcttctctgtccaggaggtccgtagctgctcatccgtggcatgatcttgagatcggtcctgatgctcctgctgttttcaatgttgtaagtaccagcattaccttagaaccgtttgatgtgttatatgtttggtgctgtggggagtggggacttaggttgtctggaaccatctacgggaaggttgttgagatcacaaagggaagcaaagttaaatatgagcttgacaagaaaactggactgattaaggttgatcgagtcctatactcatcagttgtataccctcacaattatggtttcgttccaaggactctttgtgaagacaatgacccattggatgtgttggtcctgatgcaggagcctgttattcctggttcgttcctgcgagcaagagcaatcggccttatgcccatgattgaccagggtgaaaaggatgacaagataatagcagtctgtgctgatgatcctgaatatcgtcactacaacgacatcagtgagctgtctcctcatcgcctgcaagagatcaagcggttctttgaagattataagaagaatgagaataaagaggttgctgtcgatgcattcttgcctgcgaccacagctcgagaggccattcagtactccatggatctgtatgcgcagtatattttgcaaagcttgaggcagtagattggaagcaactatttatctgggcgtcttggaatgagtgtgattttaataagtcaaaacacttgatattgtgtgcaaatcttggggttgagaacaatgtcactagctgtgatttacttctgtgacttgcattttttttcttgttaaattatgaataagcgaagtccat

SEQ ID NO: 19465 - DNA, 959 bp, Zea mays
  Clone ID: LIB3150-027-C1_FLI
cgacggaggggcagacgccagacgggcagtcccaggttcggcgtcgtcgtcagcggctccccctcctgccagtcgcctcgcgccctcgcctccggtcctccgcacacctgccggcgactctgcctcgctacgacgctacatcaacatgaggctcaataaggtggaagtgaaccttataaggctgctggaggctgctccacggcagcaaaatcaggctaaacttgtctattatgtaaccacagcgcgggagctgttggagcagctaggagctgagacaacaccagaagggatatcaagcatttcaaaagctaagctttctgagtattcagaaaagattgaagcactagcttccaggcttgctgcttcagtgcctgaaaatgaaaatccgattattgaaagcaaagatgaaatctcttatgaagaagcaaagccagaaagtccaatatctttatcatcaggactgcgaaggagatcaacagcccatgctgtggttggaacaagccatcaggaaaataaagaagatatcggagcaccgataaaattggatgcagaagctcaggcttacattgagaagcataggaagctccaagaagatttgactgatgaaatggtcgagttagcacgtcaactgaaggaaagtagcttaatgatgaaccaatcggtgcaggagacagagaagatccttgattctaccgagagggccgtggagcacagcctggcaagcacaggccacgcaacctcgcgagctgcggaggtctactcgctggcttccaagactacgtgcttccagtggctgctaatgtttgtgatgtcctgcatgtttgtaatggtggttctgctgataagggtcacttgaatgatgaggctgtagcaggcactcaaatcgtactcacccttgtcattgtttcatgggaattctttgtggtcaggtcatggtatttttccgagcaagtgtcccc

SEQ ID NO: 19466 - DNA, 2430 bp, Zea mays
  Clone ID: LIB3150-027-D7_FLI
gcaggggcccgagagcatcaccttcgaccagcagggccatacacgggcgtcgccgacggccgggtcgtcttctgggacggcgagcggtgggtcccattcgcgatggccttcccgtgctggacgcaggagctccacggagggccgaaggcctcgccgctggagtatctcccagcgagcatatctgcaaccgcccgctcgggctctgtttcgataagactggggacctgtacatcgccgacgcctacttcggcttgctcaaagtccgccgcgaggccgggctggccacgctgctcgcaacggaggccgagggcgtgcgcttcaacttcaccaacgacctcgacctcgacctcgacgacgagggcaacatctacttcactgactctagcattcactaccaaagacgtctgtgatgccatgccctcgctctcttccctctgctttgcgcgcttggttggatgctcacttgattcctactgaccacggggatggtgatcgactgattgttaacatcacttgattcctctgctttatattgattcctactgaagatggacaatataaaaacctaaaatggaccaattctttctttgagggatacaaccctactctggtgtaacttatacttgttctagcacttggccctctgatctggtgaataagttatgcagaagaaaaattatgttttattttatatttaactgtactttgttgtagcttgtaggtactgatcagagggccaggtgctatccacgaatgatagtgtaatgtctaggaacgatagctgatttggaaaacctgcaaagtctattcacaacagtgatatataatggtcacctattatgaagaaatagtgaatgggagaagggttgagttttggagccggtgcatgcaaatcatataccaggtttatgctataatgttttccttatgaagaattaaatatttgtgtgtttgcacagcgaggtcatattttcatattgattttctgtacctgggactttggagaggggaacacgttccaaaaccggagcgtttcatcaccagccccagtaactatggtctgttggtatgacctcgctgaggttgttgccctcaccgagagcatcggcaagccgctcgccgaggtgctcaaggagctcgggaagagggttccagactcccttgtgaagacccgcatcgaggatgatggcttcactatcaactcgagaagagggttccagactcccttgtgaagacccacaactagagaaataggatggagagggaaatttactaagagaggacgtgtaacaaataaggccaggaattattagaatgaatggaaaatgtcctcatacacctttggagattttatttcgcttgtgggcaagtggtgatcagagtttgtctctatcggcaactgtttggatcactgtttaactaaatcctacaatacataccttgccagtaccaatcttgtgaatgacagaaacacaaagcatatttattttctgatggactgcctgtagagctgtattctcttgatgttcagaaatcatatgagagggcaataatctccgtggagcaactgaatgctattcttagacaggcttctaaaaccaaggaaaaggaagatctcaggaagatagataactggcaatatattagttgtgtcaccctatgggttcggtttctgtgttgtcactataaggattacaatctccatcccttattttctcaagttcttcaagtaataagaggagtggctcacttattcccaggcacaaggtacttaccgttgagactgaagcttgtgcagatgctgaacgagctttccacttgcagtcagatgttctatccaattccatagttgctctttgactgcctagaattaagagaagtttctcagaaagaacaaacacaaagaacaaagatcaacttttcgtctttgttgaaggtgccaaagaacctgctgaaaccaagggattttcaagaggagtgtattctttcagcgattcagattctatcagcacattttgcccagtggagttaccatgtttccttcctagaagtagccaccattcctcttgtcctcttgaagaggctacatgagcagacaacagttgaatcacttcgccatcctattaagtgtttgatagaccaggtgacggagaacaaggattttatagaaaggaaaagagaggttgtatccttttcaccaaatgataaggcgtcagttgatagcttccttcaggaggagaaggtcagcagaaccgcttcattcactcggttctatgcatccgtagctgaaaaccgtcaaccaaaatgtatgtcataaatctctactactccttatgtctttagtgtaggcgtccacatctctttgttctgccatcgcgcgctccgcccgcgattcccctccccgcgcccgcagtccccgccgccatcctc

SEQ ID NO: 19467 - DNA, 1308 bp, Zea mays
  Clone ID: LIB3150-027-D8_FLI
gctccaactacgacgagaaccgccactcctcgaaatctccaaggattttctgcggcgaaccccttcgtgacgtgacccaatgggagaggcctcgccgtcgatcgccaaggacgtcaccgagttgatcgggaacacgccgctggtgtacctcaacaaggtgaccgatgggtgcgtcggccgcgtcgccgccaagctcgagtccatggagccctgctccagcgtcaaggataggattggctacagcatgatcacggacgcagaggagaaagggctgattactccaggcgtgagtgttctgattgaaccaactagcggcaacacaggcattggactggcctttatggctgctgccaagggctacaaacttacactcacaatgcctgcctccatgagcatggagaggaggatcatattgaaggcttttggtgctgaacttgtccttactgacccactcctgggaatgaaaggagctgtcaagaaagcggaagagatacaagcaaagacacccaactcgtacatccttcaacaatttgaaaatccagctaacccaaagattcactatgagactactgggcctgaaatctggaaagctacagcaggaaaaattgctggccttgtatctggtatcgggacaggaggtaccatcaccggtactgggcgatacctcagagagcaaaatcctaatgtcaagctctatggtgtggagccagtggagagtgctgttttgaatggtggaaaacctggaccacacaagattcaaggaattggagctggttttatccctggagtcttggatgttgatctccttgatgagactctacaggtttcaagtgatgaagctattgagactgccaaggctcttgctctgaaagaagggttgttggttggaatctcttctggtgcagctgcagctgcggcagttaggcttgctaagaggccagaaaacgccggaaagctatttgttgtcgtgttcccgagcttcggcgagcgctacctctcatcggtgctgttccagtccatcaagaaggaagcggaaagcatggtggtcgagccctagagcacacagttctgggcttctggcaaactatttcctgagacgttcatcatttccatcacagaaaaataaagctcgggtgccttctgttgatttcgacgtacatttccctgccgatggtgtccagcccactgttgtcgctggagaacacgtcgtttttagacttgtgatgttttactactgttttgacactcgttgtatttctgtatatcgcgtcagactgtgaaataaaagcagtacagtgtgtttcttgc

SEQ ID NO: 19468 - DNA, 757 bp, Zea mays
  Clone ID: LIB3150-027-F6_FLI
catcaagctccccgaccaaaccctactcgtaccccgccgccgccgcagccgcagccgcggccacaccagcaagcagaactagcagccatgccgcccaaattggacccctctcaggtggtggaggtcttcgtccgcgtgacgggaggcgaggtcggcgcggcgtcgtcgctggcccccaagatcggcccgctcggtctctccccgaagaagatcggcgaggacatcgccaaggagaccgccaaggactggaagggcctccgcgtcaccgtcaagctcaccgtgcagaaccggcaggccaaggtctccgtcgtcccctccgccgcggcgctcgtcatcaaggcgctcaaggaacccgagagggacaggaagaaggtcaagaacatcaagcacagcggcaacatcagcctcgacgacgtcatcgagatcgccaagaccatgcggaacaggtccatggccaaggagttggccgggaccgtcaaggagatcctggggacctgcgtcagcgtcgggtgcaccgtcgatgggaaggaccccaaggacttgcagcaggagatcgatgatggtgaggtcgagatcccatcagcttaaaggctatacaactagaaatcatcggacactatcaaagtggtgttttgttccaaatgcagttcctgcacctcaatcgcctattattgtctgctttagttcccttaagtcttgtgagagacctaatcagtaccttctgcctgataaaattacatcttccgattttctgtct

SEQ ID NO: 19469 - DNA, 1002 bp, Zea mays
  Clone ID: LIB3150-027-G3_FLI
ctcccatccagccgccaccaggtgcagagtctttcgtcatctcttctccggcgaagaacccccagtcgcccaccagatcacttgttaaactttgttgaggggtgatggcggtttctttcgcaaacctcaacaccgaggcagggcttaaaaagcttgatgagtaccttctcactcgcagctacatcactggctaccaagcttccaaggatgacttggctgtctacacttcgttttcgtctgctccctcgtccaagtatatcaacgtagcaaggtggtttaatcacattgatgcgctcgtgaggctgagcggaattactgcagagggccaaggtgtgaaggttgaatcctcagcagttccttcagccccaactccagatgttgctgaagcacaggccccagctgctgaggaggaggacgatgatgatgttgacctttttggtgaggagaccgaagatgagaagaaggctgctgaagagcgtgctgcagctgccaaggcttctggcaagaagaaagaatctgggaagtcatcagttttacttgatgtgaagccatgggacgatgagactgacatggccaagcttgaggaagctgttaggagtgtccagatggaagggctgctctggggcgcatccaagcttgtcccagtcggatatggtatcaagaagctgcaaatcatgatgaccatagtcgacgatcttgtctctgtcgacactctcattgaggactatctgtgcgctgagccagttaacgagtacgtccagagctgcgacatcgttgccttcaacaagatctaggcgtgactttcgatcagtccttcccctggggtgctggcgatggtggtggctgggcaatgcaccagcctaatttttccatagctatatgtctgctttgtgtggccagtgatattgccgtgagtatttttggatcctattcgagtcgaatgtaccagtaccagagttaatttgctttaattcgaaacaccgttccggttggaattctgtt

SEQ ID NO: 19470 - DNA, 792 bp, Zea mays
  Clone ID: LIB3150-027-H11_FLI
gcgagccctatctatccttttctcggcacctcgcgggtctcccgtccgccccgtcccgcattcgtatcctctcctcactctcgccgccgccgcttcccctgcgccccgagccaagatgaatgttgaaaagctcaagaagatggcaggtgctgtgcgcactggggggaagggtagcatgcgcaggaagaagaaggcagtccacaagactacgaccacagatgataaaaggcttcagagcaccctgaaaagaataggagtgaacaccattcctggtattgaagaggtcaacatctttaaggatgatgttgttattcagtttgtgaatcctaaagtgcaagcttcaattggtgctaatacatgggtggtcagtggaactccacagacaaagaagctgcaagatctgcttccatcgattatcaaccagctcggccctgacaacctagacaacctgcggaggcttgcggagcaattccagaagcaggcccctggtgcttcaggtgcagaggctggcgccagcgctggtgctgctcaggacgatgacgatgacgttcctgagctcgtccctggagagacatttgaggaggctgcggaagagaaaaaggagtcatcatgattttgccacatgcccgcccttgtgaagggcttataagtaaagccttgcgtagaagggacctgttgagaactctgacctgccttatttgtgcctgcgtacggttatgtcatgaacgagaatttggtagtccagcactgatgggattttagtttacatgaagtttgccccccctttttttc

SEQ ID NO: 19471 - DNA, 779 bp, Zea mays
  Clone ID: LIB3150-028-A4_FLI
gccgaagctcaatcaattcactcaaacctcttccccaaatcttcgattagattctcgttgacaagaagactagaaccgaacctgaccatgtcgctgatccgccgcagcaacgtgttcgatcccttctccctcgacctctgggacccctttgagggcttccccttcggctccggcagcagcagcagtctcttcccctcgttcccgcggaccagctcggagaccgcggccttcgctggcgcgcggatcgactggaaggagactccagaggcgcacgtgttcaaggcagacgtaccggggctgaagaaggaggaggtcaaggtggaggtcgaggacggcaacgtccttcagatcagcggcgagcgcaacaaggagcaggaggagaagacggacacctggcaccgcgtggagcggagcagcgggagattcctgcgcaggttccgactgcccgagaacgccaagacggagcagatcagggccgccatggagaacggcgtgcttacagtcactgtgcccaaggaggacgccaagaagcctgaagtgaagtccattcagatctccggctagacctcggtctgcggtcgtcgtacctgcgtggtttgaggaacggcagttcgcctcggtcgttctgtgaaataaaattgggttacaagaattatggcgtttgtcaatatgatcgtaatgtcgtaggatggtggaatgtggtcacaaactttgcgtatgttgggtctactggtggtgtctactctgaatctatgtatggatgtcatgagttccagttt

SEQ ID NO: 19472 - DNA, 1943 bp, Zea mays
  Clone ID: LIB3150-028-B10_FLI
attccatcgcttccctgctttagaaccttctctgctagcttctccccgtcacagcttttggtgcctcgtcatcggcgaccaaaccgccggcgaccggataaactaagccagctccttcgctccgaaagtcgtctctcgtagagagcacttgctcacctgctccccgcccccctctgctggcgctggacttgctcggagtggagatccatccggacctggttcgatttcttcatttcgggttcgattcggtttttctatcccagagcgaaagatcaatatcacctgacacaacataacgatttcgtggaagccgaggttgcttctctgctcagtgggtggataactggattgtggattttgctaactacatgctgggttatcagcctatcataaggaaagcaaagaagagacaacaaagcaatttgttgtctctttcttaggagctggcgagtactcggcatggcagatgctagttcgaggactgacacctcgactgttttagacatggatgataagaatcaaaggttagaaaatggacagagtggagctatggccctggcttcgaattcatctgatcggtctgacagatctgacaaacctatggaccaaaaggttttacgacggcttgcccaaaatcgtgaggcagcaaggaaaagtcggctgaggaaaaaggcatatgtgcaacaactagagagcagcaagctaaaacttgcaagcctggagcaagaactccagaaagctcgacaacagggaatcttcatatccagttctggagatcaaactcatgctatgagtggaaatggagctatgaccttcgatttagaatattctcgatggcaagaggaagaaaataagcagataaatgagctgaggactgcagtaaatgctcatgcaagtgaaagtgacctccgtcttatcgtcgatgggataatggcacattatgatgagatattcaggctgaagggtattgctgcaaaggctgatgtgttccatatactttcaggcatgtggaaaacacctgctgaaaggtgcttcttgtggcttgggggtttccgttcgtctgagcttctaaagctccttgtgaatcagcttgagcctctaactgagcagcaattgatggggctatccaatctccagcaatcctcccagcaggctgaggatgcattgtcacaaggcatggaagcattgcagcaatccttggcagaaacgctggctgggtcccttggtccatcaggatcttccggaaacgtcgcaaactatatgggtcaaatggctatggccatgggaaaacttggcacactcgagaatttccttcgtcaggctgacaatctacgacagcagaccttgcatcagatgcaacgcatcctgacaattcgacaagccgctcgcgcgcttcttgcaatacacgactacttttcacgtctacgcgccctgagttctctttggctcgctaggccgcgagagtagcatcacccacgttggagtcactccatgggccgatctgtgaatgtggggctgctggctgcaaactcgcaacgcatttgcagatggctggagggtcagttctctttgtacaagttgtattaacatcttctggtctcatattgcgcttcagtgttgtacaagttagggtaaagcttgcatttaacttgtaagttatcatggattcatgattgacatattgtacaattgtattagcaataagaatagaagtacataaatgctggaaggactatccagcgtctatattggttggaaacgagcagcagaagcttgtcatgtcgattttgaatagtcggttgaagtgttctttttggggtctatagagaacaaagaaagcttcaggagaaatgtataggtattcaccagtctaccatagtgtgtgcttcggggagctccttgtgatggtaaaatttgataacgaggatgagttcagtgacatt

SEQ ID NO: 19473 - DNA, 596 bp, Zea mays
  Clone ID: LIB3150-028-B8_FLI
acccttcctcttggcgcgctccgatccaagagatggcggtgccgctgctgacaaagaagatcgtgaagaagcgggtcaagcagttcaagaggccccatctcgaccgctataagtgccttaagccaagctggcgcaggccaaagggtattgactcccgtgtcaggaggaagttcaagggatgcaccttgatgcccaacattggttacggctctgacaaatcaaccaggcactacctccccaataagttcaagaagtttgtggtgcacaatgtctctgagctggagttgctcatgatgcacaacagaacctactgtgccgagatcgcccacaacgtttcaaccaagaagcgcaaggagattgttgaacgtgccgcgcagctcgacattgtggtcaccaacaagctcgccaggctccgcagccaggaggatgagtagtctggtttcttgtcataacggccaactagatcctgccattcccggctgtaggaaactactctgctttgtgccttgttggtacttagaataccagtcattttctacatttttggtaccagtagcgacttctatgtggcatattctactgttatcttgcgtctt

SEQ ID NO: 19474 - DNA, 1707 bp, Zea mays
  Clone ID: LIB3150-028-C1_FLI
atcagactacagtgcggttggaggaagggaaccggacaaatcaccccgtcgtctcgtcccgtagtcactcgcagagtcgcagtcgcagcccctgcgcccaccgggaccgtgatggagagctgggtccgcgcggtggtggaggccatccactcctctcgctcccagacagtcatctacctcgccggcggtgcatcccaggcgctcggttggctcctctccgtgcccggcgcttcgggcaccgtcctcgaggtcgtcgtgccctactctagggcctccatggcgcagctccttggcaagatgcccctgcaattcactagcaagcaggctgcagaggacatggcactggccgcatacaatcgagcactcaagctttctggaccaggtctgcaagttatgggtgttggatttactgggtcactggcgagctcacgtccaaaacatggtgaccacaggttttatgtgtcaacatggacacataattgtctcaggacatcacatgttaccttgtcgaagggtttacggagtagggaggaagaagacaaggtttcaagctactttttgcttaaggcaatagcagatacctgcagagtttctgcaaccattcagtcagacattcacaaatctgaaattccagaagaaatcatggaacaatttgatgaagatcaagaactccagcaagttattaatgggcaagtttgcatgaaagtatataattttgctgctccggcggaaagtaacttgaacagaaaaataattctgcctggttcgttcaaccccttgcacgatggtcaccttagattgctagaagctgcagtaagcatgtgtgatgatgggcttccattctttgagatatcagcaattaatgctgataaacctccactatctattgcagaaattaagaggcgtgttgagcaatttagaaaagcagggaagaatgtgattatatctaaccagccatacttctataagaaagcagaacttttcccaggaagcgcttttataattggtgcagacactgcagcaaggcttgttaaccctaagtactatggaggagattacaacagaatgctggagatacttctcgaatgtaagagcatagggactacttttcttgttggtggtcgaaagattgaaggagatttcaaggtccttgagaacttagacattccagaagagctgagagaaatgttcatttctattccggaggaaaagtttcgcatagatatttcatctactgaaataagaaagagccaagggctctgatgtatcaagtggtcgtattctacagcagatttgggatgattctccacgactatagaaggtacatttggatgctagcagtcaagtctgaattctccaagcttactttttcagatttgtggggttgtgttcacgcattctattgcagattatgataggtcctttcatgcatccttgcaaaggaactgttgatgtattctcagggagaatattttatttaacttttgtcttgactgggccccttggtattttgttcagcaaattggaatcaatcctcttgtagaacctcttgatgtcttcactaccccttgcggctaggtggtcaacctccgtctcatatctttggtacaacgctggcaaagtgtgggcgcagagaaatcctgtggatgaaatataagaattgttaaatgtatgtcataactgctttatatattgtcttgccttgtt

SEQ ID NO: 19475 - DNA, 641 bp, Zea mays
  Clone ID: LIB3150-028-C12_FLI
gcttccgcttccgctccgtcgctcgcctcacgcctccggcgccacctccaccatggccccgaagaaggagaaggccccgccgccatcgtccaagccggccaagtccggaggcgggaagcagaagaagaagaagtggagcaagggtaagcagaaggagaaggtcaacaacgctgtgctcttcgaccaggccacctacgataagctgctctccgaggtgcccaagtacaagcagatcaccccatccatcctatctgagcgcctcagggttaatggatccttggcacggagggccatcaaggatctgatggcaaaggggctcataaggatggtctctgttcattctagccagcagatatacaccagggcaaccaacacatgaggggtgttttgcgtcttgtggacgttatctagtctagacgacttgatgttgctattatatcaagtttaatttaatcgtggctcgatcaatcttactgttgtgttgaatgttgaatatttttgagattattgtactattttaagatcatgtttttataacatttaagaccatgttgccatccaaattttaatcttggtgaggaatatcaaccaatctctgctctgcaattacaattgctgaagttgttgcgtgtgttatagtg

SEQ ID NO: 19476 - DNA, 464 bp, Zea mays
  Clone ID: LIB3150-028-E8_FLI
cgagaacatgaacggcaaggagctcgacggccgtaacatcaccgttaaccaggcccagtcccgtggcggtggcggtggcggcggtggctacggcggcggtcgcggcggcggcggctatggtggcgggcgccgtgacggcggttatggcggcggtggcggctacggcggtcggcgcgagggtggtggcggcggctacggaggcggtggcggctacggcggtcggcgcgagggtggtggtggcggctacggcggcggcggcggcggctggagggactgatgtgtgggcccatcctggcttcggccgagttatcttatctatctatagtatcgtgttaccgttcgcttctgtcaccgtgttagtgtccgttctacctttggattaggtgttggtacccctgttgttccctttggttgctcccgctatgaaacgagacgagagaagaatgagcaaggtttttgttcgc

SEQ ID NO: 19477 - DNA, 415 bp, Zea mays
  Clone ID: LIB3150-028-H8_FLI
cccatcccaagggaactcgctggaatatctagtctcaaagttgttgatgtttcaagtaatgatttgtgcgggacgattcccacgtctggaccatttgagcatattcctctgagcaactttgagaagaacccgcgcttggaaggtccagagctacaaggcctggccatatacgacaccaactgctagaggcaccacgaagaaaagaactgctagaaagtaacgagcgaacaaggttaccagaaattgggcgatatagatttactaggtctggatctgtaatcctccctgcatagctcttattcgtaactcgctgtctgcacgaaagttggtgtgtgttttagcagaatgctttctgtccgtgaaagtaaacttgaaactgcttattacgactgaaatgatattgtcgttccccccc

SEQ ID NO: 19478 - DNA, 1851 bp, Zea mays
  Clone ID: LIB3150-029-B10_FLI
gttcgtctccctcctcgcgttcctctcttccgctcgccgccgccgccgcatccgtcaccttcacactgcgctccctccctccctccctgtctgcgacgactgggtggtctaccgccgccctcgctttcgcgggcgaagagcgctcaccagtttccttggatctttgagctttggaagatgccgaggtggacagagaattctgcttccaccaaatcagctgaattggtgaaacaacaagaccgtttggagtttgacgatcctgatgaggtagacgaagaggaagaagttgagtatgaggaagttgaggaggaggtcgagtatgaagagacagaggacgagtatggacagactgaagctgtacgccaagttgatgctaaacatgacagtaaaatggtggatgctgatacggatgagggtggaaaagggagtcatgatgaacttcttgctcttcctcctcatggatccgaagtttatgttgggggcatcgcctctgatgtctcttctgatgatctcaaaaaactctgcgagtctgttggggaagtagtcgaagtgcgaatgccaggaaagagtggtaggctgtatgcctttgtcaatttcagaactaaagagctggcttcaaaggccatccagaagttgaacaataaagatctaaagggaaagaagataagagtttcttcctcacaggctaaaaacaggctatttatcgggaacataccctataactggacagagaatgaatttaaaaaagcagcagaggaagttggccctggagttttaaaagttaatctcgtgaaggcaccacattcagatacaaacaagggttatggatttattgaatactacaaccaggcttgcgcagagtatgctaagaagatgatgtctaccccagaattcaaactagataaaaatgcccctaatgtcagttgggcagatactaagaatggtggtgaatctgcctctactgcacaggttaaatcactatatgtaaaaaacctgcccaaggctgttactcaagaacaactgaaaaaactatttgagcaccttggagaagttacaaaggttgttattcctcctgcaaaagctggtcatgaaaatcgatatggttttgttcacttcaaagaacgatccatggctatgaaggctctggaagacactgagagattcgaacttgacggtcagctgctggattgttcacttgcaaagcctcttgctgataagaaggacgatacatcagcacctaaaggaggtccattgctcccaagttataccccagttggatatggactgatgggagcctataacccactcggaaatggcctggcagtggcaggcgcttacaatccgtatggaaatggactggcaggtgcttatggcgtgcttggtgctcatgctgcacagccaatgttgtatgttccaggtgctcctccaggttcgacaatgatcccaatggttctaccagatggtcgtcttgtatacgtaccgcagcctgcggggcagcagcctgtgcccatgacttcgcctccgccgccacagaaaggtgatcgtcattatggtggcagcggtggatcgagctccggtggaaggcgacaacagaggagagatgacagtggtggtagtaacaccaacagccgcaggggtcggcgccgtccctattgatgcttgtcgctgttagcgcttagaagttagaacctagtaggcatattcagagtatctctgctgcagtacaaccatgatgcagacgccaactgatgctggaaaccgtactttctagtggttagttttttcgctgtgcgtctcgtgtctgtaacacaggctgctgttgtgataagagtaataacagttccaagtggc

SEQ ID NO: 19479 - DNA, 498 bp, Zea mays
  Clone ID: LIB3150-029-F6_FLI
cttacgccttcgctcgcgccgccgccgccgccgccgctacgccccgcacctcgcttcatttcgtgtcgccaagatgacgaagcgcactaagaaggcaggaattgttggcaaatatggaaccaggtatggtgctagcttgcgtaagcaaatcaagaagatggaggtatctcagcattccaagtacttttgcgagttctgtgggaagtttgctgtgaagaggaaagcagttggaatttgggggtgcaaggactgtgggaaggtgaaggctggtggtgcttacaccatgaacactgctagtgcggtcaccgtcaggagcacgatccgccgcctgagggagcagactgaagcatgatatagctctttatattattggggtttcctgtagttgctcttgtcaggcatgttgtgggggccttatctagtggaaatgtggaatcactgtactggctgttttgccgagacaatgctccttatatttggtttatgctctaggatctc

SEQ ID NO: 19480 - DNA, 1635 bp, Zea mays
  Clone ID: LIB3150-029-G11_FLI
accaccggaaaagaaattccccaattctactccacccggcgcgctctccccacgcgcatccggatccgtccgctctgatcgagtgagttgatctggactctgtgcctgcctgtgagggcgaggagggcatggacgagttcgagctggaggacaacctcgagttcatcctccagagcatccaggagctgatggaggacccgggggacaacaacgccttcggagacgccaaccagaacgagctcttcgccagcatcgttaactacgaccaggagaacatgctgcccgacgtgtctgcagcggacgttgctgcagggaaggacattcaggggatcccgtgggagaagatgctcttcgggagggataagtaccgggagatgaagatgaagaactacagaaattaccagaatctaagttacgcacgggaggatgctttgcaggagtgcaaacaagtgacgaaggatagtccttactatgatttccactacaacacaaggcgtgctcggccatcaattgtacattttcagctacggaacctagtgtgggcaaccacgaaacatgatgtttatacaatgcatgatcaatcagtgacacactggtcctcactggagcagacaagcactgagctaatcaatgccgatgattgcatcgtcccaaaacagaggggccatggttcacagtcagtggcaatggttcaggtcacaacaatggccgtggatagtaatttattggtagttggtggctttcaaggggagattatatgcaagcgtttggatgatgagggggttgtttacagcacaagggttacagatgatgaaaatgcaatcactaactctttagagatgtatcaggatccgagcggatctagaaggttggtggctgctaacaatgactgctccatcaggatttttgacaccgagtactttgacctcctcaagcactatgtcttcccttggtccgtgaatagtgtttctgtgagcccgaatgggaaactctttgctgtcctgggagatcatgaggatggttgtgtggtggatcccaagtgtggcaaggcaattggctctctcaggggtcacttggattactcatttgcatctgcatggcatcctgatggcaatatcgtggcaactgggagtcaagacactacatgcaggctatgggacatcaggaacctatcccaatcagtagctgtgcttggtggaaggatgggctcaattcggtgtgtgaagttctcttcagacgggcgcttccttgcaacagcagagcccgtagattttgtccacatgtacgatgcttatgcggactacagcagatctcacgagattgacttgtttggcgagattggaggtttagcattcagccctgacaccgaggccttctatgtgggccttgcggaccagacgtacggaggcatgatcgagttcagcaagaggcaccaacatcattacttgaactccttgtggtgataaccacttgagcggaaatttggtcgcacagctgttggaccccattgttgcattgtgtgctccagaggagtgcatggtcctacagaggaggatctcatgagtgcatgcagaagtgtataaaattctggggggtttctttccctgttgctagtaatctgggttttgtcgctcg

SEQ ID NO: 19481 - DNA, 573 bp, Zea mays
  Clone ID: LIB3150-029-H11_FLI
accagaaaaattcccagttctttggtccgcgtcagagaggcggcggcgatgtctgggcgcggcaagggcggcaagggtctgggcaagggcggcgcgaagcgccaccggaaggtgctccgcgacaacatccagggcatcaccaagccggcgatccggaggctggctaggaggggtggcgtgaagcgcatctcggggctcatctacgaggagacccgcggcgtgctcaagatctttctcgagaacgtcatccgcgacgccgtcacctacaccgagcacgcgcgccgcaagaccgtgaccgccatggacgtcgtctacgcgctcaagcgccagggacgcaccctctacggcttcggaggctaggctaggcgcctcttcatagtcggggactggttaggggacatgtctctgtgtgatgctttctgtggtattattgctgcaatagccgtgtaatccatcgcttctgcaatgaagcgctcggaagcatgctacgtatgttgtgtctgtgggtgattgtatttctggtagtaacagtgattgttcctgaattttggataatacaagctcattcgcagt

SEQ ID NO: 19482 - DNA, 716 bp, Zea mays
  Clone ID: LIB3150-030-B4_FLI
ctcctccccctcttaccaagtcctcttcgggttagggttacttagggttttgtggaggggcgatggcggcggctgatgtggagtaccgttgcttcgtcggcgggcttgcctgggccaccagcaacgagtcgctggagaatgccttcgcctcctacggcgagatcctcgactccaaggtcatcaccgaccgggagacggggaggtctcgcggcttcggcttcgttaccttctcctccgagaactccatgctcgacgctatcgagaacatgaacggcaaggagctcgacggccgtaacatcaccgttaaccaggcccagtcccgtggcggtggcggtggcggcggtggctacggcggcggtcgcggcggcggcggctatggtggcgggcgccgtgacggcggttatggcggcggtggcggctacggcggtcggcgcgagggtggtggcggcggctacggaggcggtggcggctacggcggtcggcgcgagggtggtggtggcggctacggcggcggcggcggcggctggagggactgatgtgtgggcccatcctggcttcggccgagttatcttatctatctatagtatcgtgttaccgttcgcttctgtcaccgtgttagtgtccgttctacctttggattaggtgttggtacccctgttgttccctttggttgctcccgctatgaaacgagacgagagaagaatgagcaaggtttt

SEQ ID NO: 19483 - DNA, 848 bp, Zea mays
  Clone ID: LIB3150-030-B7_FLI
ctccactttccacattccagttccactccgcctccgctgccggtcgccgactccgaaactccgacagtccgaccacaagaaggatgagtgaagaggataagactgctgcttctgctgagcagccgaagagggcccctaagctcaatgaaaggatcctctcttctctgtccaggaggtccgtagctgctcatccgtggcatgatcttgagatcggtcctgatgctcctgctgttttcaatgttgttgttgagatcacaaagggaagcaaagttaaatatgagcttgacaagaaaactggactgattaaggttgatcgagtcctatactcatcagttgtataccctcacaattatggtttcgttccaaggactctttgtgaagacaatgacccattggatgtgttggtcctgatgcaggagcctgttattcctggttcgttcctgcgagcaagagcaatcggccttatgcccatgattgaccagggtgaaaaggatgacaagataatagcagtctgtgctgatgatcctgaatatcgtcactacaacgacatcagtgagctgtctcctcatcgcctgcaagagatcaagcggttctttgaagattataagaagaatgagaataaagaggttgctgtcgatgcattcttgcctgcgaccacagctcgagaggccattcagtactccatggatctgtatgcgcagtatattttgcaaagcttgaggcagtagattggaagcaactatttatctgggcgtcttggaatgagtgtgattttaataagtcaaaacacttgatattgtgtgcaaatcttggggttgagaacaatgtcactagctgtgatttacttc

SEQ ID NO: 19484 - DNA, 1721 bp, Zea mays
  Clone ID: LIB3150-030-D3_FLI
gtttcccgtctcccgcatagagaggttcccaaaccattctctttcgctttcgtctccgcaccctagggtttctgtgcctcgccagcgaagcgatgcagccgccgcaccaaccgccgatgaacgggcaacactcccagcctccgccgcaaggacccggggtgcccatgcctccgcagcagcaggcgcccccgctgccgtactaccagcagcagcaggcgccgcagtactaccaacaggccctcccgcagccgtgggggcagcagcagcagtacgctgcaccgccgccgcagtacccgcctccgcctcagacgcagcagtacgcgacaccaccgcagcagtacgcccctctgccgcagcagcagtacgctcctccaccgcagcagcagtacgctccttcgccatatggtaccacgccgggaagcggtgaagtcaggacgctgtggatcggagatcttcagcactggatggacgagaactacctccactacaacgcctttgcggccgtggcccagcagattgcttctgtgaaaattatacggaacaagcaaactgggcactcagaaggctatggttttattgagttttactctcgagctgctgcagaacatactctgatgaacttcaatgggcagatgatgccgaatgttgagatgacttttaagctgaactgggcttctgctagcactggtgataagcgtggagatagtggttctgatcacacaatatttgttggtgatttggctcatgatgttactgactccatgttggaagatgtgttcagagctaagtacccttcagttagaggagctaatgttgttgttgataggatgactggatggcccaaaggatttggtttcgtgcgttttggagatctgaatgagcaggcacgtgctatgactgagatgaatggaatgttgttatctacaaggcaaatgaggattggtgctgcagctaacaagaagaatagggatgctcagcagacatatgcaactgacggagcataccagagctctcaaggaaattcttcagagaattatcccaacaatacaacagtctttgtaggtgggttagattccaatgtaaatgaggagtatctaaggcaaatttttactctgtatggagaaatttcttatgtgaagattcctgtaggcaagcattgtggatttgttcaatttaccagcaggtcatgtgctgaggaagccatccgaatgctgaatgggagtcaggttggtgggcagaaagttcggctttcatggggccgtagtcctcaaaacagacaggcttctcagcatgatgccaacaaccagtataatgggaacagctattatggataccaacagccgggttatgaaggttatggctatggtgcttccagtgcacaagacccaagcatacaaaactactacggatactctggttgtggtaactatgagcagcagcagccaacacaggaacagcagctgcagcagcctccaccaccacaacagcagtgacgattgcttgcacacctttggagtgctatcggattagagtgacggtggagtcacggggcgctgcaatgagacatcctatatagatatgaaggtcatatagtcgcataggagttgttggactttcttggggaccagtgttaatcgatgatggcactccggatgtttcttctgtttgtcgttgagatcttgactgttgaagtgtgctctgttgatattaatgtcttcgtc

SEQ ID NO: 19485 - DNA, 799 bp, Zea mays
  Clone ID: LIB3150-030-E4_FLI
ggaaaaatatccccaaaccctagctcccgatctcgatggcgaaccctcgcgtcttcttcgacatgaccgtcggcggcgccccggcgggccggatcgtgatggagctgtacgccaacgaggtgcccaagaccgcggagaacttccgcgcgctgtgcacgggcgagaagggcgtgggcaagtccgggaagccgctccactacaagggctccaccttccaccgcgtcatccccgagttcatgtgccagggcggcgacttcacccgcggcaacggcaccggcggcgagtccatctacggcgagaagttccccgacgagaagttcgtgcgcaagcacaccgcccccggtgtgctctccatggccaacgccgggcccaacaccaacggctcccagttcttcatctgcaccgtcgcgaccccttggctcgacggcaagcacgtcgtcttcggccaggtcgtcgagggcatggacgtcgtcaaggccatcgagaaggtgggcacccgcaacggctccacctccaaggtggtcaaggtcgctgactgcggacagctctcctagatctctctgatctggtctgttcggccgccctccctccgtcatcgtcgactccccctgcgtccgttcctttggatctgaataagatggtggtgatctgagtggtggtcttagtttatcatgtatcgctcgcagtttaatttagcggtttaggtgtggatctgtgaaccccatggcgcctctgcttgattcgtgtttcacctgttatgttctgagattcatgataatgctatgagaactgaaattcc

SEQ ID NO: 19486 - DNA, 896 bp, Zea mays
  Clone ID: LIB3150-030-G11_FLI
ctttcattcgccgccgccgcctgctctctgctgccgtcgccatggggagaaggcctgcgagatgctatcgccagatcaagaacaagccataccccaagtccaggtactgccgtggtgtccctgaccccaagatcaggatctacgatgttggcatgaagagaaagggtgttgatgagttcccctactgtgtgcaccttgtctcttgggagaaggagaatgtctccagtgaggctcttgaggctgcccgtattgcctgcaacaagtacatgaccaagtctgcaggaaaggatgccttccaccttcgggtccgggttcaccccttccatgtccttcgtatcaacaagatgctttcgtgtgctggggctgataggctccagactggaatgaggggtgcctttggcaagcctcagggcacctgtgctagggtggacattggtcaggtcctcctttctgttcgatgcaaggacaacaatgctgcacatgccagtgaagctctgcgtcgcgccaagttcaagttccctggccgccaaaagattattgagagcagaaagtggggcttcaccaagttcagccgtgccgactacctgaagtacaagagtgagggtagaattgttcctgatggtgtcaacgcaaagctgctcggtaaccatggaagacttgagaagcgtgctcctgggaaggctttcctcgaggccgttgcttaagtccaatctacagttggaatgcgaatccagacgttttggtttagcctatcttattttgctttgtgcaacatgaattttaagtgtatggggtattacagtgccttgtgtgaacctgcttatctcgtgctgaacatcgttatgcatggaagtacttatcttttgttctgctaaaaattaaagtgttctgcgact

SEQ ID NO: 19487 - DNA, 1301 bp, Zea mays
  Clone ID: LIB3150-030-G3_FLI
ggcgagaggaagaggcgcgcgtgggtgcagtgcagacgtgcggggcagagcacaacagcaggggatccggggagggagggaagccatgggcgaggaggcggccaagaaggaggaggtggagaagccctaccacctcatcatcgtgcaggacggcgacccgaccaagaccatcaaggtgcccgagggcttcgactacgagctctacaaccgcaacgacatcaaccgcatcctcgggcccaaggcctcctgcatctcattcaaggactccgcctgccgctgcttcggctacatggtctccaagaagaagtacatctacaccatcgacgacgactgcttcgttgccaaggacccatctggcaaggatatcaatgctcttgagcagcacatcaagaacctcctcagcccatccaccccgttcttcttcaacaccctgtacgacccctaccgtgagggtgctgactttgtgcgtggataccccttcagcctcagggagggtgctcacaccgccgtctcccacggcctgtggctgaacatccctgactatgatgctcccacacagctggtcaagcccaaggagaggaatgagaggtatgttgatgctgtcatgacaatccccaagggaaccttgttccccatgtgtggcatgaaccttgccttcgacagggatctcattggccctgctatgtactttggtctcatgggtgatggccagcccatcggtcgctacgacgacatgtgggcaggatggtgtgtgaaggtcatctgcgaccacctgagcctgggagtcaagactggcctgccatacatctggcacagcaaggctagcaaccccttcgttaacttgaagaaggaatacaagggcatcttctggcaggaggacatcatccccttcttccagaacgtgaccatccccaaggactgcgacaccgtccaaaagtgctacatctacctctctggacaagtgaaggagaagctgggcacgattgacccctactttgtcaagctcggtgacgccatggtcacctggatcgaggcctgggatgagctgaacccgtcgacccctgccgccgcaaatggcaaggccaagtagatgtgccatcacttcggcactggagtgaaaaagaaagtatgattgggtcctgcctaggccccatagatatagctcttttttgagaaggaagagagattaattcagcagcagcttttataaattctttgttgtcatgaagcaggtggttcttttgtagttgatgaaagggatttgtcgtcgctatcgtttacataattcagacaataatttt

SEQ ID NO: 19488 - DNA, 951 bp, Zea mays
  Clone ID: LIB3150-031-A7_FLI
cccaacaccacctcgcctgcgatctccgtagcctccgtcgcgtcgagcatcgatcatgtcggcctactgcggaaagtacaaggatgagctcatcaagaatgctgcctacattggcacccctggcaagggtatccttgctgctgatgagtccactggcaccattggcaagcgcctttccagcatcaatgtcgagatccttgttgatggccctcatgacattgatcgctgcgcttacgtcactgagaccgtccttgctgcctgctacaaggcgctcaacgagcaccatgtcctcctggagggtaccctcctgaagcccaacatggtgactccaggctccgactccaagaaggtgactcctgaggtgattgctgagtacaccgtccgtaccctccagaggaccgtccctgctgctgtgcctgctgttgtcttcctctctggtggacagagcgaggaggaggccacccgcaacctcaatgccatgaacaagctcagcaccaagaagccgtggtccctgtctttctccttcggccgtgccctccaggcgagcaccctcaaggcctgggctggcaaggtggagaacttggagaaggctagagctgccttcctcgccaggtgcaaggccaactctgaggctaccctcggcacctacaagggtgatgctgccgccgacaccgagagcctccacgtcaaggactacaagtactgagttgcttctctttgcgtgcccgttttggaactcctgcctacgagctaggttgcggagtgtggtttgctcgttagagcttattttcggacatccaaaaaacatgcttcctatgtgggatgatggttatctttatatttgtatgttaattagtctctttgctgttaaatttcgtgtaagttggtcctgccgatggagaatcgagcagccccctttttttgttctatcaactatgctgtaatgctggc

SEQ ID NO: 19489 - DNA, 998 bp, Zea mays
  Clone ID: LIB3150-031-B4_FLI
cggcgcacgaggcgcccgtgctccccaccgatggtctccccgacgatttcgactggagggaccacggcgccgtcggccccgtcaagaaccagggttcgtgcgggtcgtgctggtcgttcagcgcgtctggagcgctggagggtgcgcactacctcgcaactggcaagctggaggtgctttcggagcagcagttcgtcgactgtgaccacgagtgtgattcatcggagcctgattcatgtgattcgggttgcaatggtgggctaatgacgacggcattcagttatctccagaaggccggtggccttgagagtgagaaggattacccttacactgggagtgatggcaaatgcaagtttgacaagtccaagattgttgcttcagttcagaacttcagtgttgtgtctgtggacgaggctcaaatttctgctaacctcatcaaacatgggccattggcaatcggcatcaatgctgcctacatgcagacatacatcggaggcgtgtcatgcccatacatctgtggcaggcaccttgaccatggtgttctccttgttggatatggtgcttctggtttcgcccccattcgcctgaaggacaagccttactggatcatcaagaactcgtggggcgagaactggggggagaacggatactacaagatatgcaggggttccaacgttcgcaacaagtgcggcgtcgattccatggtctctaccgtgtccgcagtccacgcctcgaaggagtagactctggtcagcggtgataatcgtgattccatatattgtagaactataatccctgctagtaatccatttgtgctgtttatgtatcgaaggcagcaaagatgtgtgaagcggcaatgggatgcttgctgtaaggtaatatgtttggcttgctaggcatgctacacgctatttggatgtagcaacgttatcaccagctgtatacgctttttaatcgacaacatttgaataatatgtacataacattatgttgtgctc

SEQ ID NO: 19490 - DNA, 514 bp, Zea mays
  Clone ID: LIB3150-031-G12_FLI
gaggagagaaccccgtgttttgcgtggagaaggcaagccgctcgacgctcgtcgatgtcgtagcgatgcacaaatcggaatcaccgtcgttcttgcaaacgccgattgggtttgtttatggatcgagagatgatgatcgagccattgatgtggtgccaaccacaagatgcagttggtggacgacctgaagaatgatggacatgaccagtggatgctcgccaagcgagtgccacccagcaaacactgtctaagtgttaaattaaaggagagagagggatagacggaaagtgcagtgtgtcatgacagcaaccccagaccaaatattcatcctgatggtgagagcaggataaccaacctgtatctttgctcaattgctccccaaaggctataacagggactgcagatgcaaagaatatgtagagcgtaggtgccagtatcctgacaacagaattcatgtagcacagtgaacacaacaggctaattaagtaatgatgacatgtcaagcaattacaac

SEQ ID NO: 19491 - DNA, 1618 bp, Zea mays
  Clone ID: LIB3150-032-E2_FLI
cacacccccagatttcctttccatcaactccccccgttcccctcctcccctttccattttaccttctcgcccgtccccgaattcttcctcctcccatcccgtgcagccggcctcaccgccggcgacgggacgcggagacccgggctgccggtaccgtcagccgtgctccttcctctcttcgtcgcccccgccaaaaccttcatctgccggggctgcaccggcggcgcggggacaacaaaagctcgagatccggtgactgatctcttcgttcctcggttcactttgatattccaacaaaggtcacattgctagactcccagattggttcctaacaatgagggcacatgaacgagctgccagtttggctcttgcctgtctgagcttggctccacttctggttaacgtaaacccaaatgtgaatgtggtattgacagcatgccttactgtctatgtgggttgctaccgatctgtgaagccaactccaccttctgagaccatgtccaaggagcatgctatgcggttccctttagttggaagcgctatgcttttatcactgttccttctattcaagtttctctcaaaagatttggtcaacgctgtgctcactgcctactttttcattctaggcattgttgctctctccgcaacactgcttccttctataaaacgttttcttccaaaagagtggaatgataatctcatcgtctggcgggctccattcttccactcactctcggtggagttcacaaagtcccagattgttgcctcaatacctggatttttcttttgcttgtggtatgcgtcaaagaagcattggcttgcaaacaatgtcctgggattggctttctgtattcaggggattgagatgctgtcattgggatcatttaaaactggagccattctcttgggtggactttttgtgtatgacattttctgggtgttcttcactccagttatggtcagtgtggctaaatctttcgatgctccaataaagcttctgtttccaactgcagacgctgaacggccattctccatgcttggccttggtgacattgtaatacctggtatattcgtcgcacttgccttgcgttttgatgtctcaagaggtaccaagaagcgttacttcaacagtgcatttttgggatacgctgtgggtatgacggtgaccatcgttgtaatgaactggtttcaagcggcgcagcctgctctactataccttgttcctggtgtgattggttttgtcgctgttccctgtctgtggtatggagaagtgaaacagctactggagtttgacgagtcaaaaactgagtcggaggaaggcagtacagaagaggagcaagatgatgatagttccaaaggcaacaaaaaggtggactagcaggatttagttccggaggtaaaaggacaggaagacagttttcgtgtaatgtcgtctggcagctaaaaaaacgggtctgatgaccctctaataccggattcgctcgccttacttaagaacttagaagaaatggttcagcatgatacaagttttattttattttttgtttcattttgcggattatttgccctgggctggagagtgggaattgaggggaacaaaatagatgctgttactcgc

SEQ ID NO: 19492 - DNA, 698 bp, Zea mays
  Clone ID: LIB3150-033-B12_FLI
ccgccgcctccgactcctgctccgtccgagcctaccaccacagggcaagggcttcatccagccgcgtgcgagcctgaccgcccagttagacgatgagccgcagcctcggtatcccggtgaagctgctgcatgaggcggcgggccacgtcgtcacggtcgagctcaagaccggcgaggtctaccgcggctccatggtcgagtgcgaggacaactggaactgccagctcgaaaacatcaccttcacggcaaaggacggcaaggtgtcgcagctggagcacgtcttcatcagggggagcagggtcaggttcatgattatacccgacatgctcaagaacgccccaatgttcaagcgccttgaggccaggattaggggtaaaggctcagctgttggtgtcggccgaggccgcgcggtcgccatgcgggctagggctgctgctggtcgtggcggtggtcctgttggacgaggtggtgcaccccctgtgaggaggtagatctgtcgcgctatgtggcaaatcaagcttttgccctagttgcaaaaactttgcttgagcagcgatgctatatggttgttaagggtagcttatcagcagcagttcatgtttacagcatagatgcaggactttgtgtaactttgcacgagaagactgtggacagtttcgacgatgctatattgctattgagggtctgatttggataat

SEQ ID NO: 19493 - DNA, 551 bp, Zea mays
  Clone ID: LIB3150-033-F6_FLI
ggttaagggagcagacattgtgtacacagatgtttgggccagtatgggacaaaaggaagaagctgattatagaaaacagaagttccagggattcacggtggatgaggccctgatggagattgctggcccacaggcctaccttatgcactgtttgcctgcagagagaggagtggaggtgactgacggcgccattgaggctcccaactcaatcgtgttcccccaggctgagaacagaatgcacgctcagaacgccatcatgcttcacgtgctcggtgcttaactctcctattgcacaccagtgacacgctcctcttagattattgggcattgctgtcttgctgaagcattgaggctgttttggctttagggcatatatgagagcttagttcagacgaactgtttagtaaggtgataacggttcttcagggtgggaatttgttgtgctgtaaaggtttggtaacctgaataaaaaataaacttatgtgctagtttcattcgcgaatcatgacagctttaacattgaaagacacgtttggccgagaccctggatc

SEQ ID NO: 19494 - DNA, 1116 bp, Zea mays
  Clone ID: LIB3150-033-F7_FLI
gccgccactcaccaacaactgttcaatgatacacttctcaagatcaacaaggaccttgcctacttgcagttcgagttgcgggcatgcatgaaccaatatgatggaatggtttactacggggtggttaataacattgctgacgaagaatctaagcttggaacaaagtactctgtgccccagatcgcattctacaagggactgctagaagcaatagttcaggaagctggaaatgatgggagcataaccagtatcgacgcgctcaatgtccggcttgataaccaggtcgcagtattagacggttcacaggacagccagtctcgccttcctagctccataaagaacttctcaatgagccagaaggagaaaactctcgatgagctgatacgggaccgctggttgttgtacaccgccacaggcaagatcggtctgggcaccaggtcatttcttgacctccggagctggttccgtggcaacgatatcccgtcttgtgttgtctgcaacgaagcttgtataaaggcatcgagttgtccgaacgagggatgcgatgttagaattcacgagtactgcttgaagaagaaattctcacagagaaaggcctcgagagcgtgtcctagttgcggtactggatggccgtgtcaagatggcgaggccgacgacgtgaacgaacctggggaggaggagctagcctcgccagctaaccatccctcggggaagaagcgcaggagagtcaaagctgagctggtggaggaaaacgacatcgcaggcccgtcgacggaggtgcctaggactaggaggaccctgagaagcgctaaagccgaagcagtcgaggccgatcaagaggcgtcgtccaccgcagcttcgcagccaggcaggggttctaaaacaaggaagaagtgagtgatgactgatgatgcatgcttataaaggagggagattgcaaatgctcctcctttgccatgtgtagatactaccgtagacgtgctggtatggtatccggtgggtagtttttcaagtgccagagcaaaagagccttctagttctgctctttgctacagtagggactcgtagactggtggagctctctcatgacgtctaagttatttatcttgtgaagcc

SEQ ID NO: 19495 - DNA, 727 bp, Zea mays
  Clone ID: LIB3150-034-C7_FLI
atcccccagaaaatcaactcctccccaaatccacgctgccaccaactcgccgtcctccgcgccaagcaccaaagctccgatggcccgcactaaacagacggcgcgcaagtcgacgggcggcaaggcgccccgcaagcagctggcgaccaaggcggcgcgcaagtctgcgccggccaccggcggcgtgaagaagccccaccgcttccgccccggcaccgtcgcgctccgggagatccgcaagtaccagaagagcacggagctgctcatccgcaagttgcccttccagcgcctcgtccgtgagatcgcgcaggacttcaagaccgatctccgcttccagtcctccgccgtcgccgcgctgcaggaggccgccgaggcctacctcgtggggctctttgaggacactaacctctgcgccatccacgccaagcgcgtcaccatcatgcccaaggacatccagctcgcgcgccgcatcaggggagagagggcctgagcgaggcgagctcctctcaccgcaggcggcgtcgttgttgcttcgggcctgcttgtaggacttgtgcttctcttggtttcctttctggtggcagtggcatcttggtaccattgtgcttgttcttagaatcttagggatagagagttgttcagttgctgggtaacctgattgtttatcttgcattcctgcctctgtaatggttgtctgctgtcttaatggaaatgatatttgcttttt

SEQ ID NO: 19496 - DNA, 1279 bp, Zea mays
  Clone ID: LIB3150-034-D9_FLI
ggggcattggattggaccgcactagcaactttttcttcatggagaaagtggacatgatcatagctcgtgcatggcgaaggttccttgagaagacgagactgcaaaagctgttctcaagaaagaaaaatagtaagccaaagatagattccaagaagaatgatgatttagctagtgaaatagaagacaaggagctttatgttgaacgcatacgtcttgaaacaatggatttaagctttgggaatttatttggcaaggtcacaattcaagagcctacatttgaagaggtgattgtcttgtataggagaaaaagtccaaagggccaggatgatagggcaattcatgtaaagcacttcaaaaatatcccaatggcagacatggagttggttctgcctgagaagaaaaacccgagcctcacacctatggactgggttcaatttattgtttctgttgtcattggacttgttacactcatcagttcactggaaatgcctaaagctgatttctgggttgtaattgcaatcctctctgcactggcaggatattgcgcgaagatctatttctcgtttcaacagaatatggcaacctaccaaaacttaatcactcaatcaatgtatgacaaacaactagatagtgggaaaggcacacttctccacctctgtgatgatgtgattcaacaggaggtcaaggaggtcataattgcctactacattttgatggagaatggaaaggctaccagtgatgatcttgacttgcaatgcgaggagttaatccaggaagagtttggcttgcaatgcaattttgaggtgatggatgcagttcagaagctggagaggcttggtgtcattacaagagactctattggaaggatttgctgtgtccctctaaagcgtgccaatgagatcatcggcgcgaccacggaagaactggttatgaaagccaggcaaagctagcaatctattattttgaacaatgtagccgcattgtagattcttgcctgatggcgctgtaacgtttatggttactccagaaagtccaaacatttaactcttgcacaccaggagataagtacattctggtcatctccacagtagttctgggagagctacaagaaaatgtggttgtatttattttttttatttttttggtggggggtactatggtttgtggaacgtcgtcgagggtgttgtaagcatctagcattcttttgataacaagcgtggtaggaaggatgtttgaagaacacatacaagggctattatgttgctggattgatgctgtg

SEQ ID NO: 19497 - DNA, 1855 bp, Zea mays
  Clone ID: LIB3150-035-F10_FLI
ggagatgtttgtggttcattgccagttgctcttgctgctcgtggtcaccgtgtgatggttgtaatgcccagatatttaaatggtacctccgataagaattatgcaaatgcattttacacagaaaaacacattcggattccatgctttggcggtgaacatgaagttaccttcttccatgagtatagagattcagttgactgggtgtttgttgatcatccctcatatcacagacctggaaatttatatggagataagtttggtgcttttggtgataatcagttcagatacacactcctttgctatgctgcatgtgaggctcctttgatccttgaattgggaggatatatttatggacagaattgcatgtttgttgtcaatgattggcatgccagtctagtgccagtccttcttgctgcaaaatatagaccatatggtgtttataaagactcccgcagcattcttgtaatacataatttagcacatcagggtgtagagcctgcaagcacatatcctgaccttgggttgccacctgaatggtatggagctctggagtgggtattccctgaatgggcgaggaggcatgcccttgacaagggtgaggcagttaattttttgaaaggtgcagttgtgacagcagatcgaatcgtgactgtcagtaagggttattcgtgggaggtcacaactgctgaaggtggacagggcctcaatgagctcttaagctccagaaagagtgtattaaacggaattgtaaatggaattgacattaatgattggaaccctgccacagacaaatgtatcccctgtcattattctgttgatgacctctctggaaaggccaaatgtaaaggtgcattgcagaaggagctgggtttacctataaggcctgatgttcctctgattggctttattggaaggttggattatcagaaaggcattgatctcattcaacttatcataccagatctcatgcgggaagatgttcaatttgtcatgcttggatctggtgacccagagcttgaagattggatgagatctacagagtcgatcttcaaggataaatttcgtggatgggttggatttagtgttccagtttcccaccgaataactgccggctgcgatatattgttaatgccatccagattcgaaccttgtggtctcaatcagctatatgctatgcagtatggcacagttcctgttgtccatgcaactgggggccttagagataccgtggagaacttcaaccctttcggtgagaatggagagcagggtacagggtgggcattcgcacccctaaccacagaaaacatgttgtggacattgcgaactgcaatatctacatacagggaacacaagtcctcctgggaagggctaatgaagcgaggcatgtcaaaagacttcacgtgggaccatgccgctgaacaatacgaacaaatcttccagtgggccttcatcgatcgaccctatgtcatgtaaaaaaaggaccaaagtggtggttccttgaagatcatcagttcatcatcctatagtaagctaaatgatgaaagaaaacccctgtacattacatggaaggcagaccggctattggctccattgctccaacgtctgctttggctggcttgcctcgatgcaccggatgcagtgaggaatccagtcgaacgacagttttgaaggataggaaggggagctggaagcagtcacgcaggcagcctcgccgtgattcatatggaacaagctggagtcagtttctgctatgccactcactgtttaccttaagattattacctgtgttgttgtcctttgctcgttagggctgataacataatgactcattagaaaatcatgcctcgtttttatt

SEQ ID NO: 19498 - DNA, 1130 bp, Zea mays
  Clone ID: LIB3150-035-G4_FLI
ggggagccgagcgggcaaaggggagcgcggcgacagacatggcggagcagcacaaggaggagtcgggcgtgacagtgctggacaagatctccgacaagctccacgggcgcgggggcggctcgtcttcgtcgtcggactcggacgacgagcgctcgtcggcgacggccgccgtgaaggccaagatctaccgcatcttcgggcgcgagaagcccgtgcactccgtcctcggcggcggcaagccggccgatctgtttctatggaggaacaagaggatctctggtggggtgctcgcaggcgcaactgccttctggctgctgtttgaggtcatggattaccacctcctcaccctgctatgccactgcctcatcctcaccctggccatcctgttcctctggtccaatgccacgactttcatcaacaagtctcctcctaacatccccgaggtgaagatcccagatgacctggctgtgaatgttgcacgttccctgagatatgagatcaacaggggttttgctaccttgagggagattggccaaggccatgacctcaagaaatttctgattgtgattgcaggactgtggatcctttctgttcttgggagctgctgcaatttcctcaccttgtcttacatagtttttatggtactgtacactgtaccggtcctgtatgagaaacatgaggataaggttgatgcttttggtgagaaggccatggtcgagctgaagaggtactacgccatcttcgacgagaaatgcctatcaaagattccgaagggcccattaaaagacaagaagcaacattagaagcttagaatcagataagggtctgcggtgatttatcatctcttttgaccattattcgtcggttttggtggatggatgtgattccatgtctaaatacctggacgtgctctagtgttttagtgtggtcagtagcaatgttctaaattatctgagattacgctgaatcatgttctgaagtccacgtttaacgttgctctccctatcctttggaagtggcaatttcctcaatgtctgtaatatatctagtctagtgctatttcttaatctgacctagcgtcatgatgaacccttcttggatatttatttatttgtgccaccggacatggt

SEQ ID NO: 19499 - DNA, 678 bp, Zea mays
  Clone ID: LIB3150-036-A8_FLI
gttggcttctcctcccccaccggttcgtgttcaggttctggttcgtgggcgagagggaagagatggcggcgtcggacgttgagtaccgttgcttcgttggcggcctcgcctgggccaccgacgaccactccctcaacaacgccttcagcacctacggcgaggtcctcgagtcgaagatcatcctggatcgggagacgcagaggtcccgcggcttcggcttcgtcaccttctccacggaggacgcgatgcgcagcgccatcgagggcatgaacggcaaggagctcgacggccgcaacatcaccgttaacgaggcccagtcccgcggcggccgtggaggcggcggtggcggatacggtggcgggcgccgtgatggaggcggctacggcggtggcggtggaggctacggcggtggtcgtggaggctacggcggcggtgggggatacggtggtgcaaaccgcggcggcggctacggcaacaacgacgggaactggaggaactgagcggtggggtccgctgaggcctagttatcttgttcgcttctgctaccgtgttcaccctagtctagagggggtttatcttcgtctgtggtcgtctcgtgtccgtatgtttcgtttcgtgttcgttgttgttgttgcccatctgtgtttttgaccgcaagctcgctcctctgatgttgtt

SEQ ID NO: 19500 - DNA, 1457 bp, Zea mays
  Clone ID: LIB3150-036-B1_FLI
cgcagcgcggggcgacgagcgcgctcctcctctcgcgcagcgccagcgccaccccgcaccgtggctttatatacacccctcctcccaaccctaccgaatcatcactaccaccgctctctcttcctctcctccatctctcaacgcctgaagctcaccgcacctcccctcctcgccgcggatcccccactactccggtagaaaatggctgacgctgaggatatccagcccctcgtctgcgacaacggaactggcatggtcaaggctgggttcgccggcgacgacgccccgagggccgtcttccccagcatcgttgggcgcccgcgccacaccggtgtgatggtggggatggggcagaaggatgcctacgtcggcgacgaggcgcagtccaagaggggtatcctgaccctcaagtaccccatcgagcacggaatcgtcagcaactgggacgacatggagaagatctggcatcacaccttctacaacgagctccgtgtggctcccgaggaacaccccgtcctcctcactgaggcgcccctgaacccaaaggctaaccgtgagaagatgacccagatcatgttcgagaccttcaacacccccgctatgtacgtcgccatccaggccgtcctgtctctgtatgccagtggtcgtaccacaggtatcgtgctcgactcgggagatggtgtcagccacactgtccccatctacgagggatacgccctcccccacgccatccttcgtctcgacctggctggccgcgacctcaccgactacctcatgaagatcctgactgaacgcggctactccttcaccaccactgctgagcgggaaattgtcagggacatgaaggagaagctcgcctacattgccctggactacgaccaggagatggagactgccaagaccagctcttctgttgagaagagctacgagctgcctgacggacaggtcatcaccattggtgctgagcgcttccgctgccctgaggtcctcttccagccatccttcattgggatggaagctgctggtatccacgagaccacctacaactccatcatgaagtgcgacgtggatattaggaaggatctgtatggcaacatcgtcctctccggtggtaccactatgttccctggcattgctgacaggatgagcaaggaaatcaccgccctggctcctagcagcatgaagatcaaggtggttgctcctccagaaaggaagtacagtgtctggattggaggatccatcctggcatcgctcagcaccttccagcagatgtggattgccaaggctgagtacgacgagtctggcccgtccatcgtgcacaggaaatgcttctaattctttgggcccaagagatgcaaagccgagaggagccattatcgccagcctcccgccccgtttctttctccttttgttgctgtttcttcattagcatgaacaaagttttctgccggtctatc

SEQ ID NO: 19501 - DNA, 1091 bp, Zea mays
  Clone ID: LIB3150-036-C2_FLI
gggccccgggggtaggctgcccccgccgccgcgatcgtacggcggcgccggcggatctggcgacgccgcgcactccggtggcggcgacggccgccgcgggggcatcctcgggctcctcctcgccgggtgggccgcccgcgtcgctgcggacccgcagttccctttcaaggtgctcatggaggagctcgtcggcgtcaccgcttgcgtgcttggcgacatggcctcccgccctaacttcggcctcaacgagctggactttgtcttctccacgctcgtcgtcggatccatcctcaacttcgtcctcatgtacctcctcgcccccaccgcgggcgtcgccgccgccgcgtcgtccgccgcgtccgcgcttcccagccacatgttcgagcccggcgcgtactccctcggctcccgcgtcgccacgatcatgtccaagggcgccaccttcgcggtggtcgggttcgcggccgggctcaccggaaccgcgatctccaacgggctgatcgcgatgcggaagcgcatggacccggcgttcgagacgcccaacaagccgccgcccacgctgctcaacgcggccacctgggcgctccacatgggtgtcagcagcaacctgcggtaccagacgctgaatgggatcgagtacctgctcggcaaggtcgcaccggcgccggtgttcaaggtgtccgttgttgctctccgctgcatgaacaacgtgctgggtgggatgtccttcgtgctgcttgccaggctgaccggggcgcagaaatcagacaagccagcgacggtcgcggaagagaaggagaggttgatagctgtgggcaatgccgcagcagatgccatcaacgaggcgaggcatggagagggtaagtaggtggtagaggagagagacgagtaagttgatggtgcatcatctcagactcgtttgctggttcttggacatagaccaagaaactcacctagtcacctgtagagttggttggaataaggagtggagtgaggttcagaacttcttttttaaaaaactctgtttgtggtttatcggtgttgatgatgacatgcttagtgatggtagaataaagtttttttttcctctc

SEQ ID NO: 19502 - DNA, 811 bp, Zea mays
  Clone ID: LIB3150-036-C7_FLI
cgcttccccgttccccaccccgaccgactgctccccctcccccgcaccagcctcaaggcatcgccggcgccgcaacatcgctgaggaagcccgcacccctgcccggatccgatggccaacagcaacctcccgcggcggatcatcaaggagactcagcggctgctcagcgagccagcaccggggatcagcgcgtcgccctcggaggagaacatgcgctacttcaacgttatggtccttgggccggcgcagtcgccctatgaaggtggagtttttaagcttgaactctttttacctgaggaatatccaatggctgccccaaaggttaggtttctgacaaagatctatcatcccaacatcgacaagcttggtaggatatgcctcgacattctcaaggacaaatggagcccagcacttcagattcgaacagttcttttgagtatacaggctctactgagtgcgccaaatccagacgaccctctttcggataacattgcaaagcactggaaagccaatgaagtagaagctgtcgaaacagctaaggagtggactcgcctgtatgcgagcggtgcatgagaacgcagtgatgttcttgatgtaataacccatcatacttcagtcctcatctattgccatttgcttgataaaaaataggctggagatatttgccatggaatgaagtctctacatgactatcactctgaattgtttggttgtacacctgtggtcggttccctttaccttggggcacctttgacaaatcagtatctgtggtagaacttgctgatactgtaatatatttgttacttcatgt

SEQ ID NO: 19503 - DNA, 1098 bp, Zea mays
  Clone ID: LIB3150-036-E6_FLI
gccatctcgagatcattacacatgcatggttgacttgcttggtcgtgccggtcatctcaaagaagctgaggagctcataaaggacatgccaacggaacctgactctgtgctctgggcttctctgctaggtgcttgcaggctgcataagaatgttgagttgggggaacggacggctggaagattgtttgagcttgatcctgagaactctggaccctatgtccttctctcgaatatgtacgctgagatggggaaatgggcagatgtttttagagtcaggagatccatgaaggacaggggtgtcagtaagcaacccggttgtagttggattgagataggaagtaaaatgaatgtgtttctggcacgagataatcgacatccatgcaggaatgagatatacagtactttaagaataattcagatggagatgggcagaacgagtatagatgaaattgatgatgacttgatgaattactgctctgaagcctgtggatagaagtagaaagtcagatgacttcagaagtaggtgttgacagcttgcttgatatcatatttgcgaggttagtacatccacattaggacaggccaaaagcaagttggctgaccggaagggtcttcttacccaggagagaagggagggtgttgacataaaaaatgtgccgacaagattattggacttcactactaagttcctgatgtcaagatgatgaaggaaaatatttggcgcaacaagaaccggagcccaaaaagagggctttgggttcagccctgcccaaactgtcctagcccagatcaattttaagctcccaaccaacatatctgctcactgtcctcaaccagctaaaatgacttcccaagaatggaataagctacggagatgggggatcactggatcaggaactctctgtgggtaaatgcaaggtggcatggacaccaatgtgtcagctattagaaatgggtggccttggcattctggaccttgaatgctatgcttgagctcaacgcttatggtggctgtggtttgaatgggttgcactagagtgcccttgtattggcatgcccgcccctgcctgtagagctttactaatatattttttctcg

SEQ ID NO: 19504 - DNA, 453 bp, Zea mays
  Clone ID: LIB3150-037-B5_FLI
ctgagacctgacgttgtcagctacaatactataatatcagcatgctgcaacaagggcgatactgataaagcattggagcttctccaagaaatgaacaagtatggcatcagacctacactgagaacgtaccatacacttgttagtgcattggctagtgcagggagagttcatgatatggaatgcctatatcagcaaatgttgcacaagaatgttgaaccgagcagtagcatatatggcatcatggttgatgcctatgtgagatgtgaaaatgattcaaaggtagcatctctgaaaaaagtaatgtcagagaaaggaatagcctttgatgacacgaagagaagtaaccatgagctagataggataatagcaagtccaatttgattggattgccttgaaatgaaaaggctggaaggttgccagttatgttaatatcaaaaacaaaatttcagattt

SEQ ID NO: 19505 - DNA, 894 bp, Zea mays
  Clone ID: LIB3150-037-F12_FLI
ggcgtcgtcgtcggtggcggcggcggcggcgggtgccccctcctgtccgacttcgggtggagcctccccgaggcggagccccacgcggcgaaccagttcatggtggactggtgggcctcccgctgcgccgcccaggcgggcggtaagaagcgcggcgacggcagcggcgtggacggcgacggagatggcgcggagctccgtctttgctcccacgtgcggtgcgggcggcgcgagacgcggcggcacgagttccggcggtgctccgtgtgcggcgcggccaactactgctcccgcgcgtgccaggcgctggactggaagcgcgcgcacaaggcgcagtgcgtgcccatggaccggtggctcctcgccggcgttgccgttggcggcggcgtcgaggcgcagcaccatcagcagtgaggaaacggctcggcgggcgcatcccgcagcggctgacatgacgtaccagcaccgagtcccctacaggcccacggctccgctgcgtggaccgggcgtagcggaaagcggcgcaggaggggagaaggcgtttcggctgttttcttttctttttgcctctttttcacctgctgatgaattgaatgaggtgtatctcgctggcgctggctgccgttcagatgcgcattttctactaggtagtactccctccttttctttttatttgtcgttggacagtgtaattttgcactatccagtgacaaataaaaagaaacggagggagtaccagggaagcaaagagccaaaaagcagtggagatccaccagccgcgcgcctctccttttattttattttcttgtaatgttctggcatttccaagctaggaagcgtagaattccaatttccaagccgttttgtaatggagctttggagctgagggttttc

SEQ ID NO: 19506 - DNA, 1695 bp, Zea mays
  Clone ID: LIB3150-038-G1_FLI
gtaaaaatgtcacagagtggcaaaattccaattattatttcacctaaacccctctgctctcaaacctagctcgctcccggcggaccgacgatgccgaaggcaggcggcggggcggcggacgaagaggagttccgcgccgaggtggaggagcgcctcatcaacgaggagtacaagatctggaagaagaacacacccttcctctacgacctcgtcatcacccacgcgctcgaatggccctcccttaccgtgcagtggctccccgaccgcaccgagccgccggggaaggaccactccgtccagaagatgatcctcggcacgcacacctctgacaacgagcccaactacctcatgctcgcgcaggtccagctgcccctcgatgacgccgaggccgacgcccgccactacgacgatgaccacgccgacatcggtgggtttggcgccgcctccggcaaggtgcaaattgttcagcagataaatcatgatggagaggtcaatcgagctcgctatatgccccaaaattcatttgtaattgctactaagacagttagcgcagaagtatatgttttcgactatagcaagcacccatctaagcctccactagatggtgcatgcaaccctgatttacggctgaagggacataattctgaaggatatggcttatcatggagtatttttaaagagggacatttgttaagtgggtctgacgatgctcaaatttgcttgtgggacattaaagcaaatagtagaaacaaaagtcttgacgccttgcagatttttaagcatcatgatggtgttgttgaagatgttgcttggcacttgaggcatgagtacttatttgggtcagttggtgacgattatcatcttttgatttgggacctgcggtctccagcccctactaaacctgttcagtcagtggtggcgcaccagggtgaggtgaactgcctggcttttcacccgttcaacgaatgggttgttgcaactggttctactgacaagactgtcaaattatttgatcttaggaagattgatacttctctgcacacctttgactgtcacaaagaggaagtttttcaagttggatggagtccaaagaatgaaactatacttgcatcctgttgtctgggcagaaggctcatggtctgggatctaagcaggatcggccaagaacaaacaccagaggatgctgaagatggtcctccagagctcatgttcatccacggaggccataccagcaagatctctgatttctcctggaacccctgcgaggactgggtggttgctagcgtcgctgaagacaacatcctccagatatggcagatggctgagaacatctaccatgacgaagatgatctgccaattagcgatgagccggcaaaaacttcttgaagcaacacagcacaaaaggaatcttaacttctatcgactgttggtgttcctagatcggaaccctgctcgccggagaatcttcatcgagtgagagttggctgtaggttgcttccgtggtcgtaactttatgcttgacgggttcgtcgtttcttcgaccgtctgtatgtgtattcggcgaacctttagcaatatacatatcccgattgactagatctgtacgtcgcagttgtgttttgtagtattgttttgcagccagtaggatcatgttcgtgatgtgatttgtaacgggaacaaaataatatccactcc

SEQ ID NO: 19507 - DNA, 917 bp, Zea mays
  Clone ID: LIB3150-038-H9_FLI
ccgaaaaccgacaagacgatagcaaatcgaaggaggacacggctgctggtggccgcattcggtcgggggaggagcacgaggagccatggcctgcctgcacgaccacagctgcgaggatcacaactgcgccgccgactggtcgctctacaaccacatcgacgtccccaaggtggtggctctcaacgaatcggtgcccgggagcgtcaagtccgtcttcaagccctgggagcagcgccttgacacctcggggggttttctggagagtaatgagggtgaccctgagctacttattttcatcccgttcacatcagatgttaagatcaagagcatttctgttgttggtggtgctgatggaacaagcccgtcaagaatgagagcgtttatcaatagagaaggtattgacttttccgatgctcaaaacatgcagccagtgcaggaatgggaattagcagagaacctgcaaggagctcttgagtaccaaacaagatattcaaggttccaaggtgtggctaacctaactctgcatttctctgacaactttggtggtgatacaactaaaatttattacattggactacgtggtgaagccactcagaacaaaagggatgtagttgcaacaattgtatatgaagtcatgcccaatccttctgatcacaaaacaaaatctgagactggaggaggtttctcgcatgtggagtagacatcatacaagttgggtatggatccacagcagagctagagaagcggaagctgggtactgcgttgcctgaaagcaaatttgaacctcgcttcgtcgatcaataagataaatagataattcccagctgctagacttttagcttgacttttgagcacataactctgtacccgtggacgctgtgactggtttgctaatgctctatcatcagagttggtct

SEQ ID NO: 19508 - DNA, 744 bp, Zea mays
  Clone ID: LIB3150-039-A12_FLI
gttggcttctcctcccccaccggttcgtgttcaggttctggttcgtgggcgagagggaagagatggcggcgtcggacgttgagtaccgttgcttcgttggcggcctcgcctgggccaccgacgaccactccctcaacaacgccttcagcacctacggcgaggtcctcgagtcgaagatcatcctggatcgggagacgcagaggtcccgcggcttcggcttcgtcaccttctccacggaggacgcgatgcgcagcgccatcgagggcatgaacggcaaggagctcgacggccgcaacatcaccgttaacgaggcccagtcccgcggcggccgtggaggcggcggtggcggatacggtggcgggcgccgtgatggaggcggctacggcggtggcggtggaggctacggcggtggtcgtggaggctacggcggcggtgggggatacggtggtgcaaaccgcggcggcggctacggcaacaacgacgggaactggaggaactgagcggtggggtccgctgaggcctagttatcttgttcgcttctgctaccgtgttcaccctagtctagagggggtttatcttcgtctgtggtcgtctcgtgtccgtatgtttcgtttcgtgttcgttgttgttgttgcccatctgtgtttttgaccgcaagctcgctcctctgatgttgttagtgatgtctacaatcgtccaatcccgagcctgcattgagctccaccgattatcttatctggctat

SEQ ID NO: 19509 - DNA, 1138 bp, Zea mays
  Clone ID: LIB3150-039-C5_FLI
ctcgcattgttaccgaggacttcttgccacttccaagcaaagggaaatctgggaaggatggctggtatcctccaggccatggtgatgtgttcccctctttgaataacagtggaaaactcgacatcttattggctcagggcaaggagtatgtcttcgttgctaactcagacaacttgggtgctatagtcgacatcaagatcctgaaccatctgatcaataaccagaatgaatactgcatggaggttactccaaaaacattggctgatgttaaaggcggtactctcatctcttacgaaggaagagttcagcttttggagattgcccaagtacctgatgagcatgtgaatgagtttaaatcaatcgagaagtttaagatattcaacactaacaacttgtgggtgaaccttaaagctgtcaagagactagtagaggctgaggcacttaagatggaaattattccaaaccccaaggaagttgatggtgtgaaagtccttcaacttgaaactgcagctggtgcagctattcgtttctttgacaaagcgattggaattaatgttccccgctcaagatttctcccggtgaaggctacatctgatttattgcttgtgcagtctgatctttacaccttggttgatggctttgtcatccgcaatccatccagagcgaatccagctaacccttcgattgagcttggacctgagttcaagaaggttgccaatttccttgctcggttcaagtccatccccagcatcgtcgagcttgacagcttgaaggtttctggtgatgtctggtttggttctggaattacgctcaagggcaaggtgacaatcaccgccaagtctggagtgaagttggaggttccagatggagctgtatttgaaaacaaggatgtcaatggccctgaggatctttaagctatgcttgccgtcaccagtttttcccaaggatttgtcaataggagcagccaacccaaatcactcccactgagctctaccttttgtaattctcgtgccattccgctcccgctgtgagggtcctgtgagcccgctagagaatatgactgtaatcttctttggtgcgtctgcccttctgtttttgtgcgccagggacgtatattttgctgaaatgatactaccat

SEQ ID NO: 19510 - DNA, 953 bp, Zea mays
  Clone ID: LIB3150-039-H8_FLI
aaaatgcgcaacacgatgcagatcgctggaccgcagtagctttctgacacagccccgagagagtagggatagggccatagggggtcacaaaccataaaccaagaagctgcgggacgttcgaatcaaacatctctaccctctccttccagcgaaatggcaagagcggcggctcctcctctgcaccggctgcccggtctggccttgctgtgtcttgccgtggcagtttgcttctcaggcggcgaaaacgccgcggcggcggcctggacgaggaagatagtcggcgttcacgagctcagggtgggggatttctccgtcaaggtcaccaactggggggcgactctcatgtccgtcatcctccccgactccaaagggaacttgggcgacgttgtgctcggctacgacaccgtcgctgaatacgtcaacggcaccgcctacttcggcggtctgatcggccgcgtggccaacagggtcgccggcgcgcggttcacgctggacgggaaagcctaccgcctctaccgcaacgacggcaacaactcgctccacggtggccaccgggggttcagcaaggtcgtatggacggtgaaggagcacatcggcggcggtgactccccgtacatcacgctctaccatcatagcttcgacggggagcaaggtttccccggcgacctggacgtgtacgtgacgtaccgtctgtcgcgcccgtacgtgctgagcgtgcgcatgaacgccacggcgcggagcagggccaccccggtgaacctcgcgcaccacgcgtactggaacctcggcggccacggcagcgggcccgtcctcggcgaaacggtgcaactcttcgcgtcgcgctacacgccggtggacgccgcgctcgtgccgacgggcgcgctggcgcccgtggccggcacgccctacgacttccgcgcgccggcgcccgtgggggcgcgcctggcggacct

SEQ ID NO: 19511 - DNA, 830 bp, Zea mays
  Clone ID: LIB3150-040-A10_FLI
cggcggcgaagaagcctgcagaggaggagcccgcgacagagaaggcggagaaggctccggcggggaagaagcccaaggccgagaagcgcctcccggcgggcaagtccgccggtaaggagggcggcgagggcaagaaggggaaaaagaaagcgaagaagtccgtggagacctacaagatctacatcttcaaggtgctgaagcaggtgcaccccgacatcggcatctcgtccaaggccatgtccatcatgaactccttcatcaacgacatcttcgagaagctcgcggccgagtccgccaagctggcgcgctataacaagaagcccaccgtcacctcccgcgagatccagacctcggtgcgcctcgtcctccccggtgagcttgccaagcacgccgtctccgagggcaccaaggccgtcaccaagttcacttcttcttaggctcatagtactaggctgggtggtgttggtagacgtggctcaatttatctggtaggggtagtgatggatgatatgatctgcgtctatttgagctgttaagactgatgaacattgttccacgtcacgttgtgtttgatgggcattgttccagatcacgttgttaagactgcagaactgtgtctgacatggaacaagtatgatacttgaaatttctgtgagtgcattgaaacgtgaaatctgcagcccttgaaaaaaaaatctgaaatacaactgcgtgttcatgatcaagttcaggatgcaggcacattttgtatcctatcattagtgctatttggtttatatatttataatgtaatagctggctaatatgataatgttaaattatatttcttt

SEQ ID NO: 19512 - DNA, 1098 bp, Zea mays
  Clone ID: LIB3150-040-B2_FLI
agcagcttctgcttgctctggggggaaggagagagagagagagcgagagagagatctagtagagaggctagtaggtggtcctcgaacgaagatgttggcggtgttcagcgggcaggtggtggaggtgccggcggagctggtggcggcgggcagccggacgccgtcgcccaagacgaaggcgtcgcagctggtggggcgcttcctggccgcgtccgagccggccgtgtccgtgcagctcggcgaccacggccacctcgcctactcccacaccaaccaggcgctcctccgccccaggtcgttcgcggccaaggacgaggtgttctgcctgttcgagggggtgctggacaacctgggtcgtctgagccagcagcacgggctgtcaagcaagggcgccaacgaggtgctcctcgtcatcgaggcctacaagacgctgcgcgaccgcgcgccctacccggccagcttcatgctcgcccagctcaccggctcctacgccttcgtcctcttcgacaagtccaccaactccctgctagtcgcatctgaccccgagggcagggtgccgctcttctgggggatcaccgccgacggctgcgtcgccttctccgacgacatcgacatgctcaaaggctcatgcggcaagtcgctcgcgccgttcccgcaaggctgcttctactccaacgccctcggagggctcaagtgctacgagaaccccaagcacaaggtcaccgctgtccccgccgacgaagaagagatctgcggtgccactttcaaggtggtggaagggtctactgtcctgacggcgctgcactgatcgatcatcagctggcggaggcgatgcgacgatgatgcagaactttgtacatgcgtggtgggtgtgtaacatagtgtggctggcaacaagccatgctcatgcaaaccgatgaatctatctctgtatcatgcatcgatctcggttgcttgctagtcccgactccagactccagacatggctatatatagctggtgctaataaataggagtataatcgtcatatcgatcgattgcgtgtggaatgccaatcaagtgtgtaatctgttccaaataacaaacctctgttcctcc

SEQ ID NO: 19513 - DNA, 1222 bp, Zea mays
  Clone ID: LIB3150-040-E1_FLI
ggaaagggtaagagaagaaaaaggaaggagattagacgtacacgacaaagagacgaagacagtgtggaggggaggcagggtagcccccgcggcgccgctccgctcgaaatccccaaaaaggcaagatcaaatcaaatcagatctctccacccccagcccatccatggcgatcgtgtacgccctggtcgcgcggggcacggtggtgctggccgagttcgccgccgtctcgggcaacgccggcgccgtggcccgtcggatcctcgagaagctgccgcccgacgccgagtccaggctgtgcttcgcgcaggaccggtacatcttccacgtcctccgatccgacgccgccggcatcaccttcctctgtatggccaacgacaccttcggaagaaggatcccctttctctacctggaggacatccaaatgaggttcatgaaaaactacggcagagtcgcccactctgcgctggcttacgccatgaacgatgagttctccagagtgctccatcagcaaatggagttcttctccagcaacccaagcgccgacacactcaaccgtctccgtggagaagtcagcgagatacacaccgtcatggtcgacaacatagagaaaattcttgacagaggcgatcgcatctcgctccttgtcgacaagacatccaccatgcaagacagcgcctttcacttccgcaagcaatccaagaggctccgtagagctctttggatgaagaatgccaagcttctagttgtgttgacagttgtcatagtagtgctgctctacttgatcatttctgctttctgtggaggcctttccttgtcatcatgcagatcatgagtaacacaccagatggctttgcccctcccttaaatggagggtagaacaccatggaatgatgcctgctgtgttgagcaccggagcttccggaggcaaaaaaaaaaaggagatcgatggataccactgtggtttccagtaacttggatcagtttgtacagtggacgagtggagttggccgttgctgtttttgatgtcgccatggttgtgggtgaactcaaaccttaaatcgtggtgtgcttagcatctttcttggcgtgtcaaactgtcgttgtgacttgtgagggatgggactagtgagttgggttttgtagagttacttggttatcaatgtgcagacatatatgtatgccgcgatgagtgttagtacatgcctactatggttatcggtgt

SEQ ID NO: 19514 - DNA, 1721 bp, Zea mays
  Clone ID: LIB3150-040-F12_FLI
atgacattctttcgaagttgaagagttcagttgagttagatcacaggcaagcagctgtttggaatatcctaggtttagttcttcttcggggtggtcagatacagagtgctatctcagttctatcttctctcacggctgttgctccagactacttggactcccttgcaaatcttggcgttgcatacattcaaagtggggatctagagctgtctgcaaagtgctttcaagaacttcttctaaaagatcaaaaccaccccgctgctctggtgaactatgcagttcttcttctgtgtagatatggatctttgtctgcaggggcagggggcaatgtcagcacaggtccttacgtgcatcagaaagaagccttagttgttgcaaaagagtgcttgcttgcagcagtgaaggctgatcctagagctgcatcagtttgggttaatcttgcaaatgcatattacatggatggtgagcataagaactcaaagaggtgcttggagcaggcagcaaaattggaacccaatcatatgcctgctcggtatgctattgcagttcaccgtatcagagatgctgtaaggtcacaatgttctgatgatcaacttctttgggctgcaaatgaaatggcaacagttctaaaagaaggagacccttccgcagttgacaccccaattgcatgggctgggttggcaatggctcacagggcacaacatgaaattgcagccgtctatgatactgaaaacatcaatcttaatgatgcagaagagcgagctcaatatacactaaaacaggcaatccaagaggacccagatgatgctgttcaatggcatcaacttggcctgtacaatatttgcatgacccggttcagcaggtctgtaaattttcttaaagcagccttagcccgttccccagattgcagttatgcttggtcaaatcttggtattgcgttgcaactatcagacgatccatcctctgaaactgtatataagcgggcactggtactatcatcaactcagcagctgcacgcaatcttctctaatcttggaattctttatcggcaacataggaactatgaatttgcaaggaagatgttattaaggtcgttggaactgtgtcctggatttgcaccagctagcaacaacctgggtcttgtatttgtcgctgagggccgttgggaggatgctaaaagctgctttgagaaagctctgcaatctgatcccctgcttgatgcggccaaatcgaacttgttaaaagtcctcacattgtctacgaaacaatagaacaagagaagacctaactcctaaggaaattgccactggagcctcagagttcagacacggaagcgcggtcaccaaatctctgttctgaagtgtctcaactgccagctcaaaattgatgcttggtgcctctagtctactgctcattgctcacagagtcacaggtgtaggaagtttcagaagtgcggcttcgaagactgcatttgattttgactgagttgctgcctatatgacaatcaaagctgcacaggctccgaagtggctgtgatgtgttcttaaagagtcgcatcagcgcaggaagagcccagattttgaagttcatgtgtagctaaatttcgatataagcttgaacggcttcccttagctgatgtatatacataaatatactccaacttgaggtgtactccaagttgagcatgtgcaagttataggttcagtgttccagagcaactt

SEQ ID NO: 19515 - DNA, 1619 bp, Zea mays
  Clone ID: LIB3150-040-H3_FLI
cgcctccatttcggcctctgtcccttgcaagttcaatctcacctccaaccatgggtaaagagaagtcccacatcaacattgtggttattggccatgtcgactctggcaagtcgaccaccacaggacaccttatctacaagcttggaggcattgacaagcgtgtgatcgagaggttcgagaaggaggctgctgaaatgaacaagcggtccttcaagtacgcgtgggtgctcgacaagctcaaggctgagcgtgagagaggtatcaccattgatatcgctctgtggaagtttgagaccaccaagtactactgcacggtcattgatgcccctggacaccgtgacttcatcaagaacatgatcactggtacctcccaggctgactgtgctgtccttatcattgactccaccactggtggttttgaggctggtatctccaaggatggccagacccgtgaacatgctctccttgcgttcacccttggagtgaagcagatgatttgctgctgcaacaagatggatgcaaccactcccaaatactccaaggcacgttatgaagagattgtgaaggaagtctcatcctacctcaagaaagttgggtacaaccctgataagattgcctttgttcccatttctggttttgagggcgacaacatgattgagaggtccaccaaccttgactggtacaaaggcccaaccctgcttgaggctcttgaccagatcactgagcccaagaggccttcggacaagcccctgcgtctgcccctccaggatgtgtacaagattggtggtattggaactgtaccggttggtcgtgtggagactggtgtcatcaagcctggtatggtagtcacctttggtccaactggcctgactaccgaggtgaagtctgttgagatgcaccacgaggcacttcaggaggctcttccgggtgacaatgttggcttcaacgtgaagaatgttgctgtcaaggatctcaagcgtgggtttgtggcctccaactccaaggatgaccctgccaaggaggctgccagcttcacctcccaggtcatcatcatgaaccaccctgggcagattggcaacggctatgccccagtgctggactgccacacctcccacatcgctgtcaagtttgctgagctcattaccaagatcgacaggcggtctggcaaggagcttgagaaggagccaaagttcctgaagaacggtgatgctggtatggtgaagatgatacccaccaagcccatggtggtggagacattctcagcgtatcctccccttggtaggtttgctgtccgtgacatgaggcagacggttgctgttggagttatcaagagtgtggagaagaaggacccaaccggcgccaaggtgaccaaggctgctgccaagaagaaatgatgcgatcctgcgcctgctttagcaatacctagttttcatcattacaagttttgtttgtggtcgttgctgttattgtgtgaactgttgagctctgttagcctgtgcacttttatctatttatttggtaccttcttgctatttcaccttctgcaatacaagaatgctgtaagagctatatgttaaccttttggcattgttaatttgattttaggaagtcgtatagtt

SEQ ID NO: 19516 - DNA, 580 bp, Zea mays
  Clone ID: LIB3150-041-A8_FLI
gctcatcggagaaaagtagatccgggttagggttttagacggcgatgggtgcggcgggcgacgagaaggctgcgatggctgcgtccgctgcagccgcgggtgccggtgccgccgagggcgagggcgcggtggactccaaggaccttcagcagcagagcaaggcgctcgacaagctcactgatcatgtcgaggaccggcagctcgattcatcccgtgtccaatccgccatggcagcacttgcttcatccaaggaggctgactggaacgcgatgaggctgagggagaaagaattggctgctgtgaagatcaaccctgccgatgtcgaaattatcgctactgagcttgagctggacaagaagatcgcggagagaacgctccgtgagcacaagggtgatgccgtggctgcggttcgattcctgctgcgctagttccgagatttcgtcgccagcatcatatgttccccttcagttcctcacaagaggtggtgatgtgaagcactagtacttttgtctgtgtgcctgttttggaagtttgctattagaactatgttgcagaaaatttaagaatgagaataccatgc

SEQ ID NO: 19517 - DNA, 1410 bp, Zea mays
  Clone ID: LIB3150-041-B9_FLI
gccgccgccgccaccaccagcactgccactccgccaccaccgtcccgaagccccctcccagcgccatcgacttcatctcggattgaagcaatgtcgtcggacgatgaggtcagggaggagaaggagctcgacctctcctccaacgacgttgtcaccaagtacaaggctgccgccgaaatcctcaacaacgctctgaagattgttgtgtctcagtgcaagccaaaagtcaagattgttgacctttgcgagaagggcgactctttcataagagagcaaactgggaatgtttacaagaacgcaaagaggaagattgaaaggggtattgctttcccaacctgtgtatccgtcaatgacacagtttgccacttctcaccgcttgcaaccgatgatgccgttctggaagaaaatgacatggttaaaattgatatgggctgtcatattgatggctttattgctgtggtggcacatacacatgtaattacaaatgggcctgtcacaggaagggctggtgatgtgcttgctgctgccaacacagcagcagaagtcgcaatgcggcttgtgagacctgggaagaaaaataaggatgttactgaagcaattcagaaagttgctgctgcttatgattgcaaaattgtggaaggtgttcttagccatcaactgaaacaatttgtgattgatggtaacaaagttgtgctcagtgtctccaatgctgatacaaaggttgatgatgctgaatttgaagaaaatgaagtatatgcaatcgatattgtcaccagcactggggaggggaagcccaagttattggatgagaaacagaccaccatctacaaaagggccgtagacaagaattatcacttgaagatgaaagcgtcaaggtttattttcagtgagatcagccagaagttcccaatcatgccttttactgctagggcattagaagagaagcgtgcgcgtttaggcttggtggaatgcatgaaccatgaactattgcagccgtaccctgtacttcatgagaagccaggcgatcttgttgcacacataaagttcactgtgctgctgatgcccaatggatcagataagataacatcacatcctctacaggagttaaagcccaccaaatccattgaagacaatgcagagataaaggcatggcttgctttggggacgaaatcaaagaagaagggtggtgggaagaagaagaaaggcaagaaaggagatgcagcagaagcagatcccatggaggaggcgacaaacggtgctacaagccaagaataattctgatttttggaattactgccaccagcttttttcttgtttcttcgctgcatctgatggtgttatattacattcagttgtggaaaaattgagtactatttctagcttctaagaaatgaagcatcctattatcgc

SEQ ID NO: 19518 - DNA, 1691 bp, Zea mays
  Clone ID: LIB3150-041-D8_FLI
ggtccccgtcctcccactcccccctcgcaaccatttcaaatcgctctctcgacccaactgtactcgccgtcgtcaattcatcatccatccccatccccccatcgactcccagatctctatccccctctccctgtcctcactctctcgagcgcgttgtggcggatgtcctcgtcggcgcgtttcgatctccgggcctcgtcgcagcagttgcagccgccaccgtcgcacgccagcatgagcagcgacgggggcgcgttcgcaaacgcggagaacctggagcactgcgcccggtacctgaaccagacgctcgtcactttcggattcccggcatctctcgacctcttcgccaccgatccggtctcgattgcaagaacttgtaactgcatctatgcgctgctgcagcagcgacaaagggacattgagttcagggagtctacaaatgaccagcggcagcggatgcaatctgatatctcacggctggaagctaagattgagagaatggatgctcaattagcagcgaaagatcgagagctagccactcttactcgaacggaggccaaaaacactgctgctctgaagtctcagattgataagctgcaacaagaacgtgatgaatttcagaaaatggttataggaaatcagcaagtacgcacccagcaaattcatgaaatgaagaagaaagagaaagaatacataaagttgcaggaaaagctaaatcaggtattgatggagaagaaaaaggaatcatcccgttctggaatggagataatgaacttgttacagaaagaaggacgacaacgcggaacatggaatggaaaaaagaacgacaatgattattacaaaatgattgttgatgcatatgaagtgaagaaacaagagctgatgcaagagaatgcagatttacgggcactgttacgttcaatgcagatggacatgcgtgactttctcaatgccccgaatgggtcatcacaatctactgttactgataatggaagacaggagtcagggtctcctcagtctccgcttggtggcaagacggatgtttttgacttgccctttcatatggccagagatcagatagaagagagtttgcgcacaaaaatgacttcaatcaaggcacgaatgacacaacttcaagatgctcagaaaggtgcagaagtgacttctgaggcaactgaccgggagcttgagcttgaagctcaactggttgaagcaagaagcatcatccaagagcaggcctgcatcatgtccaagcacttcaagtctgataagccaagtggcaggaggcatagcggtctggatggcgagcgtgaggcatctgccgaggtgtaaaagcatgtctgtagcaaggatatatctgttctgcaagacctcctgattttagtaagtaccgaggtagtatgttgcaggatataacatggtcctgtgctgttgtagcccgagtttaggtgctgtctatgcagtatgatgtgcaggagcatatcctccagcacatggctaacccgatcacatctaagtcacatgtagcgtaactgtaatcctattcatactatatgaagaatgtcagtgtagcaacccttgaaaaaaatggacctttcggaccttacatcttgaagctctgttcgcatgatttttttttttagtttattctatcagcggtgacagcacgttgtgacccttgttccctgctg

SEQ ID NO: 19519 - DNA, 1863 bp, Zea mays
  Clone ID: LIB3150-041-E4_FLI
gattagcctcgccgacgacgaagagggaagagctggtggctggcgaggggctcgcggggatggggatctcgaggctcctggcgctccttctggcgctgctgatcgccgtcgccggcgcgaccgccgaggagcccgtagtggcggcggactcgggggccggcgcggtggaggccgcggcggcgctcagggcggaggaggctgcggaggccgcggcgctcagggccgagctggagcagctccgggcgaagatctccgccttagagtcagacatagcagtgcgatctctggaactgaagaataaggacgatgtcatcgtgaacctagagaaagccattgcggagaagtcaaaggctattacctctatgcagggcgagattgcttctctccaggcaaaaggatctttagctgccgaggagcaggctaacaaggccaatgccaaggctgttgaacttgagaagcagattgacaagctcaaaaaggatattcaagcacaaagtagtcagaaagcagcactagaatctagggccaacgatgcagagaacaaggtggaaaagttgactgaaaagcttaatacaatgcaaaaggaaagtgatgagcaaaaacgcaaaatcaagaagacagaacgtgctcttaaagtcgctgaggaggaattgatgaggttgcagttagaagcaactgctaaatcaaaacagctgactgaggttcatggagcatggttaccaccttggttagcgacacactatgctcgttacatggaggttgtctcaggtcactggaattatcatggaaaacctgctgtgcagaatgttttgcataaggcatcagaaaaatcagcacatgcaaagaaatgggctgaaccacatattgagactgctaagatgaaatggattcctgttaaggagaaattggttgtcctcaagaaaaatacagaaccttatgtacagaaggtatcgacaagatcagtggagttttatgagtcatcaagggatgctgtgacacctcacgttgtcaaagttaaagagtttgctcatccctactaccaggaagccaagaagttttctaagccttacattgatcaaattgctgagatcactaagccacatgttgagaaagttagaactactctgaagccatacactaagagagcagttcatgcgtatgggtcatttcttgcgtctgcaaccacataccatcgacaggctcaggcgaccatcatggactacctccatcagcatggggtacccaagtcatttgcaacgaaggagttagtttggttcctggcttctgccttgctagctctgcctgtcttcgtcatatacaggcttgtagtagagaccttatgcaccaaaaagaacagaaggcctcgtggcggtaatggtaacggtaaccatggccagaagagacacaagcggcgatacgccgacaagtagaccaatctacccaacactttagggttcagcatgctgtgtttgcattgtcgcgcatctttgagcaatgagcaagattgggttgctcctccctcccggaggcactgctgaaccatacatggaggaaggagactcgggtcatgggcaccctttaccgtgagaagcgttgtagcctacaccaccaacatttctctttcttttacttcttcccaggtgtactatgaacttcggtgcaggtgcagcggaccttttatattatctgcactttgctggggttcagggggttaggcctttgttttattggtcgttgtttattgtaacttgtgaattcgtttgagttcgtctgtttgtttgttttttcgttggcgacctacactcgaacttgttagctaactggatgttgaagtttgactcaagttgctggagtgtcatgaac

SEQ ID NO: 19520 - DNA, 412 bp, Zea mays
  Clone ID: LIB3150-042-A3_FLI
gagtgtctcctcctcctccgccgccgccgccgccgcttccctcgtctccgcccgccgaagccatgccgtcgcacaagaccttccggatcaagaagaagctggccaagaagatgcgccagaaccgccccatcccctactggatccgcatgcgcaccgacaacaccatcaggtacaacgccaagcgcaggcactggcgtcgcaccaaactcggattctgagcggtggaagaaatgctggctaaagacgcctagagggtatagggctctgcaagctaggaagctcttgtttaattttttttgcttgtgttatttgtcattgtagtaccatgttttgtctgatggttaaagaaccgcctttatgctatggtgaatttatttaaccttgcagcgccttaatcagttgatctctagcc

SEQ ID NO: 19521 - DNA, 1228 bp, Zea mays
  Clone ID: LIB3150-042-D6_FLI
cctctcccctcgccgtcgtcgtcctccctcctctcctccgctcccaccgaggaggggaccctctataagaaggcaggagcgacgaatccgatcgtctgtcgtgtgggagagccgcggccccatcctccgtgtgatgaagttcgggaaggatttccggaaccacctggaggagacgctgccggcgtggagggacaagtacctcgcctacaaggccctcaagaagctcatcaagaacctggtgccacgcgagcccgcagcggcccctcctctccctcctcctgcccccgccgccgccgacgccgaggggccgggggctcctgccgccgcgcacgggaacgtcaacctggccaactggttcgccagcatcctcgacgcggagctgcacaagctcaacgagttctacatcgagagggaggagtggtacgtcatccgcctccaggtgctcaaggagaggattgagcgcgtcaaggctaagaagaatgacgcttttacatccaggagtgagtttaccgaagaaatgttagagatacgtaaggattttgtgatcatacatggtgaaatgattcttctgcaaacctacagctccctaaattttgctggactagtgaagatactgaagaagtatgacaagagaacaggcggtgtgcttagcctgcctttcactcagcgtgtccgtcaccagccatttttcacaaccgaacctttaacaaggcttgtccgagaatgcgaggctaacctcgaactacttttcccgatcgaagcagaggttcttgagcctagttcatcctcgaatctggaaccgcatgatgtggctaggtgtgacccgacatcgtcgcgcgatgtggaaaccgtcgatgtttaccgaagcacactcgcagctatgaaggcgatacagggccttcggagagccagctctacttacaaccccctgtctctgtctaggttcttccacggcgaggatggcgaaccctgctcgggtgccatcacttctgagagctcgctgtcagattcctcaacggactcccagattcaggatgctgggaaggatgataaggaggtgcaatcaaattcgagggaccagaatgctgcccaaggggaacagaatgcacaaggcgagccgactgatgaataaacagtttttttcccacacgctgttcaataagacaataaccattgataagtgtaaatgctaataatcttgctggttaaccctcttttgaagtgacac

SEQ ID NO: 19522 - DNA, 1657 bp, Zea mays
  Clone ID: LIB3150-042-E2_FLI
gcgtcttcgtactcgcctatctccgcgacccaaagcgttcccccttctcccattcttctctcatttctcaccaccgccgccgctaccccctttcgacaacaccatgagggagtgcatctcgatccacatcggccaggccggtatccaggtcggaaacgcgtgctgggagctgtactgcctcgagcatggcattcaggctgatggtcagatgcccggtgacaagaccattgggggaggtgatgatgctttcaacaccttcttcagtgagactggcgctgggaagcacgtcccccgtgctgtttttgttgaccttgagcccactgtcatcgatgaggtgaggactggcacctatcgccagctcttccatcctgagcagctcatcagtggcaaggaggatgcagccaacaacttcgctcgtggtcactacaccattggcaaggagattgttgacctgtgccttgaccgcatcaggaagcttgcagataattgcactggtctccagggcttcctcgtcttcaacgctgttggtggaggaacgggctctgggcttggttctctcctcctggagcgcctgtctgttgactatggcaagaagtccaagctcggtttcaccgtgtacccatccccccaggtgtccacatccgtggttgagccatacaacagtgtcctgtccacccactctctcctcgagcacactgatgttgctgtcctgctcgacaatgaggccatctatgacatctgccgccgctcccttgacattgagcgcccaacctacaccaacctcaacaggcttgtgtcccaggtcatctcatccctgactgcttccctgaggttcgatggtgctctgaacgttgatgtgaacgagttccagaccaacctggtgccctaccctaggatccacttcatgctttcgtcctacgctccagtcatttctgctgagaaggcctaccacgagcagctgtccgtggccgaaatcaccaacagcgccttcgagccatcctccatgatggccaagtgcgacccccgccatggcaagtacatggcatgctgcctcatgtaccgtggtgatgtggttcccaaggacgtgaacgctgctgtggccacaatcaagaccaagcgcaccatccagttcgtggactggtgcccgactggcttcaagtgcggaatcaactaccagcctcccagcgtcgtccccggcggtgacctggccaaggtgcagcgtgccgtgtgcatgatctccaactccaccagtgttgtggaggtcttctcccgcattgaccacaagttcgacctcatgtacgccaagcgcgccttcgtgcactggtacgtcggtgagggtatggaggagggcgagttctccgaggctcgtgaggatctggctgcgctcgagaaggactacgaggaggtcggtgctgagtttgacgagggtgaggacggcgacgagggtgacgagtactagacgctctactggcgcggcgtcgtcgggcttgtgtgccactgctatcctgtgatctgccctgagtggctcctatcgtgttatgtttctgtcggttcttatctatctgtcgttgtgtggtttacaacttacgttgtaagactttattcccccgctttgctactgggttattaagtttggcgttattgttttcttgatctc

SEQ ID NO: 19523 - DNA, 813 bp, Zea mays
  Clone ID: LIB3150-042-G6_FLI
cacagaagcggcggcggcggagcaaacgcaggcgaaggcgagggtgtgagggaaggagcaccagccatggtgcacgtcaacttctaccgcaactatggtaagacgttcaagaaaccaaggcgtccttatgagaaggagcgtcttgatgctgaactgaagctggttggtgagtatgggctgaggtgcaagcgtgagctttggagggtccagtatgcactgagcaggatccgtaatgctgcaaggcacttgctcacccttgacgagaagaacccccgtcgtatctttgagggtgaggcacttcttcgccgcatgaaccgctatgggctgcttgctgagggtcagaacaagcttgattatgttcttgccctcaccgctgagaacttcctcgcaaggcggcttcaaacacttgtcttcaaggctggcatggccaagtccattcaccatgctcgtgtcttgatcaagcagcgtcacatcagggttggcaggcaaattgtcaacgtcccatcattcatggtgagggtggagtctgagaagcacattgacttttcactgtcaagcccattcggtggaggccccgcaggaagggtgaagagaaagaatcagaagaaggcaagcggtggcggggatgctggtgatgaggatgaggagtgaggatggacaagtagtgttacaccaatataataatattatctagttttcttgaacttgttcgaatgatgagtgcttagctgtgtgatctgacgcagagtcccctgtgctgactctgtgtcatggatggtccattttatcttgtggtattatcagcctttacat

SEQ ID NO: 19524 - DNA, 1446 bp, Zea mays
  Clone ID: LIB3150-043-C7_FLI
attcctcccaacaccacctcgcctgcgatctccgtagcctccgtcgcgtcgagcatcgatcatgtcggcctactgcggaaagtacaaggatgagctcatcaagaatgctgcctacattggcacccctggcaagggtatccttgctgctgatgagtccactggcaccattggcaagcgcctttccagcatcaatgtcgagaacgttgaggagaaccgccgtgccctccgtgagctcctattctgctgccctggtgctctccagtacatcagcggtgtgatcctcttcgaggagaccctgtaccagaagaccaaggatggcaagccttttgttgatgtcctcaaggagggaggcgtcctccctggcatcaaggttgacaagggcaccattgaggttgttggcactgataaggagaccaccacccaaggccatgacgaccttggcaagcgctgcgccaagtactacgaggccggtgcccgctttgccaagtggcgcgctgttctcaagattggccccaatgagccatcacagcttgccatcgacctgaacgctcagggtctggctcgctatgccatcatctgccaggagaatggtctggtgccaattgttgagcctgagatccttgttgatggccctcatgacattgatcgctgcgcttacgtcactgagaccgtccttgctgcctgctacaaggcgctcaacgagcaccatgtcctcctggagggtaccctcctgaagcccaacatggtgactccaggctccgactccaagaaggtgactcctgaggtgattgctgagtacaccgtccgtaccctccagaggaccgtccctgctgctgtgcctgctgttgtcttcctctctggtggacagagcgaggaggaggccacccgcaacctcaatgccatgaacaagctcagcaccaagaagccgtggtccctgtctttctccttcggccgtgccctccaggcgagcaccctcaaggcctgggctggcaaggtggagaacttggagaaggctagagctgccttcctcgccaggtgcaaggccaactctgaggctaccctcggcacctacaagggtgatgctgccgccgacaccgagagcctccacgtcaaggactacaagtactgagttgcttctctttgcgtgcccgttttggaactcctgcctacgagctaggttgcggagtgtggtttgctcgttagagcttattttcggacatccaaaaaacatgcttcctatgtgggatgatggttatctttatatttgtatgttaattagtctctttgctgttaaatttcgtgtaagttggtcctgccgatggagaatcgagcagccccctttttttgttctatcaactatgctgtaatgctggctatgtatcggcaaaaacaattctatatgctgagttggagtcggcaaaaattcatatatgctgagttggagac

SEQ ID NO: 19525 - DNA, 458 bp, Zea mays
  Clone ID: LIB3150-043-G12_FLI
catgaacaagctcagcaccaagaagccatgggccctgtccttctccttcggccgtgccctccaggcgagcaccctcaaggcctgggctggcaaggtggagaacgtggagaaggctagagcggccttcctcgccaggtgcaaggccaactccgaggctaccctcggcacctacaagggtgatgctgccgccgacaccgagagccttcacgtcaaggactacaagtactgagttgcttctctttgcgatcccgttgttttggaactcctgcctgcgagtaggttgctgagtgttgtttgcttgttagagcttttatattcggacatgaaaaaaacatgcttcctatgtggatgatggttatctttatattcgtatattaactactagtctctgttgttaatttccgtgtaatttgctcctcccagatgggagaatcgaacgccgcttttttgttctatct

SEQ ID NO: 19526 - DNA, 688 bp, Zea mays
  Clone ID: LIB3150-044-C3_FLI
cgacttccgtccgagtctgagctcatctccacgcgccgccgccgccgctcgacgcccaccgcgcagccatggcggaacagactgagaaggctttcctcaagcagcctaaggtgttcctcagctcaaagaaatctggcaagggtaagaagccaggcaagggtggcaatcgattttggaagagcattggccttggtttcaagactcccagggaagcaattgaagggacctacattgacaagaaatgtccattcactggaaccgtttctatcagaggcagaattattgctggaacatgccacagtgctaagatgaacagaaccatcattgttcgcaggaactatctccactttgttaagaaataccagaggtatgaaaagaggcactccaacattccagctcacatctccccatgcttccgtgtgaaggaaggcgaccatgtcatcattggccagtgcaggcccctatcaaaaactgtgaggttcaatgtcgtcaaagtcattccagctggatctgctgctgccggcaagaaggctttcaccgcagcctgagtttaagactatgttccatgagtagtttatatagtgatgtctttttttgttaaaaaaactgccttctaggcttgtgcctttcgactatggtttggagattgttcccatcttaatgaagtccaatcatctgaacaaaaaag

SEQ ID NO: 19527 - DNA, 618 bp, Zea mays
  Clone ID: LIB3150-044-E5_FLI
gcctgcctctcctcctccagagctcgtcgccaccggccaccgccaccctcgatcacgccgtccgtcgaggtaaggtcagcatggtgagggtcagtgtgctcaacgatgcgctcaagtccatgtacaacgctgagaagattggcaagaggcaggtcatgatcaggccgtcatccaaggtcatcatcaagttcctgacggtcatgcagcgccatggctacattggagagttcgagtacgttgatgaccaccgatcgggcaagattgtggtcgaactcaacgggaggctgaacaagtgcggcgtcatcagccctcgctttgatattggcgtgaaagacatcgagggatggactgcaaggctgctcccgtccaggcagttcggatacatcgtcctcacgacttcggcaggcatcatggaccacgaggaggcccgccggaagagcgtcggaggcaaggttctaggtttcttctattgaagaagctgagaatctttgttatggcctgcctgcctgtcttactctctcagactagagtacctgttattttactttaatatgtctctctcagactagagagccttcttttacttgaatattggttactgcattggtctttcacttt

SEQ ID NO: 19528 - DNA, 921 bp, Zea mays
  Clone ID: LIB3150-045-B1_FLI
gtcttcagaccattagctttatctactccagagcgcagaagaacccgatcgacaccatgagggtgttgctcgttgccctcgctctcctggctctcgctgcgagcgccacctccacgcatacaagcggcggctgcggctgccagccaccgccgccggttcatctaccgccgccggtgcatctgccacctccggttcacctgccacctccggtgcatctcccaccgccggtccacctgccgccgccggtccacctgccaccgccggtccatgtgccgccgccggttcatctgccgccgccaccatgccactaccctactcaaccgccccggcctcagcctcatccccagccacacccatgcccgtgccaacagccgcatccaagcccgtgccagctgcagggaacctgcggcgttggcagcaccccgatcctgggccagtgcgtcgagttcctgaggcatcagtgcagcccgacggcgacgccctactgctcgcctcagtgccagtcgttgcggcagcagtgttgccagcagctcaggcaggtggagccgcagcaccggtaccaggcgatcttcggcttggtcctccagtccatcctgcagcagcagccgcaaagcggccaggtcgcggggctgttggcggcgcagatagcgcagcaactgacggcgatgtgcggcctgcagcagccgactccatgcccctacgctgctgccggcggtgtcccccactgaagaaactatgtgctgtagtatagccgctggctagctagctagttgagtcatttagcggcgatgattgagtaataatgtgtcacgcatcaccatgggtggcagtgtcagtgtgagcaatgacctgaatgaacaattgaaatgaaaagaaaaaagtattgttccaaattaaacgttttaaccttttaataggttt

SEQ ID NO: 19529 - DNA, 1106 bp, Zea mays
  Clone ID: LIB3150-045-D1_FLI
gccggctcacgctcccccgcctgctctctcattctcgacgatggctgggcgaccgccgccgtcctacgccaggtattccgcgcttcaaggcggcaggcccttcgccggcgaagagcacccatcagattcccgagttgtttatcccagttatcttgcacccgagggctccgtagcatcttattatgcttcaagacctgttctacctgttggatcagatgttcttagaaacgatgtaatttctcaaccaagaacgcatggttatgatggtccagcaagagtgaccaatcctgctttggctggcctgactggactacctgctggagttacggcacgggggcctagtgctctggaagacccgtctttggctggtctgagtggattagctccagtccgggcaacgggcggagctacggcacgagggtctggtgctttggaagacccgtctttggctggtctgagtggactagctccagccagggcactggcacctagagctttgaaagaagaactggatgtagttgggagaagttcttcagtaggcagaggtgctagcattccagatgttgagcaccacagctcaattccaaactttgatggaccctcagaaaatgaatccaacattctttttgttgattgtcttcctactgattgcacaaggagagaagtagctcatttgtttcgttgttttcctggcttcaaggacatcagagtagtgcacaaggaacccagacgtagtggtgacaaggcctatgtcctgtgctttgtggagtttgagaacgcgaaattcgcacgcactcccatgcaagctttacaagggtaccgcttcgatgaccggaagcctgacgaccggtgtctcgagatccatttcgcaaggttcccgttcgctctgcctggcgccggcgccggcgccgcccgggaccacaggaagcggtagctggtagcagcgtggcctgcgcagtgggcactgcagtagatggcctgcgatcaacatgtatcgtatctgtatgcgactgttttgttgggcagttagatgaagtcgcctactatcagtagtagtctcctgtgacaccaacacgtggaatgataagactgcctccttttttttc

SEQ ID NO: 19530 - DNA, 1263 bp, Zea mays
  Clone ID: LIB3150-045-D2_FLI
ctacgcgcagccgcggtacctccgcatggtgcgcctcgcccggcgcctctgggccgccgccgaggccgaggctggctaccgcgtgctcaccccgacgccgcacctctccatgggcccgcggagcagcgcctcgctcgccgccgccatcgctaacatcggcgccgaggaggtggacgaggacgaccttcaccgcaggtggggcggcgccttcgccctcaccgtcccgggcccggtggacgcgtgggtcaccgcgctcagcgaccacggcggcgtgctcagcgccaccaaggccgtggccatgttccaatcgctcgccgtcgcgaaaggcgccgtggtcagggacaacaccgaggtcgtcggcatcgacagggcgcccgagcccgacggcggcggcgtcgtggtgagggccgccggcggcgaggcgttccgcggcgccaggtgcgtcgtcacggtgggcgcgtgggcggccaagctgctcggctcctggggcgtggacctcccaatcaggccgctgcacacgctccacctctactggcgcgtgaagcccggccaggagcagactgtctcggcgagcgccgggttcccgaccttctccagctacggcgacccgcccgtgtacggcgcgccgtcgctggagctcccggggctcatcaagatcagctgcgacggtggcccgccgtgcgacccggacgcccgcgactggctcgcgggcgacgcggaggtcacgcaccgggtggccaggtggatccaggaggccatgccggaccacgtggacgccgcgggagggccggtcgtccggcagtcgtgcatctgctccatgacccccgacgccgacttcgtcatggacttcctgggcggcggccgggacgtggtggtcggggccggcttctcgggccacggcttcaagatgggccccgccgtggggaagatcctggcggagatggccattgatggcggctccgagacggcggaggaggctggcctggacctcggcttcttccggatcgggcgcttcgatggcaacccaatgggaaatgccaagaaggattgatgcatgtagttctaaatatggatcgatggtggtcaataatgaaagtaataaaacattcatattctagcatcgtaggctgagaatactttcttcatgtatggcacctgagaaactatcctcttccagattttgtatggtcagtcactctaataaacgatttgctgtattttaaacattaacgtattcccaagtgatacttcttcgtttcttcg

SEQ ID NO: 19531 - DNA, 1100 bp, Zea mays
  Clone ID: LIB3150-045-D3_FLI
tcggcatcgtcgacacctccatcggcctccgatctctccacgagcctccgctccaatccgaggatctgcggcggtgggcagtggtcggccggcgatggcgcaccgagtggacaacgagtacgactacctcttcaagatcgtgctcatcggcgactccggcgtcggcaagtccaacatcctttcccggttcacccgcaacgagttctgcctcgagtccaagtccaccatcggcgtcgagttcgccacccgcaccctccagatcgaagggaaaaccatcaaagctcaaatatgggatactgcggggcaagagaggtaccgtgcaatcacaagtgcttactacagaggagccgtgggtgcacttctagtctatgacatcacgaagaagcagacatttgaaaacatacagaggtggctccgcgagctccgtgaccacgcggactccaacatcgtgatcatgatggtcggcaacaagtccgacctgaaccacctgaggtcggttccagaggaagatgggcaggcgttagcggagaaggaaggcctatccttcctcgagacatccgccctcgaagcccttaacgtcgagaaggcgtttcagaccgtcctctccgacatccatcagatcataagcaagaaggcgcttgcagcccaagaggcagcaggtagtggacctccaggtcaaggaaccaccatcaacgttgcggattcgtctgccaacatgaagggagggtgctgctcttcctaggtgtgcagacaaagacatgctgctgctgctgcaaaaaagagagagagaaacctcatggatcgtacgatactttaggtgttatgtaggtgacgactccttttggcctgtaactccggtgggttgtaatcacagttcatacttctgcaaagaaatcctcctctcaggtagatatggcgtgtagtttttgaaattttggtagagagcgatggttggcagacttgcgtggagcccagcttggtgttttctttcagtgttctatcttaagtagccctctgctggaaaaaggacccagatatttcttgtatttgtactcgagtttgcggtgttaccagatatactttgattcctgtgctagaac

SEQ ID NO: 19532 - DNA, 640 bp, Zea mays
  Clone ID: LIB3150-045-D7_FLI
gaagctccaaacgaccacaccgcacacgccgataaaaccgctccacccactccgcccactccccctctgccgtcgcctgtccactttccccgtgcttctccgccgtcgaggccgcgtcccagtgcgaagagactccgactcagatggccagccgctgggtccggcccgaggtgtacccgctgttcgcggcgacgggcgtggccgtcggcatctgcgggtttcagctcttccggaacatcactggcaacccggaagtcagggtaaacaaggcagggagggcagctggtgtgcttgagaaccatgaggaggggagacgttacgccatgcatggcctaagaagctttgtgcacgacaagactcctgagatcatgcctgcagttaacaagttcttcactgaccctaagtgaagcatgttgattggcatactactactactacttgctactggggattttacactttgctggcaactcaatatgttggggacatccatgacctctaaaagtactttgagcgcttggtgatgacttggtatatgtatgatggtggatgagtttgatcgtccatgcttgatgttcatattcatctgtcatctggatttgccgcacttcagtgataaaattgtcatttggatactggt

SEQ ID NO: 19533 - DNA, 1359 bp, Zea mays
  Clone ID: LIB3150-045-F7_FLI
gcacacacggatcaatcacactcactcgcggcccggccattctcctgctcgtgcgtgctctgcccttttcaggcgatcgaccaaccaacttctcgtcactgccatggctctgctctccgacctcatcaacctcgacctctcgggccgcaccgggaagatcatcgccgagtacatctgggttggcggttccgggatggacgtcaggagcaaagccaggacgctgtccggacctgttgatgaccccagcaagcttccgaagtggaacttcgacggctccagcaccggccaagctccgggcgacgacagcgaagtcatcctttgccctcgggccatcttcagggacccgttcaggaaggggcagaacatactggtcatgtgcgactgctacgagccgaacggggagccgatcccgagcaacaagcggcacggggccgcgaagatctttagccaccctgacgtcaaggctgaggaaccatggttcgggattgagcaggagtacacccttctccagaaggacaccaagtggcctctcggttggccgctgggcggctaccctggccctcagggaccttactactgcgccgtcggagcggacaagtcctacgggcgggacatcgtggacgcgcactacaaggcctgcctctacgccggcatcgacatcagtggcatcaacggggaggtcatgccggggcagtgggagttccaggtcggccctgccgtcggcgtctcggccggcgaccagctctgggtggctcgctacattcttgagaggatcaccgagatcgccggcgtggttgtctccttcgaccccaagccaattccgggggactggaatggcgctggtgcacacaccaactacagcaccaagtcgatgaggagtgacggcgggtacgaggtgatcaagaaggcgatcggcaagctgggcctccggcaccgggagcacatcgccgcgtacggggacggcaacgagcgccgcctcaccggccgccacgagaccgccgacatcaacaccttcgtctggggcgtcgcgaaccgcggggcgtcggtgcgggtgggccgcgacaccgagaaggaaggcaaaggctacttcgaggaccggaggccggcgtccaacatggacccgtacgtggtgacctcgctgatcgcggagacaaccatgctgtgggagcccagccactccaacggcgacggcaagggcgccgcggctccttgatttgattctgcggagactgagctctgtgtgtgagccggcctgcgtagatggcaaatgggactgaccctgtcagaaacttgagatgaccataataatagctgcagtgtgctcgttctggggttggataagacccaagaacttttttt

SEQ ID NO: 19534 - DNA, 678 bp, Zea mays
  Clone ID: LIB3150-046-E6_FLI
gtccatgccatcactgctacccagaagactgttgatgggccctcgtctaaggactggaggggtggaagggctgctagtttcaacatcattcccagcagcactggagctgctaaggctgttggcaaagtgcttcctgtccttaacggaaagttgactggaatgtctttccgtgtcccaaccgtcgatgtttctgttgttgatttgactgttaggcttgagaagtcagcaacctatgatgagatcaaggctgcggtcaaggccgaggcagaaggtagcctcaagggcatcctgggttacgttgaggaggaccttgtttccaccgatttccagggtgacagcaggtctagcatctttgatgctaaggctggcattgccttgaacggcaacttcgtgaagctcgtgtcctggtacgacaacgagtggggatacagcacccgcgtggtcgacctgatccgccacatgaacagcaccaactaagatgaagaactcaaggtctggtgatacgagcgagttgtcttcttcccccccggagaaaagtgcttccgagaataaatttttttccatcggaatgtctgaaactatgttgggtgtatcctagtggttggttgagcattaatggctcatattttgtcaggtctatgtgtcgccgtgaaacttttaatcaaatcagttcactct

SEQ ID NO: 19535 - DNA, 494 bp, Zea mays
  Clone ID: LIB3150-047-C11_FLI
ttccgtgctcaccttcgagagatcaagttgctgctgcggtagtcccccaaccatcatcatgcagaacgaggagggtaagacggtggacctctacgtccccaggaagtgctcggccacgaacaggatcatcactgccaaggatcatgcctctgtccagatcaacattggccacttggatgcgaatggcctgtacgatggtcacttcaccacgtttgctctctctgggtttgtccgtgctcagggtgatgctgacagctcgttggacaggctgtggcagaagaagaaggctgagatcaagcagtagatcttgcacgtagttccaccagtaatgcactctcgagggatactgctctagctatgctttagctagggggggatgattctgatgtttggctgttcgtttgttggatgaccaggttttagtttgtctggccatgcttgggtcgcagcaatctgtggcaccatgaatatcattttgtcaacttattcttctc

SEQ ID NO: 19536 - DNA, 1747 bp, Zea mays
  Clone ID: LIB3150-047-D4_FLI
atccaggcgctcttctgctgcagcgccgcctctcgtcctcccggcgtcatcgtcgccgccctgatctccgcaggccggcgtgtggcggagatccatccgtgcttgaactgactccttccttagctacaagtacctattatcaaccatgtttggacgcatgccaaggaagagtagtaacaataccaagtattacgaggttcttggtgtgtctaagaccgcaagtcaggatgagcttaagaaagcatacagaaaagctgccataaaaaaccatcctgataagggtggagaccctgaaaagtttaaagagctgtctcaagcttatgatgttcttagtgacccggagaagagggagatctatgaccagtatggagaagatgcccttaaggaaggaatgggaggaggcagcagcagtgatttccatagccctttcgacatttttgagcaactttttccgggttctagcacctttgggggtggtagctcaagaggacgcagacaaaagcgtggtgaagatgtggtgcatactatgaaggtttccttagacgatctgtacaatgggacaaccaagaaactatctttatcgcggagtgctttgtgctccaagtgcaaggggaaaggatccaagagtggggcatcaggaacatgccatggttgtcgtggtgctggaatgagaacaatcacaagacagataggccttggcatgatccaacagatgaacactgtttgccctgaatgcaaaggatcaggtgagatcataagtgacaaggacaaatgcccaagctgtaaaggaaacaaggtagtccaggagaagaaggtgttagaggttcatgtggagaaaggaatgcaacataaccaaaagattgtattccagggtcaagctgatgaagctcctgatacggttacaggagacattgtttttgtcttgcaacttaaagaccatccaaaatttaagaggatgtacgatgacttatatgttgagcacacaatctctctcaccgaagcattgtgtggcttccagtttgttcttactcatcttgatgggcgacagcttctgatcaaatctgaccccggggaggttattaaaccaggtcaacacaaggccattaacgatgaaggtatgcctcagcatggccgtcctttcatgaagggccgtctgtttgttgaattcaacgtcgagtttcccgagcctggtgcgctctcccctgcccagtgccgatcgttggagaagatccttccgccgaaaccagggagccaactgtcggacatggagctggaccagtgcgaggagaccacccttcacgatgtcaacattgaagaggagatgaggcgcaggcagcagcagaagaagcaggaagcctacgatgaagacgaggaggaggatgctcaaccaagggtgcaatgtgcccagcagtaaaatccgtgttcgttggaactgttctccaaaagtttcagcaggattttttatccatctgatcatctcgattctttttggcaaaaatataatcgttttataaactttaaactgttagttccatcctagtgtcagggaaaaaatgagagcccggaatggcatgttccttgtttgaactgcaatgcgtgattggtgttagttaagctctgctccatgttattttgttgtacccgtgaaaaaggtatcatgttcatggtgtgctactatttttgatgtgtaagaaacattgagcttgctggtagtgatgatttgtgatgcaccctggggtgctggctc

SEQ ID NO: 19537 - DNA, 898 bp, Zea mays
  Clone ID: LIB3150-049-C9_FLI
caagatcgaggctgaactgagcaatatcttgccacgatattccttgataaggttcacatgctcttcgttcttacgggactcctccttttgttcaatggaagaacgaagagcatgtgaaccttatcaaggaatatcgtggcaagatcgaggctgaactgagcaatatctgtgatggcatcttgaagctgcttgactcccacctagtgccttcttctactgctgctgaatcaaaggtcttctacctcaagatgaagggtgactatcacaggtatcttgcggaatttaagactggtgctgagaggaaggaatctgctgagagcacaatggtggcctataaggctgctcaggacattgctctggctgagctggcacctacccatccgataaggctgggacttgctcttaatttttcagtgttctattatgagattctgaactccccagacaaagcttgcaacctggcaaagcaggcgtttgatgaagctatctctgagttagacagccttggtgaggagtcatacaaggatagcactctgatcatgcaactcctgagggataacttgaccctttggacatccgacctcacggaggatggtgctgatgagggcaaagatgccccgaaaggcgatgcaggcgagggacagtaatcttcggaggggggtgcaaagttgttcgagccccaatgttttagatgctctgtgctgtcgaagctgtgccgtgctattattgtagctgatttcgtctccattcacttcttttttcttgttagtaggctggtagtggtcgaattagtaccccattgctttgtgttgccgctagtccatgtggactggtattgttcccctggatttatttggcaagcgtgtccgtgctcgctctagcgttttattgagctttt

SEQ ID NO: 19538 - DNA, 756 bp, Zea mays
  Clone ID: LIB3150-049-D4_FLI
gaaaaatatccccaaaccctagctcccgatctcgatggcgaaccctcgcgtcttcttcgacatgaccgtcggcggcgccccggcgggccggatcgtgatggagctgtacgccaacgaggtgcccaagaccgcggagaacttccgcgcgctgtgcacgggcgagaagggcgtgggcaagtccgggaagccgctccactacaagggctccaccttccaccgcgtcatccccgagttcatgtgccagggcggcgacttcacccgcggcaacggcaccggcggcgagtccatctacggcgagaagttccccgacgagaagttcgtgcgcaagcacaccgcccccggtgtgctctccatggccaacgccgggcccaacaccaacggctcccagttcttcatctgcaccgtcgcgaccccttggctcgacggcaagcacgtcgtcttcggccaggtcgtcgagggcatggacgtcgtcaaggccatcgagaaggtgggcacccgcaacggctccacctccaaggtggtcaaggtcgctgactgcggacagctctcctagatctctctgatctggtctgttcggccgccctccctccgtcatcgtcgactccccctgcgtccgttcctttggatctgaataagatggtggtgatctgagtggtggtcttagtttatcatgtatcgctcgcagtttaatttagcggtttaggtgtggatctgtgaaccccatggcgcctctgcttgattcgtgtttcacctgtt

SEQ ID NO: 19539 - DNA, 1587 bp, Zea mays
  Clone ID: LIB3150-049-G3_FLI
cttttggcacagaccactacttgcgattcatgcttcggaagaaactacaagacattaagaatgatgataagatgattcaagctgagggtgtggagtctctttctgaatatgagcttcgacaagcatgtcgtgagcgtgggcaccttggtttgttgtcaacagaggagatgcgtcaacagctcagagactggctggatctatcactcaatcattctgtgccatcgtctcttctaatactctcaagagcttttactgtatctggtaaaatgaaacctgaggaggccgttgtagcaaccttatcttccctgccagatgaagttgtcgatacagttgggactgtactgccttctgaagattctgtttcagagaggaagagaaaattggaatttctggagatgcaggaagagcttatcaaggaagaggagaaaaggcaagagaaagaagacaaggcaaaactggaggagccaaaggctactgaagaagatttggctttgaaggaaatgactgagcctactgttagggagaaagaggaactaaagaaagcaaaaacccacgataagaaagagcagctttgtaatatcagtcaagcattggctgtgcttgcatctgtttcttctgttaccaaggagcgacaagagtttttaagccttgtcaacaaggagatagaactatataataacatgctcgcaaaggagggtacagatggtgaagaagaagccaggagagcgtacaaggctgctagggaggaatcagaccatgctgcagaggcagctgtgggagaaaaggtctcttcagctttgattgatagggttgatgctatgcttcaaaagttagaaaaggagattgatgatgttgatgctcgaattggcaatcgctggcagctgctggatagggactgcgatggcaaggtgactcctgaagaggtagctgcagctgcaaattatctcaaagacaccataggagcagaaggcgtccaggagcttatcagcaatctttctaaagacaacgaagggaatatccttgtggaagacattgtgaagctggcgtcacaaacagaggaaaacaacgaagctgaagaaactgcacgatgatttggaatagcagccacattcttggctcttaaaactcgacggtccattccttttttaaaaggaaccgcacataataaagctagttcctggcagtctcatgcaaaaatcaccaagcaggatggtcattctttttgttctgactggcggctgcagagaaaattgtatcctgctgttgaaagatattcatttatacagttaagtcccagcacaaccgatcgttaggttaggaattctgtccgaaatggcaacttgcatttcaaacgtctgccatgaaaatgagaataaattcggcgggctctacagatttttcatctattgtctgaacaaaagtataggcatcaaataagtatctgggtaagtttatactatttgaataagaatcagctggatttgtttaaattcttaacaagaccgttttagcagtttgactatatggtcaatcaaaacactattttgtattgtatattgtactatgtgcacttttgcagtgagattt

SEQ ID NO: 19540 - DNA, 1049 bp, Zea mays
  Clone ID: LIB3150-051-C10_FLI
agcccccaaaccccaatcaccctccggagcgtcgcagcgatcccacccctccttctccccttcacccatccatggcggagcgcggcggcgagcgtggcggcgagcgcggcgggtttggtcgtggcttcgggcgtggcgggcgcggcgaccgtggcgggcgccgaggcggccgtcgcggcccgcgtcaggaggaagagaagtgggtccccgttacgaagctcggccgcctcgtcaaggagaacaggatcaccaagatcgaggagatctacctccactcgctccccgtcaaggagcaccagatcgtcgagaccctcgtgccggggctcaaggacgaggtgatgaagatcacgcccgttcagaagcagacccgcgccggacagcgcacccgcttcaaggcctttgtcgtcgtgggcgacggcgacggccacgtcggcctgggagtcaagtgcgccaaggaggtggccaccgccatccgcggcgccatcatcctcgccaagctctccgttgttcccgtcaggagaggctactgggggaacaagatcgggcagccgcacaccgtgccctgcaaggtcaccggcaagtgcgggtccgtcaccgtgcgcatggtgcctgcgcccaggggttctggcatcgtcgccgcgcgcgtgcccaagaaggtgctgcagttcgctggcatcgaggatgtcttcacctcgtcccgtggctccactaagacccttggcaacttcgtcaaggcaaccttcgactgcctcatgaagacctacggcttccttacgcctgaattctggagtcagaccaagttctccatgactccgttccagcaatacacggacctgctggcgaagcccaccaagggtcttgtgcttgaggccccaaccgagacagtagaggcttaggatggtttgtgctgtctaaatgcactttctatgttatagttaagaactgttgtcaactttgggttttgttttgccctggatgatgttctttgttgtcaagttttggatataacagtactcttttttaatcagtgaatgctacataatcatctc

SEQ ID NO: 19541 - DNA, 1105 bp, Zea mays
  Clone ID: LIB3150-051-D9_FLI
ctgtagctagctgatctccctccgaaactctctgctcgcccgctgcctgctggaagcttggcgcggtcccggcggcggcattctccggcaatggggtgcaaggcgtgcgacaagcccaagcccagctaccgcaagggcctgtggtcgccggaggaggaccagaagctccgcgactacatcctcctccacggccacggctgctggagcgcgctccccgccaaagccgggctccagcggaacggcaagagctgcaggctgcggtggatcaactacctccggccgggcctgaagcacggcaccttctccccggaggaggaggagacggtgatgagcctccacgccacgctcggcaacaagtggtctaggatcgccaaacacctgcctggcaggaccgacaacgaggtcaagaaccactggaactcgtacctcaagaagagggtcgagggacccagcacgccgccgtccgactcagacgactcgcattgcgccaagcccggccggggcggcagcacggcgcgggagacgggagacgaccgcccggcggactactccggctcgtcggagccgcgcgagccgtcgtcgtcgcccgacacgagctgcctgacgggcacgcccaaggtcatgttcgtggactggctcgacatggactgcatgggtggtggtggtggtggcccgccgggcgcggcggcagcggcagcggcacctggtctgggcgctgctgcgggcgtggccagggtcagcacgggcgatgatcagatgacgatggatgatgggtcggcgtccggtcgtgccgacgtgtccctgcacggtacgttcggtgacagcggcggcgccggctgctgggagttccacgagagcttcgatcagatgcaggcggccggcttctgcgacctgctctcctccattggcgagtactacttcggactcgactaggctctcggccctggttggtgatcggtcgttgctcaaaggatttgcgcgttttttttttaactttgttagaagtttcgatggatggctttgtctgtgcttgtaaattgttgtcgtgtacggtatagatagagcaattttaaaggcagataaaagtcaaggacggtgacgagtc

SEQ ID NO: 19542 - DNA, 695 bp, Zea mays
  Clone ID: LIB3150-051-E2_FLI
gctctcccctcacctctctcctcccttccctcgccttgctcctctctgtcccgaccgagcagcagccgcgagcggatgtcaagaatcactggcatgtcgtcatggcacgtcgcagccgcgagcgctccaggctccaggggaagcggcggcctgttcaggtcgccggtgcttgcacctcctacttcactgttcaagaactttggcacagccactatgagtaagggcttgatggggccgagttttgaggcatcaggacggtacagctacagcggcaagcagccgacgacacctctctccatcatcttctcctctccaagagaagcgctaggcatggatatcggccaccatggccgccatgagcaccaccaaaaggagtatcacgccagcgacatcgccgatgagccactgaagaagaaggacgtgtcgttctttgatttcctcggcgtcggtgtgtcctcgtaatcaataataatattgcattcctgaaataccaatcgatgttgatcaatcaagtgtattgatcagtgtttgttttttaattattagggcgaactgcatgcggctgacaagtattcagggttagagttcatcgtcattgatggttacagtgttctgatcatcatgtgctgattcatcagtcaaataaggctccagacacatggctatttaatatttatttaaaagttttttttact

SEQ ID NO: 19543 - DNA, 1485 bp, Zea mays
  Clone ID: LIB3150-052-A2_FLI
ctcgcaaaccctatccccgaccccgattcccctctcgcctctcgatctctggcggcggcgccgtcgttttcccccatcggctcagcgactctcgagtcccgacctcgacgctaccggctcagcggctctggtgctccgtcctccactcctcctcctccttcatccattcctccggtgcaaggtccgtctctggtgtaccgcgccgtcctgttcggcggcctcagcaacgacgtcatctcggccggagccctggggatcacgaccgcacagctggtgcgcatcaacgacctccacagccggacggtgcaccaggagaacgccctgtcgaaccgactcgccaccctgcaggaagacatcgccaaccgcccgctcctgcccatcgtgcggcagcgcgagctcgccaccgcgacacgactgggagctgctgcgagcggaagctgcgacggcgcggcacgacggtggcttagggcggcacggctaggagaaccagagccggtattgtcgaggcggtggacaacctgacgctgcgtcggttcctgcgcgcgcgcgaccacgacgtggacaaggcctccgccatgttcctcaagttcctcaagtggcggagggaggcggcgcccggcggctccgtgccggaggagcaggtgaggagggagctgtcgcaggacaagctgtgcatgggcggcgtcgacagggccggtcgccccatcctcgtcgccttcgcggccaggcacttctccgccggccgtgacatggcagagttcaagagttttgttgtctacttcttcgacaagatctgtgccagaatccccagagggcaggagaaattcctctgcatcgttgatctcaagggctgggggtactcaaactgtgacgtccgggcatacattgccgctatagagatcttgcagtatttctacaggttaacaaggtacatacaaagaaggcggctgctcccaagattgctaaacaagagtccagtgatgatgacactagcgacgagacctttgaatctgatgagttttcagagtttttagatgccaattcatcttctcattaaggaacctacaaagaagcctgctgctaaacccttggctgcagttgcaaaaaatggttcgaagacggtcaagcaagagagcagcagcgatgaggacagttctgaagatgagtcggatgacgacagtgatgatgtgagttgaagtttcctcggcgtccctgcatcgcttccaccagccctccccacacgcggcgacagggtcgtcgtcgtcccggctccgcgtcggccacacccgaacgaccgtctccatgtcgtgccgtctccagttatgcgagcgaggctggataaggtcgtggggttccaacaaggtggtgcagctccattcgtccctccacctcacccgccggccatctctcgatttctttttgtgtgctcagttttttctttgtgtgtcatgagtttcagaacttgattgggatggtttttgtgcc

SEQ ID NO: 19544 - DNA, 1253 bp, Zea mays
  Clone ID: LIB3150-052-F2_FLI
cctccccaaaacacatcctgcgatcctcgaagcctccgccgagcatcgatcatgtcggcctactgcggcaagtacgcggatgagctcatcaagaatgctgcctacatcggcacccctggcaagggtatccttgctgctgatgagtcaactggcaccattggcaagcgcctttccagcatcaatgtcgagaacgtggaggagaaccggcgggctctccgtgagctcctgttctgctgccctggtgccctccagtacatcagcggtgtgatcctcttcgaggagaccctctaccagaagaccaaggatggcaagccttttgtcgatgtcctcaaggagggaggcgtcctccctggcatcaaggtcgacaagggcaccattgaggttgttggcaccgacaaggagaccaccacccagggccacgatgacctcggcaagcgctgcgctaagtactacgaggccggtgcccgctttgccaagtggcgtgctgttctcaagattggccccaacgagccgtcacagcttgccattgacctgaatgctcagggtctggctcgctacgccatcatctgccaggagaacggtctggtgccaattgttgagcctgagatccttgttgatggccctcatgacattgatcgctgcgcttacgtcactgagacagtccttgctgcctgctacaaggctctcaacgagcaccatgtcctcctggagggtaccctcctgaagcccaacatggtgactcctggctccgactctaagaaggtgacacctgaggtgatcgcccagtacaccgtccgtaccctccagaggaccgtccctgctgctgtgcctgctgttgtcttcctctccggtggacagagcgaggaggaggccaccctgaatctcaatgccatgaacaagctcagcaccaagaagccatgggccctgtccttctccttcggccgtgccctccaggcgagcaccctcaaggcctgggctggcaaggtggagaacgtggagaaggctagagcggccttcctcgccaggtgcaaggccaactccgaggctaccctcggcacctacaagggtgatgctgccgccgacaccgagagccttcacgtcaaggactacaagtactgagttgcttctctttgcgatcccgttgttttggaactcctgcctgcgagtaggttgctgagtgttgtttgcttgttagagcttttatattcggacatgaaaaaaacatgcttcctatgtggatgatggttatcttt

SEQ ID NO: 19545 - DNA, 673 bp, Zea mays
  Clone ID: LIB3150-052-G3_FLI
gcgtcgagcggcggcggcggcgctcgacgcccaccgcgcagccatggcggaacagactgagaaggctttcctcaagcagcctaaggtgttcctcagctcaaagaaatctggcaagggtaagaagccaggcaagggtggcaatcgattttggaagagcattggccttggtttcaagactcccagggaagcaattgaagggacctacattgacaagaaatgtccattcactggaaccgtttctatcagaggcagaattattgctggaacatgccacagtgctaagatgaacagaaccatcattgttcgcaggaactatctccactttgttaagaaataccagaggtatgaaaagaggcactccaacattccagctcacatctccccatgcttccgtgtgaaggaaggcgaccatgtcatcattggccagtgcaggcccctatcaaaaactgtgaggttcaatgtcgtcaaagtcattccagctggatctgctgctgccggcaagaaggctttcaccgcagcctgagtttaagactatgttccatgagtagtttatatagtgatgtctttttttgttaaaaaaactgccttctaggcttgtgcctttcgactatggtttggagattgttcccatcttaatgaagtccaatcatctgaacatgttactgtttattgt

SEQ ID NO: 19546 - DNA, 504 bp, Zea mays
  Clone ID: LIB3150-052-H4_FLI
agcgcattgccgcagcacagcatcacgagcaaagtccccgtgccagcgaggaaacaccgatccgattcgagcgggagcgcgcgtaccagtggggaacatctggttgatgtattcgagagcgctggacttgtccatttctccggcgagatctctgccccgcgcgcccgcgctcggaggatctggcgaggtctagaaggatctggaaggggagggtggtgcggaggagctgatctggcggcgaacgggcgccgggcttcccctcgcgcacgcgaggggaggtggtggcgagagaggtggaatcgccggcggatactactccccgtcgttggcagctcggtggttcaacgggtgggcgcggagtccaatagcccgcttcctattatgagagttgtaaaagttgaagtgttcacttgttgtgattacctgccgctgcttgagcacattgtatagttattattagaacttttgctagtaaggttccatttatatttgaatatagagtat

SEQ ID NO: 19547 - DNA, 1333 bp, Zea mays
  Clone ID: LIB3150-053-A6_FLI
aagacaatcacccttgaggtggagtcttcagacaccattgataatgtcaaggctaagatccaggacaaggagggcatccctcctgaccagcagcggcttatcttcgccggcaagcagcttgaggacggacgcacacttgctgactacaacatccagaaggagtcaaccctccacttggtgctgcgccttaggggaggcatgcagatctttgtcaagaccttgactggcaagacaatcacccttgaggtggagtcctcagacaccattgacaatgtcaaggcaaagatccaggacaaggagggcatcccacctgaccagcaacgtctcatctttgccggcaagcagttggaggatgggaggacccttgctgactacaacatccagaaggagagcaccctccacttggtgctgcgtcttaggggtggaatgcagatctttgtgaaaacccttactggcaagaccatcactcttgaggtggagtcttcagataccattgacaatgtcaaggccaagatccaggacaaggagggcatcccgccggaccagcagcgtcttatctttgccggcaagcagctggaggatggacgcacccttgcggattacaacattcagaaggagagcaccctccacctggtgctgcgcctcaggggaggaatgcagatcttcgtgaagacattgactggcaagaccatcaccttggaggttgagagctccgacaccattgataatgtgaaggccaagatccaggacaaggagggtatccccccggaccagcagcggctgatcttcgccggcaagcagctggaggatggtcgcaccttggctgactacaacatccagaaggagagcaccctccatctggtgctccgcctgaggggcggtatgcagatctttgtgaagaccttgactggcaagaccataaccctggaggttgagagctctgacaccatcgacaacgtgaaggctaagatccaggacaaggaggggattcccccagaccagcagcgtctgatcttcgccggcaagcagctggaggatggtcgcacccttgcagactacaatatccagaaggagagcaccctccacctggtgctccgtcttcgcggtggttattaagccatcagtcgttgaagctgctgctgtatctgggttatctagtgtctctgccattgcccatggatggtgctgtctttcaaagtatttgtatggtttgtgtcgtgagtcgtgactgagctggtttcatggaccagttgtgttctcgttacccaaaactatcgtgcgaccgcatatggcttaatcatgaataaatgttgtttgaatttaaaaaaaattt

SEQ ID NO: 19548 - DNA, 1322 bp, Zea mays
  Clone ID: LIB3150-053-E9_FLI
aagacaatcacccttgaggtggagtcttcagacaccattgataatgtcaaggctaagatccaggacaaggagggcatccctcctgaccagcagcggcttatcttcgccggcaagcagcttgaggacggacgcacacttgctgactacaacatccagaaggagtcaaccctccacttggtgctgcgccttaggggaggcatgcagatctttgtcaagaccttgactggcaagacaatcacccttgaggtggagtcctcagacaccattgacaatgtcaaggcaaagatccaggacaaggagggcatcccacctgaccagcaacgtctcatctttgccggcaagcagttggaggatgggaggacccttgctgactacaacatccagaaggagagcaccctccacttggtgctgcgtcttaggggtggaatgcagatctttgtgaaaacccttactggcaagaccatcactcttgaggtggagtcttcagataccattgacaatgtcaaggccaagatccaggacaaggagggcatcccgccggaccagcagcgtcttatctttgccggcaagcagctggaggatggacgcacccttgcggattacaacattcagaaggagagcaccctccacctggtgctgcgcctcaggggaggaatgcagatcttcgtgaagacattgactggcaagaccatcaccttggaggttgagagctccgacaccattgataatgtgaaggccaagatccaggacaaggagggtatccccccggaccagcagcggctgatcttcgccggcaagcagctggaggatggtcgcaccttggctgactacaacatccagaaggagagcaccctccatctggtgctccgcctgaggggcggtatgcagatctttgtgaagaccttgactggcaagaccataaccctggaggttgagagctctgacaccatcgacaacgtgaaggctaagatccaggacaaggaggggattcccccagaccagcagcgtctgatcttcgccggcaagcagctggaggatggtcgcacccttgcagactacaatatccagaaggagagcaccctccacctggtgctccgtcttcgcggtggttattaagccatcagtcgttgaagctgctgctgtatctgggttatctagtgtctctgccattgcccatggatggtgctgtctttcaaagtatttgtatggtttgtgtcgtgagtcgtgactgagctggtttcatggaccagttgtgttctcgttacccaaaactatcgtgcgaccgcatatggcttaatcatgaataaatgttgtttgaattt

SEQ ID NO: 19549 - DNA, 2064 bp, Zea mays
  Clone ID: LIB3150-054-B10_FLI
cgcacagccctaggcaccaaactgcccacacgcacagccgcggagccgccagagcctgacgctgccgccgtcggccgtcctccgccctccagttcttaaggaaagatgagtttgatatcccagaacgcggtccagaagcgctgcctcagaaaaagtgaagctgataattgcaatgatgaggacattggctctccgacctctatagatgcagaagttgggaaggaagcaaaattgaagaatcacaataaggaaaggaagaagaaaaagactaagttgttggaatcccagcagaacaaagaggaagaggagatgcggcagctggagagctcattgtttggttccctttatgctccactggagtttggcactgaggtaggggctgcagtagctcctgaccgggatgcgcctttgtttttcacagataggtctgctggtggtggcatggattattttcctacatacgaggaggatatggcccatgaagatgaggaagacatggtgggtatcaagaggaggaagcctgtatgggtggatgaggaggaagaaatgacagaggtggacattgtgaaggttccaaggttgaggaagctgagaaaagaggaagatgagcatttgatttcagggaaagagtatgaggccaggttgcgtggtcagcatgcaaaattgaacccctttactggctgggctgatatggaccagaaaacttctcttcctgctgcgtcagatggtgagtctgatgatgagggttgtgtcgatgatattcttcggaataatgatgagcttgttgccaaggatactgtcaagctcttacctgggatgctggaattctcaaggctcgttgatgccaatatccaggatccatcaagtggtcctatcaattcagtgcagtttcataggaatgggcaactgatgcttgctgcaggtttggacaagcatctgaggtttttccagattgatggaaagagaaaccccaagatccagagcatatttattggggactgtccagtacacaaggcttcttttctacccgatggctctgaggtgatcctatcaggcaggaggaagttcttctactcatttgacctggtgaatgctgctgttagcaagattggacctttgacgggacgcgaggagaaaagcctggagacctttgagatatcacctgattcgagaaccattgcttttgtcggcaatgaagggtacatccttcttatttctgccaagacaaagcagctcatcacaaccctcaagatgaacggaagcgtgcgttcgctggcttttgcggatggtgggaaccagctactgagcagcggtggagatggccatgtttaccactgggaccttggaacaaggaaatgcatccacaaggcaacagatgacggttccctggctggcctctcgctctgcacctcgcgggatagctctttgtttgccacaggctccagcagcggcatcgtgaatgtgtacaagagggacgattttctcggcgggaagaggaagccgctgaagacgatcgagaacctgactactgacatcggcgagatgaagttcaaccatgacgcccagatcctggcgatcagctcgaggaaagagaggaacggcatgaggctcgtgcacgtcccgtcgttcagcgtgttccagaactggccggggcctcggtttagtctccactatccacggtgcctggatttcagccccggcagtggcttcctgtccgtaggacacgcaggtggaaaggtcctgctgtacaagctccaccattacgagaatgcatgatgaggctaggatggttgcttggcgaaaacccattcttgacattatatttgtactcatgaacactccaatactccatgaatcgagtgagtgtatgctggtccgttccagtcattgtgcctttctatttggtgccgctggtgtcaatgctttggtgcaggctggcgatctcgtacatgtcttttactcttttgtagtcgtacgcaagtcgttgtgctgctgtttgctttattatagtggtggactgagttggttgcagaagtttagtttttttttggcaagagattgcag

SEQ ID NO: 19550 - DNA, 1064 bp, Zea mays
  Clone ID: LIB3150-054-D11_FLI
ctttgaaatgccgaaagagagccgttccctgttgccgaaagcccgaaactagtcttccctcctgctggcggcgtgcggagggccggaggccgggtcgacaagaggagatgacgttggcggcggggctgggttacgccctgatcgcgctgggccctgccttctccctcttctccggcgtcgtcgtcaggaagcccttcctcgtcctcaccctcctctctagcaccttattttggcttataagtttgatagtcctctcgggaatatggagaggatttcttcctataaagtcaggagcttggtgggcatatgtgattctgatccttacatctgtcgcattgcaagaaggcactcgtcttgtgttttggatgctttacaagaaaatggaagagatgctagatgcttttgctgatagaatatctaagccacgtcttagattgactgacaagatgctgatttctttagctggtggtttaggccatggagtggctcatgcagtctttttctgtctcagtcttttgactccagcgtttggtcgagccacattttatactgaaaggtgctcaaagctgccatttttccttgcgtcagcccttattgcacttggattcttggtcatccatacattctcaatgattattgcttttaatgcatatgacgagggaaagaaaagtgatcaagtctttgttccagtaattcatttggctgctgctgcgatgacacttgttaacctcgccccaggaggctgtctcattggtaccccgctgttgttggtcatggctgcgctgaccttgcagcactgctggcgagtggcatgccggagattaactgagcaccggcatcagcagcataacagcagctagttgtaggcttgccatcatgtaattttcccatgtatgtttgactgaatcttctgatgtactatgacagtaaaaatcaggttctgagtcgtgtcgtgtagttagacgaggggttattatagtttgactcgatgttttgcatatgcagtatgtcctccctttcctggagcacttttatatctatctatctatataaccatgattgtt

SEQ ID NO: 19551 - DNA, 614 bp, Zea mays
  Clone ID: LIB3150-054-G11_FLI
atatctcctcgcattttccttgggaccgattgcctatccccctcccaaccaaagaccgatggcgcccaaggccgagatgaagcccgtggcgaagaatccggtggaggaggagcccgcggccgagaagaccaccgccggtaagaagcccctgcggacaagctgatccccattatcaagtccgccggcatggacggctacgagggcaaccgtggcaagaagaagggcaagaagagcgtggagacgtacaaaatctacatcgttgaaggtcgctacaagcaggtgcacccggacatctgcatctcctccaatgccatgtccatcataaactcattgatcaacgacatcttcgagaagctgtccggagaagccggcaagctggcgcgctacaacaagaagcccaccatcacctcccgcgagatccagacctacgtgcgcctcgtgctccccggagagctcgccaagcacgccgtctctgagggcaccaaggccgacaccaagttcacctcctgctaggcttgcacgctcgacctttgtaggactttcttgagtagatgttcgccttgtgtcgtagttatgatgtgctagtttgtctgacgacgctgctctgcttctgt

SEQ ID NO: 19552 - DNA, 1059 bp, Zea mays
  Clone ID: LIB3150-081-A9_FLI
cgaggattacaggttctatgccatttcagccgaataccctgagttcagcaacaaggataagaccctggtgctgcagttctctgtgaagcacgagcagaagcttgactgcggtggtggctacgtcaagttgctgggtggtgatgtagaccagaagaaatttggtggagacacatcttacagcattatgtttggaccagatatctgtgggtacagcaccaagaaggttcacactatcctgaccaaggatggcaagaaccacttgatcaagaaggatgtgccttgtgagactgatcagttgactcatgtttacactttgatcatccgtcctgatgcaacatacagcattctcattgataatgaagagaagcaaactggcagcatctacgagcactgggatattcttccccctaagaaaatcaaggacccagaggctaagaagcctgaggactgggatgacaaggagtacattcctgaccctgaggacaagaagccagagggctatgatgatattcccaaggaaattcctgaccctgatgctaagaagcctgaggactgggacgatgaggaagatggtgaatggactgcccctaccattcccaacccagaatacaagggaccatggaaacaaaagaaaatcaagaacccgaactaccagggtaaatggaaggcacctatgattgacaacccagattttaaggatgatccatacatttacgccttcgacagcttgaagtacattggcattgagctgtggcaggttaaatcgggcactctgtttgacaacatcatcatcactgatgaccctgcgttggccaagacttttgcagaggagacttggggcaagcacaaggaggcagaaaaggctgcttttgatgaggccgagaaaaagaaggaagaagaggatgccgccaagggtggggatgatgaggatgatgacctagaggatgaggaagacgatgagaaggcagacgaggacaaggccgactctgatgccgaggatagcaaggattctgatgatgagaagcagcacgacgagctctagatggcgaggatgatgtt

SEQ ID NO: 19553 - DNA, 1558 bp, Zea mays
  Clone ID: LIB3150-081-H5_FLI
gagaaagcaaaagctgaaaaacttattgaagaactagaaaaggcatctccgctttcaaaggctgaagttagagagactatatcagaagatgagaggtacatgttgaggaaagttggattgaagatgaaacaatttctgctgctaggtcggaggggagtttttgacggaactattgaaaatatgcatcttcattggaagtatcgagaacttgtgaagattatatgcaaagaacaccgccttgaagatgtggaatacgctgctcgaactctagaggcagagagtggcggtattttggtggcagtggaaaaagtgagcaaagggcatgctataatagtatataggggaaagaactacaagagaccatcaaaactcaggccaaaaactttgttgagtaaaagggatgctttgaagcgttccctggaaaaccaacgttgtaagtcccttaaggttcatgtacttaagctgtcaaagaacattgacgacttgagggatcagatgaattccagctactatcacaaggacatgcatgatcctagtgtcaactctgtaacactacagcagcaagacgaagaaatgcctgaagttgctcccatgagttcagagcctgaggttgagaagtggacatcagttgagattgatagagccttagatttaacaaagtctggagtccctgtggaagatatgcagagcaaagtctgtttcaacaagcttgaagatgattcttctgcgactgcaggtccatgtctgactgggagttcaattgcagcttcatcctataatctgatcagacatcaaaaccaacgtagctctactgtgacatccagtcctgatggtcgctacgaaggtgcaccttcaaaagtcgtggatgcgccaaaattggatgcggaatctctttctgtatcgcctttgagagccgcaccgctctcgaatcaagaaaggcttgtgctaaggaagcaagcccttcaaatgaagaaaagacctgtactttccatagggaggaacaatgccatcaccggagttgcaaaaaccataaaaacgcacttcaagaagcaccctcttgctatcgtgaacatcaagaacagagcggacgggactccgattcagcagctgatatcggaactcgaggaggcgacaggatcggtgctagtgtcacgagaaaccaacaaagtgatcttgtacagaggctggggcgcagaagtggcccagaaaagctcaagggaaagtagcacagacgagggcgaaaaggaggtcatatcacctcagctccttgaagctatcaggttagagtgtggactgctccctgccgattcgggatagttggtccggataaccttcccccacagatcccgtgtttcgaaaggatcgtacaatgattgcccgcggatagatccgaagctgcataaacgcacgcaaggtgtgaaaccctccctgctcacgggcatagttgtaagagaagaacaggggcggcggcaggggtattcttaggtattccatgggatgcccttttttgtgaaagaaaagaatatgtattgtctatactaaaatatttagttctcct

SEQ ID NO: 19554 - DNA, 1829 bp, Zea mays
  Clone ID: LIB3150-082-C2_FLI
gggcctatgtccggcagcccctccgcagtcggcgccggcacaagccctttaggtcggacacgacgccgcgtagtcccgactacgtaggcaggttgccggcctccgcctccgcctccggcccttcccctgcgccccgactgagtcgctgctgcagccgccaacttcacccgcggcgagctcaccacagccctccggaagtttgtttcaggggctatcaacttggaagatggccgatgaggaacaaaccccaagctctaggaagagggttgcaggtacccaaatcaataaggataatcctgagcctgatgatgacgaaccagagcaagagatgggtacatttaagaaatctactgaggaagttatggcaacccggagaattgtaaaggtccagccttcagatgttaaaggtgacgagggatgcaatggtactgggaaaaatactttgtctgtgccagacaagaatgcaggctctggtgtaaatactgactccggtgccataactgaagcaccacctcaacctgttgaaaccagtgagaaggcagaaggcacagaggctgaatctggtggagacaaagtggtagctggagaacccaacgaaggtagttgcatgccatctgaagttcagggcaaaacgaaagagggagatgctgaagaaaaggaaggggcagatggagctggaaataatggtacagttagcaaggatgatactgagaagaaaggtggaggtgaatcggagaccaaggattgcttgtctgatgagcagagagatgctggcaaaattagcaaggataaatctgagcagaaagatggaggtgaatcacatcagaaagatgctgataacaaagggcagacatcatcagcaacatcccttttctcgtttacaaatctgtcaagtggccaaaatgctttcaccggtctgactggaactggattttcaagcacgtcattctcgtttggctcagcctctacagatggcccaagtactggtcccctgttcgggctgaaagctgatggttcttcgttcccttcctttagtcttggtgctgccagcaacgggagttccgccacagtgcttgctacctcagcagaagcacccaagaaatttgctatggcagaaggccctgtcgaaaccggcgaagaaaacgagaaggctgtatttactgccgattctgccttgtatgagtacctagatgggggctggaaagaaagaggaaaaggtgaactgaagctgaacgtccctgtatcctcctccggcggcgagagagcccggctcgtcatgcgggcaaagggcaactaccgtctggtcctgaacgcgagcctctacaacgacatgtcgctcaaggacatggacaagaagggcgtgacgtttgcctgtatgaacagcattggggagtcgccgagcagcctggccacgtttgctctcaagttcaaggacacagccaccagggaggaattcaaggacgcggtggagtttcacagggcaagcaaagcaccggacgagccgctgaaggcgcccgagaactcttcgaaggcagcagaagcagaagcctgaagctgcactcgggtcacgcttactcgttttttgtagagtccaggaaggagctgagagatactttctgtcattgccttcttaagaatgttacgttatgacatgatgtcctgagcactgccactggtgctgttgttggaacagtgggtagccttgacgaactttcattagctacagtcctaatctagagttctggagacgagactcgttagatttattcgcttgtcttgtgctccgttatgtttgttctatcggttaagctatgcgtcatgtgttatct

SEQ ID NO: 19555 - DNA, 1416 bp, Zea mays
  Clone ID: LIB3151-022-D3_FLI
gatcgatcgccacagccaacaccacccgccgaggcgacgcgacagccgccaggaggaaggaataaactcactgccagccagtgaagggggagaagtgtactgctccgtcgaccagtgcgcgcaccgcccggcagggctgctcatctcgtcgacgaccagtggattaatcggcatggcggctctggccacgtcgcagctcgtcgcaacgcccgccggcctgggcgtcccggacgcgtccacgttccgccgcggcgccgcgcagggcctgaggggggcccgggcgtcggcggcggcggacacgctcagcatgcggaccagcgcgcgcgcggcgcccaggcaccagcagcaggcgcgccgcgggggcaggttcccgtcgctcgtcgtgtgcgccagcgccggcatgaacgtcgtcttcgtcggcgccgagatggcgccgtggagcaagaccggcggcctcggcgacgtcctcggcggcctgccgccggccatggccgcgaatgggcaccgtgtcatggtcgtctctccccgctacgaccagtacaaggacgcctgggacaccagcgtcgtgtccgagatcaagatgggagacgggtacgagacggtcaggttcttccactgctacaagcgcggagtggaccgcgtgttcgttgaccacccactgttcctggagagggtttggggaaagaccgaggagaagatctacgggcctgtcgctggaacggactacagggacaaccagctgcggttcagcctgctatgccaggcagcacttgaagctccaaggatcctgagcctcaacaacaacccatacttctccggaccatacggggaggacgtcgtgttcgtctgcaacgactggcacaccggccctctctcgtgctacctcaagagcaactaccagtcccacggcatctacagggacgcaaagaccgctttctgcatccacaacatctcctaccagggccggttcgccttctccgactacccggagctgaacctcccggagagattcaagtcgtccttcgatttcatcgacggctacgagaagcccgtggaaggccggaagatcaactggatgaaggccgggatcctcgaggccgacagggtcctcaccgtcagcccctactacgccgaggagctcatctccggcatcgccaggggctgcgagctcgacaacatcatgcgcctcaccggcatcaccggcatcgtcaacggcatggacgtcagcgagtgggaccccagcagggacaagtacatcgccgtgaagtacgacgtgtcgacggccgtggaggccaaggcgctgaacaaggaggcgctgcaggcggaggtcgggctcccggtggaccggaacatcccgctggtggcgttcatcggcaggctggaagagcagaagggccccgacgtcatggcggccgc

SEQ ID NO: 19556 - DNA, 1254 bp, Zea mays
  Clone ID: LIB3152-046-B11_FLI
cgaagtctgccccgctcttcggcctcgtcccttctctccaggtgagcgctggatgaacctctgctcggctttctgcgttgcgctaatcgattgctggatggtcgccagtctgatttgatgaaacagaagttggggaaattgaggatctccttagggccatggatgtagatgatgtgctcagtaacttgcgtgttgttggtgtgccaacaaagagtgcaatttacatatggggttataaccacagtggccagactgcccgaaagggcaaggaatgccacttgaggatccccaagagcctccctcccaaactattcaaattggggaatgggaagagcctcaggtggaccgatattgcatgtggccgtgagcataccgctgcagttgcttccgatggatcactgttcacctggggtgctaatgagtttggccagttgggagatgggacagaggacagcgcgaaagagcccaagaaggtcaagtcattggagactgagtttgtaaaatcagtatcctgtggcgcacattgtacagctgccgtcgctgagcctcgagaaaacgatggcacggtatcgaaaagcaggctttgggtttggggacaaaatcagggttcagattaccctcgtctattttggggagctttcacaccaaacacagtgattaagcaagtttcttgtggagctgttcatgtcatggctctatccgaggatggtctactgcaagcatggggctacaatgagtatggtcagcttggcagaggtcgcacttctcaaggacttcagggagctcgtgtgttaaatgcttatgcaaggttccttgatgacgcccccgagcaagtgaagattgttagagtgtcatgtggagagtaccatacagcagctatatctgaaaatggggaggtgtaagtccattagtcatcccaagggagctgttctctgctgccagtgactgttgtatggtttctcacatgacaacatagaagcatttggaatattgaagactaaccacgactaactatagggctaactgcaaagaaaggaagtaaatacatttatattatagatctcatattgatcaactaatctcaatatggcgtcagggttactctaaatagctttctgctatttaagatctttgtgcacatagatcgaagtgggccttctcttgagcatcctagtgtcttagtgaatgcaaagaaatgtgaagaattaaatggatgttgttatatcattattatagttgaataacttgtcaatc

SEQ ID NO: 19557 - DNA, 754 bp, Zea mays
  Clone ID: LIB3152-046-D1_FLI
ccgccgcctccgacatcgtcccttcgtccccacgagcaaccgataatccgccggcgttgagatgttggtttatcaggatctcctatctggcgacgagctcctgtcggattcattcacctacaaggagctcgagaacggcgtcctgtgggaggtcgagggaaagtgggtcacccaaggtcctgttgatgtggacattggtgccaatccatccgccgagggtggtgaggacgaaagcgttgatgacacagctgtgaaggtggttgatattgttgacacattccgtctacaggagcaacctccttttgacaagaaatcatttgtgtcttacatcaaaaaatacatcaagaatctcactgctgtgttggagccagagaaagcggatgagttcaaaaagggtgtcgagggtgcaaccaagtttctccttagcaagctgaaggacctccaattttttgttggtgagtccatgaaggatgatgcgtctgtggtattcgcctattacaaggatggtgccactaatccgacattcctctatttctctcatggtcttaaggagatcaagtgctaggcgtgcggcgaaattagttacccatgttgggtactatctatgtactattattatatccaaaactatagttgtcctggctgaattgaactcaaaagggtttgtttgagaaaaaattgtcccaagattggattgcttgttaaagctcaatattgttattgaagtgttattgcttagttgtgattgcctttc

SEQ ID NO: 19558 - DNA, 1675 bp, Zea mays
  Clone ID: LIB3152-050-G8_FLI
ccagcgcaacacggccgccgtcggcgggttgctctccgacctgcgcgcccgcgtctcccaggtgctgcgcgggggaggcgccgaggcggtgaggcggaacgcggcgcgggggaagctgctcccgcgggaccgcatcgaccgactgctcgaccccggcgcgtccttcctcgagctctcgcagcttgcaggctcagatgtttatgatgaagcattaccatcagcaggtataataactggcataggacctgttcatggacggttatgtatgtttgtggccaatgacccaaccactaagggtggcacatactatcctcttactgtcaagaagcatctgcgagcacaggaaatagcttcggagtgcaaactgccttgcatatatctcgttgacagcggaggtgctaatctccccaggcaggctgacgttttccctgaccgtgataattttggccggatattctacaatcaagctaagatgtcttcagatggtatccctcagattgcagtagtcttgggttcttgcactgctggtggggcatatattcctgcaatggcggatgagagtgtaatagttaagggaaatgggactatatttctagcgggtccaccacttgtaaaggctgctacaggagaggagatatctgctgaggaccttggtggagcatcagtacattgcaaggtatcaggagtctcagatcattttgcacaagatgaaattcatggacttgagttggggcgaaacattgtgaagaacctgcacttagctgctaaaggaacaaatattcagagttctgcttgtggttaccaagagccattgtacgatgtagaggaacttcgctccattgcaccagctgatgtgaaacagtccttcgacattcgttcagtaatagcccgtattgttgatggaagtgaatttgatgagttcaaaaaattgtatggaacaacactagtgactggttttgcaaggatatgtgggcaaccagttggaattattggaaacaatggcattttgtttacagagtcagcgttgaagggctcccacttcattgaattgtgcgctcagcggcatattcctttgattttccttcaaaacattactgggttcatggtcggatcaaagtctgaagctagtggaattgccaaagctggagcaaagatggtcatggcagtttcctgtgctaaggttcctaaaattacaataattgttggtggaagttttggggctgggaattatggaatgtgcggacgtgcatatagcccaaactttttatttctttggccaactgctaggatatctgttatgggtggcatccaggcagctggagttctcgctcaaatagaaaagaacaacaaaaagagacaaggagtggagtggagcaaggacgaggaagaagccttcaaagccaaagtcgtggaggcttacgacagagaaggaagcccgtactactccactgctaggctatgggacgacggggtcatcgaccctgctgacaccaggcgggttctgagcctctgcctctccgcttcggccaagccggttccggaagacacaagatacggtgtattccggatgtgaataaacgtgtgtgagtaataacgcagacgtgtttaataaaaagctgcctgcacgcacccaatgtgtgtgcacaaataaaaatttcgccctggtttttctgtc

SEQ ID NO: 19559 - DNA, 1254 bp, Zea mays
  Clone ID: LIB3152-051-D7_FLI
caccgcctcaccaccagcgtccagggaggaggaaagggaaggaggaaccgaggaacccgccgcaccgcaggcacaggcaggcagggcagcagatcgcgagttccgacttccgacgcgtctccgaccaggccgccgccatttctctgtctccacacagcgggatccctccgccgctcgccgcttctcccttggtccaccgtccacccaaccatgtataacaattaccggaatcctcccgggacgcatatgcccccgcagaattctcaacctgtccagtttgacaatccattgtacggtgcaagctcgggtctaatccgatctgggattggagtgtacggggagaagttcttgggctctagttcagagttcatgcaaagcaacatcaatagatacttctccaacccacagtattacttccacgtgaatgatcaatatgtccggaacaagttgaaagtcatactgttcccgttctttcacagggggcactggactcgaataagcgagccggtcggtggacggttgtcctacaagcctccgatatatgacataaatgcgccggatctgtacatccctttcatggcatttggaagcttcatcattctttcagggtttacattgggtttcatgggaaagtttactccagaagctataaacctgcagtttacaagggcgctcatcggatggggcttccagctcacggtcctgaaaggcctgctctactcaatgggtggcggcgaggtgccactgctcgacctggtagcgtacggtggctatttattcgccgggctctcgcttgccgtcgtcgcgaggctcgtgtgggcgtactcgtattacgtgatgatgccttggatgagcctgtgcatgggggtgttcctggtgaggacgatgaagagggtgctcttcacggagatgaggagcagcgagaggcactcgtcgcggcagcattacttcctcctcttcatggcgatagtgcagttccccctgttcttctggctcggcagcataggcgtgtgatacacagttttgtgcgtgttatgatatttagatgtgttgtagaaaaaaaaaacagtcggaggatggtctcaccagcttgtgctcatccatagtatgtgttcttgaggaaccttggatgtggtgatgtatagcttggagctgttgttgtgaagttctacatgtgatccgtaatcatgttaacttggtccatgatgctattgttatcatttatttacagggagatgggtgctagttagtatt

SEQ ID NO: 19560 - DNA, 2112 bp, Zea mays
  Clone ID: LIB3152-053-F10_FLI
tccgtgaccaaagatcgagtagccaagaagaagagagatgaacgccgacttcggcgcgcccaaggagctcgcgggaggcctgcagcagcggcggagtacggtgacgcgaccacaaccatcgatcccacctgtgcccaagccgtcgcgcaggccttcccgcacacctttggccagccgctcgtcagcttcgtcgcgccggccgccggcgccggcgccgttgaggagcgccacccgatcagggtgggcgtggtgttctctgggaggcagtcgccgggagggcacaacgtcgtctggggcctccatgacgcacttaaagcctacaatcctcagagcttgctctacggattcgtcggtggcacggagggactgtttgcaaacaagacgttggagatcacagacgatgttcttgcttcctataagaaccaaggtggtttcgatttgctcggtaggagtatcgatcagatccgcactactaagcaagtgaatgctgcaatgacaacatgccacagtctgaacttggatgggttggtcatcattggaggtgtgacctccaattcagatgctgcacagcttgcggagacccttattcagaataactgtaagaccaaggttgttggtgtgccagtttcattgaatggtgacctcaagaaccagtttgttgaaacaacagttggatttgatacagtatgtaaggttaattcacagcttgtaagcaatgtttgtcttgatgcgatctcagctggaaagtactattattttgttcgtctgatgggacgaaaagcatctcatgttgcctttgaatgtgcacttcagtcacacccaaacatgctcatcttaggcgaggaggtagcattgtcaaaactcacactgatggaaattataagcaagatatgtgatggagtacaagcaagggcagaattagggaaatatcatggtgtgcttgttattcccgaaggacttatagaaagcattccagaaatgtatgctcttattcaggaaatcaatatccttcacaacagtaatgttcctgtggctgagatgtcatcacaactgtctccgtgggcagctgctctgttccagttcttgccacccttcatcaggagagagctgctgctccaccaagaatcagataactctgcgcagttgtcccaaattgacacggagcaactgctggcccatctagtagaaacagaaatgataaagagaacgaaagaaggaaggtacaagggaaggaagttcagttcagtatgtcatttctttggatatcaggctcgaggatctacaccatcaaatttcgactgtgactatgcttatgctcttggacgtatctccctgcatatgattgcagttggattgactggctacatggcaactgtggctaatctgaaagaccctgttgacaaatggagatgtgctgctgctcctttaactgcgatgatgagtgtgaagaggcatttacgtggccctggagcaatccctatagggaggccttccattcacccttctccaattgacctgaaagggaaggcttatgagttgctgcgagagaaggcttcaagcttcctccttgacgacttctacaggactccaggaggcattcagttcgaagggcctggttcagatgcaaagcccatcacgctgaccattgagaaccaggactacatgggtgacattgagatactgaaagagtaccttggcaaggttaggaccatggtgaagccagggtgctcccgggagatcctgaaggcggcgatcagttccatggtgtcggtgacggatgtgctgactgtgatgtcccaccccctcaacgccgagctgcccctctaccatttcaagtgagcgagggcatcagtctggttgttattcctagagtgtttttgaaacagcagaagattctgcttcatggctgccggtcttctttttttttaatttgggtgagaattaagcaatgggttgtactaataaacactgaaacagtacttgatactgaactgagtcgcgtgctagttgtattattggtggcagtattccagttttcaagaggtctctagaatatccaagattgataacactcatctttcagcctagcaatatagtagtagttctttcttt

SEQ ID NO: 19561 - DNA, 1360 bp, Glycine max
  Clone ID: LIB3170-058-E2_FLI
ttcaggctcttcaagaggaacgcaaaaaagttgctccagagacagctgaggcaattgatcagttcctggtgaaactgcgagcctgtgcaaaaggagaatcagccttcacatttattcttgatgatcctgctggaaacagcttcattgaaaacccgtttgcaccatcatctgatccatcattgactatcaagttttatgagagaactcctgagcagcaatcatcattgggataccttgttggttccactcacattgaaggaactcatgatcaagcaccagaaaggggagaagtgactgctgatcaagtgaggagagaacctcatgggtcaataggggcaacagctggtcatcgagccattgcacagagtaacagttcagaaattgctgaagccttatttcgatatactgcaccagaagaggtgatgacattcccaacttcttgtggtgcttgtgccgctaggtgtgagactcgaatgtttgtcaccaatattccttacttccaagaagtaattgttatggcatccacatgtgattcctgtggttaccgcaactctgagttgaaacctggtggtcgaattcctgaaaaagggaaaaaaattactcttaatgtgaaaaatgttaatgacctgagccgtgatgtaataaagtctgatactgcaagtgtaaaagttcctgaacttgacttggagctggcaagcggaacccttggaggaattgttacaactgttgaaggtttaattacaaaaattagtgaaagccttgagagggtccatggctttacttttggagatagtctcgatgaacagagaaaaaacaagtggatagattttaaagcaaggctaaacaagcttcttagcttggaagaagcttggactctaattctcgatgatgcattagccaattcttttgtagctcctgcaactgatgatctgaaagaggacaatcaattatcatttgaggaatacgagaggtcatgggaacaaaatgaagaattaggtctgaatgatatagacacctcttctgccgatgctgcttatgaatcaacaaatactactaaaacttagtgaaaattgtgtaattatttcttctcacacccccaaccaaaacaaatggagggaagaagcagtcaggaaaggaagaatttttgtgccaatttgatagcaatgagacaggaaggatggagaagtcaattgtcttaagcgtcatgtaatggctgattgatttattaatttgtaagcaagttcatcgactagtatcatccttctgaaatagttctgtcgtgaaagatgtaatctcctctgaactggcaagttaattgcttatttctgcttttgtagtcatctgagattgtttatttttt

SEQ ID NO: 19562 - DNA, 909 bp, Glycine max
  Clone ID: LIB3170-059-C12_FLI
gagaaattgcaggcggcggcacagaggggaagtagtagtaaataaggatcaatggcggttcctgggaggcgcaacggcatcaacgacgacgaagaggagttagacgacaatgcccttttcgaagaacaaggtgtcgtcgaagacgacaccgatacccctcctcacctccgcgacctctccgccgccgctcaaatcggcgacgcccacgccctccgtctcgctcttgataacttgactggtagtattgatgagccagtggaggatggggatacggctcttcatttgacatgtttatatggccatttggcttgtgtccagctgctaatagaaagaggagcaaacattgaggctaaggatgaagagggtgctattcctttgcacgatgcttgtgcaggaggatttactgagatagtccagctgctgcttaacagagcaaatgatgcagaacatataaagagaatgctagaatcagttgattctgagggtgatactcctctccatcacgctgcaagaggtgagcatattgatgtaattaggttgctgctgtctaatggcgcatctcccacaaaggcaaacttatacgggaaggccctgcggatttgcctgaacaggaagatgctcggaggctgcttgaagctgcagctcttgccatggcatgccagtagcatttcagtagaaatatttagttccattttgacagagatgctacactttttggaccataaaatctgtatttcatacactactcttttttcgaagttcaaaaatcaaaatgatttattagaggagcaccataggaagttttaactctggagacagataaaaatgaggattcccggattacttatagtggggcaagcttgtttgttttcgttactttgcttaagtgaaatatatttactcttcaac

SEQ ID NO: 19563 - DNA, 890 bp, Glycine max
  Clone ID: LIB3170-062-D8_FLI
gccatagcatcgcgaaactgggaaaccattcaaattgaagacctcaaaattgagcgcaatgagctgcttgctgtgaactgtctggtaaggtttaagaatttgcttgacgagtcaattgaagtgaacagtcccagaaatgctgttctgaatttaatcaggaagatgaaaccagatatttttgttcacagcgtagtaaatggatcttataatgctcctttctttctcacacgcttcagggaggcactgttccattattcttcaatttacgatatgtttgatactctcatatcccgtgaaaatgaatggaggttgatgcttgagagagaatttttgggccgggagataatgaatgtggtagcatgtgaagctcttgagagggttgagaggcctgagacatacaaacaatggcaggctaggaatactagagctggttttaagcagctcccactggataaggagataatgaccaaatttaggggcaaattaagggaatggtaccacagggattttgtctttgatgaagatggaaactggatgcttcaaggttggaagggtcgcattttgtatgcttcaacttgttgggtgccagcataatgatgtgtgtgactcaactcttgtttcagaattcatactggatggaaggtcaccttcgctgttgtgaactgtgatgaatattcttcccaggtttgcaccaagtgaccctgtataatagtgccagaatttttcccagattagcattaaatcctacaatgacatggacgcgaacattaggagtcaaaattgttatttacgatgcttttccttttcttttcactctctaaccggcatgtactataggcacttcaggatcctaagaagtacttagtaaattggttaaaaggttttttcat

SEQ ID NO: 19564 - DNA, 2491 bp, Glycine max
  Clone ID: LIB3170-065-B8_FLI
gttagaagaaacttccactgtggcatgcatcttatatcttgtgacatgtcatatattgttggcctattagaattattatgttccagtttgagacttccatttttgcaggcaattcttagtctgttttagttggttgaataaaagtagtaaggagcatttcttgtggtatatgtaacttttggagttattgcatatattggcagaggggatgggtagagaaatttaagttgatatacttatggttcactactcaagtaagaaagaagggtagaggtctgaagagaaatttaaggtgataaacttatggttcactactcaagtaagaaaaaatggaagaggtctgggaaaagataagtacggtgtggacttattgtatatattggtaaaagggcagagaaaggaaaggggtttcttggtcaggtgaagagtttaggctgcacagtctttaaattacacattagatttcttcatgtttaatttattcttaatggaagatgctcattaagatctcatatgtatcatgttccatctatccatctcggaaccaaactttgcaatattatgatacccagttgctaataatgaacaatgtgctgccatggctggtacttaaaccgaaagttgttcaacattttgatttacaaatatcagatgaggttaaattattaaaaaggatctcatggtgaacaatatccttgagaatttggcttttaactgagcctaatagtgttatgtgatccatgtagcctaactcattggtataagactattattgctgttgtactatctggtaaggttgctaatgtagattaattaggagcaagagttatcaagataaggtctcaaacataatgagctgtgtagggcatgtagaaagatgatctgatggtaaaggatttcttctggcattttgttgacaggtgagaacattatagggattaatcggggaagaaaatatcagaaggaggattggcttctttttctgagtcttctaagttattagattttgtaatattcaaaattgctttcttgcttagcttgacattgtgggtggcatgtaatatgcttggtaattaatgcttttgttgctgtgttattgtgggttaatcttttttttttttgctaccctatattctgtattcttgttgtacctagacattgtagtgaatgttaaggacaaggatgggctgatgctgttatttgttcatttggttaggtaatgatatcagctaaagaggaacctggttcctctgttcctcctgctgtggatggcttattaagggttcataagcggattattgatggtttagagagtgattttacccatgctccttcaggtgtggcggggaaggtttctacaaaacttctagtgccagcctcacaagcaggaagtttgattgggaagcaaggagggactgtaaaatctatccaagaagcatccaattgtattgttagagttcttggagcagaagacctccctatttttgcccttcaagatgacagggtggttgaagtagtaggggatcccactggagtgcataaggcattagagttaattgcctcccacctaaggaagtttttagttgatcgcggtgtaattccaatttttgaaatgaatatgcaaacagctaatacccaccatgcggagcacatgccaccccaccaatcttggggtccacctcagggtcttcctccaaatgttggtggaggttctggttttggacctccttctcaatacatgccacctccacgacaacttgatagttattatccaccagctgaaatgcctcctccagtggacagacagccccatcaaggtatatctgcttatggaagagatgcttcaataggtgttcatgcatcttcaaatactcaatctgcaccttccattgtcacacagatcacgcagcaaatgcaaattcctctatcttatgctgatgctgttattggaacagctggagcaagtataagctacatcagacgagctagtggggctactgttaccatacaagaagcaagaggtgttcctggggagatgacagttgaaatcagtggaactgcttctcaagtccaaacagcacagcaactaatacagaattttatggctgaagctgcagctgcagctgcagcaccagcacagccgcaaacaactgtgcctgctgcagaccaaggatacaattcttaccctgcccatggttctctctatgcgtctcctccttccaatcctggacatgctggaggctatagctcagtttatggtgcaaactatgggtactaggctggactgtgcaactaatgcctgctattattgaaatgtaaaatgctgggaacggaattactgtaataatttaagaaatattagattattgtctgacccttgtgttttgttgtacacgtagtcatttggaaaggtaaaacatactattcgtggccttctgatgtatcatttacttgttctatgattctatctaattggtgcacctatgcctct

SEQ ID NO: 19565 - DNA, 1259 bp, Glycine max
  Clone ID: LIB3170-067-B1_FLI
ggaaaagtaatggtaaaagaaaagggaaagtttataactttttaagagtttcttaacttgagaaaagcaaactcataaataagtaaataaaattcattagacagaacaatcaaactcaccctgatcctatcagaccttatcacagtcctcacggtagacacatggacacatatatggcctttcgcggtttccagaaaatcaataatagccattagcaaccatcccatcaaaaaagataaaacattattttctgaagataaaaaagaagtatgtacgtattaataatttcatgtaataattaattattgtgtataaaaagtttataaacttttatttaataatcttaaaagagatatcaatcataatatatgtgactttgtgcggataagtatgtgaaattgattgaaaggtgtcacatgatgatagatggattaacacagtgtttgtatgtggcagtggtgtcatcatgtgagaagaagaagaagaaaagtgtgagtgcagaaaagaagagtggtgggcgagctcggaagaacgtgtacagaggaatcaggcaaaggccgtggggcaagtgggccgcggaaataagggacccacataagggcgtccgcgtctggctcggcaccttccccaccgccgaggaagccgcccgagcctacgacgacgccgccaagcgcatccgcggcgacaaggccaagctcaacttcccggccaccgctccgccaccctccaaaaaacaacgctgcctcagccctgacaccaccaccgaacaaagcagcagctcacaatccaccactggatccaccggatcgccgccttccgccgccttccacggcggaggagatgaactcgacctgaaacaacttgaacggtttctagggttggacaacatgggtgctgagtgggacaacatggatgacctgtggatgctggacgacgtcgttgtgcccaaccgtcacttaatttactagaagggagataattaattaattaataaatggcgttttcttaagttatagttttataaaactatgttggtgtatgtgttcttagttttctgttttgtcttgtcctctcgctttggtaatttctgttttgtacggtcgaattatttcaaaattaggtgcaacgtatcatgagagggatgattatatgttatcattatgattataaataaaggccaattagggtgtgttagcgtttgggtcgtgcatgtttatatgtagtttatgcgttgtatataatatatttggcatgacatt

SEQ ID NO: 19566 - DNA, 942 bp, Arabidopsis thaliana columbia
  Clone ID: LIB3175-035-E9_FLI
cttataaaaccccacaccttccttgtttccctcttcctacaccgcactctcttcttcttcttcttcttcctctctgttttttctctctctttgtttggaaccaccatggataatgtcaaacttgttaagaatggtgttttgagattgccacctggattcagattccatcctactgatgaagaacttgtggttcaataccttaagaggaaagtttgttcttctcctttgccagcttcaatcatccctgagtttgatgtttgcagagctgatccttgggatttacctggcaatttggagaaagagaggtacttctttagcacaagggaagctaaatacccaaatgggaaccggtctaaccgggcaactgggtctggttattggaaagctaccggtattgataaacgggttgtgacctctagaggaaatcaaatcgttggtttgaagaaaactcttgtcttctacaaaggcaaaccacctcatggctcaagaaccgattggatcatgcacgaatatcgcctctcttcttctcctccgagttctatgggtcccactcagaactgggtactctgtcgtatcttcttgaagaaaagagccggtaacaagaacgacgacgacgacggagatagccgtaatcttagacataataataataacaattcgagtgaccaaattgagataattacaacagaccaaacagatgataaaacaaaaccaatcttctttgatttcatgagaaaagaaagaacaacagatttgaaccttttgccgagctctccttcttccgatcatgcttcaagtggagtcacgacggagatcttctcttcttccgatgaagagaccagtagttgcaatagtttcagatgaaatctttaatttaattttaatgttgactatcttaataagttattatagttttatattaatacgactctctttcctttt

SEQ ID NO: 19567 - DNA, 1204 bp, Arabidopsis thaliana columbia
  Clone ID: LIB3175-040-D5_FLI
gaaatcgaaaaggaccccaaacttttttcttccttcatctttctctcctcccatcatcatcaccatgtcctcccataccaatctcccctctcccaaaccagttcctaaaccagatcaccgtatctccggtacatcccaaaccaagaaaccaccgtcttcctccgtagctcaagaccaacaaaacctaaaatgccctcgttgcaactctccaaacacaaagttctgttactacaacaactacagtctctctcaacctcgtcacttctgcaaatcttgtcgccgttactggacacgtggcggtgctctaagaaacgtccccatcggtggtggttgccggaaaaccaaaaaatctatcaaacctaattcctccatgaacacacttccttcgtcttcttcctctcagaggttcttctcatcaatcatggaagattcatccaaattcttccctcctccgacaacaatggattttcagctggccggattatctctcaacaaaatgaacgatcttcaacttttgaataaccaagaagttcttgatcttaggcccatgatgtcctcgggccgagaaaacacacccgttgatgtcgggtcgggtttatccctaatgggttttggagatttaacaacaaccattcaccgacggggttcacaaccgccggagcaagcgacggaaacttagcttcttctatagagactttgagttgtttaaaccaagatttacactggaggcttcagcaacagaggatggcgatgctttttggtaattctaaggaagaaactgttgtcgtcgagaggccacaacctattctttatcggaatcttgagatcgtaaactcatcatcgccgtcgtcgccgacgaagaaaggagataatcagacagagtggtattttggtaataacagtgataatgaaggagtgattagtaataatgctaatacaggaggaggaggaagtgaatggaacaatggaattcaagcttggactgatcttaatcattataatgcattgccttgaatcttggtaagtttaagaaactatataatctataatttcatataatctatttgctatgtgttgtgatgtaatgccaaaactatttatgtttgtagtttttttttttttttgtattctttttgttgtcgttgttggttactattctagtattttaagtttcaatttgtaaacaaaaaaacaaaattggggg

SEQ ID NO: 19568 - DNA, 1761 bp, Arabidopsis thaliana columbia
  Clone ID: LIB3175-044-E2_FLI
aagtttatgtgcaattatatatcaatataccaatcttttatctttatataaaaatatacctatagagttgatatacaagtggacccctagaggatatatgtggtcctaatcagactaggaatacatattctgtttctttgaactactccttattaaactcaactatcatatacttatatatttctatatttggctgttataacacgctatctaaatttatatagatgtttgtatatatgtgtgtgtctgttttgtgtacaactcatatataggtataacgtcggccataatttgttagaggacatttgtaatatattaagtgtatatagaataaaagtggttgattttaaagaagatgtcaaaactaattcgcaaacttaataattatgcattaacatgtatatgtatatgaaatggaaagtatttgcctcttgattcggacattatgcaagtaggtatctaacaaacacttctcttgtcttatatcaacttggtcgggttgcttttcttagacgaccaagtttattaatttaatatttatttcttaatcatttactagtttaggacaggcaagtttttgaaacaaagaaatatatatatctgcttgtgtatattaatgtataagtctatactctatatgcaaatggacatttcggctaattaattctatacaagatacatgcatatacaagttggcatctttcaatgatttcttaatataattagttctaaattgttcctgttccgcctataaaaaaagtttttgtgtttcgctacacggttagtcgctcacaatttggagaaagatccaactttaaaataggtggtaaatgtggggttagttactaaaaaggggtaatgaattcaattttctctaaacgcacgtgacaattggcaccatgaaagtatgtattaagtatacatattccaatatatgtagtccaaaagaaaaatacatatattatgtatctataatatatcacatcaaataaaaacatggaatgcttggagcccatatcgttgcatgatgtcatggacgtaactgcccaagtatcccatcctccgaaaacacttccttgagaataattcctttacttacatttgattctgcatttttttgtctacttttatatcattgataataggttgattatatatgtatgattctaattaatgatcaaaagtatcatgaagcatggcgtgggaccgagggtatggaattcacggtttcacctttttgacatgttggtgtcgtgttcttattagtgaattactaacaagctttgattttttgatcgatcaacatgttgaataatcggcattagtcgtcaatcaaccacataatttcgggtcatgcacaatcattataatgcttaattagtcctttatctgtttttttcctctctagttagtctttaatacttatatttatgagattaatgatggtccaattcgattatttgtccttaattggtcttagtcaataacatgtgcactactttgtccatcttttgttttgcttttactatttctccattttccctataactcttatttagttttgaactagctaatacattagaaacttacaggcggataatttgaggcaccaaacgatccataggctgaaccaattgttgacgacccgtcaagaagcacggtgtcttctagccgttgcggagtacttccaccgtcttcaagctctaagttctctctggctagcccgtcctcggcaagatggataatactaaaacaactttt

SEQ ID NO: 19569 - DNA, 1176 bp, Arabidopsis thaliana columbia
  Clone ID: LIB3175-046-B10_FLI
ctcaaaaccaaaatcactaaagaggagaagattgctaaagtttgataaaacattccaaaatcaatggctgataggatcaaaggtccatggagtcctgaagaagacgagcagcttcgtaggcttgttgttaaatacggtccaagaaactggacagtgattagcaaatctattcccggtagatcggggaaatcgtgtcgtttacggtggtgcaaccagctttcgccgcaagttgagcatcggccgttttcggctgaggaagacgagacgatcgcacgtgctcacgctcagttcggtaataaatgggcgacgattgctcgtcttctcaacggtcgtacggacaacgccgtgaagaatcactggaactcgacgctcaagaggaaatgcggcggttacgaccatcggggttacgatggttcggaggatcatcggccggttaagagatcggtgagtgcgggatctccacctgttgttactgggctttacatgagcccaggaagcccaactggatctgatgtcagtgattcaagtactatcccgatattaccttccgttgagcttttcaagcctgtgcctagacctggtgctgttgtgctaccgcttcctatcgaaacgtcgtcttcttccgatgatccaccgacttcgttaagcttgtcacttcctggtgccgacgtaagcgaggagtcaaaccgtagccacgagtcaacgaatatcaacaacaccacttcgagccgccacaaccacaacaatacggtgtcgtttatgccgtttagtggtgggtttagaggtgcgattgaggaaatggggaagtcttttcccggtaacggaggcgagtttatggcggtggtgcaagagatgattaaggcggaagtgaggagttacatgacggagatgcaacggaacaatggtggcggattcgtcggaggattcattgataatggcatgattccgatgagtcaaattggagttgggagaatcgagtagacaaagtgagattattaggaaactgtttaaattggagaagaagaaaaatgctctgtttttttctcctttggattaggcttaagaattttgggttttaaggaaatgtatagaggaaatcgagtgaacaaagctcgagagctggggacgtagtgacgaaaacgaagaacaaatttctcttaagctattcaggaaaat

SEQ ID NO: 19570 - DNA, 484 bp, Arabidopsis thaliana columbia
  Clone ID: LIB3177-079-E4_FLI
ccagctggcaaataaccggaattttgttcccgagatcgcactcgaccggacattcgttaattcaaccggctgggaatctagaccggtttacgttgaggttaccggatgatgtacgacggcaacttatgaagacatcgaggacgatgggacacgtggcgttactacctcaggcgaggagttcacggagcggttatagaagcggtagcgtcgggagcgagagaagcgctttcccgtacggacgtaagagtaataataacaatcgacggcttcattcgctgtctttttcattctctttccggagtggttccgtacggtctactttctccggagatgcgccgaagaatcttccgacatcgattgaagctggtgaacggtctttcgaacggctccgaccagatgaacgagtgtaaataatatatatttttttcttttttacaatttgtaattgggatttaatgttgtcatgcctcttatttgcgttttt

SEQ ID NO: 19571 - DNA, 540 bp, Arabidopsis thaliana columbia
  Clone ID: LIB3177-080-G7_FLI
tgaaaataacagtcaactctttgtgcatgtggccttctttgccatttctcacatccctccaatgactgagttaacttacgactatggagtatctagaccaagtgggactcaaaatggcaatcctttatatggcaaaaggaaatgcttctgtggatcagcgtattgccgtggctcatttggatgatgatggagagaaaggcgatctctggtgaacaactggagtcggatgattttggttgcaaaaagctggagtgttgagtcctgataggtggaaccgagtacttttggtagcaagtaaagtaagtctctttgatcttctcttcaagagcataagacgcaaagctgtgaaggatttttatactgcttctccagcaaaaaccttatctatttatcggattgtggaagatgtcctcatgcttttatcctgttggatatgtaatcttattagtcagtattcagatcgatttttaggacaaatctctggaaactctaagcctcttttgattaattattatgtgaatgtgataaaggttacaagtc

SEQ ID NO: 19572 - DNA, 558 bp, Arabidopsis thaliana columbia
  Clone ID: LIB3177-085-F7_FLI
ggaactgttgcactacgtgaaattcgtaagtaccagaagagtaccgagttgctgatcaggaagctccctttccagaggctagttcgtgagattgcccaggatttcaagactgacttgcgtttccagagccatgctgtgcttgcactccaggaggctgctgaagcataccttgtgggtctctttgaggacactaacctctgcgccatccatgccaagcgtgtgaccataatgcccaaagacattcagctcgctcgcaggatcagaggagaacgtgcttaattgtgattgggaagtagttggattatgtgaatgtgggtggttttctaaatagatagttggaattagataatggcttaaaaagcttttgggtgtaggagacttggaaacaatggtgttttttttttcttttctttctgtttcttgtctagtcggtttatgatttgcttgtgttcttcttagctacgttttgtggtgtgtattgctttcttctttggcaatgttgaacaccttttgttgttgaattcatctctgaaacatatgaatatgttaaagtttctg

SEQ ID NO: 19573 - DNA, 1033 bp, Zea mays
  Clone ID: LIB3150-053-C2_FLI
cacattcttaaaaacttgttaaattcatatttaaggacctttacataactgctctaagttccattgatacgtttcatcgattttcggaggaatttattcgaggaatctagtgtttgaccggctccgctcgattctgcttcgttaccacgcgggtgctatcgaatcttggcggagatggggctcacgttcacgaagctgttcaggcggctattcgccaagaaggagatgaggattctcatggtcggtctcgatgcagctggtaagaccactatcctctacaagctcaagctcggcgagatcgtcaccaccatccccaccattggatttaacgttgaaactgtcgagtacaagaacattagtttcactgtttgggatgtcggtggtcaggacaagatccggcccctgtggaggcactacttccagaacacccagggcctcatttttgttgtagacagcaacgacagagagcgtgttgttgaggccagagatgagctccaccggatgctgaatgaggacgagctccgtgatgctgtgcttttggtgtttgcaaacaagcaagatctgcctaatgccatgaacgctgctgaaatcaccgataagcttggcctgcactccctgcgccagcggcactggtacatccagagcacatgtgctacctctggtgagggtttgtatgaggggcttgactggctttcgaacaacatcgctaacaaggctcgaagcatctaggcaaggcttcaatcagtggaagcaaactgcctctaccattacagctatgaagtatatagtcgtgactgtgtcagacgtggtgtgttttgggaggataaaaggctcttttggtcgaggagctaggtatcagatgttttttatggtacctgtaattttccgtgcttctgttttggttttgtgcaaggtataccatgtctgactgtgctcgccactgtctgagtcgttgtactatcccggcctgtccgtttttttttttttttgtctagagatgctttcagttttgaactgctagaaagtcggtttt

SEQ ID NO: 19574 - DNA, 2049 bp, Zea mays
  Clone ID: LIB3150-054-G3_FLI
ggttcgccaaaaggttcgagacgcgcaccgccagccgatacgaatccgacgagctcgatcgctccacttccccgatcgcacgccaatcagcaccagccaccgtggcgatgacggaggaggcggaggcgaaggcgaagggcaacgcggcgttcgcggccggccgtttcgaggaggctgtccagcacttcagcgacgccatcgcgctcgcgcccgacaaccacgtcctctactccaaccgctcggcggcgtacgcgtcgctctggcgctacgcggaggcgctagatgacgccaagcggaccgtggcgctgaagccggactgggccaagggctactcccgcctcggcgccgcgcaccttggcctcggtgacgcgcccaaggccgtcgaggcctacgagaaagggcttgcgctcgagccgtccaatgaggcgctcaaatccggcctcgcacaggcgcgccagtccgcatcggcgccgagacgtccggtgggctccggggctgacgccgttggcaagatgttccagggccctgagctatggagcaaggtcgcggccgatcccaccacgcgtggctacctcgaccagccggacttcgtgcagatgctgcgggaggtgcagcgaaaccccggcagactgaacagctacctttctgaccaacgaatggttcaggtgctcaccctcatgctgaacatcaagttccagaaccagagcagtggggcgcctgacccggcagcagcacaatcgaacccgccgccaccaaagcagcagccagaggcgaaggcaagagaaccagagccggacccggagcccgagcctatggaggtgacagaggaggataaggagcagaaggagaggaaagcgtcggcgcagaaggagaaggaagcaggcaacgccgcttacaaaaggaaggattttgataccgcgatccagcactacacagaagccatggagctcgatgacgaggatatctcctacatcaccaatcgtgctgctgtttaccttgagatgggaaagtatgatgaatgcattaaggactgtgataaggctgtcgagagaggaagggaactgcatgctgatttcaagatgatctcaagggcacttaccagaaaaggaactgctcttgccaaacttgctaaatcatcgcaagactatgatgctgccattgagattttccagaaggcgttaactgagcaccggaacccagatacactgaaaaaactaaatgatgcagaacgagcaaagaaggagctggagcaacaagagtactatgacccaagaattgctgacgaggagcgagaaaaaggtaatgagttctttaagcagcagaaatatccagaagcagtgaaacattacaccgaagctctcaggagaaaccccaaggaccccagggtatacagcaatagggctgcctgttacaccaagctaggggcccttcctgaaggtctgaaagatgctgagaagtgcattgagctagatcccacattctccaagggatacacaaggaaaggtgctatccagtttttcatgaaagaatatgacaaagcgctggaaacttatcaagctggcctaaagcatgacccgaaaaaccaggagttacttgatggtgtaaggaggtgtgttgaacagatcaacaaggcgagcagaggcgaactcagtgaggaggaactgaaagagagacagaacaaagccatgcaagaccctgagatccagaacatcctgactgatccgatcatgcagcaggttttgacggatctgcaggagaaccctcgggctgcgcaggcgcacctcaagaaccccggagtgatgcagaagatccagaagctcgtcagcgcagggatagttcagatgaagtagacggtggctggaatgtccgggttcagatctgggacctgtgctggaaatgctgtgaacttgatcattgtttcgcattttggaaactgaacccttttgtgcgaccatatatgggttttccatatatgggttttcccatccgatatgttccaattcgtgcctttccccctggaatgcccgtgaaaaaggaagaatattcatc

SEQ ID NO: 19575 - DNA, 1359 bp, Zea mays
  Clone ID: LIB3150-054-G6_FLI
gcgagcagccgccgccgggcaagaaggctcgcggcgggggcggcggcagcgatagcggcggcggtggcagcacgagcaagtcgcgcgccattggcaagatgttcttcaagaccaagctctgctgcaagttccgggccgggacctgtccctacgtcaccaactgcaacttcgcgcatggcatggaggagctccggaagccaccgcccaactggcaggagatcgtggccgcccacgaggaggccacggagcagcgggaggagcaccagatccccatcatgacatctggaagtgttgtagctggagacggcggcggtggcagtggtggcggctcgcaggggggcagggcattcaagggccgtcactgcaagaagttctacactgaagagggctgcccctatggtgacacatgcaccttcctgcatgatgagcagtctaaggcacgggagagcgtggccatcagtctctcgcccaccgttggtggtgggggatacaatgctgcctccgccaacggagtgatggtgcagaagccgtccaactggaagacaaggatctgtaacaagtgggagatgactggatactgcccatttgggagcaaatgccactttgctcatggttctaccgaacttcacaagtacggagggggcctcgtggacatcgacggcagggacatcttgtccactcctgattcgaagcaagccggtggctctgctaaagctcctctagagtctgctgctgcgtccactgcgttgccccctcatgcagacgtgtaccatctcggcatccagtcgcagcgctcggccatcgccagccagaggtctggacagctgcaaaggcccatccagaaatggaagggccctgacaagatcagcaggatctatggagactggatagatgagaacgaatagaagaaggatcttctacggtgggccgaagggaagctgttacttggtatccgtccgactccacatcagctggtggaagctttacctggcttagaagatctcgttagcgctgcaaaaccagagtcaagatcatctttgcaagacctgtattggggagataaactgctggaacatagtgccgctttcttccgttgaactcagtagcattgctatgcttgtgtaatttgtgtgttggatggaggagcataatagcatatagcgagtcatggtgcaccctgtacagggtggctgagctgcatcctgaaggctggttgttcaggtgcgtccgtgactgtctgttggttcttgttttcgggctattattattgggccggatatttctagccttactctttggcccattgagcagtgcgctgtgtaccaagcagttaaggccaataaacagggtattttttcc

SEQ ID NO: 19576 - DNA, 1136 bp, Zea mays
  Clone ID: LIB3150-054-H10_FLI
tctgcgtacacggtctccctcttcctgtcagtagtagagtgagagtgaggcagcgagtgggagacaaggggaaatggggaagggagcgcaagggagcgatgcggcggcggcgggcggcgaggtggaggagaacatggcggcgtggctggttgccaagaacaccctcaagatcatgcccttcaagctcccgcccgtcggcccttatgatgtccgcgtgcgcatgaaggcagtggggatttgcggcagcgatgtgcactacctaagggagatgcgcatcgcgcacttcgtggtgaaggagccgatggtgatcgggcacgagtgcgcgggcgtggtcgaggaggtgggcgccggcgtgacgcacctgtccgtgggcgaccgcgtggcgctggagccgggcgtcagctgctggcgctgccgccactgcaagggcgggcggtacaacctgtgcgaggacatgaagttcttcgccaccccgccggtgcacggctcgctggcgaaccaggtggtgcacccggccgacctgtgcttcaagctccccgacggggtgagcctggaggagggcgccatgtgcgagccgctgagcgtgggcgtgcacgcgtgccgccgcgcgggggtggggcccgagacgggcgtgctcgtggtgggcgccggccccatcggcctggtgtcgctgctggcggcgcgggccttcggcgcgccgcgcgtggtggtcgtggatgtggacgaccaccgcctggccgtggccaggtcgctgggcgcggacgcggccgtgcgggtgtcgccccgcgcggaggacctggcggacgaggtggagcgcatccgcgcggccatgggctcggacatcgacgtcagcctggactgcgccgggttcagcaagaccatgtcgacggcgctggaggcgacgcggcccggcgggaaggtgtgcctggtcgggatgggccacaacgagatgacgctgccgctgacggcggcggcggcgcgggaggtggacgtggtgggcgtgttccggtacaaggacacctggccgctgtgcatcgacttcctgcgcagcggcaaggtggacgtcaagccgctcatcacccaccgcttcggcttctcgcagcgggacgtggaggaggccttcgaggtcagcgccc

SEQ ID NO: 19577 - DNA, 1243 bp, Zea mays
  Clone ID: LIB3150-056-B1_FLI
tccaggacttgcttgcgctcgtctacttcggctccctctttgacgtcaagcagcaaagcgacttcgtctctttggtttacacgcgcgaactcgagcggagcagctgcctcacttatgactacgtcggggatgatccggaggacagtctcgcggagaccgatctgaacgcggtttctgcccttgcctccctcgccgcgttgcgccctcctgctgcagccggagtctcgcaccgtgacgcccttcaggcttgtgctcatcacgcccgcctctggctctgccgtgcggatgaacccatccatcctgactccaccatcacatatgctggggtgagggcaaagctggataggatcatggcatcgggctacttcacagcgcagctagaaatgaggacaccattggatctggctgctgcagtggcaagttttggagctggaggtgtgcaggtgcaagagagcatggttgtgtcacctcaggcaccggaagcagtggaggagagccaggctgttgaaggacacaagaatgagaaggaagattctcaggctacagaaatctacaatgatcatcctgttgttgactctgaacatgtggaggatgaagtcctggtgcatccaactgatgaagttcctccagctgagacagagcaggagcaggagacatttgatgctgatgtgaaggatcaggagcaaaaggaccaacaattcatccagcggcggtcttaccagaaccagcgtggtggtggtcgtggtggcagcaggagaggctatcctaatggtcgtggaggacgtggtggccgaggtggcgggtaccagaatggccgtggtggataccagaatggtcgtggcggtgctggcgggtactactacgaatctggatactaccagccgaggaactacaacagaggccggggtggtcgctccggcggtggcaactcttactacaacagccatggtggaggtgcacaggggcatcatcctgggagtgttgagctgggcgcaaacgcctagcttcgctgactgttctgtttgataatgaggagcgagtgagtcgtgccattttgttattatagaactaacttagcctgttattacgtcaccgttggtcccatccgtgagtctttttgctgctcgagtgactgcatatggtcggtcggtattgaggaaatactctgggaaagtagtttcaggtcatattcgttttctaagttacgtttttttttgtgttaatatgcccttatttcttaatt

SEQ ID NO: 19578 - DNA, 698 bp, Zea mays
  Clone ID: LIB3150-056-B6_FLI
cctctcctcactctcgccgccgccgcttcccctgcgccccgagccaagatgaatgttgaaaagctcaagaagatggcaggtgctgtgcgcactggggggaagggtagcatgcgcaggaagaagaaggcagtccacaagactacgaccacagatgataaaaggcttcagagcaccctgaaaagaataggagtgaacaccattcctggtattgaagaggtcaacatctttaaggatgatgttgttattcagtttgtgaatcctaaagtgcaagcttcaattggtgctaatacatgggtggtcagtggaactccacagacaaagaagctgcaagatctgcttccatcgattatcaaccagctcggccctgacaacctagacaacctgcggaggcttgcggagcaattccagaagcaggcccctggtgcttcaggtgcagaggctggcgccagcgctggtgctgctcaggacgatgacgatgacgttcctgagctcgtccctggagagacatttgaggaggctgcggaagagaaaaaggagtcatcatgattttgccacatgcccgcccttgtgaagggcttataagtaaagccttgcgtagaagggacctgttgagaactctgacctgccttatttgtgcctgcgtacggttatgtcatgaacgagaatttggtagtccagcactgatgggattttagttt

SEQ ID NO: 19579 - DNA, 754 bp, Zea mays
  Clone ID: LIB3150-057-A6_FLI
gggggagagagagaagtgggagacccgcgagaggctgccgtgtcgggactagggaccgtagagtaagcgacagcgaaggagggagagggggatggccgggatcgggccgatcaggcaggactgggagccggtggttgtgcggaagaaggcacccaccgccgctgccaagaaggatgagaaggccgtcaacgccgcgcgccgctccggcgcggagatcgagaccatgaagaagtacaacgctggtatgaacaaggcggcgtccagcggcacatccctcaacaccaagcgcctcgacgacgacacagagaacctcgcccatgagcgagttccaagtgacctgaagaaaaatctcatgcaagcaaggctagataagaagttgacccaggcacagcttgctcagatgatcaatgagaagccacaggtgatccaggagtatgagtcaggtaaggcaattcccaaccagcagatcattggcaagctcgagagggccctgggaacgaagctgcgtggcaagaaataaccaggagcagcatagggaagacaaggcaaactgtctgcttattatttgctatgtttggtatctcaagtcatgcggactgtttgtgttggtacaagagtgaattaactgtgttctcctgaatgcttgctgcttgtcatatgagtatatgatctagctctaaaaaatttgtgatgaagatgtcaactgatatgacaacctcataaccagcgtgatcaagatgatgctcattactgc

SEQ ID NO: 19580 - DNA, 681 bp, Zea mays
  Clone ID: LIB3150-057-B9_FLI
ggccccttaaccctcgttcctctagccgtctcgcgcagccacagcctccatttctcctccgacggcggtgcggctagctcaaccatggcggactccaaggccacctcggcggtcaccctccgcactcgcaagttcatgaccaaccgcctgctggcccgcaaacaatttgtgcttgaggttatccaccccggccgcgccaacgtctccaaggcggagttgaaggagaggcttgccaagatgtacgaggtgaaggaccccaacaccatcttcgtcttcaagttccgcacccacttcggtggaggcaagtccactggcttcggcctcatctacgataacctcgagtctgccaagaagttcgagcccaaataccgcctcatcaggaatggtcttgctactaaggttgagaagtcccgcaagcaaatgaaagagcggaagaacagggccaagaagatccgtggtgtcaagaagaccaaggctggtgacgccaagaagaagtaaacagtcatttatatttctgtattactgtcctgaactctgggtggtcgtctagttgcaatgtcataattatggtcgtgttaggttttgttccgcactcagcagtaagtgaagttttgtaattcctggatgtgaacctacccggattggctgtagcatgttgtgagatgagaaggctattttgtc

SEQ ID NO: 19581 - DNA, 608 bp, Zea mays
  Clone ID: LIB3150-057-C11_FLI
ggcacgggcaccttcggttggattaaatgtatcactgaatcgctatgatttgttccatgggcatcttttccttgcatcggagacaggacggcttggaattctgttccatgctaaagaatacccagcatttaacaaggaattgtttccttataatttgggatattgccaggcaggatctaatgtaccatatgatgattcgatgaatttgcgcaatgtactttggttagcacctttgccatcaaatgagacaaaagcttggttagcaccaggattactagttgtcttggacgcacatcctgatggaattatctatcaagagatgatacgtgactatgttcagattgttagaacagtatacgaagatgatcttggggagaacgcagttgatgtcaattatctgaatgtggcaaatgcagctcccgtagatagaatttacatttgctgaagtcatatgtaccgctatttgtcttcccatggtgtgatttgatttgatttctgagaaccggacgtcaatgcatcatcctcatgcccaccaaagcaattgttcccatgacggctgctgtgtatttcacatgtttatttgtttaattaaaaatgctcaatgaagc

SEQ ID NO: 19582 - DNA, 993 bp, Zea mays
  Clone ID: LIB3150-057-D4_FLI
attggccaacaaagctgcagcactttctcccatggatgctgcccctccatctccaacacctcaggtttatcttggtgagcaatacgtgaatagttcaacactttcagacgttactttcttggtagaaggaaagcgattttatgcacacagaattgctttgcttgcttcttctgatgcatttcgtgcaatgtttgatggcgggtacagggaaaaggatgcaagggacattgaaattcctaatatcagatgggacgtctttgaactcatgatgagatttatctatacagggtcagttcaggttaccagtgaaattgcacaggatcttcttagagctggtgatcagtatctcttagaaggcctcaaacgcctatgtgaatatactattgcgaaggatgtgaatctagataatgtatctgacatgtatgacttgtccgaagcctttcatgccgtgtctctgagacatacgtgcatcttgtacattctggaacattttaacaagatctgcaccagagccggttctgcacagctgatccagcgtgttattccagagctccgcaatttccttaccaaggcactgagttcatcaagaagcccaagtacaaccgacgacaggaacttgcagacttgattttgagtcccaattcattgacactgacaccgtcatctgaccaaagttgctggacatcctgtacagtgaagtttctggcgctgagcatttgatggcatctgttgtggtacatggtggccggctcctcaaaattaacatcagcagcttaacaaacttttgtaagatttagtggaggatatgggtaaagagaacccgcgtcttagtcatgcccgaccagcttacactgggataggctgtagctgtgaatggtcttggcagtaattcgtcggtctctgctttgtttctgagttgtgtttgtttcaagttcacagttcagtgtatgcctgcatatgtttaaagtatgaagcttgagcaagttagaaatt

SEQ ID NO: 19583 - DNA, 904 bp, Zea mays
  Clone ID: LIB3150-057-E11_FLI
cacaggccggcagatcgctcgccatggaggtgaaggtgatgagctctagacttgtcaagccgtcctatccacctggtgtgccgcaaccagacaccacccagcatgtgccttgctcggtgttcgacaagatcacataccacatacagatggccatcatctacgccttctcacctccggtgccctccatcgcggacattgagcacggcctcgccgccgtgttgggcgtgtaccgggcattcgccggccaggtccgtccgggcccggacggcgagctcggcgtgctgctcaacgaccacggcgcgcagctcatcgaggcgttcgtggacgcccaccttactgttgtcgcaccagcgaggccgtcgcctgagctgcagcagctgcaccctgggctacatgtcgagatagaggaggtggtgcaggtgcagctcacgaggttcacgtgcggctcgctcatggtggggttcaccgcgaaccatgccgtcgccgacggtcgtgccaccagcagcttcctcgtcgcatggggccgcaccatgcgcggcttcccgatcggcctgccgccgccgccgctacaccaccacccagggctcttcccgccccgagacccgccgcgctttgagttcgagcaccgcggtgtggagtaccgcccgacgccgcctgcatcatcatcatcgtcatcccacctcgtcacagcccacggtcagacgacccaccgccacgacatcgtgatccacaaggcgcacttcaccggggaattcatcaccgcgctccgcgccaaggcatcagaaggccgcggccaccctttcagccggttcgagaccatcgtcggccatgtatggcgtgccatgacgcgcgcgcgcggcctccgtgacccgcgccagcgtccgccatacgaatctccgtcgac

SEQ ID NO: 19584 - DNA, 540 bp, Zea mays
  Clone ID: LIB3150-058-B11_FLI
ctatatctctagccaacacacacataatactctccattccattccattccatctcaaaggatagaataatgggcggtctctccaccaagcttttcgtggtcctcctcctgctcgtttgttacaccgggacgcaaggcgggccggtgactatggtgtcggcgaggaagtgcgagtcgcagagcttccgcttcaagggaccttgctcgagggacgccaactgcgcaaacgtctgcctgaccgaaggtttcaccggcggcgtgtgcaagggcctacgccaccgctgcttctgcaccagggactgctagtactgcctcgcctcgtgtcctgcgtgtgcatatatagccgcagcggatcagtaaaacatgcatgcatgcgttaccaaatatttggcagtaccagcaagttaatgaattaaaatattaaataatatgttatggaacaaagcctgttttgaacgttgaactgctgagtgcgagcagcgctcgagtttattcgcatatatgaactctatggcgcgtttggagtgcgaggatttttttt

SEQ ID NO: 19585 - DNA, 1399 bp, Zea mays
  Clone ID: LIB3150-058-C3_FLI
ggggcttccgtcctgttctcgtcgcacctctttacctccgccgccgccgctattgtcccattccaatctagaacccatagtcttcttcgtgattgtgcggttctttggtgagagcatgagctcgtctacttccggaacacgagagatgtcatctccaaattctacagcaacatctattggccaagttcaaaaggtgcctggttttgccaagcttcagggtgaaaactttgtgtacttcatgcaaacttattcaatcatgttgggacgcaccagcagaagttatactgcagactttgatctctctaaatatgaatgtgggagccaatgtgtttcccgatgccatgcatgtatattctatgactttgaactccgccattttgccattgaagtccttggaagaaatggatgcaccattcgaggggtctcttatctcccaggtagtgtccctattaaattgaattctcaggacctcattgagattgctggcataaaattctactttcttctaccatctcgctccatttttgccactcttgctgctcgagatgctactatgttgcctccacaatctccatccttgttgcaccctaattaccctgggaatccaagtgctaatgattgtggtcgtagcaatggtgagaatggggttaaaatcagcaatgacatgcaagggaagttggtgaaacaaaagagaagtttttctggagaattggatatatcttacagttatggcaccaagaaaaatgttgatcgagttggaacacttgatggatgtgtcaacaagctacatatacaaattgcagataaggatacagacaatcaacagatcctactagaagaagagaaggatgtaaccacttgtcttacaaccctgatatctgagttatcaggtcctaaagaatgggtgcctatggaaagactcctttcagagatttttaaacgttttggtaaaaaatggcttcgtgatagggtaagcaagtacttaccacaaaagggcatgtctggctcttcaactaaagttgatcataggccatggtgtagcttgtgggagctactcaggaagcacccagagcattttgtcatgaccacattgacaagaggagaagaaacattagattatgttggcttggtacacctggtatctgtggaaaatgaaccatgaatcctagacccattattgccattcgaaggacttccgtaccattatgggctagttatgtttgaaataaactaggacatattattgttatcatataaaatttgaagcccattttgtagtatggctatcatgttctattgtaaaactatgcagctttgatgtggtacctttagttttgatctatgcatttcaatgtcggagtttggaaacatttattttgaaagagtttgatttgttggg

SEQ ID NO: 19586 - DNA, 732 bp, Zea mays
  Clone ID: LIB3150-058-G3_FLI
caacacccccggacagacgggcgcgaactcaaaccctagaaacggtagccatggattcgggaggcggaggagggagcggcgcgcacaaggcggcctcgggctccgcgccctcgccggcgcctaaccccacggcgatgctttcggcgctcatgagcaagcgcgccaagctccaggaggagctccgctccatcgagcgccaggtttatgatatggagaccacctacctacaggagactaatcaatttggaagtgtgctgaagggtttcgaatcttttttgtcatcctcaaaaaacacctctaaccttaagcgctctcggaaatttcaggctgacgagaggttattctccctgtcatccgttacttctccagcggttgatgaacatttggctggacgagatgatggaagagagtatggagcaggtcgttctaagggtggaagcacccctgcgaacgggcaaggcaaaccgaagaagggagggcgccctggcgggcgagacggcaagagactacggccgtcgaatgacccagacctggacgacgaagatgactactaactcctccatcatgtaggcctactgtagcgggttaacttcaatttagcgtctagcagcacatgattctttacgaattgcttcccttctcgtttgttttgcttggttgcatcttcgcttccttccccaactcttccgatttgtaatataacataggtcaatgaaaattagccagattgtt

SEQ ID NO: 19587 - DNA, 833 bp, Zea mays
  Clone ID: LIB3150-059-D4_FLI
gcgtgcctggcaagtggcaaactcgagctgtctagtcctcggttcgcgaatcttccacagagaggcagacggcaggactcgcttcaagctcctcatctcgcgcagggggggtcgcctgagatcacagagacaatggtgaaggcagttgctgtcctcgccggcactgatgtcaagggcaccatcttcttttcacaggaaggggatggtccgaccaccgtgactggaagtatctctggcctcaagccaggcctccatgggttccatgtgcacgcgcttggcgacaccaccaacggctgcatgtcgactgggccacacttcaatcctgttggcaaggagcatggtgcaccggaagatgaggaccgccatgccggtgatctggggaatgtgacagcgggagaagatggtgttgttaatgtcaatattactgacagccagatacctcttgctggaccccactcgatcattggccgagctgttgttgtccatgctgatccggatgaccttggcaaaggtggacatgagcttagcaagagcaccggaaatgctggcggacgtgttgcctgtggtatcattgggctccaaggctaaagcggttaacctccgaggcaaacaccatagaagatcgaagcgagcacctcaggatgttgctgttccatttcccctgtattggcaacacaatttgagtacaccaaataagcgcctgatccatgatcaggaagcactattcatgccattttgtatatgaacaatgttgcgcacctgcttaagtgtctgttccaacaaatgcttaagaagacactactggaggtgtactatcgagtactaccagcagc

SEQ ID NO: 19588 - DNA, 560 bp, Zea mays
  Clone ID: LIB3150-059-E12_FLI
ccagcgtccactcgcccaccgtttccgctccatccccggcccccacttccccgttcgagagacgaaaaccgaccattcattccttcttccatggcgaggagggcgacggtgatggtgctcgcggcggcgctcgcggtcctcctgctggcgtcgtcgtcgtcgaagacggcccccgtggccagcgccgcccgggacgacccctcggcagcggcggcggcggccgtcacttcttctcgtgacctgcagaaggatggatcggcggcggcggcggaagggaaggggaaggagaaggagtgcgagggcgccaacgacgaggacgagtgcatgatgaggcgcacgctggccgcgcacaccgactacatctacacccagcagcaccacggctgatccaatagaatccgtcctaggttacatgcgttgctctcgtacgtgtgttcgtgtccgtccgtgctcgtgtcgtgtactcgtgtgtgtgtgtgtgtgtgtgtgtgaaacgccagcgcgtgctgcttctgctgcgtcgttattacctgcgtgtcaaataaattcttttttttgtc

SEQ ID NO: 19589 - DNA, 2045 bp, Zea mays
  Clone ID: LIB3150-060-C6_FLI
aacaatatgtgccaatgcaatcatgcatgcgggaactactgtagatacctttctaagagagaacctggagtggttaagcagggcaaccaattgggcaaaattcagtgcaactgctggactaggtgtcattcatagaggtcatcttcaacaagggcgggctttgatggccccctacctacctcaaagtggtgcagttggtggtgggagtccatattcagaaggtggtgccctctacgcactaggtttgattcatgccaatcatggtgaaggaatcaaacaattcctccgtgaaagtcttcgcaactccagtgcagaggtcatccagcatggtgcatgtttggggcttgggcttgcagctttgggaaccgcagatgaggaaatatatgaggacataaagaatgtcctttacacagacagtgctgttgctggtgaggcagctggtattggcatgggcttgctcatggttgggaccgccagtgagaaggctagtgagatgcttgcttatgcacatgatacacagcatgaaaagattataaggggtttgtcactgggaattgcattgacagtatatggcagggaagaggaagcagacaccttgattgaacaaatgactagagatcaagatcccatattacgttatggtggtatgtatgcattggctctagcctataggggaactgcaaacaacaaagccatccaccagctgctgcattttgctgtatcagacgtcagtgatgatgttcggaggactgcagttatggctcttggatttgttctatacaacgagcctgagcagactccaagaattgtgtccctgctctctgaatcatacaacccacatgttcgttatggtgcagccttggctgttgggatatcatgtgcaggatctggattaagtgatgcgatttccttgttggagcctcttacatcagatgttgttgacttcgtgcgtcagggagctctcattgccatggcaatggtaatgatccaaactaatgaatcctttgattctcgtgttggagcatttaggcgtcagttggagaagatcattcttgacaaacatgaggacaccatgagcaagatgggtgccatattagcatctggtatcctcgatgctggtggtaggaatgttacaatcaagctcctctcaagaaacaagcatgacaaactcacggctgtgattggtcttgccgttttcagtcagttctggtactggtatcctctcttgtatttcatcagcctggccttctcgccaacagccttcattgggctcaactctgatttgaaagtgccaaagtttgaattcctgtcgcatgctaaaccgtctctctttgagtatcccaaaccgacaactcagcagactacaacttcaacagtgaagctgccagcagccattctgtcaacttatgcgaaggcaaaatctagggcaaagaaggacgcagaaagcaaagctaaccaggagaaggccacagaagaggcttctggttctacctcaagcaagacggctaaagctcaggagaaggatgctgatgcaatgcaggttgacaatgccagtgagaagaaagctcctgaaccagaagcgacttatcagctccttacgaatccagctcgcgtgatccctgcccaggagaagttcatcaagctccttgaaaacagccgatatgtacctgtgaaaccagcgccttctggattcatcctcctccgagacctgcagccgactgaggctgaggatcttgcgctgaccgatgcccccacaacagtcgcaggaagcaccggcaacactgcccctgctgcaggccaacaggggtcaggatcatcagccatggccgtggacgatgagccacagccgccacaaccctttgagtacacctcgtgagcgaccgagcgtcaccttttcttattcgttttttttttgactttttgagtatgtagtgtgcggaaatttgttgttggctggaagaccttttgtagaaacatgagtagagaattttacttgaattgaagctataggatcaacgttgggaatctgggatatagcccaggtc

SEQ ID NO: 19590 - DNA, 563 bp, Zea mays
  Clone ID: LIB3150-060-F8_FLI
gtactcgtctcctcccacccgcaaccgcagggagagaaaggggaagcccgccgccgccccggcccccagcaaccagcagatcgggacctctgttctgcgcaatccatccatggcggaggaatcaggccgtcccttgccaaagtttggtgaatgggatgtcaacgatccggcttccgcagacggatttactgtcatattcaacaaagccagagatgagaagaagggtgggaatggtcaagacacagactcaccttccaaggaccccaggactgagagggtggagtcttatgctgcaaaaccaagcacgaagaaatggttttgttgtgtgacagccagccctacgcaatcctgaggaaggcaattgcatgcgctggaaatactgcccctttaattttctatacatactatccataagacactgtagaggtacccatggctctctgggctccaggatgggtgtctcataaaactctggcgtgcatgtatgtatggtgtgagagttgtcggcatacatttgcaaagtggacttctgcttgtaattctagtcctgtctctcttttttt

SEQ ID NO: 19591 - DNA, 958 bp, Zea mays
  Clone ID: LIB3150-061-D9_FLI
ggttttgctgctctccgaccccgagctccgaaggccgcagcatcaggcgcggcccccctcgcgtgtgaccgagatggcgctgccgaatcaggggaccgttgattaccccagcttcaagctcgtcatcgtcggcgatggtggaactggtaaaactacatttgtgaagaggcatctcactggagagtttgagaagaaatatgaaccaaccattggtgtggaagttcatccgttggatttcaccactaactgtggtaagatcaggttctactgctgggataccgcagggcaagagaagtttggtggcctcagggatggatactatatccatggccagtgtgcgatcatcatgtttgatgtaacctcaaggcttacttacaagaatgttcctacgtggcatagggacctgtgcagggtctgtgaaaacatccccattgtcctctgcggtaataaggttgatgtgaagaacaggcaggtcaaagccaagcaggttactttccacaggaagaagaatctgcagtactatgaaatttctgccaagagcaactacaactttgagaaacctttcctgtacctcgcaaggaagctggctggtgatccgaaccttcactttgttgaagctgttgctcttaagcctccggaagttaccatcgacatggctatgcagcagcagcatgaagctgagcttgctgcagcagctgcacaacctcttcctgatgacgatgatgatctgattgagtagaaaggatcatgagtcttgaacttgagcaggagttgtgccttgcgtgttttaagttgttctagggtgaactcttgagttctcattgtctggatcatctttttctccttggatgtgttgcatcttttgagtgtggaaatggatggtactcctcgccatgaatttgctggctactttatacattgctttgtaactctgtttgatgataaactttgttgtggc

SEQ ID NO: 19592 - DNA, 1279 bp, Zea mays
  Clone ID: LIB3150-061-F3_FLI
cgcgtgggatgtacggcgatgcggtgccgccgtcgctcagcctgttcgacgccgccggcagcgtcgcggcggacccgttccaggcggtgcagcaggcgccgggcgccggtggtggtggggtggacgacgtcgccgggtggcagtatgctgctgcggctgggagcgagctggaggcggtgcagctgcagcaggagcagcagccgcgcgatgcggactcggggtccgaggtcagcgacatgcagggggacccagaggacgacggcgacggcgacgcgcaggggcgtggcggcggcaagggcggcgggaagcggcagcagtgcaagaacctcgaggcggagcggaagcggcggaagaagctcaacgagcggctctacaagctcaggtcgctcgtcccgaacatctccaagatggaccgcgcggcgatcctcggggacgccatcgactacatcgtgggcctgcagaaccaggtgaaggcgctgcaggacgagctggaggacccggcggacggcgccggcgcccccgacgtcctcctggaccacccgccgccggcgagcctggtggggctggagaacgacgagtcgccgcccacgagccaccagcacccgctcgccgggaccaagagggcccgtgcggcggcggaggaggaggaggaggagaaggggaatgacatggagccgcaggtggaggtgcggcaggtggaggccaacgagttcttcctgcagatgctgtgcgagcgccggcccgggcgctttgtccagatcatggactccatcgccgacctgggactggaggtcaccaacgtcaacgtcacctcccacgagagcctcgtcctcaacgtcttccgcgccgccaggcgggacaatgaggtggcagtgcaggcggacagactgagggactcgctgctggaggtgatgcgggagccgtacggcgtatggtcgtcgtcggcgccgcccgtggggatgagcggcagcggcatcgccgacgtgaagcatgacagcgtggacatgaagctcgatggcatcatcgacgggcaggcggcaccgagcgtcgcagtgggggtttcagaggatcactacggcggctacaaccatctcctccaatacctcgcttgatcattatttaattgcgttcgttcatgttgaaagttcgatcaaactatcaaaggatggatcaactaataaaaacgggatccatatataagtaactgtgaattgcgatcattaattgtatgcatacaagcatatggtcgtggattaaagtttgttaattgggttttctc

SEQ ID NO: 19593 - DNA, 825 bp, Zea mays
  Clone ID: LIB3150-063-B9_FLI
gacgcaattgagtatctgaaggagctcctgcagaggatcagcgatcttcacaatgaacttgagtcagctccgagctcttcgcttgttggaccaacatcagctagcttcaacccatcaacaccgacattgcagacatttcctggccaggtcaaggaagaactttgcccgggctcattcccaagccctactggacaacaagccacagtcgaagtcaggatgagggaagggcatgcagtcaatatccacatgttctgtgcgcgtaggccaggcatcctgctgtcgacaatgacggccctcgacagcctaggcctcgacatcgagcaggcggtcatcagctgcttcaatggctttgcgatggacgtgttccgagctgagtgcgcggatggtcctggaatggtgcctgaagaaattaaggccgtgctgatgcacaccgccggcctccacaacgcaatgtagccggtccgaaaacgggccaccgccaggatgacgacgatcctcctcctttctactaagggcttcggttcggaagcggcataagattaagctgtggtggccattggttttctggggcaagtgatgaattttaagatgatgaggctcgccatctcgggcatgaggcatgagtgatgatgtaactatgggattcttttttttcttctcattagcctaatgtcggattttctcctctctgatacacttgtggtgtaatagaatctatgctgcgtgttgaacaatatatggtggtgaatggtgatgcggtagctagcatcaaactcagtgcctgttggtcagagatcgatggtgcaaagagagacgagttcattc

SEQ ID NO: 19594 - DNA, 642 bp, Zea mays
  Clone ID: LIB3150-063-H6_FLI
ctctcggtcgtgcccgtcaggaggggctactggggaaacaagatcggccagccgcacactgtgccctgcaaggtcaccggcaagtgcgggtccgtcaccgtgcgcatggtgccggcgcccagggggtccgggattgtcgctgcccgcgtgcccaagaaggtcctccagttcgccggcattgaagatgtctttacctcgtcccgtggctccaccaagacactcggtaacttcgtcaaggcaacctttgattgtctgatgaagacctacggcttcctcactcctgagttctgggccgagaccaagtatgccaagaccccgttccaggagttcaccgacctcttggctaagccgacaaagggtcttctgatcgaggctcccaccgagacagtggaagcttgaacgtcttagtttactgttccaagtgtcgcgaaaagagttttctgtactagctacatattttaaatgttattttgaattatgatgagaaaccaaggtatgcacccaagataattgatgtcctgttgttttcgtatgtgggtatcgaaccccaaagatgtcctattgttttctgtactccgcatgtgatgaaaatctgtcctgcctgtgttaggccatctgcactagtctacgcatagattatcc

SEQ ID NO: 19595 - DNA, 1630 bp, Zea mays
  Clone ID: LIB3150-064-A7_FLI
ggacgaactcaggaggcggcgcggtcatgggatcctgcttctcgttggagggaggccgcagtgaaagcatagcgcccgcgcagaggtcgcagatcccggaggatgagcaggtcgagcctaccgttacgagcgagctggccatcccagtcccagaggtggcagaatcagtggtcatgttggaggcccttcgtactggcttcatcacagaccaacgtccagagaggcacattcgtgtcaggagtttcacctatgatgaggtgtgtgcggcgacacatggcttcgaagtagatcgtttcctgggacagggtgggttcggccaagtgtacaggggttttcttgaaagcaccaatcaggaggtggctataaagaggcttgatcttcaaggacaacaagggcacagggaattcgttactgaagttctgatcttgagcaatgtgcaccacccgaatcttgtaaagctcgttggacattgcactagtcatgatcagaggattttagtttatgagtatatgcctttgggttcgctaaacagtcacatccatgatcttccccctggccagcagcctcttgactggagtacaagaattaagatactgcttggtgctgctaaaggtcttgagcatttgcatcacaatctcaaccctcctgtcatcaatcgtgatgtgaaatgtgcaaacattttgctcggagcggggtaccacccgaagctgtctgacttcggcttggcaaagctaggtccaactggtgacaacacccatgtttcaacaagagttatgggtacacctggttattgcgcgccagagtacttgatgactggtaaattgacagtaaagacagatatttacagctttggtgtagttatgttggaggttctcaccggaagaatggctagagacgaaagacttcctgaatccgagcgaaaccttgtcgcatgggctctcaactttctccgcagacgggaactggacaatctgctagatccggcactgcggggtcagtgcccccaggcttgtttggagcatgccttttttgttgtttcacgctgtatcagtgaatcacccaatactagaccatccatgcgagatgttgtcgcctctctcactgtgatctcagaattcagaaacagaaacacaaggcggttggagcgtggcgggcgcagcacaccaacaagaactcctgatcggaaccaccggggcgacgatcagggagaaggaagctgaggaatcagtgcatagcaaaacaatggtgatcttctgttgctgtatttttttatgatggtcggttactgcctgtctgggagcaaggaagttgtaatgcctgttcaaatgatatggttcaattgcagggaagtacatggtcatgcagaagatttttttccctgttagggctagtttgggaacttcattttccaaagtgatttttattttctcaagtaaaaataaactattttttcttaggaaaatggaaatcccttgtaaaatgggttctcaaactaggcattaaagtctgtagataacaggtgtaaactcttgttgtgtttgttggggctcagtcttctcagacgttctgtttgcatgttgtattattgacgaggctatgtttaaaccaatggagatggtttgtttccctt

SEQ ID NO: 19596 - DNA, 782 bp, Zea mays
  Clone ID: LIB3150-064-B5_FLI
gccgagacctccagccgtccgcccctgaaccctcagccttctccgtcccgcctcggcactcgacggccgccggcacacaccgcgcagtctcgagacaggaaccggaggaacgaggatggaggatgactcgccgctgacgaagacgatgaagggtgcggtgacaggactcgccgcggggaccatctggggcaccgtcgtcgccacctggtacgacgtgccccgtgtggagcgccacgtcgcgctccctggccttatccggacgctcaagatgtgcggcacctacggggccaccttcgccaccatcgggggcctctacatcggcgtcgagcagctcgtgcagagccagcgcaagaagcgcgacttcgtcaacggggccgtcggcgcgttcgttgccggagcctctgtctgcggctacagaggaaagagtattcagtcagccctcatcggaggctcctgtctggctttcacatctgctgtgctggacattggcggcaatacgaccagagttgacaacggcaaagagtactatgcctacacaactgagaagaagcctgcaaattgattccaagtctgcacttctagcaaacaatcttgcacgccatcaactcagtgaatttgaagctgatgtgcagttttatgtctgttttgctgatgcaattagttcttaagcaaatccatggcaacttgtttatcgctgatgcttgagggatggaaatgacactcagaataaatatttgatttgctttcttgtgatcgttgatcacattaaacgcagtggcgcg

SEQ ID NO: 19597 - DNA, 1171 bp, Zea mays
  Clone ID: LIB3150-064-E8_FLI
ggacatgcgcttcagcacccgggtcaaggacgaggaaggcatgccggcgttcgcgctcgtcaacaaggccacggggctcgccatcaagcactccctcggccagtcccacccggtcaagctcgcgcctttcagcccggaccaggaggacgcgtcggtgctgtggacggagagcaaggacgtgggcaagggcttccgctgcatccgcatggtcaacaacacccgcctcaacttcgacgccttccacggcgacaaggaccacggcggcgtgcacgacggcaccggcgtcgtgctctgggagtggtgcaagggcgagaaccagagctggaagatcctgccgtggggtcccgaggccaactccgccgcggcccacgcgggaggcccgcacgccgtgcgcgtcttctgcaaggccggcggcgaggactacagcctcacggtgcgcaacggcacggcgtgcctggcgcccaccaacccgcgggacgagtaccagcactgggtcaaggacatgcgccacagcacccgggtgcgggacgaggagggctacccggccttcgcgctcgtcaacaaggtcaccggcgaggcgctcaagcactccacggggcagggccaccccgtcaagctcgtgccctacaacccggactaccaggacgagtccgtgctctggaccgagagccgcgacgtcggcaacggcttccgctgcgtccgcatggtcaacaacatctacctcaacttcgacgccttccacggcgacaaggctcacggcggcgtccatgacggtaccgagatcgtgctctggaagtggtgcgagggcgacaaccagcgctggaagatcctcccttggtgaacgaacgaaagaaactactagctggtaccctaataataattctgctggctgcggcgatccccaaataaaagaggcagggtgcgatgcatcgcggtcttctcgactctcgagtggtgtttgcgttagacagccagccactgtgtggctagtgttccaacatttgtcagcctgcttgcgcgaggaagtgggggtgactgactcaagagaagggcctggtcataggctgctgcattatgaatttctgatcatgtcttatgtctgtactctgaatcaactatgtatgagatctcatctcctttctcctactgaatgaatgaatcattattggct

SEQ ID NO: 19598 - DNA, 1372 bp, Zea mays
  Clone ID: LIB3150-065-B10_FLI
cttggatccggtcccatgctgggacaggttttgcgaagactccgaccagcggtggcggctgaggtggcgaggggctactccgccgcggcgaaggagatgactgtccgtgatgcattgaactctgcattggatgaagagatgtctgctgatccttccgtttttctgatgggagaagaggttggagagtaccaaggtgcatacaagatttctaagggcttgcttgataggtatggtcctgatagggttcttgacacgcctatcacagaggctggttttactggcattggtgttggtgcagcttatcatggtcttcggcctattatagagtttatgacatttaatttctcgatgcaggctattgatcatatcatcaattcagctgccaagtcaaattatatgtcagctggtcagatatctgttcctattgtttttagaggaccaaacggagctgctgctggagttggtgctcaacactcacagtgttatgcagcttgctttgcacatgttccaggacttaaggttctcacaccatactcttcagaagatgcccgaggcttgctcaaagctgctatcagggaccctgatcctgttattttcctggaaaatgaattgctttatggagaatctttcccagtttctgctgaagtgcttgattctagtttttgcctaccgattggcaaagctaagatagaacgtgagggtaaagatgttaccattactgcgttctccaagatggttggctatgctctccaggctgcagagatactgtccaaggaaggaatcagtgctgaggtgatcaaccttcgatcaatcagaccacttgatagagctgctattaatgcatctgtcaggaaaaccaaccgattggtgactgttgaagaagggttcccccaacatgggattggtgccgagatatgcatgtctgttgtagaagaaagcttcgcgtaccttgatgcaccagttgagaggattgctggagctgatgtacctatgccctatgctgccaaccttgagagaatggctgttccgcaggtcgatgacattgtgcgggcggcaaagcgggcctgctacagggcagtaccaatggcagcagctgcctgattggtggacaagcctttctgttttccttccatcggttttcgctctctagccagaaacatgtagtattcataaggcgcaggcaaattggccggaacccagactccaagcgagctaattttgtagatctgccatggtgtgctttgtcccgttagtcgatatatgtggcgttatttctagattcaagtccatttgcttctctatgatttttgtacaccgctaaataatcttcttaagcccctgaatgaatgcaaaatatttaagatgttttagg

SEQ ID NO: 19599 - DNA, 788 bp, Zea mays
  Clone ID: LIB3150-065-D2_FLI
cgggttgctgtcaccggcaatagttcaggcaatcgaggcacgggatagagatcgcatctgcacagagtactggagatccaggcctcatgttgtcactgaagatcgtgcgacggcgccacctcaggctcagggtcctctgcatgcgctgaggggtctattccagcgagccaaccgcaatgagctgctagccctacggagtctactggtgagcaacatcagcccggacgacttctccaggcggcaggctacccaaatcctcgacgaggagatcgccaagcagtggcgctgacaggcgtaaatacaactctgtaatctcttgatggcatgacgggaccaagcagttttcgaccctgacgagagagcggctccttccgttgccccccgtgcccattctttgtattgttgtgtccatgctccatgccataagatcttgtccccatttggatgcgatcgaatgaccgacgacggctcatcaactgaccagcgtacataccgtctgtctggaaactcttgtggtgttgtaggtttagttatttttcttttaaacgaaatatttaaccttcttttttagtgaggctgaaacgcaggctcatgagacctgagttttttacatgaaaggttgtgtacatcagaaatgtgcagggcctgttgacactactagcagataggcgtgatttttgtgccgagttggtcagagtcgaacagtccatgtgcttcaggtactcatcctgcatggttgactgggagttggtacttgcaagctgctgttacagaccagtagtccaatg

SEQ ID NO: 19600 - DNA, 727 bp, Zea mays
  Clone ID: LIB3150-065-F9_FLI
atccgatctccgcttgcgctgaagcctgatctccaccgggttcgcagcaggggcgcaggacctcgatcacgaggaggcaggggagcagcatccacaaccacaagccatggcggggagggccaacatccccactaacaactccgccctcatcgcaatcatcgccgacgaggacaccgtcactggcttcttgatggccggcgttggcaatgttgatctgcgcaagaaaaccaactacctcctcgtcgacaacaagacgacagttaaacaaatcgaggatgcgttcaaagaatttactacgagggaggatattgctattgtgctcatcagtcagtatattgccaacatgataaggtttctggtggatagctacaacaagcccgtccctgctattctggagatcccatccaaggaccatccatatgatccagcgcacgactcggtgctctctcgagtgaaatatctgttctctgcagaatcggtggcgtctgataggcgatgaaggcatccttgcgtagcagtacccttcgatgcatctattttgttatggtattgaaaagaagatggcacgtaccattgggtgcgagcgagccagcatgaacaataatgagcttgcaaacaataattggttgaactaaaccaacaccctttttttcataaatggttcgaatgatattttggtgcttgtgtttgattggttattagggaataaaatgcgattgttatgacg

SEQ ID NO: 19601 - DNA, 1240 bp, Zea mays
  Clone ID: LIB3150-066-A10_FLI
ggaagctgagaactgtgactgcttgcaaggattccaagtatgccactcccttggtggtggtactggatctggtatgggtacgctgttgatctcaaagatcagggaggagtaccctgaccgcatgatgctgacattctcagttttcccctcaccgaaagtatctgatactgtggttgagccatacaacgccactctttctgtccaccagttggttgagaacgctgatgagtgtatggttcttgacaacgaggccctctacgatatttgcttcaggactcttaagctgaccacccctagctttggtgatttgaaccatttgatctctgcaaccatgagtggagtcacctgctgcctaaggttccctggtcagctgaactccgacctcaggaagctggcagtgaacctaatccccttcccccgcctccacttcttcatggttggcttcgcgccgctgacgtcccgtggctcccagcagtaccgagcactcaccgtccccgagctcacgcagcagatgtgggacgccaagaacatgatgtgcgccgctgaccctcgccacgggcgttacctcaccgcctcggccatgttccgcgggaagatgagcaccaaggaggtcgacgagcagatgatcaacgtgcagaacaagaactcgtcctacttcgtggagtggatccccaacaacgtgaagtccagcgtgtgtgacatcccgccgaggggcctgtccatggcgtccaccttcgtcggcaactcaacttccatccaggagatgttccggagggtgagcgagcagttcactgccatgttcaggaggaaggctttcttgcactggtacacgggcgagggcatggacgagatggagttcaccgaggccgagagcaatatgaatgacctcgtgtcggagtaccagcagtaccaggatgcgactgctgatgacgatgaggaggccgagtatgaggacgaggaggagccagctgatggcatgtgagggaggcagttaaatgtgaagcctggtggttctagggaccccgatgagttttgatgtcccctttcgtgttgtcgccatgttatactattacactagcataccaccctcgtggcccattccgtcgatcgtcgctgttgatgcttgtgtttccttgttctatagaaccttgcttttggtacggggctgcaatgtggattcgatccttccgtatcgctacttatgctgcgctaatttgctgaaatcaaaatctccagagct

SEQ ID NO: 19602 - DNA, 1069 bp, Zea mays
  Clone ID: LIB3150-066-E10_FLI
ggtcctcatccatccaaccaggcgagccaacaagcaagcaaaagtaaacggggcgaggagctggagagacgccggcgacgtgaagcaaccgcccgatcggagccgcggctgagcaggaggagggagccggagatggtgggtctcgtcggcggcagcacggcgcgggcggagcacgtcgtcgccaacgccggaggggaggcagagtacgtgcgccgcatgcaccgccacgcgccggccgagcaccagtgcacctccaccctcgtcaagcacatcaaggcgcccgtccacctcgtgtggcagctcgtgcggaggttcgaccagccgcagcggtacaagccgttcgtcaggaactgcgtcgtgcgcggggaccagctcgaggtcggcagcctgcgcgacgtcaacgtcaagaccggcctgccggcgacgaccagcaccgagcgcctcgagcagctcgacgacgacctgcacatactcggcgtcaagttcgtcggcggggaccaccgcctccagaactactcatccatcataactgtccaccccgagagcattgacgggaggccgggcaccctggtgatcgagtcgttcgtggtcgatgtgcctgatggcaacacgaaggacgagacatgctacttcgtcgaggccgtgatcaagtgcaacctcaattctctcgcagaggtatcggagcagctagcagtggagtcacccacgtcgctgatcgatcagtgaagtcacctgcatcgcccatcgatcagtgaccaccggtacaaaaaagaagcttcgaaggctggctggagagttcaacctttttgagaccggtggtttcgccatcgtcttctgcgtgtaatgtctcttggaatatggaagtattagtcgttgtgtaggattaaacatctgtagtagcttgtatgctagggatggttgtttagccttagaaactgcacctagatacctcatggcatgtatgcatactgctagtatgtgtagagatcagggaaagcatggagcgggttttgcctcttaggtgcatggagatctgtctttttttctctccattttgcggtggcgactc

SEQ ID NO: 19603 - DNA, 524 bp, Zea mays
  Clone ID: LIB3150-066-F8_FLI
gatgaagagatgagagacattgcattacaatacgtcgatcaattgcaccgagctggaatagacacctcagagttcccttggcggttaccagaaagccactgattttgatttcggcaagatagtcgagtttatcaactgaagagcaacaccagactcccaatttaaagaacgtgtgcttttttaggatttgaggatatgatatccaagtcctgcaagaaaattactccttacgtgctgagttttctaacccaagtgctaatggctaacaaattgctagcttatcagctattcagttacactgccatactagttagtagataaccagatggcccagtaaatgttgtattagttcatgcacgtaaatgaggtgtagctgtgaaagtagatcgatgaaggttcctgatgtgaaaaagtcaaaagacaatgtaggagcttctgggtcacagtttcaaaagattttgtcccttggcagtgattgtaagatcttttggaagttatgccttttgttgttctgccatctaaaa

SEQ ID NO: 19604 - DNA, 1243 bp, Zea mays
  Clone ID: LIB3150-066-G4_FLI
ggattgcgtgatgcaattgctgctgggatcacctcacgtgacggattccctgcaaatgcagatgacattttcattacagacggagcaagtcctggggtccacatgatgatgcaattactgattaggaatgagaaagatggcattctgtgcccaattcctcagtaccccttgtactcggcctccatagctcttcatggtggagctcttgtcccctattaccttgatgaaaaaactgggtggggtttggagatctctgatcttaagaaacaactcgaagatgctcggtcaaaaggcattgatgttagggccttggtggttatcaatccaggaaatccgactgggcaggttcttgctgaagacaaccaatatgatatagtgaaattctgtaaaaatgagggccttgttcttctagctgatgaggtatatcaagagaacatctatgttgacaacaagaaatttaactctttcaagaagattgcaagatccatgggatacggcgaggatgatctccctctagtatcatttcagtctgtctccaaaggatactatggagagtgtggtaaaagaggaggttacatggagattactggcttcagtgctccggtaagagagcagatctacaaggtagcttcagtgaacctgtgctccaatatcactggtcaaatccttgcgagcctcgtcatgaatccaccaaaggttggggacgaatcatatgcttcctacaaggcagagaaagatggaatccttcagtctttagctcgccgtgcaaaggcactggaagatgcattcaacacgcttgagggattttcatgtaacaaggctgaaggagcaatgtaccttttccctcagatccatctgccacataaggcaattgaggctgctaaagctgccaagaaagcacctgatgcattctatgcgctccgtctccttgaatcaactggaattgttgtggttcctggatctggatttggccaagttcctggaacatggcacgtcagatgcacgatcctgccgcaggaagacaaaatccccgcggtgatcacccgcttcaaggctttccatgaggcgttcatggctgagtaccgtgactgaactgttacagtggctgagtaccattgtgtagaccgaaacaaaataaagctcccccctctctgtctctgtgcgtgtgtgtgaactgatctctgaatggaagaacaatgtactctgttggcgcctttaatggcaattgaggaaaattttgatc

SEQ ID NO: 19605 - DNA, 576 bp, Zea mays
  Clone ID: LIB3150-066-H8_FLI
gtacactattgctgctgaggagataccgtttcagctgggattatcaaaaactgacctaaggagggtactgaaatccagcttatctgggattgataagtcaattagcgccatgtacaggaggttgcaaaagacactgacctccgacgagttgtttccttcgctgtgggacaagtgcaagaaggagtttttggacaaatacgagagctttgttcagatggtaacacggatatatgggaatgagccgatcatgtcagtcaacgaaatgaaagacgtccttgctggtttttagatacaagtacacagcaccatgtatgatttcagagaaatagctatgtattccattcattccattgaattctgcacccacttgcgttactgtgttaggcgccctttttgggttatgtgtgtgtatgtggatgtcctctgtatagaagtgaacgcggcatgcttcccctaatgatgttcctgtgtcgcatcgagccgtcagtgacaatgcaaactgcaaacccggagtaccggaaggaacatgttcatgtttatgacgtcatttgtccaattgccgttccattcacggtc

SEQ ID NO: 19606 - DNA, 1315 bp, Zea mays
  Clone ID: LIB3150-067-A11_FLI
ggcagccagagagacggagccaccagccacggagtgacggaggcactactagtgtcgtaacgacgccacgacggtgtgtctgactctgatctcgcatcgcgccgaggccctccggaatcccaatcctctcctctcccgcaagcaccccgggtctgctgcagcgcctcgtctccgtggtctggcatcagagtccccgggagaatggttgctctgtcggcaggagcgctggctccgctcgcaggtctgtctccgctgccgtcgtgcagcgcggctccgttgtactgccgcaggagtccgccacttctcaatgtcgccatcgccaagacgcggccagctgttcaccaatctgctcctgcaagcttccgaaaatgtgcagctatgtcagaacatggacgtcaggaactccggaccaatgagtaccagctggatgatgatgatgagccgttttggctggcagtggtcagagaccttgctgtgggtttcaagggattggtagctttcttagctgagcagccgaggcaactgaagcacctggagtggccgggctttctacacacgctgaagacggccacacttactcttgtattggtagttatgtttattgttgcattatcaactattgatgctgccctctgctacatgctggcctggctacttcgaaaatctgcctagaataatgctggaatatccatgtattgcttgaatatgatttagccagacaggatagtagcaggcactgcagctggaactcaagctcttgttgtcgtcgaggtcagcaatgttaatcagactggaggtagcaggaaggtggatcttgcacggtgtgccattttatttttgggaggattgagaaaatcaaaacagctgccctacaaatagtgctgatgtcatgtgatgcagatgctcatagtggcatttcaaagggttaattagatctgtgccattataactttgctgttttggaggcacaccgttacatgttgaggtccaatttaacagagaaagagcacatcatggataggatcggagaactgtgtgtagtgatttgtaacttctcttttatgttaagcagacttgcttgtaacttgttggtccgtcagctaggatatggagtatttttaagacatgcggtctactttgtaggcttaacaagtcttccactctgatttctcattagtattggattggtgagttcttatctagattgtctgctgttgagctacaaaatgcaacttacatgcttttgtaattatgggaggctgcaaaattggattttatacatcagaagaaggatgcaaattttgcaaacatggtt

SEQ ID NO: 19607 - DNA, 742 bp, Zea mays
  Clone ID: LIB3150-067-D1_FLI
gcggccgccaccagacactagcatagttctagtaaaaacacagcctaacacaacaacggaggcataaggaacaaaacagaaagaaagaaaaacgactgaagaacacgtcgacgacacgtatgtccggaactaccaaaagaatccctaggatctctactaccccactagtacagagcaccaaaccacatggcacatggcagccaccaccactagcacggggaaggacaagagggtcagttgaataacagtaaaccccgtgctgctactaaaccacgacggctgatcgatcaaaacccagcgcaggcgcaggcacgcacgcacgccagacagcgggatccactgcgcgtgtcgtgcccgccccctccctcccacttacacctcctagcggaggagaggtgcggcggcggcggcgaggccgaggccgagggcggccaccacgtgcagcctggagacgcgcggcgccgcagcgtcgttgtagtcggtgctgcctgctcctgccgggccgtaggcgcccgtgccgccgaacggcgggctcagggccccgggggtcgtgatcccggcgccggcgccagctccggtgctggtccccgtcccggcgcccatgcccgtgcctgctccggttccagcgccggcacccatgcccgcgcccgtgcctgctccagtgccggcgccggcgcccgtgccaccgccgacgccagcgcctgctccgccggtgcccataccagcgccgccgccggtgccc

SEQ ID NO: 19608 - DNA, 1671 bp, Zea mays
  Clone ID: LIB3150-067-D9_FLI
ggcagtggcgtctcgcagtggcgtctcgcgctactgatgcccagccggatcgccgcctgcttccgctgcgccgcggcgccgtcctcgggcgcgggcgcgggcgcggcggggcccagcctggcgacctccatctacgagacccacctcggcttggtcgcgctctcctggtcccggacctcgctcggcctctccctccgcgccgtgctccgcctgtcggccacgcccccgcccggctcctcctcctcggcgtccggagcgggctacctcgacgatgacgcggacgaagagattctcgccttccgcgtcagcccatggctattctggcgccgccgcgggtccagacggttccgcgctggcgaccgcctcgtcgacctggcgtgggatctctctcgcgcgcgcttcccggtctccgggtcccccgagccctcatcgggcttcttcgtcgccgtcgtcgtctgcggcgagatggtcctcgcggccggggacctgaccgatttggcctaccggaggacccgggcccggcgcccatcaggcccgcgtccggtcctcctctcccggcgggagcacgtctcgctacgcgacgcgggcgccggccgaggccgcagccacaccacctgggtgaacgtccagggcaaggagcgggagatctccgtggatctcgtggctcgcggccgtggcagggacaaggccaccgccggcaaggggaaggagaaggaccgggctgatgtcggcatgtcggtctctgtcgacggcgagcgagtgctgcacgtccggcgcctgcgctggaagttccgcggcagcgagcgggtcgacctcgggggcggcgacggcgtccaggtctcttgggatctccacaactggctcttccccccacgcgagccgccccccacggaggcctcgacgcacgcccacgcggtgttcgttttccggttcgaactcgccagcggcggcgaggagagcgaggcggatttggggaagaatccctcccccagcaaggccgcaaggaggaacacgggcgtttggggaggctacctcgcgcggtgggggcaacgggactggagcgagacgggcagcaacggtgagaggaggaagggcagggggcggaggctggccaaggagagctcgtcgtcgtcggcgtccgtggcatcctccacggcgtcgtgggccagtggctccacggtgatggactgggccagccccgaggaggtcgagatgcagcgcggcgacggcttctcgctgctgatctacgcctggaagagctaacaccggcgacgacggcggcagcatagttctgatcaactagcggtgatggtaaattttctctggactgttgtagtttgcagtgttcttgtgcagttaaagcctggagagattgaattgagcttgaattacagtagtgccattgctaagtggaacgagcgattagtgtgattttttttcattactagaacaattttcttccctggattagcattaattactgaaatgaacccaacaccaaatctatttgcctacaatctagggcaatggctcaggatattttgagcagcttggaatcagtccaccgtagcgatcaacgtcaacaactccagtatagtatcttattctgtgtttctcttgtgtcacctgctcaaaagagaatctatccatcaatcaattagctgttgctgc

SEQ ID NO: 19609 - DNA, 700 bp, Zea mays
  Clone ID: LIB3150-068-G4_FLI
gaaagaggagggtacatggagattactggcttcagtgctccagtaagagagcagatctacaagatagcttcagtgaacttgtgctccaatatcactggtcaaatccttgcgagcctcgtcatgaatccaccaaaggctggggacgaatcatatgcttcctacaaggcagagaaggatggaatccttgagtctttagctcgtcgtgcaaaggcgttggaggatgcattcaacaagcttgagggattttcatgtaacaaggccgaaggagcaatgtatcttttccctcagattcatctgccacagaaggcaatcgaggctgctaaagctgctaagaaagcgcctgacgctttctacgctctccgtctccttgaatcaactggaatcgtcgtggtccctggatctggatttggtcaagttcctggaacatggcacatcagatgcacgatcctgccgcaggaagacaagatccccgcggtgatcagccgcttcagggctttccatgaggcgttcttggccgagtaccgcgactaaactgttacgctgtgtgtgagttaagttggaggttcagtagaactgtagaagagctcagtgacagcgcagaaagaggcagtgttagaaaggcttaggtccttcttcacaggagcaacagttgtcttgtctccatcaaggagaaataaaaattttagttttacaacttctc

SEQ ID NO: 19610 - DNA, 1114 bp, Zea mays
  Clone ID: LIB3150-069-A10_FLI
gagctagcgacgacgacactgcccatgcagcatcaacgctcaatgatatatactagtacatctttttgccaacattttcattcgcctcgctatacatacatctatcttccgcggccaacaatttccaggaggacaagacggtcctgctgctgcaaccagctcgcgagttcctgccggtgatcgacaaggcttacaaggctctggtggagaagacgaaggacacgacgggggccagggtggagaacaacaagttctgcctctccgtgcacttcagatgcgtcgacgaaaagagctggagctcattggctgagaaggtcaaggccgtgctccgggacttccccgagctggagctcaccgagggcaggaaagtcgtggaggtccggccgtcgatcatgtgggacaagggcaaggccgtcgagttcttgctcaggtcgctcggattcgacgacgaccgcaccaacgtcctgccggtgtacatcggggacgaccggaccgacgaggatgctttcaaggtgttgagggagagaggtcaagggatagggatccttgtttcgaaatgccccaaggagactgatgccacctactctctccaagatcccactgaggtcatggagttcttggtccgtctggggcagtggaatccactgcgatcaccatcgccggcggcgcgcccaagggggcgaaagcagtaacagacgacgacaacaacagatcgttgcagatcgctaagcgtgtttaattatagttagttagttagtttattaattgttgcactagtctaggagtaataaccctcctcgatctacatacattaccccatctcagctcagcttccggccccagatcgatgtgaactctggccggcaacctgctgattgtgttcgatcagacgttcttccatatgggtttgagaggcacaggcaggcatccatgtgcaaagctgcctgccgcctttgattagcttaacccaggaaggttcatctgctgtatgagttgtgtggtgactacctagctatgaccttagcagcttaattattagcccgtctactgtaaaatgtaacatataagcaactggcagaattttaatatgcacttcctttgctctgaggaccct

SEQ ID NO: 19611 - DNA, 407 bp, Zea mays
  Clone ID: LIB3150-069-A12_FLI
ggtgatttcagctgatggatgtgctgcttcttttcttccattttttttccgcttgagaagcaaaattgccggccgatgctgatgcacatgatacgtgaatcctcaatgtggtcattttatgaaagccacatgtcaattctggctaccagtatgtatgaatgaataccgataccagtttgtggtgtggaatgggttgagtttgtacccttgaattgtgatcaatgtttcattgattcgtctgtccttgttccattcggggctaatttctgggtggttgctggcattatactgcaccaacaacaacagtataaacatagtggtatatatcccaagtccaagtgtaacgacgactgcataaatgtagagatgtttgtttttaattggcaataaatgaaatgtgatgagac

SEQ ID NO: 19612 - DNA, 890 bp, Zea mays
  Clone ID: LIB3150-069-C11_FLI
cagaccattagctttatctactccagagcgcagaagaacccgatcgacaccatgagggtgttgctcgttgccctcgctctcctggctctcgctgcgagcgccacctccacgcatacaagcggcggctgcggctgccagccaccgccgccggttcatctaccgccgccggtgcatctgccacctccggttcacctgccacctccggtgcatctcccaccgccggtccacctgccgccgccggtccacctgccaccgccggtccatgtgccgccgccggttcatctgccgccgccaccatgccactaccctactcaaccgccccggcctcagcctcatccccagccacacccatgcccgtgccaacagccgcatccaagcccgtgccagctgcagggaacctgcggcgttggcagcaccccgatcctgggccagtgcgtcgagttcctgaggcatcagtgcagcccgacggcgacgccctactgctcgcctcagtgccagtcgttgcggcagcagtgttgccagcagctcaggcaggtggagccgcagcaccggtaccaggcgatcttcggcttggtcctccagtccatcctgcagcagcagccgcaaagcggccaggtcgcggggctgttggcggcgcagatagcgcagcaactgacggcgatgtgcggcctgcagcagccgactccatgcccctacgctgctgccggcggtgtcccccactgaagaaactatgtgctgtagtatagccgctggctagctagctagttgagtcatttagcggcgatgattgagtaataatgtgtcacgcatcaccatgggtggcagtgtcagtgtgagcaatgacctgaatgaacaattgaaatgaaaagaaaaaagtattgttccaaatt

SEQ ID NO: 19613 - DNA, 1441 bp, Zea mays
  Clone ID: LIB3150-069-F10_FLI
caaaatgaatcttcgaggagaggtcagggtgtggaagaaaacaacatgcagaataaagggcgttctgatgtacatccacgtgatgacagtttaaacagtgagaggaactccaggcaagaaaaacaaaacaataatcgtctatctggcagttctgatgctcgccatgcaggtagagataggcatagggagagcacaaggaagggcagaggttctgagcttggtgagcatgatctccacagatcaagcaaaaggcgacgtgaagaccatgaaagccatcacagtgggaaggttgaaacaaaagaagtgaatgaacaagagagcagtagaggccatgcaacattatccaagaagagccagaatcctcagccagataattcattggtgaatcaagtggaagaagacgcctcagatgatgaaaatcacgaggattctagaaggggacgctctaaattggagcgatggacaagccacaaagagatagaatatagtaatatcgatgatgataatacagagacatttccgaccatcaaagctgatgttgaagccgatgaggtgggtaaatctgaagtttctgctgcagttggcaattcagacatcaatagcaatgttgatactgggcaaacatctgataagagtgaccgacatctagacacagttgagaggctcaagagacgaagtgagcgtttcaaacttcccatgcctggcgagaaggatacacctcaaagcaaaaaggtggataccgaaatgcagcctccccaaaatgaatctactgctgctgatacggaagtgaagcctgagcggccagctcggaagcggagatggactgggagttagttgaactagtacaacgtttccacttttcagcagatttcatggcagatgcttgcgctttgccacgtttttcctcgtacagttgaaagttgaattgatgtatggttttactgtctagcatacacatgtacgtgtaaacatagtttttttttgtggctgggaactggatactgtactaaaaccccatccattttcccactatgattctggtgacctcaatgtggcacaggagccactgtactccgggtaagttccgaggctgttatgggaagcagtggcctcggagtttcccagttgaatatctgggttcggcatgaactacattttgatgaagctggagtgcccctgctgcaaggttcttttgtttgaagtgcaggtggcctgaagcaccgggtcttgtaacaatcttgtgttggtgggagatacttgcaagatgtgatggttgaatgtttggcacgtgatgctgatgctgttttaggaaccaccaataggtgatagaaaccaagggctagagatttcagaactgacataatcacagatttgtatgcttaatactatattagtcatgtacattctgataaacgtataaatgtcgtgcatgatttactgg

SEQ ID NO: 19614 - DNA, 316 bp, Zea mays
  Clone ID: LIB3150-069-G3_FLI
gcgaggcagatgcgtcagggcccgtggccgaccaggagagaaggtcggccgtgttggtgtgcgacttccgaactggcaccgctctctccattgctctgagcggcggcagctacgatacgacgagatcgaggatgctttcgctcggccactaccgcctgcctgctcagctcgtcaggtgtcacgcttcccctcgcgatttcttcgcaagtgataggcagacacctctcgtttcgaaattttttgccggcgacaccgctgcctgccactggtttgtactggtactggtacacatccatgcctgttcccctagatcgcg

SEQ ID NO: 19615 - DNA, 682 bp, Zea mays
  Clone ID: LIB3150-069-G7_FLI
gagaacactaaggttgtctatgttggagatgggaacaacattgtgcactcgtggcttctattggctgctgtacttccttttcactttgtatgtgcttgtcccaagggatttgagcccgatgcaaagacagtggaggtcgccaggagtgctggaatcagtaagattgaaataacaaacgatcccagggaagcagttaagggagcagatgttgtgtatacagatgtttgggccagcatgggccagaaggaagaagctgattatagaaaacagaagttccagggattcacggtggatgaagccctgatggagattgctggcccacaggcctaccttatgcactgtttgcccgcagagagaggagtggaggtgacagacggtgccatcgaggctccaaattcaatcgtgttcccccaggctgagaacagaatgcacgctcagaacgccatcatgcttcatgttctcggtgcttaactctcctattgcacaccagtgtttaacttttcttgaatttgcttagggattgaggcagttttggctttagggcatatatgagagcttaattcagcgaactgttcagtaagcgtactgttcagtaacgtggtaactgttcttcagggtgggagtttgttgtactggaaaagtttggcaacctgaataaaaaaaataatcttttgtgctggtt

SEQ ID NO: 19616 - DNA, 829 bp, Zea mays
  Clone ID: LIB3150-069-H6_FLI
gctgtgcaaggaaaggaacccagcagatcgatcggtcgaggcgggtaggacaggatccagaggtagctaaccatggcggaggaagcgtctgcgcctgcggcggggacggaagcgccgccgggtaagatgacgatggtggtaggggtcgacgagagcgagcacagcttctacgcgctgcagtgggcgctgcagcacttcttcccgccgggccagccgcagcagtaccgcctcgtcgtcgtcaccgccaagcccaccgccgcctccgccgtcggcctcgccggcccaggcgccgcggatgtgctgccgtacgtggaggcggatctcaagcgctccgccctgcgcgtcgtcgaaaaagccaaaggcctctgcacacaggcgagcgacgctgtgtttgaggcgctagagggggacgctaggaacgtcctctgcgaggctgtcgagaggcacggggccgagatgctcgtcgtcggcagccatggttacggagccattaaaagggctgttcttggaagtgtgagcgactactgtgcccatcacgcgcactgcaccgtgatgatagtaaagaagcccaagcagcacaagcactgatcaatgccgactgatcactacgtgtactgcaaataatttgtactactgcaaagttatgtgtgcgtccgtccgtttgtgaataattgggtcatcaaccatcacatcttcggttgcttctacaagtatccgatccaatccttctacgagtggattgggatttacaaataattgattgctctctgaacctgaaaacaatgtatttgtattaatgtgttggaacacgtatatgtagttgcaactt

SEQ ID NO: 19617 - DNA, 450 bp, Zea mays
  Clone ID: LIB3150-070-D7_FLI
ggttatagtgctcagggaacgggatctactttgattatgccagtcctggacaatcaactaaaatcaccaagtcctctattgctccctgccagggatgctgtcacaccattgtcggagtcagaggccatcgatctagttaaggatgtgtttgcatctgcaactgagagagacatctacactggagacaagttggaaattgtagtcatcaacaaagtcgggactaagcgcgagtacatcgacctgaggaaggactaagccaacgcttcagttgtgctgcagctgtcatttgcttcggacatgtttcctagtctggggatttatgtctaaagccgttgctttcatagaaacatatgttattacttgcatatgtcctgtaccagggttcagtcagcttgtttttttttttgttgaaacaaattgcttggatattgaagcggtacttactggcgg

SEQ ID NO: 19618 - DNA, 1750 bp, Zea mays
  Clone ID: LIB3150-070-G4_FLI
gcaggcgaaaccccctcatcgcttcgcgctgtccaccgacgaatcttccccagctgagttaatcggggactggtcgtgtgcggagatgttggtgctcttcgagacccccgcggggttcgccctattcaaggtgctcgacgaggggaagctcgacaaggtcgaggatctatggaaggagttcacgacgtcggactcagcgagaaaggtggtcgagctgaaggctttcaacaagtttgagaacacatctgatgccctatccgcggcaaccctgattattgatagcaagcctagcaagggtctgcgcaagttcttgcagaaacattgtgagggtgaaacattagcagtagctgattctaagcttggaaatgctataaaagaaaagctgaaaattgactgccttcacaatagtgctgtgatggagctgatgagaggactgagaaatcagcttaccgagcttataactgggttgggtgcacaagaccttggtccaatgagcttgggattgtcccacagcttgtctaggtataagctgaagttcagccctgagaaggttgatacaatgatcattcaagccattggattattggatgatcttgacaaggagcttaacacttatgccatgagagttcgtgaatggtatggctggcactttccagagctcaccaaaatagttacagataatatacagtatgccaaagttgtgaagatgatgggcaacagagttaatgcagtcaaccttgacttctctgagatattgtcagatgaagagctagaaacacagctaaaggaggcagcagtaatatccatgggaacagaagttagtgaccttgacttatcgaatatcagagagctatgtgatcaagtgctggccctttctgagtacagagcccagctgtatgactatttaagaagcaggatgaacactattgcaccaaatttgacagcactggtgggtgaattagttggtgctcgccttattgcacatggtggaagtttgttaaatttggccaagcagcctggtagcacaattcagatacttggtgcagagaaggctttattcagagctctaaagacaaagcattctacacctaagtatggcctcatctaccatgcatccttaattggcaaggcttctcaaaagcacaagggaaaaatctctcgttctcttgctgcaaaaacagctcttgctatccggtatgatgcccttggtgatggtgaggacaactccattggcactgagagtcgacttaagcttgagacacggcttcaagttcttgagggtagagaacttgggaaatctgctggttccacaaaggggaagcccaagatagaagtgtatgaaaaggaccggaagaagggtactggggctttaacaactcctgctaagacatataaccctgcagctgatctggtactcacggaagaaacaccaaagaagtcagaattggcttcaaagaagaggaaacataatgaggtggaaactgaaccattagcagagcctgcagaggaagcaatccaggaggatggtgaccaggaggatcggaagaagaagaagaaaaagaacaaggaaagcaaggaggctcctgctggtgaaggtgatggtgagaagaaaaagaaaaagaagtctaaggaggtcgaggaagagcctgttgtggctgctgcttcagaagttaagaagaagaaaaagaagtctgacgctgatggtgaggatgtcgcaatgcaaaccgaagaatcaggtaagaaagagaag

SEQ ID NO: 19619 - DNA, 876 bp, Zea mays
  Clone ID: LIB3150-071-E8_FLI
gcggcggcgcgggcggacaaggagcaggcggaggaggagttgtgccaagccacaatgggtatctcgcgtgactcgatgcacaagcgccgagccaccggtggaaagcagaaggcctggaggaagaagcgaaagtatgagcttggtcgccagccagccaacaccaagttgtcaagcaataagacagtgaggagggtccgtgttcgtggaggtaatgtgaaatggagggctcttcgccttgatactggtaactactcatggggaagtgaagctgttacccgcaagacccgtatcctcgacgtggtctacaatgcatcaaacaatgagcttgtgaggacacaaacccttgtgaagagtgccattgtgcaagttgatgctgccccattcaagcagtggtacctcactcactatggagttgacattggtaggaagaagaaaacccctgctgcaaagaaggataatgctgagggacaagaggttgaggcagcagctgaggaaacgaaaaagagcaaccatgtcacgaggaagcttgagaagcgcaaggagggacgtacccttgacccacacattgaggagcaatttggcagtggacggttgctggcatgcatttcttcccgccctggacagtgtggccgagctgatgggtacatccttgagggtaaagagcttgagttctacatgaagaagctacagaggaagaagggcaagagcgctgtagcttagagcattctcatggattgtcttgcaccgaaatgtgtgtcctgatgagtacactttttttggttagtcgtctcaagttcagagcgttatgccatgttttcagtcctgattagtacactgttttctaaaagcgattgagctctagtccaatgtattgat

SEQ ID NO: 19620 - DNA, 707 bp, Zea mays
  Clone ID: LIB3150-071-G10_FLI
ccgggacgtgggaaaactgaaggcattggttaattccggaaaattaatcaaggtaaaccaaaagtacagaattgcaccaagtccacccccctcgggcagaataggcactaaggtatcctctgctgaaggcatgaaggcagaaaataataatgctaaacggctaactaagcatcaagtgattgctgagctggagaagatgaaaggcatgaccaaggaagaggcagctgcctttgctgccaaggcagttgctgaggcagaagtagcaatagcagaagctgaggaagcagcaagagttgcagaggctgcagaaaatgatgctgaagctgcaaaggcttttcttgatgctgtcactttatcaatgagaaacaggaatgctgcttccatgatgcttcgagcttgctgatcctttacccatgcggtcatatggttttggccagcagcacaccggtgtttctgctgcaaagattttctggatatatgagtttcttgtatagccttatttatagatcacgacgcatcaactggaggggtttttaacatcttgctgttggtcctttgtcgttgcagcctttagacaatcgacaatatgataacaagagttatcttgaaagtagtcttcatttacttttgttttctccccattgtgttgctttgtaattaaactctagccttttcgtttagttatttgaaattgtgtcgtctagtag

SEQ ID NO: 19621 - DNA, 1170 bp, Zea mays
  Clone ID: LIB3150-072-F11_FLI
gaatgggtttccagctacttctattcatggagatagaaaccagcaggaaagagaatatgctctgaggtccttcaagagtgggcaaactcctattttagttgcaactgatgtggcagctcggggcctcgacattcctcatgttgctcatgttgtcaactttgatctccccaatgatattgatgactacgtacacaggattggaagaactggaagagctgggaagagcggacttgccactgccttcttcaatgataataactcatcactggcaagatctcttgctgacctaatgcaagaatctaaccaagaggtacctgcatggctattgcgctatgcagctcgtccttcttatggtggtggtggtggtgggaggaaccggcgatcagggggagggagccgctttggtggccgtgacttccgcaatgattcttcgtcatttggcaaggggggatcccgtggtggtgactactatggtggaggcagcagtggtggttatggtggtggctcctcatatggtggtggcggacacggtggagctggggctccgagtgcctgggattgatgttacagttgctcccaagtagaggggtctgccaagtttaggtcactttttactctagttctatttaggtatacatttttggtaggagctgttatacagcaacaagtacaaggtgaatgtggtcatcccctttcttcttctggttgctactggctgcagtcttaatcttgcagatgttcattacgaagagggtcttgaggacattcaagcacacgagattcctagttaggtgaaattcctttgtagggggatagtagctaggctctgacaagtagtgcttggtgcgtaatttctgcctttgctctttttccctttgtcagcgtcgaattttggtggtcggttgtaaagcttgtgttgagggggcttttgcggcttgatttttgtcctggattcgagttttgacaccggaggttgaagaagcggtaggatgatggtagtcctttagatcctgttgtaatgtatttaactgtgaggtgaggctggacacaataaattctgtaggcgtgtttagaggaagaagggggaagttgtgtgtgatggtttcttcagagaagattcctgctactgtgtacttcgaatctgtttttggatggagttaaattgacatt

SEQ ID NO: 19622 - DNA, 1108 bp, Zea mays
  Clone ID: LIB3150-072-H9_FLI
cttgaagatgaacaaccatatttccattctagtgattctcatcgtcgatgtgtctgttgtcctcctgctcaattcccatgtagggttatgcagctgctacaaccgcatctttagttttggtgacgataccatggacactggaaatttcattcacttgattgggaaggccccatctaagtacaaggaagccccctatggcaagacattttttagacatgcaactggccgcatttctgatggtcgtgtcctcattgatttctatgcggaagcactaaaactgccaatgataccacccattttacctgagaagaactctgggtgtttcccacatggcgccaacttcgctgtgtttggtgccacggcacgtggcaaagtcttcttttcagggagcccctggtgtataggcacacaaatgtactggtttgatcaattggtagatcgtatagctcccggagatggtaaacctcccaaggatggaaatatcatttcagatgtcatcgcagacataagccatttcatcgaggagcttattgtcgttaatggggcgaaagcattcgtggtcgccaataactttcccgttgggtgtttggcatcatacctaagtaggttccacagtgacgaccatgaggactacgatgagcatgggtgccttaagtcgttcaatgagttctcccaaaagcataatgagcaactttattctgccatcggacaaatcagatactcttacccaaatgtgaaggtaatctatgctgactactacaacgccaccatggaattcatcaagaagcctagcagatttggtattggtgatcctctagtagcatgttgtggcggcaatggaccataccacaccagcatggagtgcaatggcacagcaaagctttggggtgacccacaccactttgccaattgggatggcatgcacatgacagagaaggcatacaacatcattatggaaggggtgttaaatgggccatttgctgatcctccatttccacttagttgctaggattgttacgctaggaattccttacaacatgtagccaatattttttataataatggaagtattttggatttatactacttcaaggaagaagtaactttc

SEQ ID NO: 19623 - DNA, 775 bp, Zea mays
  Clone ID: LIB3150-073-A7_FLI
ctgcgccaagagttccatgttgcggctcagaactgctgggttaagaagggaggtgctttcaccggtgaagtcagtgctgagatgctcgtcaaccttggtgttccctgggtcattcttggacactctgaaaggagagctctgctgggagaatcaaatgaatttgttggagacaaggttgcgtatgccctgtctcagggactaaaggtcattgcatgtgttggtgagacacttgagcagagggaggctgggtctaccatggaggttgttgctgcacaaacaaaagcaattgctgagaagatcaaggactggagcaacgtagttgttgcctatgaaccagtttgggctattggaactggtaaagttgccaccccagctcaggctcaggaagtgcacgcctccctgagggattggctaaagaccaacgtcagccctgaggttgctgaatctactaggatcatttacggaggctctgtaactgccgcgaactgcaaagagctagcagcacagcctgatgtcgatgggtttcttgtcggtggagcttctttgaagcctgagttcatcgacatcatcaacgcggccaccgtgaagtccgcttaagatgttacgctgaagacgaacatactttttttttgctcaactgtgctatgtaagctagtagcttttgcgcaggagcagagactgttttgcctgcccccaacttttagcttgagcttgctaataatgtttacctctggacgtatcaataatggtgcttatgtaccccttttttgtgccg

SEQ ID NO: 19624 - DNA, 1108 bp, Zea mays; identical to SEQ ID NO: 19622
  Clone ID: LIB3150-073-D9_FLI

SEQ ID NO: 19625 - DNA, 1180 bp, Zea mays
  Clone ID: LIB3150-073-E10_FLI
caaaagccatttctgagggatggttagattcttcgtatgtgaactcaggtgtcaacggaagcgttgaagacgatgaacatgagaagctggctaggtacaagagggaggctgtatccataatacacgaatactttctctctgatgatacaacagaggtcatccgtagtgtcaaagagcttggttatccggaatacaatccgatcttcgtcaagaagctcataacaattgctatggaccgcaagaacagggagaaagaaatggcatcggttcttctcccttcattaagcatggagctgttctcgtctgaagacattgccaagggattcgtaatgctccttgaatctgcagaagacaccgcgctggacatattggatgcctcagatgagctgggactgttcctagccagggctgtgattgatgacgttctcgcacctctaaacttggatgagattagcagcaagcttccaccaaactgcagtggggctgaaacattgaacatggcacgctcccttgcgtcggcccgtcatgccggtgagaggcttctgaggtgctggggcggtggaaccggatgggctgtggaggatgccaaggacaagataacaaagctcctggaggagtatgagagtggaggcgatgtaggggaggcatgcaactgcatccgtgagctgggtatgtctttcttcaaccatgaagttgtcaagaaggcgctcgtgatggcaatggagaagaagaacgagaggaccctgaacctgctgcaggagtgctttggtgaagggatcataaccatcaaccagatgaccaaggggttctcaagggtcagggacgggcttgacgatctggctctcgacattcctgatgccagggagaagttcctttcctatgtgcagcgcgcgaagaagagtggatggctcctgcctgggttcggtgttgcatcttcggcttgaacagctgggcagaagagaagtacgaagctgaagcggctcagcaaacccagtttggatgtgtgttttcgtcgtttgtggttgcccttgcgcctaggttagcggagcgagcccttcctggttgcggtggtggtggcttgtgtaggtctcgcatctgacatgttcatgctgttcttgtttcatttcatttaactctccatagaccctttttttttacatcaagctaaaacagagaagag

SEQ ID NO: 19626 - DNA, 1343 bp, Zea mays
  Clone ID: LIB3150-073-F12_FLI
ctgcgcgcgcgacgtctcgctgctttctccaactcctgttcggtatcgccgtttctcgcttggaggttgtcctgtagcggggacgaccgcccattccggcgcccgctcttctgctcctcctcgccttcctgtttctgctgcggggagttcttccgccgcgagccgggacaccgtcgccgccggccgcccgctgtccgacgcgcagagcctcgtgtccaagcgtggcaagttcaagctcggattcttccgtccagggtttggctcgagatggggaaggcaaagagcaagggccctaaattcgcggcggtgaagaagattatcaccaagaaaaccatcaataaatacaaggaggatgtgctgaaccacaagaagaaggacgtggacaaggagaaactcggccggaatgtgccgcaggtttcgtcggcgttgttcttcagctacaacacagcattggggccgccgtatcgggtgattgtggataccaacttcatcaatttctcgatacagaataagctggatttggagaagggaatgatggattgcctttatgcaaaatgtaccccatgtatcacggactgtgttatggctgagcttgaaaagctggggcagaagtatcgtgtggccttgagaattgccaaggaccctaggttccaaagattagcatgcacacacaagggaacctatgctgatgactgcattgtggagagggtcactcagcacaaatgctacatagttgctacttgtgatagagatttgaaaaggaggataagaaaggttcctggtgttccaatcatgtacatcacaagacataggtattcgatagaacggctccctgaggccacaattggtggagcaccaagaatctgatcggtgcagacatgagatgttctgggatgtaatactatggcggtacttgtccatctgaccaagtcactatttcatgtttcagtccacgacaaggactaggataagaacgctgctttctaggttgagcttactgtaactactaagaaatttttattatgtaccaaccttatcatttctacaatgttgcgggatgtctgaagtaattctttgttaaaagatcgggtatcctgctcccttttgcttctcaatcttgtgcgctacaagccataatcccaatagagtggctcttcctgaatctcttatagaggatgaacataggagtccctcataatgtgaaacagaggcgacaacaatctgcaacagtcgttggatatttaggccttgtatttctacagtgctacaacactttactaaagtttagcacatgaaatcaaacaagcatattgaaagagcagtgctaaagtttagcacctatt

SEQ ID NO: 19627 - DNA, 1532 bp, Zea mays
  Clone ID: LIB3150-074-D10_FLI
gcaaaccattcggtttctcgagcgcaatgcctctcgctgcagtgctccttcccctcctcgtcctcggcgcgtcgtcggtgtgtcaaggtcaaggcgctgcgagccacaacatcacggccatcctggcggcgtacccggagttcaccgacttcagcgctgccctggtcagcaccggcgccgcggcggagatcgaccgccgcagcaccgtcaccgtcctcgccgtcgacaacgccgtcatggcgcggctaaaggcgcagaagctgcagctcgacgacctgcagcgcgtgatctacctccacgtcctcctggactacttcgacgccgccaagctaggcagcatccagggcggtttcgcccaggccgctagcctctaccaggcctccggcaaggcgcaggggagcgacgggatcgtcaacatcaccgtgttccccgacggccgcgtggcggcgttcacgccgtcgggcccctccaacaggttgccgaccgccttctatcaacgatccatcaaggaacaaccgtactacatcgccgtcctgcaggtgagggacctgatctggtctccggcgccggcggacggggtgcaggctccaccgcccgcgccgcagcccgacgcggcgccggggttgacggatctgctgtccaagaacggctgcgggggcttcgccagcctcctcgccgcgacggccgacgcagtcaccaagtacgacagcagcgccgccgggctcaccgtcttctgcccggccgacgaggctgtggaggccttcaactccaccttcaagaacctcaccgccgacgcccagctcgcgctcctgctgtaccacggcgtggcggaacactactccgcgcagtctctcaaggcgatcaatggggacgtaagcacgcttgcctccgacggatccaagaacaacaacgggtacaacctaacgatacgtgccgacggggacacagtgaaaatctcgtccgcatctgccagcgccgccacggtgaccaagacgctgctcgacaaggcgccgctcgccgtctacctcatcgacgcggtgctcctgccaaggcagcagtctaacgacgaccagggacacactgcgcccgcccctgcgccggcctcctcgcctgcacatgcacctacacctgcccttgcgccggtctcgccgtcgcctgcccctgtaccggtctcgccgtcgccgtcgcctgcacatgcacccacacccccgcttgcccctgctccggtgactgcacctgcgcccaggcgtcgcccagcgccttcgccagagcacactaccccagctccttcgccagacgcggacggccaaccgcctgcagatcagaagaacaacgcagcaagggacacggcatcttggactatcggcgcggcgctggcgatcgtgtgcctcttgtcgtgaagggtttaaggctttaagcttagatagattgacgccgattgggatccgtcatctcgccgccaataccagtgtacactgaagacaatgtttatgggcatgcattggccaaaataatattattctgcttccgcc

SEQ ID NO: 19628 - DNA, 1905 bp, Zea mays
  Clone ID: LIB3150-074-D2_FLI
ctttgagttcacccgagaacgtgctatatttgatcttcttgatatcccgctataccatggatggatagtggaccctcaggatactgaaactgctaccgctattggatcaaagtcctacaatgctcttgcttctggacttgctgaattcaagtcaggtaaaccaacagaagaaaacaaatatgtggaggaagaaactgttgattttgctgccgcaacaactgcagctttaaagattccatctcccagtgtttctcgtgggagatcgtttgatgaacatactctctcaaactcatcaactgtaccacataaaaggcgaggtgaccttgaggaagaagaggaactgatgagagtcctcaatctatctaaagctaaaagtggggatgtagaagtttcttttgacacttcacatagtcattcatcctccaatattgagacaccacaaaatgagagttttcagtcagaagcactcgagttggtggtggcgacaaaaaaagaggaatatggtaatcacgctacgagtgatcatgtctctatgctatcagtcacaaatgttgctattaatggcagcgaagttgtacccgaagaatcccaagaaaatttgatatctaaagaaccagaggacaatggaataaagaaccttgatatacccattcaattttcagaaactactccttatccgtctcatgaatcctttgctagcagtgaccaccaacctgctattcctacccttgttgaagatgataaagaaacctgcaaagaacagttcgatgtacaaattcatggccagtctaatgatactgatgtcgcttgtgactcatcagttacaacttgtgaagctgttccagatcatgctacaacagaactggatgtgaaaagtgattctttagataattctcagtctctaccttcaagcattcaggaatgtgaaccaatataccaaggtgaagagcacatacttggcaccacaaatatggtgtatgaaaatcaagagccagtgtatgagggggaggtggttcttgctgagcaggctgacaagattggggaaagcagttcttctggggatgacaaggccacagaacatcaatgggaactgattgataattttctgcggaccactgctaaccagctgactgtctatggtctcttctgtttacaagagggacttaacgaaagtgagctttgtgtcttcttccgcaataaccactttaacaccatgttcaagtacaacggaagtctatatctcctagcaactgatcaaggttttataagccaaactgatttggtatggcaaaggttggatgaggtgaatggagatggcgtttttcttactagcaacttcacaccatttaatgctgaaactccaagaaatgattcatggaatgaacagcaagctatgacgagtactgctgattatcttgctcaatttgacaactccacttctggaaactctgatcttgagctagctatagcactccaacagcaagagtttgagcggcaaccacaaaggtttcaagctccaccgcagcagcagcagcaacaacagcaacaaccaccacctcatacgcagtaccagactcaatctggccgaccaggacttgttgttggtccaaggaggtccaacgccccacctccgtccagaagtgaatcgaagaaagagagatgcatcgtgatgtaaaaataccttcaacagaaatgtagaagaaaaagagagagaaggaactcattatactgtaaagaaatgttttcttctgcggaggcagtgtctgcgtttagtcaccttgagccatctcccatttgagtttttttttggttttactttctctgatgtatgtaaataacctaaacgaataaagtgtagaaacagatgctgtcaaagtgatggccccatgcaatgtgatttcattc

SEQ ID NO: 19629 - DNA, 1767 bp, Zea mays
  Clone ID: LIB3150-075-C4_FLI
gtccgccactgcggcctacagctgtaggcctgtagcctttgccttcctctgtgctgtggctctgcatctcatcgctgcggctcttcatcctcgccaccggacctctgtcgctcacctgttgcccccaagtccaaatgatgaagtccctcctcttctccgcccaccccacgtcgctgctcctccccgctccccgccttcgcaggctcctccgcctccgcgccgcctcctctgcctccgcctccgcgccgcctcgagccgaccgccgctcccccgggacgccttcgcgccgaccatcctcctccctctacgcgcgccccagcctcctcgacatggagcgggatcgcgccacccgccgcgccgatgtcgacgccttcctcacctccctcggcgtcgacccgggcgaactcgcgggcctcgagctcccagtcaccgtcgacgtcatgcgggagcgcgcggagtttttgggttccctcgggctcacccaggaggacctcgctgcctaccctctcgctctcggctgcagcgtgcgcaagaacatggtccccgtcctcgactacctcggcaagctaggcgtacgccgcgatgcgctcccggacctgctgagacggtacccgcaggtactacacgccagcgtcgtcgtcgaccttgcccccgtcgtcaagtacctccagggtatggacgtgaggcccactgacgtgccgcgcgtgctcgagcgctacccggagctcctcggattcaagctcgagggcaccatgagcacttccgtcgcctacctcgtcggcattggagtggggaggcgtcaggtaggcagcgtcatcacccgttttccagaggtgcttggcatgcgcgtggggaagataataaagcctttcgtcgaacaccttgagggcatcgggctgcagaggttagctattgcaagaataatagagaagaagccatatgtgcttggatttgggctacaggagaaggtgaagcctaacattgaggctcttgtggacattggagtgaggaaggaggccctagcatccattgtgatgcagtaccccgacgttcttggacttgaactgagggacaagcttgttgcacaacagagcttatttgagtcgagcatattggttagtcgtgaagattttgggagagtgctggagaggatgccgcaagccattagtcttggacgagctgcggttctgaagcatgttaatttcctcacagcttgtggatttatgctatctcaagtgagcaaaatggttgtggcatgcccccaactgctcgcactaaatatagatataatgaggatgaattttgaatacttcaagaatgagatggagagggatttggaggagctggttgagtttcccgcattcttcacatatggcatcgagtcgactgtgaggcctcggcatgagatggtgtcccggaagggcctcacatgctcccttgcatggcttcttaactgttctgatgccaaatttgatgagcgcatgaagtatgatacaattggggttgatgaaatggagcgtgaggattcttctgacatgaatgcatctgtggatgaggtagagagtgaggagtatgaagacagtgattatggtgactctgatgatgagtttgttcgataatttatttcaccagtcattagatttttaactttggagtatgtgcttggtacgcgaaatgtcaaattatagcttaatgatgcatttctcatcttccttactgatgtatcccctcagttccaaattataagaggttttggcttttccagat

SEQ ID NO: 19630 - DNA, 951 bp, Zea mays
  Clone ID: LIB3150-075-D1_FLI
ctgctctccgaccccgagctccgaaggccgcagcatcaggcgcggcccccctcgcgtgtgaccgagatggcgctgccgaatcaggggaccgttgattaccccagcttcaagctcgtcatcgtcggcgatggtggaactggtaaaactacatttgtgaagaggcatctcactggagagtttgagaagaaatatgaaccaaccattggtgtggaagttcatccgttggatttcaccactaactgtggtaagatcaggttctactgctgggataccgcagggcaagagaagtttggtggcctcagggatggatactatatccatggccagtgtgcgatcatcatgtttgatgtaacctcaaggcttacttacaagaatgttcctacgtggcatagggacctgtgcagggtctgtgaaaacatccccattgtcctctgcggtaataaggttgatgtgaagaacaggcaggtcaaagccaagcaggttactttccacaggaagaagaatctgcagtactatgaaatttctgccaagagcaactacaactttgagaaacctttcctgtacctcgcaaggaagctggctggtgatccgaaccttcactttgttgaagctgttgctcttaagcctccggaagttaccatcgacatggctatgcagcagcagcatgaagctgagcttgctgcagcagctgcacaacctcttcctgatgacgatgatgatctgattgagtagaaaggatcatgagtcttgaacttgagcaggagttgtgccttgcgtgttttaagttgttctagggtgaactcttgagttctcattgtctggatcatctttttctccttggatgtgttgcatcttttgagtgtggaaatggatggtactcctcgccatgaatttgctggctactttatacattgctttgtaactctgtttgatgataaactttgttgtggc

SEQ ID NO: 19631 - DNA, 1948 bp, Zea mays
  Clone ID: LIB3150-075-F6_FLI
cctcactcttcactagccctctgctcctctgaaatggcggcggcgacttcctcttccacctacctcgccatcggccgcaaaaccctaaaccccgccccctccgtagccacagccgccacctccgtctccttccccgccacgcagcatccatgcctcgtcgccgcctccgcggaccgccgccgcgccgtggctgcgaaggtctcgtcgccgtcggtcatcggcaccgccatgccgtcgctcgacttcgagacctccgtcttcaagaaggaaaaggtgtccctggccggccatgaggagtatattgtgaggggtgggagggatctgttcccgctgttaccggaggccttcaagggaatcaaacagatcggcgtaatcggctggggctcgcagggtcctgcgcaagctcagaacttgagagactcacttgttgaggcaaagtcagatattgttgttaagattggtctccggaaaggttctaaatcttttgaagaagcccgagcagcaggattcaccgaagagagtgggacgctgggtgatatatgggagactgtatcaaacagtgatcttgttttgctactgatatctgattctgctcaggctgataactacgagaaaattttctcgcacatgaaaccaaacagtattcttggtttgtcacatggatttctccttggacatttgcaatctctgggttttgatttccctaaaagcatcagtgtgattgctgtatgccccaagggaatgggcccatcagtcagaagactttatgttcagggcaaagagatcaatggtgctggtatcaatgctagctttgctgttcaccaggatgttgatggaagggcaacagatgtagctctagggtggtcagtagctttaggttctcctttcacatttgctactactctagagcaggagtaccggagtgacatttttggcgagcgaggtattttgcttggtgctgtccatggcatggtggaggctcttttcaggagatacacagaacaaggaatggatgaggactcagcatataagaatactgtagagagcatcactggaattatatcgaaaactatttcaaagaagggtatgcttgaagtgtataactctctgactgaagaaggaaagaagcagtttattgaggcctatagtgcagcatattacccatgcatggacatattgtatgagtgctatgaagacgtctcttctggaagtgagattagaagtgtggtgttggctgggaggagattttatgagaaggaagggctccctgctttccctatgggaaaaattgatcaaacacgtatgtggaaggtgggtgaaagggtccgttcaaccaggccacaaggtgatcttggcccactgcatcccttcactgccggagtgtatgttgcattaatgatggctcagattgaggtccttaggaagaagggccactcttactcagagataattaacgagagcctgatcgagtccgtggactcgttgaacccgttcatgcatgctcgcggtgtggccttcatggtcgataactgctccacaactgctcgtttgggatctaggaaatgggcaccacgcttcgattacatcttgacccaacaggcgtttgtgactgttgacaagaaagcaccgatcaaccaagacctcatcagcaacttcatgtctgaccctgtgcacggtgccatcgaagtctgtgctcagctgaggcccaccgttgacatctcagtgaccgctgatgcagatttcgtgcgcccagagcttcgacagtcttcataagcttgtatggatccgcagtgtgactgcaatggctagtttgtaagaacttaatatgcctgggcttttgaactcttagattgtgcttgtattgctcgtgcttgaggaccagaaaattaaactcttggcggtgtggtactgttgtgatttgcaagaataaaaataattggtttaaact

SEQ ID NO: 19632 - DNA, 1005 bp, Zea mays
  Clone ID: LIB3150-075-G12_FLI
gtactcaggtctcaggtcactgtctttctcactgaaaccaccaagccctctgcatctttaaccctccccgtcgtcacgctgacctaaccatgatttgcctcaaagccatctcatcccctctccacctcccgaccctccgccgcctcacccccacctcctccctccgcgccgccgccgccatgtcctcctcctcgtccgctgtggccgccccgatcgagcacttcgtgctcttcaaggcccgcccggaggcggtggcctcgggcgccgcggcggcgatggtctcctcgctgcaggcgctggccacgctcgtcccgggcctggcctacatccacgcgggaccggtgctccgcctccggtccccggccgcggaggcgctgggccccacgcacctcctccacacccgctacgccaccaaggaggacctggcgtcctacgcggcgcacccggcgcacgtggccgccgtgcaggggcacgtcctccccaacgcgctcgacatcaccgccgtcgactgggtcaacgccgcgccgctcccgtcccccgcggcccccggcagcgccgtgcgcctcacgctggcgaaggtgaaggaaggggtggaggtcgcgcagctcgtggagaaggtggccgcggcgacccaggccgccggggacgccaaggtgagcttcggggagaacttttccccggcgcgggccaaggggtaccagttcgggatggtggcggtgttcgacagcgtggaggagctggacgccgtggaaggggacggcaaggtggaggaggccaaggccttggtcaggccgctgctggacgaggtgatggtcctggacttcgtcgtcggagatgctccaacgcccgcgagcctctgattacaggctgcagggtctcagtttcgggattctgagtgtgttgttgatgtcggaataatggatagatggactccctggtcctgcagcttctcaacttgtgatttgtgaaattgggaatgacagtgcaatgaataagaattgcttc

SEQ ID NO: 19633 - DNA, 589 bp, Zea mays
  Clone ID: LIB3150-075-G4_FLI
cacgcaagccactccgaggccaagtctagggtttgggaatctgtaggaggggagaggggagcgcgctcagggtcagggaggcgaagatgatcgaggtggtgctgaacgaccgcctggggaagaaggtgcgggtgaagtgcaacgaggacgacaccatcggcgacctcaagaagctggtggcggcgcagacggggacgcgccccgagaagatccgcatccagaagtggtacaacatctacaaggaccacatcacgctcaaggactacgagatccacgacgggatggggctcgagctctactacaactaggcgccctgaccccaaccgtgccctgatgtaaggttaatccgaattctgaagtcatgggtgcgcttccagtcacagcgtctttagctaacaagctcgcatacatataggcaacttgagtgagctatgtagtacggatatggttgtgtggcaaactgccaatgactattgacatccttgcatatattgacatgtgacaaggatcaacctgcaaaactggtgccctgctactcgcagaccttattatcttaaataacacaggtggtgtgtttttcaattatgtg

SEQ ID NO: 19634 - DNA, 946 bp, Zea mays
  Clone ID: LIB3150-076-F1_FLI
gcgagatcgtgcgcgcctccgagatctccacgaagttgtggtaacatggggctcaccttcacgaagctcttcagccggctcttctccaagaaagagatgaggatccttatggttggtctcgatgcagctggtaagaccaccatcctctacaagctcaagctcggagaaatcgtgaccaccatccctacaatcgggtttaatgtggagactgttgaatacaagaacattagcttcactgtctgggatgttggaggtcaggacaagatcaggccattgtggaggcactatttccagaacacccaaggccttatctttgttgttgatagcaatgacagagatcgtgttgttgaagcaaaggatgagctccacaggatgctgaacgaggatgaattgagggatgctgtcttgctcgttttcgcaaacaagcaagatctaccaaatgcaatgaacgctgctgagatcaccgataagcttggtctccattccctgcgccaacgccactggtatatccagagcacttgtgctaccacaggagaaggtttgtacgagggtcttgattggctctccaacaacattgcaaacaaggcctgaatggacaattctgctgtttcacggagcacatctgcacatggcgaggcatggtcattttgaccctcagacgatcattgtttcattggaaagtatcgtatttctatgctaggcttttcagagagattactctctaagaaactgatccgatattaagacactataattggcattggcactagtagatcgtttactgagtaatgcagtttattttaatgtatcccaattgtgttgtaagatacaactatgcgtcggaattacccattcaatttgaatctagatacgtagtttttgttatatacttatacttggatatatattgtttaatacatggtaaaagtaacatatcaagaaaaat

SEQ ID NO: 19635 - DNA, 731 bp, Zea mays
  Clone ID: LIB3150-076-G4_FLI
ggcttctcctccccctcttaccaagtcctcttcgggttagggttacttagggttttgtggaggggcgatggcggcggctgatgtggagtaccgttgcttcgtcggcgggcttgcctgggccaccagcaacgagtcgctggagaatgccttcgcctcctacggcgagatcctcgactccaaggtcatcaccgaccgggagacggggaggtctcgcggcttcggcttcgttaccttctcctccgagaactccatgctcgacgctatcgagaacatgaacggcaaggagctcgacggccgtaacatcaccgttaaccaggcccagtcccgtggcggtggcggtggcggcggtggctacggcggcggtcgcggcggcggcggctatggtggcgggcgccgtgacggcggttatggcggcggtggcggctacggcggtcggcgcgagggtggtggcggcggctacggaggcggtggcggctacggcggtcggcgcgagggtggtggtggcggctacggcggcggcggcggcggctggagggactgatgtgtgggcccatcctggcttcggccgagttatcttatctatctatagtatcgtgttaccgttcgcttctgtcaccgtgttagtgtccgttctacctttggattaggtgttggtacccctgttgttccctttggttgctcccgctatgaaacgagacgagagaagaatgagcaaggtttttgttcgcagc

SEQ ID NO: 19636 - DNA, 1039 bp, Zea mays
  Clone ID: LIB3150-076-H7_FLI
gggagacataacccgagccaactcgaggaaaaaaaagaagttactgcaaataaattctggaggatatagtgtatctgaacaagataaaattaaattctcaatgcgtatcgtgcactttttgcttccttggctgaaacaattccatcaagagcagatgcaagagaaaagtgccgaggctgcaactaaaggtattgatgcagacaaactggaggtccctctaaccatttgtggaaaaaaggaacggatatactgcaacaactgcaggacatctattgttgacttccacagaacctgcaataaatgtaactatgatctctgtctccagtgctgccaggagcttcgtcgaggccttgtttctggtaatgatggcaaggttgatggtggaggcaagcaagattttctatcgggagttagtcatgataaaatcataagcaaagggccatccgatggacagaatgacatgttgatagatagtgtagttcctggtgaaaacaacacttctagcttgagacagtggagtgtgaataaagatggaaccataccttgcccaccaaatgcatttggtggttgtgggagctctcttcttgaactgaagtgcttgtttaaagagaagtttattgctgaattactggagaaagctaattcagcgctcaataatgaaatggaggtgaagatagaaggatcaaaatgtccctgcttcactgaatccggtgacatggatgatggtatatcacggaaatcatcttgcagggagaattcctgtgataactacatatattgcccaaccgctacagatgtccaaaatggaagtttagaccatttccaggagcattggttgaagggtgaacctgtaattgtccgtgatacacttgcgttgacttctggattaagctgggaaccgatggttatgtggcgtgccttacgagaaaagaaagagaaagttgagaggctctcagttcttgctcttgaatgcttgggttggtgtgaggtttgtaatattctcatgactgttaatagctcgaaataataagacattctg

SEQ ID NO: 19637 - DNA, 1291 bp, Zea mays
  Clone ID: LIB3150-077-A12_FLI
gcataaaaccccaccccatctgcgtcgagggttttcctcgaagcctcggatctccgccgagaaagcatctccagggggatttttgggaagaagtagtggttgagccatgggcaaccttcacgccaaaggtgctggtacgggcgccaaaggtgctggagcagcaaacacttccatctcgaattctggggactcgatgtccaatgccgctacaccttctcccgtagagcaggcaaccttcaagtgggtcattgatggcttttcctccctgcttgacaaggatcaaggatggacatactccaacgtatttgagctcatgggtgtagaatggtatctgaaactgaatccaaagtacgaagtcagtaatgaggagtgtgtctctctcaggcttgaactgtcgcagagttcagtgaaactcgacactatctttgaggcatctttcaagttcatgatatatgatcagttaatcggaaagcacaaggtgcatctaggtaaccacagcttccagaccgcaagtacgagctctgccatcgcattcatgttacctctgaaagcactcagacagtcctctagatttattgtcaataacagctgcgtatttggcattggcttcatcaaagttgccactatcaaagtcaacacgacgctagaaacactgtttgtcaggaagatgaacatcttcaacgaggccaaagtttacacttggaaaatcgaggatttctctgctctgaagaacccgtgccactcaccagagtttgagatcgctggatacacatggattatctctttgaatccatcctacgatggtaacagcctgtccttattcctgaaaatgaagaagacaaacgacgtccccaaaggctctgggagcctggtcgagttcgctttatccatcaaagaccaggaaaacggcaaggacaggaaatatccaggcaggtgccagttctcgagcaaacaccatcgctggggatggaagaagttcatctcgctggaggacttcaaggactcgtcaaagggttatctcatcaagggcaagtgctgcatcgaggctgaggtcgcaatcagtggctcttcgaagacggagtactctatgtaatttgatttgtgagagctcatgattagtgtttattctcgctagaaccaactatatagcgtgttccatatgtattagcatgccatcgagactctagcttgctctatagatatctcgacgtatccgctcttcaagcttcgttctgtcgagttgaatgtggtctaataagtgaatatatgcaaactgggatcttattatttt

SEQ ID NO: 19638 - DNA, 674 bp, Zea mays
  Clone ID: LIB3150-077-C3_FLI
gattggtgagacccttgagcagagagaggcaggaacaacaatggatgttgttgctgcacaaacaaaggctattgctgaaaaaatatcagattggacaaatattgtgttggcatatgaaccagtttgggctattggtaccggcaaggttgcaactcctgctcaggctcaggaggttcatgatggtctgagaaagtggctccactccaatgttagccctgcagttgctgaattgacaaggataatttatggagggtctgtaaatggagctaactgcaaagaacttgcagctcaaccagatgttgatggattccttgttggtggagcctcattgaagcctgaattcgtggacatcatcaagtctgccactgtcaagtcttcatctgcctagtgttttgactttcaatgcacctggatgcttgtcgtactgaatgctgttgatcttttaaagctattgccattttaccatctcgttttggtattctagctccagtgcatcgtttgtatatcatcatctcctgcgtatgtgcacagagtagtcatttacctgaatcatccttgtgtaccctttggaactgcataattgaactgcgctattctagatctgtcctctcatggttacttcaatttataaggtgttgcatcatgagtcaactcttcaaatttgatggataaaa

SEQ ID NO: 19639 - DNA, 634 bp, Zea mays
  Clone ID: LIB3150-077-E1_FLI
gcctcattggaccccaggaagcaatcgcgctgatcggggccgccgcctagcggtgccgtgcgggttagggcgcgaggctggcgctagctcgagctcgcggctgccgcaaggtgctggaaatgtgaggagtatgtcctcgatacgatttggatatgttagaagccagctcctctgttctggcaccatttgctaggattttgttatggtgtttattaggcagccatgaaaagtctgatatgcttcgaacagaagatggacatcaggcaatgggaaatgggtgcaactgcaaggagaacagattaacatcacatcagtggtcagcgacaagatccatttaacaccactcaaggtccacaaaagcctttagcggccatgggtgttccgcagcggaggcagcaggtgcgccggcggccagaaaggtggctactgtcgttctcgatgatgaaatggtaccgcttcacgcagaccgggtgtccactccagcctacaaccaaacaaacaaatcagacgcatgattccattgcagatgccgtgttgttgtatgtaacagtgtgcaagtatatgacaattcaatcaatcattctaacgggcggttgcacactgaaagcaacagcctaacgattgggattggctg

SEQ ID NO: 19640 - DNA, 813 bp, Zea mays
  Clone ID: LIB3150-077-E5_FLI
gaaaaatatccccaaaccctagctcccgatctcgatggcgaaccctcgcgtcttcttcgacatgaccgtcggcggcgccccggcgggccggatcgtgatggagctgtacgccaacgaggtgcccaagaccgcggagaacttccgcgcgctgtgcacgggcgagaagggcgtgggcaagtccgggaagccgctccactacaagggctccaccttccaccgcgtcatccccgagttcatgtgccagggcggcgacttcacccgcggcaacggcaccggcggcgagtccatctacggcgagaagttccccgacgagaagttcgtgcgcaagcacaccgcccccggtgtgctctccatggccaacgccgggcccaacaccaacggctcccagttcttcatctgcaccgtcgcgaccccttggctcgacggcaagcacgtcgtcttcggccaggtcgtcgagggcatggacgtcgtcaaggccatcgagaaggtgggcacccgcaacggctccacctccaaggtggtcaaggtcgctgactgcggacagctctcctagatctctctgatctggtctgttcggccgccctccctccgtcatcgtcgactccccctgcgtccgttcctttggatctgaataagatggtggtgatctgagtggtggtcttagtttatcatgtatcgctcgcagtttaatttagcggtttaggtgtggatctgtgaaccccatggcgcctctgcttgattcgtgtttcacctgttatgttctgagattcatgataatgctatgagaactgaaattcccgtttcatgcttctt

SEQ ID NO: 19641 - DNA, 1917 bp, Zea mays
  Clone ID: LIB3150-077-F2_FLI
gctagccctctgctcctctgaaatggcggcggcgacttcctcttccacctacctcgccatcggccgcaaaaccctaaaccccgccccctccgtagccacagccgccacctccgtctccttccccgccacgcagcatccatgcctcgtcgccgcctccgcggaccgccgccgcgccgtggctgcgaaggtctcgtcgccgtcggtcatcggcaccgccatgccgtcgctcgacttcgagacctccgtcttcaagaaggaaaaggtgtccctggccggccatgaggagtatattgtgaggggtgggagggatctgttcccgctgttaccggaggccttcaagggaatcaaacagatcggcgtaatcggctggggctcgcagggtcctgcgcaagctcagaacttgagagactcacttgttgaggcaaagtcagatattgttgttaagattggtctccggaaaggttctaaatcttttgaagaagcccgagcagcaggattcaccgaagagagtgggacgctgggtgatatatgggagactgtatcaaacagtgatcttgttttgctactgatatctgattctgctcaggctgataactacgagaaaattttctcgcacatgaaaccaaacagtattcttggtttgtcacatggatttctccttggacatttgcaatctctgggttttgatttccctaaaagcatcagtgtgattgctgtatgccccaagggaatgggcccatcagtcagaagactttatgttcagggcaaagagatcaatggtgctggtatcaatgctagctttgctgttcaccaggatgttgatggaagggcaacagatgtagctctagggtggtcagtagctttaggttctcctttcacatttgctactactctagagcaggagtaccggagtgacatttttggcgagcgaggtattttgcttggtgctgtccatggcatggtggaggctcttttcaggagatacacagaacaaggaatggatgaggactcagcatataagaatactgtagagagcatcactggaattatatcgaaaactatttcaaagaagggtatgcttgaagtgtataactctctgactgaagaaggaaagaagcagtttattgaggcctatagtgcagcatattacccatgcatggacatattgtatgagtgctatgaagacgtctcttctggaagtgagattagaagtgtggtgttggctgggaggagattttatgagaaggaagggctccctgctttccctatgggaaaaattgatcaaacacgtatgtggaaggtgggtgaaagggtccgttcaaccaggccacaaggtgatcttggcccactgcatcccttcactgccggagtgtatgttgcattaatgatggctcagattgaggtccttaggaagaagggccactcttactcagagataattaacgagagcctgatcgagtccgtggactcgttgaacccgttcatgcatgctcgcggtgtggccttcatggtcgataactgctccacaactgctcgtttgggatctaggaaatgggcaccacgcttcgattacatcttgacccaacaggcgtttgtgactgttgacaagaaagcaccgatcaaccaagacctcatcagcaacttcatgtctgaccctgtgcacggtgccatcgaagtctgtgctcagctgaggcccaccgttgacatctcagtgaccgctgatgcagatttcgtgcgcccagagcttcgacagtcttcataagcttgtatggatccgcagtgtgactgcaatggctagtttgtaagaacttaatatgcctgggcttttgaactcttagattgtgcttgtattgctcgtgcttgaggaccagaaaattaaactcttggcggtgtggtactgttgtgatttgcaagaat

SEQ ID NO: 19642 - DNA, 916 bp, Zea mays
  Clone ID: LIB3150-077-F3_FLI
gccatctcatcccctctccacctcccgaccctccgccgcctcacccccacctcctccctccgcgccgccgccgccatgtcctcctcctcgtccgctgtggccgccccgatcgagcacttcgtgctcttcaaggcccgcccggaggcggtggcctcgggcgccgcggcggcgatggtctcctcgctgcaggcgctggccacgctcgtcccgggcctggcctacatccacgcgggaccggtgctccgcctccggtccccggccgcggaggcgctgggccccacgcacctcctccacacccgctacgccaccaaggaggacctggcgtcctacgcggcgcacccggcgcacgtggccgccgtgcaggggcacgtcctccccaacgcgctcgacatcaccgccgtcgactgggtcaacgccgcgccgctcccgtcccccgcggcccccggcagcgccgtgcgcctcacgctggcgaaggtgaaggaaggggtggaggtcgcgcagctcgtggagaaggtggccgcggcgacccaggccgccggggacgccaaggtgagcttcggggagaacttttccccggcgcgggccaaggggtaccagttcgggatggtggcggtgttcgacagcgtggaggagctggacgccgtggaaggggacggcaaggtggaggaggccaaggccttggtcaggccgctgctggacgaggtgatggtcctggacttcgtcgtcggagatgctccaacgcccgcgagcctctgattacaggctgcagggtctcagtttcgggattctgagtgtgttgttgatgtcggaataatggatagatggactccctggtcctgcagcttctcaacttgtgatttgtgaaattgggaatgacagtgcaatgaataagaattgcttccctcgattaaggatc

SEQ ID NO: 19643 - DNA, 906 bp, Zea mays
  Clone ID: LIB3150-077-G9_FLI
cttagctgtggtatttctaccggtcttggtgcatcaattaatgttgcaaaacctccgaagggttcgacagtggctgttttcggtttaggagccgttggtcttgccgctgcagaaggtgcaaggattgctggagcgtcaaggatcattggtgtcgacctgaaccccagcagattcgaagaagctaggaagttcggttgcactgaatttgtgaacccaaaagaccacaacaagccagtgcaggaggtacttgctgagatgaccaacggaggggtcgaccgcagtgtggaatgcactggcaacattaatgctatgatccaagctttcgaatgtgttcatgatggctggggtgttgctgtgctggtgggtgtgccacataaggacgctgagttcaagacccacccgatgaacttcctgaacgaaaggaccctgaaggggaccttctttggcaactataagccacgcactgatctgccaaatgtggtggagctgtacatgaaaaaggagctggaggtggagaagttcatcacgcacagcgtcccgttcgccgagatcaacaaggcgttcgacctgatggccaagggggagggcatccgctgcatcatccgcatggagaactagatttcgctgtctagtttgtgatctggcctgggcttggggttaataaaagaggcaatgctagcctgccctttcgatgaggaggtacatacacgctggcgatggaccgcgcttgtgtgtcgcgttcagtttggcttttgccaagcagtagggtagcttcccgtgtcggtaattatatggtatgaaccatcaccttttggctctacatggtatgaacgtaagatacaaattccaactacctctagctcgcttgtgtggtatctgtatcagtattcatgtgtttgtttgctt

SEQ ID NO: 19644 - DNA, 1405 bp, Zea mays
  Clone ID: LIB3150-077-H4_FLI
acctctcacccggcgccgccgccgccgccgccaccgccgccgccccgaggccccatcccagcgaaaccgacttccgcctcggattgaagcaatgtcgtcggacgacgaggtcagggaggagaaggagctcgacctctcctccaacgatgtcgtcaccaagtacaagactgccgccgaaatcctgaacaacgctctgaagctggttgtgtctgagtgcaagccaaaagcaaagattgttgacctttgtgagaagggtgactctttcataagagagcaaactgggaatgtctacaagaatgcaaagaggaagattgaaaggggcattgctttcccaacctgtgtttcggtgaacaacacagtctgccacttctccccgcttaccacagatgatgcagttctggaagaaaatgacatggttaaaattgacatggggtgtcatattgatggctttattgctgtggtggcacatacacatgtaattgcaaatgggcctgtcacaggaagagcagctgatgttcttgctgctgccaacacagcagcagaagttgcaatgaggcttgtcagacctgggaagaagaataaggatgttactgaagcaattcagaaagttgctgctgtttatgattgcaaaattgtggaaggtgttcttagccatcaactgaagcaatttgtgattgatggtaacaaagttgtgctaagtgtctccaatgctgatacaaaggttgatgatgctgaatttgaagaaaatgaagtctatgcaatcgatattgtcaccagcactggggaggggaagcccaagttattggatgagaagcagacaaccatctacaaaagggctgtagacaagaattataacctgaagatgaaagcgtcaaggtttattttcagtgaaatcagccagaagttcccaatcatgcccttcactgctagggcattagaagagaagcgtgcacgcttaggcttggtggaatgcatgaaccatgagctattgcagccgtaccctgtacttcatgagaagccaggtgaccttgttgcacacataaagttcactgtgctgctaatgcccaatggatcggataggattacatcatatccgctacaggagttaaagccaacaaaatccattgaagacaatgctgagataaaggcatggcttgctttggggacgaaatcaaagaagaagggtggtggaaagaagaagaaaggcaagaaaggagatgcagcaggagatcccatggaggcgacaaacgatgctacaagccaagaataattctgatttttggaattactgcacccagcattttctctcttgtttcttcgctgcatctgatggtgttatattacattcagttgcgaaaaaatgaatacttttttctagtgtctaagaaacgaagcatcctgttgc

SEQ ID NO: 19645 - DNA, 1303 bp, Zea mays
  Clone ID: LIB3150-077-H6_FLI
gtttctccccattagccaggggtaaaacgggaaagacggagaacgaagaggaggggggcgacgtcgccggcggtcggaggcgacggggatgagtcggaaggaggcggagccggcaggacaggatgggtcttcttcgtcggccactgatgggggaggaggaagtggcagtggccgggagctggcagatgcgctggcgcggcgacgtttgtaccgggaggtgacgctggcgctgcactcagggttgcgcgacgccaaggcggacttctccttcctccgcgcgcgtgggctccgcagcctgctcggattccttcgctccaccgcctccgcggccgacgacgcgctgctgctccttttccgccactcccaatccatccccgatctccaagttattcctgttctctttcagaattcgttgcatcaaccaaagcaagatcctgttgtgacattggatcatatatttggaacggaaccaatgaagattacaagcccccctacagattctgaaattgctcttgcacttagagtcttggaaggttgttgccttttatatagccgatgcacagctctggcccacaaatacaaggctgtgaaggtactcttgaatatattagccagccgaggtccaactgagcaaggagtttgcttggacacactgatatcgctgatgttggactcaccctccaatcagatggatttcgaagaatacagtggacttgaaaaggttgctgaacttttaaaggatgtgcaagtggaaaagcatataagattgaaatgtggggagttcctattgttgctcattggacatgtttttgtgaaggaaaactctcccatacatgaacaaatgaaaaatctgtttggtgagcagtgcgcatcacttatatgggcagcaagccggttcggctccaccttggatgcagagcaaaggcagacgaccttgcaaatacaagcaatgagagttgtcgaatccttggaaccctactaggactggtgcattcatctgtgtaacttacgggtgatgacaatttgatgtctctaatctgagctgcatgctccattttgttcatgcaagctttgttgtcattctcttctgtgtaaagccattcttatgctactctttttagtaagctttgttaaaaggattgtattagttccatttgagaacaatgcattagggagacactaggaaaacattaaaatatccattttgttgtggtagatttgagctgttgtacctgtgattcaaataaaagtggttagtccaaagtgctagtgaatgttattgatcccttaactgattaaactg

SEQ ID NO: 19646 - DNA, 724 bp, Zea mays
  Clone ID: LIB3150-078-B8_FLI
cccacacagaaaaccctagccgccgccaccgaagcggcctcccaggtaagcaggatcgtccagcccgccgccgccatgaagcgcaatccccgcgtcacgagctcccgccggaagtgccgcaaggcgcactttacggccccgtcctccgtccgccgcgttctcatgtccgcggggctgtcgacggagctccgccacaagtacaacgtgcgctccatcccgatccgcaaggacgacgaggtgcaggtcgtgcgcggcacctacaagggccgtgaggggaaggtggtgcaggtgtaccgccgccgctgggtcatccacgtcgagcggatcacccgcgagaaggtgaacggctccaccgtgaacgtgggcatccacccctccaaggtgatcgtcaccaagctgaagctcgacaaggaccgtaaggcgctcctcgaccgcaaggcccggggccgcgccgccgacaaggctaagggcaagtttactgccgatgacgtcgctgccgccgccgctggtggcgccgccaccggcgcctctctccaggagatcgactagactcttcacggtcatctgatggttgtcgtaccgccttttcctcatctctttagtttttgctaccaattgttatgtgatagaggtcttatgttatttgaaaactgctctgtgcctggatgagagttttggaacataatgtgaacctgtgtgtctgtgacctgagctttgaagatct

SEQ ID NO: 19647 - DNA, 919 bp, Zea mays
  Clone ID: LIB3150-078-B9_FLI
gacgtggattcgtacacaatccgcggcaccaacaaggtcgtccatgtgggcgactgcgtgctgatgcgggcgtcggactcggacaagcagccgtatgtggcgcgggtggagaagatggaggccgatggacgcggcagcgtgcgggtgcaggtgcgctggtactaccgccccgaggaatccaagggcggtcgccggcagttccacggcgccaaggagcttttcctttccgatcatttcgacctacagagcgcccacaccatcgaggggaaatttgttgtccactctttcaagaactacaccaagcttgataatgtcgggcctgaggacttcttctcccgatttgagtacaaggcggccaccggttcgttcacccctgaccgcgtggcagtgtattgcaaatgtgagatgccatacaacccggatgacctcatggtgcagtgcgaagcttgcaaggactggttccatccatcttgcatggctatgaccattgaacaggccaaaaaactagatcactttgtttgctcagactgtttgaaagaaaatggttcaaagagactttcaaatgtatatgccacttcatcaaattcttagcccaaggctgaatcaataaggcagacgaggtgaaaactgagtgccaacatccaggggagatgtgctgcttctgtggcgaatcagcccttgcactggcgagagcagaggtgtacagtgtttgctgtggtttgttcgatgtaactagccagtgtggcatgtcatgcagttgttggtagatcagtcattgtgttgacttggtcagcttaactcgacatccccttcgttgattacattgcgcatgttttgttaggatcagcagatcctggtcgaagcctagatgcaggctgggcttagcctgtatgcattgatgcaaaccaaaataagttct

SEQ ID NO: 19648 - DNA, 1602 bp, Zea mays
  Clone ID: LIB3150-079-A11_FLI
gaacccctctgcgttccgccgcagcttccgaagacatcgatgtcctagcaagttggaaacccccctccctcccctcatattcgcctccgcctccctccgtccctcgtcaaatccacgcgaccgcgattgctctcagaaggcactagcacgcaaaaaccccacgagagagacgaatcttccgaatctctcggtggcgatggcgctctccgaccgctcccgcgagtcgctcctcccgagcttcctctacgcctcctcggcgcgctctttcgctgccacaggagccgccgcgcgcctccctgtctcctccccagcgcctgccacggctggagcaggaggcggcgtgccgttctcgatccaggcgcccaaggagaagatcgagatgtactcgccggccttctatgccgcctgcactgccggaggaatcgccagctgcgggctcacccacatggccgtcacgcctctcgacctcgtcaagtgcaatatgcagattgacccagcgaaatacaagagtatctcatctggatttggtatcctgttaaaggagcaaggggccaggggtttcttcaggggatgggtgcctactttgcttggttacagtgctcagggggcttgcaagtttggcttctatgagttctttaagaagtattactcggacattgcagggcctgagtatgcccaaaagtacaagactctaatctacctcgcaggatctgcatctgctgaggtaattgctgatgtggctctctgcccttttgaagctgtgaaggtacgtgtgcagacacaacctggatttgctcgtggattgagtgatgggctccccaaatttgtccgatctgagggtgttcttgggctctacaagggaattgttcctctctggggtcgtcagattccttataccatgatgaagtttgcttcctttgagaccatcgttgagcttatctacaagcatgctgtgcctgttccgaagtctgagtgcagcaagactacccagttgggtattagctttgctggtggttacattgccggtgtcttctgtgctattgtttctcacccggctgacaaccttgtgtctttcctgaacaatgccaagggagctacagtgggagatgctgttaagaagcttggtctctggggtctcttcactagaggacttcctcttcgtatcgtcatgattggtacccttactggtgctcagtggggaatttacgatgcattcaaagtgatggttggactcccaacaacgggaggtgttacacctgccccagcagcagaggctgaattgaaagccagtgcttgatttttttttctgtgttccctgagatcatatttggtggagtggaattgtatcagccggtcgagagcttagttcccgaatcttttttaatcttaacggaaaatttgtccgtcatccttctgatgagaggaactcattaaacaggcgaaataggtctttttttgcgctgggaaaagtttacgcttgatgcataataatttgtaggacggcaacgctctagagcgcaggttttgttcacctcctgtaccgaggaatgcttaaagttacatttcacattatggtctttatgaaagagtgcacctcggttg

SEQ ID NO: 19649 - DNA, 1557 bp, Zea mays
  Clone ID: LIB3150-079-E4_FLI
gccaatggcccgaccaacctcggctcctcgctctgcccctccctcccaactcctgccatcaaagtgcacagcttcgccggccccaatgtggctctgtcgaccctccgtcggcacccacgcacaccacctcgactgcgcgtagcctctgcggcaccgccgccagggccgcctcttccgcgacggtgcgtcgcccctctccgcctccgcagcggtcgcctcactggaggttgcgctgcgatgggatctgggaaccgcagacggcctcaaccacccacgtggattgttgcctcggcggctaagatgcagcgccagggggccagaggaaacgacgtgatgaacctcccgtcccaactatcttttgcccttttgagcttactgcattactcccgcacttgtttttgtgattttttcttaaacactatgcaccaataattgtatctccacttttgctacatggcctgataaatacgaaaacccattttctatatttagttcacctttatcttttcttctaatgtttatttttctctagatcaaacagctaaatgtgttcaccgttgcaggaaaagagtagttgtagttttctggtgtacagccaataggattggtccaccttggaaattatctcgacaaacatctgtaggaattacaaaatagttttctgttggaaattgagtttgctttaagttctcaactaaaataagtgaagagaaactaaacttgtcttcatcttctgaagttgagtaaatgaaagagtgatacatgtttaatcaacagagatccaatctgttgaatgtatgtcttcctttatgtttgagcaactactaatgttttttatatcaaacatgacatctattatctgtgagattcagtgacctattatcaccaaatcttctcttgtatgtttcaactgtttgaacttatttttgatatagctttctaatgccatttagtgtgatgtgacagtttagacagtctactttatatatgaaaaaggagagctttaggtgttcacgagaaatataatttgccatcaggaaaaccaaagttaacaggaagttcaatgttcaggctggggattaaaacgaggaacatgaagatattgcttcgtagcccggaaaggaacttgggggatttatagcaatattagtgtgacattttccacaagactgagaagaatgtggtaaaacagtgcagagaggaagatgccaactgtgacaacacacagacagttgagcaacagcagccctctgacgacagacagacagttgagcatgctcctcttcagaaaactgatctaggcaaagagacacatgtttcagaggctaaaacgctcacagcagatgctgatggaaatttgagctcaagccagcaaactggggagtacaatgaattgctgagacaatactattaaattgttgtttaattttaaattgttcattgtaaactagaacttattgtggctgatcatctctggagcttttgtgaataatctagctagctatctgtaaatgatatagttgtgaatgatattataattgtgatgtttttgtgaat

SEQ ID NO: 19650 - DNA, 740 bp, Zea mays
  Clone ID: LIB3150-079-F10_FLI
gaaatctcctccctccctccctccaagcacctagctgccgccggttcccgcgtatgggagggtcgcggcgcaaattgaagcgctcccgcactaaggtccgcgtggggcttccccgccggaaacccaatgaattcaaggcggccttcgaactccccgaggcactcgccgccgccgccggggccggggcgggctgggacgcggagggcagcgtagtgaagaactacgccgcgttcggggtggtggccaacccaaacctactcggtgcgcactcccgcggcacgccgcggctcgtccagagcgcggcgctgcaggcgcccgacgtcgccgccgcgcatgcacccgtcccggagttcgagccaatcgataccggcagcgacctcgaggacgacgacctgaagtctgctcttgggaagaaaaggaaggatggcaaatctgcaccgttgcaaccacttactaaagttcaacgtgtttgcattggcagattaatagagaagtacggtgatgactacaaggccatgttcatggataccaagctgaacgcaatgcagcactctgtgggtacattgaagaaactatgcgaaagacaccacgttgatggcaagatcttcgtctatccactgtagtattgtgctggcacctacttcagcctcagtgtactcttttcgccccgttaatggaacaagaacaattttgcaatgtgccccaaagaggaatccgcaattcagaactattgtgtactt

SEQ ID NO: 19651 - DNA, 956 bp, Zea mays
  Clone ID: LIB3150-080-B11_FLI
caccctctgcgcggtgccggtcgagaactcgagatgccccgcgaccgcgacgagccagccgccgtgcgcgtctacaccgtctgcgacgagtccaggtacctgatcgtgcgcaacgtgccgtcactcggatgcggtgacgacctcgccagtctcttcgggacgtacggccctgtggaggagtgcacgcccatggatgcagaggactctgagccctacactgacgtcttcttcgtcaagttctcacaggtcaacaacgccaggtttgcaaagaggaagcttgacgagtctgtgtttcttggcaaccgcctgcaggtgacctatgcccctcaatttgagaaccctcaagataccaaggagaaactggaagttaggagaaaagaagtccttggccgaataaaatcatctgctggcagacctgaagggtcatctccagctcagggatcatctagtgggaatcaccaccaaatgaactctaataagagggaatatatgaagacaattcatgcttctattgaagatcctcgcttcagtcatgtgccctcagataaggattattttccatccgagtcgatgaatgctactgtaaagctagtcagagggaagcttgataagatacaatctggtggtgataattccagtacctcagcagcatccaggaaaccaggggtcgataagcgcaggcgaatttgattgcagataatgccgagcacgcgttcaatgttttggtgtaatgttgataccaggattttaatggccttttttctatcaattttctcactcacattctaggccattaagttgtttatgtttcagggtggcggtgctgtactatatggttagctagaattgccggaatatcgataaccgagttaagttaaaaatgcctcgcgtttagttttcccagctgtaatgttatgttactcttgcaatcaattgtatcggaattctcatatttt

SEQ ID NO: 19652 - DNA, 540 bp, Zea mays
  Clone ID: LIB3150-080-B4_FLI
gagcataaacaaaataaaataggtttgagagatcaccgaaggaaagcgactcctggaaaagccaacgcgacaccaatccattcttccctcttccacaggctgaggaccgaacaccgaagccaggcagccagccgaggaagccaggcgacaggcgacgccaagtcgagaacaccctaggtggtcgctcgcaggctgcgagtgagagccgtggcggagtcgccgtccttgcccacggaggaggacacagccgccggcgcagtgggatggcgacgccgacgcccatgcccggaagcgaggggacgctcgtggcggtgatgccgcggtccccgtccccgacgccggcggaggcggggacctcggcgaccgagacgcccgtgctaatattcctttacttccacaaggcgatccgcgcggagctcgaggcgctgcacggcgccgccgtgctcctggccaccgagcgcaccggcgatgtcgcggcgctcgccgagcgctgccgctttttcttcagcatctacaaacaccactgcgatgccgaggacc

SEQ ID NO: 19653 - DNA, 1137 bp, Zea mays
  Clone ID: LIB3150-081-A11_FLI
gggaacgcttgatagtctatgattatatgccaaacctgagcatacacgcccaacttcatggacagcacgcagcagagtgcaatctcagttgggaaagaaggatgaagatcgccgtcgattccgcagaagggatcgcttatctgcatcaccatgcgacgccacacatcattcatagagatgtcaaggcgagcaacgttctcctggattcgaatttccaagctcgggttgctgactttgggttcgccaagctagttccagacggcgcgacgcatgtcaccacaagggtgaaaggcacactcggttatctcgcaccagagtacgcgatgcttgggaaggcctctgaaagctgcgatgtcttcagtctcggagtcatgctcctagagcttgccagcgggaaaaagccagtggagaagcttaaccccaccacgaagcgaaccatagctgagtgggctcttcctctagctcgggacaggaagttcaaggaaattgccgatccaaagctcaatggtagcttcgtcgaggacgagctgaagcgaatggtgctcgttgggctcgcctgttcccaggacaagccagagcagagacccgtaatgtctgaagtcgtcgagctgctcagaggagaatctaccgagaggctttccaggctggagaatggtgatctgttcaagcctgatatctcgttccatggctcatccggacctgatagctcggactgcgtcacggaggagaggagtcccaaggcagatgcgacagaggaggctgttgattcaagtgagacggttccctcagcaaggtagtgtgatgcacggtggtgtactgtcagtaggtgccctgagctccttgcctgggggaaatgtgtttatcagttcatttttgtggttattccttgctatttagcaagttaatctgggagcctccttgcccggttctcttgtgtggtgtcattccttcgtgttggcatggttctatggcttgtaaaattctgtatgtaaatctgggcctggttccatcccttcgtgtagcaagcagttcactgcactgtggttagcgttttagctacttcagtccattaatgatttgtgtgtaagtctgtaatatgtatttttttaggtttttatgatggaacttcgtttttct

SEQ ID NO: 19654 - DNA, 921 bp, Zea mays
  Clone ID: LIB3150-082-D11_FLI
cctcgcagcgccggcgctccctctcccgctcccttccttactcgcgctcggcacacaggcggcggcgctcgggctctcagcgacggcgtcagcggcttaccctcgcgccctcgcctccggtcctccgcacaccggccggtgaccctgcgacaacattgcatctgaactgcattggatcctaagagatgatggatgagtcttttcttgataggatggtttcccaacttcggtcaacatgcaagtactacactggatatcccaaggacttagggcgatcaagaattataccattcacatctgagcgtcagtttgtgcagctattacatgaaggcaggcctgtagtcgttgcctttactattaagtgcacatatacacagcatcttgataaagttctggaagaggccgcagctaaattttatccacatatcaagtttgtccgagttgagtgcccgaagtaccctgggttttgcctcacaaggcaaaggaacgaatatccatttgttgaagtattctacaacccagaacaggctgcaagcccaggaaagagcgtggatcctaacatcaccaagtattctgtaaaagtgctaccgttcaactatgaccaaagcgtgtatggatttcgagaatatttcaagaagcatggtttcaagtattctgaaacgaactagatccgttgttaaagatctgcctcaagagtagtcctagggacttgagtagcatgtggaggcagttgttgtatggagttgaaatggcgtgaggctctaatgtggggtcttgactagttcattcgagaatgcctgtcatgtattcatttgtatacgggctactgctcatgcctagagatttgaattttccgtacctatgaaccattggatttggtaatgttttacctctcaaagccagtagtgagcaatttgcatc

SEQ ID NO: 19655 - DNA, 547 bp, Zea mays
  Clone ID: LIB3150-083-F9_FLI
gttagagcagaatccaaaacttatgcaaatgctccaggatcgcattggccagttgtagtcgcactggaggtgctattgtgaaagtgaaatctgatgctggtcgatcgctaggttcctagagtatggtgttgttttgttttcggctatggctgtagctagatgaaagcaactgccagcttgctagtcgccgaaatgtattcctatgtacattatatgtaactttgttctgtaatgtgaaaatttgtaatgttagtgcgtatctaatttatagttttaagtttacctttagtggttagatcgtgtgacatgcgcagcgacgggaaaacgacgccgccttttgtctgcaaaggcatttgacgctaactacctgtagagttctgaatatcctgttgcactcttgtgtgtatctggttgctttaatgctcgaaaatgaatatcctaaggttttgcattcgtatgcaatcataagcaatcctacgcttccgttcctattttgaacagcatggggttttatatgatatataaataaaaatcaatattggaggga

SEQ ID NO: 19656 - DNA, 248 bp, Zea mays
  Clone ID: LIB3150-084-E12_FLI
gcaataccattgtaggttcttgtaaccttggtatggtaagagccgcttgacaggaagtcgagcgttcgggcgcaagatgcgttgtctggcatgctgttccttgaccatttgtgctgctagtatgtactgttataagctgccctagaagttgcagcaaacctttttatgaacctttgtatttccattacctgctttggatcaactatatctgtcatcctatatattactaaatttttacgtgtttttct

SEQ ID NO: 19657 - DNA, 924 bp, Zea mays
  Clone ID: LIB3150-085-A3_FLI
gacgaagaaatgtgtgacattataaataaagaaatagagtagtgtttgctcaaatcgacatgccgggtataatcttaatccttccctctcgcacaaacacaaacaagctaaaaggagaatgaatggtcacggaccaccgacatcaacaagaggacgaacagcacagcaccaattgaaaaggggaagcctgaaattgttgttctaacaaaactcggtggcctaagcgccaccagcaacaacgaatcgccgaatcatggcggcggggagattaccaccggagcataggcagccaggcggatcgcgggtccgtcgcttcagcggtgcgccgtgacgagcgtctcgatgaagcgcaggccatcgaatcgcggcgcgaaccgctccccgcggcgaccgccgctatggctgttgtctctcgacgccgacgaggatccctgtggtgaaaaacaggcgcgaaccgtaccaattagccaaccctgcttctatttccccccgatctttacttggaatgtaaatcgaggaggaatcgttatccctcctatattatatatcgcgccatacaagacaggggaggccggagggggacccaggaatcctcgatccgtgggagacgcacctcagggacctcgtcgtcgtggtgctgccgggagagcaccagcccgtcgcacctgccgacggtcgcggcaggggccggcgacggagcagaggcgtcgcagtcgcaggcgaggagctcggcgcccgacgccgccgccacggtcgccgcggaagccacggcggctgccagcccccacttcatctctcctcccccttgcggcggtcggcggcggctggcagactcccaggcgtgtggtcggcggctggtccacgccggcctcacgtcgcaggtcgaggtgtgaacacgcggggagcgcttgcttgctggcgacc

SEQ ID NO: 19658 - DNA, 982 bp, Zea mays
  Clone ID: LIB3150-087-H7_FLI
gcggaacgagccagagaacaggtatggcggcggcgcggcacctcagatccggcctccccctcctccgcgcccacctcgcatcctccgaatccgcggccgtcgctcaggtttcgaggggcttcgcgtcgcaggccgctaagcccaccgggaaggagatcaaggttccaaaggctctgtttggcggcacaggcaactatgccagtgcactgttcctcacagcagctaaatctaatgcattggacaaagttgaatctgagattaaagctattgtagaggcttccaagaagagcccgttgttttctcaattcataaaggacttgtcagttccaaaagcgaccagggtgaaggctatagccgaaatatttgctgacgctgggttttcagatgttacaaagaatttcttggctgtcctggcggacaatggcaggctgaaatatattgaacgcattgcggagagatttgttgatttgactatggaacataagggggagatgaaggttgtggtcaggacagttatttcactcaccaaggaggaggagaaagaactcaaggaaaccttgcaggatatccttggggaaaacaaaactattttggttgaacagaagattgactacagcatcatgggaggattagtgattgaattcgggcagaaggtgcttgatatctcaatcaggaacagggcgaagcaaatggaggcgttcttgaggcaaccacttgacttctaacagccttttggataaaagcatcatcggaatgcagaggctgtcctgttgaaggttttcctgtgtctgcaattttaatctgtccttttgaataaaatgtttcctctaacaagtgaagggcactgtttttattgtctcgtgggccacagatgcctgctgaacaatttatgttcatttcttcttttcttaaaaagaagcatgcactaagaacatgaaggatgcatgccatggaaagtttttgaaagtcattgaaacgtatg

SEQ ID NO: 19659 - DNA, 677 bp, Zea mays
  Clone ID: LIB3150-088-D6_FLI
gcggcatgttcctgtggcacgcccgcggcgacacgggcggcgcggaggacatgttcaccggcgccattgacgcggagcccgagagcagccaccaccggagcagctacgcgtggttcctatggatgaccggcggcgtcgagacctgcctcatggacaccggcaggcagagcgacggcaacgacgcggattgaaccgcgcagcgcccttggcttgggatcggagacacaatccaaaagcagacaagaaaaagacgacgacgaccttacctttaccaccggcaagtgccccggccggccggcgggccggccatttagatggcgcgtctaggtatcgccgtacgtcgtgccgcatgcatgcatgcccggcggcgcaagatggctatgcagcaagcgtagtatatatcatccatgagcagcgccggccgttgtagataggtgcaagttttccagtgtgctagatgcatgtgcgcgtcaaggaggcagccagcccaatagcccatgcagggccaggaagcgaacaataataatgttggcaaagctgctagcgcatgttagagcgtgtgatgcatagtactatagtagtatgtggaataaagcatgcatcgtgagatagtagcaatgctgttatatataactgcgtttgtgaacaacaacaataatatatatatctgtgttttt

SEQ ID NO: 19660 - DNA, 2123 bp, Zea mays
  Clone ID: LIB3150-088-E1_FLI
gctcccgttttcccccttccccttccgcttcgccattccttctcggtcagaacgacgcgcatccccgcccgcacgttcccgtgctctcgcttctccggaggcgaccagggttgggacttgggaggctagcgagaaggtgctacccgggccaactcctccgatcgcccgcaggagaaggtatctctccgcctccccgccctcgtcgggcctttcccatcgccacccgcgaggccacgcgctccagctcttgtgaaccggaagggttctggatttctgagccaagcgaccagcacggtggctcggccgggctgacactcccctcccctgtcgcccggtctcttccttcccgagcagaactcccctgcgtcttgccgcttctagcatcggggagaaaaattatagaggaaggatatgcgggatccatttgatgcaccggttgatctcattaacccggaccataatggtgggaacaaactttctaggactggtgcagtgtctgctggggactatggtttacaaaatggacccaaatcctttgccccaaactccgacaccctagtcaggcatcaagtccaggttgcatccttgcacaaagacttagttttggaagatcccaatactcgtatcatggatcctgagaccaaggaactttactttagatcacaatcacaaggggacgagatcttgttgcttcgcaagaaaattgctgaggcatctctcaaggagctgagattactgggtgaaaaacatattctggagaggaggttcacagacttgaggatggctgttgacgagaagcaggaagaagctatatctggtgctttgcaacaattgaaccagaagaaaacccatcttgaggacaatatgagactggcaaatgaactaaaagttgaggaagaagagctatacttttttacttcttcattgcttagcatgctagcagaatacaatattcgcccacctcaaataaatgcttccatcattacaactgttacaaagcgtttgtaccaacagatgcatttgaagctcagatctttaaatgacaatttaggtgatatgactcaacctggaaatatatataatcccaatcttcagcaagtaaccctatcaagaaatgaaccttccccatcttataatttggattcaaataggaacactcttcaacagtatgctcaaggtccaagtgaccgacatatggatcaaatgtaccatggatccaattttcagcaggatactggcggtactactccctctaattattttgggggagacagaagagtagatggtgactcacagttataccaacctgatggtgacactttacctggtattgaggggtttcaaattgctggtgaacctagaccaggatttcaattaacagcatgcggttttcctactaatggtactaccctttgcaatttccagtgggttcgccatcttgaaaatggtaccagacagtctatcgaaggtgccacgatgtatgactatgtggtcactgcagatgatgttggtacttttcttgctgtagactgtacacctatggatgataatggccgccagggtgatttggtgacagaatttgctaacaatgggaataagataacctgtgatccagagatgcagagtcatattgatgcatatatttctaatgggagagctgaatttgaagtttttgtcctggcttattctcctgaggagtgggaattggctacattggtgctaacacgacctaactatcagattaagttcaaaaagaccggtgaagctataattgatgagaagtactcacaaagtctacagatgaaaattccaaatgggcgcacaactcaatttgttttagtaactgcgggtgcaactctcccatttaacacacagggaatatcagagccaaacaatgaggattacgatgttaggttacgcgatctaatcgtattagtcatgagaactttccagaaaaaggctttagatgccaaaaggaaagtcaacacttagaatccatgttgatctgttacaaaagattctatgtaaaaccgtagaaaattttcctatttttgattgttttgtgcagtattcgatgatttttgttcttgagatggaatgagctctcgatcaaagttttacta

SEQ ID NO: 19661 - DNA, 989 bp, Zea mays
  Clone ID: LIB3150-088-F5_FLI
gagcatattgctctctgctgcagtgccaatttttcatcaatcttttgatccaatccgtgaagctctcactggtagagatctgattcctgagatggttaacgggtaagataaccgaacaacactttgttttggaggtatgcagaaggtcctcatctcatgtaaatgtaccaggaggggacctaaggagggaatgcccgggcaagattacagtggaatgtactgcgcactgttaactgtgggctctaccgtggtgtcagcagcacttttgcgtgtgatgggaggtgatgtggccgagctgccactagttgctacaagccaggatgttcaagggctggtgggtcttagaattgctttgcagctcaaactagactgtttgttctggtcatgtgggttggttctttgttcattgcttgatgtttcacctattgcggtgattgatgcagggctacttccaagccttgttctcgtgcatagagagggtgctagtctcactgaagatcaagcactttgtgcttccagctgcacatgaagctgaagggatctggatgaacaaatttggcttctctagaatctctcccgaagagctggaagcttatcttaatggggcgcacttgactatattccatggaacgtcatacatgtacaaggctgttccagtgtcataattgatgggatagaagagatatgggtgatttcgtctgtcttttggggggtgggggtccgctcgctattgtgatgtacagagagagttgataaggaagcaaagcatggcaaagacaatgtacaggagctggaagccaaggcgaagcatcggatgaatctaaatgaatgaattccccttggtttgtttactcttgaatcgaaggaagcctgtcttttttttggtgtgatatactagactagatgcaatgcaattgaaggagtcgcaccgagtcctggtactagagccagattttttgcaatttaaattttgactctgaacttcacca

SEQ ID NO: 19662 - DNA, 754 bp, Zea mays
  Clone ID: LIB3150-088-G1_FLI
gacccatcctgcacacgaagcctagaatagccctcccctgctccgccacctcctcggatcccgaccaccccacccccaccccagacaacaggttgatggaggctaagatgggacgcttcttcgagtccgtgagcaatttcttcaccggaggcgaccacatcccctggtgcgaccgcgacctcatcgccggctgtgaaggagagcttgtcaatgctgcaaatgaggaacagaggaatgaaagccttatgaggttgtcatgggcccttgtgcactccaggcagacagacgatgtaaaccgtggaatcagcatgcttcaagcttctttggataattctgccagtcctctgcagactagggaaaagctgtacttgttggctgttggattctacaggattggcgactactcaaaaagcaggcaacttgcagatcgttgtttggagattcaagcggattggcggcaggccatatcgctgaagaaggcaatagaagataaaattgccaaagatggtctgattggaataggaattgcgacaactgcggtcggacttctggttggtggaattgcagctgctgttgccaggaagaagtgaggtcaatatattggatcggcagctcattgaactaggggagctcccgtctctgtaattccaacttttctgttgttaccttggtgatattacagttgaattgccactctttatatgtacgaagtaatcgtatgataatgataacaccattgtgacattatagcttt

SEQ ID NO: 19663 - DNA, 842 bp, Zea mays
  Clone ID: LIB3150-089-H7_FLI
ggtatgtcgtgtgttccacaagaccactgggatcaagaagaccaccactgctgcaccggcgtaccaggtggccatggccggcgctgagatggatcagaatcagaacaacatccccttccccatgccgatgcaattttccatgctgcccgacttctccttggacccggtgcccccctactacccgtaccccaacgctggcgcggggatgccgatgcttcctatggcagcaggtataggtggtggcgccggtgggctccacctcaacggcgccgccctgttcggcaatccgatggccgcgccccagcccatgagcttctaccaccagatgggcacggggactgcttgcgctggcggcttcgatgtttctgcgccggagagtaggccgtcctcgatggtgtcgcagaaggacgaccaggctaatggcgctgagatctcgtcgatgatgtccgtggccggcccagggcctgcgaccaccaccaccatagagatggatggcgtgtggaagtactgaaaacgtggagggtcgagggcaaagacatgaattcgcataaattaaatatgcatgtaatatctatatctgcattgcattttgtgaaatatgatgcatgcatggtttgtatattccgtaataaccagtagttggtaagctatgtgtgtgtatggatgtactagctagtacatgcaccgtatcattgcatgtgtggtatatgtctcgtttggtgttagtaatctgcttggttgtgctgatgactgatggttgtaagaagcagattcgagtttggtacaatattatcgtgaacctatatattatatatatgttaattatagtatgttgtttaatt

SEQ ID NO: 19664 - DNA, 2019 bp, Zea mays
  Clone ID: LIB3150-090-G4_FLI
cggagctaacccttgcaggagctgcttgtggagatgatcagcttgtcatcttcgatgcttctgatggcctccttaacctgtcggtcaatggggttctgatgcaagatcgcgtttttgcctgccagaagctcggcttctactttggcagtggatgcctccgctgcagcaacctttcagatgcgtggaggagtgccgtaaagcagtactgtggtgaagggagcgaaaagagccatgcaactttacatcaagatgtgccaaggaagctcttgaggtggtccacagaaaatagctcaaggaatgcatgtgaaaggtctgggttgaatgaaaataatcaggacattggtgattcttcagaaaagcaggagcatctcctggctgtgccaggtgtgattctcttatgctgtggccttatgttaccatgctttcatgctgaaaggaaagaagtcagcaggcatgacaatgcaaccattcagcgcaacgcacttgaatcagtttcatcctatgaaggaagcatgtcatctgagaaagtcccaccaactccacatcgaatacctccaagtccctctagatttgcgccgtctccacagatagctagagttggatctgtcaacttaagcatccagcagatcctcagggcaactcagaacttctcaccttcatttaagttaggtgaaggaggatttgggatggtctacagggctgtattgccagatggcaatgttgttgcggtcaagagagctaaaaaggatcagtttgcaggtcctagggatgagttcagcaatgaagtagacttgcttgctaagatagaccaccgaaatttggtgaggttactgggttttactgataaaggaaatgagcgcattatcatcactgagtatgttccaaatggtactcttagagaacatctagatggtcaacatggaagagtcctagattttaatcagcgtctagaaattgcaattgacgtggctcatgcacttacttatcttcatctgtatgcagagaagactataattcatcgtgatgtgaagtcatcaaacatcctgctgacagatagctatcgggccaaggtgtctgactttgggtttgcaagaagtggccctagtgacacggagaagacacacatatcaacgaaagtgaaaggcacagctgggtacctggaccccgaatacttgaggacataccagctaactccaaagagtgatgtcttctcatttggcatattgcttgtagaaattctttctgctcgcagacccgtagagctgaagcgaacccctgaagagaggatcacaatcagatggactttcaaaaaattcaacgaaggcaacacgagagagatactggacccattgctggaagatcacgtggacgacgaggtgcttgaaaagctccttagcctggctttccaatgcgctgctccgacacgggacgaccggccgaccatgaaggaagttggggagcagctgtgggagataaggaaagagtacggaaagagtgttaggaaggtgtgaagatcatggaaaacatttccctgtttctcaagactttccctggaccaaggggactaagggggtgtttggttttatagggattaaattttagttcttccattttattctatttaagtccctaaattaccaaacacggaaatcaaaactttattttagttttagtatttggtaattcagagacttgaatggaataaaatggatagactaaaaataagttcctagaaatcaaacaccctctaagcatgcgaagtatttgtgcccattggataaacacctgatcatctatgtttcttggaagatgtgacctgaagaaatgtacagtgcgataacaccgccatcagtttgtgctttcttgtctcagtttgcagtgcactccctctatggagaatgtatattttggagttctcgcatttcttgattctgttgatatggtattctgatggatgtacccgcatacattactgcaaacggtctgaaataatatacgaagggaaattgtttgtattgg

SEQ ID NO: 19665 - DNA, 1625 bp, Zea mays
  Clone ID: LIB3150-091-C11_FLI
gccatgatgcagcagcccccgccgcagcagccgcagccgggcatggcgccgcctccgcctccgcaggctgctggcgggcagccaccgcagtggggtgggatcccgccgccgatggcgcagcagtacggcgcaccgcctccgcagcagcctccggcgatgtggggccagcctccgccgcaggcgcactacgggcaggcaccaacccctcagcagtactacgccgcgccgccggtgccggtgcaggcgccagccgcccccgctgcggcggacgaggtcaggacgctctggatcggggacctgcaatactggatggacgagaactacgtcttcgggtgcttttcgaacactggggaggttcaaaatgtgaagctcatccgtgacaagaattcagggcagcttcagggttatggttttgttgagtttacaagccgtgcagctgcagaacgagttcttcagacatacaatggacaaatgatgccaaatgttgacttgacatttcggctgaattgggccagtgctggtgaaaagcgcgatgatactcctgaatatactatttttgttggggatttggctgcagatgttacagattacttgttacaagagacattcagggttcattatccctctgtcaagggtgcaaaagttgtgactgataaattgacaatgcgcacaaagggttatggatttgtgaaatttggtgatcctacagagcaagctcgtgcaatgactgaaatgaatggaatgccttgttcttccaggcctatgcgtattggtcctgcagcaagtaggaaaaatacaggaggtgttgttcaagagagagtaccaaattctcaaggagctcagtctgagaatgatcctaacaataccactatatttgttggtgggcttgaccccaatgtcactgaagataccctaaaacaagttttttctccttacggtgaagtcgtccatgttaagatccctgttgggaagagatgtggttttgttcagttcgttaccagaccttctgctgaacaagcgctgctaatgctgcaaggggccttgattggtgcacagaatgttcgactttcatggggtagaagcctgtcgaacaagcaggctcagcctcagcaggaatccaatcaatggggtgcggctgctggtgctggtggctactatgggggctatggacaaggttatgaggcttatggcagtgggtatgcacaaccccaggatcctaacatgtatggttatggcgcttatggcggttatcccaattaccaacagcaaccagctgcacagcagcaacagcaacaacagtgatgcctgtttgctcgggtaggtcattgggttgtcgcgacggaattaattaaatattatttcaggacactctcatattgcattcttgtcaattgaggtggttttgaaaggctcctgattttgatggccccatggcacggtttcatctatttattagtatatgacatatatgcgctgtgaacaagtggcgctctactgtgattgctgtgttgagacatgctttcttagtttctttccatgtttctcggatctgttgtgttacctttattactgtgtatttgcatatctactgtgatgctatatatgcactgtgccgtttgtttcct

SEQ ID NO: 19666 - DNA, 992 bp, Zea mays
  Clone ID: LIB3150-091-F4_FLI
gccgccgacaactctctctaccgtccgagaccccaagcaccaccgcggcggcggcgaccatggctgtcggaaagaacaagaggatctccaagggaaagaagggcggcaagaaaaagaccgtcgaccctttctctaagaaggattggtatgacatcaaggcaccgtcggtgttcagtgtgcgcaacatcgggaagactctcgtatccaggacacagggtaccaggattgcttctgagggtctgaagcacagagtctttgaggtttgcctagctgatcttcagggcgacgaggatcaagcttacaggaaaatcaggctccgtgctgaagatgtgcagggcaggaatgtgctcacaaacttttggggtatgaattttaccactgacaaactcagatccctagtgaagaagtggcagacattaatcgaagcccatgttgatgtcaagacaaccgacaactacatgttgcgtttgttctgcatcggcttcaccaagaggcgcccaaaccaggtcaagagaacctgctatgctcaggcatcccagattcgtcagatccgccgtaagatggttgagattatgatcaaccaggcgtctacatgtgacctgaaagaacttgtttcgaagttcattccagaagttattggtaaggagattgagaagtctacctccagcatcttcccacttcaaaacgtcttcatccgcaaggtgaagatactcaaggcccccaagttcgatcttgggaagctcatggaggttcatggcgactacaaagaggatgttggtgtgaagcttgagaggcctgtcgagggagatgaggctgtgcaggaggttgctgctgccgagtagtttgtttgctacttctatatctaggcgagtctggacattaggttgcttatgacgtgaacttagagttgtctacttgttttcatctgcccctaagattttgtctggaaacaagtttaaaattaagattattcgcaacaagtgtttaagatt

SEQ ID NO: 19667 - DNA, 1091 bp, Zea mays
  Clone ID: LIB3150-091-G4_FLI
cccctaccttgcttcctatggtgtggagaatccaatctatgctgtcctacaacttgcacaaacaaccatgagaagtgaactcgggaagataaccttagataagacttttgaggagagagatgcattaaatgagaaaattgtgagtgccatcaatgaagcagccacagattggggcctgaagtgtatccgctatgagatcagggacataaatcctccagcagggattaggcaggctatggagatgcaggctgaggcagaaaggaaaaaacgcgctcaaatccttgagtcagaagggatgaaacaggcccaaatccttgaatcagaagggaaaaagactgcccagatccttgaatctgaaggagctatgttggatctagcaaaccgtgccaagggtgcggctgaagcaattcttgccaagtcagaagctactgctcgtggaatgagattggtttcagatgcgatgacaactgaaggcagtgccaaggctgctagcctgaaacttgcagagcaatacatcgaagcattctcaaatctggcacaaaagacaaatacaatgcttcttccaggtgatagtgccagcccagcatctttcgtggcccaggcaatgaagacgtatgagcaaatccattcccacagccaggcattaaagagccacccccagatagaagagctgaaggaatcaggagagaccagtcctgctccatcttctgaggcgagcaagacaccaccactcattgaggaagcagattctaaccagaccttctcactgcaacgccccaagaacaagcagtgagcttcgctcaagtgtttgaagtccttttttctatctgttgttctgaaacatgagtgccactgagaaacaccactagtaggttttagttttctttagtctgagagagctgatatgtggcggagaagggatagacccctaggcatttggtttctgggagctaaatgcgaccggagagacctagagagattttgattctcgtgaaggttatactttggttccttgttggaatgaagtttgtaaaaaggcaaggttgggttaacgttggttagacaaaatgcataaatgcttaagttatttc

SEQ ID NO: 19668 - DNA, 720 bp, Zea mays
  Clone ID: LIB3150-092-A4_FLI
cgccgctcttgttgtttccgatcccaaaccccaaacacgctccaccggcacctccgctcccacaccaccgatggcccgcacgaagcagacggcgcgcaagtccaccggaggcaaggcgccgcggaagcagctggcgaccaaggcagcgcgcaagtcggccccggcaaccggcggcgtgaagaagccgcaccgcttccgcccgggcaccgtggcgctccgcgagatccgcaagtaccagaagagcacggagctgctcatccgcaagctccccttccagcgcctggtccgcgagatcgcgcaggacttcaagaccgacctccgcttccagtcctccgccgtcgccgcgctgcaggaggccgcggaggcctacctcgtcggcctcttcgaggacaccaacctctgcgccatccacgccaagcgcgtcaccatcatgcccaaggacattcagctcgcccgccgcatccgcggggagcgcgcttaggcgtttacggttgattgtcactactgtagatgtttaggctatgttctcgccatgtcctaggtctgctttgttcttatttgtttttttggtttcatcctgtgcgttgatggttgtcaatgagctatcggtgcctgtctgagagaaatggagtgatctgttggcgccattgttgaacaccatgaagttgcgagctcggacgttataaattcctaccagacataaatatgcatgaacaatac

SEQ ID NO: 19669 - DNA, 1412 bp, Zea mays
  Clone ID: LIB3150-092-B1_FLI
gagcgttttttttgtgtgtgtgccgaagcgaagaggcgatggctgcgccgaggaaggggacggcgacgccgctgggcaccgtgttctcgccggaggagacgaagagggccgtggcgagggtggccgagtccgtcgctgggcgccgcgccgagctcgcccgcctccagggtttcgccgccgacaacgccgccctcgtctccctcgtcaacaggctccccgacgaactctctcacgatatcatggttccctttggtggcgccgcctttttcccagggcgtttaatacacacaaatgaactcttggtgcttctgggtgaggggtactatgcagagaggtcggctaagcagacgactaatatattgcacaggagggggcaggaattggaagctcaagtcgaagcaatgaaggcaactatcgctgaccttgaagctgaggccaaattctttgaatccacggccaccgaggcttcagagggtcttgttgaaatcagggaagagtatgatgaggacttagagacgaattcatcaagatcagaggcttcagttgctactgtggttatgtccgataaagacagggaacatgctcgaatcatggcaaggttagatgaacttgaaagggaagaaaaggatgctggaagtgcctgtgaagatgataatgatggcgacgatgatgatggagatgctggaacaagtgatgatggcgaggaaaataaggaatctggaaatgctttaagtgatgtcaatgaagactacagttctggttttggcgcttcattttctggaagtggcggcaatgataggagtcatgggaatattaagagtgcactgaagaagcctggaggagatgaaatgctgataggcatttctcataagccatcatcccatacatctcatctagcatttcctggccaaacctctgcaacaaattctgatgtccgagttcacactaaagctgttacttttgaagacgacaaatatgtagttagttcgtcaaagtctcctcccttgctactggattctatacagtctgatcctgtgctcaagaattcttcagaccccgctctatctcgtgacagaaagataatatcaagtggacgaaaggcctttacaggatctatcattgagcacgacgacaatgtttccaccattgaaccttctgtggctagtccgttggcaaaacctggtacttgtgcttcttcaaggcccgtgtcaaggttcaagatgcagaaaggagggcggtgagtctggacactcgggtggacctttggtgtctgatagattgcatattggacacgttcaaattgtctgtgcggtctgaactcctggacgctagacatgttctagagtgatttgtcttctgccgactgtagagtgaaaccgggacgtccaagcaaagaagggaattaaaaaccc

SEQ ID NO: 19670 - DNA, 594 bp, Zea mays
  Clone ID: LIB3150-092-C7_FLI
atgagcttatatacctatatgaatactagctagaagttagagcctagatgatggttgcttccgttggcgtgcaagctcgagtgctcctaaatggtcgtcgtattagcttatacgacaacgacccggtgcaagagataatattgtttacacgtgcgagtccaaaattgttggctttgggccggagcagttaacacgagaagtgtattttatcacttccgcctcttgcatatgttgtagattctcgccgagaagggagtagtagtattacctgatacctatgctaattcaggtggcgtggtcgttagctacttcgagtgggtacagaacattcaaggtttcatgtgggctgaggagaaagtgaacgatgaactagaaaagtacatgagcagtgcttttcaacacatgaaggccatgtgcaaatctttggtgctgccgaagtgtgccatgacattggaattgcgggtctagaaaaacaagctcattagatttctaaaaaaatattgggagttattagattggtagcatttttttaagatttaaagttttatagaagtcatcattttcgtttattggaagaaatatttttggaagttg

SEQ ID NO: 19671 - DNA, 266 bp, Zea mays
  Clone ID: LIB3150-092-D3_FLI
gaattctctctcctactcaatggcttcacagcagcacactggtgccatggtaatcaattttggggcaagtagcaacggtggaatgtacgttggtgtaccaatggcatgcagttggcagcagtgaaaagtcttcacggttggaagtctggtgtctcttttcatttgcccctcctctcggttaaagaaacaatggcgagctgattctttttcttctccctactgtaattgattgtttcattttttatcatagcagaaatgttcttttc

SEQ ID NO: 19672 - DNA, 919 bp, Zea mays
  Clone ID: LIB3150-092-F4_FLI
gggccaccatcctggagaacatccagaaggcgaggttcctgccgaccaggccgctcaaggacgagctgcccaccttccagggcggcggcaagagcaaggaggagagccacctcatgggcctgaggaagcggctgtccagcttctccggcaagatccagcccatctcctccgcgtcggccgccgagtgggcgttccgccgctccaagtcggcgccctccctcggcgccgccttcgccgcggggggcggctccctgaggcagtggtggcagtggggcgtcggctggctcctgtccaagaagcccgggttcgcgggcgacctcgagatgaacgaggaggaggtcgccgcgctgggccgccagagcaggggcacctgggcccacatcctgttcaagatgcggtccggcgtccgccgcctcgtcgcgtccgcgcactcgctccccaccacgcacaagcagcagtccctgccgtcgtcgtcggccgcggcggcgcacagcgtccagtgcaagccggcggcgtcgttcgcctacgcgcagcggcagagcttccaccacaccggccacgccatggcgcactaggcagcgtctcgcggttgccggtgccgtctgcggccggtctcctccagatccagggatggagagcgctgagaggcgcgagaagaagaagaagaagaagatccaggttacaggtgcgtgagatcgacggtgaagatgtcgttgaattgatgatgaatgaaatggaatgtaggattaccgttctgtgatctgtgtagatctagtgcccctgtagaggtgaacaagtgttatactacatgctcgttctttctttatattattcttttgggttcgttcgttggacgatgtaaatgtaaaatgtttggttgatcttgtactgttaaataaaactgatgcaaattgtgccc

SEQ ID NO: 19673 - DNA, 280 bp, Zea mays
  Clone ID: LIB3150-093-A7_FLI
gcgagagagatggtggcacgggacgaccccaagtgcgaggagatggtgccctgcaccttcaggcgctgcatccagtactgcgtcagcatagggctgcagcccaaggggttctgcaactccaagcccaacatgcaggtctactgctgctgcgtcatcccctagcatcatagctcctcgtcaacacacctaaatctgcagccctgctagagaagatacgatctctatgcagattagctgcagcgatatatatagatggatgaatcgttcaaacggttgaact

SEQ ID NO: 19674 - DNA, 1026 bp, Zea mays
  Clone ID: LIB3150-093-E5_FLI
ggcaaagcggacggagcgccagcgttcttagatcgattgctcgccaggctgttggcgaggagtcgtcaaccctcacggcagccatgtctgtggagctcatcctgtggcttttctccttcgtctccgtcatggtcctcatcggcctcaccgcataccagcttatctgtctgtcagatttggagtatgattatatcaacccatatgattcatcgtctcgcatcaacgctgtggtgctgatagaatactcactccaaggggccctgtgtgcttctttcctcttgacattgcattggttcccgtttctagtcatgacaccagtaacatactaccatgtcaaactgtatttggctcggaaacatcttgtagatgtcactgaaatttttagacaattaagtgacgagaagaagtacaggatgatcaagcttgccttctacttctgcctatttattataactatttacaggcttgtaatgacagctgtgatgttgtttattgatgaggacataaatttggcagaaactaggagtatctagacttcgccaccaacttgtcatggggatggagcagagttgtagcttgaaccagggagaccacaactcaatgccttgacttagttgtgagaaacaagatcagtttgtgccctgtagctggaggagctaacctggtactccttttaccctaaatcgtaagttgttttagttttttctagatgcatagcttttacgatgtatcctccagatgcatagtaaaagttatatatttagaaaaaacagaacaacttataatttggaatggagtattcatttcatccatcagattgtgatgtacaatgaattcccatagtttggtccatcggtaccatgtttgtaaattgggcagtcaatgatgtgcatcactgcaggatgaacgcacgtttggtaattgttgtgcaattctttgtacttgtggacaagtgctgtattctacacattgtttgcatacagacgatgtgtggttggtgtcataatttaccactaaacctttggt

SEQ ID NO: 19675 - DNA, 406 bp, Zea mays
  Clone ID: LIB3150-093-F6_FLI
ggcagcgcgtgcggttcttcctcgacacgcagatggagctcacgcaggccaagaatcacgcgtctcctgccacggccgccgtccctgctgttggctcgtcgaggaggattccgaggatgtcactggttaccgacgccggtggcagcagcaatcaccatagccgttaccggatcagccatgttgacaggcaccgccatgctccacgcccacattaccagcagtaccatgacaacaataacgcgggggcagcggctgcaagtgacggtgagcagtctgacgaggaagattatgaagaagagagccagtaactgcatcattgttcgccataattcatagggttaattaattggatctctatgccatgacaattccgtgttcgtagtgtctaactgagtcgttctttttt

SEQ ID NO: 19676 - DNA, 602 bp, Zea mays
  Clone ID: LIB3150-093-G6_FLI
gggcagtttgaagaagattccgaatctttcagaccctgcagaatattcaagacttggactagtgccaagaagagctgacctggacatgaaccaacatgtcaataatgttacttacataggttgggtcctcgaaagtatacctcaagatataattgatacacacgagttacaaacaatcactctcgactacagaagggagtgtcaacaggatgatatagttgattctcttacttgcatagaggaaggagaggagaaaagcatgaacggctctgcttctgcagcagcgcctcacaaagaagagcggcagcagttcctgcattgcttgagatttgcagccaacggacacgagatcaaccgtggccgtaccgtgtggaggaagctagctagataaaagtgttctttcgtcataaatgatctcctccatttctctgctcacggctggcggcccttgtaccacaattttgtgatgtattgttgccctttggaatgtactcagccatgtatcggtgccgatttgtgacatttcttggagctgtagctgtctgtccgttttgtaccagtggacaatgtttgtgacatgcaataaactgcgtttctccggc

SEQ ID NO: 19677 - DNA, 2512 bp, Zea mays
  Clone ID: LIB3150-094-A6_FLI
gagatcgtcctgatctgactgcacctgaaagtttacaactgtatcttgatacacgtgttgagcagcttaaagttgctacagaactctccctttggcaggaagccttccgatcggtggaagatatccatggtttgatgaccatggtgaagaaaatgccaaaaccatctatcctggtggtctattatgcaaagttgactgagatcttctggatatcggacagccacttatatcatgcgtatgcgtggctcaagcttttcaacttgcagaagagctacaataaaaacttgtctcagaaggatctacagttaatagcatcttctgttttacttgctgcgctatccgtgtcaccttatgacaaaaagtatggtgcatttgagacagagaatgagaaagagcgcaacatgcgtctgtccaaccttgttaacttttcgcttgataacaagcgtgaaaacagggaaatgccttcaagaccatatcttctatcagagttggcctccaaaggagtcctttcatgtgcttcccaagaagtgcgagatttgtacaaccttttggaacatgagtttctacctctggatcttgcatcaaaagtgcagccacttcttttgaggatttcgaagattggagggaagctttcatcagcttcttctgttcctgaggtcaagttatctcagtacatttcagcattggagaagctgacaacattgagagtgctacaacaggcctcttgtatttttcaatccataaagattgatatgctctcgagaatgattccattctttgacttctctgtcgtggagaagatttctgttgatgctgccaaacaaaattttgttgctataaaagttgaccatttatcgggagttgttcagtttggtactgtggacatagaatctgatggcttaagtgatcaccttagtgttcttgctgattcattaaataaagcaaggattcatatctgtccaccagtgaaaaagccatctaaactcggtgaaagtctcattagtttggctgcaatagtggagaatgaacataagaggctgcttgcaaggaagtccatcattgaaaaacgtaaagaagagcttgagcgtcaaatattggagaaggaaaaagaagaagaaaaaaagagaatgagcagtcaaaagaaaactgcggatgaggaaagggtgaggcttctcaatgaacagaggcagagggagcaggaccggattcgtagagagatagaggaaaaaaataaagcagaagcaaaaaagttgctagaagatttgaataaggcagggaaaaaacatgtcgttgttgaaggggagcttactaaggaggccatcatggaattggcacggaatgaacagttaaaggagcgccacgaaatggagaaaaaactgcagaagtttgcaaaaacaatggattatctggaaagggcaaaaaggcaggaagaggcaccactgattgagcaagcttttcaaaaacgtcttgaggaagagaagatccttcacgagcaagagcagcttcgggagattgaactcagcaagcaacaccatgccagcgacttgcaagagaaaaatagactttcacggatgttggagcacaagaatgctttacaggagagaatcatccaagaacgtgcagctgagtttggccgtctgaagaaagagagagatgaacggatgaatcggttgatatcttcaagaaagcgtgaaagggagacagtaaggaagttgatgttttatctgaacctggaggaacagcggattgaaatgcttcgtgaggaagaggaagctagaaaacgtgaagcggaagagaggaggaagagagaggaggctgaaaggaaagctaaacttgatgccatcgctgaaaagcagcgattgagagagatagagctggaggagaaggcaaaggcaacaagggagaagctcttaaagggatccgaggctgtgcgcgctccagattctgcacctgttgcacagccacctcgagagtcagcagcagcgcctgcagctgctgcggctgctcctgctcctgctcctagtaaatatattcccaagtttaaacgcggtggtgatagcagcagcatcccttctggcagccgcgatgaagatcgctggggttcacgtggtccgctcaggcaagatggtcctcctgcacgactggatgcaccctcatcacgccaagatactgatcgctggcgtggatcaagattttcctctaactcaacgtcctcttcatcaacctggagccgttcacggaactgatcctatgctgcaggacttttttctagccatgtgtcgacctccgtgcacaatgtctaatcgtacctttccaggcactgcactacatgcatattattgctgttttgtacttttgtagtaatactctacaatccatgattattgtccctgtttgttagtaatgctgttttgtctgtgcatgaaacactctatacctacatatagccaagaattgcaggactatgtatgcatgtaaaactcttgcaagattatcaatttttatgagctat

SEQ ID NO: 19678 - DNA, 1205 bp, Zea mays
  Clone ID: LIB3150-094-B3_FLI
ggttcaactcaggcacttgtttttgctgatgcaaaagcaattaaggagaacagtgccaaactgggtgctggggaggatcttcatgcactctttgctggtgttctcactatgagaccatggaaaagggtgattgacccatctcctgatcatcttgtactaggaaaaaatactgattattcagaattacaggtacatatgtcctacaattgtatccccaatagtcatccgtggtaccaccgcaaatgtaatgatgcaaattgactatgttgttaaacattataacagtatctgtagggccatgggccgatgaagtagctagaatgctgttgtagaaagactgatattgtcgattgtggtttgattgttgttcatgaaatcaacaggtctttaaatcttgacaagatcaacagagagaaaacagattacaaactttacttgaaatacatatagcagcccacactctaaaatgggatgaaaggaatacacatttcttagataatgttttacttgaaatctaacccttctttccacttcaactattaggatttagagcctttgatgttcccaatatagagtatacaagctgatattctccttgttcatcagttatattattttgtaatttttatattcttttcttgcttttatatcatgtatcctagtgttagataattggactcagattcatttgttaagtttctgttttataaacctttcagtagtcttgtagattttgaggtccttggtatctgtccttactcgattacttatttcttgagcccagaattacgcctccttatattttactgagatctccgagctactgaggagattaccaagggttatattgttgatgcttaaaacaaatgactgtttacgtgcagtcagtcatgccctggttgggggcagttccttggagtcgtttatgattattggacgggtatcttctgaagctgtgctggatgctaaaaggatgaacaggaggtcctttctcgatggattgaagatatggctggaggaagccctgctggaagctcgattctttactttgaagctgatgctatgtgttatgcaacttaggaagttgttgcctggctaaaagcagttaggcgtatcagcagcctttttgaccggtagaactgcggagttgacatctagttccataatttttttgagggcgaaacttttcttttgcttaaaaaaac

SEQ ID NO: 19679 - DNA, 1136 bp, Zea mays
  Clone ID: LIB3150-094-B6_FLI
gaaagaaggctgctgtgcacgcctctgaaaagaaaactgctaccaaagaacctaagacgcctactggctcccaaagtgaatcaacggaggtgaatacactttttatgggaaatgtcccctggaaagctgaatttgatgatgtgaaagaattttttgaggacgttggtgaggttgttgatgttcgttttcctacacatgatgatggcaatcgtaaaggattttgctatgttgaatttgtttcagctgaagctgctgcaaaggcatataaagagaagcaatcaaaggagctgcatggtcgtgaagtaagacttgacttcgctaaaggaagaagtacacaaactcctcgcagcggcaatgatggatctttccagaaggctgctcggggtaacagcagctcaatatttatccggggctttgataaaaatctttcagaggatgagatccggagctctctcgaacaacattttagtgattgtggtgagatgacaagggtctctatcccgactgatcatgaatctggtgcaataaaaggaatggcttacatagacttcaaggatcaggactctgtgtctaaagcccttgagctcagtggctctgacattggtggtggctatgagctttatgttgatgaagccaaaccaagaggcgatggccagcgtggtggtggtagatctggtggccgttctggtgggagatttggtgaccgttctggtggccggcgtggtggtggtagatttggtgaaagatctgggggcagggatggtggcggcagattcggtggccgacgtggtggtagggatggcggccgaggacgtggtggccgtggctttggtaacaagcacagcgctggcactcccagtgcaggaaagaagactacttttggtgatgattgatgatgaacgcggaggatgcggcaaaaggatccaatgaaattgtgtttttttggtcttgttgtggtaccgtaactggaatttggtattttttgtctactatttactgtagtggtttctggattttccttgtgttgcctatgctgcaatacaccgttttgttgttgcgatacatctgtagtttggttttgttatccacctgtcgtttataagaagcggctgtactcaggctactatgccgaactg

SEQ ID NO: 19680 - DNA, 474 bp, Zea mays
  Clone ID: LIB3150-094-D6_FLI
ggggcgctcgttttcgatgccccagcaccgctacgcgccgcacttcgcccccttctctccctctcatgccgctggttgatctctcgtcatctcctcctccaagcacggatcttctcgtcgtctcctccaagcacggatcaggagcactgaaattctatctcaaccggttctgccgactgggtaacttgaattctaaaggttgatccaagcaggaggtgaatgtgtgatggttggttattttgcatttcttctaggttgatgcatgacggttcatggagaaggctggtggttgtgatagctatcacacactcttttggttaataattagatactctttttgttgagcaatgtgaacctttaatggtgtttatgggtcttgtggagttgtgatggggctattatgaagatgctatggcctgttatggatgattggacatgttatgggctctatatattaatctgttagtttggttt

SEQ ID NO: 19681 - DNA, 1315 bp, Zea mays
  Clone ID: LIB3150-094-E8_FLI
ctcctcggcgccgacgacaacgacgacccgacgcagctgattgcggcggcggcggctgctgctcagaaagccgaggcgaagaagtccgccgtggcgcctgctgggaaggctgcccagcctgcggcgaccaccaagttcccgaccaagcccgctcctccctcgcagacggttcgggatgcacgcggcggtggctcatcagctcgtggaggctttggccgtggtgaacgtggccgtggcagaggtggacggggatatggccagaaccgtggcttcagtggtgacaatggcagtgacttccagggaggttatggtggcggaggctatggggatggtgctgtaactggtggatctgaaggagaaagggagagagacactcgtcccccgtaccgtggcggaggcagacgtggtggttacaggaatgttgagtttgctgatgactctgagaggccaccacggagaaactatgagcgccacagcgggactggccatggctatgagatgaagcgtgatggcgcagggcgtgggaactggggcactgccactgatgaacttattgcccaggatgcagaggactccccgaagatggaggaggctgctcctgttgctgagaaacaaggtgagcagaatgatgccccagcagcagatgagaacaaagataacaaggatgctactgcaaatgaggaggaagaaaaggaagaggacaaggagatgactctggaggaatttgagaaaataagagaggagaagaggaaagcactacttgcattgaaggctgaggagaggaaagttgaagttgacaaggatttgcagtctctgcagccactttcaaacaagaaagaaaatgatgaagttttcattaagctgggttctgacaaggataagaagaaggaaaatgctgagcgtgatgagcgtgccaagaagtcggtgagcatcaacgagttcctgaaacctgctgaaggagaaaggtactacggcggccgtggccgtggaaggggccgtggggatcgtggtggttttagaggcggatacggagggggatacagtcgtggcccagctgctgctgctccatccattgaagatcaagctcagttcccaagcctcggtgggaagtgaagggcgcccagctgctgctgtcaccgagcgttgtgttgtctgctgttgtcatatttaaattttgtccgacgttaaatttctgtgccacggtttaaacggaacaaataatgatgttgcatgtggctatctttagttatgtggtacttgacgttgaataccggagttgttgtttatcagaattaacctccaatttttgtaggcc

SEQ ID NO: 19682 - DNA, 1890 bp, Zea mays
  Clone ID: LIB3150-094-G12_FLI
cattgcccgatgtggaggtagaaccgatggttgaagtttcagcaaagtttgctgactaccagtgcaacaatgctatgggattatggtcaaaggttaaaggatctggaacaattttcaaaaaccctaattccattgggcaggccattgccaagaatctgccgtcttctgatattattgaatctgcatctgttgctggacctggttttgtgaacattaccttatcaaaccgctgggttgcacagagaatacaagatatgcttgttaacggcatcaagacttgggcaccagttctgccagtaaataggacagtggttgatttttcatcacctaatattgcaaaggaaatgcatgtgggacatttaaggtctacaattattggagatacattagcacgcatgtttgagttctcgaatgttgttgttctgcgcagaaaccatgtgggagattggggtacacagtttgggatgctaatagaatatctttttgagaaatttccaaattggcaggagataggttgccaggccattggggaccttcagattttctataaagcatccaagcataggtttgacagtgatccagactttaaagcaagggctcaacaaggagttgttcggctacagggaggggaggataaatatcgagaagcatggaaaaagatttgtgacattagcaggagcgaatttgacttggtctacaagcgcctaaatgtggtgcttgaagaaaagggggagagtttctataatccttatattcctcaagtgctggaggaattgagtaacaaaggcttgatcaaggagagtgagggtgcccgagttatatttattcaaggtcatcaaatccctttgattgttgttaagagtgatggtggcttcaactatgcctcaacagacttaactgctctttggtatcggctcaatgttgagcaggcagagtggatcatatatgttacagatgttggtcagcagcagcactttgacatggttttcagtgctgcaaagatggccggttggctcccagatccaagtgaaaagaagtttccgaaaacaagccatgttggatttggtcttgttcttggttcagatggcaagcggttccgaacccgcagtactgaggttgttcgattggtagagctacttgatgaggctaaatctcggagcaaatcagaactactacaacggctcactgaaaatggcaaaattgttgactggacggatgaggaattagatcaaacttcagaggctgttggatatggtgctgtgaagtacgctgatctaaaaaataacaggctcactaattacacatttagttttgaacaaatgctgagcgataagggaaatactgctgtgtaccttcagtatgcacatgctcgtatttgttccattattcggaaatccaacaagaacgtggaagagctgaagatgagtggagccatttctctcgaccatccggatgagcgcgtgttggggctgtatcttatccgatttgcagaggttgttgaagaggcatgcacgaatctacttccaaatgttgtgtgtgaatacttgtacaatctatctgaaatgttcacaaaattctataccaactgccaggtggttgggtcgccggaggagacgagccggttgttgctttgccaggcgactgctgttgtcatgcgacagtgcttcaacctgctcgggatcacgccagtatacaagctgtgattggctgcatgttcgattaatacattcaacatgtagaaaccccaattcatcatggttgcagttttggtcttgtaacctagttgaggcagttaacataatctactgtcctgtttgaaaacagaaggaactcaaaaggttgtatcaaaatgtgcttgcagagtttctgttactgttaggctagttttgc

SEQ ID NO: 19683 - DNA, 705 bp, Zea mays
  Clone ID: LIB3150-095-A1_FLI
gcggccgcctgccgctccgctcgaaagtttttagtgaagattttttgaagccgagaagatggtgctgaagacggaactctgccgcttcagtggccagaagatctatcctgggaaaggcatccggtttattcgtgctgattctcaggttttcctttttgccaactcgaaatgcaagcgctacttccacaaccgcctgaagcctgcaaagcttacctggacagcaatgtacaggaagcagcacaagaaggacatccatgctgaagctgtcaagaagaggcgccgcgccaccaagaagccatactcgaggtccattgtgggtgcttccttggaagtgatccagaagaagagagctgagaagcctgaagtccgtgatgctgctagagaagctgctcttcgtgagatcaaggagcgcattaagaagaccaaggatgagaagaaggcgaagaaggctgaggtgtccaagtcccagaaggcgcagacgaagggcgctgtccagaagggttccaagggccccaagttgggcggcggcggtggcaaacgctgaaaaggaacgaagtgtcattctgagacctcaccaaagccacctttgtagtacctgggttaattttgcattttcgttcagagttacctgtgactcttaactaccatgtcaagagaatggattcgttatttttatatattgggagaaatgatcgccgttccttc

SEQ ID NO: 19684 - DNA, 1052 bp, Zea mays
  Clone ID: LIB3150-095-A8_FLI
gcaaattgagaaagttatgcgcgcacttggtgactaccttggtgttaaagtccatgcatgcgttggaggaacatctgttcgtgaggaccaaaggattctcgccagtggtgtgcatgttgttgttggtacacctggtcgtgtgtttgacatgctgcgtagacagtccctccgccctgataacatcaagatgtttgttcttgacgaagctgatgaaatgctttctcgtggtttcaaggatcagatttatgacatcttccagcttctgccatccaagattcaggttggagtcttctctgctaccatgccacctgaggcccttgagattacccgcaagttcatgaacaaaccagtgagaattcttgtgaagagagatgagctgacccttgagggtatcaagcagttctatgtgaatgtggacaaggaagactggaagctggacacactgtgtgacctgtatgagaccctggccattacccagagtgtcatctttgtcaacacccgccgcaaggtggactggctcactgacaagatgaggagcagggaccacaccgtttctgccactcatggtgacatggaccagaacactagagacatcatcatgagggagttccggtctggctcctcccgtgtgctcatcaccactgacctgcttgctcgtggtattgatgttcagcaggtgtccctggtcatcaactatgatcttcccacccagccagagaactacctgcatcgtattggtcgtagtggtcgttttggtaggaagggtgttgccatcaactttgtgacccgcgacgacgaacgtatgctgtttgacattcagaagttctacaacgtgttgattgaggagctgcctgccaatgttgctgaccttctgtgatcaatttcaagaaaaaacaaaacaaaaaagggtggtgaggaacctggtaaggcttggttttgtcgaaataccgtgggagagggggtgataaggacggtggggtttctatgttgaagtcgtggtcatggacaatttgtgattttttctcctttatgccatgttttggaatttttgt

SEQ ID NO: 19685 - DNA, 1795 bp, Zea mays
  Clone ID: LIB3150-095-C11_FLI
cccaaaatcgccgccgcagccgccgccgccatcagccatggccgctgacacttcgaagcccttcttccccgcggcgccgcactcggctctccgcccctccaggagcgccgcctcgcgcgcgttccctgagagctcctactggcgcgccttccgctcctcggagctcttgtccgacgccggcttccccgtcaccgatctcaccttcgcctcctctgtggaagacagagctgcccctaccctcgccgcttcctggtccacctccgtgcacgtcttctcctccgaccccctcgagaagctccgtaggatctctgtcgcgggcgatctcgccttctccccgtccttccgctgcgacggcgccctcctcgccaccggagacaagaagggtgtcgtccgcgtattccgcgccgacaaggccgccacgggggccctccgcacgctgcgcgcccacgccgccgagacccgcgtggtccggtacccagtcgctggcggcgacaagcttcacctcctcaccgccggcgacgaggcgctcctcgcctactgggacgtgccctcggagactcccgtcttctccatccccgccgcgcaccaggactacattcgcggcggtgcggcctcccctgctgatcacaacattttcgccactggctcttacgaccgcagcgtcaaattgtgggatgcccgcaccagcaataccggcccatctttgtccttctcccacggggaattggtggaaagcgtgctattccttccgtccggcgggctgctggccacggccggagggaacgtggtcaagatttgggacgtcattggtggtggccggctcgtgcactctgtggagagccatgtcaagacagtgatggacctgactcttggcaagatggtcaacactggggagatgcggctgcttagtgcgggcattgatgggtatgtgaagagctttgattttgggaagcttaagatgacacactccttgcggtaccctcagccgctcctttctgtggctgtctcgccctgtgggtctgtggtggtggcagggtctgcgaaagggaagatttatatgagaaataggaagaagaaggctgtggatgaggaagagcaagggatgaaatctgttggtggtgagattgactgggtatctccagagccggagaagtcagtgttgaggccaaattactttaggtacttccgccgtgggcagaatgagaaggcaaaggagggtgactttgtgattgagaagccgaagaaggtgaaatatgcagagcatgataagttactgagaaagttcaggcacaaggatgctctggtttcagcattggtcaagaacaacccgaggagtgttgtggctgttatggaggagctggtttcaagaagaaagctcataagatgcatcgggaatttggataatgaggaacttggtcttcttttggagttccttcaccggaatgcaactttgccaaggtatgctaagttgttgttgtgtttggcaaacaaggttgtggagatgcgcgaggctgatatccgatcagatgagaagctgaaggtgcatatgaggaatcttaagagaatggttgcagaggagattcagatacagcacatgctgcagggcattcaagggatgatttcaccaatgcttgcacttgcaaccagatgaaaaggtgcttttgtttcaaacaaggaatttttgttatatgttagtttgcaggaggcccctgcatgcgatatgtactgctttgaaaaattatgtttgctattggatagtgaagtatgccagatggttgagatactctgttctgtc

SEQ ID NO: 19686 - DNA, 974 bp, Zea mays
  Clone ID: LIB3150-097-B6_FLI
gccccgatccgaagctgtgcctcgtaccatttcgatccaatggcgccgacgtcgaagctgtcgacgggcatcaagcgcgcttcgcggtcgcacgcgtaccatcgccgtgggctgtgggccatcaaggccaagaacggcggcgccttccccaaggccgacaaggccgccgccgccgtggaacccaagttctaccctgccgacgacgtcaagccccgcgttcccagcacccgcaagcctaagcctaccaagctcaggtcgagcatcacgcctgggacggtgctgatcctcctcgcagggcgcttcatggggaagagagtggtgtttctcaagcagctcaagtccggcctgctccttgtctctgggcctttcaagatcaatggagtaccgatccgccgtgtgaaccagacctatgtcattgctacatcaaccaaagttgacatctctggtgttgatgtcgccaagtttgatgacaagtactttgccagggagaagaagcagaaggtgaagaagaccgagggcgagctttttgagacagaaaaggaggcatccaagtcactgcctgacttcaagaaggatgaccagaaggctgtggattctgctctgatcaaggctatcgaggctgtcccggagctgaaaacctatcttggcgcccggttctctctcagggatggtgacaagccccatgagatggtcttctaagcttctagttttggagttcgtaggaagctgttttgtctgtgttcttgtacttctgagttttgtaccagtagcgaacgtttcattgtgattgaagtcttcctgccaaatattataagatctaagaaagttctattcgtgttggtggttcagcagtgcactatctgcatttggttccttaggtagtccatggtatcttgaggtcccattttgtttgaattgctgactgtcaggtgtttttgctgttggttggaataaacttggcatgtagcttgccg

SEQ ID NO: 19687 - DNA, 648 bp, Zea mays
  Clone ID: LIB3150-097-B9_FLI
gcgacgagctcctgtcggattcattcacctacaaggagctcgagaacggcgtcctgtgggaggtcgagggaaagtgggtcacccaaggtcctgttgatgtggacattggtgccaatccatccgccgagggtggtgaggacgaaagcgttgatgacacagctgtgaaggtggttgatattgttgacacattccgtctacaggagcaacctccttttgacaagaaatcatttgtgtcttacatcaaaaaatacatcaagaatctcactgctgtgttggagccagagaaagcggatgagttcaaaaagggtgtcgagggtgcaaccaagtttctccttagcaagctgaaggacctccaattttttgttggtgagtccatgaaggatgatgcgtctgtggtattcgcctattacaaggatggtgccactaatccgacattcctctatttctctcatggtcttaaggagatcaagtgctaggcgtgcggcgaaattagttacccatgttgggtactatctatgtactattattatatccaaaactatagttgtcctggctgaattgaactcaaaagggtttgtttgagaaaaaattgtcccaagattggattgcttgttaaagctcaatattgttattgaagtgttattgctt

SEQ ID NO: 19688 - DNA, 1568 bp, Zea mays
  Clone ID: LIB3150-097-C8_FLI
ataagtccgcccccctctccctcagtaaacccctctcttcttcccgcggtctgctcgttcgatctgtgcagcagatctgaggtctcgagcgaccgtgaagcagcttcaatcgtcggcatggcgctcgtattgcatagtggggctggaaacaagaatgccttcaaagcacttattgctgcagaatacagtgggatcaaggttgagttgaccaaggattttgagatgggtgtctccaacaagacccctgagtttcttaagatgaacccccttgggaaggttcctgttctggagactcctgatggccctgtttttgagagtaatgctatcgcacgctatgttgctcgcttgaaggatgacaaccctctttttgggtcttcccatattgaacaagcccacgttgagcaatggatggattttgccgcaacagaagttgatcctggtgttgcatggtacttgtatccaaggcttgggtacctcccttatgttagcacaactgaggaaacagctatttcttcattgaagaggtcgcttggtgctctgaacacacaccttgcctcaaacacataccttgttgggcatgctgttactctagctgacattgtattgacatgcaacctctaccatggaattgcacggatcttgaccaagaccttcacgtctgatttccctcatgtcgagaggtatttctggaccatggttaaccagcctaacttcaagaaggtcattggtgaggtcaagcaggcagagtctgcacctcctattccgaaaaaggctgctccttctaaggagccaaaggcaaaggatgtcaagaaggaggctccaaaggaggcccccaagccaaaggtggttgaggcaccagcagaagaggaagcaccaaagccaaagccaaagaatcctcttgacttgctgccaccaagcaagatggtccttgatgactggaagaggctatactcaaacacaaagaccaacttccgagaggttgccatcaaaggtttctgggacatgtacgacccagagggctactctttgtggttctgtgactacaagtacaatgatgagaacaccgtctcctttgtgaccctgaacaaggttggtggattcctgcagcggatggacctgtgccgcaagtacgcctttgggaagatgctcgtgataggctctgagccacccttcaagctgaagggcctttggctcttccgtggccaggatgttcccaagtttgtaatggatgaggtctatgacatggagctctacgagtggaccaaggtggacatctctgatgaggcccagaaggagcgtgtcaatgcgatgattgaggaccaggagccctttgagggcgaggccttgcttgacgcgaaatgcttcaagtgagtgtgcttgcctggagacagaactgtttagcccttgaatttgtctatggaagagtttgcccttttactagtgtcgatgttgatctggtataccttgctatgaactggttaaagtttgtgctggtttgggatttttttgtgcatcttgtgatacctcaagtcttcatcatttaaatgtttagccgtaataatctggtt

SEQ ID NO: 19689 - DNA, 2130 bp, Zea mays
  Clone ID: LIB3150-097-D8_FLI
gccttccgttcgtctcaatcccccgtcgcattccgcaacacctgctcctcgcccccttctctcagaggcgacgcctcgggcgctcctaccctgccccgtctccggtccccccgcgccgtcggcgaggcagccggccgtcacagaagcccgatccggaccccgcgagaaatccttgttatacctgatggctatgattgatgagcctctttatccaattgctgtactgattgacgagctcaagaatgaagacatccagttgcgtctaaactccattagaagactttcaacaattgcacgggctcttggagaagaaagaaccaggaaggagctgattccttttcttagtgaaaacaacgatgatgaagacgaggtgcttcttgcaatggctgaggaattgggtgtgttcattccgtatgttggtggtgtagaacatgctcatgttttgctcccacctttggagacattgtgtacagtggaggaaacttgtgtccgtgataaagcagttgaatctctgtgccgtattggtgcacaaatgaaggaaactgacattgtcgactggttcattccagtagtaaagaggctagcagctggagagtggtttacagctcgcgtatcgtcctgtggtcttttccacatagcctatccaagtgcgtcggaccaattgaaaacagaattgaggactatctatggtcagctatgtcaggatgacatgcctatggtcagaagagcagctgcatcaaatcttggaaagtttgcagctacagttgaacagaatcatttgaagacagaaataatgtcaatatttgatgatttaacccaagatgatcaagattcagtgcgtctgttggctgttgaaggctgtgctgcccttggtaaattgttggaaccacaagattgcgtagcacacattcttccagtcattgtcaatttctcccaggataaatcatggcgtgttcgttatatggtcgccaatcaattatatgagctctgtgaggctgttggccctgagcctacaagagctgatttggtgcctgcctatgttcgcctccttcgtgataatgaggctgaagtgcggatagcagctgctggaaaagtaactaagttttgccgcatattaaatcctcagctctcagtccaacatattcttccatgcgttaaggaattgtcatcagattcatcccagcatgttcgttcagctttagcctcagtgattatgggaatggctcctgtactgggaaaggatgctaccattgaacagcttgttccaattttcctctctttgttgaaagacgaatttcctgatgttcgacttaacataatcagcaaacttgatcaagttaatcaggttattggaattgacttgctatctcaatcactgctaccagcaattgtagaacttgcagaggataggcactggagagtccggcttgcaataattgagtacatcccattgttggcgagtcaattaggtgttgggtttttcgatgacaagctgggggcgctctgcatgcaatggttggaagacaaggtcttttcaatcagagatgctgccgctaacaacttgaagcgccttgcagaagagtttggtccagagtgggcaatgcagcatataatccctcaggtgctggagaagatcaacaacccacactatttataccgcatgacgattctgcaggcaatctccttgctagctcctgtcatgggtgcagagatcacctgtcaaaagctgcttccagtcgtcattaattcttcgaaggacagggttcccaacatcaagttcaatgttgcgaaagtactacagtcacttgtaccgatcctcgaccaatctgtggtggagaagaccgtgaaaccgtgcctcgttgagctcagcgaggaccctgacgtcgacgtaaggtactacgcaaaccaggcactgcaggcgtgcgaccagatgatggtgtcaagctaactagcctttgtgtcaagtatttagagagttcgatcgatgctccatagtccaattttggattacctgtaatttggcctttagatttgaagagttgtttgtgtctagcctcggtaacagataaaaacggacggtcctgatccccttgttcgtttgtgttaattaatgttgtaattgagcaggac

SEQ ID NO: 19690 - DNA, 790 bp, Zea mays
  Clone ID: LIB3150-098-A5_FLI
ggatgattcatatctggagagctatatcagtactattggagttgattttaaaatccgcaccgttgagcaagatgggaagacaataaagctacagatttgggatactgctggccaagaacgctttaggaccatcacaagcagctactaccgtggagctcatggcattattgttgtgtatgatgtaactgaccaggagagctttaacaatgtcaagcagtggctgaatgaaatcgataggtatgccagtgaaaatgtgaacaagtgtgacctggctgagaacagagtagtttcttacgaggctggcaaggcccttgctgatgacatcggaataccattccttgagactagtgccaaggatgcaacaaatgtggagaaggcattcatgaccatggcaggggagataaagaacaggatggcaagtcaaccagctgcaagtggtgctagtaggcctgcaactgtgcaaatgcggggtcagcctgtttctcagcaaagcagctgctgctcttgatcgtctgtctagatcacagtagtgtgattgtgcagcaagcaaaacttaaattggttgctccctgtacattaagcctattactgtcccaaagaactcgatgttatctatcggatactggaagtctgtctatcgactgcaacgattaagcagatatggcctgttttatctgtctgttcttattccagtgctaatgtgatgttggatcaaatcgtttgtcagttcagcagtacgctaatgatgcgtgtgagctggagtcaggaggatattattttgatgatgagc

SEQ ID NO: 19691 - DNA, 585 bp, Zea mays
  Clone ID: LIB3150-098-H4_FLI
gattccaagtcacatagttgacatactcaagccctcccaaccacctatattcattgatccatcctatacacaagatttagtccactacaaccaacacaagtgccacaaaagagagagcaagcaattgagagctactcaattgagtttagccctagcgccttgtgagattcattgagagatagtgtgtgctacatctttgtgttcatttgcgcgtggagtttttgactcccattcgaacttcctccaaagtgttggaggcttgtaaaagctagcaagagacaccaaagattgtggtggtccttgtgggatcgagagtgatctttgagaagaagaagagctcgccgatccttgtgtgatcgggagagagggaaagggttgaaaaagacccgtccttaagtggactcctcaacggggactaggccttcgagggccgaacctcggtaaaacaaatcacccgtgttcattgtgcttttgctcgtgatttgtttgctttcccttactctaagttctcttgcactattctttactcatatcatttggtgttgcttcaagttaaactctcatttaagtgaagcaacgctccgc

SEQ ID NO: 19692 - DNA, 1021 bp, Zea mays
  Clone ID: LIB3150-099-E1_FLI
gcgcgctccagctcaccatttctcctctcccttcccttccctaagcatctcagcgaatccaatcgatccgaaggcgatggaccagcagggtgcgggcggggacgtggaggtgccggcggggctggggctgacggcggcggagtacgagcagctgcgtccgacggtggacgcgcaccaccgctacgccgtgggggagggccaatgctcctcgctgctggcgcagcgcatccacgcgccgccggccgccgtctgggccatcgtccgccgcttcgactgcccgcaggtgtacaagcacttcatccgcagctgcgcggtccggccggacccggacgccggcgacgccctccgccccggccgcctccgcgaggtgtgcgtcatctcgggcctccccgccagcaccagcaccgagcgcctggaccacctcgacgacgccgccagggtgttcggcttctccatcaccgggggcgagcaccgcctccggaactaccgctccgtcaccaccgtctccgagctcgcggggcccgggatctgcaccgtcgtgctcgaatcctacgccgtcgacgtccccgacggcaacaccgaggacgacacccgcctcttcgccgacaccgtcatcaggctcaacctccagaagctcaagtccgtcgccgaggccagcacctccagttccgcaccccagccgccgtcggagtagcgggcggccggaatcggcaaggggagaaacgcagcagcaagttttgggcgtttttctgttatttcacttctctgaggaatggtctctctgaattaaatctgatcgtggatggatttggactggacgagaggaggagaggaggggtcgggtcagcttgaatcaggtgtcgcgttgccagggtggcgacctgtaataacctctccttcatctcctagattccttcctttcatctcctagattcgttcctttcatctctgcttcttccagaatttggttaatttcagctttatgcgagtggaatgattccttagaattgctgcttctcat

SEQ ID NO: 19693 - DNA, 609 bp, Zea mays
  Clone ID: LIB3150-099-F12_FLI
cgacctcttcgcgcgccccttccgcaagaagggctacatcccgctcaccacctacctccgcacctacaagatcggcgattacgtcgatgtcaaggtgaacggcgccgtccacaaggggatgccgcacaagttctaccacggccgcaccggtcgcgtctggaacgtcaccaagcgcgccatcggcgtcgaggtcaacaagcaggtcaatgggcgcatcatcaggaagcgtatccatgtccgtgtggagcatgtgcagccgtcccgctgcacagaagagttccgcctgaggaaggcgaagaatgaccagctgaaggcggatgccaaaaagtgcggcgaggttatcagcaccaagaggcagccattgggtcccaagcccggcttcatggtcgagggcaccaccattgagaccgtaactcccatcccatatgatgtggtcaatgatctcaagggtggatactaggttgtttggtccatctacctgcagtacccagttctacatctgtgttactctagtgcgtgcaactttgctcactctgagcagtagtatgaacctgttgtgtgttcctgttgaaagatttcccattttaggtgcaaacctgagtttctccg

SEQ ID NO: 19694 - DNA, 1452 bp, Zea mays
  Clone ID: LIB3150-100-A1_FLI
aagggctagtttgggttagatatatagatagattatgataagggctagctatatagattatgataatccatatactggtaagggctatggattgtcataatctatatatctagcccttactgaaatgtaatatagattatgggtttaggcctagcttatggattatataagcacctattatgtagattacagtgtttacagattgaaacggtagaatgggcgagttcttcatctctattagggctagtttttaaactcgaattctttttggaattaccctctattcaaacaagctcttagggtggttaggattggattgaagagaatttgaggctagtcaaaattgaatagaaaagaatttaattttcttcagtcttctctaatgcacatgcaactgaacacggccttgattggtgcctcaaattttagaccatattggccatcattgtattctatttttagtagattatgcatatgcatgtactcagtggagtttgaaatatgagtgagataggtaatggatatgggaggtgctggagatagcattaatacctaaaaattattctcataagttaagactcctgaatgttgatgcatgtgtaaagggccgttggacccttcatttcggaggaattagagtgcacttaataaagtaggctatttagtgtaaaatttgatattccatcattttcaaagttgaaatataagcttggagggataaaaattggtctctatatttttatactataatttatagtaaaatttgatactccattttccaaagttcaaatataagcttttcttcaattcattaagtggagggataaaatttggtttctatatttttatactacaatttataataacgctccaactaatggcctatgtggttcttggtgttaaaatttagcactacatttttaacacttagatttaaatatgagtgttaaaaggtgctacaagtgaagtgctaaattttagcatctaatagaactttagctccaaagtgtgctaacctttagtacttgttaaagtttagcatataacatccaagcatgtcttcagtatttcctctatatagccaacaatagtataaagtattttctctatattgccaacaatagtacaatatgtatattctgcataaaactattgtcttgattggtaagtgcttaaattatgtttaactcacttgaaagccaaaaaaagagtatcccagttcttaattttgtgctagagttttgtatatataatataggctcggaatttgctgtcagatttttatattactcatcaaagaagacatgacaactctatgcaaaataaacgtctcaaataaactgatttctgcaaaaaaaatgaacattaaaatgacctagttttccaaagctaaacgtcattttgctggatgttgtagtgtagatctctgagtctgcttgttgagatgttgtt

SEQ ID NO: 19695 - DNA, 1060 bp, Zea mays
  Clone ID: LIB3150-100-D1_FLI
cacgaattcaccaaccaaactccactgtctccaactctccatcgcgtctgctacgcctctcctgcaggacgaccaatggcttccaggaagttcttcgtgggtggcaactggaaatgcaacggtactggcgaggacgtgaagaagatcgtcaccgtgctcaaccaagccgaggtgccctctgaagacgtcgtcgaggtggtggtgagtccgcctttcgtttttctgcagcaggtcaaggggctgctgcggctggacttcgccgtcgcagcgcagaactgctgggtgcgcaagggcggcgccttcaccggcgagatcagtgctgagatgctggtaaacctgcaggtgccctgggtcattttgggacattctgagcgcagagctctgttgggtgaatccagtgattttgttgctgataaagttgcatatgcactcactcaaggtctcaaggtaattgcttgcattggtgagacccttgagcagagagaggcaggaacaacaatggatgttgttgctgcacaaacaaaggctattgctgaaaaaatatcagattggacaaatattgtgttggcatatgaaccagtttgggctattggtaccggcaaggttgcaactcctgctcaggctcaggaggttcatgatggtctgagaaagtggctccactccaatgttagccctgcagttgctgaattgacaaggataatttatggagggtctgtaaatggagctaactgcaaagaacttgcagctcaaccagatgttgatggattccttgttggtggagcctcattgaagcctgaattcgtggacatcatcaagtctgccactgtcaagtcttcatctgcctagtgttttgactttcaatgcacctggatgcttgtcgtactgaatgctgttgatcttttaaagctattgccattttaccatctcgttttggtattctagctccagtgcatcgtttgtatatcatcatctcctgcgtatgtgcacagagtagtcatttacctgaatcatccttgtgtaccctttggaactgcataattgaactgcgctattctagatc

SEQ ID NO: 19696 - DNA, 673 bp, Zea mays
  Clone ID: LIB3150-100-D8_FLI
gtccgagtctgagctcatctccacgcgccgccgccgccgctcgacgcccaccgcgcagccatggcggaacagactgagaaggctttcctcaagcagcctaaggtgttcctcagctcaaagaaatctggcaagggtaagaagccaggcaagggtggcaatcgattttggaagagcattggccttggtttcaagactcccagggaagcaattgaagggacctacattgacaagaaatgtccattcactggaaccgtttctatcagaggcagaattattgctggaacatgccacagtgctaagatgaacagaaccatcattgttcgcaggaactatctccactttgttaagaaataccagaggtatgaaaagaggcactccaacattccagctcacatctccccatgcttccgtgtgaaggaaggcgaccatgtcatcattggccagtgcaggcccctatcaaaaactgtgaggttcaatgtcgtcaaagtcattccagctggatctgctgctgccggcaagaaggctttcaccgcagcctgagtttaagactatgttccatgagtagtttatatagtgatgtctttttttgttaaaaaaactgccttctaggcttgtgcctttcgactatggtttggagattgttcccatcttaatgaagtccaatcatctgaac

SEQ ID NO: 19697 - DNA, 534 bp, Zea mays
  Clone ID: LIB3150-100-E2_FLI
ggtgaaggaccccaacaccatcttcgtcttcaagttccgcacccacttcggtggaggcaagtccactggcttcggcctcatctacgataacctcgagtctgccaagaagttcgagcccaaataccgcctcatcaggaatggtcttgctactaaggttgagaagtcccgcaagcaaatgaaagagcggaagaacagggccaagaagatccgtggtgtcaagaagaccaaggctggtgacgccaagaagaagtaaacagtcatttatatttctgtattactgtcctgaactctgggtggtcgtctagttgcaatgtcataattatggtcgtgttaggttttgttccgcactcagcagtaagtgaagttttgtaattcctggatgtgaacctacccggattggctgtagcatgttgtgagatgagaaggctattttgtcatgcagttgtgtcatttgcaagccaatccattttgtcatgcagttgtcatttgctcacctctgatccatatcagctttgatcgtgctgcatttgcgcc

SEQ ID NO: 19698 - DNA, 738 bp, Zea mays
  Clone ID: LIB3150-100-E6_FLI
ggtgagtgaggccaatgagagccctcgtagtcgtaagtttcgcttcggcgtgcttgctgctgctgttgcagctcgcaggagcgtcgcatgtcgtctacaactacaaggacctcgaagccgaggctgctgcggcgacggaccaggtgccgccgtccatcgtcaaccccctgctcaggacggggtaccacttccagccccccaagaactggatcaatgatcccaacgcgcccatgtactacaaggggtggtaccatttcttctaccaatacaatcccaagggcgccgtatggggcaacatcgtgtgggcgcactcggtgtcgcgagacctcatcaactgggtggcgctagagccggcgctcagaccaagcatcccgggcgacaggtacggctgctggtccgggtcggcgacggtgctgcccgacggcggcggcccggtgatcatgtacacgggcgtggaccacccggacatcaactaccaggtccagaacgtggcgtacccgaagaacgtgtcggacccgctgctccgggagtgggtgaagccctcgcacaaccccgtcatcgtccccgagggcggcatcaacgcgacgcagttccgcgacccgaccacggcctggcgcggccccggccccgagcagtggcggctgctcgtcggcagcgcggcggggtcgtcgccccgcggcgtggcgtacgtgtaccgcagccgcgacttccggcggtggaggcgggtgcggcggccgc

SEQ ID NO: 19699 - DNA, 983 bp, Zea mays
  Clone ID: LIB3150-102-D5_FLI
cctcgtagcttccacccggcccccatccgcggcctccctcctccgttcccctttcccgttttcctcctccgcttcccgattcaactcgcaacgccgccgccttcgctgacccatgagcgggcgcgagccgatttaggcccgccgctacagagatttcgagagaatttttgggctagcggggtgtgaacagaaacttggtgccccgctgctctgccttttgtcgtccactgtttcgcgtcaattctcgcgcgaaaagggatgggcactggagaggggtcgccgccggcgaggcggggcatcagcggtaggcgccgtcgatggccggacggagaggacgacgacgagtatgtgctggatgaggaagaagaagaggattatgtggaggagctctccgcctcgagcgccggcgaggagggggtggattcagacgccgagtaccaggaggcagaggaggaggaggaggaggaggaggacgacgaaatcgagacgccgcgcccgaagcgaccggcaaagggcagcaacagagtacggaaaggaaaggttgatctggccgccgcacgatctcgacgccggaagtatgaggaggacgaggactacgaggaggaggttgacgaagacgacgaggtggaggaggagtaccatgatgaccttgaggaggccgatgaggaggaagaagtggcaccacaacggccgaagagcattgtgaaatgcggtgcccgtggccggaatgtgaagctgtctctggcagcgaagcgatctcatcagcggaagcaggaagatgatgaggacatggattttgacccagagttggatgacgaggaggtcgagatagatgaggatattgattttgatcccgatgtcgatggtgacgaggaggatgagtatcaagacgaggaggaagaggaactggttcctgcccgtgccagaaaggtaactgtaaagaatccggtgaagcgaaagtccatttcaaagaggcgaacacc

SEQ ID NO: 19700 - DNA, 1420 bp, Zea mays
  Clone ID: LIB3150-102-F10_FLI
gcgacacattctttgtaccagaggacgtcaagagtcactggagccgccacacacccgaaggtgctgcacttgaggctgattggaacgctaagtttgcagagtacgagaagaagtatgcagatgatgcagcaaccttgaaaagtatcatcacgggggagttacccactggctgggttgatgctcttcctaaatacactccagagagcccaggagatgccaccaggaacctctcccagcagtgcttgaacgcgcttgctaatgttgtgcctggtcttatcggaggcagtgctgatcttgcatcctccaacatgactctgctgaagatgtttggtgacttccagaaggatacagctgaagagcgcaatgtccgctttggagtcagagagcacggaatgggcgccatttgcaacggcattgctctgcacagcccagggtttgttccgtactgtgctacattctttgtcttcactgattacatgagaggtgccatgaggatctcggccctgtctgaagccggagtcatctatgtcatgacccacgactctattggtctcggagaagatggcccgacccatcagcccatcgagcacctggtgagcttccgtgcgatgccgaacatactgatgctccgccctgctgatggcaacgagactgccggagcatacaaagtcgcggtcctcaacaggaagaggccgtccatcctcgctctctctaggcaaaagctccctcacctgcctggcacctcgatcgagggcgtggagaagggcgggtacaccatctccgacaactcgaccggcaacaagcctgacctcattgtgatgggcaccggctccgagctggagatcgcggccaaggccgccgacgagctgaggaaggaggggaagacggtccgcgtcgtctcgttcgtctcctgggaactctttgatgagcagtcggatgagtacaaggagagcgtcctccctgccgccgtcacagcgaggatcagcatcgaggccgggtccactctcggctggcagaagtacgtcggagcccagggcaaggccattggcatcgacaagttcggcgcgagtgctcctgccgggacgatctacaaggagtacggcatcaccgtggagagcatcattgcagctgccaagagcttttaagagctaacaacggtctgagtttttttattgtcgtcgttgatgccaaaggaacactgtacctagaggacagtcctatgcctcggagcttggaataatgatgatggagggagcggaaggatgcctgccatttgttggagcgtgcgtggtagtatttctaggcctgtaataaacaatgcctttttccatttacgttgttggttttatccggtgaccctcacacgattcatcaaggatggtgagcctggctattaaatcgggtgctgttttttttgggt

SEQ ID NO: 19701 - DNA, 1100 bp, Zea mays
  Clone ID: LIB3150-103-A11_FLI
gctccgcaccccaatctaatcgacacctcgccgagatgggccgcaagttcttcgtcggtggcaactggaaatgcaatggaaccacagatcaggtcgagaagattgtcaaaaccctgaatgaaggacaggttcccccttcagatgttgtggaggtcgttgtcagccctccttatgtcttccttcctgtggtcaagagccagctgcgccaagagttccatgttgcggctcagaactgctgggttaagaagggaggtgctttcaccggtgaagtcagtgctgagatgctcgtcaaccttggtgttccctgggtcattcttggacactctgaaaggagagctctgctgggagaatcaaatgaatttgttggagacaaggttgcgtatgccctgtctcagggactaaaggtcattgcatgtgttggtgagacacttgagcagagggaggctgggtctaccatggaggttgttgctgcacaaacaaaagcaattgctgagaagatcaaggactggagcaacgtagttgttgcctatgaaccagtttgggctattggaactggtaaagttgccaccccagctcaggctcaggaagtgcacgcctccctgagggattggctaaagaccaacgtcagccctgaggttgctgaatctactaggatcatttacggaggctctgtaactgccgcgaactgcaaagagctagcagcacagcctgatgtcgatgggtttcttgtcggtggagcttctttgaagcctgagttcatcgacatcatcaacgcggccaccgtgaagtccgcttaagatgttacgctgaagacgaacatactttttttttgctcaactgtgctatgtaagctagtagcttttgcgcaggagcagagactgttttgcctgcccccaacttttagcttgagcttgctaataatgtttacctctggacgtatcaataatggtgcttatgtaccccttttttgtgccgaattacggtggatccgtcatctgaaccatgggtttggtgtatgtaattgcgtcacccgatgcctagggtgagactgaagtttttggacatttgggacaaggtagccttgtgccccacattggtcg

SEQ ID NO: 19702 - DNA, 1537 bp, Zea mays
  Clone ID: LIB3150-103-F10_FLI
gggcggagaggttccgggttttcggggtggggtttgggagatgcctcccgtgaagaagtccaagaaggggaagcggaaatccaaggatggcaagctcaagattgtcagggcgcggggcgcgccgccggcgctgccgccggagctccgcgccctcgacaccgagtggtggtacgctttcctgaacaagcaagtcgagctagagcatgctgtgcctccagatgagggggaagcattcaggcacttcttcaggacttcaaggaagacttttgactacatctgctccattgttagggaagatctgatctcaaggccaccgtctggactgatcaacattgaggggaggctgctcagtgtggagaagcaagtggcaattgccatgaggaggcttgcgtccggtgattcccaggtgtcagtagggactgcttttggtgtgggccagtctactgtttcacaagtgacatggagatttatcgagtcgatggaagatagggctaggtatcatctggcatggccaagtcaagagagacttgagcagatcaaagctgtgctggaggatgcttatggcctgccgaattgttgtggtggtgttgatgccacccacgtaatcatgacacttcctgctgttgagtcatctgcagattggtgtgatcatgcaaagaactacagtatgttcctgcaagggattgttgatgatcagatgaggtttattgatattgttactggttggcctggcagcatgacattctcacgcctgatgaaatgctctgggtttttcaagctctgtgaagctggggaacgtttgaatggctctgtcaaagtttcagcagagggtgcagagatcagggaatacattgctggtgactcatgttatcctctactcccatggcttatgactccattcgaaggaaaacatctgcctgccccattgcaaaactttaatgcccgccaaaaagctgcaaggctgcttggaacaaatgcgttggcgcggctgaagggatcctggaggatcttacacaaagtcatgtggaggcctgacaagaacaagctgccaagtataattcttgtttgctgtctgcttcacaatatactcatagactgccatgatgaattgcttccaagtgttcaacttcccgaacatcatgatactggctataatcgagaaaactgcgagcaggtggatcctaatggcaaagtgatgagagaaaacattacagcacatctccaacactgtgaagcttccaagtttctctgcaactgagctaagttagcttgttgttttgctgggattttgatgatgcatcattattccttttaccttatgcaatttcccttagtttctgttattgtagtgagactttctgattgcaattcagtaaagattctctagaaatggcatggttcagtactatagaaaatagctagttggaaaattacaaggactagccctcatgcttgggtttatgttcttcaggataatgccagtcctcatcatgctgagtgccatgaagttgcataatgtaacaaaattcatgaataa

SEQ ID NO: 19703 - DNA, 887 bp, Zea mays
  Clone ID: LIB3150-103-G12_FLI
ctccctacctcggcacgctctcgctcccaccccccaactcgcatctcctccggaatcgcacctatatctctgacatgcgccgctctgccttcgtcgaccgcttgctccgttccgtacgctccgagatctccttcctcgataactccgccccgccaccgccaccaccgcctcctaagccattcaccattgaggaccgcccgggcgagcagtgggcccgcctgcgccgcgtgttccctgcggccgagggggaggaagaggaggtcagggtggacgccacgttggtcgacggcgcgctccctccctcccgctcgggcgcggacacgggcggcccgcccagaatgcatatcagtgttaaggttgaggtctccaaggccgcgcggcctggagtggcgctcaccttcgagtgctccgcgtggcctgacgagatggaggtgcggagggtctttcccgtccgccgcggcgggcctgccccagtgcagcagtacgtcggccgccaattcagtgagttggatgaggaaatgcaaagtgccgtacaagactacctggagaaaattggagtgaatgatgaccttgctgcatttttgcacgcctacatggaaaacaaggagcacactgaactgatcagatggctgaaaaacgttgagtgccatatcaagaagtgaacattctagtcgggttaatactttgtcctacagcacttgcagatgcagcttttgatcgcaatcttggaactttactaggccccatttaaatccttagaattgattaagctcatattgttgtatgagaaatatcacgcctacatggaaaacagggatcatactgaacttatcagatgactgaaaaacgtagtgccatatcaaaaaaaattgcattctagttgtgtt

SEQ ID NO: 19704 - DNA, 1175 bp, Zea mays
  Clone ID: LIB3150-103-H11_FLI
catcatctctctcccagctctttctaccgtttctcttctagtctagcggggaaaaagaaaagcaaggaagcagctgcacgcacgcacgcgcgtcgcctggccggccatggggttcccgtcggtgtgctactgcgtgatcctgccgcagccgctcatcctggtgctgcagctgctggacttcctgcggcacgccgtgctgctctgcctctcctcgctgggcctcgcggcgccgccggccgccgacgaccacccggcctacgcctacgcggcgccgccgccgccaccggacctctgggcactgcagccgtcgtccctgcagcagcagcaggcggcggcggcggcggcggcggcggcggccctggcgccgccgcccacgccggcagccatcaaggcccgcctccccgccgtccggtacgccgacctgctcggggcccgccgcgccccgccgggcccggccgtctgcgccgtgtgcctcggcgcgctccaggcgcggcaccgcgtccgcgagctcggcaactgcgcgcacgccttccacaaggcctgcatcgacaagtgggtcgacaagggccaggccacctgcccgctctgccgcgccctcctcctccccggcctcagcgccggagacggcgacggcgacgccgagctcgcctcctcctcctccttccccttctccttctgaacccacgcgtagtacgtacgtacgtacgcgcgcgtgctccagccgacaagcaaaagtgaaggcgcacggccggcggcgtgcgtagtacgtgtacgtacgtccctgcagcccggcggccgattgggaggcagagcaaggtcagtagcaaagccacctacctacttactacactactcctgctagctgatgagacacgagccccgtcgtacggccggccccggtcctgtgaccatccatggatcccgatgagacgagcaaggaaacagaggagagagaagaggaggtgtcagtgagcgtgaggtggtgcagtattattggtaggtgaggcacaaattatgaggaggacagggatggctacctgcattggatctggtggatgcgtagatccatccactccgcactgctccacccttttctcctgcagtgcagctccaattcacacccccccctctctctttctctctcttttgtttattaattaataattattagtttc

SEQ ID NO: 19705 - DNA, 180 bp, Zea mays
  Clone ID: LIB3150-104-E5_FLI
gctgtgttgcaggttgcgttagggccaagtcctagcctttgtgatggtgattacatttaggggtggtcaagattcacttatttatgtttcttcaccctttcctggactcggcgacttttttcatgtcgaactctgaattttcttattcaacagaagttgataaaaaaggacttcctgtgt

SEQ ID NO: 19706 - DNA, 769 bp, Zea mays
  Clone ID: LIB3150-105-D10_FLI
gcgaaggcgaccctccctccttcgctccttccgcgccgcctcccggccgtcgccgccatggtgaagtactcgcaggagccgggcaaccctaccaagtcggctaaggccatgggcagggatctgagggtccacttcaagaacacaagggagacagcctttgcgcttcgcaagttgtctttgaccaaggctaagcgataccttgaggatgttattgctcacaagcaggcaattcccttccggagatactgtgggggtgttggtcgcaccgcgcaagctaagtcgcgccactccaatgggcagggccgctggcccgttaaatcagccaggttcatcctggatttgctgaagaatgctgagagtaacgctgatgtgaaaggcttggatgtggacaacctctatgtttcacacatccaggtgaatcaagcccagaagcagaggcgccgcacctaccgtgctcacgggcgcatcaatccctacatgtcctcaccttgccacattgagctgatcttgtcagagaaggaagagcctgtgaagaaagaggctgacaacattgtcgcagcaaggaagcagtgaagtatatcagcatgctgatcgaggccattttgtcgaagtattatagccgtagctcttttatgtaccttttcaggcagccttgcctctcgagacgtttccggcaccgatgttttaaatctggattatctatgttctgtactgaactactgtgttggactgtaagttcagctcgtaatacaatagctcttaagatatc

SEQ ID NO: 19707 - DNA, 911 bp, Zea mays
  Clone ID: LIB3150-105-E5_FLI
gtggaaatgcaatggaaccacagatcaggtcgagaagattgtcaaaaccctgaatgaaggacaggttcccccttcagatgttgtggaggtcgttgtcagccctccttatgtcttccttcctgtggtcaagagccagctgcgccaagagttccatgttgcggctcagaactgctgggttaagaagggaggtgctttcaccggtgaagtcagtgctgagatgctcgtcaaccttggtgttccctgggtcattcttggacactctgaaaggagagctctgctgggagaatcaaatgaatttgttggagacaaggttgcgtatgccctgtctcagggactaaaggtcattgcatgtgttggtgagacacttgagcagagggaggctgggtctaccatggaggttgttgctgcacaaacaaaagcaattgctgagaagatcaaggactggagcaacgtagttgttgcctatgaaccagtttgggctattggaactggtaaagttgccaccccagctcaggctcaggaagtgcacgcctccctgagggattggctaaagaccaacgtcagccctgaggttgctgaatctactaggatcatttacggaggctctgtaactgccgcgaactgcaaagagctagcagcacagcctgatgtcgatgggtttcttgtcggtggagcttctttgaagcctgagttcatcgacatcatcaacgcggccaccgtgaagtccgcttaagatgttacgctgaagacgaacatactttttttttgctcaactgtgctatgtaagctagtagcttttgcgcaggagcagagactgttttgcctgcccccaacttttagcttgagcttgctaataatgtttacctctggacgtatcaataatggtgcttatgtaccccttttttgtgccg

SEQ ID NO: 19708 - DNA, 566 bp, Zea mays
  Clone ID: LIB3150-107-B9_FLI
cgaccaacgaggcaacgaccaaacccttccccctccctagctccgtgctccagcgggagtccgcggcggcggtgaagatgattatcccagtgcgctgcttcacctgcggcaaggttattgggaacaagtgggatgtctacctcgacctcctccaggccgactactcagaaggggatgctctggatgctttggaattgttccgctactgctgcaggcgaatgctcatgacacatgttgacctcattgagaagttgctcaactacaacaccctagagaagaccgagacaagttaagcgagcacatcatgctccaaaaacactactgtttcgcagtatcatagagcttaggtagtatgttgtctcttctctatcagtagaaatgggttgtgagtgtgaacatgcttttgctcatgagcattcaaggacttttcatgcgacagtgcttgttgccacctatgcaacgatgttggatattttaagtgatataattgctaaaagaaagctaatgtatttgtgtgaattgggtcgataatatttcgttgacagatgtgcgtttttggttggact

SEQ ID NO: 19709 - DNA, 863 bp, Zea mays
  Clone ID: LIB3150-107-E5_FLI
ggacacaaatatgcttactacacactcgaaacacatactagttggtacagtacagagtacacatatatttaaacgacacaggagctctacggcccagccccaccgatgtgctgtaaaggcaggccacatcagcaccgacagtgggcccactaacccgacacgggatcggcacacagacacattatttattcgaccacaacacaaaacgacgctcctacgctcctttactaggcggggcccgccgcgccacgtaggacacgacgtgaacccgaacacaaaagcaggtttttcctagcgacctatgccggcgccatgccgtgctgttgccgtggcagtggcaccagagcggcgcacgccaggtgacaggctgacgcagcgagctagatcggccgccgtccggcgctggactcactcgacggacttctcgacggcagcgacggcggcctcgggagcagggaccgccgcttcctcctcggtcgctgcgacctcaggagtggcagcaaccgcaggcgatgcctccccctcctcctcgttagcctccacagccgccgcctccttggtctcggcggctatctccggctcagcagcctcgaccggggcagcagcagcctccgtctctgctgccggcgcggcggcctcgggctctgcttccttgggctctgcctcggtcggctcagcctcagctacggcctcggcctcgacctcgacctccttggactcagtctcggcctcggccgacaccggctccttagcggcgacgacctcggtctccgccgccggagcagcggtctcctcgttcggggtctcgacggcggccagctgggcagcctccactcccgctgcagcagcagcagcagcctccc

SEQ ID NO: 19710 - DNA, 580 bp, Zea mays
  Clone ID: LIB3150-108-D3_FLI
ggtttggtgaatggaaacaagagatggagctaatggctggacggatcaagaatgtaagacaaaagctctacgacagtttgtctgccaaggacaagagcggcaaggactggtctttcattctgaggcagattggcatgttctcctacaccggcttgaacaaagcgcagagtgacaacatgacggataaatggcatatttacatgaccaaggatgggcggatctcgttagctgggctgtccctggctaagtgtgattatcttgccgacgccatcatcgattccttccataatgtgaactaggctgaggtacgatagttgagggtcaagctattgatgtttagttccgtggacgctaggctgggatttttgggtccttccagctatacagctcttccgttgtgctccatctggtgtaacttggataaataaaaattttgtcgctgaactaaaactcgtgtgcttttttacctgtaactgtaaggtcagcgcgtggctacagacttgtaaacacttgaatggaaaaaaaacaatgacattaccggatattaatggccaactggccggtatgcgcttaagaagtc

SEQ ID NO: 19711 - DNA, 501 bp, Zea mays
  Clone ID: LIB3150-108-E4_FLI
gtgagcatggggtgcacgttgatgaagtactcaagcggttcaaacttttgccgaagaagcagatcacggatgctattgattacaatatggactcggggcgtctttactcaacaattgatgaattccactacaaggcaacttaaccgatttgaaggccagcctgctggaaatggcagaggactaagtatcacttgtactaaaccaaagtctggaaatgtcatgttgtgtcatgaaatgcatggttggtttatggaaacatttatatcttgtatcaactagttgatttgtatctcgtgtcaacttaatgactgagccaagaaaaggaagatgtagaggcagacagacatttgtagattggctgatagctgattcgggtagctggtccaatcgcaatctggggcccaataattcagatgcaaaagcagaaagatatttcactgtcgtttcttttgatgcaaaagaaattaaattataaggaaatgaagacttccattatttccc

SEQ ID NO: 19712 - DNA, 1276 bp, Zea mays
  Clone ID: LIB3150-108-G10_FLI
aaaattcggagcattaccaactccaaaaatatacatgatccattgaattatgtcaacacaccaacatgaaaaattgagtatagaaatacattaattattatccggttacatggaataagcaaataaaaaataaagaagctacaggcaagtaaacaaactgaacactattttaggaaacaggctacacgaggcagttcctcagccttctctacaagattttgcttcgccttgaaatcaagctctgactcccaagactacaagcaataaactcaatttccactaaggtgcttggtggtcctcactatgtcgccgagaagttcagcgatgcaatcattcttccatgtcatgtccaagatctgctcgtgctcttgctcgagtctgataaacttttcttcctccgctgctgctgccgctgctgcagctactgttgtagctgttgttgatgctcattaaatcgctcaagaagtaccagcagattgtgctatgtggatgcccaggtaaaaggctaacaggaggagccctgcacggcgtggagctcccagattccatgtcaaagaccatgccttgatccctaccgcgcccacctatccagtatacacagttgcccctcaatcctggcacaccctctgcatacattgacactgcattgttccttccaacaaaaagtgagtgacctcccaggttcttcaccacatcccagcaaggctgccgtcgaggataatacctcagcaccaatatctcattttccgcaacgcgacgctgacctcctgtaggcagctgcagagtaacagtgcaacttgcgttcctccaaacttggtacagattgccctcacagaacaccaagttctttgcactagtgaacgacgacactgtgtcataaggtggagggaagacagtggcagggtcgaacgggaggttggcctcacacaacaggggctcaacagtggctggcgcatttaggtgtggtccttgcgattcaggtggaaatttcttatatgggatgaatgtctctgcacagaacgttaccctcagtggaatagttggatcctgatctcttgtttgggcctgttcatggcgcatcatccgaaaattgcgcagatgttgccaacgcagtggacggcaattatttgtgcgttcagcaggctgtggcggctggagaacagagaatggtggctccgatggccctgcttcatcggcgttggcaggctttcggcaccgtcgctcggggagacggagcacatgcacgtctacactgacaaaggtagggtctactgcc

SEQ ID NO: 19713 - DNA, 1557 bp, Zea mays
  Clone ID: LIB3150-108-G5_FLI
tgatgctgtaccaaccaagactgtgtctgggcaaaggaacattcagttatcaggggtcatgcctaagggagaaggcagcaagcagctgtcgaaggagaaaggggagggtatctctattgacgcacttcataagctcaaccagaaaaacatctcagcttggaacatgaagaggctgatgaggattgtccgctttgggacgctaacaactatggatgagcagatacaacaagcaacaggcgagggggatgaatcagcgacacatatacgaagtgaatatgaggcaaagattgctgccaagaagatctttcacaatgtagcaaagccaggttccaagtacatatacttgtcagacttgataagattcatgaggcaagaagaggctgttaaagcaatgaatctttttgaaggagcacaggagcacagcagggtcagcaagacgtctctcaagaactgggtggtgaatgcatttagagagcgcaaagctcttgcccttacactcaatgatacaaaaactgcagtaaacaagctgaaccagatggtcaatgtcgttgtggggataattgtgtttgttctctggcttcttattctgggaatagcaacaacacatttctttgtcttcctaagttcacagcttctcctggcagttttcgtatttgggaacacattgaagacagtttttgaggcaattgtcttcttgttcgtgatgcatccctttgatgttggtgaccgttgcgaaattgaaggtgttcaggcggtggttgaggaaatgaatatcatgacgacggtgtttctccgatatgataacctgaagatatattatccaaacagtgtacttgcaacaaaaccaattatgaatttttacagaagtcctgatatgggagaagcaatcgatttctctattcatgtcgcaactcctgtcgagaaactggccctgatgaaggaacgaatactgcgctacattgacaacaagaaggaacattggtacccgggtgcgatggttgtactccgggacgtcgatgacaccaacaaactgaaagtgtcaatatggctgcggcacacgctcaacttccaggacatgggtatgcggttcgtcaggcgagagctagtgctccaggagatgatcaaagtcctgaaggacctcgagattgagtatcggatgctgccacttgatgtgaatgttcggaatgcgcctccaattcagtccacaaggatgcctacaacatggaactattcatgaagcagtgacagggccggaccatttggccgcgacgttgcagatgcggacttgcctatggatttggtggtcttaagctgcaagatactggtggtagcacaagcggattaagctgcaggtgcttggtagcaaatattagaggtagagaatagtagcatattagctagcatgtagagagctgttagctgtgcctgcagtcgtcacttgtgcaacttgtaattactgtattctcttgcgtgatgataattttctgtacattttatggggaaatgacggtttggaaagagaagcaattgaagaagatggcatggtaatgtgtatgc

SEQ ID NO: 19714 - DNA, 1612 bp, Zea mays
  Clone ID: LIB3150-108-H12_FLI
ggttcatgttgatgtcactgagacaagcgaggtacgacggagtccagtgatttgaaaaaaggtttggttaatgctattcaagacctatatgatgttgttcatcatgaagcgttttcagttgatatgagtggccacattgaagactgggatcaaattaatttagcaagggctgaaggtcacctcttcaataaactcaagtggccaaatgatcccaaattgaaagacttgatcaagagattgtattcacttctgacaattaaagaatcttctgcaactatccctaaaaatttagaagcaaggcgaagtcttcagttcttttacgacctcactgttcatggaaatgcctgttgcacggcctgtttcggaaatggtctcctttagtgtgtttactccatattactctgagattgtactctacaacatggctgaacttcagaagaaaaacgaagatggtacaactacactgttttatctccagaagatttacccagttaccagtggtagatggttatttctgcagttgcagtacatcttgatcatgtaacttaagatctagcgctacagcctacaggtccttgctactagagttacaacatggctgttagacagagctggacgacgcatccttctcagttctcattgtatgttcaagtttctttatctaggattcgagtgagaagatgataaaactttattggataacatttcataggattctaactcgtactacatcttaacaatgatctccctttgttggtattgtgtctttcgtcattaccttctcgtttggtatgggtgccattccatggctcatgatgtctgaggaggatgttcgtggccgcacaacggcaagagacaggtacacaggacgcctaggcggcggtgacgcggggaggccgcgaaggacgccacacgggggctgcggcacgagctcgacgccgagcgggcctccgtggagacagtagccagatctggccattgagtgccccgacgccgctgcttactcatccatcgccgcggaaggagagaaagggagaatcggttagaagaaagaagagtccgaaagctaattttgttttaccagtggagacacggagattggaggacagaagggcgcagcacaggactacagcgaggtgggaaggccagatcaagcaggagacaacaagaggatgtgataaatggtgatctctgcgagcagtatccctccctcccagctgatatgtagaggaagattgctgatcatctggatagaacttcgacgcctgcagcactgcttggtgaggattgccaaggaggaagactagaacagacaagagcagcgctaatcagtgacagagcatgatgccatccagatgggacaagataaggcatgttatggtgttctctggtttctcatcgagaatagctctttctctttcgtcaagggtttcaccaatggcttgtaacaactggatgtaaaacattttttgttttttaatcgatgtagtgtgtttttgcattacagtccattgtggctatgggggcggcacatgtagtgtgtagtcatcgtgaatttaatagtaactagctctgcagttgtgattggtttatgaatgtgtttggttggacc

SEQ ID NO: 19715 - DNA, 1010 bp, Zea mays
  Clone ID: LIB3150-109-C10_FLI
gtccgatccgatccggaactgtgccggccagccatggcgactagggtttggctcaccaccctcctcctcgccttcctcctcgtcgccacccccttcaccgcccgagttgctagagctgattcggaggaagatgctgctgcagctgaggttgttgaaggggctgatctaggtattgtgggtgatgatacacaggtttccagtgacggacctttaagccctgctcctggtgtagagacagtagttgtattccccaaaaatgctggcaaaattgtactagcaggtgaagaaactgaattactagttggtctgcaaaatgagggtgaatcgactttgaatgttgttgctgttcattcaactctccatcttccttttgaccataatatgtatggccagaacctaactgttcagaatttcttcaacgcatcagttcctgtttctgtgcaagcaaccttcccttataaattcgttgtgagcaagttcttgcagcctggagcctatgatctggttggttacatagtgtatgagatcgaccagcacccttaccagaatgtattctacaatggcactattgaggtcgttgaggctggaggcttactcagtgttgagtctgtgttcctcatcacccttggaatcgctcttcttggtctctttggattatgggcatatggccaggttcagcagctctcgaagaaaacgaagaaggcccccaaggtggagctcggaactggaacaactgatgccaacatcgatgagtggctggagggcacttcgtttgtgcagagaagcaaatccaagaagaagcagacctgaagctagctctccagactagttaatccttggaggatctagaatgaggcatttgagggtagcccttcacaagtgacttctgcagaaagatagatgcctaaggaggtgctgaaaaatgtagtttcgtggtcgaacatctttgttgacaccattttcgaccttgtgtacttcacatggaacttttcttcaaacaaagttttgtt

SEQ ID NO: 19716 - DNA, 1104 bp, Zea mays
  Clone ID: LIB3150-109-E11_FLI
ggctgctctgtcctctctcttttcgctccctcttgcgctgctttcctttccttcctcgcgagaacgagaggctagaccgcatccagtggtggggctcggtatgggcggaagcgaatgcgccctgggcgacgccgctataggcgaggaaaccctaaattacgacggcgatgacgttgagatggccgacgccgactcggatacggaggaagcccgagcagctgaggtctccgctgcaactggaggatccgccggaggtgttaggcaggcggagaaggacggaccggatggaaagaagaagaggaagaagaggaggaacaaagggaagaagaacaaagggaggcaagatggggcgcccaccaacatcgcggacattaatcgatttgttcttaacacttgcaagcgcttgaaggagaagaagtcgtaccttgtctggaatgctgttggctgccttggtgtcactgctgtcaatgatcttgttagagaggtggaggctattcagaagtgtggtgggcagactattgctgatggaagccgctttcgcactggcggtggaattctctggaacatcttaaagtcgcgggaacccaaggcttacaaggaaataatggcaaagggaaaggaacttgagaagcagtttaggtgtacgaaacgaccacagattagcagaaacgaagatgcaagttcacagggcagtgctttaattgatgatgaaattgaagcgcgagaccaaaaggaaacattggatgaccctgagcaattggatgatgtggaggtacacgtatcagacaataaagctcaacgcaaaccactggcggacagaattcgcgctcctgttgcatatgatgatctgtttgaagagggggagatacacgacggagaaccacgtagttagcatttcaaagattatgcctcgtcatgagtgcccaaaggaatgtcacataattgcaagagcatgattatgatttaagaactaccactgcaatgtagcagtttttcctctaaacatcatccccgtgaacttgcagcgatggagattttgttgcgttcggtgaaaccattgttgggcctgaattcagtggtcaatggaaatcatggttaaacgag

SEQ ID NO: 19717 - DNA, 799 bp, Zea mays
  Clone ID: LIB3150-109-F10_FLI
gtgagaaggcaggctacactggaaaaatcaaaattggtatggatgttgcggcatctgagttccttacaaaggatgggaactatgatctaaactttaagaatcagcctaatgatggagcccatattctctcagcccagcatctgggtgatctgtacagagattttgtcaaggatttccctattgtatcaattgaggacccttttgatcaggatgactggagttcatgggcatcattgcagtcctcagttgatatccaaattgtgggtgatgatttactcgtcacaaacccaaaacgtatagcagatgctattgataagaaggcttgcaatgctctgttgctaaaggtcaaccagattggtactgtcactgaatcaattcaagctgctctcgattcaaaagctgctggttggggtgtgatggtcagccacagaagtggtgaaaccgaagacaacttcatcgcagatttggctgttggcttagcaagtgggcagattaaaaccggggctccatgccgcagcgagaggctggccaaatacaatcagcttctgcggattgaagaggagcttggcaacgtgcgctatgcaggggaggcattcaggtctccatgagaaatacagacttcagagtttcagtaaagcctaaagtatgtgtactgcccagtagaagaaataaaagaactagatcatgaccagtcatgctttcatccttgttaccacgagttatcccaattttttgcggttttttttttcttgatacatcttattatctgcgagcaattgaagacatagtcatcattttg

SEQ ID NO: 19718 - DNA, 795 bp, Zea mays
  Clone ID: LIB3150-109-H5_FLI
gcaaaggacatgggtgctaagaagtacaagtaccccgatgtatacgacccgtacgggcctatgccgccgccttcggagaaagtcgtggaactagccgatcgcatcgctgctctccctcccgaggagatcaaacagatagctccagcgcttctcctcagattgaaccaggagccgccacaggcggtatctggccagggtttcggtgcccaggtcggctctggggcaggttctgggaaggctgagaagaaagccgagaagacagtcttcgacgtcaggttggagaagttcgacgctgctgcgaagatcaagatcatcaaggagatcaggacgtttacggatctggggctgaaggaggccaaggagctggtggagaaggccccagtcgttctgaagcaatcgctcacaaaggaggaagcggaagcgatcatagcaaagataaaggcagctggcggtgttgctgtgatggagtgaatgatagatgatcatctagacagcatgcctttttttgtttcatatttttgttgccatgttcaggtatttgagattgcacattgcagtgcctctgtgcagatggaggaaatagactagttcacagctacgttggtaacaagggagagatggagagtagagattagttgctatgatgatagtcatgacttgttctagaataagcagttctttgggctctacgcaacttttctggtggagtgaatgtatgtggccatcagggccaacgacatgaatcttgtgctcttgttgtatctgctatgagttataaacacttcgcagttgctt

SEQ ID NO: 19719 - DNA, 914 bp, Zea mays
  Clone ID: LIB3150-110-C1_FLI
gcgaggagctggtccgtgtggaccgcaccgtggctgtcgcccttggcccccgctcgccggagtccccggggactctgttcgtcaccaccaggagggtgatttggctcagcgaagcggagaagggcaagggctacgcggtggacttcctcgccatctcgcttcacgctgtgtcgcgcgacctcgaggcgtacccctcgccctgtatctacactcagattgaggcagccgttggtacagaagaggaggctggggaatcaaatcctgaagcaaatgaactagagctatctagagtatctgaaatgaggctcatactagcggaccccggtcaactggatgcactttttgatgtcctctgtcattgtgctgaactgaatcctgaccctaatgctgagtgcaatggggagaatggctggatccgtggtgaaaatatgtctaatggtgactggattcatgatgatgtggacatggttgatgaaaatgtcccgcagtttttcaatgccaatccgataggtcaaaatggtggatatgaccttagtcgttcagtatttgagcttcaaatcaacgaccaacgttttgaggatgcagaggaggaacaggagagccatgaaaataatggacattagaaacagagacatgttcctcgagagcatcatgtgatttattttgttgtaaatcactaccgatgcagctcggtttgcctactgtttcatctacactttctcttcctttttccttgatgttataggattaacatcactgggtgactttctggaattgcatcgatggttccttttggtgagaaaaggtcttgctgctggtcaagaatgtaacttgtagagcatgatgttgaatcgtgtgaaattagttcagtacttttgatctaacaaatagaaggtcgaattgggaaaggagat

SEQ ID NO: 19720 - DNA, 1252 bp, Zea mays
  Clone ID: LIB3150-110-C12_FLI
gcctgccttggttcgcttgctgcgagcattccttaggaaaattccaaatgagctaaaccaagagggcaggcttccaaatatcttggcaatatcccgtagtctcctctcacgcagcagcactgaagattctgctttctacatgctgaacacaatagtggaaaacgttggttttgacatactgaacccatatataactgagatatggagtgctttgtttactcggttacagactagacaggcagtgaaatatgtgaactctcttgtggttttcatgtcgctagtgctggtcaaatatggatcaagtgttcttgtcagttccgttgattcaattcagccaaatcttttcacccaaatccttcagcgattttggattcccaacctcaaattgatcaaaggtgctcttgaagttaagttgacagcagttgcttcgacaaagctgctttgtgagtctgcggtgctgttggatgctgctgcagctcagttatggggtaaattacttgatagtattgtcacactgttgtccagaacgaatcaagatggaacacaagagcaaaatgatggtactgatgcagtggatattcagaagacatcaagttattctgtctcatttgtacggcttcaatatgctggaaagagtgaagatgaccttttgaaagaagtaaatgatccaaaacagtttgtggtcacatccttggccacactttctgcccagtttcctgggaggtttggacttgtcattgagcagcatgtggacccagcgaacaaaagtgtgcttcttcaactttgtgcagcctacagtgccaacattgtctaggagccaattgcattgggaaggcatttgcttgttgtcaaatgggtctggtcgaaagatgagtctcttggagttgtctgtctgtcaagattttctggtgtaatccttatttatttagtggcaggatgttggttgtgccgtgggacccttggatgccaaaacatgtagggttgatttggtgatcagagatcacgaggaatccatgggagatgaatccattgctattcaaattgaatagcaaggggattcctccccatggattcccttgtgattcctggtcaccaaaccagcccataaggaaaacaacattagctttgtggaggattcgtctgtttggtttggctgaggattttgtttcgaggctgaagtttctttttttggggcagtctaatggtgtactgtcctgattatgtatctgaaggtcctgaatcaatggttcgg

SEQ ID NO: 19721 - DNA, 857 bp, Zea mays
  Clone ID: LIB3150-110-H2_FLI
caccgatggtggtacagctgtaatacgcaatcaaaatcggagcactacagctgctattgctgcgctaccaaagtatttgcatcgccatgctgccactgaagccaataatgctggtgatatttcatctgttcaggagctggatggtgaaggtgttaaagctagcacggatgttgatacaactggaacagatgttcagcacgggagcattgaagctactaaagccaacgctgctggtgatacacctggagcattttttcaaaagcagtgtgctaaagctgctgatgttattaccattgacgacgatgacgaggacaacagtcatcgttgttataaagaagaacaaacagcagtagttgatcttgaagctgattatgctggggataaccatcccgtgcagcttgaggcaaatagtcgaggccataaacacgtgaaggtgaaggagcgcatttggtattacattgatcctcagggtgatgagcaagggccatttacaatgcagcatctgagcatctggtggagcaatggcttcttccccggcgacttcagggtctggagaacaggccaaactagtaatgacgccatcttgctcgtggacgcactgcagatgactaggtaggctagttaggagcctcgaagactagatgtatttatgttctgctggggtgtacatcctttatatgatatgatgatgacatcctatccccaccatcacctcacccaccaatcaaaaacatcttgccaaacaaaacaatggttgtttgatggcaaagacgatttgttgggatgaaatatttgtggactattcagtatccctgtgctgtgacaatgctattgaaaatctggttctttggcatgtt

SEQ ID NO: 19722 - DNA, 1571 bp, Zea mays
  Clone ID: LIB3150-112-C5_FLI
ataaagaagacagacaagtctaggcttcatgtggaggacaccatggatattgataattctaacgctagcaaatctactgaagaggattttcttagtgataaggttgagaaactaaaagagctttcgaagttgcctgatatctatgaaagattgactagatcattagctccaaacatatgggagttggatgatgtcaaaagaggtctcctttgccagcttttcggcggcaatcccttgaagcttccttctggagctagtttccggggtgacatcaatattttacttgtgggggaccctggaacaagtaaatcccagcttctccagtacatgcataaactgtctcctcgtggtatctatacgagtggtagaggaagttctgctgttggtcttactgcttatgttaccaaagaccctgagactggcgaaactgttctagaaagtggagcacttgttttgagtgacaaaggtgtttgttgcgtagatgagtttgataagatgtctgataatgcccgaagcatgttacacgaggtgatggaacagcagacagtatccattgcgaaggctggaataattgcatctttaaacgctaggacatctgtcctggcatgtgccaatcctactgaatcacgttacaatccaaggctctctgtaattgacaacatccacttagcgccaacgctactttcaagattcgacctgatttatcttatcttggacaaggcggatgagcaaactgataggcgcctggcaaagcatattgtttcgttgcattttgagaatccaaatttagaggagctcgaggtcttggacttgcagacactagtttcctacataagctatgcaaggaagtatattcagccacagttatctgatgaagctgcagaagagttaactcgtggctatgtcgagatgagaaaaagagggaatagccctgggagcagaaagaaggtcataacagcaaccgctagacaaatagagagtttgatccgtctcagcgaagcattagcccgaatgcggttctctgaagtggtcgaggtgcgggatgttgtggaggcattcaggcttcttgaagtcgccatgcagcagtctgcgacggatcatgcaactggtacgattgatatggatctgatcatgacggggatatccgcaagcgaaaggcagaggcgggagaacctcgttgccgcaacccgtaacctgattgcggagaaaatgcagcttggaggcccctcgatgcgcatgattgagttgctggaggaactgaggaagcagagctcaatggaaattcatatgcacgaactccgcggtgctcttggcaccctgatgactgaaggcgcggtggttatccatggagacaacgtgaggagagtttgatgtcttgacggccatctgcggtgatgcttctataagctcaaaccctcgaacagacaaggttccgaagatttggtcaactgtagcacttagccctaacttgtggtccgaggtctaaactggtccagatttgtgtaactttctaagtattgctagttgtagattttttttaaaaaaaattgatatcagaattttgttctcta

SEQ ID NO: 19723 - DNA, 395 bp, Zea mays
  Clone ID: LIB3150-112-D11_FLI
ttccaaaacattgttttaatttataagactatatgtcaacagattcgtcctaataatgcgagcggcatcatataacaacgcaattatcttattggggtttcttctgaacctacacacacgcgtcaacgcctccgtttcttccccggatgcccagaacccagctgttctggacgagaacgaacgacgcactccgaacagtctttaccaatactcgagacagccagccacctatagtactacaatgaacggctacgggctacggctaaaatatctctcagtgtatctgcctatctatacataagttttgcataaaagcgcactttctaacagctggagggagggcgcaaggccagcgtcattgttcctcatgtacgtctgtctcgtcgtatatctcc

SEQ ID NO: 19724 - DNA, 1279 bp, Zea mays
  Clone ID: LIB3150-112-G4_FLI
gcttttgctctaacgcttcgcctttcgaccccccctttcctccgacttctttcagcagcatcccctagtcctcgcctggactccgcggagtctttgattgctccgagttcctcgcctggttttcggcaaggtgagctgctcctttcgccgttcctatgggagtttccccggttgcttgttgcttcccgctttccttctcggtatggcaaggccttctgattgctggcggctcaccttttcgcaggccaaggaaaggtggtcacttcacttctgttttttttttgtttttttactgccgccgcaaacctccgctcctgtgccatgccgccattccattcttaatctgggcgccgaagaagagaggacgggagcgaggtccggtcgaagaatcgtagcggattggggaagagagggcggcggaggccggtcggtatgattcaactgctgttcctcgtgctgttcgcggagggcgcggtggcgctgctcctcatggtgaaggtcgggccgctgcgggagcttgcgatgcgcggcgtggaccaggtgaagacgggcaagggcccggccacggtcaagacgctggcgtgcacgctctccgtcatcctcatgtccagcgtcgccagcatcctcaagatccagaacagggggctcaagctcggcaccgtcagccccatggaccaggtgctctggaggacgcacctcctcgaggcatccctcatcggatacacgctattccttgcatttgtaatcgaccggctgcaccactacctgcgaaagctgatgaccctgaggaaaacatccagcacatccagagaggaggtggagaaacttcagatggagaaccggtcgctccgcgaaaaggaggagaaatcctccagtgagacgaataggcttcagcgagagattgcgaggctgaatgagggcatgaagaagctgaaatctgagaccgaagagcacgagaggaaggcgtcggtggcagaggcccatgtcgacgcgctgcagaagcagtcggaggagctgctcctggagtacgaccggttgctggaagacaaccagattctgcagactcagctacttagcagaggctaagctaaggagcttggtttgttagcaagactcctttaccaggtagtgtcgtagagccaaggacttgcccggttctgaatgcttacatgccgcggttctaaatttcggcatgtccattgtggttcttggcgttcatgttgttcggttgttcctaacttgtgatcttgttgatgtatggatgcccgcgtgtatttta

SEQ ID NO: 19725 - DNA, 2902 bp, Zea mays
  Clone ID: LIB3150-113-G12_FLI
ggaaaatattgtgactgaagcacacaaaattttgcagcttttgaacttgccaagcgcggcagtaatgttgacaagagacaaattgttgctgagaattcacgcggtgcagtcactactgtggcccctccacgtttagtaattggccgcgaaaaggatcgcgtcaaggtcatatctatgcttcgtgagacacttgatgatggtcaacgggatcgcagcggtgctaaaccatactctacaattggcatttatggcgttcctgggtctggtaaatctaccctcgcaccagtatgtttgcgcccatgaggaagacaatatccactttgacattatcatctgggtccatgtgtcgcagaaatttagtgtgcaagccgttttgagggagacgatcgagcaggttacagggaagccaggcccccagtttgctggtgctaccgccctacaaaagagattgaaggcggagattcgagaaaaaacgtttcctcttggtacttgatgatgtctggtacagtaagaatggaaatcgtcacgatgatttacagcagatactctccccattgaatgttgccaaggcaggaagcaagatcttagccactagcagaacattggatgcactgctagctttgggtgctacgagacgcattccgatacgtgacctggatgacggggccttccttaacctgttcatgcattacgcacttgattttgcgagcattgatgaacgagaccgaggagagtttcagatggtcggagctgagattgcgaaaaagctcaagcgatcacctctagctgccagaacagtgggaagacagttatgtataagaccaaacatggagttttggaggaatactcgggatcgggaccttctggacgagacaatgggagctctgtggtggagctaccagcatctagatgagcaggtcaggcgatgcttttcttattgcagtatttttcccaggaggcgttggctggaccctgagtacttagtcaggttgtgggtggcagaaggatttgtcacagccagccgcaatacaggggaggaactggaggctgttggtcgaggctactttgatgagttagtgtcagcctcatttctgcaaccagtagatggtgacaaggaacgctatacgatccatgatctgttgcatgacttggtaagtaaagtagctggaagtgactgcttcagagctgacaatggctgggaaggagaatttcctcaggatgtccgtcatctttgggttgagaactgtaaattagacttgattgcccacaagattaccagactgaaaaagctacgcaccctgttcatttctgctggcgagaatggcacgccagttgaggaaaaagccttgttggaaaatattttcacgggtgtgacgacattgcgggtgctccagataacaccctggacagcaggaactctctcgttcccagcatctgttgggcggctaaagcatctacgctatctttctgtcggtaggcatattggcggtactaaggtgattctgccaagtacggttgttttgggactgtaccatctgcagcttttggattgcccttctgtagccttctcctcctgcgaagatattgttaagggcctgttcggttgtaccggaatgagccaggattcattccagctcatcaaaatctatataaattagagaagtaatccagctaggaattaatccggggctccaatccggaacaaccgaacagggcctaagctggttagcttgaggcacctactgtgctcatcaggatctctgaatgtaccaaacataggcaggattgtgtcactccgaactcttcgatgcttcagggtaaagaagaaggcaggctacgagttgtggcagctgaagcacctcaacaagcttgagaagaagctagtgatccgcggccttcagaacgctggacgcaagggagaggctccagaagccaatctagctgccaaggaacggctcacaaccctagcccttgagtgggacagtgatgcgctgctgagctgcggcgcggacctccaagcagaggtactggagggcctctgccctccgttgcattgcacctcgaaaaactgcggctctgttggtacggcggctcgaggtacccagactggattgttggcgtgcgatgcctttgcctctaccggtgcagccgactaggcgcctttcatggagagaacatatctaatgcacatggaagattggtacacatggtgtacatattaaatcatcatcactcattttagatctaacgtctctaattgtttggtatattttgctaaagataccctccaacatggtggtgtgtagtggtggaaggtgttatttgtaaattgaatgatcaactatagacgttagatttaaaataagtggtggtgatttaatatgtgcaccatgtgcactaatcctctatgtgcaccagatatgcgcaaaaggatacagcacgttcgcacagtaatcatcggatgggaatcacttcccagagcagagctattagatcacttcgagagcgagcctgtggtgccggagaaagaggagatcgccgcccttgttaaaaagttgctcgtgatgcttggccttctactactttgcatgttcagtgtgattgcaaggttgcttgtaggctctttcctgctcccagctccgctggtcgtcgtaattttgctgcttgtggtatggataattttgacactctagaggcctgtgaaatcggttatgcctggtgccgttaaacacggacactactctctgtcaattttcttctcttctctatggatattatgtttgcttgcctatgtctactcgaccagtctgagaaaaaaactactatttagttgtttgtatggaaaaaaatgttgtataagataaaaaaacgaatataaagctatgacccttttttttggatg

SEQ ID NO: 19726 - DNA, 653 bp, Zea mays
  Clone ID: LIB3150-114-D2_FLI
ggtctgtgagcacacctgagcatacaacagcagtaccaaatggaacagagcatgtagcaggtgatgttgacggagagatggctgaagcagaagctgaggaatcatctggtagccacgacatagagatgcaggaggacaagcctgatcaggttgataatgttaatgctgatgctaatcctggtgctgcagctgctcctgaagcatttaatgccagtgaatccacatcgcagccacaaagttgagcttgctagaaaagaaagtcgcagaatcaagtttctagtacagctgtccatttagcaatttgagagtattgctcgccaactcttgggattcgctccttgcttcctcaaacaaccagaaagggaatgtggattcagaagttgacaggattagccgatcatactagatgttgatcatcctgaaacactttaaactttccagggaatgccttactcacaaaggccatggtatgttttgatcaatcgtacctttctttctgcgtcaccacataggttagaaattctgtgtacgggttgccaaaatccatgaaggatgagtaaaacgaatatcttcactaagtcgctgatgtatcatgagagtgaatttcatgcacgtctcgccccatctactccagtatttattactgaaccttg

SEQ ID NO: 19727 - DNA, 677 bp, Zea mays
  Clone ID: LIB3150-116-B4_FLI
tcgacccagcgtccgagcacgcgcagggccccgtgggacctccccgccggccgggtccccgcgctcgtcctctgccgcgtcgccgccgtccgcttcatggccgatccggacaccgacgaggtcttcgccaagatccgcctggccccggtccgtcccaacgagccgggctacgccgacgacgccattggcgccgcggcggcgtcgggcgcgcaggaggacaagcccgcgtccttcgccaagacgctcacgcagtccgacgccaacaacggcgggggcttctccgtgccgcgctactgcgccgagaccatcttcccgcggctcgactactcggccgacccccccgtgcagaccgtgctcgccaaggacgtgcacggcgtggtctggaagttccgccacatctaccgcggcacgccccggcgccacctgctcaccaccggctggagcaccttcgtgaaccagaagaagctcgtcgcgggggactccatcgtgttcatgcggacggagaacggggacctctgcgtcggcatccggcgcgccaagaagggcggcatcggagggccggagttcatgcaccaccaccaccagcagccgcccccgccgcagggcggcgggtacgccgggttctccatgttcctgcgaggggaagaggacggcggcaagatgatggccgcggccgc

SEQ ID NO: 19728 - DNA, 1166 bp, Zea mays
  Clone ID: LIB3150-117-B2_FLI
gggtaactctcaaattggctattgctgatgacaaaaattgtgaaggtagaataatcataactactcgtaaatgggaacttgccaaagatgctagctgccagcactttttcctgatagctcaaggaaattattctatacaagaatatatggtgataaaaacttcagtcttggagaaatttgaagtgtccaacggtccaaggcgagtgacaggcagggcgactcgggcggccttccatccgccggaccgccgccggcggcttccaacctcgccgtcaccggagtggccgcagatggaagcttggcagcaacttcaagcttgcttgaagggcggatagtggatagccgccaggcgctcaccgccgccggctcccgcctccccgagccgcacgccgccagatcccaccctcaggtgccgcccagcgccggatcccgcttcaccgagctcccggtcgccggatcccatcgtcccgagtaggcgccgccggatcctgccgtcccagagcaggcgctgccggatccgtcttccccgaccagcccgctgcaggctccctcctctgccgaccaggacctcgccagtgtgcttctgggacaggccttcgcctcagagagcatcggagaggtggaggcagcccggatctgctacgtcctgctgccgtcgcgggagatccagcggaggaggcccgggacggccgccgtcgctccgtagctcggtcccgccgccgccgccggggtgctgctgctcccgcggagtccgcgcgtggatctcgtcgccgccgccagggagcctgctgctttcgtggagtccgccagtggatcccgccgccgccaccgccggggagcctgctgtcctcaggagcccgctcggggatcccgtcgctgccgcccgggatcgggatctcgccactgccgccgccgttgggagcctgttgctgttgccgcccgggacgactgcgcaggaaaggttggcttgaccacatcgccgcggcaaccgccggaggtccttcctggcctcaagcccacctttcgagctcgtcggctgctcgttctcgagtgcttgtccttgccctgcttcatgtagggccgctttcttccctagattggctgctgccgtcaatggcggcggccggtcttagcgctagcagaggccccgtctccaacagccgtcc

SEQ ID NO: 19729 - DNA, 805 bp, Zea mays
  Clone ID: LIB3150-117-B8_FLI
actcgcgtctcttccctattcgcgccgccgccgctgccgctgctgcaagcgccagctcgccgtcgtccgaatagtacactctaacgccgccatggggcgtatgcacagccgcgggaagggtatctcgtcgtcggcgctgccgtacaagaggacgcctcctacctggctcaagaccgccgcctccgacgtggaggagatgatcacaaaggcagcgaagaagggacagatgccgtcgcagatcggcgtcctgctccgtgaccagcacggtatcccccttgtcaagagtgtcaccggcagcaaaatcctccgcatcctcaaggcccatgggctggcacccgaaatcccggaggacctgtacttcctcatcaagaaggcggtggcgataaggaagcaccttgagaggaacaggaaggacaaagactctaaattcaggctcattcttgtcgagagcaggatccaccgccttgcccgctactacaagcgcacaaagaagcttccacccacgtggaagtacgagtcaaccactgcaagcactctggtggcctaagcgaggagctcagcgtcgggcgcttgaagccgagggcattgttggaaatcatttttatgtaccgttttaagagtttggagtgaactagagatggtgaatgtccctcctctggaggatgccatggaccctttttgtttacatagaactgccctgctgttaaacttttgctacttggcgaaggcagttgattgcttgcctccattaacacctgctatgcgagaagcttttagccttgagctgtcgggcagagggactcct

SEQ ID NO: 19730 - DNA, 1492 bp, Zea mays
  Clone ID: LIB3150-117-D12_FLI
ggccgccgtgcccgtgctcgcgctcgaccaccgccggccatggtcggcgtcgccctcgcgccggcagtgtcccgcgtgccttgccgtcccggcgcttccttccacgcctcgcgcccctcctcttcggcgcggctcccggccaggccgcgggcgcgggcgcgggcgcgggcgccgccggagaggctcgtggttgtcgcgcggtactcgtcctcgtacgaggtcgagggcgaggaggaggaggaagatgaggaagggctcgggggcggcggaggctgggggaggagggaccgcgggcccgaccccgactacgacccggcccttgacatcgaacgcatcgagtcctcgaccgtaaggctattggacgaacagaaaagaatggttggtgtagtatctgtcagcgaggcagttcagattgcagacgataatgatcttatactggcaatattatcaatggatggggaccccccagtacttcgactctttgaggagagagattacaaaaaacataggtatgaacaacagaagaagaaaaagattcagcagaaaagatctgtcgcgaaacgcatgggcttgaaggagctgaaaatgggatacaacattgacatccatgattacagcgtgaggcttaaagctgcaaaaaagtttcttaaagctggcgacaaggttaagataattgtgaacctgaaaggacgggaaaacttgtacaaaaaagaagctatcgaactccttagaagattccaaaatgacgttggcgagctggcgaccgaagaaagtaagaatttcgccgagaggaatatatatctggttcttgttcccaataagatagctatacagaaagaacaggatgaattgaacaaaaagggtgctgtgagagaagagaaagaccaatcagacagtgatgaaccagaagagaacgaccaaccagacagcgatgtacccctgacagaactgctggaggaaagtatggaacccgaggcagaagtctcagcaaacgtttgatttgaactgtagaggccaaggtgccttgctgagattgaaacaaggtacagttgctgtagaattgcagctctcgtaaatacaaggcaggctggttcttttgtgtaacaaatgtatctgttaaactccatctccacaagctatccgataggcgccaaggcgtaaacaaggcttgatgatgtatgtcctccaagtctccaacccctcagcatcgaaggatgatgatacctgggaactggaaatcaccaccccttgcataaatggattgagacagaggttggatccggtaccaataataaagtaattgttaggacagacatttttctagcagcgtccagcacggtggacttttttttggcctcatttccaatcgtttttccttttgactccttgtagagaagaaagctgagacgtatctatttgacaagtgcacatgttattgcgagttttgagaccttctgtaagagcctacctatgtgttctggaagagttacca

SEQ ID NO: 19731 - DNA, 653 bp, Zea mays
  Clone ID: LIB3150-117-G4_FLI
caagactggagctgagagaaaggacgctgctgagaacacgatggtggcatacaaggctgcccaggacattgctctggctgagcttgctccaactcaccctattaggcttggactggcacttaacttctcagtgttctactatgagattctgaactcacctgatcgcgcctgcagtcttgcaaagcaggcttttgacgaggccatctcggaactggacaccctgagcgaggagtcctacaaggacagcactttgatcatgcagctccttcgtgataacttgaccctatggacttctgacatctcggaggaccctgctgaagagattagggaggcacccaagcgcgactcgagtgaggggcagtaaagccggctttatgtgcctagaaactagtagctagtgtttgctgctgtcgaatgacactatgcaatgtgatctggaacctggtttcttgggtgcgacgcttgttatgactgtcgtcagtaaaatttgggggctccccgtatgagatgctgccgggcaaggcctcggtgtcccacctcgtttgtggcggggggcgctggagcccggtctggttgggttgggaagccctttaaactgttgtcacttgcattttaccttttccatcgctgtttattgtgagtggtcctatatc

SEQ ID NO: 19732 - DNA, 1691 bp, Zea mays
  Clone ID: LIB3150-118-A11_FLI
ggatgatttcaagcctgtcctgaaagaactactggcaacacaccctggcttagagtttttacaagggacccccgagtttcaggagagatatgcggagactgtaatatacagaatcttttactccataaatagatctgggaatggtcatctgactctgagagagctcaaacgtggaaatttaattgctgcacttcagcagttagatgaggaagaagatatcaacaaagtgttgagatatttctcatatgaacacttttatgtgatctactgcaaattctgggagctggatgcagaccacgattttttgattgataaggaaaatctcatcaaatatgggaaccattcgttgacctatagaatagttgatagaattttcgcacagatcccaaggaaattcacaagcatgacagaaggaaagatgggttatgaagactttgtttactttatattatcagaggaagacaaatcatctgagcctagtcttgaatactggtttaagtgcatcgatcttgatggtaatggtattttaactttcaatgaaatgcaatttttctacgaggagcaattgcaccgaatggagtgcatggcacaagagcctgtgctttttctggacatattatgccagatgattgatatgattggaccagagaatgagagctatttaactctacgggacttaaaacggtgtaaactctcaggaaacatattcaatattcttttcaatctcaacaagttcatggcgtttgaaactcgtgatccgttcctcattcgccaggaacgtgaaaatccaactctaactgagtgggaccggtttgcacatagagaatatattagattgtccatggaagaagatggtgaggatgcttcaaatggaagtggtgatgtgtgggacgaatcacttgaggctccattctgaatggcgtcttgctgcatgaatttggttggacatggatgattatggttgtgaagcggaaggattgtaaatttggtggctaccctgttgaggccattgtaggctcacagcagattcagtaacatcaaaggctactgaaaagttttactgtgcagatctgattcaatatttgtcagttatcttgttgggcaaacatttttgctttgctggaaaattggggagggaggttggtgggggcgccctgcagtttcaaggcaacaacctcagcagtcatcaacggtcgactccatttgtgttctgattgatccttagggggatatctgttattcaattgtgcgcaaattttggggctgaactgttaatgtttggctgctatttctttgttaaatcttggaagcgcaggctaccaattccatcacacaactaagatcatggcatgtagctttcaggttctgctttctcatcagcatggtgttctgtagttgtgttgccattcttggtgcatcttgggaggaatgatccgtgaccttgaagcatggatacttgtcattttgtaacattaccgagaagcagtggattgggtgcatagtaacacaggttgtaacgttaccgagaagctgtggattgggtccaatttttgttaaggtgtaaatttggagaatcttttaggttatcttacttgaaagtgctttgcgctttgcgtattgagctacttatgtcgtgatgcgctgaaactccatgtgtgtattcttgttgttttttccatttaaaaaacccc

SEQ ID NO: 19733 - DNA, 1053 bp, Zea mays
  Clone ID: LIB3150-118-C1_FLI
ggaattcaccaaccaaactccactgtctccaactctccatcgcgtctgctacgcctctcctgcaggacgaccaatggcttccaggaagttcttcgtgggtggcaactggaaatgcaacggtactggcgaggacgtgaagaagatcgtcaccgtgctcaaccaagccgaggtgccctctgaagacgtcgtcgaggtggtggtgagtccgcctttcgtttttctgcagcaggtcaaggggctgctgcggctggacttcgccgtcgcagcgcagaactgctgggtgcgcaagggcggcgccttcaccggcgagatcagtgctgagatgctggtaaacctgcaggtgccctgggtcattttgggacattctgagcgcagagctctgttgggtgaatccagtgattttgttgctgataaagttgcatatgcactcactcaaggtctcaaggtaattgcttgcattggtgagacccttgagcagagagaggcaggaacaacaatggatgttgttgctgcacaaacaaaggctattgctgaaaaaatatcagattggacaaatattgtgttggcatatgaaccagtttgggctattggtaccggcaaggttgcaactcctgctcaggctcaggaggttcatgatggtctgagaaagtggctccactccaatgttagccctgcagttgctgaattgacaaggataatttatggagggtctgtaaatggagctaactgcaaagaacttgcagctcaaccagatgttgatggattccttgttggtggagcctcattgaagcctgaattcgtggacatcatcaagtctgccactgtcaagtcttcatctgcctagtgttttgactttcaatgcacctggatgcttgtcgtactgaatgctgttgatcttttaaagctattgccattttaccatctcgttttggtattctagctccagtgcatcgtttgtatatcatcatctcctgcgtatgtgcacagagtagtcatttacctgaatcatccttgtgtaccctttggaactgcataattgaactgcgctattct

SEQ ID NO: 19734 - DNA, 922 bp, Zea mays
  Clone ID: LIB3150-118-D8_FLI
gtcgcgcttcgggcgctccgggcagccggagaaccgcgaatctttctccatcctcgtcctcaacgtctccttccgcactacggctgacgatctcttcccgctcttcgatcgctacggcaaggtcttagacatctacatcccgcgcgaccacaggactggggatccgcgagggttcgcgttcgtgaggtacaattacgaggatgaggcgcgggatgccattgacgggcttgatgggatgaggtttgatgggcgtgcgctcatggtgcagtttgccaaatacggacccaatgctgaaaagattcataggggtagaattacagaagaaaatccaaagccaaggggtcgttgcagaagccgcagtccaagacagaggtatcgagaggattatcgggatagagactatagaaggcgaagccagagcagaagtagggagcgatatgaacaggccgggtacagagatggtgatcatcgtcgccataggactcacagtatcagtcctgattatgacaggaaacgtaacagacacagtggctctcctgtacttaaacgccccagtcatagcagaagtcgttcgcctcgtagggcacctcatgaaggaatacctagcaagcccagagatggccgcgctgcatgttctggaagcccttgaccctgagctgtggctgaatatcacacagtttctcctggacagcttgaggcatctaaacagttctcatcatttgtattttcttactaagatggcctttgttttagtccaggatgagtagaccgagctttggcaaaaacaacaatgtctgcttggttactgaatctacatggtgacaatgatggaatattgtgtggcacagcattcaacttccagtactgcgctttgtaaacatctaagcctcatttgggaactatatgcatgttggatattgtc

SEQ ID NO: 19735 - DNA, 650 bp, Zea mays
  Clone ID: LIB3150-118-G9_FLI
gcagccatccgcttctcttcggttcagctctcgagtttccaggatgaaggtaatagctgcctacctgcttgctgttctgggtggaaacacttccccgactgctgatgatgttaagagcattctggaatcagttggtgctgaagctgatgaagaaaaactagagttcctgctcacagaactcaaagacaaggacataacagaagtgattgcagctggaagggaaaggttatcctctgtgccttcaggtggtggtgcaattgacatgggagctccagcagctgtagctggcggtggcgcagcacctgctgaagaggcaaagaaggaagaaaaggttgaagagaaggaagagtctgatgaagatatgggtttcagcttgttcgattaaaacaccactgccagtttacagtttctctcgcgaatggtctcacaatattcgctggtttccacaaaataagattgtcaatagctactacgtacttatgctattctgcatgtgatgtacgagtgtgcatcttcaagaatctttaagttgaatggtcccataataatattgataacaatgtaaattgtatgtcctgtacgtactttggtatcgcgacatctcagtgtgcatcttcaaggatcataagttgaatgttatcattaaggtc

SEQ ID NO: 19736 - DNA, 882 bp, Zea mays
  Clone ID: LIB3151-001-D12_FLI
accattagctttatctactccagagcgcagaagaacccgatcgacaccatgagggtgttgctcgttgccctcgctctcctggctctcgctgcgagcgccacctccacgcatacaagcggcggctgcggctgccagccaccgccgccggttcatctaccgccgccggtgcatctgccacctccggttcacctgccacctccggtgcatctcccaccgccggtccacctgccgccgccggtccacctgccaccgccggtccatgtgccgccgccggttcatctgccgccgccaccatgccactaccctactcaaccgccccggcctcagcctcatccccagccacacccatgcccgtgccaacagccgcatccaagcccgtgccagctgcagggaacctgcggcgttggcagcaccccgatcctgggccagtgcgtcgagttcctgaggcatcagtgcagcccgacggcgacgccctactgctcgcctcagtgccagtcgttgcggcagcagtgttgccagcagctcaggcaggtggagccgcagcaccggtaccaggcgatcttcggcttggtcctccagtccatcctgcagcagcagccgcaaagcggccaggtcgcggggctgttggcggcgcagatagcgcagcaactgacggcgatgtgcggcctgcagcagccgactccatgcccctacgctgctgccggcggtgtcccccactgaagaaactatgtgctgtagtatagccgctggctagctagctagttgagtcatttagcggcgatgattgagtaataatgtgtcacgcatcaccatgggtggcagtgtcagtgtgagcaatgacctgaatgaacaattgaaatgaaaagaaaaaagtattgttcc

SEQ ID NO: 19737 - DNA, 917 bp, Zea mays
  Clone ID: LIB3151-002-E3_FLI
gtcgacccagcgtccgcattagctttatctactccagagcgcagaagaacccgatcgacaccatgagggtgttgctcgttgccctcgctctcctggctctcgctgcgagcgccacctccacgcatacaagcggcggctgcggctgccagccaccgccgccggttcatctaccgccgccggtgcatctgccacctccggttcacctgccacctccggtgcatctcccaccgccggtccacctgccgccgccggtccacctgccaccgccggtccatgtgccgccgccggttcatctgccgccgccaccatgccactaccctactcaaccgccccggcctcagcctcatccccagccacacccatgcccgtgccaacagccgcatccaagcccgtgccagctgcagggaacctgcggcgttggcagcaccccgatcctgggccagtgcgtcgagttcctgaggcatcagtgcagcccgacggcgacgccctactgctcgcctcagtgccagtcgttgcggcagcagtgttgccagcagctcaggcaggtggagccgcagcaccggtaccaggcgatcttcggcttggtcctccagtccatcctgcagcagcagccgcaaagcggccaggtcgcggggctgttggcggcgcagatagcgcagcaactgacggcgatgtgcggcctgcagcagccgactccatgcccctacgctgctgccggcggtgtcccccactgaagaaactatgtgctgtagtatagccgctggctagctagctagttgagtcatttagcggcgatgattgagtaataatgtgtcacgcatcaccatgggtggcagtgtcagtgtgagcaatgacctgaatgaacaattgaaatgaaaagaaaaaagtattgttccaaattaaacgttttaaccttt

SEQ ID NO: 19738 - DNA, 1401 bp, Zea mays
  Clone ID: LIB3151-003-G6_FLI
gcaggccgcaccggtcatcacaccggagcgcacgcggggagcccccgtagagttccggggcgaccaggccaactaacgccatgaaggaggaaggcggcggcggggacgcggggttcgtgcgggcggaccagatcgacctcaagagcctggacgagcagctggagcgccatctcacccgcgcctggaccatggagaagcgcaaggaggaggcctccgccggcgctggcgccggcgccaggcagcaccagcagtcccggcgcccgcggagggaggactgggagatcgaccccgccaagcttgtcgtcaagggcgtcatcgcccgcggcacctttggcaccgtccaccgcggcatctacgacgctcacgacgtcgcagtgaaactacttgattggggagaggatgggcatagatcagaacaagacattgcagcactaagagcagctttttcacaagaggtctctgtttggcataagcttgaccatccaaatgtaaccaagtttattggagctataatgggtgcaagggatctgaatattcaaacggaaaacggccacattggcatgccaactaatatctgctgtgtcgttgtggagtaccttcctggtggtgcactaaaatcatttctgataaagaacaggagaaagaagctagcttttaaggtcgttgttcaaatcgctcttgaccttgccaggggattaagctatctccattccaagaagattgtgcaccgtgatgtgaagactgaaaatatgcttcttgacaaaacgagaaccgtgaagatcgctgattttggtgttgctcgccttgaagcttcaaatcccagtgacatgacgggcgaaactggaacgcttggttacatggcacctgaggttctcaatggaaatccctacaacaggaaatgcgatgtttacagcttcgggatctgtttgtgggagatatactgctgtgatatgccatatcctgacttgagcttttctgaggtcacgtctgcggttgtccgtcagaacctgaggccggagataccacgctgctgcccgagctctctatcgaacgtgatgaagcgctgctgggacgccaaccccgacaagcgacctgagatggccgaggcggtgtccatgctggaggcgatcgacacgtcgaagggtggaggcatgatccctgtggaccagcggccaggatgccttgcgtgcttccggcagtacagaggtccatgacagataggtggaaacctgttggagctgcggcctctagatctcgtggatgccgatcgatcgcgtgttgttttctggggaagcaaactggttaatggagctagcccgccttaccggctcgtgtaaatcctctgtccatcaattctgtaactctgttttatcgattaatgaaaagaaccgggcttgctcg

SEQ ID NO: 19739 - DNA, 656 bp, Zea mays
  Clone ID: LIB3151-004-E9_FLI
cacaaggccatgtgcaacaacacgaacagagccatgagcaacaccaaggacagagccatgagcaacaacatcaacaacaattccagggtcatgacaagcagcaacaaccacaacagcctcagcaatatcagcagggccaggaaaaatcacaacagcaacaatgtcattgccaggagcagcaacagactacaaggtgcagctataactactatagcagtagctcaaatctaaaaaattgtcatgaattcctaaggcagcagtgcagccctttggtaatgccttttctccaatcacgtttgatacaaccaagtagctgccaggtattgcagcaacaatgttgtcatgatcttaggcagattgagccacaatacattcaccaagcaatctacaacatggttcaatccataatccaggaggagcaacaacaacaaccatgtgagttatgtggatctcaacaagctactcaaagtgcggtggcaatcttgacagcagcacaatacctaccatcaatgtgcggcttgtaccactcatactaccaaaataatccatgcagcagcaatgacattagtggtgtttgcaattgaagaattgtgtctacctagccgttatactcctataacggtgttaagcaataaagtaccatacattatgatgtt

SEQ ID NO: 19740 - DNA, 891 bp, Zea mays
  Clone ID: LIB3151-004-F3_FLI
cttcagaccattagctttatctactccagagcgcagaagaacccgatcgacaccatgagggtgttgctcgttgccctcgctctcctggctctcgctgcgagcgccacctccacgcatacaagcggcggctgcggctgccagccaccgccgccggttcatctaccgccgccggtgcatctgccacctccggttcacctgccacctccggtgcatctcccaccgccggtccacctgccgccgccggtccacctgccaccgccggtccatgtgccgccgccggttcatctgccgccgccaccatgccactaccctactcaaccgccccggcctcagcctcatccccagccacacccatgcccgtgccaacagccgcatccaagcccgtgccagctgcagggaacctgcggcgttggcagcaccccgatcctgggccagtgcgtcgagtttctgaggcatcagtgcagcccgacggcgacgccctactgctcgcctcagtgccagtcgttgcggcagcagtgttgccagcagctcaggcaggtggagccgcagcaccggtaccaggcgatcttcggcttggtcctccagtccatcctgcagcagcagccgcaaagcggccaggtcgcggggctgttggcggcgcagatagcgcagcaactgacggcgatgtgcggcctgcagcagccgactccatgcccctacgctgctgccggcggtgtcccccactgaagaaactatgtgctgtagtatagccgctggctagctagctagttgagtcatttagcggcgatgattgagtaataatgtgtcacgcatcaccatgggtggcagtgtcagtgtgagcaatgacctgaatgaacaattgaaatgaaaagaaaaaagtattgttccaac

SEQ ID NO: 19741 - DNA, 889 bp, Zea mays
  Clone ID: LIB3151-005-A4_FLI
cttcagaccattagctttatctactccagagcgcagaagaacccgatcgacaccatgagggtgttgctcgttgccctcgctctcctggctctcgctgcgagcgccacctccacgcatacaagcggcggctgcggctgccagccaccgccgccggttcatctaccgccgccggtgcatctgccacctccggttcacctgccacctccggtgcatctcccaccgccggtccacctgccgccgccggtccacctgccaccgccggtccatgtgccgccgccggttcatctgccgccgccaccatgccactaccctactcaaccgccccggcctcagcctcatccccagccacacccatgcccgtgccaacagccgcatccaagcccgtgccagctgcagggaacctgcggcgttggcagcaccccgatcctgggccagtgcgtcgagtttctgaggcatcagtgcagcccgacggcgacgccctactgctcgcctcagtgccagtcgttgcggcagcagtgttgccagcagctcaggcaggtggagccgcagcaccggtaccaggcgatcttcggcttggtcctccagtccatcctgcagcagcagccgcaaagcggccaggtcgcggggctgtttggcggcgcagatagcgcagcaactgacggcgatgtgcggcctgcagcagccgactccatgcccctacgctgctgccggcggtgtcccccactgaagaaactatgtgctgtagtatagccgctggctagctagctagttgagtcatttagcggcgatgattgagtaataatgtgtcacgcatcaccatgggtggcagtgtcagtgtgagcaatgacctgaatgaacaattgaaatgaaaagaaaaaagtattgttcc

SEQ ID NO: 19742 - DNA, 1143 bp, Zea mays
  Clone ID: LIB3151-005-G4_FLI
ggttgctaccgtgcagtgcctatcgggtactggttctttaagagtcggaggtgaatttcttgcaaggcactatcacgagcgcactatctacatcccacaaccaacctggggaaatcacccaaaagtcttcaccctatctggcttgaacgttaggagctaccgctattatgatcctgcaacatgcagccttcacttcgaaggactcctggaagacctcggttctgctccttcaggttcaattgtactgctgcatgcctgtgctcacaaccctactggagtagatcctaccatcgaacagtgggaacagattaggcagctgatgagatcaaaatcactgcttccgttctttgacagtgcctatcaaggctttgcaagtggaagtcttgacaaagatgctcagtcagtgcgtatgtttgttgctgatggtggtgaacttctcatggctcagagctacgctaagaacatgggattgtatggagagcgtgttggcgctttgagcattgtatgtaaaagtgccgatgtagctgttagggttgaaagtcaactcaaacttgtcatcaggcctatgtattcaaaccctcctcttcatggtgcctctatcgttgctaccatactcagggacagcgagatgttcaacgaatggactctggaactgaaggccatggctgataggatcattaacatgaggcaacaactatttaatgcgctgaaatccagaggaacccctggtgattggagccatatcattaagcaaattgggatgtttactttcactgggctgaatagcgaacaagtcgcattcatgaggcaggaataccacatttatatgacatctgatgggaggatcagcatggccggtttgagcatgaggactgtgccccatcttgcagatgccatacacgctgcagttactcaactgaaatgaggatagtatcgcagctttcgtgaataaaacctgaatcacccacaacaatgttctaagtactcagccagtggtatttactggttgacctactgtagtttgcgtcggaatagatatgtttttttactcttcgtggggcagttttgtactggtggattcataaggactctgattatggtgcgttcggaacttataataataagcacatgaaattttgcttc

SEQ ID NO: 19743 - DNA, 595 bp, Zea mays
  Clone ID: LIB3151-007-A3_FLI
gccaccatgccactaccctactcaaccgccccggcctcagcctcatccccagccacacccatgcccgtgccaacagccgcatccaagcccgtgccagctgcagggaacctgcggcgttggcagcaccccgatcctgggccagtgcgtcgagtttctgaggcatcagtgcagcccgacggcgacgccctactgctcgcctcagtgccagtcgttgcggcagcagtgttgccagcagctcaggcaggtggagccgcagcaccggtaccaggcgatcttcggcttggtcctccagtccatcctgcagcagcagccgcaaagcggccaggtcgcggggctgttggcggcgcagatagcgcagcaactgacggcgatgtgcggcctgcagcagccgactccatgcccctacgctgctgccggcggtgtcccccactgaagaaactatgtgctgtagtatagccgctggctagctagctagttgagtcatttagcggcgatgattgagtaataatgtgtcacgcatcaccatgggtggcagtgtcagtgtgagcaatgacctgaatgaacaattgaaatgaaaagaaaaaagtattgttcc

SEQ ID NO: 19744 - DNA, 893 bp, Zea mays
  Clone ID: LIB3151-007-F9_FLI
cttcagaccattagctttatctactccagagcgcagaagaacccgatcgacaccatgagggtgttgctcgttgccctcgctctcctggctctcgctgcgagcgccacctccacgcatacaagcggcggctgcggctgccagccaccgccgccggttcatctaccgccgccggtgcatctgccacctccggttcacctgccacctccggtgcatctcccaccgccggtccacctgccgccgccggtccacctgccaccgccggtccatgtgccgccgccggttcatctgccgccgccaccatgccactaccctactcaaccgccccggcctcagcctcatccccagccacacccatgcccgtgccaacagccgcatccaagcccgtgccagctgcagggaacctgcggcgttggcagcaccccgatcctgggccagtgcgtcgagttcctgaggcatcagtgcagcccgacggcgacgccctactgctcgcctcagtgccagtcgttgcggcagcagtgttgccagcagctcaggcaggtggagccgcagcaccggtaccaggcgatcttcggcttggtcctccagtccatcctgcagcagcagccgcaaagcggccaggtcgcggggctgttggcggcgcagatagcgcagcaactgacggcgatgtgcggcctgcagcagccgactccatgcccctacgctgctgccggcggtgtcccccactgaagaaactatgtgctgtagtatagccgctggctagctagctagttgagtcatttagcggcgatgattgagtaataatgtgtcacgcatcaccatgggtggcagtgtcagtgtgagcaatgacctgaatgaacaattgaaatgaaaagaaaaaagtattgttccaaatt

SEQ ID NO: 19745 - DNA, 965 bp, Zea mays
  Clone ID: LIB3151-008-H4_FLI
cccatgaaggtggtggagcgcgtgcagaagaagactggccgcaaggtcgagctgctgtcgccgatgccgcccccgccggaggtggaggagaagaaggaagatgaggcggagaagaagaaggacgatgagaagaaggcagagcccgagccgccgaagccggaggagaagaaggagccgccggtgatcgctgtggtgctgaaggtgcacatgcactgcgaggcgtgcgccgaggggatcaagaagaggatcctcaagatgaaaggcgtgcagtccgtagaaccggacctcaaggcgtcggaggtgacggtgaagggcgtgttcgaggagtccaagctggcggagtacgtgtacaagcgcacgggcaagcacgcggccgtcgtcaagtccgagccggccccggcgccggagggcggcggcggcgacaaggcggccaaggaggaggagaagaaggatgcaggcggagccggaagcgaggagaagaaggacggcaaggaggaggaagagaagaaggacggcggcgagaagaatgaggagaagaaggacggcggcgacggagacggcgacaagaaggacgaggccggcgacaaggacaaggacccggccgccagcctgtacatgcactacccgcggttcccgttcgctggagggtactaccagccgccggcctacccgccgcctccggggtacccgtacgcctaccagccggcctacccgccgccgttctacgcgccgccgcaccaccacctgcaccagcagcagcccatggcgccgcagatcttcagcgacgagaaccccaacgcctgctccgtcatgtagttgtcactcaaatgtcatgtaaaaaaaaaagaaccgtaggaccctgtctttgcgcggggtcctggcgtcctgcccctgccagagcgaaggaccctgtctttgccagaaatgcccctgggcaaccaagctaatggcgactttgtttgaac

SEQ ID NO: 19746 - DNA, 890 bp, Zea mays
  Clone ID: LIB3151-012-A3_FLI
agaccaactagcaacatagaaagcacaatattgtaccaataatggcagccaaaatattttgcctcattatgctccttggtctttctgcaagtgctgctacggcgagcattttcccgcaatgctcacaagctcctatagcttcccttcttcccccatacctctcaccagcgatgtcttcagtatgtgaaaatccaattcttctaccctacaggatccaacaggcaatcgcagcaggcatcttacctttatcacccttgttcctccaacaatcatcagccctattacagcagttacctttggtgcatttattggcacaaaacatcagggcacaacaactacaacaactcgtgctagcaaaccttgctgcctactctcagcaacagcagttacctttggtgcatttgttggcacaaaacatcagggcacaacaactacaacaactcgtgctagcaaaccttgctgcctactctcagcaacaacagtttctgccattcaaccaactagctgcattgaactctgctgcttatttgcagcaacaacaactactaccattcagccagctagctgctgcctacccccggcaatttcttccattcaaccaactggcagcattgaactctcatgcttatgtacaacaacaacaactactaccattcagccagctagctgctgtgagccctgctgccttcttgacacagtaacatttgttgccgttctacctgcacactgcgcctaacgttggcaccctcttacaactgcaacaattgctgccattcgaccaacttgctttgacaaacccagcagtgttctaccaacaacccatcattggtggtgccctcttttagattgcttatgagttatagttcaataataaagttttttttgctgat

SEQ ID NO: 19747 - DNA, 1794 bp, Zea mays
  Clone ID: LIB3151-012-C9_FLI
gcggcgagcagatatcccacgagaaagccctcgaccccttcaattctccagcaaactagtcaccggcgtgtgcactggtgcagtgcacgcacgacgccggcagcatggcgggcagggccagggcacggcggttcgtgctcgccggcgctctgatgatcgcctggctcctctgtcttctcccacgggccacggcggcggccgtccgcaggagcgacttcccgccgtcgttcctcttcggcaccgccacctcctcgtaccagatcgaaggcgcgtacctcgagggcaacaagagcttgagcaactgggatgtcttcagccacgtaccaggaagaatcgaagacggaagcaccggagatatcgcggatgatcactatcatcgttacgaggatgacattgagctcatgcactctctcggcaccaacgcctacagattttctatatcatgggccagaattcttccgagagggagattcggcgaggtcaacccagcaggcatcgcgttctacaacagactcatcgactcgctcctgctcaaagggatagagccgttcgtgacgctgtcccactacgacatcccgcaagagctggaggacaggtacggggcgtggctcggcggcgccgaggcgcggcgcgacttcggccacctggcggacgtgtgcttcgcggcgttcggcgaccgcgtcaggcactgggccaccttcaacgagcccaacgtcgcggtcaccaggggctacatgctcggcacctacccgccggggcgatgctcgcgctcctgcgcccggggcaactccgacgccgagccctacgtcgccgcgcacaacgtcgtcctggcccacgccgccgccgtccagatctacaagaccaagtaccagaagggcttgatcggcatcgtgatgtccactgtctggttcgtgccgctgacggacgcgccggcggaccggctggcgactgagcgggcgctggccttcgacgttccatggtttcttgacccgataatctacggagactaccctccggagatgcgccggctcctgggctccaggctgccgaccttctcgccggaggataggaggacgctgggctacgggctggacttcatcggcatcaaccactacacgacgctgtacgccagggattgcatgttctcgccaggttattgcccgtcggggcaggagttccaccaatcgctggcggcctacacgggagaaagagacgggattcccatcgggcctccgacagcgatgccgacgttctacgtggttcctgacgggatagagaagatggtcacctacatcatgaacagatacagcaatctccccatgttcataaccgaaaatggctacgcacaaggtggggatggttatactacccgtgccgaggactggcttgacgaccagggcaggatacagtacctcgagggctacctcgcaaaactcgccaaagtcatcagtgacggcgccgatgtccgtggctacttcatctggtctctcattgacaatttcgagtggctatatgggtacaccctccgcttcggccttcactacgttgactaccaaacgcaggagagaaagcccaagtcgtcggcgctgtggtacaaacggttcctccagagttcacttcaagctcaatagagagagggtgccttgttcgaagtacaggcacgcagcatgagcttgcgagtgtgtgacgactgagcatgccgcttcttcaattcagaaaatgaagggcgtgatctttgtatgaatttattgatccttaataaagggggccactacagttgccaaaaaaaaaaat

SEQ ID NO: 19748 - DNA, 382 bp, Zea mays
  Clone ID: LIB3151-012-D5_FLI
gcggcagcagtgttgccagcagctcaggcaggtggagccgcagcaccggtaccaggcgatcttcggcttggtcctccagtccatcctgcagcagcagccgcaaagcggccaggtcgcggggctgttggcggcgcagatagcgcagcaactgacggcgatgtgcggcctgcagcagccgactccatgcccctacgctgctgccggcggtgtcccccactgaagaaactatgtgctgtagtatagccgctggctagctagctagttgagtcatttagcggcgatgattgagtaataatgtgtcacgcatcaccatgggtggcagtgtcagtgtgagcaatgacctgaatgaacaattgaaatgaaaagaaaaaagtattgttcc

SEQ ID NO: 19749 - DNA, 788 bp, Zea mays
  Clone ID: LIB3151-012-F11_FLI
cagaccattagctttatctactccagagcgcagaagaacccgatcgacaccatgagggtgttgctcgttgccctcgctctcctggctctcgctgcgagcgccacctccacgcatacaagcggcggctgcggctgccagccaccgccgccggttcatctaccgccgccggtgcatctgccacctccggttcacctgccacctccggtgcatctcccaccgccggtccacctgccgccgccggtccacctgccaccgccggtccatgtgccgccgccggttcatctgccgccgccaccatgccactaccctactcaaccgccccggcctcagcctcatccccagccacacccatgcccgtgccaacagccgcatccaagcccgtgccagctgcagggaacctgcggcgttggcagcaccccgatcctgggccagtgcgtcgagtttctgaggcatcagtgcagcccgacggcgacgccctactgctcgcctcagtgccagtcgttgcggcagcagtgttgccagcagctcaggcaggtggagccgcagcaccggtaccaggcgatcttcggcttggtcctccagtccatcctgcagcagccgactccatgcccctacgctgctgccggcggtgtcccccactgaagaaactatgtgctgtagtatagccgctggctagctagctagttgagtcatttagcggcgatgattgagtaataatgtgtcacgcatcaccatgggtggcagtgtcagtgtgagcaatgacctgaatgaacaattgaaatgaaaag

SEQ ID NO: 19750 - DNA, 1026 bp, Zea mays
  Clone ID: LIB3151-012-G5_FLI
tccaggacaaggagggcatccctccggaccagcagcggctcatttttgccggcaagcagctcgaggacgggcgcacgctggccgactacaacattcagaaggagagcaccctccacttggtgctgcgtctcaggggtggcatgcagatcttcgtgaagacacttactggcaagacgatcacccttgaggtggagtcctcagacaccattgacaacgtcaaggccaagatccaggacaaggagggcattccaccggaccagcagcggctgatcttcgccggcaagcagctggaggatggtcgcaccttggctgactacaacatccagaaggagagcaccctccacctggtgctccgcctcaggggtggtatgcagatttttgtgaagacattgactggcaagaccatcaccttggaggtggagtcgtctgacacaatcgataatgtcaaagccaagatccaggacaaggagggcattccaccggaccagcagcgcctgatctttgctggcaagcagctggaggatggccgtaccctcgccgactacaacatccagaaggagagcaccctccacctggtgctccgcttgcgaggtggtatgcagatctttgtgaagaccttgactggcaagaccataaccctggaggttgagagctccgacaccatcgacaacgtgaaggcaaagatccaggacaaagagggcatccccccagaccagcagcgtctgatcttcgctggcaagcagctggaggatggtcgcaccctagcagactacaacatccagaaggagagcactctccacctggtgctccgcctccgtggtggtcagtaagccatggttcatttaagctgctgctgtacctgggtatctgcgtcgtcgtcgtctaataaacatctgtggtttgtgtgtcatgaatcgtggttgtggcttcgttggtttaatggacctgttgtgtcctctgtgttgtacccaaaactcttctgcagcagtatggcttgaatccttgtgaagtttgatgtttgaactt

SEQ ID NO: 19751 - DNA, 1037 bp, Zea mays
  Clone ID: LIB3151-014-E10_FLI
caaatactgatctcactgatccagtatggctatggcaaaggcaggcgcgccgagggtctcggcggcccagctggtgactctcgggctatcactcctctgcgctgtcgccggcccggccgccgcgcagaactgcggctgccagccaaacgtatgctgcagcaagtttggctactgcggcacgaccgacgagtactgcggcgacgggtgccagtcgggcccgtgccgctcgggcggcggcggcagcagtggcggcggtggtgcgaacgtggctagcgtcgtcaccggctccttcttcaacggcatcaagagccaggccgggagcgggtgcgagggcaagaacttctacacccggagcgcgttcctgagcgccgtcaaggcgtacccaggcttcgcccatggcgggtcgcaggtgcagggcaagcgcgagatcgccgccttcttcgcgcacgccacgcacgagaccgggcatttctgctacatcagcgagatcaacaagagcaacgcctactgcgacccgaccaagaggcagtggccgtgcgccgcggggcagaagtactacgggcgcggcccgctgcagatctcgtggaactacaactacgggcccgcggggagggccatcggcttcgacgggctcggggaccccggcagggtggcgcgggacgccgtggtggcgttcaaggcggcgctctggttctggatgaacagcgtgcacggggtggtgccgcaggggttcggcgccaccaccagggccatcaacggcgccctcgagtgcggcgggaacaaccccgcccagatgaacgcgcgcatcggctactacaggcagtactgccgccagctcggcgtcgacccggggcccaacctcacctgctaggctagctaggcggcatcggtggacggcggggccttcaggccttgtgctcggcgtcgcaccccctcgcgcgcgaaaccgagcaatagtgacaataaaacgccggggctagctgagcctgtttgttcgacctgaataatgaagcagctgtgatatgcatgttgtttcg

SEQ ID NO: 19752 - DNA, 519 bp, Zea mays
  Clone ID: LIB3151-014-E4_FLI
ccgcatccaagcccgtgccagctgcagggaacctgcggcgttggcagcaccccgatcctgggccagtgcgtcgagtttctgaggcatcagtgcagcccgacggcgacgccctactgctcgcctcagtgccagtcgttgcggcagcagtgttgccagcagctcaggcaggtggagccgcagcaccggtaccaggcgatcttcggcttggtcctccagtccatcctgcagcagcagccgcaaagcggccaggtcgcggggctgttggcggcgcagatagcgcagcaactgacggcgatgtgcggcctgcagcagccgactccatgcccctacgctgctgccggcggtgtcccccactgaagaaactatgtgctgtagtatagccgctggctagctagctagttgagtcatttagcggcgatgattgagtaataatgtgtcacgcatcaccatgggtggcagtgtcagtgtgagcaatgacctgaatgaacaattgaaatgaaaagaaaaaagtattgttcc

SEQ ID NO: 19753 - DNA, 1543 bp, Zea mays
  Clone ID: LIB3151-015-C12_FLI
catctcgcaagagatcgacaggttcaaggccaccgatgccaataggcttcgtgctgaatacaacagactggtggatggactggcacagcgaggaaatctaccaatatcggatgcttggctcgcgaatccgtctttgcctgatgacatcttgaaggaagctgttcctggaaacataaggagggctgaacattttcttgctgtcttgcggaggcttgtgagattccttgatggccggcttgaaacagaaaatgttgagaatgaaatgccagtttcctttgttgcctcaatccattcccaggctggaatcgaccaaaaaatgctgaggttttgttatgaccggctacactccctaatgatgacattagagataactgatacagatgagttcatgcacatacagaccatatgtgactttgccacactgattggaacttatacacggggcttttctattataatagagccgtatgatgatagaatgcctgatattcgtgatcctgttattcagctgagttgccatgatgcttcactcgcaataagacctgtttttgatcgtttcgaaacggttgtgatcacttctggaactctcagcccaatagatctttaccctcgtctcttgaattttaatcctgtcataagcagaagcttcaccatgtccttaacaagagattgtatttgtcccatggtcttgacccgaggaagtgatcagctacctgtgagtacaaagttcgatatgcgtagtgatcctggtgttgtgaggaattatggccgcctcttgctggaaatggcttctgctgttccagatggcatagtttgcttttttgtcagttattcctatatggatggcattgtcaacagctggcacgaaatgggaattctgcaggacatcatgcaacataaattagtgtttatcgaaacaccagatgtcgttgagacaacattggctcttgataactacagaaaggcatgtgattgtggaagaggtgccattttcttctctgttgccaggggcaaagttgctgaaggtattgattttgatcggcactatggcagattagttatcatgtttggtgttcctttccagtacacattgagtcggatattgcttgctaggttggagtacctgcgggaaacttttcagataaaggagggtgacttcctaacatttgatgctttgaggcaagcggcccaatgtgtcggtcgtgttattcgctccaaagctgattatgggatgatgatatttgctgacaagagatacagtcggcatgataaacggtccaagttgcctgggtggatactctcgcatttgcatgatgcgcacctaaatctgagcactgatatggctctccatatagctcgtgagtttctccggaggatggcacagccatatgacaaggcgggaagcggtggcaagaaaacgctgttaaccgaggaggatctggagaatttggcgcaggatggcatggcgatgtaaaaaaatgagggtactgttgtacatttctttttgtagccattttatggcggtagataacttgtttgaagc

SEQ ID NO: 19754 - DNA, 667 bp, Zea mays
  Clone ID: LIB3151-015-D4_FLI
gccggtccacctgccgccgccggtccacctgccaccgccggtccatgtgccgccgccggttcatctgccgccgccaccatgccactaccctactcaaccgccccggcctcagcctcatccccagccacacccatgcccgtgccaacagccgcatccaagcccgtgccagctgcagggaacctgcggcgttggcagcaccccgatcctgggccagtgcgtcgagttcctgaggcatcagtgcagcccgacggcgacgccctactgctcgcctcagtgccagtcgttgcggcagcagtgttgccagcagctcaggcaggtggagccgcagcaccggtaccaggcgatcttcggcttggtcctccagtccatcctgcagcagcagccgcaaagcggccaggtcgcggggctgttggcggcgcagatagcgcagcaactgacggcgatgtgcggcctgcagcagccgactccatgcccctacgctgctgccggcggtgtcccccactgaagaaactatgtgctgtagtatagccgctggctagctagctagttgagtcatttagcggcgatgattgagtaataatgtgtcacgcatcaccatgggtggcagtgtcagtgtgagcaatgacctgaatgaacaattgaaatgaaaagaaaaaagtattgttcc

SEQ ID NO: 19755 - DNA, 987 bp, Zea mays
  Clone ID: LIB3151-016-A12_FLI
ctagaagcgcccctctccctctctctctctctcttcgccgtccgaagctccgcaccccaatctaatcgacacctcgccgagatgggccgcaagttcttcgtcggtggcaactggaaatgcaatggaaccacagatcaggtcgagaagattgtcaaaaccctgaatgaaggacaggttcccccttcagatgttgtggaggtcgttgtcagccctccttatgtcttccttcctgtggtcaagagccagctgcgccaagagttccatgttgcggctcagaactgctgggttaagaagggaggtgctttcaccggtgaagtcagtgctgagatgctcgtcaaccttggtgttccctgggtcattcttggacactctgaaaggagagctctgctgggagaatcaaatgaatttgttggagacaaggttgcgtatgccctgtctcagggactaaaggtcattgcatgtgttggtgagacacttgagcagagggaggctgggtctaccatggaggttgttgctgcacaaacaaaagcaattgctgagaagatcaaggactggagcaacgtagttgttgcctatgaaccagtttgggctattggaactggtaaagttgccaccccagctcaggctcaggaagtgcacgcctccctgagggattggctaaagaccaacgtcagccctgaggttgctgaatctactaggatcatttacggaggctctgtaactgccgcgaactgcaaagagctagcagcacagcctgatgtcgatgggtttcttgtcggtggagcttctttgaagcctgagttcatcgacatcatcaacgcggccaccgtgaagtccgcttaagatgttacgctgaagacgaacatactttttttttgctcaactgtgctatgtaagctagtagcttttgcgcaggagcagagactgttttgcctgcccccaacttttagcttgagcttgctaataatgtttacctctggacgtatc

SEQ ID NO: 19756 - DNA, 1236 bp, Zea mays
  Clone ID: LIB3151-016-D2_FLI
ccaagcgcgacggatcccaatccatcttctcctcatcccccaccacgaccaaaaaaaatccggtcgccgatgccgtctgctgcctgacatcggtcagccagggtagatcgcgcaggcaggcaggcagccccacacacatacgaaacccaatcctgcttcgatcccgtcggccggcgatggagggccggcggccgggcgcgcccgtggcgggcctgcccatcggcttccgcttccgccccaccgacgaggagctgctgctgcactacctccgccgcaaggcgctggcctgcccgctccccgccggcgtcatctccgacgccgacctcgcgcgcctccacccgtgggacctcctccccgccgccgccgccgcaccaggtaccgtgcctctccatcacacccctccccgcattgccgctcgcgtcccttacctgacgagcacgcgcgaccgaattggatccaaccctgcagggggatccggagccgacgccgacggggagcgcttcttcttccaccgcccggcgacgcggtgctggcgcaagggcggcggcgcggccagggcggccggcaccggcgtctggaggccgtccggcaaggagaccctcgtcctgtccccgcgctgcaagcgccccgtcggcaccaagcggacgctcgtattctgcccccgccgcggccgcgcccgcacccactgggccatgcacgagtaccgcctcctccccgccggcctccacccctatggctgcgccgccggcgccggcgccaacgcgcctccgcccactaatgtgagctcccacggcggcgacgcggcggccgactgggtggtctgccgcattttcaggagggccaggccggcccaccgcgcccgccttggtggtggcgccagggaggaactagaagaggagcaggcggcggaggagagcccgtcgtccccgtcgtcctgcgtcaccgacgcctccgagaccctcgaccaggaagaggatgacggcgacgaagggagcagcagcagcaccgtcgcctcctctaactgagactgagtagaagagttggctagccccctgtcgatcagatcgcgggcgccatgttctaattgccgtagaagcctcatcatcagtacctagttgcaaatcaatagagagacaagaagatcggcctccaacaaaccaacaaaaaaaaaaagctaagcgctttggtggtatgttgctgttggagctcgtcgcgaatccatattgttaattagcg

SEQ ID NO: 19757 - DNA, 857 bp, Zea mays
  Clone ID: LIB3151-017-A12_FLI
gcagaagaacccgatcgacaccatgagggtgttgctcgttgccctcgctctcctggctctcgctgcgagcgccacctccacgcatacaagcggcggctgcggctgccagccaccgccgccggttcatctaccgccgccggtgcatctgccacctccggttcacctgccacctccggtgcatctcccaccgccggtccacctgccgccgccggtccacctgccaccgccggtccatgtgccgccgccggttcatctgccgccgccaccatgccactaccctactcaaccgccccggcctcagcctcatccccagccacacccatgcccgtgccaacagccgcatccaagcccgtgccagctgcagggaacctgcggcgttggcagcaccccgatcctgggccagtgcgtcgagttcctgaggcatcagtgcagcccgacggcgacgccctactgctcgcctcagtgccagtcgttgcggcagcagtgttgccagcagctcaggcaggtggagccgcagcaccggtaccaggcgatcttcggcttggtcctccagtccatcctgcagcagcagccgcaaagcggccaggtcgcggggctgttggcggcgcagatagcgcagcaactgacggcgatgtgcggcctgcagcagccgactccatgcccctacgctgctgccggcggtgtcccccactgaagaaactatgtgctgtagtatagccgctggctagctagctagttgagtcatttagcggcgatgattgagtaataatgtgtcacgcatcaccatgggtggcagtgtcagtgtgagcaatgacctgaatgaacaattgaaatgaaaagaaaaaagtattgttcca

SEQ ID NO: 19758 - DNA, 1184 bp, Zea mays
  Clone ID: LIB3151-018-G12_FLI
gagcggcagcacacccacagctacgactacgactacgagcacctcgtgctcgacccggcgtctctgggcgtgccgtgggccgacccggccgccgtggagatcccgccgcagctcctcgccgcgctcggggagtacctctccggctccgcggcccgcggggacgtcgaggcggaggcggaggcggacgacgagttcatgatgcacgagttcaaggtgcggcggtgcgcgcgcgcgcggagccacgactggacggcgtgcccctacgcgcacccgggcgaggccgcgcggcgccgggacccgcgccgcgtcgcctacgcgggggagccgtgcccggacttccggcgccgcccgggcgccgccgccgccgccgccgcgtgcccgcgcggggccgcctgcccgctcgcgcacggcaccttcgagctgtggctccacccgtcccgctaccgcacccgcccctgccgcgcgggcgccgcctgccgccgtcgcgtctgcttcttcgcgcacgccgcggccgagctccgcgccgccgccgccgccaagcccaagcccaaggacgggtgctctccgctcgcgctctcgctctccctctcgcccaagtccaccctgcaggcggcgctctgggagtcgccgccggtgtcccccgtggagggccgcaggtgggtcgacgagccgtcggaggacggcgacgccgacgccgagatggaggagctgatgttcgcgatgcgggagctcagcttcaggaaggcccaggcgtcgccagcgccggttctgcctgcagtcacagaggacgacgggccggacttggggtgggtgtcggagctggtgatgtaggcgaggcatgccagcgcctgcccggtgccgacggccgaaattaatcaaagccaagacgtggacgccgccatctcctgaggcgcctctcgccgttcggaacagcttcattaagcaatgtttatttttagcatttccatgaattgcatcattcttctgtggatagaccaaacatggtgcaagtattaatactgcaatctgtaagcgtggcgtgtgtgccccccttcttctcttttttttccggagaccatggcctcactcaacatgctactgtcgtccatggttttcgttcgatcgtgttactactaccagtaccagtgtgtacgtatataccaagtgcagttggcagtgtgttc

SEQ ID NO: 19759 - DNA, 936 bp, Zea mays
  Clone ID: LIB3151-018-H6_FLI
caaaaacacacaaagggaagtgcactagcaacttcctaacaacaatggctaccaagatattagccctccttgcgctcctttccctttcagtgagcgcaacaactgcattcattattccacaatgctcacttgctcctaatgccattattccacagttcctcccatcagttacatcaatgggcatcgaacaccctattgtgcaagcctataggctacaacaagcgcttgcggcgagcgtcttacaacaaccgtttgcccaattacaacaacaatccttggcacatctaaccatacaaaccatcgcaacacaactagagcaacagtttgtgcccgcattgagccaactagccgcagtgaaccctgtctcctacttgcaacagcaactgcttgcatccaacccacttgctctggcgaacacagccgcataccagcaacaactacagttgcaacagtttctaccagctcttagtcaactagccatggtgaaccctgccacatacctgcaacagcaacaactgctttcatctagcccactcgctgtgggcaatgcggctacatacctgcaacagcagctgctacaacagatcgtaccggctcttagtcagctagttgtggcgaaccctactgcctacttacaacagcttcttccattcaaccaactagatgtggcaaactctgctgcgtacctacaacagcggcagcaactacttaatccacttgcagcggctaacccattggtcgccgccttcctgcaacagcaacaatttctgccatacaaccaaatctctttgatgaaccttgccttgtcaaggcagcaaccgatcgttggaggtgccatcttttagattacaaatgagatgtacttgataacattgccctcataccggcatgtgcaacttcctataaataatcaatatattgattgagatttatctt

SEQ ID NO: 19760 - DNA, 781 bp, Zea mays
  Clone ID: LIB3151-019-A11_FLI
cccatctccaccgcgccacgaatccgcgccgggccctgccctccgtccgcccagccatccctgcggctccggccgaggccgtccccggcagccgcggccgccgtccaggcggagcaccagcccgcgttgaccgcggcgccgaagccacccgcgctaccgttccgcgtgggccacggcttcgacctccaccgcctggagcccgacctcccgctcatcatcggcggcatcaacatcccccacgaccgcggctgcgaggctcactctgacggcgacgtgctgctgcactgcgtggtggacgcgattctcggcgcgctggggctgccagacatcggccagattttcccggactccgacccccgttggaagggcgccgattcttcggtgttcatgagggaagctgtgaaattgatgcatgaagcaggctacgagctgggcaaccttgatgctacgctgatcttgcaaaaaccaaaaattagcccattcaaggagacaatccgatcgaatttgtgcgacctacttggggcagatccatctgtggtcaatctcaaggccaagacgcacgagaaagttgacagtctaggggagaacaggagcatagctgctcatactgtagttctcctgatgcgaaagtagaaagaacaaatggcagctaattgtatcatgctacacggaaaaggttgttatcttatacttgtgattgttgagtgatctagccagtatggaaaatcttcatgtggtagaaacaataaagctgattgcaatgagaatttttctgtatttc

SEQ ID NO: 19761 - DNA, 627 bp, Zea mays
  Clone ID: LIB3151-019-D2_FLI
gtggttgcttactgagagaatgcaacatcgagcattctgtgattggagtctgctcacgtgtcagctctggatgtgaactcaaggactccgtgatgatgggagcggacacctatgaaactgaagaagaagcttcaaagctactgttagctgggaaggtcccagttggaataggaaggaacacaaagataaggaactgtatcattgacatgaatgctaggattgggaagaacgtggtgatcacaaacagtaagggcatccaagaggctgatcacccggaagaagggtactacataaggtctggaatcgtggtgatcttgaagaatgcaaccatcaacgatgggtctgtcatatagatcggctgcgtttgcgtctacaaaacaagaacctacaatggtattgcatcgatggatcgtgtaaccttggtatggtaagagccgcttgacaggaagtcgagcgttcgggcgcaagatgcgttgtctggcatgctgttccttgaccatttgtgctgctagtatgtactgttataagctgcctagaagttgcagcaaacctttttatgaacctttgtatttccattacctgctttggatcaactatatctgtcatcctatatattactaaattttt

SEQ ID NO: 19762 - DNA, 687 bp, Zea mays
  Clone ID: LIB3151-019-F1_FLI
ttctgtgagggcaatctgtaccaagtttggaggaacgcaagttgcactgttactctgcagctgcctacaggaggtcagcgtcgcgttgcggaaaatgagatattggtgctgaggtattatcctcgacggcagccttgctgggatgtggtgaagaacctgggaggtcactcactttttgttggaaggaacaatgcagtgtcaatgtatgcagagggtgtgccaggattgaggggcaactgtgtatactggataggtgggcgcggtagggatcaaggcatggtctttgacatggaatctgggagctccacgccgtgcagggctcctcctgttagccttttacctgggcatccacatagcacaatctgctggtacttcttgagcgatttaatgagcatcaacaacagctacaacagtagctgcagcagcggcagcagcagcggaggaagaaaagtttatcagactcgagcaagagcacgagcagatcttggacatgacatggaagaatgattgcatcgctgaacttctcggcgacatagtgaggaccaccaagcaccttagtggaaattgagtttattgcttgtagtcttgggagtcagagcttgatttcaaggcgaagcaaaatcttgtagagaaggctgaggaactgcctcgtgtagcctgtttcctaaaatagtgttcagtttgttt

SEQ ID NO: 19763 - DNA, 1110 bp, Zea mays
  Clone ID: LIB3151-020-E3_FLI
catccatcattttagctgttgatacaaagagaagggaatggccgagataaccctagagccgagtgatcttatggcgcaaacaaacaaaagaatagtgccaaagttcactgaaatcttccccgtggaggacgcgaactacccttacagcgccttcatcgcgtcggtccggaaagacgtgatcaaacactgcaccgaccataaagggatcttccagcccgtgctgccaccggagaagaaggtcccggagctatggttctacacagagctcaaaactaggaccagctccatcacgctcgccatacgcatggacaacctgtacctcgtgggcttcaggaccccgggcggggtgtggtgggagttcggcaaggacggcgacacccacctcctcggcgacaaccccaggtggctcggcttcggcggcaggtaccaggacctcatcggcaacaagggtctggagaccgtcaccatgggccgcgccgaaatgaccagggccgtcaacgacctggcgaagaagaagaagatggcgacactggaggaggaggaggtgcagatgcagatgcagatgccggaggccgctgatctggcggcggcggcagcggctgacccacaggccgacacgaagagcaagctggtgaagctggtggtcatggtgtgcgaggggctgcggttcaacaccgtgtcccgcacggtggacgcggggttcaacagccagcacggggtgaccttgaccgtgacgcaggggaagcaggtgcagaagtgggacaggatctccaaggcggccttcgagtgggctgaccaccccaccgctgtgatccccgacatgcagaagcttggcatcaaggataagaacgaagcagcgaggatcgttgcgctcgttaagaatcaaactactgccgctgccgctactgctgccagtgctgacaacgacgacgacgaggcctgatcaatgcaacgacacatcatgatctgctgctgcacttaattactatgttcgtatacaaataaatacacccggcgtacgcggtgttccttatatggtctaaaatgtagccagtaaattttaaactactttatttcttgaggctctataaacaatagatttaaagtgtt

SEQ ID NO: 19764 - DNA, 1140 bp, Zea mays
  Clone ID: LIB3151-022-A5_FLI
ctcatctgcgtacacggtctccctcttcctgtcagtagtagagtgagagtgaggcagcgagtgggagacaaggggaaatggggaagggagcgcaagggagcgatgcggcggcggcgggcggcgaggtggaggagaacatggcggcgtggctggttgccaagaacaccctcaagatcatgcccttcaagctcccgcccgtcggcccttatgatgtccgcgtgcgcatgaaggcagtggggatttgcggcagcgatgtgcactacctaagggagatgcgcatcgcgcacttcgtggtgaaggagccgatggtgatcgggcacgagtgcgcgggcgtggtcgaggaggtgggcgccggcgtgacgcacctgtccgtgggcgaccgcgtggcgctggagccgggcgtcagctgctggcgctgccgccactgcaagggcgggcggtacaacctgtgcgaggacatgaagttcttcgccaccccgccggtgcacggctcgctggcgaaccaggtggtgcacccggccgacctgtgcttcaagctccccgacggggtgagcctggaggagggcgccatgtgcgagccgctgagcgtgggcgtgcacgcgtgccgccgcgcgggggtggggcccgagacgggcgtgctcgtggtgggcgccggccccatcggcctggtgtcgctgctggcggcgcgggccttcggcgcgccgcgcgtggtggtcgtggatgtggacgaccaccgcctggccgtggccaggtcgctgggcgcggacgcggccgtgcgggtgtcgccccgcgcggaggacctggcggacgaggtggagcgcatccgcgcggccatgggctcggacatcgacgtcagcctggactgcgccgggttcagcaagaccatgtcgacggcgctggaggcgacgcggcccggcgggaaggtgtgcctggtcgggatgggccacaacgagatgacgctgccgctgacggcggcggcggcgcgggaggtggacgtggtgggcgtgttccggtacaaggacacctggccgctgtgcatcgacttcctgcgcagcggcaaggtggacgtcaagccgctcatcacccaccgcttcggcttctcgcagcgggacgtggaggaggccttcgaggtcagcgccc

SEQ ID NO: 19765 - DNA, 864 bp, Zea mays
  Clone ID: LIB3151-022-D1_FLI
ccgccgcctccgccgcccccgccgccggaggaggtcgagatgcgggtctacatgcactgcgaagggtgcgcccgcaaggtcaagaagatcctcaggcgcttcgacggagtggaggatgtgatcgccgactccaaggcgcacaaggtgctggtgaaggggaagaaggcggccgccgaccccatgaaggtggtggagcgcgtgcagaagaagactggccgcaaggtcgagctgctgtcgccgatgccgcccccgccggaggtggaggagaagaaggaagatgaggcggagaagaagaaggacgatgagaagaaggcagagcccgagccgccgaagccggaggagaagaaggatgcaggcggagccggaagcgaggagaagaaggacggcaaggaggaggaagagaagaaggacggcggcgagaagaatgaggagaagaaggacggcggcgacggagacggcgacaagaaggacgaggccggcgacaaggacaaggacccggccgccagcctgtacatgcactacccgcggttcccgttcgctggagggtactaccagccgccggcctacccgccgcctccggggtacccgtacgcctaccagccggcctacccgccgccgttctacgcgccgccgcaccaccacctgcaccagcagcagcccatggcgccgcagatcttcagcgacgagaaccccaacgcctgctccgtcatgtagttgtcactcaaatgtcatgtaaaaaaaaaaagaaccgtaggaccctgtctttgcgcggggtcctggcgtcctgcccctgccagagcgaaggaccctgtctttgccagaaatgcccctgggcaaccaagctaatggcgactttgtttgaac

SEQ ID NO: 19766 - DNA, 908 bp, Zea mays
  Clone ID: LIB3151-022-F10_FLI
ctgggtcttcagaccattagctttatctactccagagcgcagaagaacccgatcgacaccatgagggtgttgctcgttgccctcgctctcctggctctcgctgcgagcgccacctccacgcatacaagcggcggctgcggctgccagccaccgccgccggttcatctaccgccgccggtgcatctgccacctccggttcacctgccacctccggtgcatctcccaccgccggtccacctgccgccgccggtccacctgccaccgccggtccatgtgccgccgccggttcatctgccgccgccaccatgccactaccctactcaaccgccccggcctcagcctcatccccagccacacccatgcccgtgccaacagccgcatccaagcccgtgccagctgcagggaacctgcggcgttggcagcaccccgatcctgggccagtgcgtcgagttcctgaggcatcagtgcagcccgacggcgacgccctactgctcgcctcagtgccagtcgttgcggcagcagtgttgccagcagctcaggcaggtggagccgcagcaccggtaccaggcgatcttcggcttggtcctccagtccatcctgcagcagcagccgcaaagcggccaggtcgcggggctgttggcggcgcagatagcgcagcaactgacggcgatgtgcggcctgcagcagccgactccatgcccctacgctgctgccggcggtgtcccccactgaagaaactatgtgctgtagtatagccgctggctagctagctagttgagtcatttagcggcgatgattgagtaataatgtgtcacgcatcaccatgggtggcagtggcagtgtgagcaatgacctgaatgaaccattgaaatggaaaggaataatatataaggaaaaaagatgattgg

SEQ ID NO: 19767 - DNA, 1478 bp, Zea mays
  Clone ID: LIB3151-023-F1_FLI
ctcccacccaacaacaaaacaagcctaatggcttcctctccatctcacgccactgcggttgcctacttgccctagaaccctcgccgccgcccctctttaggattcccatgtccctggtcgccccctgacacgcccgccccggatcctgcacccgaattccgcgtggaattccgggccgaaccgcctctctgcgtgcgcctccgaccaccaaactctctctctcacacgcgcgcgcgcgcgcacgtctgaggcggtttgattctccggtgggggttccttggtctcgaactctcgatttgctgctgatgggggtgccgaagcagcgctggacgccggaggaagaggccgcgctcaaggccggtgtcgccaagcacgggcccggcaagtggcgcaccatcctccgggactcggacttcagcgcgctcctgcgcctccgctccaatgttgacctcaaggacaagtggcgcaacttgagcgtcaccgcaggaggttacgggtctagagagaaggcaaggatggcgttgaaaaaaggcaggcgcgtggtgcctaagcttactgctgacccaatggatgtagatgagaaggatatggacaacgctcatgacacagtcattgatgtggaaccgttagcaatggctttcgagcccttgccacttttggaaagcccagataagtcagttgctaggctcgatgatctcatagtagaagctataaggaagcttaacgagccatctgggtccaataaggcagtcattgctggatatattgaggtaaaccaaaagtacagaattgcaccaagttcttccttgggcggaataagcactaaggtatcctcttctgaagggatgaacacagaaaataataatgttaaacggctaactaagcctcaagtggttgctgaactggagaagatgaaaggcatgaccagggaagaggctgctgcctttgctgccaaggcagttgccgaggcagaagtagcaatggcagaagctgaggaagcagcaagagttgcagaggctgcagaaaatgatgctgaagctgcaaaggcttttcttgatgctgtcattttgtcaatgagaaacaggaacgctgcttccatgatacttcgagcttgctgatccttcacccatgcagcacaccgatgttctgctgcaaagattttctggatagatgagtttcttgtatagccttatagatcatggcgggttttcaacagcttgctgttgtcctgtgctgtgcagccaatcgacaacatgataacaagaatgatcgagaaagtagtcttcatttttttttgtttcccattgtgttgctttgtaattaaactatagccttttcccttcattagttgatgaagtgatgtcgtctaatagaacaactgtagtgaaaagaaaatgtcagaaagccgccttagttaatgcaaattgctgtgatattatttttgcagaaatgattatatggtgacagcgtttaagatt

SEQ ID NO: 19768 - DNA, 1322 bp, Zea mays
  Clone ID: LIB3151-024-C2_FLI
gtagaattcagatccctcctaccacatccgttccccccttcccttccctcctctcgcgcgccggctccacgcagatccaggagatatgcctcgctatgatgaccgctatggaggcacgcgcttgtatgttggcagattggccactcgtactcgttcccgcgatttagaacatctgtttggcagatatggaagaatacgagaagtggagttgaagcgtgactatgcatttattgagttcagtgattatcgcgatgctgatgaggctcgataccagctagatggcagggatgttgatgggagtcgtattgttgttgagtttgctaaaggggtcccacgtggttcaggtggctcacgtgaatatatggggagaggccctccaccaggtacaggtcgttgtttcaactgtggagttgatggtcactgggcaagagactgtaaagctggtgactggaaaaacaaatgctaccgttgtggagaaaggggccatatagaaagaaattgccagaacagtcctaggagtctcaggcgagagagaagttactcacggtccccatctccccgccgtggacggggccgcagtcgaagctatagcaggagcaggagccggagtcggagctatagtcgatcaagatccctgtctagatctcctaggggaggtcgccgtgaccgtgacgataggagatcaaggagtcctagctacagcaggagccccatgcgatctgcctcgccaccagtaaaggaaaaggagcgcagccccgcacctgatggaagcaggagcccaaggagtcggagcccccaggatcaggtgatgagcccaccaccaaaggataatggcgaaggcaatggctcagaccgtggcggcagccccagagggagggagaacagcaggagccgcagccgcagtccatctggtagtaaccgcagccctgcggccaatggacgtagccggagtcctggaggtgagcggagcccgagtcctggaggtgagcggagcccgagtcctggaggtgaccgtagcccaagccccaatggcaatggtaacaatgatgctgctgctgatgtcgatgctgatgctgctgcccgcggtggctcccccactggaagcaagtcaccctgagcgctggcggtcccagattgtggtggtgcttctcaatgcaatgggcaatcgtattgctattttttgctaccatatcaaagacacaatagctacatcattttcttctctgaaacaatgactttattttgcttgctttgagatatgactcttaccctctcatggataatatatatatgatatgatgccactggtgcttgcttgcatc

SEQ ID NO: 19769 - DNA, 1355 bp, Zea mays
  Clone ID: LIB3151-024-E3_FLI
gcacggggaacagaacaccgatcgatcgatccctcgagaagcagagacaagtagcccgcccgtccgcccgcacacatagagacagagagaatcaagccgccgccgaccagtgacatggcgccctgggccattgccatccacggcggcgcgggcgtggacccgaacctcccggagcaccggcaggaggaggcgaagcgcgtgctggcgcggtgcctgcaggtgggcgtggacctgctgcgcgcgggcgcgcaggcgctggacgtcgtggaggccgtggtgcgcgagctggagacggaccccttcttcaactcggggcgcgggtccgcgctcacccgcgccggcaccgtggagatggaggccagcatcatggacggccgcggccgccgctgcggcgccgtgtccggcgtctccaccgtcaagaaccccgtgtccctggcgcgccgcgtcatggacaactcgccccactcgtacctcgccttcgacggcgccgaggagttcgcccgtgcgcagggcctggagaccgtggacaacagctacttcatcacggaggacaacgtcggcatgctcaagctcgccaaggaggccggcagcatcctgttcgactaccggatcccgctggcagggacggacacgtgcagcgcgctggcgggcgcggcggacagcaacggcggcggcgtgcacaaggcggggatggtcatgaacgggctgcccatcagcgtgtacgcgccggagacggtggggtgcgcggtggtggacgcgacgggggcctgcgcggcggccacgtccacgggcgggctcatgaacaagatggccggccgcatcggggactcgccgctcatcggctccggcacctacgcgtgcggcgcctgcgccgtgtcgtgcacgggcgagggcgaggccatcatccgctgcacgctcgcgcgcgacgtggccgccgtcatggagtacaggggcctgcccctgcagcaggccgtcgactactgcgtcaaggagcgcctcgaccagggattcgccggcctcatcgccgtctccggcaccggcgaggtggcgtacggattcaactgcaccggcatgttccggggctgcgccaccgaggacgggttcatggaggtcggcatctgggagtgagctggaggccccgccatctaaacacaaatcaaaatcagtgtgcgtgcagctgcatgtggccatcctgcgattgccatgtgtttaatctccgggtcacaggtgttgtcgatgatccaccactagtagtagcgattgcatggagattggtgctcgggtcaataatgatggtgattgtgacggagtgccctggaaaataattaataattcgtgtgaaaaagttgattaac

SEQ ID NO: 19770 - DNA, 829 bp, Zea mays
  Clone ID: LIB3151-026-A5_FLI
agaaatgtactttcttatttctgggaagccacaaacatcagacaaaaaactttattattgaactataactcataagaaatctaaaagatgacacacctgggtacggttcatcccacgctgaagatgatgcacatggttttgttgttctcgatgatggtgttgagtccggtgaagattttgatgaaaaatcaggccacccttcagatcctgcagacagcaggagctgtgatactggcgcctcatgcaaatgttggttgaagaagcatatgacatgcttgtataaccaagcaaaggaaacaaatgctatctggtctgtggtggttgcagctgcactagttggtattgtgattttgggacgttggcacaaagataaattgcaccttaaccagcttaagtggcgctctggctcagcagtgagaggatgatcaacaagtcgtttgtgctgctctgatgaatcaattcaattcaagccataaccaagacggtttccgcaatgttattgtgatgatgacgaaaaggggtatgttcaatgcaataatatgatgttcgactggaatttcacttaccgccctacaatgagtgcctcgtgggcttctaagatgtcaaatccacttctgccatacacattatcttacagctttacttgcgacctggcacatgatttttggttcctggtacttttgctgtggtatatcatatatgttgactaaatggctgtagaacgtagcaggattgcatactgcgaagtctgttaaaaaacttggtggttctgcgagagcaactcacatgcaattgtgaaaatggagaacaaggaaaatttatttggctt

SEQ ID NO: 19771 - DNA, 823 bp, Zea mays
  Clone ID: LIB3151-027-D8_FLI
ccagatccctgttcgtcttcggccccttcggagggaacgactacaatgccatgctcttcttcgggctcaccatggatcaggcaaggaactacacgcccaagatcgtcgacaccgtcgccagcggcgtcgagcaactcatccagctgggcgcagtggacatcgtcgtcccgggagcgctgcccgtggggtgcttcgccatctacctcacgtttctcccgagcgacgacccggccgactacgacgggcacgggtgcctgagggcgctcaacgagctgtccgtctaccagaactccctgctccagagcaggctcgccgccctccaggcaaggtatccctcggcgaggatcgtgtacgccgactactacacccacatcgaccggctggtgcgcagcccggcgcgcttcggcttcacaactggcgccgtcccggcgtgctgcggcgctggtggcggcaagtacaacttcgagctcgacgcgcggtgcggcatgaagggcgccaccgcgtgccgggacccgtcgaggcacgagtcctgggacggcgtccacctgacggaggccgtgaacaggctcatcgccgagggatggctcagaggcccgtactgccatcctcccattgcgactcagtcgatagcgtaggtcacccccggcccatgcggggttgcggccatggtaagactgacacgagccttccctgacatacagtggcatggtggcgtagtgttgtaccgtatttacgaagtgaaaatctaaaagcttaaatcataaaaaaaactccctaaactctgatttagtatgttgctaaatacatattaggaataaaatcc

SEQ ID NO: 19772 - DNA, 885 bp, Zea mays
  Clone ID: LIB3151-031-H11_FLI
cagaccattagctttatctactccagagcgcagaagaacccgatcgacaccatgagggtgttgctcgttgccctcgctctcctggctctcgctgcgagcgccacctccacgcatacaagcggcggctgcggctgccagccaccgccgccggttcatctaccgccgccggtgcatctgccacctccggttcacctgccacctccggtgcatctcccaccgccggtccacctgccgccgccggtccacctgccaccgccggtccatgtgccgccgccggttcatctgccgccgccaccatgccactaccctactcaaccgccccggcctcagcctcatccccagccacacccatgcccgtgccaacagccgcatccaagcccgtgccagctgcagggaacctgcggcgttggcagcaccccgatcctgggccagtgcgtcgagttcctgaggcatcagtgcagcccgacggcgacgccctactgctcgcctcagtgccagtcgttgcggcagcagtgttgccagcagctcaggcaggtggagccgcagcaccggtaccaggcgatcttcggcttggtcctccagtccatcctgcagcagcagccgcaaagcggccaggtcgcggggctgttggcggcgcagatagcgcagcaactgacggcgatgtgcggcctgcagcagccgactccatgcccctacgctgctgccggcggtgtcccccactgaagaaactatgtgctgtagtatagccgctggctagctagctagttgagtcatttagcggcgatgattgagtaataatgtgtcacgcatcaccatgggtggcagtgtcagtgtgagcaatgacctgaatgaacaattgaaatgaaaagaaaaaagtattgttcc

SEQ ID NO: 19773 - DNA, 574 bp, Zea mays
  Clone ID: LIB3151-034-E9_FLI
ggcaataccccactcaaccaccgcagctaagcccgtgccagcagttcggatcctgcggcgtcggcagcgtcggcagcccgttcctgggccagtgcgtcgagttcctgaggcaccagtgcagcccggcggcgacgccctacggctcgccacagtgccaggcgctgcagcagcagtgctgccaccagatcaggcaggtggagccgctgcaccggtaccaggcgacatacggtgtggtcctgcagtccttcctgcagcagcagccgcagggcgagctcgcggcgctgatggcggcccaggtagcgcagcagctgacggcgatgtgcggcctgcagctgcagcagccaggtccctgcccttgcaacgcagctgccggcggtgtctactactgaggaaactatgtactgtagtaataatgtaatggagccgctgactagctacctagctcgctagtttactcatttagcggcgatgagtaacgtagtgtcacccatcaccatgggtggcagtgtgagcaatgacctgaatgaaccattgaaatggaaaggaataatatataaggaaaaaagatgattgg

SEQ ID NO: 19774 - DNA, 545 bp, Zea mays
  Clone ID: LIB3151-035-F3_FLI
ccggcgggctgtacccctacgcggagtacctgaggcagccgcagtgcagcccgctggcggcggcgccctactacgccgggtgtgggcagacgagcgccatgtaccagccgctccggcaacagtgctgccagcagcagatgaggatgatggacgtgcagtccgtcgcgcagcagctgcagatgatgatgcagcttgagcgtgccgctgccgccagcagcagcctgtacgagccagctctgatgcagcagcagcagcagctgctggcagcccagggtctcaaccccatggccatgatgatggcgcagaacatgccggccatgggtggactctaccagtaccagtaccagctgcccagctaccgcaccaacccctgtggcgtctccgctgccattccgccctactactgattcatgatatttgggaaatctcctctatccatccctctctatctatatatgtaataatgcagtaagacgacacacattatcatgtgtggtatgaccaataatatatgcatcataataaagttttggttttaaagaatt

SEQ ID NO: 19775 - DNA, 777 bp, Zea mays
  Clone ID: LIB3151-038-C9_FLI
ctcgctcactgactgactactgtaataccagagatcgaacaacttggtcctgcagctcaagaagagagttttgtgcatttgggggccgggggcaagagagagagagagagagccatggcggcggaccagcagccgcagctgcaggaggagatgaacgacgccggttcatctgccgccgccaccatgccactaccctactcaaccgccccggcctcagcctcatccccagccacacccatgcccgtgccaacagccgcatccaagcccgtgccagctgcagggaacctgcggcgttggcagcaccccgatcctgggccagtgcgtcgagtttctgaggcatcagtgcagcccgacggcgacgccctactgctcgcctcagtgccagtcgttgcggcagcagtgttgccagcagctcaggcaggtggagccgcagcaccggtaccaggcgatcttcggcttggtcctccagtccatcctgcagcagcagccgcaaagcggccaggtcgcggggctgttggcggcgcagatagcgcagcaactgacggcgatgtgcggcctgcagcagccgactccatgcccctacgctgctgccggcggtgtcccccactgaagaaactatgtgctgtagtatagccgctggctagctagctagttgagtcatttagcggcgatgattgagtaataatgtgtcacgcatcaccatgggtggcagtgtcagtgtgagcaatgacctgaatgaacaattgaaatgaaaagaaaaaagtattgttccaaatt

SEQ ID NO: 19776 - DNA, 1772 bp, Zea mays
  Clone ID: LIB3151-038-E4_FLI
ccccccgcgagctctatctttcgtggcgcagctcggcagctgggcggccgccccccgccggcgccacgccctaagctacgccaggttcccagttcttcgtccgtccttttgctaggtcttcgttggacacttaaacggcgacgagcaccgccagacgcgctggtgcctggatccggcgggagtgcttcaggttttgacggttcgtctctctcgttgtttccggcggggttatgaaggcggtgggatacagcccctacgacagcagcgcacaaaatagaggactaagagggcgatctttcagtgggaatgtcgtagcatctgctggggcatttccttacatgagggcaaataatgatctggagagtgaaatacatcgggttgagcaagatgcatatactggtattcttagggcatttaaagtgcaatctgatgcaatatcctgggaaaaggagagcttgattactgaactcaggaaagaactgagggtttctgatgaggagcatagggagctattaaataaagtcaatgaagatgggaccatccgtcgaatgagggagttaagacaggcaggtggatccccaagtggtttgcatcatggcaacatggttttatatggtgcagaacctgggtccactaccaagaggcaaagggcatctcattcgattcctttgcaatcagcaggcctccagtcccctatgatgccctcccactcagtttcatctgcaaaatggggtcctttgcaagcaagaggcacgaaagcgaggacgcccattcctttggcgttaccatctgtggatccaagttcactaataaaccataaagtttatacaaggtggccagaagacaacaacttctatgaggccaccataacacgatataaccctgtgacgggtgagcatggacttgtctatgacatgggcacacaagccgagagttgggaatcagttagactttgtgatatggcacctgaagatataagatggggatttgatggacacctttcaaatcgtgatgtctggagcccttctggccctatgttgatgaggcacatgaccaacaatggtgctatggcaggttcaatcaagggaagagggaggttatcaataaatgagactataaaggactatgctccacctgaaaatggcaccaataggaattttgatcatgtcgacataccaaataccggaagtgttgttatggaggtgaagagggtattgttcaacccaaatatgcctgaaatcgagaaggcaaggaaacttttgaaagatcaggagcagtcattacttgatgcaattgccagacttgatgaagcatctgatagcgataatgaagatatggccatggaaggccgaatgggttctgctggggaaaggaatggcatcactacgtagttgcttctggcatgttggaattttggtagattaacatgcatttgtgtagcacctacctcgaccgcagaacaaggaaaccacattatggcaaaactgcatgccagaaaatggtgtcctggaaacggttgacgcctgaaatgggattttttggctacacaaaattgagcgcacgagcggcagagatgcaaatgttaaagaactgtttaagcgccattgcatggtgtttcctatgtagcaaactagaggcaactaaatgttctagttgatcattagcatggagcacttagcattcctgattcagtacaggtagatgtctaacactccagcataatatccaacttggctgttcttgtactctaatgtgaaaaaggattgttgtgc

SEQ ID NO: 19777 - DNA, 1116 bp, Zea mays
  Clone ID: LIB3151-038-F6_FLI
cttcctgtcagtagtagagtgagagtgaggcagcgagtgggagacaaggggaaatggggaagggagcgcaagggagcgatgcggcggcggcgggcggcgaggtggaggagaacatggcggcgtggctggttgccaagaacaccctcaagatcatgcccttcaagctcccgcccgtcggcccttatgatgtccgcgtgcgcatgaaggcagtggggatttgcggcagcgatgtgcactacctaagggagatgcgcatcgcgcacttcgtggtgaaggagccgatggtgatcgggcacgagtgcgcgggcgtggtcgaggaggtgggcgccggcgtgacgcacctgtccgtgggcgaccgcgtggcgctggagccgggcgtcagctgctggcgctgccgccactgcaagggcgggcggtacaacctgtgcgaggacatgaagttcttcgccaccccgccggtgcacggctcgctggcgaaccaggtggtgcacccggccgacctgtgcttcaagctccccgacggggtgagcctggaggagggcgccatgtgcgagccgctgagcgtgggcgtgcacgcgtgccgccgcgcgggggtggggcccgagacgggcgtgctcgtggtgggcgccggccccatcggcctggtgtcgctgctggcggcgcgggccttcggcgcgccgcgcgtggtggtcgtggatgtggacgaccaccgcctggccgtggccaggtcgctgggcgcggacgcggccgtgcgggtgtcgccccgcgcggaggacctggcggacgaggtggagcgcatccgcgcggccatgggctcggacatcgacgtcagcctggactgcgccgggttcagcaagaccatgtcgacggcgctggaggcgacgcggcccggcgggaaggtgtgcctggtcgggatgggccacaacgagatgacgctgccgctgacggcggcggcggcgcgggaggtggacgtggtgggcgtgttccggtacaaggacacctggccgctgtgcatcgacttcctgcgcagcggcaaggtggacgtcaagccgctcatcacccaccgcttcggcttctcgcagcgggacgtggaggaggccttcgaggtcagcgccc

SEQ ID NO: 19778 - DNA, 891 bp, Zea mays
  Clone ID: LIB3151-039-D9_FLI
ggtcttcagaccattagctttatctactccagagcgcagaagaacccgatcgacaccatgagggtgttgctcgttgccctcgctctcctggctctcgctgcgagcgccacctccacgcatacaagcggcggctgcggctgccagccaccgccgccggttcatctaccgccgccggtgcatctgccacctccggttcacctgccacctccggtgcatctcccaccgccggtccacctgccgccgccggtccacctgccaccgccggtccatgtgccgccgccggttcatctgccgccgccaccatgccactaccctactcaaccgccccggcctcagcctcatccccagccacacccatgcccgtgccaacagccgcatccaagcccgtgccagctgcagggaacctgcggcgttggcagcaccccgatcctgggccagtgcgtcgagtttctgaggcatcagtgcagcccgacggcgacgccctactgctcgcctcagtgccagtcgttgcggcagcagtgttgccagcagctcaggcaggtggagccgcagcaccggtaccaggcgatcttcggcttggtcctccagtccatcctgcagcagcagccgcaaagcggccaggtcgcggggctgttggcggcgcagatagcgcagcaactgacggcgatgtgcggcctgcagcagccgactccatgcccctacgctgctgccggcggtgccccccactgaagaaactatgtgctgtagtatagccgctggctagctagctagttgagtcatttagcggcgatgattgagtaataatgtgtcacgcatcaccatgggtggcagtgtcagtgtgagcaatgacctgaatgaacaattgaaatgaaaagaaaaaagtattgttcc

SEQ ID NO: 19779 - DNA, 1322 bp, Zea mays
  Clone ID: LIB3151-039-G2_FLI
cttcacgactccggtcggccgtcagctcgattcgccttcccccccacctcccccgccctccgatgacggggcgtccgtgggcgggcgcgccgccgccgcctcttcctctcgccgtcgccgtgggcgtcgcggcgctgctgtcctgctgctgctgctgctgctgccagggcgcgtcggcgacggcggcggcgtcgttcggcgacaacttcgagatcacgggcgccgaggaccacgtgaagacctccgccgacgggcagacctggtacctatacctcgacaacaagacaggcgtcgggttccagacgaagcagcgctacctgttcggctggttcagcatgaagctgaagctggtgggcaacgactccgcgggcgtcgtcaccgcctactacatgtgctccgacctggacgcggcgcccctgcgcgacgagctggacttcgagttcctgggcaaccgcagcggggagccctacatcatccagaccaacgtgtaccacagcggcgtcggcggccgggagatgcgccactcgctctggttcgaccccaccgccgacttccacacctacgccatcctctggaaccccaagcagatcgtgttcttcgtggacaaggtggcgatccgggtgtacccgaacgacgcgtccaaaccgccgggcggaggaggcggcggcgacggcttcttcccgatcgccaagcccatgtacatcttttccagcatctggaacgcggacgactgggcgacgcgcggcgggctggagaagacggactgggccaaggcgcccttcgtgtcgtcctaccgcgacttcgccgccgacgcctgcgcctggccgccgccggccgcgggggtcgccccgtccccgccgacgcccgcgtgcgccgcggccacgggggacagctggtgggaccagccccccgcgtgggcgctggacgccggccagcgcctggacaacgcctgggtggcaaggaacctcctcgtctacgactactgcgacgaccgcaagcgcttcccgacgccgcccgaggagtgcaagctccggcccgccgcgaccgcatcgtgatcatactatactgttggattggttcgtgcatgatgatgagatggttttttttttggggtttgtttcttggtgcgtaaaaccgggctgattgttgggggtgggggatggagaaaggccgtattatgcgtacattgtgtgtgggcgcatggacagtccggaccgatggttgtggcgttggaacggaccatgtcggccattcttttgttacgaggaaacgaggaatggattcagttttgtaccaccaaagcaattttgtttcccgttggc

SEQ ID NO: 19780 - DNA, 755 bp, Zea mays
  Clone ID: LIB3151-040-G1_FLI
ggataaatacagcaatcatacttcgccttgttttaagtttggagcaactgaccaaagtaccaacctaagtacatgacttgtcaaaccaatcgccaggtcacactgacgtggtaatgccttaggctatctccaacacatcctcatattcaaactccactccgtgaacaatgcatgcagtgaactgctggtgtcttggttgtgcaacctgtattttcagacagtatgacggcctaagaacactggaaccctgaaacaatcctgaatccttagatgaccaagtttctgctgcaattccgcacgccacacatgcctttttccttcttccccgcaatctgcacccattgtgtttctgaatttatggtggagaggatgatggaatggcggcctctgagtggtcagttcaggaaaagctttcacagacattagactgtctttcccagggttaactatctctgtatcgttcattggcgtttcgtcttttgattgctaataagttcttcttgtgtttcagctgtgtgcgatggagcttgggaaacacaagataagggttaacgccgcctgccgcggcctgcatctgcaagacaagttccccgtgtccgtgggcaaggagaaggcggagaaggcaacggcggaggtgatgcccctgcggagatggctggatccggagaaggacctggcgtcgacggtgctgtaccttgtcggcgacgagtcccggtacatgacgggcacaacaatattcgtggacggtgctcagt

SEQ ID NO: 19781 - DNA, 878 bp, Zea mays
  Clone ID: LIB3151-041-D5_FLI
ctactccagagcgcagaagaacccgatcgacaccatgagggtgttgctcgttgccctcgctctcctggctctcgctgcgagcgccacctccacgcatacaagcggcggctgcggctgccagccaccgccgccggttcatctaccgccgccggtgcatctgccacctccggttcacctgccacctccggtgcatctcccaccgccggtccacctgccgccgccggtccacctgccaccgccggtccatgtgccgccgccggttcatctgccgccgccaccatgccactaccctactcaaccgccccggcctcagcctcatccccagccacacccatgcccgtgccaacagccgcatccaagcccgtgccagctgcagggaacctgcggcgttggcagcaccccgatcctgggccagtgcgtcgagtttctgaggcatcagtgcagcccgacggcgacgccctactgctcgcctcagtgccagtcgttgcggcagcagtgttgccagcagctcaggcaggtggagccgcagcaccggtaccaggcgatcttcggcttggtcctccagtccatcctgcagcagcagccgcaaagcggccaggtcgcggggctgttggcggcgcagatagcgcagcaactgacggcgatgtgcggcctgcagcagccgactccatgcccctacgctgctgccggcggtgtcccccactgaagaaactatgtgctgtagtatagccgctggctagctagctagttgagtcatttagcggcgatgattgagtaataatgtgtcacgcatcaccatgggtggcagtgtcagtgtgagcaatgacctgaatgaacaattgaaatgaaaagaaaaaagtattgttccaaaaaaaatt

SEQ ID NO: 19782 - DNA, 893 bp, Zea mays
  Clone ID: LIB3151-041-F12_FLI
ctgggtcttcagaccattagctttatctactccagagcgcagaagaacccgatcgacaccatgagggtgttgctcgttgccctcgctctcctggctctcgctgcgagcgccacctccacgcatacaagcggcggctgcggctgccagccaccgccgccggttcatctaccgccgccggtgcatctgccacctccggttcacctgccacctccggtgcatctcccaccgccggtccacctgccgccgccggtccacctgccaccgccggtccatgtgccgccgccggttcatctgccgccgccaccatgccactaccctactcaaccgccccggcctcagcctcatccccagccacacccatgcccgtgccaacagccgcatccaagcccgtgccagctgcagggaactgcggcgttggcagcaccccgatcctgggccagtgcgtcgagttcctgaggcatcagtgcagcccgacggcgacgccctactgctcgcctcagtgccagtcgttgcggcagcagtgttgccagcagctcaggcaggtggagccgcagcaccggtaccaggcgatcttcggcttggtcctccagtccatcctgcagcagcagccgcaaagcggccaggtcgcggggctgttggcggcgcagatagcgcagcaactgacggcgatgtgcggcctgcagcagccgactccatgcccctacgctgctgccggcggtgtcccccactgaagaaactatgtgctgtagtatagccgctggctagctagctagttgagtcatttagcggcgatgattgagtaataatgtgtcacgcatcaccatgggtggcagtgtcagtgtgagcaatgacctgaatgaacaattgaaatgaaaagaaaaaagtattgttcc

SEQ ID NO: 19783 - DNA, 2065 bp, Zea mays
  Clone ID: LIB3151-042-F10_FLI
gtaacatcctgccgtgggagtcacgatcatcggctccgcctcctccgagggaagtacagatcccttcaccgctgctcgaatagatcgtctgcagtcgcgtgactcgactttaccccgccccacagctcgaagccgacgaggtggcctcagcacacgcgcgcgcagccatggcagctgctcaaggtggcactgttgtgtgttcatctgagaaagttgagtttctgaagcttcaaaatggcagtgatattcgtggtgttgctgttgctggggttgaaggtgagcctgtcaacctcacggaagatgtcactaaagctatagctgcagcttttgctgcatggctgttaaacaagaaaccagatggctggagacttttaagaatctctgttggacatgattcacgaatttctgcacataaattgcagaacgcagtcactcatggaatcactgctgctggacacgatatcctacagtttggattggcttcaacacctgcaatgttcaacagtacacttacagaagatgagagaagtcatttacctgttgatggagccataatgataacagcaagccatctcccctacaatcggaatggtctcaagttttttacaagtgatggtgggctaaataaagctgatatcaaagatatcctggagcgtgcttccaaaatatatgaggaatctgcacataataacctgaaagaacagggggaagcttcgaagggagttgtcactaatgtggactacatgtcaatttatgcttctgatcttgtacaagcagttcgtaaatctgctggagacaaagaaaaaccattggaggaactgcatatagtcgttgatgcagggaatggtgctggtggtttttttgtggataaggtactcaaaccattaggagctgttaccactggaagtcaattccttgagcctgatggtttgtttcccaatcacattcccaaccctgaggacaaaaccgcaatgaagtttattacacaagcagttcttgataacaaggcagacttaggcatcatatttgatactgatgttgacaggtctgcggctgttgattccaggggtcgtgagttgaatcgtaaccgattgattgctttgatggctgccatagttcttgaggaacatccaggaactacagttgtgacagatagtgtgacttcagatggattgactgtatttattgaaaataaacttggagggaagcatcaccgtttcaaacgagggtacaagaatgtaatagacgaggctattcgtctgaactctattggtgaggagtcacatttggccatggaaacaagtgggcatggagcgctgaaagagaaccactggcttgatgatggagcataccttatggtcaaacttttgaataaacttgctgctgctagaacactgggttcaagtattggtagtaaagttttgactgatttggttgagggccttgaagaagctgatgtgacagttgaaataaggttaaagattgatcagaatcatgcagatttgaaaggagggtccttccgtgactatggagaatccgtcttgagacatttagagaatgcaatcagcaaagacccaaatctccataaagccccggtgaaccatgagggcgtaagggtttcaggatatggtgggtggttcttgctgaggctctctctgcatgatcctgttcttcccctaaacattgaggcacagagtaacgatgatgcgattaagctggggcttgcggttcttgctgctgtgaatgaatttccagcactggatgtgacggcactgaacaaattcgtgcaccagtgaatataagggacggacattggcatcataatgtgatcagcttcgcatggtgccgtgttcgccccggtcgaacatgttctacatgtgtggcacgagtatcgtacagaaatataccagtttattacttgcacaggcttgttagtctggaaggacaagggagattccagtgttgagatgattcttgtgtgtgtttataccagctatcaaagtaagaatatgcgtgcgtactgttgaggctgatctttacttgagaataaggtttgagttacccg

SEQ ID NO: 19784 - DNA, 857 bp, Zea mays
  Clone ID: LIB3151-043-B4_FLI
caacaagcaacatagaaagtggaatccagtagcaacaatagagcaacaatggagaccaagatattttccctccttatgctccttgctctttctacatgtgttgctaacgcgacaattttccctcaatgctcacaagctcctatagcttccctttttcccccataccttccatcaattatagcttcagtatgtgaaaacccagctcttcaaccatataggcttcaacaagcaatcgcagcaagcaacatacctttatcgcccttgttgtgtcaacaatcgccagccctatctttggtgcagtcattggtacaaaccatcagggcacaacagctgcagcaactcgtgctacctgtgatcaaccaagtagctctggcaaacctttctccctactctccgcaacaacaatttcttccattcaaccaactgtctacactgaaccctgctgcttatttgcagcaacaactattaccatttagccagctagctactgcctactctcaacaacaacaacttcttccatttaaccaattggccgcactgaaccccgctgcttatttgcagcagcaaatactactaccatttagccagctagctacagcaagccgtgcttccttcttgacacaacaacagttgctgccgttctaccagcagtttgcggctaaccccgcaaccctcttacaactacaacaattgttgccctttgtccaacttgctttgacaaacccagcagcctcctaccaacaacacatcattggtggtgccctcttttagattgcttattagatgtaattcaataataaagttttttggatgatgtatgtggccaaccagaaataaaaagttacatttccagattc

SEQ ID NO: 19785 - DNA, 885 bp, Zea mays; identical to SEQ ID NO: 19772
  Clone ID: LIB3151-044-A5_FLI

SEQ ID NO: 19786 - DNA, 728 bp, Zea mays
  Clone ID: LIB3151-044-D3_FLI
gatcagcaaagcggcagtgcgtagagaggatcgtcgaacagaacagcatgaagatggtcatcgttctcgtcgtgtgcctggctctgtcagctgccagcgcctctgcaatgcagatgccctgcccctgcgcggggctgcagggcttgtacggcgctggcgccggcctgacgacgatgatgggcgccggcgggctgtacccctacgcggagtacctgaggcagccgcagtgcagcccgctggcggcggcgccctactacgccgggtgtgggcagacgagcgccatgtaccagccgctccggcaacagtgctgccagcagcagatgaggatgatggacgtgcagtccgtcgcgcagcagctgcagatgatgatgcagcttgagcgtgccgctgccgccagcagcagcctgtacgagccagctctgatgcagcagcagcagcagctgctggcagcccagggtctcaaccccatggccatgatgatggcgcagaacatgccggccatgggtggactctaccagtaccagtaccagctgcccagctaccgcaccaacccctgtggcgtctccgctgccattccgccctactactgattcatgatatttgggaaatctcctctatccatccctctctatctatatatgtaataatgcagtaagacgacacacattatcatgtgtggtatgaccaataatatatgcatcataataaagttttggttttaaagaatt

SEQ ID NO: 19787 - DNA, 1223 bp, Zea mays
  Clone ID: LIB3151-044-F7_FLI
tggccggggatctagatctcccatcgcctcgcctcgtctccctccagtccaaaccgccgtcgaccgccttgcccccgactccgcccgcactcccacccgctgctgccggatcccctgcccctaccgtacggtctgcccgctttcaccgcccgcccgcccgccgccgccagcctagctggggtcgggtggagatccaccaggaaaagagggtgctctcttctcctcgtgcgggtgttgtaattttgtcaagccagaagggcagcagtacttatagagttgttccaccatggccaatgatggagacgatggacaaagccaggattatctcttcaaaattgtcctgatcggggattcctctgttggtaaatcgaacttgctggcaagatttgcaaggaacgagttctacccaaactccaagtccactataggagtggagttccagacacaaaagttggtaatcgatgggaaggagattaaggctcagatatgggacactgctggacaagagcgctttcgagcagtgacatctgcttactaccgaggcgctgtgggagctcttctcgtctatgatattagcaggcgtcagactttcgacagtgttggtcgatggctcaatgaactacacaatcattctgatatgaatgtcgtcacgattctggtgggtaacaaaaccgatctgaagcatgcgcgtgaggtgagcaccgcggaaggacaagcactggccgaggctcagggcctcttcttcatggaaacctcagctttggattcgtcgaatgttgcagcagcttttcaaactgtggttaaggagatctacagcatactaagcaggaaggtgtttcagtcactagagcagaagaaaagcgagctgcagtcgctaagcagcgggaaagccgtggtgctgcagggtgaggccaaccaaacaagcagtggtgggaggtggtgctgttcctcgtgacctgacacgaggactgcagctatggagggcgatcggattgtgagacattcgggtgtgtaaccctgtaggtccgatttgtgaaaagttgcttttcccccatgttcttgttctaaaggtaagctggcgtggctgcttgtacgaaagctggtgttttccgtcggaggaaatcaatgtatagttcgattgatccttgggaggtgtcgatgatacacatgattgtgtaaagagaaaaagcgcgaccaacttgactgttgcgtcattctgcatc

SEQ ID NO: 19788 - DNA, 1866 bp, Zea mays
  Clone ID: LIB3151-045-C7_FLI
ggtgacctaccccttgggtaccatcagaaggaccttgtcatatatgaaatgcatttgcgtggattcacaaagcacaactcaagcaagacaaaacacccaggaacttacattggtgctgtgtcaaagcttgaccatctaaaggaacttggagtgaactgtatagagctaatgccctgccatgagttcaatgagctagagtacttcagctcctcttcgaagatgaacttctggggatattccacaataaattttttctcaccaatggcaagatattcttcaagtggcataagagactctggatgtggtgccataaatgaatttaaagcttttgtaagggaggcccacaaacggggaattgaggtgatcatggatgttgtcttcaatcatacagctgaaggtaatgagaaaggcccaatattatcctttagggggatagataatagtacatactacatgcttgcacctaagggagagttttataattattctggttgtggaaataccttcaattgtaatcatcctgtagtccgtgaatttatagtggattgcttgagatactgggtaacagaaatgcatgttgatggttttcgttttgaccttgcatctatactgaccagaggatgcagtctatgggatccagttaatgtgtatggaagtccaatggaaggtgacatgattacgacagggacacctcttgttgccccaccacttattgacatgattagcaatgacccaattcttggaaatgtcaagctcattgctgaagcatgggatgcaggaggtctctatcaagttggtcagtttcctcactggaacgtttggtcagagtggaatggaaagtatcgcgataccgtgcgtcagttcatcaaaggcacagatggatttgctggtgcttttgctgaatgcctatgtggaagtccacagttataccaggcaggggggaggaagccttggcacagtatcaactttgtatgtgcacacgatggatttacactggctgatttggtcacatacaatagcaagtacaacttgtcaaatggtgaggacaacagagatggggaaaatcataatcttagctggaattgtggggaggaaggagaatttgcaagtctgtcagtccgaagattaaggaagaggcaaatgcgcaatttctttgtttgtcttatggtttctcagggagttccaatgttctacatgggcgatgaatatggtcacacaaagggagggaacaacaatacgtactgccatgaccattatgtcaattatttccgttgggataagaaggaagaacaatcctctgatttgtacagattctgccgtctcatgaccgaattccgcaaagaatgtgaatctcttggccttgaggacttcccgacttcagaacggttgaaatggcacggtcatcagcccgggaagcctgactggtcagaggcaagccgattcgttgccttcaccatgaaggacgaaaccaaaggcgagatctacgtggccttcaacaccagtcaccttccggtggttgttgggcttccagagcgctctgggttccgatgggagccggtggtggacaccggcaaggaggcaccatatgacttcctcaccgatggcctgccagatcgtgctgtcaccgtctaccagttctctcatttcctcaactccaatctctatcctatgctcagctactcctccatcatccttgtattgcgccctgatgtctgaaagaagcagatacaatagagtatactatagcggttgttctctaggctgtagcatgcagtggaaactggaaaatgttggggttgctctgttgtcggtagtttacatgcgcatgtcggtatgtgtagctaaagctggtggatctcagttctc

SEQ ID NO: 19789 - DNA, 753 bp, Zea mays
  Clone ID: LIB3151-045-H6_FLI
ccgggggaggatcgagagaggccaggaccagccagcatagccatggacggcggcggcgacgcggccaagacgaggatgaagacggtgtgcgtgacgggcgccgggggcttcgtcgcctcgtggctcgtgcagctcctcctctccagaggcgactacctcgtgcgtggcactgttcgcgaccccggtgaccccaagaacgcgcacctggcggcgctgggcggcgccagcgagcggctgcggctgttcaaggcggacctgctggaccctgccagcgtcgccgcggccgtggctggctgcgacggcgtcttccacgtcgccagccccgtcccggccgtcgagcccacgaaccccgacgaagtcctcgttccggcggtgaccggcacgcagaacgtgctcgaggctagccacgcggccagcgtccgccgcgtcgtggtggtgtcgtcggtcggcgcggtgatcgcgaaccccagcatccccgacggcgccgtcgtcgacgaagactgctggtcggacgaggactactgcagaaccactaagaactggtactgcgtttccaagacggtggccgaacgcgaggcgctggcgtacggcgagaggactgggacgatggacgtggtcaccgtctgcccgccgtgggttctggggccgctgctgcagccgacggtgaacgccaccagcatgcgcttcgtgacgtacctgaaaggagaaaacaccgaggagaagacgaggaacatggtggacgtgcgcgacgtc

SEQ ID NO: 19790 - DNA, 844 bp, Zea mays
  Clone ID: LIB3151-046-A12_FLI
ggcaaaggacgacgggtcggcgagaggcggggccatgaggatccggaagcgcacccctgccagggcagcgtcgccgggaccgccgcctctgcctcctcctcctcccctaccgctgcagcgtcccacggagaaaccacgggatgaggcggcggcggaggaggaggaggagaagcgggcggtcctcgccgccggagtccgagaaggcgacgaccgggttcgccccgccgccgccgccgctggctctgggaacagcagcgcaacggacgacgtgccgaggccggagccgcaggagcaggacgccgccaggtgcagccggaacgacgggaagcggtggcgctgcaagaaggcggccgtgccggggtacctgttctgcgaccgccacatcgcgtggtccacacgcaagcgcaagcccagagccagcaccaagcccaaggttcacggcagcggcgtcctggagcccaccgccatcgcccaggagttcgcggaggaccacggccccacgcagcgcgacgccgggttcctcggcggcttctagccccgctgccggaacttggcgggcgcagggcggcgctctacttaccgtggtctacctttttcctactctccaactgattgatgatagtagttctgcatcctgtgttgcgtcgatttttgctgccgtgctatgctcggatcgtgtcgcagttctcgtgtccatctggagggaaatgctgcgatgccttttttttcttttagggagaatccaggacctggtgcaaaagtagtagccagttcaactaaatatatggggcattgatcattggttcttgcgcctcgttcttctcgagctattttgctctcgtcc

SEQ ID NO: 19791 - DNA, 866 bp, Zea mays
  Clone ID: LIB3151-046-F1_FLI
cccgttccgtcgccgccgcgcgcctcggagaagagatagaggcggccgctgcatcgaccccgcgccacctccgcctgcctcccccggcaccgatcgggtttgatcgatggcgtcgaagaggatcctgaaggagttgaaggacctgcagaaggacccgcccacctcctgcagcgcaggtcctgttggtgaggacatgttccattggcaagcgaccatcatggggccttcggacagcccatttgcaggtggggtattcttggtgaacattcacttcccaccggattaccctttcaagccaccaaaggtattccacccgaacatcaacagcaacggcagcatttgccttgacattcttaaggaacagtggagtcctgctttaactatctcaaaggttctcctgtcaatctgctcactgctcacggacccaaaccctgatgatcctcttgtccctgagattgctcacatgtacaagaccgacagggccaagtatgagtccaccgcacgctcctggacacagaagtatgccatgggctagaagcaaggctaaaagctggccaaactggtgaatgtgccggaccccaaatcgttatcacctaaataaccagtcaagtcgcaagtatgaatggacttttgaggaccattgtgccctgttgaactcatgtattaccttgtgaagtccgttgtgtctggtttctacctgaccgtttcgttatctgatgctgtttctttaatatctgatgctgcttcattaaccatacttctatatggtttgtggtgttgctgtttgtttaatctgtcagctgcttgacgtttcactgaaagaaagacgttccagtgagcgcagaaaaagttggtgattcggtgag

SEQ ID NO: 19792 - DNA, 1025 bp, Zea mays
  Clone ID: LIB3151-046-F11_FLI
gttcagatcatgctggagaggcacacaaaccgccacaggggctttggcttcgtgacattcgaagatcgaagggcagttgacagcgctatcaaagagatgcgtggccaagagttagatggtcgtaccatctcagtgaacaaggctgagcctaagatgaatacagatgacacaaggttcgacaatggcggtggacgagactatcgaggtggtagaggtgatggtccaccccctggcaattgctatgagtgtggccgtcctggtcattgggtccgtgactgcccgagtgctgttggtggtcgttctggcagattcccgtccaagttcagtgatggtggcaggggagaccgcttttctggatcagataggtttagtgatcgttacatggatgatcgttatgatggtggtcgttatgggtaccgtgatcaagttgatgcaagggacaagtatgctgggggccgagatcgttatgccaatgatcgctactccactggtggcgatcactttgacggagacaggtatggaggtggcccggatcggtacgcgccaaatggttatgggagggaacgagaaagaagctacgagagagatggagttcgtggtggcggtggctatgataggaatggctcaagaggtggtggaagctatgacagggatggccctagaggcggcaagggtggtggctatgtcagggatggcccacgcggtggtgttgctgatcgttatggtggtggaggacctgcacgctatgatgggggaagttacagggacaggcctgggccatatgatcgccctagcaggggaggaggtcgttttgatgatcgccactgatgaactgcttctagactcgagcccctggtcttgtagtttagctttttgcagttttgcatagcttaatgcttaatgggctatggaagatgcctaatttacccccctctttggcacttcaatgtctgctctgtatttcaaccagtacttgggcaccggtgttgccttctcgataagtttatcaagctgactgtttttgc

SEQ ID NO: 19793 - DNA, 871 bp, Zea mays
  Clone ID: LIB3151-049-A1_FLI
ttgagaccaacaagcaacatagaaagtggaatccagtagcaacaatagagcaacaatggagaccaagatattttccctccttatgctccttgctctttctacatgtgttgctaacgcgacaattttccctcaatgctcacaagctcctatagcttccctttttcccccataccttccatcaattatagcttcagtatgtgaaaacccagctcttcaaccatataggcttcaacaagcaatcgcagcaagcaacatacctttatcgcccttgttgtgtcaacaatcgccagccctatctttggtgcagtcattggtacaaaccatcagggcacaacagctgcagcaactcgtgctacctgtgatcaaccaagtagctctggcaaacctttctccctactctccgcaacaacaatttcttccattcaaccaactgtctacactgaaccctgctgcttatttgcagcaacaactattaccatttagccagctagctactgcctactctcaacaacaacaacttcttccatttaaccaattggccgcactgaaccccgctgcttatttgcagcagcaaatactactaccatttagccagctagctacagcaagccgtgcttccttcttgacacaacaacagttgctgccgttctaccagcagtttgcggctaaccccgcaaccctcttacaactacaacaattgttgccctttgtccaacttgctttgacaaacccagcagcctcctaccaacaacacatcattggtggtgccctcttttagattgcttattagatgtaattcaataataaagttttttggatgatgtatgtggccaaccagaaataaaaagttacatttccagattctaatgtg

SEQ ID NO: 19794 - DNA, 891 bp, Zea mays
  Clone ID: LIB3151-049-C4_FLI
ggtcttcagaccattagctttatctactccagagcgcagaagaacccgatcgacaccatgagggtgttgctcgttgccctcgctctcctggctctcgctgcgagcgccacctccacgcatacaagcggcggctgcggctgccagccaccgccgccggttcatctaccgccgccggtgcatctgccacctccggttcacctgccacctccggtgcatctcccaccgccggtccacctgccgccgccggtccacctgccaccgccggtccatgtgccgccgccggttcatctgccgccgccaccatgccactaccctactcaaccgccccggcctcagcctcatccccagccacacccatgcccgtgccaacagccgcatccaagcccgtgccagctgcagggaacctgcggcgttggcagcaccccgatcctgggccagtgcgtcgagtttctgaggcatcagtgcagcccgacggcgacgccctactgctcgcctcagtgccagtcgttgcggcagcagtgttgccagcagctcaggcaggtggagccgcagcaccggtaccaggcgatcttcggcttggtcctccagtccatcctgcagcagcagccgcaaagcggccaggtcgcggggctgttggcggcgcagatagcgcagcaactgacggcgatgtgcggcctgcagcagccgactccatgcccctacgctgctgccggcggtgtcccccactgaagaaactatgtgctgtagtatagccgctggctagctagctagttgagtcatttagcggcgatgattgagtaataatgtgtcacgcatcaccatgggtggcagtgtcagtgtgagcaatgacctgaatgaacaattgaaatgaaaagaaaaaagtattgttcc

SEQ ID NO: 19795 - DNA, 437 bp, Zea mays
  Clone ID: LIB3151-050-B12_FLI
ggtgtaccttcgaggtgagatttttgacattgtctgcggcgagggcagtgcacgcaccgaacgtcatgagttgtttggtcactggagggagaggctcacctatgctgggctaactcaagtgtggttcgaccccgatgaggttgacacgctaaaagaccagttgatccatgtgacatccttatctggctctgggttcaacatcctagtgtgtgatggcagccttgcactagcgtggcataatcgcccgttatatgtggcaacagcttggtgtgtgacaggaggaaatgctgccagttccatggttggcaacatctgtaagggtacaaatgatagtagaagaaaggaaaaccgtaatggacccatggagtagcaggaagaataaccatgtcatgagcaaatcgatcaagtaataaaatgcactgatgacatgcatggtg

SEQ ID NO: 19796 - DNA, 643 bp, Zea mays
  Clone ID: LIB3151-050-B5_FLI
cacttctacggttcctccgagttttcgtttggtattttctgtttaccgaaatcggcaattattcccctccacaaccatcctgggatgacagtgtttagcaagatactgtttggttccatgcacctcaagtcctatgattgggctaaaagtctgccggcgggtagcaacgataatgcacttgagaactctgatggagcaggagctcgtctggccaaggtgaacacagatgccgtttttgacgcttcatctgagaccgtagttctgtaccctgaaaatggagggaacttgcactgctttacggcgctgaccccttgtgccgtgctggatgtgatgggccctccctacaaccgtgctcaaggaagggattgcgcgtattacagcgaatcgccctactcgtgtgctggagatgcacaatattcttggctcaaagaggttcacagcacatttgagatggaaggcataaagatggagcccaacttcatcgtctaataattaagcaggcatggcatgacatgacatggcatcgtaatgctgctagtttcatgtagataatctctagctgcgggggtgtagtacaactggaagacggccagatgctcttttgacattcgtttgccttaatttcatatgcctccctttatgt

SEQ ID NO: 19797 - DNA, 371 bp, Zea mays
  Clone ID: LIB3151-050-H6_FLI
caaaggcgcatggtctttttcgggacttcagtacccaccatattcaaaggtctaagaacagaagaaatacaacaatgcttctggaggggatttgtctgtgtgcgaggattcgacatggagactagagcaccaaggcctctgtgcccccatttgcacattatagcaaggccgaaggcccgcaagacagcagcaactgagcaagtactctaatcagcaaagatatcagttttatgaacatcatgtttattgtgatatgacatcaatagctctcgacctgtgcatggaatcatattacttcctgcctggcgatggccattgtttagggaatttaagccatggatggggtccgagactattagtcctctcgtctc

SEQ ID NO: 19798 - DNA, 881 bp, Zea mays
  Clone ID: LIB3151-052-A5_FLI
ccattagctttatctactccagagcgcagaagaacccgatcgacaccatgagggtgttgctcgttgccctcgctctcctggctctcgctgcgagcgccacctccacgcatacaagcggcggctgcggctgccagccaccgccgccggttcatctaccgccgccggtgcatctgccacctccggttcacctgccacctccggtgcatctcccaccgccggtccacctgccgccgccggtccacctgccaccgccggtccatgtgccgccgccggttcatctgccgccgccaccatgccactaccctactcaaccgccccggcctcagcctcatccccagccacacccatgcccgtgccaacagccgcatccaagcccgtgccagctgcagggaacctgcggcgttggcagcaccccgatcctgggccagtgcgtcgagtttctgaggcatcagtgcagcccgacggcgacgccctactgctcgcctcagtgccagtcgttgcggcagcagtgttgccagcagctcaggcaggtggagccgcagcaccggtaccaggcgatcttcggcttggtcctccagtccatcctgcagcagcagccgcaaagcggccaggtcgcggggctgttggcggcgcagatagcgcagcaactgacggcgatgtgcggcctgcagcagccgactccatgcccctacgctgctgccggcggtgtcccccactgaagaaactatgtgctgtagtatagccgctggctagctagctagttgagtcatttagcggcgatgattgagtaataatgtgtcacgcatcaccatgggtggcagtgtcagtgtgagcaatgacctgaatgaacaattgaaatgaaaagaaaaaagtattgttcc

SEQ ID NO: 19799 - DNA, 725 bp, Zea mays
  Clone ID: LIB3151-052-E5_FLI
cccccactcagaaaacccagccgccgccgcatcggcctcccaggtaagcagtagcgtccaccccagccgccgccatgaagcgcaacccccgcgtcacgagctcccgccggaagtgccgcaaggcgcacttcacggccccgtcctccgtccgccgcgtgctcatgtccgcggcgctatcgacggagctccgccacaagtacaatgtgcgttccatcccgatccgcaaggacgacgaggtgcaggtcgtgcgcggcacctacaagggccgtgagggcaaagtggtgcaggtgtaccgccgtcgctgggtcatccacgttgagcggatcacccgcgagaaggtgaacggctccaccgtgaacgtgggcatccacccttccaaggtcatggttacaaagctgaagcttgacaaggaccgcaaggcgctcctcgaccgcaaggcccggggccgcgccgccgacaaggctaagggcaagtttactgccgacgacgtcgccgccgctgctggtggcgccgccgccactggcgcgtctctccaggagatcgactaggcgcttcgcggggatctgatggtggtcctaccgcctattactccttatcgctctagtttttgctatcaatgattatgtgctaggagttttatgttacttataaactgctttgagcctcgatgggagttgaacttaatgtggagtgtatctgagatatgaagaactcattatatggct

SEQ ID NO: 19800 - DNA, 1620 bp, Zea mays
  Clone ID: LIB3151-058-B11_FLI
gccgtcgtcttctgcggttctgccgtctacgcctccaatttggcctctctcccttgcaagtttaagcttcaccttcaaccatgggtaaggagaagtcccacatcaacattgtggtcattggccacgtcgactctggcaagtcgaccaccaccggccacctgatctacaagcttggaggcattgacaagcgtgtaatagagaggtttgagaaggaggctgctgagatgaacaagcggtccttcaagtatgcttgggtgctcgacaagctcaaggctgagcgtgagaggggtatcaccattgatattgctctgtggaagtttgagaccaccaagtattactgcaccgtcattgatgcccctggacaccgtgacttcatcaagaacatgatcactggtacctcccaggctgactgtgctgtccttatcattgactccaccactggtggttttgaggctggtatctccaaggatggccagacccgtgagcatgctctccttgcgttcactcttggagtgaagcagatgatttgctgctgcaacaagatggatgcaacgactcccaaatactccaaggcgcgttatgatgagattgtgaaggaagtctcatcctacctcaagaaagttgggtacaaccctgataagattgcctttgtccccatctctggttttgagggcgacaacatgattgagaggtccaccaaccttgactggtacaaaggcccgaccctgcttgaggctcttgaccagatcaccgagcccaagagaccttcggacaagcccctgcgtctccccctgcaggatgtgtacaagattggtggtattggaactgtaccggttggtcgtgtggagactggtgtcatcaagcctggtatggttgtcaccttcggtccaactggcctgactactgaggtgaagtctgttgagatgcaccacgaggctcttcaggaggcccttcctggtgacaatgttggcttcaacgtgaagaacgttgctgtgaaggatctcaagcgtggttttgtggcctcaaactccaaggatgaccctgccaaggaggctgccagcttcacgtcccaggtcatcatcatgaaccaccctggccagatcggtaacggctatgccccagtgctggactgccatacctcccatattgctgtcaagtttgctgagctgattaccaagatcgacaggcgttctggcaaggagcttgagaaagagcccaagttcttgaagaacggcgatgctggtatggtgaagatgattcccaccaagcccatggtggtggagacattctcgcagtatcctccccttggtaggtttgctgtccgcgacatgaggcagacagttgctgttggagtcatcaagagtgtggagaagaaggacccgaccggcgccaaggttaccaaggcagctgccaaaaagaaatgatgcaacctgtcgttaatcctgtatctgcttttgcaatacctgacttgtcactccatcccgaagttttgtatgcggttgttactgttattgtgtactgttaagctctgctgcggcgtgccctgttgtttgggtagcgtcaacgtcgagcgccacttgcgggtgtgcctttgtctgctatcagtagcggcaaaaattg

SEQ ID NO: 19801 - DNA, 1560 bp, Zea mays
  Clone ID: LIB3151-058-C10_FLI
gccgtacttttcagtggtacaagcaagggaggaacgaacttgagggctgcctgcctgcctgcggacatgggctccagcctcaagtaccgatctggcctgtgcctcatcgtcgccgtcgtgctgatctgggtcatctccgccgaggtcacgcaggggatattcacaaagtacagacatccatttgcagttacttacttgggggcctcccttatggtcatatacctccctttgtcatttctaaaagattttatatacaatttgttgagaaggcattctagaaacactagtgcttccaaaattgcaagcaaatcttcctttggtggtagtgcccctttgaagaatggtgaatttcagaagatgttggaaatggaatcacagaaaactatagtggtaaattgccctgatgtgagcatccctgtagtggaagagacaaaaccactcatatgcggaatcactgaattggatgatggccttttcaaggacaagcaactttccactaaggagattgcaacgtatggattgtatctttgccccttatggtttgtgacagagtatttatcgaatgcagcgcttgcaagaactagtgttgccagtaccacagtgctgtcttcaacttcaggactcttcactcttttcattggtgttttacttggccaagactccataaatgctgcgaaagttattgctgttttcattagcatggctggcgttgtaatgacaactatgggccagacttgggcatctgatgaatcagaagcaggcaaatctggttttacacagaggactcttctaggtgatatgtttggtcttatgtcagcaatcgcctatggtctatttactgtgctgcttaaaaaattttgtggagaggaaggagaaaaggttgatgtccaaaaactgtttggttatcttgggctttttacccttgttgctctatggtggattgtctggccattaaccgcactaggcgttgagccaaagttttcaatgccccactcagctaaagtggatgaagtggtggtggcaaatagcctaatcggaagtgtattatcagactacttctgggctctttctgttgtttggactactcccttggtggccactctaggcatgtctctcacaattccaatagcaatggttgctgatatgatcattcacggccgtcactattcagcagtatatattcttggttctgtccaggtattttcaggctttgttatcgcgaaccttgcagatcgcttttctcgttctctagggctatcatagtctcataaaacagaacaggcccttattagagcgtgcatcaggaatctccaaggtcgggttggttaggccaatacttcagaaaacctggatcgggagataccaggaattattttccctttgcttctttaaacatagtggaggtgaattttgccgtggtgaatagtgaaagtcagcagacgaaagaagaaaacatatgttatagcaaccctttgcaactgtaaattctcttaatacaaattgcgcgacagtgtagactgcggccgttctcggcccatgtcaacaggcttgcacgatttc

SEQ ID NO: 19802 - DNA, 1618 bp, Zea mays
  Clone ID: LIB3151-058-E3_FLI
ccgtctcgtttggacctccatccgcggcggccgccgccgcgctgagtttgggccgggctctgttaatctgggcgactttgattttctctgctcccgctgccccggccgtcaggagtgaagcgatgctggagaaagaccggatatcctacttctacgacggagatgttggcaatgtctactttgggccaaatcaccccatgaagccacatcgtctctgtatgacacatcaccttgttctttcatatggacttcatcaaaagatggagatatataggccacacaaagcatatccaatagagcttgcccaattccattctgctgattatgtggaattcttgcaccggataactcctgattcccagcacctatatgcaagtgaactaactagatacaatcttggagaagactgtccggtctttgataatttgtttgagttctgccaaatctatgctggaggaactttagatgctgctcgcagattaaatcataaaatatgtgacattgccattaattgggctggtgggctacatcatgccaaaaagtgtgaggcttcaggcttctgttacattaatgatctagtattaggaattctggagcttctcaagtaccatgccagggttctttatattgacattgatgtccatcatggagatggagttgaagaagccttttatttcactgacagggtaatgactgtgagtttccacaagtatggtgacctgttctttcctggaacaggtgatattaaggatataggagaaagggaaggaaaatattatgctatcaacattccacttaaagatgggatagatgacactagctttactcggctttttaaaacaattattgccaaagttgttgagacatatctgcctggtgctattgttcttcaatgtggggctgattcattggcgagggatcgtttaggctgcttcaatctctccattgaaggccatgctgaatgtgtaaagtttgtcaagaaattcaatattccccttctggtaactggaggtggtggatacacaaaggagaatgtagcacggtgttgggctgttgaaactggggtccttttagacacagaactcccaaatgagattccaaaaaatgaatatattgagtactttgctccagattatacattgaaagttccaaatttgaacatggacaatttgaacagtaagacctatctcagttcaatcaaagtgcaagtgatggagagtttgcggtacatacagcatgctcctggtgttcaaatgcaagaggttcctcccgatttttatatcccggactttgatgaagatgaattggatcctgatgaacgtgttgaccagcacactcaagacaagcagattcaccgtgatgatgagtactatgaaggtgacaatgacaacgatcacgacgatggcacacgctaatctgcttcttctgaggccctggtgtaaatggaaacctgagattcttcactgttgtgtagttcagcagtcttgagatgtaatagtttgtcagttgacagcagggatctaacttagcaggtcaaagtggtttagacttttataagggattctgacccctcctgaattacacattgtagtacaagtctgcacatttttaagcatgc

SEQ ID NO: 19803 - DNA, 1806 bp, Zea mays
  Clone ID: LIB3151-059-A6_FLI
cgctgttctcagcgatgcccatgcccagcgccggcagggacaacgcgacagcggcggagggggcggcgcaggcgtttctgctgccggagcacgccggggacaacgacgccccgtgcgtgggcggctccgcttcggtgctgggcgcggtgtgcaacgtgtcgacgagcgtggtgggcgccgggatcatgtcgatcccggcggccatgcgcgtgctgggcgtggcgccggcggtggcgctgatcgccggcgtcgcggtcctggccagggccgccgtcaacttcatgctccggtacacccgcggcgcgccgtcgtacgcggcgctcatgggcgacgcgttcggctccgccggggccgcgctgctcaacgtcttcgtcgccctcaacggcttcgggacactcaccgtctacctcatcatcatcggtaacgccgcgagacccacaccggccattccagcgcgctagctaactgctagcgaacgaacgtgccatccggttccgccccggccgtgcgagtgactagacacgccatgcatgctgtcgccgcgcgtgcaggggacgtggtgtcgggcacggcgagcggcggggtggcgcacccgggggtgctgcaggagtggttcgggcgccaatggtggaccagccgggaggtggtgctggtggcagccgcggcgattctcctgccccttgtgctccggaagcgtgtcgattcgctgagattcacgtcggccatttccatcctactggcggtagtgttcatgctcatcagctcggggatcgcgctatacgctctcttcaagggcaccgcgaccatgccgcggatgtttcctgacttctccagactctcctcgccgttcgagctcttcaccgccgtccccgtcatcgtagtcgccttcaccttccacttcaacgtgcacccgatccgcgcggagctgagcaagacgtcggacatgaaggtggcagtgcgcgtctcgctcgtgctctgcgcggccatctacgccgccgtgggcttcttcggcttcctcctcttcggggacgccaccatggccgacgtcctcgccaacttcgaccgcagctctggggccggtgtcccgcaggcgctcaacgacgcggcgcgcctcagctacgcgctgcacctcgtgctcgtgttcccgctcctcctcttctcgctccgggtcaacgtcgacgagctcctcttcccgggccgccggccgctcgccgcggacacgcgccggttcgtgtccctgacagccgtgctcatggcggtgctctacgtcctggccatcgcaatccccagcatctggacgctcttcgagtactccgggtccacgttcgcggtcaccatctcgttgatcttccctggcgccatagttctcagggatgttcatggaatagcgaagcgcaaggacaaggcattggcggcaacgatgatcgttctggcagtggtcacgagcagcatcgccattgcctcgaacatcatgagctccatcagtgacgaagacagaggaggtcatgtagctggtagacgataatggctcagatcgaatcaaattaaaatgtggtttccaggccaaccgcgcgtgaagattgctgctcgtgtcatgcgttcctcctgggtattctttctttgcagcgagattgcttcggcccctgagatgcaagtttagtctgtgccccctcatggtgtagatgtttgtggttgagaggagatacgttggtacatggtaaggaaattaccagttggccaatgctgtatacttgtttcggtgatacattacagtgtaaaatagaaaacggtcatattttctttttc

SEQ ID NO: 19804 - DNA, 2020 bp, Zea mays
  Clone ID: LIB3151-059-B12_FLI
ctgggacctgcccgcccgctcccgcctccgctcccgcgactcccagtggtatttcttcagccgcctcgaccgcaagcacgccaaccgcgcccgcaccaaccgcgccacgtcgggagggtactggaagaccaccgggaaggacagggaggtgcgccatgggcccagacttgtcgggatgaagaagacgctcgtcttccacgcgggacgcgcccccaagggcgaacgcaccaactgggtcatgcacgaataccgcctcgagggcgatgacgccgcagggataccgcaggactcatttgtggtgtgccggatcttccagaaagctggaccaggtcctcagaatggcgcacagtatggagcgcctttcgttgaggaggaatgggaggaggatgacacagatgatggtttgcttccagtggagggtgttgctgctgctgaccctgaggttccccttgcttctgtggagatccctggtgctttggatagaggctatcttcaaatgagtgatctcattcagggtttggatgatcaaaatggaaatggtacacctagtttgccagtttctgatacttcaaataatagcaaccattctgaagacgtagatggaaattctggggacattttaagtgacccaaaccttggctctaattttcttcagtatgctgaacctggggagcaaaatagcttaatgcttaatggaactatcatatcaaatgcaaatgctggagatttttttgataattccagccacagtgatgggtttctagagctgaaggattttggagatgctgcaaatctggatttccctttgggcaatggatcatccatctggcctttggattgttgggcatggaaaacacctgactcagcggaatctttaaatggaactaatgatgagattcctccacttcctgatgaccagactttccagccagatgagctggaacaactgttacagtcaatacaagaagattcccatttaggctcaagtatcattgaccccccacattcttctatgacaaattcagttctgcctgatgaggattgtttgatgttctatgatgcaccgttcgattccaccatgtgtgatgatgggtttgcacagaatgggatccttggctctgcagcaaccaatctatctggtattggcatggtggacgatggtatgccatactttgatgcaatggatggtaatttatttaatgacattctgggctccatacagcagccagatggtagcagttcccatgcttttaatggcccagtccttacccaagaggtcaacaataccatgtttacatatagtccaactcaaaaggttttagaacctaatattgtagttggcgcaccatcgtctgctaggttacctgaagctggtagtcagttaaattgtgttgttttaccagatggtcaggctaagagtagtactattggaaagggatttgtaaggattttggattcgatctctgctcccccagcttttgcaggagagttcccatctaaccaccgcaaatccttggctcgtatttctggagcgcgccccaacacactccatgtttctgctgaagtgatccatataggaagtttagctgttccttctggcgcagataagtgggcgctgcaaaaggatcaaggcatggagctgctcttctctgcagattttgaacctgatgcccgtatacattgtggctgcaacaccattaccgcggtgctgcgtggtggcttctgccttttcttcgtttcagcaataatgctcttagtgagctacgaggtgggcatgtgcatctatggcaagtagcaacctggtactggtctaagataaatctcacagcatttaggttaatcctatgttttgaggcagactcaactggggtctggggcctcctgctagcttttaagtgtgccgcattgcatggcatggacctgtggggtgtttagcactagcagtaccattttgcagctcgagagctaatggtgtatgtatgaattcagtgctatttagaaatactatgagaattgcctc

SEQ ID NO: 19805 - DNA, 1669 bp, Zea mays
  Clone ID: LIB3151-059-G9_FLI
ctcgccgtcgtcttctgcggttctgccgtctacgcctccaatttggcctctctcccttgcaagtttaagcttcaccttcaaccatgggtaaggagaagtcccacatcaacattgtggtcattggccacgtcgactctggcaagtcgaccaccaccggccacctgatctacaagcttggaggcattgacaagcgtgtaatagagaggtttgagaaggaggctgctgagatgaacaagcggtccttcaagtatgcttgggtgctcgacaagctcaaggctgagcgtgagaggggtatcaccattgatattgctctgtggaagtttgagaccaccaagtattactgcaccgtcattgatgcccctggacaccgtgacttcatcaagaacatgatcactggtacctcccaggctgactgtgctgtccttatcattgactccaccactggtggttttgaggctggtatctccaaggatggccagacccgtgagcatgctctccttgcgttcactcttggagtgaagcagatgatttgctgctgcaacaagatggatgcaacgactcccaaatactccaaggcgcgttatgatgagattgtgaaggaagtctcatcctacctcaagaaagttgggtacaaccctgataagattgcctttgtccccatctctggttttgagggcgacaacatgattgagaggtccaccaaccttgactggtacaaaggcccgaccctgcttgaggctcttgaccagatcaccgagcccaagagaccttcggacaagcccctgcgtctccccctgcaggatgtgtacaagattggtggtattggaactgtaccggttggtcgtgtggagactggtgtcatcaagcctggtatggttgtcaccttcggtccaactggcctgactactgaggtgaagtctgttgagatgcaccacgaggctcttcaggaggcccttcctggtgacaatgttggcttcaacgtgaagaacgttgctgtgaaggatctcaagcgtggttttgtggcctcaaactccaaggatgaccctgccaaggaggctgccagcttcacgtcccaggtcatcatcatgaaccaccctggccagatcggtaacggctatgccccagtgctggactgccatacctcccatattgctgtcaagtttgctgagctgattaccaagatcgacaggcgttctggcaaggagcttgagaaagagcccaagttcttgaagaacggcgatgctggtatggtgaagatgattcccaccaagcccatggtggtggagacattctcgcagtatcctccccttggtaggtttgctgtccgcgacatgaggcagacagttgctgttggagtcatcaagagtgtggagaagaaggacccgaccggcgccaaggttaccaaggcagctgccaaaaagaaatgatgcaacctgtcgttaatcctgtatctgcttttgcaatacctgacttgtcactccatcccgaagttttgtatgcggttgttactgttattgtgtactgttaagctctgctgcggcgtgccctgttgtttgggtagcgtcaacgtcgagcgccacttgcgggtgtgcctttgtctgctatcagtagcggcaaaaattgaaagctctcgagacttatgtcccttttgggcgccgttgaactgatt

SEQ ID NO: 19806 - DNA, 1272 bp, Zea mays
  Clone ID: LIB3151-061-E8_FLI
gtcttcgcttccactccccacgttccccgcctgcttcctccaggccccggccagatccgcgcgcccgcggggaagagggcctcctctcctccctcctcccttggctcgcgctctggtcgaggaggcggaggccggtgccggcgggcgggcggggaggtaggtagcagcttgcggttgcgggagggaagctgcgcgcgctaggctgccatggcggtggagaagacgctgcccggcgcgagtgcggggaggaccgtgctggtcacgggcggggcgggctacatcggtagccacgccgtgctgcagctcctcctcgcgggcttccgcgccgtcgtcatcgacaacctcaacagctctaacagttttaggaaatgactatgcaacaagagacgggactggggtccgagattacatccatgtggttgaccttgctgacggacatattgctgcattgcagaagctttttgagaactctagcatagggtgtgaagcgtacaaccttggaaccggaagaggtacatctgtgctggagattgttaaagcatttgagaaggcttctgggaagaaaatacctctgatttttggtgaaagacgcccaggtgatgcagagattctgttttcagagactactaaagcagagagggagcttaactggaaagcaaaatacggtattgaagagatgtgccgcgaccaatggaactgggccagcaagaacccttatggctatggatcacctgactctatcaagcagaatggtcaccaaacaaacggatccgctgactcctccaagcagaatggccaccgcacaaacggttcaactgactcacccaagcggaacggccaccatgcgtatgggtctgctgactcacccaagcgcaacgggcactgcgtttttggatcatcagacctcaagccgaatggtaatggccacctgcgctgagcagaactgtttggcctgtgagctccctgtacattcggttgcgatgtgagctccctgcacgttcggtcgaggtctatcgtgaacccactatccgagattgatgtggatcattgggttgacaggtcatacagtatagagccggtggcagaggaattcctgtttgctgtgggtaaagcttatcttctgctttcgtgttttttcttgcttctttcgattatggtgtaggtcataatgtattagctgattatcctttccctgctaattggactttattacgcttcattaagtttggctgattactgtttaacggggaaaagttgcacctgtgtacgatt

SEQ ID NO: 19807 - DNA, 1096 bp, Zea mays
  Clone ID: LIB3151-061-E9_FLI
cagaagaatcggaggatgttggcttactctactgttggtacacctgattacattgcacccgaggtggtcacttggtgcaataatgttcgaaatgcttgtggggtatccgccattttattctgaagacccaatgtcaacatgtaggaagatagtgaattggagaagtcatctaaaattccctgaagaggccagcctttctctagaagctaaagatctcattagcaagctattgtgtaatgtggatcagagaattggaacaaaaggtgcacatgagataaaggcacatccatggtttgcaggtgttgagtgggaaaaactatatcagatggaagcagctttcattcctgaggttaatgatgagttggacacacaaaactttgaaaagtttgaggagactgctcctccaatgcaaacttcatcaaaggcaggtccttggagaaagctgagctaaagaaaacgaacaacaagccaaagcgaccaaccatcaaatcattatttgagactgctgatagtgaagaccagccttctgatggcagttttctgaacctattacccacacaactggagctgccagagagccttgagccctctcctcactccagtatctcttctgaggattcccaagcacggaataggtagcaggtgtgttttctggcacctgccagcttagtccaacaaaagcaagacatagaggcctttcacctagtgatggattgctatctgcaggtctctattcagaggacaagctccataaagtttgcttttgaagagatgtttgtggtgctcagcagccatctaatgtacattgtcctgtacattgttactggtttccaaagttcctttggcaacgacacgaggaggttggttgtcatatagaggaggaggtatttgttctctcctgtaaatccttggattctttgagtttctgagatttattctttcgatatagcatgccaagggggtatgctgcctgtttcctttttacgtgcagaaatctgcatttctacatcgttgttgtaagatttgagacagtgtaaagaaattgcaagtgataaacaagcgaccgaaaatgataatgaaaatgctatttttcttc

SEQ ID NO: 19808 - DNA, 1556 bp, Zea mays
  Clone ID: LIB3151-061-F2_FLI
tcgagcaacaacagcttgctcgactcagcgcccatctatctctcttctcccccgcctgtctagccagcggcggccaccaccaccgttcagttattatagcaagcatgacgaagcacggcgtggtgatcggcccggaggacgtcgcggcggcgcggcatttctcgttcccgccgccgaggacggcggcgggcggcgagtcgtgcaggaagctggcggcgcaggtggacctcggccccgccgtcgtggggtcctggctcgactccatgaaggcctcgtcgcccaggcacaggctcatggcgcccgtgcccggcgccgccgacgcggagcacgacgactggatggagcggcacccgtcggcattggaccgcttcgacgcgctggcggcggcggccaaggggaagcaggtcgcggtgttcctggactacgacggcacgctgtccccgatcgtggaggaccccgaccgcgccgtcatgacggacgagatgagggacgcggtgcgcggcgtggcggcgcgcttcccgacagcgatcgtcagcgggcggtgccgggacaaggtgttcagcttcgtgcggctagcggagctctactacgcggggagccacgggatggacatccgggggcccaccgccgacgccaaccaccaccacggcaacggcaaggcggaggcggaggcggaggcgtcgtcggtgctctgccagccggcgagcgagttcctgccggtgatgcaggaggtgtacgcggcgctggtggccaaggtggagcgcgccatcccgggcgccaaggtggaggacaacaagttctgcctgtcggtccacttccggtgcgtggaggaggcgtgctgggccgcgctcttcgagcaggtccgcgccgtgctgagggaccacccgggcctgcgcctcacccagggccgcaaggtgctggaggtccgccccatgatccgctgggacaagggcaaggcgctggagttcctgctccacgccctcggcttcgccgacgccgacgccgaccgcgacgacgtcttccccatctacgtcggcgacgaccgcaccgacgaggacgccttcagggtgctgcgcgcgcgcgggcagggcgccgggatcctcgtgtccaggttccccaaggagacaagcgcgtccttcacgctacgcgaccccgccgaggtcaaggagttcctgcgcaagctcgtcggcgccaacgacgacagctgatgatcccgcgattcgtttcccgccgtgaccagctccgatccgcctgtgtcaagccgctaactcaacctcggctacctacctgctgcaccggcagagggcttccttgttgttgcaactgcatctccatcgagcagcttgctttgggacaagaacagacctagctagtagtacagtagagcccttttgtatcttcgtttcttttttttggtttccatctctcttgttcatcatgcctgctgttgtttaccatttgcctcggctgaaaaggcttgtattttcggcgcccttcccgcgaggcactgtaactagttgctttgtctgctgaacgtacgcgtaccatgttgaaat

SEQ ID NO: 19809 - DNA, 722 bp, Zea mays
  Clone ID: LIB3151-062-C9_FLI
caaagcggcagtgcgtagagaggatcgtcgaacagaacagcatgaagatggtcatcgttctcgtcgtgtgcctggctctgtcagctgccagcgcctctgcaatgcagatgccctgcccctgcgcggggctgcagggcttgtacggcgctggcgccggcctgacgacgatgatgggcgccggcgggctgtacccctacgcggagtacctgaggcagccgcagtgcagcccgctggcggcggcgccctactacgccgggtgtgggcagacgagcgccatgtaccagccgctccggcaacagtgctgccagcagcagatgaggatgatggacgtgcagtccgtcgcgcagcagctgcagatgatgatgcagcttgagcgtgccgctgccgccagcagcagcctgtacgagccagctctgatgcagcagcagcagcagctgctggcagcccagggtctcaaccccatggccatgatgatggcgcagaacatgccggccatgggtggactctaccagtaccagtaccagctgcccagctaccgcaccaacccctgtggcgtctccgctgccattccgccctactactgattcatgatatttgggaaatctcctctatccatccctctctatctatatatgtaataatgcagtaagacgacacacattatcatgtgtggtatgaccaataatatatgcatcataataaagttttggttttaaagaatt

SEQ ID NO: 19810 - DNA, 423 bp, Zea mays
  Clone ID: LIB3152-001-A7_FLI
gtgccacctccggtgcatctcccaccgccggtccacctgccgccgccggtccacctgccaccgccggtccatgtgccgccgcagcaccggtaccaggcgatcttcggcttggtcctccagtccatcctgcagcagcagccgcaaagcggccaggtcgcggggctgttggcggcgcagatagcgcagcaactgacggcgatgtgcggcctgcagcagccgactccatgcccctacgctgctgccggcggtgtcccccactgaagaaactatgtgctgtagtatagccgctggctagctagctagttgagtcatttagcggcgatgattgagtaataatgtgtcacgcatcaccatgggtggcagtgtcagtgtgagcaatgacctgaatgaacaattgaaatgaaaagaaaaaagtattgttcc

SEQ ID NO: 19811 - DNA, 874 bp, Zea mays
  Clone ID: LIB3152-002-H2_FLI
gctcgcctcgggtcaaaccctaagcagggagttgatttatccgctgcagccatgagtaagttgcagtctgagtctgtcaaggatgccatctcccagattgttggggatgccaaggagaagaataggaagttcactgagactgtggaacttcagattggtctgaagaattatgatccacagaaggacaagcgtttcagtggctctgttaagttgccccatatccctcgtcccaagatgaaggtgtgcatgcttggtgatgcccagcatgttgaggaggccgagaagatgggacttgactacatggatgttgaggctctcaagaaaatgaacaagaacaagaagcttgttaagaggcttgccaagaagtaccatgctttcttggcatcagaggccatcatcaagcagattccccgtctccttggtcctggtctcaacaaggcaggcaagttcccgaccctggttactcaccaggaatccctcgaatccaaggtgaacgagactaaggcaaccgtcaagttccagctcaagaaggtcctttgcatgggcgtcgccgtcggcaacttggcgatggaggagaagcagatccagcagaacatccagatgagcgtgaacttccttgtttcccttctgaagaagaactggcagaatgtgagatgcctctacgtcaagagcaccatggggaagccatacagggtgttctaagtatgctcttttgtgaagtctgctaggttctggcaccgaggttttattgaattaaactcttgttaaggatatgtttttggacgatcctatatttcgtcctggcgctactatgtttcagaatggtggtactactataagtatcctggcgctctaagtattgcttgaaaggatc

SEQ ID NO: 19812 - DNA, 790 bp, Zea mays
  Clone ID: LIB3152-005-A7_FLI
ccaggacaaggagggcatcccaccggaccagcagcgcctcatcttcgccggcaagcagctggaggatggccgcaccctggcggactacaacatccagaaggagagcaccctccacctggtgctccgcctcaggggtggcatgcagatttttgtgaagacattgactggcaagaccatcaccttggaggtggagagctctgacaccattgacaatgtgaaggccaagatccaggacaaggagggcattcccccagaccagcagcgtctgatctttgctggcaagcagctggaggatggtcgcaccctcgcggactacaacatccagaaggagagtacccttcaccttgttctccgcctcaggggtggtatgcagatctttgtgaagaccctgactggaaaaaccataaccctggaggttgagagctcggacaccatcgacaatgtgaaggcgaagatccaggacaaggagggcatccccccggaccagcagcgtctgatcttcgccggcaaacagctggaggatggccgcaccttagcagactacaacatccaaaaggagagcaccctccaccttgtgctccgtctccgtggtggtcagtaagtcatgggtcgtttaagctgccgatgtgcctgcgtcgtctggtgccctctccatatggaggttgtcaaagtatctgctgttcgtgtcatgagtcgtgtcagtgttggtttaataatggaccggttgtgttgtgtgtgcgtactacccagaactatgacaaatcatgaataagtttgttgtttgaaattg

SEQ ID NO: 19813 - DNA, 1214 bp, Zea mays
  Clone ID: LIB3152-005-F12_FLI
ctgtcagtccggtggtgcaaacatctatagtaactacaatacgacgtcttcctctccgcagaggccaccaatacatcatctattcatcttgctctctcctctgtccaaaaaggaggcgccgcgctcctcttcttctacgccgttcactctctctagtctctcccttcccttctccacgcctccgcccccactcgtgagactctacctagccctagcgccagcaccacccgcccaacctcccggagagagagagagagaggaggaggccttcgccgccgccgttgccgtcggccgagacgccaggatgttcgggtaccagaagggcctcgatgtcgaggcggggacatcgggcgccgccgccacgggcggcgcgcgccagctctacccggggatgcaggagagccccgagctgcgctgggcgctcatccgcaagatctacgtcattctctccctccagctgctcctcaccgccgtcgtcgccgcagtcgtcgtcaaggtccgcgccatcccgcacttcttcaccaccaccagcgccggcctcggcctctacatcttcctcatcatcctcccctttatcgtgctgtgcccgttgtacttctaccacgagaagcacccagtcaacctgatcctgctcggcctcttcaccgttgccatcagctttgctgtgggcatgacatgtgccttcaccagtggcaaggtcattctggagtctgcaattctgacaacagtggtcgtgctcagccttaccgcatacactttctgggccgtgaataggggcaaagacttcagcttcctgggtcctttcctgttcgccgccctcatagtgctgcttgtgttcgcactcatccagatcctgttcccactgggcaagctctcccagatgatctacggcgggctggcgtcgctcatcttcagcgggtacatcgtctacgacacaaacaacatcatcaggcgctacacgtacgaccagtacgtctgggccgcagtctccctgtacctggacgttatcaacctcttcctgtccctgatgaccctcttcagggcagccgactaggcgctctgctctcatcctgtctatctacgagtcggtgcctgaatgctcccgtggttaagctccggtacccagaattccagttccaagaatagagttgtatatagctacctgtgttgcctttctactagtatggtcttattcggcttggctcggttcgatc

SEQ ID NO: 19814 - DNA, 1080 bp, Zea mays
  Clone ID: LIB3152-008-H4_FLI
gtgtactactccttcggtccgtccccatttcttcctttccttggcctcgactcctcccgacgtgatcgctccagagaaaatttcgcgggtttagacaaacagcgattgggatcgagatcggggcaacatgagcaaggtgttcgagggctacgagcgccagtactgcgaggcgtccgcctccctcacccgcaaatgcaccgccgccgccgccctacagggagagaagctgaagcagaaggcggcggagatccaatccggcatcgatggcgctgaggcactgataaggaagatggatcttgaagcaagaaacctgcaaccaagcattagagctgatctcctagtaaagatcagggagtacaagtcagatcttaataaccttaagggagcgctgaagagggttactagtattaatgcacaacagggggcgagggaggagttgttggagtcaggaatggcagatacattgggggtttctgctgatcaaaggtcaagattgctcagggcaaccgagagacagaaccaaacaactgataggctcagagatagccatagaactatgctggagactgaagaacttggtgtctctatcctgcatgacctgagtcaacagcgccagtctctcttgcatgctcatgatgtattggacgaagtggataacaacgtcggcaagagcaggaggaccattggaggcatgatgaggagaatggatagaaacaagtggatcatcggtctcatcatagcagttcttgtcttggctatcctcgtgattctgtatttcaagttcgtgcactagtggattgcgttgcgtacgttgcatggacggtacgtagttttctactgcgaccagaacgaagaggaaggcagctgtgaatttgcttctatctacattttgcgatttcctgtatttattttcagttttctatttctttttaaatcatatttctgggggtgtgctcgtacggtaccggatgtgttgtgtgaggaaacaagttcaggccatgacgcagagttttgtatatctgattggtttctatttaaaagaaaaactgaacggataatcaataactaagcatatttggg

SEQ ID NO: 19815 - DNA, 719 bp, Zea mays
  Clone ID: LIB3152-009-A7_FLI
gtgcatctcccaccgccggtccacctgccgccgccggtccacctgccaccgccggtccatgtgccgccgccggttcatctgccgccgccaccatgccactaccctactcaaccgccccggcctcagcctcatccccagccacacccatgcccgtgccaacagccgcatccaagcccgtgccagctgcagggaacctgcggcgttggcagcaccccgatcctgggccagtgcgtcgagttcctgaggcatcagtgcagcccgacggcgacgccctactgctcgcctcagtgccagtcgttgcggcagcagtgttgccagcagctcaggcaggtggagccgcagcaccggtaccaggcgatcttcggcttggtcctccagtccatcctgcagcagcagccgcaaagcggccaggtcgcggggctgttggcggcgcagatagcgcagcaactgacggcgatgtgcggcctgcagcagccgactccatgcccctacgctgctgccggcggtgtcccccactgaagaaactatgtgctgtagtatagccgctggctagctagctagttgagtcatttagcggcgatgattgagtaataatgtgtcacgcatcaccatgggtggcagtgtcagtgtgagcaatgacctgaatgaacaattgaaatgaaaagaaaaaagtattgttccaaattaaacgttttaaccttttaataggtttatacaac

SEQ ID NO: 19816 - DNA, 841 bp, Zea mays
  Clone ID: LIB3152-009-E6_FLI
caacatagaaagtggaatccagtagcaacaatagagcaacaatggcgaccaagatattttccctccttatgctccttgctctttctgcatgtgttgctaacgcgacaattttccctcaatgctcacaagctcctatagcttcccttcttcccccataccttccatcaatgatagcttcagtatgtgaaaacccagctcttcaaccctataggctccaacaagcaatcgcagcaagcaacatacctttatcacccttgtttcaacaatcgccagccctatctttggtgcagtcattggtacaaaccatcagggcacagcagctgcagcaactcgtgctacctgtgatcaaccaagtagctctggcaaacctttctccctactctcagcaacaacaatttcttccattcaaccaactgtctacattgaaccgtgctgcttatttgcagcaacaactattaccattcagccagctagctactgcctactctcagcaacaacaacttcttccatttaaccaattggccgcactgaaccccgctgcttatttgcagcagcaaatactactaccatttagccagctagctgcagcaagccgtgcttccttcttgacacagcaacagttgctgcctttctaccagcagtttgcggctaaccccgcaaccctcttacaactacaacaattgttgccctttgtccaacttgctttgacaaacccagcagcctcctaccaacaacacatcattggtggtgccctcttttagattgcttattagttgtaattcaataataaagttttttggatgatgtatgtggccaaccagaaataagaagttacatttcc

SEQ ID NO: 19817 - DNA, 604 bp, Zea mays
  Clone ID: LIB3152-014-E9_FLI
agcagccgcagccatggcaataccccactcaaccaccgcagctaagcccgtgccagcagttcggatcctgcggcgtcggcagcgtcggcagcccgttcctgggccagtgcgtcgagttcctgaggcaccagtgcagcccggcggcgacgccctacggctcgccacagtgccaggcgctgcagcagcagtgctgccaccagatcaggcaggtggagccgctgcaccggtaccaggcgacatacggtgtggtcctgcagtccttcctgcagcagcagccgcagggcgagctcgcggcgctgatggcggcccaggtagcgcagcagctgacggcgatgtgcggcctgcagctgcagcagccaggtccctgcccttgcaacgcagctgccggcggtgtctactactgaggaaactatgtactgtagtaataatgtaatggagccgctgactagctacctagctcgctagtttactcatttagcggcgatgagtaacgtagtgtcacccatcaccatgggtggcagtgtgagcaatgacctgaatgaaccattgaaatggaaaggaataatatataaggaaaaaagatgattggaaactgataaaattt

SEQ ID NO: 19818 - DNA, 736 bp, Zea mays
  Clone ID: LIB3152-014-F9_FLI
ggagcgcagtagaacgcgtgggacggcaggcgttgattcggaagtatgctcctgtcgccattgtcattggggtagtattgatgctgttttggctcaagaacaagatatggtgattgtacagtacgaaggatactgggccctgttacaacacctgagaagaacagatggagataaaaaccaggtctattctggaacaagaagatgctttggtgacttgtatcccgtatctgcccattcaagcgattacttaagctgcccttttgctcctccctataagctagtatcaaagtgaattcgttggagtgcagacctgataagagcatttccggaagtctttcaaaatttcactctaaattgtcattttgagagtcatttgcttaataactgttattctgtttttttcactctccaacagctttttatatcctgtttgcactagggagccattctctttctatattggactaccgatgaatttggaggagatggatatattcggatagctgttttgaaaaaaagctgttgggggaatcttagcaattaggaagggtatagtctctggagaaactcatattttgtgcatccgttgaactcaatgtaatataatataagagctctagagttctacatcggggttgtggaactcaatgtaatacaagagctgtggagttgactttacatcggggttgtaatttttagggtggaactcaatataaggattcaggctggtctgatg

SEQ ID NO: 19819 - DNA, 862 bp, Zea mays
  Clone ID: LIB3152-014-G2_FLI
ttgagaccaacaagcaacatagaaagtggaatccagtagcaacaatagagcaacaatggcgaccaagatattttccctccttatgctccttgctctttctgcatgtgttgctaacgcgacaattttccctcaatgctcacaagctcctatagcttcccttcttcccccataccttccatcaatgatagcttcagtatgtgaaaacccagctcttcaaccctataggctccaacaagcaatcgcagcaagcaacatacctttatcacccttgtttcaacaatcgccagccctatctttggtgcagtcattggtacaaaccatcagggcacagcagctgcagcaactcgtgctacctgtgatcaaccaagtagctctggcaaacctttctccctactctcagcaacaacaatttcttccattcaaccaactgtctacattgaaccgtgctgcttatttgcagcaacaactattaccattcagccagctagctactgcctactctcagcaacaacaacttcttccatttaaccaattggccgcactgaaccccgctgcttatttgcagcagcaaatactactaccatttagccagctagctgcagcaagccgtgcttccttcttgacacagcaacagttgctgcctttctaccagcagtttgcggctaaccccgcaaccctcttacaactacaacaattgttgccctttgtccaacttgctttgacaaacccagcagcctcctaccaacaacacatcattggtggtgccctcttttagattgcttattagttgtaattcaataataaagttttttggatgatgtatgtggccaaccagaaataagaagttacatttccagattct

SEQ ID NO: 19820 - DNA, 727 bp, Zea mays
  Clone ID: LIB3152-016-F7_FLI
ctcagctaccgcgaccacgacgccgacgcgagagggcagggaacacagccactcgccgacgagaccccggcgcgcgcgagagaaagagaagagaggaggatcttttgttcgtgaaaaatattggaggcggagggaaggtgaaggagggggatcggagatgaacgtgttccggctggcgggggacatgacccacctcctcagcgtggtagtgctgctcctcaagatccataccatcaagtcctgcgcagataacattgctcctgagaagacccatcaaggaggaatatgttgacttgttgaggttgtcctggaatcagcagtgccatctaaaacgccgccaaatctcaccgggaggcataacgaacagcaaaatatagaggaaaacagataaaagagataatagatgtatttttaatcgattagatgttaggtaccttaatcagctgtattcctctggtacttagtaaccaggttcccggatcgatggcatcgagaaacgggaacatggtacatggtacgctactaaaactaagttttaacactacgggaacgagcttgttcccacgttcccggaaagaggaacgtgccaagttcccagttccctgttactaagctctggtatatatagagaggggtcgtcttatcctagtaaaaaaacaattctaaaacatgttttatatgttttcaatgtcaaaaaccaatatagaagttaatcgattcagaatct

SEQ ID NO: 19821 - DNA, 880 bp, Zea mays
  Clone ID: LIB3152-016-H1_FLI
gctttatctactccagagcgcagaagaacccgatcgacaccatgagggtgttgctcgttgccctcgctctcctggctctcgctgcgagcgccacctccacgcatacaagcggcggctgcggctgccagccaccgccgccggttcatctaccgccgccggtgcatctgccacctccggttcacctgccacctccggtgcatctcccaccgccggtccacctgccgccgccggtccacctgccaccgccggtccatgtgccgccgccggttcatctgccgccgccaccatgccactaccctactcaaccgccccggcctcagcctcatccccagccacacccatgcccgtgccaacagccgcatccaagcccgtgccagctgcagggaacctgcggcgttggcagcaccccgatcctgggccagtgcgtcgagtttctgaggcatcagtgcagcccgacggcgacgccctactgctcgcctcagtgccagtcgttgcggcagcagtgttgccagcagctcaggcaggtggagccgcagcaccggtaccaggcgatcttcggcttggtcctccagtccatcctgcagcagcagccgcaaagcggccaggtcgcggggctgttggcggcgcagatagcgcagcaactgacggcgatgtgcggcctgcagcagccgactccatgcccctacgctgctgccggcggtgtcccccactgaagaaactatgtgctgtagtatagccgctggctagctagctagttgagtcatttagcggcgatgattgagtaataatgtgtcacgcatcaccatgggtggcagtgtcagtgtgagcaatgacctgaatgaacaattgaaatgaaaagaaaaaagtattgttccaaatt

SEQ ID NO: 19822 - DNA, 325 bp, Zea mays
  Clone ID: LIB3152-017-C5_FLI
aagaccgtccagtacctcatcggctccggcatggatcccggaacggagaacaacccgtacctgggcttcgtgtacacgagcttccaggagcgcgcgacggccgtctcgcacggcaacaccgcgcggctcgccagggcgccgaggacagggccaagaaggacgagcccaggacggtcaagttcagctggatctttgatagggaagccgttgtttaggcacttgttgctgactgtgatatgtgctcagatcatgtcgctagctgtcagtgtctttgtcacaatgtgtttatgtgtttgaaatgcagtaagagtgtttttttcctgct

SEQ ID NO: 19823 - DNA, 1050 bp, Zea mays
  Clone ID: LIB3152-017-F3_FLI
cctccccactgcctcgtgtggccgtcgtctcccgttcggaacgccaagccccccctccggcgaaatggcccccaagcgaggtggcagggcgccggtgccggccaagaagaagacggataaagtgacgaaccctctattcgagaagaggccgaagcagttcggcatcggcggcgcgttgccgcccaagaaggacctgcaccggttcgtcaagtggcccaaggtcgtgcgtatccagcggcagcgccgcatcctcaagcagcgcctcaaggtaccaccggcgctcaaccagttcacccgcaccctcgacaagaacctcgctacgaacctttttaagatgcttctcaagtaccggcctgaagacaaggctgccaagaaggagaggcttctgaagagggcccaagctgagaatgaaggaaaaactgttgagtcgaagaaaccaattgttgtgaagtatggccttaaccatgtgacttacctcattgagcagaacaaggctcagcttgttgtcatcgctcatgacgtggatccgattgaactggttgtgtggcttccagccctgtgtaggaagatggaggtcccttactgcattgttaaaggaaaggctcgtcttggatcgattgttcacaagaagaatgcatcagtcttgtgtcttaccactgtcaagaacgaggataagcttgagttcagcaagatcttggaggctattaaggcaaacttcaacgacaagttcgatgaggtcaggaagaagtggggaggtggcatcatgggatccaagtcgcaggccaagaccaaggcccgggaaaagctgctcgccaaggaggctgcgcagcggatgacctagattgtctactgctgtgtctgccctgtagtttgacggggaagaactgatgaactcgtattgtggttttccgaatctagtttcatatgtttctgtccaccagaccatgtttagaagctttgcaagacagagtttacagtgtttatgtgatgcctcagatccatgcagctttgcttctaattgcctaagagcaacctcaaaagtatttcatg

SEQ ID NO: 19824 - DNA, 692 bp, Zea mays
  Clone ID: LIB3152-019-A3_FLI
ggcgataggtggacttcaatcgcttaaaggcatggcagtggatgagagtctgattaactatgatgtcctcctgcatgtgcaccagtgctgcccagactttgtggagctgaaggtgtctgcactgtacgtggatgaagacatggcctcagtcatctgcaactctcttcctcgtctgaaaaagttggagataccaagttgtgacatgtcttccgctgcgattataaggttccttgattgcctagagcagctcgagcacctggacatctcaggttacgagacatcagccatctcaagcccggttcttgagaaagcttcgcggctcaaggtcttcctctggaactcgaaatttgagcttggggagttcatggactgctccaattgtggagagcacaacattaaccctcaagaaccctgcaagtgcatgatggagcacaaggtcatggactggctggctggaccttcataagcttcctgaaccaaaggcgtctcttcttgtgtcttgttaaatcatgacgttttactggctgtaaaattccaacctctgtcaaagttggtgtctgagctgtatgtacaaggaaatatgccacttcaaatgtttagcgcgccttcatgcatgatacttagagaggtctgcagctttttaatgtaacaaatcgttgtatcaagtgttaatggaacctcttctttacacc

SEQ ID NO: 19825 - DNA, 580 bp, Zea mays
  Clone ID: LIB3152-020-D12_FLI
ccctactcaaccgccccggcctcagcctcatccccagccacacccatgcccgtgccaacagccgcatccaagcccgtgccagctgcagggaacctgcggcgttggcagcaccccgatcctgggccagtgcgtcgagtttctgaggcatcagtgcagcccgacggcgacgccctactgctcgcctcagtgccagtcgttgcggcagcagtgttgccagcagctcaggcaggtggagccgcagcaccggtaccaggcgatcttcggcttggtcctccagtccatcctgcagcagcagccgcaaagcggccaggtcgcggggctgttggcggcgcagatagcgcagcaactgacggcgatgtgcggcctgcagcagccgactccatgcccctacgctgctgccggcggtgtcccccactgaagaaactatgtgctgtagtatagccgctggctagctagctagttgagtcatttagcggcgatgattgagtaataatgtgtcacgcatcaccatgggtggcagtgtcagtgtgagcaatgacctgaatgaacaattgaaatgaaaagaaaaaagtattgttcc

SEQ ID NO: 19826 - DNA, 780 bp, Zea mays
  Clone ID: LIB3152-021-H6_FLI
aagactccatcaagcagctcatacgtatatcacttgccatgccagcctagcttcttccgtgtctttctttctcaataaatacatgccactcacatggtgctcctccatcttccaagtcaccaacgcaaattgcaccaagaaatccatcgagaggccgtcgacaggggaattaatggcgtcgtcgtctagcagcagccaccgccgcctcatcctcgcagccgccgtcctgctctccgtgctcgcggctgccagcgccagcgccgggacctcctgcgtgccggggtgggccatcccgcacaacccgctcccgagctgccgctggtacgtgaccagccggacctgcggcatcgggccgcgcctcccgtggccggagctgaagaggagatgctgccgggagctggcggacatcccggcgtactgccggtgcacggcgctgagcatcctcatggacggcgcgatcccgccgggcccggacgcgcagctggagggccgcctagaggacctgccgggctgcccgcgggaggtgcagaggggattcgccgccaccctcgtcacggaggccgagtgcaacctggccaccatcagcggcgtcgccgaatgcccctggattctcggcggcggaacgatgccctccaagtaactgcgaagagcatagtgcatgaggaatgagcttgtagctagctcatatgtctgaataataagcacagcaagaagatgaatgcatttctcggatcgttcatccggaacaataattaaaggggatccggatttgttcttgtg

SEQ ID NO: 19827 - DNA, 748 bp, Zea mays
  Clone ID: LIB3152-022-G7_FLI
cacagccgcgggctcgaccacggcgcctgggtgccgctgatgctcatgtacccggacgccagcatccccgtgtgccagctctcggtgcagaccgaccgcgacggcacgtaccactacaacctcggcaaggcgctggcgcccctgcgggaggaaggcatcctcatcctcggctccggtagcgccacgcacaacctgcgcaagattagcccgtccgacgcgcccgtgccgcagtgggccgccgagttcgacacctggctcaaggactcgctcctcaacggaaggtacgaggacgtgaagcggtacgaggagaaggcgccgcacgcgagggtggcgcacccgtggccggaccacttctacccgctgcacgtcgcgctcggcgccgccggggacgccgcgaaggcggagcagatccaccagtgctggtccaacggcacgctctcctacgcgtcctaccggttcaccaccaacacctgacgcgctgctcgtggtgtcggtggaataccacccggccagctgctgaattcgcggggaagcatccatcgacgggtgtggcactggcagcattgcacatactgtatttctaataaacccccgtgtgcctgccgttccgttcgcggtagatatgcgtttgttgatgttttgcattgtttggtgcagcagcttaggctgattgattgcctgcatggtggtgccgggatctcgctggcctagctgaatcatgcattctatcgagaaacatttgtttgtt

SEQ ID NO: 19828 - DNA, 827 bp, Zea mays
  Clone ID: LIB3152-023-F9_FLI
ctcggcacgcaggctagcagcacagcagcagccagagccatcccctctcctcgctacgcttcgcttcctcggcgccgattcctcctcctcctcctccaccctcgtccgtccccttccggcgcacgagctcgcccgagatggcgaacgcgagatcgggtgtcgctgtgaacgatgagtgcatgctgaagtttggcgagctgcagtcgaagaggctgcaccgcttcataactttcaagatggacgacaagttcaaggagatagttgtggaccaggtcggggatcgcgctaccagctacgatgacttcacaaacagcctccctgagaatgactgccgatacgcgatctatgatttcgactttgttactgcagaggatgtccagaagagcaggatcttctatatcctatggtccccatcctccgccaaggtgaagagcaagatgctttacgcaagctcaaaccagaaattcaagagtggcctcaatggcattcaggttgaactccaggccacagatgcgagtgaaatcagcctcgatgagatcaaggatcgggcacgctaggcgcaccgccatcgcgagtttcatgatcacgcatcatggactcgcctactactgtggatttgtatgccattatagacttggtgctgcgaaagactgctttggtgatttgtgggtttgttgctgtgtaaaaagatcctcatggcttccagaagaccatgaaggtttggatctatcatgtaattccttgttatctgccaattatgtatggactatggacatgtgttgcgctgttcaactcactacaaataagtaatcgatatattccctacc

SEQ ID NO: 19829 - DNA, 659 bp, Zea mays
  Clone ID: LIB3152-027-B7_FLI
gaagactccatcaagcagctcatactcaccaacgcaaattgcaccaagaaatccatcgagaggccgtcgacaggggaattaatggcgtcgtcgtctagcagcagccaccgccccctcatcctcgcagccgccgtcctgctctccgtgctcgcggctgccagcgccagcgccgggacctcctgcgtgccggggtgggccatcccgcacaacccgctcccgagctgccgctggtacgtgaccagccggacctgcggcatcgggccgcgcctcccgtggccggagctgaagaggagatgctgccgggagctggcggacatcccggcgtactgccggtgcacggcgctgagcatcctcatggacggcgcgatcccgccgggcccggacgcgcagctggagggccgcctagaggacctgccgggctgcccgcgggaggtgcagaggggattcgccgccaccctcgtcacggaggccgagtgcaacctggccaccatcagcggcgtcgccgaatgcccctggattctcggcggcggaacgatgccctccaagtaactgcgaagagcatagtgcatgaggaatgagcttgtagctagctcatatgtctgaataataagcacagcaagaagatgaatgcatttctcggatcgttcatccggaacaat

SEQ ID NO: 19830 - DNA, 1389 bp, Zea mays
  Clone ID: LIB3152-027-D10_FLI
ctcgccgtctgccttctgcgcctccatttcggcctctgtcccttgcaagttcaatctcacctccaaccatgggtaaagagaagtcccacatcaacattgtggttattggccacgttgactctggcaagtcgaccaccacaggacacctgatctacaagcttggaggcattgacaagcgtgtgatcgagaggtttgagaaggaggctgctgaaatgaacaagcggtccttcaagtacgcatgggtgctcgacaagctcaaggctgagcgtgagagaggtatcaccattgatatcgctctgtggaagtttgagaccaccaagtactactgcacggtcattgatgcccctggacaccgtgacttcatcaagaacatgatcactggtacctcccaggctgactgtgctgtccttatcattgactccaccactggtggttttgaggctggtatctccaaggatggccagacccgtgaacatgctctccttgcgttcacccttggagtgaagcagatgatttgctgctgcaacaagatggatgcaaccactccgaaatactccaaggcacgttatgatgagattgtgaaggaagtctcatcctacctcaagaaagttgggtacaaccctgataagattgccttcgttcccatttctggttttgagggcgacaacatgattgagaggtccaccaaccttgactggtacaaaggcccaaccctgcttgaggctcttgaccagatcaccgagcccaagaggccttcggacaagcccctgcgtctgcccctccaggatgtgtacaagattggtggtattggaactgtaccggttggtcgtgtggagactggtgtcatcaagcctggtatggtagtcacctttggtccaactggcctgactactgaggtgaagtctgttgagatgcaccatgaggcgcttcaggaggctcttccgggcgacaatgttggcttcaacgtgaagaacgttgctgtcaaggatctcaagcgtgggttcgtggcctccaactccaaggatgaccctgccaaggaggctgccagcttcacctcccaggtcatcatcatgaaccaccctgggcagattggcaacggctatgccccagtgctggactgccacacctcccacatcgccgtcaagtttgctgagctcattaccaagatcgacaggcgatctggcaaggagctcgagaaggagcccaagttcctgaagaacggtgatgctggtatggtgaagatgattcccaccaagcctatggtggtggagacattctccgcgtatcctcccctgggtaggtttgccgtccgcgacatgaggcagacggttgctgttggagtcatcaagagtgtggagaagaaggacccaaccggcgccaaggtgacca

SEQ ID NO: 19831 - DNA, 1497 bp, Zea mays
  Clone ID: LIB3152-027-D9_FLI
cctactcctccacccagctcgctgcttccggaatccggagagctcgcgtcgcgcgtgcgcgggcgtgggtgcgtgcggcggcgaagcaccagcaccaccctctcgcgtcgcgcgcgcgtctcgatggccgacggcgagccttccctcacgcgctggaccttcgaggatttcgtggtccactacgaagcgcgcttcggcctccggcgcgaggccgacggcgacggcgacggcgatggcgacgatgcacccccgccgcgcggatccgatcatggggccagtcgccccgccactgcccgcgccaacggcggcgcagacctcgccgtcttcgagcagttcgagcggatggagaggaaggtggagataagcaatggagctatagaggacggtccactgcagaaatctctacttccttcatttgaatctgcagaaatgcgcaacttagctgagacattgttaagggatataattcgtggaagtccagatgttaaatgggaaagcataaaaggtctggagaatgcaaagcgtcttctcaaagaagcagttgtaatgccaattaaatatcccaaatacttcacaggtctattatcaccttggaaaggcatattactgtttggtccacctggaacaggaaagacaatgctagctaaagctgtggctactgagtgcaaaacaacttttttcaatatttctgcctcgtcgattgtaagcaagtggcgcggtgactcggagaaactagtgaaagtgttattcgaacttgcaaggcatcatgcaccatctactattttccttgatgagattgatgctatcattagtcaacgtggtgaagctcgtagtgaacatgaagctagccggcgattgaaaactgagctattaatacagatggatgggttgactaagacagatgagcttgtttttgttctagcagcaacaaatttaccatgggagttggatgcagcaatgctgcgtcggctggagaagcgtattcttgttccattgccagagccggatgctagacatgctatgtttgaagagctcctgccatatacacctggcacaatggagattccctatgatgttcttgtggagaaaactgaagggtattctggctctgatattcgcctggtatgcaaggaagcagcaatgcagcccctaagacgggtaatggcagttcttgaaggcaggaaagaagaggtccctgagagtgagttgcctgaagttggcccagtaactacagaagatattgaacttgctttgaggaatacaagaccgtctgctcatcttcatgcacatagatacgaaaagttcaaccaagattatggcagtcatgtacatggctaaaggggagaagcttgttgtagggtttaatttgtatgctcatgcgtgggccaataggtgactactgaattcatcgacatgctgaggtatccttgtaaacactatgcttatccttgtatgctgtacactatcattcatttgatgagcaataagctgtttggt

SEQ ID NO: 19832 - DNA, 439 bp, Zea mays
  Clone ID: LIB3152-031-A11_FLI
ggggacggggtcggcacggggcgatgaggagcagcgaggccatggagctcctgggcttccatccctactccaggccctccccttccgagatcgcagaagcatattcttgttcgaaggacggaagaagatcagggagtaggatggaagttcatgttatgcgttctggtgttccgactagccacggaagatcaaatagaacgttggttaaagccccgtttctcctcataacgtttgcagcagtttcttttggcgccttcagcgcatcaagagcgtatcaacggcaaaaggaactgtgttcctctcagaacccctttctaccatagaggaagacggtgggctctgtccatgttctcatagacgagaagagcttcttgctacgttgtatacagatgtaaaacaatcacaccatcctgaataaacgtgccaacctgtgccttct

SEQ ID NO: 19833 - DNA, 1882 bp, Zea mays
  Clone ID: LIB3152-033-B3_FLI
caatttaatgatgcccccaacaaagaaagcgaaggctatggagaaagtggacgtggcaagcatggagaaaaatctctagctgaatcagtgggatcacttaacattggcattattgattctgagttcatggattcaagtcctctaattcatgataaagaatcatgttttcctctagaacctgagggctccgttaatgaagataattttacagctgtgctttcacaatttaacgatgcccccaacaaagaaagtgaaggctatggagaaagtggatgtggtaagcatggagaaaaatctctagttgaatcagtgggatcacttaacattggcattgttgattctgagttcatggattcaagtcctctaattcatgataaagaatcatgttctcctctagaacctgaggactccgttaatgaagataattttacagctgtgctttcacaatttaacgatgcccccaacaaagaaagtgaagcctatggagaaagtggatgtggtaagcatggagaaaactctctagatgaatcagtgggatcacttaacattggcgttattgattctgagttcatggattcaagtcctctaattcatgataaagaatcatgttctcctctagaacctgaggactccgttaatgaagataattttgcagctgtgctttcacaatatagcgatggccccaacgaaggaaatgaaggatatggagaaagtggacattacaagcatgaagaaaagtctctagatgaatcagtgggatcactaaccattggcattattgattctgagttcatggattcaagtcgtccaattcatgataaagaatcatgttctactggttctgcagctgaccaatgttcaaggactataccggctaaatatgaattaagttcagaagagtcagattccacaggcagtcatttggtgtttgacagtggcaagaattatctggagttgaacaatcattctgtcacagatttggaaaggatttacaatggacatgccacgtctgtagatcaatatgttcggggaaatggggagacattagctgaccatccaaaaaaagaggaagctggcctccaaaaggacactggcaccatagctcaacatcgtgatacccttgcttgtgatggggagtctgtgtgttcgagttgtgaagagccgagacgtggattaaatggcgagccatcagacttcagctcggagtcacactcgagactgaccccaacacataacacaggtggcaaattgtcgatggtttctgaacatccagtgcataatatggagtcagatatgactgggatggcaagtgatagcactaacccggagctgaatcctgaagccagcaccaggaacgaaatggacggctcccgatccactgataacccagtggaaccagaaaacgtagctcaggacagcgccactcgaggaaggcctgaaggcgacgcccccagatcagggaaaggggttctgaggtcggtcgctggaggaatcacccttgtcggcgcagtgttcttcatgttccatctcagtgccgcgctgctgcagaagaagcaaggggggaagctttgcgacggtcataccatctctttcgggaaaatctgctcggagcaacgcaagggccaggaacatgggcagagaaaacgtccctgatgcgtatcccggggggcggctgaaggcttgacaagacgatggagcacagtctgcttcacagaatctggatgaactctgtcgacccaccagtcaagttgaagtcagtaccctgccttctttcatgtacagaacgacataatcatatgatttaggtgatcgattacagcaaatagtgggacagattttgtacaagtatagttgaggcatgaataaagtctagtttccaacc

SEQ ID NO: 19834 - DNA, 1221 bp, Zea mays
  Clone ID: LIB3152-033-G12_FLI
cgacaagagaaaggattagaaaaaggaaagatccatggacatgatctccggcagcactgcagcaacatcaacaccccacaacaaccaacaggcggtgatgttgtcatcccccattataaaggaggaagctagggacccaaagcagacacgagccatgccccaaataggtggcagtggggagcgtaagccgaggccgcaactacctgaggcgctcaagtgcccacgctgcgactccaacaacaccaagttttgctactacaacaattatagcatgtcacaaccacgctacttttgcaaggcttgccgccgctattggacacatggtggtaccctccgcaatgtccccattggtggtgggtgtcgcaagaacaaacatgcctctagatttgtcttgggctctcacacctcatcgtcctcatctgctacctatgcaccattatcccctagcaccaacgctagctctagcaatatgagcatcaacaaacatatgatgatggtgcctaacatgacgatgcctaccccaacgacaatgggcttattccctaatgtgctcccaacacttatgccgacaggtggaggcgggggctttgacttcactatggacaaccaacatagatcattgtccttcacaccaatgtctctacctagccaggggccagtgcctatgctggctgcaggagggagtgaggcaacaccgtctttcctagagatgctgagaggagggatttttcatggtagtagtagctataacacaagtctcacgatgagtggtggcaacaatggaatggacaagccattttcgctgccatcatatggtgcaatgtgcacaaatgggttgagtggctcaaccactaatgatgccagacaactggtggggcctcagcaggataacaaggccatcatgaagagcagtaataacaacaatggtgtatcattgttgaacctctactggaacaagcacaacaacaacaacaacaacaacaacaacaacaacaacaacaagggacaataaggttagtgtgccagaccgtggaagcgttgctgctataaataatgcaattgggtagtagtacccagtgaaatcaggagagactagtagcctagggtgcattttgatttatttagttttggtcaagatgacaagtcatcatgaatcaccctttttattcatttgcatgttttgatgagagttcatttgcagtaagctatatatcattggat

SEQ ID NO: 19835 - DNA, 284 bp, Zea mays
  Clone ID: LIB3152-034-H10_FLI
atggtagtagtatttggccagctagctacaacaagccccgcttccttcttgacacaacaacaattgcttccgttctaccagcagtttgtggctaaccccgcaacccttttacaactgcaacagttgctgccctttgtccaacttgctttgacaaacccagcagccttctaccaacaacacatcattggcggtgccctcttttagattgcttattagttgtcattcaataatgaagttttttggctgatgtatgtggcctcctagaaataagaagttatatttcc

SEQ ID NO: 19836 - DNA, 1034 bp, Zea mays
  Clone ID: LIB3152-035-A11_FLI
ggcaggaagaccgaagaccgagccgtgcgggggctcgggacgggaacgggacaggaccccaaaatctcagatccttcctgcccgcccgcccgtgcccgtcgacgcgtcgttcttgccggccgcgccccacctccgccctctcctcctccagggggatcggatacgccacaggctgcgcgatggtgctgtgggtcttcggctacggctccctcatctggaaccccggcttcgacttcgacgacaaaatcctcggcttcatcaagggctacaagcgcacctttaatctcgcttgcattgaccacagaggcacaccggagcatccggcgaggacctgcacgcttgaaaccgacgacgaggccatatgctggggaattgcatattgtgtcaagggtggtccagaaaaagagctaaaagcaatacagtacttggagagaagagagtgtgagtacgaccagaaaatatccattgatttctacaaggaaggagatcccttgaaaccagctgtgacgggcgtcttagtgttcgtttccactccagatccaattggcaacaagtactatcttggccctgctcctctgcaggatatggcaaggcaaattgctacagccaatggccctactggctataatagggattacctgttctcaatggagaaggcattagccagcattagccacgaagatgattcgatcatagagcttgcaaacgaggtgaggaaggtgctcaacagaacaaaggagaccaagatcactggtgccaatgcttccctgaaatcacatgcccctcttgtgcacctgtccgcgcttccagaaggcaccgttgtggactcgagatagcgagagccttggacgttggacctctactcggaatttacttccagctcttgcatgtttgtggccatcatgtactgattttcccttttcaacagttgtcgtgaggctgtatcttctggagttaaaaaaaatgctaaaagccggcactaataatgatattaacttgaaaaatctatcggcgatccttgaacttggaggacc

SEQ ID NO: 19837 - DNA, 1640 bp, Zea mays
  Clone ID: LIB3152-035-D11_FLI
gctgccgctccagccttaactgttttgttaaagatgggttcctggcttcctgctgaccaatttagtatcaaggtcttgccaactattgtcaagctttttgcctccaatgaccgagctatccgagcatgtcttttgcatcacataaatcagtttggggaatcaatgtcagctcaaattgttgacgaacaagtttttcctcatgtagccactggcttctctgatactgatggtactattcgtgaactgacattgaagtcgatgctcgtattagcaccaaaattatctcagcgtacaatctcaggatctctcttaaaatatctctctaagctacaggtggacgaagaacctggtatcaggacaaacacgacaattcttcttggcaatattgcaggctacatgaacgatgggacaaggaagagagtgctgatcaatgcattcacagttcgtgcattacgtgataccttccctccggccagagcagctggaatcatggcactaagtgtcactagttcatactatgaaatgacagagattgcaactcgcatcctgcctaacatcgttgtgctcacatttgacccaaatagtgatgtccgaaccaaggcttttcaggctaccgatcagttcttgcaaatagcaaaacaacaccatgaaaagcttaatacgggagacaacagtgtggctgaaagtactggtgttaagttaaagcctggaaatgcaggtttacttgggtgggccatgagttctgttacacaaaagggtaaaccttctgaccatgctccaatatctactgcaaatgccaataattctcaagcatcaacaacctcgactgccactccagacactcaggcttccacactagcgtatgcaccatccacatccacctcgcttgatcaagctgcatcagcatcagcaaggtcgtcagtagatgggtggggtgagcttgaggatggtaatatccatgaggagaatagtagcgataaagatggatgggatgatgtagacccatttgaggacaagccatccccatctcttctatccaatatacaggctgctcagaaacgtccagtggtgcaaccaaagcaaccggttgcaaactcatctaaaccaaacccaccgaaagcgccaaagtcagaagacgatcctttgtggggtcctatagctgctgcaccacctaaaagtgcagtaaaatctgcagacatcaagccatcaacatcacataatgatgaggatgacctctggggttcaatagcggcacctccaaaatcatctgggaagcctttgaagccagctgtagcgaatagtgacgacttatggggtgccatcgcagcacctccaccagcaaccaaagccagacccttagcctcgtcaggtaggggccgaggaacaaagccagcgcaaccaaaacttggtgctcaaagaataggaagaacatcttcaactggaatgtgacgtcttatggtatcaagtgttgtacaagaatgcaaagttttccttttttcccctgccttgcgttgagtctgtccaggatgacattctttgtaaactagtaaaaagatttatgtatatgagcacagttttgaccaatgtattagtattattttaccattgtgtattaaaatagatccagaagatttttgtac

SEQ ID NO: 19838 - DNA, 1165 bp, Zea mays
  Clone ID: LIB3152-035-F7_FLI
tacctgcttcacaagatcctggtacaagcttgttgggaagcgattatcctgagccacttttgttaggttctttgtttacagctgattcaacaaatttcttatctgcatctggaagcataagtaaccagcaaaattctggatccagctctagttccatgctcaggcctgctgttaatgttggaacacaagtccctgagttcaacgtatctcagccaagtacaactttaagaggttcatctgatgtgttcaggaggtccttaatttctgctggcatttctcattctagaagttcaagcatcccattgcagcaccgtggaaattcatccacatcacatgagattaggaatcatcagccaggatcaagctctcgtgcacatcagcagcaccccttaagacccggtcattcctctgtagacaggcagagctctggttacttggaccttcagtcttttatgcagaccatagcttcaagggaaggaggcagaccaatgtcagagatccgcaatgtcttcgatcagattcgtcaggggagaaatgcacgattggaggatttgcttctcattgaccggtcacttattatgagacgagctaatttgattgatagacatcgggatatgaggcttgatgtggataatatgtcctatgaggaattgctggcactaggtgaacgcattgggtacgtaaacacaggacttactgaagaaaagattttgagtaacttgaaacaatggaaatgtgtcttaaaatcattggatgatcctccaacaagtgttgaaccatgctgtatttgccaggaagactatgtggaaggcgaggacctgggcaggctggattgtggtcatgacttccacaccgcatgtatcaaacaatggctggttataaaaaacctgtgcccaatctgcaagaaaacagcactggacacctagaaacatggctgcctttttccttaggaaaaagccggtagcggcagggcaagtggttgccatctaaccacaccctcccatgactagcaaagtatgttacacctttcccatcatcaacatacatgtgggaatctatactataggtggtacatggcacttgcctgaagccaatggctgtagaccatggagttttatcctttgttttttcaatcttagatttgggatttaaaatttaaaaaaag

SEQ ID NO: 19839 - DNA, 1365 bp, Zea mays
  Clone ID: LIB3152-036-E1_FLI
agttctctctctccgtatctcgcttcgccaccgccggcgagaggtagggtttcgtgcgccaccgtcacttccgcccgccatggccgagacctccacgtatcagattctggtgcgtctcctcgacgggcgtaccagatgtctccgcttctccacgcccaccgtttccggcgccgtgctcctcgacgccgtcgcgtcgatctctcgcgttcccgccgccgctctccgcctcgtcaccggcggcatcgacgtatcgccctcttccgtcctcgccgcagcagctgatggccagttcccctactcgtcagcgctcctccgccttcgaggaagccgccgaccgccagctagaaaagctcgccgagaacttcatcaaaaagaaggccaaggaagcgggccgcggcggcggaccctcaaccgctgaggtggacaaatatctagagaagtaccgcaaggatgctgagatctgcgtcaacgcggttgaggaatccgtacgtgcatcccttggaaagaggaagaccgcacctaagctgccctctggcgcagacgctaagaagcttaagatttggttaggaaagaacaaagtagaagaagatgaaagtgatagtgacagtgacagtgatgtggatgatgaggacagtgaagatcttgagagcgcagatgcaaaatctgtagtagttgatgaagggaattactcaaatggatccagaaaaaatgaggagaagcttgatcttggttctgtttctgggtcatcacattcagaaggagagtcttcaggagaaaagtcccaactgacaacaagttcaggagctgaaggtggtgactttgaatctggtgatagtgcagagcttgaggtaggaatggtggatcatcccatttctgttgctgctgcttcagaagaagtgacagcagatgaggataacactgctttagctacttcaaaccaaaataatccagaggtaccacaagttgaagaagtgcggaaagcagacaaggacaacactgcttcagctacttcaaaccaaaacaatcaagaggtgccacaagtagaacaacatgttgacgtcagcaactcttattcagagccgttggaccttgcaaagtacagttcatctgcagaattggaggtgcttggtctggagaagctaaaaatagagctgcaatctcgcggattaaaatgtggtggaactttacaggagcgtgctgcccgactcttccttctgaagacaactccattggacaagttaccaaagaagctgcttgcaaaggctaatggggggaagtgagaagttgtaccaattatataaagaagtaccaatggtgcaacgcttaagattttctttgtcaatatatggaaatctgttgtggtgt

SEQ ID NO: 19840 - DNA, 525 bp, Zea mays
  Clone ID: LIB3152-039-D11_FLI
gacacacacacaccacaccacggcaccgctagtgagaagcagagcgggaggacacgcggcgcggactgcgatggctcgtgcgctcggcgcttgcgtgctgctcgccgtcctgctcggtgccctggcgccggcgccggcgccggcggcggccgcgcgcgcccacgacgaccagggcagcggggccggcatacggcagccgagcggcgagtaccgcgggaggaaggtgggggccaggaccgaggtgcgggacgtggagggcgacggcgaggtgcaggagctcggccggttctccgtcgccgagtacaaccggcagctccgagaaggtggcggcggcggcggcaggctcgagttcggcagggtggtggcggcgcagcggcaggtggtgtcggggctcaagtactacctccgcgtcgtggccgtggaggagggcggcggcgcggggaacggcggcgagcgcgtgttcgacgccgtcgtcgtcgtcaagccctggctcgactcgcgtaccctgctcacgttcgcgcccgc

SEQ ID NO: 19841 - DNA, 112 bp, Zea mays
  Clone ID: LIB3152-039-H4_FLI
cggcgatgattgagtaataatgtgtcacgcatcaccatgggtggcagtgtcagtgtgagcaatgacctgaatgaacaattgaaatgaaaagaaaaaagtattgttccaaatt

SEQ ID NO: 19842 - DNA, 2011 bp, Zea mays
  Clone ID: LIB3152-039-H5_FLI
ccgatccatccgcagcgggcggcggctgcctcctcggctcctcccctgcggccgagctcgcccctcgccccgccgcctcaactcgtctcgcccgcgaccgatttcctccctccgctcgccgcgccgcaacccggagataaggccgcgctcgatcgagaaccacctggggtccatcgtcatcgcgaccagctccggcgaggcgtccgccctttgcagcccggtgtctctgcgaccggcacacagctccagagggtgtcttggactgaagaagatatcagcaaagcttgaaaaggactgagagatgtcattgggctatgctgagaagctgtcctaccgggaggatgtgggtactgtgggaatgcctgagatctttgagacccctgagctagtccagaataagatagaagagcttgctgccatggtgcaaaagagtaagcatttagtggtgtttaccggggcagggatatcaacttcatcaggcatacctgattttcgagggcccatgggtgtctggaccttgcagcgtgcaggaaaaggtattcctaatgcatcacttcccttccatcatgctgttccaagcttgacacatatggcactagtcgaacttgaaagagcaggatttctaaagtttgtcataagccagaatgttgacagcctacatctccgttctggtttcccaagggagaagttggctgaattacatggcaattctttcaaggagatctgcccatgctgtaaaactgagtaccttcgtgattttgagattgagacaattggactgaaggatactccaagacgttgttctgataagaattgtggagctagattaaaggatacagttcttgactgggatgatgctttaccccctgaggagatgaatttggccacggagcattgtcgatcagctgatcttgttctatgtctaggaactagtttgcagattactcctgcatgtaatatgcctctgatgtcaatcaagaatggggggagggtggccattgtaaatcttcaggcaactccaaaggataaaaaggcaagccttgtcatccatggacttgttgataaggtcattgctggagtcatgagcaagttgagtctgcgaattcctccatacatacgtactgactttgttcagctcactcttaggcactcactgaaaaagaaatgtgttagatggactcttcgagtaacaagtattcatggcctccgagcaccattgccatttcttcagtctgtcaaggtttcctttccagaaagacctgatctgaagtctgtagtgcttaaagagcaaccattctctttgcagagggaaacatcgatgaacaaaccatttttcatgctgttgacattaaatttcagtgatggttgcagctgtttgagctcctcaattggatggcctgttgattttcagaagcgaaaagacagcttcgtcagagatagagctctagtcctacgggagttgtactctgctgcacagcgcgagtcttgcattgggcaacaagaaattctggaaagagagaacctaccaagagctgagacgtctattcatggaatcgtgacaaacatcgttaggtatgacactgaagatgaaaagttggctccacccaagaatgatttgatgaatcacagccgcagcaaccctgcaaaacggcacgtggaaggcactgattgccactcgtcattgccaaagaaactgaagtactttttgaaagacaagaagctgaactgctaaaagtgtaaaaccgtagaaggtagatagagaatgctgtaggtttgtttattttggttattagacgagttatacatagcgtagatgcatgggaagttcgcatgctaaggttgaactcttctgctgcataggaaagttggctgacttcttatattatgcgagcctagcttaggtacctcctgtggggagaagcgattgcaatacatctggtggtatcctcttaccagtcctctggtggtatcatcttttgttcacggaggtcgatgaagtactgcctccgat

SEQ ID NO: 19843 - DNA, 1868 bp, Zea mays
  Clone ID: LIB3152-041-B8_FLI
ggagaaccaaggtaatcgaacccggaagcgaccttcttgagcccgaagcaaaaggcactgctcatcgatccgccaccacgccacaaaatcctctcctactccggcagttctgctcgccgccgcctccacgatgacggaagacgtgcagatgaacgactcggagccccagcctgcggcctcagctcccgccgtcggggcgccggcgctctccacactacaccatctgaaggagatcgcgtccgtgatcgaggccggttctctgtccaaggaggtccgccggatctcccgcgccttccgcctcaccgtcgcgctccgtcgccgcctcgccgcgcgggacgtctccgccttcctcgccttcgcgctacccgcgtcctccgaagcctacggacgcctcactgccctggtgcccaaggaagatgatactgagatggatgttgatgctgcagctccagcaactcagatttcaatcaaacatggtctccctgagattgaaatatattgctacttgctcgtactgattttccttattgatcataagaaatatgatgaggctaaggcatgcgcaagtgtgagcattgctcgcctgaagaatctaaaccggagaactgttgatgttttggcatcacgactgtacttctattactcttatgtgtacgagcttaccaacagccttgctgaaatccgtgggaatttgcttgctctacacagaatggcaactttgcatcgtgacgagcttggccaggaaacactgctcaatctcctccttcgcaattacctccactacaatttgtatgatcaggcagaaaagcttagatcaaaggcacctcgttttgaagcacactccaatcaacaattctgccgatacttgttctacttgggtaaaatcaggacaatccagttggagtacaccgatgctaaagaaagcctcctgcaagctgctcgtaaggcaccaataacagcctgtggttttcggattcagtgcaacaaatgggctatcatagtgaggctgctgcttggagagattcctgagaggactgttttcatgcagaaaggaatgaagaaagctctgataccttattttgagctcacaaatgctgtcagggttggggaccttgaactgttcagggctgttgcagacaaatttgcaagcacattcagcgcagacaggactcgtaatttgattgtgaggctgcgccataatgtcattcgaactggactgcgcaacatcagcatttcttactcaaggatctcccttgctgacattgctaagaagctaagactagactctgagaaccctattgctgatgcggagagcattgtagccaaggccataagagatggcgccattgacgccaccatagatcatgcaaatggctggatggtatccaaggaaactggtgatgtctactcaacaaatgagccacaaattgcattcaactccaggattgcgttctgcctcaacatgcacaatgaggcggtcaaggcgatgagattcccccctaattctcacaaggaaaaggagagtgctgagaagcgccgagagaggcttcagcaggaggaagaactggctaagcacatggctgaggatgatgacgacgacttctaagttagctgccttttgagcaactacttgcaatgtggagtttgttcgatttgtgaacgcctggttcaaagcaattcccctacctctagttactccagtcatgcaaacactgaagttcatccactgtaatgttgtgtcgatcaggattttgtattaattctatacttgagttttagtccccctgaattgttgaaccagggaatttactcaccattaaacggctttgtttatttctttaatcccagttcggcctcttttgaaattc

SEQ ID NO: 19844 - DNA, 518 bp, Zea mays
  Clone ID: LIB3152-042-A8_FLI
gaccattagctttatctactccagagcgcagaagaacccgatcgacaccatgagggtgttgctcgttgccctcgctctcctggctctcgctgcgagcgccacctccacgcatacaagcggcggctgcggctgccagccaccgccgccggttcatctaccgccgccggtgcatctgccacctccggtaccaggcgatcttcggcttggtcctccagtccatcctgcagcagcagccgcaaagcggccaggtcgcggggctgttggcggcgcagatagcgcagcaactgacggcgatgtgcggcctgcagcagccgactccatgcccctacgctgctgccggcggtgtcccccactgaagaaactatgtgctgtagtatagccgctggctagctagctagttgagtcatttagcggcgatgattgagtaataatgtgtcacgcatcaccatgggtggcagtgtcagtgtgagcaatgacctgaatgaacaattgaaatgaaaagaaaaaagtattgttcc

SEQ ID NO: 19845 - DNA, 2015 bp, Zea mays
  Clone ID: LIB3152-045-B7_FLI
cggtgcctgccacgcctgtcgcgccgccccccaggcggacctacagcgccaacacggggcgcacccggagcatcaactccgacgacatgtcctactcctactcggtgttctcgcacaacccgagctgctccctcacgcacaactccaccgacatctacgccgccggggagggcaccaacggctccgtccacagccggttcaacttccgccccatgggggacggcagcgtcgccttcgccccggcgcagctcaaggagggcacctcgtccttcttccccacggagctccccgccaggatggcagccgcgctcagcgctggcgccagctttgacgccagccatggagggatgcactcgtcacggcctcataggatcctgcgggagatcgtgtcggaccctgtgccagccatggctcaggccctgcaggattttccgagtgaaaccctggaggtgctgcgggagacagtgcggggtatggttgatgctccggagaagagggatgaactgtcgagcctgcagcggaagctggagcgtcgctcggacctgactgccgaggtgttggggcgggcaaacaagacgcagctggagatcctggtggccatcaaaaccggcatggccacttttgtcactggtaagggccgagtctccagcagcgagcttgtggagatgtttctgatgacacggtgccgcaacctgaactgcaagagtgccgtccctgtggacgactgcgagtgcaagatttgctccaccaagaagggcttctgcagtgcgtgtatgtgcccggtgtgccagaagtttgattgtgctgcgaatacatgcagctgggttggatgtgatgtctgctcccattggtgccatgctgcatgcgcgctagagaagaacttgataaggccaggtccgacattgaagggggcgatgggcacgaccgagatgcagttccagtgcctcggctgcaaccatgcttctgagatgtttgggtttgttaaggaggtgttcaattgctgtgctcagaactggagtgctgagacacagattaaagagctggactttgttaggaagatatttgctgctagtgaggatttcgaggggaaggggctccatgccaaggcagaagaggtcctcagcatgcttgtaaagaaactcatttctccttctgatgcgacgaacaccatgctacaattctttaaatatggtgtaacagactgttctgttactggtagcaagtcaaaaggaatactggcggctcagacgagtaaatctacagatatgcttcatcttcaggccccaaccatcactccgccaaaatccccgtttaacttcaagccgagcacctccattcttgattcacagatcgatgtgctcaaggccagcccaaaaccactccctatagaaccccatttcaactccagctcaaaggacgacgactcctccagccttgagaccatcgtgaagtgcaaggaagctgaggcgaaactgttccagaaactggccgatgatgccaggaaggaggtagacagctaccggcagatcgtccgcaccaagacccagaaactagaggaggagtacgccacgaaggtggcaaagctgtgcttccaggagacggaggagaagaggaggaagaaagttgaagagctgaagacgctcgagaactcgcactacgactaccacaagatgaagctgcggatgcagaccgaaatccagggcttgctcgagcggatggaagccacaaagaagatgtgggtataggctcctgttaacaatttcatgttgctgctgcttaatgtttcgggtatagactccagctaacaactgcctgatgctgctgctgctgctgaatacctgagatttggtgttgttcgttaggagagtgtccattgttgtattttttttcaccatcttgtgttataatctaaatgctgttgtaacttgcaagtggatgcctagccttgcgcttgctgatataacttggcagcattcactcagttaatcacttcagggttgttccgagttcaaagt

SEQ ID NO: 19846 - DNA, 907 bp, Zea mays
  Clone ID: LIB3152-053-F8_FLI
ctctattctttcccttttcctcgtatccatcctccggcgtccgcccttctctcgcgcgcgccgaccgccgccgccaggtgccaggaagtcgtgggaagtcttcttcggcgacgagcacccgccaggccatatctctgcaatgggtgactacacaatccagattagcaccaagctcattgaccagcttgctcgtgatgacgagaaggtaaaacggaaagccaggaagcccaagcctaagaagaagcccaccgtccagccacatgaagagcccctggaattcccgagagaaccaaagacgacaagccttgctactgctcctgggtggcctctgcagcctccccctatgtttctgccagtgacccctgctcccccgccacccccggccacaatgccggaggtggaagccattcgttccgtcctgaaagaaagtgaggcgcttctcaagaagctggagaaccaggaaactggggcacgccaagagctcagcaagagagcaaaggagctgcacgacaaggagttcaagctaccataccagaaacccatgccctgcacccaggagagggcaggctgccttgagtgttacaagaccaatacaaaggacccgctcaagtgtgctgaagcagtcaagagatttgaggcatgtgctctcatggccatcaaaagtactgccgcaaaagctgattagtatgtagtccgtgaagctttgtgagttggggcgagctgatacgcggactctgttttttatcttttgaggcaattcaaataaccaaggattttcatgggacccactgtagatttctaatgccactgcactgggctacctgaggcagcgcaccttgagcttagcgatattgcatatgtttgttaaaattggtatatcaagttgctggtgcaaaggttttttctg

SEQ ID NO: 19847 - DNA, 936 bp, Zea mays
  Clone ID: LIB3152-056-G2_FLI
gtgaaggggcaccacttctaccactactatttgtgttggttaacatgggattcaatatatcattactaaacctactaaagatctcctcagcagtcatatcttccttggcttctacattctcagttccgctgtccatctacgctttcactctgccactgccgtatatcggtgcggcgtcatctctgccacctggctttgttgcgggtgcagcggtactcaccaccggcttactactatacagcctaccacaggcacaacattatgggaattctttccacaacaagaatgatgactagtcagcattcatttcttcattggtttataatcacccttcactccaagatggtgcgccatctgggttcgaaaggttggagcagaagttctcctgagggccaccagactgttgtatgttgtatgaaacatatcatatatatatacccaccaataaaggtgaggaaatatcatatggatatactgggaataaagagcgagaggatgtataaccgaacaagtacctggccgtcatacattgttgtttactgagtgaaggtcggagaagagcatggacagtggttagacgggaagaaaaccagggagaagagcaggagcatcatcaccacagggacgaagagaagaaacagcggtggtggcggaaggggtggcagcaccaacggcaggcacaggaggatcactgtcgccgccagcaacatcatcagtactctcttgctcatcgccgccgccctgcgctcgctgtgatggaacttgcttgtgccaacccccaatggctgcccggctccagtctttttctaggctttcatgtgaggaagttgtactatgtgtgagagaaagaaaatgttagttgcccccgatgaaggaactggcaaggtatatgtacatggccagcttgaatcagcaggccagatggggtgttttggc

SEQ ID NO: 19848 - DNA, 979 bp, Zea mays
  Clone ID: LIB3153-004-H10_FLI
cgacccaattctcctcaatcaaagaaagtccccacgcagagcaagccaagatctgcgccgcggcgaggcgaggcgaagcaaagcaccggctggctcccatggccgtggacctgatggggtgctacgccccgcgccgcgccaacgaccagctcgccatccaggaggcggcggcggcggggctccgcagcctggagctcctcgtgtcgtcgctgtccacgcaggccgccgcgccgcacagggccgcggctcaccagctgcagaagccgccttcgcagccgccgatcggcgagatcgccgaccaggccgtctccaggttccgcaaggtcatctccatcctggaccgcaccggccacgcccgcttccgccgcgggcccgtcgtcgagccgccaccggtgcctgctccggccgtcgccgctcccgctccggcccccgctctccacgtggtggctcccgtcgccgtggcgcagccccagagcctgaccctggacttcaccaagccgaacctggccgtgtcgggcggcgccacgtccgtcacctccacgtccttcttctcctcggtcacggccggcgagggcagcgtgtccaagggccgcagcctggtgtcctccggcaagccgccgctgtccggccacaagcggaagccctgcgccggcgcgcactccgaggccaccaccaacggcagccgctgccactgctccaagagaaggaaaaaccgcgtgaagaggaccatcagagtgccggcgatcagcgccaagatcgcggacatcccgccggacgagtactcgtggaggaagtacggccagaagcccatcaagggctccccctacccacggggctactacaagtgcagcaccgtgcgcgggtgcccggcgaggaagcacgtggagcgcgccaccgacgacccggccatgctggtggtgacgtacgagggcgagcaccgccacacgccgggcgcgcccgcgcccgcgcccagccccct

SEQ ID NO: 19849 - DNA, 572 bp, Zea mays
  Clone ID: LIB3153-005-B5_FLI
ccatcgcacaaatcctcttcctcgagttctcctcaaccaaattcaaagtcacagcggcgaaactctcggcgatgtctggccgcggcaagggcgggaagggtctgggcaagggcggcgccaagcgccaccgcaaggtgctgcgtgacaacatccagggcatcaccaagccggcgatccgcaggttggcgaggaggggcggcgtcaagcgcatctccgggctcatctacgaggagacccgcggcgtgctcaagatcttcctcgagaacgtcatccgcgacgccgtcacctacaccgagcacgcccgccgcaagactgtgaccgccatggacgttgtctacgctctcaagcgccagggccgcaccctctacggtttcggcggttaggtcgcccctctcccggtggcgaattacgtggtggcggtggcggtcgtgttgtgttcttggtctagttagtctgtgttgtctttatcggtgctgttttctgtggtggttgtactgcatcgttctagtttctagtccatgtgctgtaatatctcgctgctgtaatcaatggaatgtcctcgtttcaagcct

SEQ ID NO: 19850 - DNA, 1026 bp, Zea mays
  Clone ID: LIB3153-005-E8_FLI
ccaatctagaagcgcccctctccctctctctctctctcttcgccgtccgaagctccgcaccccaatctaatcgacacctcgccgagatgggccgcaagttcttcgtcggtggcaactggaaatgcaatggaaccacagatcaggtcgagaagattgtcaaaaccctgaatgaaggacaggttcccccttcagatgttgtggaggtcgttgtcagccctccttatgtcttccttcctgtggtcaagagccagctgcgccaagagttccatgttgcggctcagaactgctgggttaagaagggaggtgctttcaccggtgaagtcagtgctgagatgctcgtcaaccttggtgttccctgggtcattcttggacactctgaaaggagagctctgctgggagaatcaaatgaatttgttggagacaaggttgcgtatgccctgtctcagggactaaaggtcattgcatgtgttggtgagacacttgagcagagggaggctgggtctaccatggaggttgttgctgcacaaacaaaagcaattgctgagaagatcaaggactggagcaacgtagttgttgcctatgaaccagtttgggctattggaactggtaaagttgccaccccagctcaggctcaggaagtgcacgcctccctgagggattggctaaagaccaacgtcagccctgaggttgctgaatctactaggatcatttacggaggctctgtaactgccgcgaactgcaaagagctagcagcacagcctgatgtcgatgggtttcttgtcggtggagcttctttgaagcctgagttcatcgacatcatcaacgcggccaccgtgaagtccgcttaagatgttacgctgaagacgaacatactttttttttgctcaactgtgctatgtaagctagtagcttttgcgcaggagcagagactgttttgcctgcccccaacttttagcttgagcttgctaataatgtttacctctggacgtatcaataatggtgcttatgtaccccttttttgtgccg

SEQ ID NO: 19851 - DNA, 909 bp, Zea mays
  Clone ID: LIB3153-005-F10_FLI
ctggtgaagcagatccccgtgctggcctcgtcgcagggcggcgccatgcgcaaggtcgccgcctacttcggcgaggcgctcgcccggcgcgtgtatcgcctccgcccggcaccggacggctccctcctcgacgccgccttcgccgacctcctgcacgcgcacttctacgagtcctgcccctacctcaagttcgcccacttcaccgcgaaccaggccatcctcgaggctttcgccgggtgccgccgcgtccacgtcgtcgacttcggcatcaagcaggggatgcagtggccggctctcctccaggccctcgccctccgccccggtggccccccgtcgttccgtctcaccggcgtaggcccgccgcagcccgacgagaccgacgccctgcagcaggtgggctggaagcttgcccagttcgcgcacaccatccgcgtcgacttccagtaccgtggcctcgtcgccgccacgctcgctgacctggagccgttcatgctgcgaccggagggcggcggcgacacggacgacgagcccgaggtgatcgccgtaaactcggtgtgcgagctgcaccggctgctcgcgcagcccggtacactcgacaaggtcctgggcaccgtgcgcgcggtgcggccgaggatcgtgacggtggtggagcaggaggccaaccacaactccggcacattcctcgaccgcttcacggagtcgctgcactactactccaccatgttcgactccctcgagggcgccggctccggctccggctccggccagcccaccgacgcctccccgccggccggcacggaccaggtgatgtccgaggtgtacctcggccggcagatctgcaacatcgtggcgtgcgagggcgccgagcgcacggagcgccacgagacgctggtccagtggcgcggccgc

SEQ ID NO: 19852 - DNA, 612 bp, Zea mays
  Clone ID: LIB3153-005-H1_FLI
aatctgcccttgccgccgccactgcccgatccaggtgtgcagactgctccctcctcctctccgctccgaatggcccgcacgaagcagacggcgcgcaagtcgaccggcggcaaggcgccgcggaagcagctggccaccaaggcggcgcgcaagtcggccccggccacgggcggcgtgaagaagccgcaccgcttccgccccggcaccgtcgcgctccgcgagatccgcaagtaccagaagagcacggagctgctcatccgcaagctcccctcccagcgcctcgtccgcgagatcgcgcaggacttcaagacggacctgcggttccagtcctcggccgtggcggcgctgcaggaggccgcggaggcgtacctggtggggctcttcgaggacaccaacctctgcgccatccacgccaagagggtcaccatcatgcccaaggacatccagctcgcccgccgcatcaggggcgagagggcttgagctgtcgcgctgctgctgttcgtcgttgtaatgtctgaagtagatggtggtgggtgctttctatgccgtgcctatttggctatttcggacgtgttggttcactgaatggaaaatggaatgccatttctcgtc

SEQ ID NO: 19853 - DNA, 399 bp, Zea mays
  Clone ID: LIB3153-006-C12_FLI
accaaaactaaaattcccatatattattaatagcattacctaccattacaatgtatataataacaacgatcttaatttttgtttagaagcaggcatgtctacactcagccatcgtagagtagcgagcatgagttcgccccccaatgcagcagtagcacttgttatctttgcatggaggaaaccctacaatgcatcgtgctccgtttccttgcataattccttctttagctggagtagaaacaccgacatcatctgtgacatgacccttcccatgtgcatgagcagcaaagtatccgaggagaagtaacgagaaaaacactagcgcatccaccctctttctgtactccatctcgcaagacaatttaatgaactcctcacgattgatcctagaagagtgta

SEQ ID NO: 19854 - DNA, 1170 bp, Zea mays
  Clone ID: LIB3153-006-C4_FLI
cgccctgccgacgcgtcagcccctagctacgagtagctcggtcacgcacctgcggcatgccagccatcctggacctctgtctgccgcgggccgcggcgtcatcgtcctccactccattggctgctgcttcacctggctagtagatagctagctgagctgacgacggccattatatatattgagcgcccgggaagcttcgtcgccgaacccatgtcgacgagcggcgcgaggtcgtggtcgccgccgccgcggccgagccggtacgagtcgcagaagcggcgggactggcagaccttcacgcggtacctgggcgcgcaccgcccgccgctggagctgtgccgctgcagcggcgcgcacgtgctcgagttcctgcgctacctcgaccgcttcggcaagacgcgcgttcacgcgccgtcctgcgcggcgtacggcggcggcggcggcggacggccggtggagcccgccgtggcgtgccagtgcccgctgcgccaggcgtggggcagcctcgacgcgctcgtcggccgcctccgcgccgctttcgaggagcgtcacggggcgcgtgggatctggacgtcgtcgcagcagcccgacggcggcgttggcgtcggcgtcggcgtcggtggcggcgacggcgccaaccccttcgccgcgcgcgccgtcagactgtacctgcgcgacgtccgcgacgcgcagtccagggcgcgcggcatctcctacagcaggaagaagaagaagaggagcaagcagctggtcgacggcgccgccgcagccgggtgcgcccgcccgcccgtgaccagcgtgacgttaatgcctgctgctgctctgccgcacgcaccgcctccaccatgtccgccgccgccgctgccgccgccgtactgcctcaccggtgtgcccttcgagttctgtgactatggcagcgtcctcggaggagttaccgccaacggtgcgcctggcttctacttgccatcgctgttcaacaccttcggctagctagggcatgctgcctgccatgtttgccgccatgcgtatccttgctttcggttgttcttgtgttcagacttcagagacgttattaattcatgccctagagtgtccttcctttcgcttggtgaatatggcatccaaataatataattaatttctctgttgacgacagcgcactttccccct

SEQ ID NO: 19855 - DNA, 601 bp, Zea mays
  Clone ID: LIB3153-008-H12_FLI
caccaagaccgtgaagaagacctccaggcaggtgatcgagaagtactactcccgcatgaccctcgacttccacaccaacaagaaggtgctcgaggaggtctcgattctgccctcgaagcgcctccgcaacaaggtggctggcttcagtacccacctgatgcgccgcatccagcgcggcccagtccgcggcatctcgctcaagctgcaggaggaggagcgcgagcgccgcatggacttcgtgccggagaagtccgcgctcgaggtcgaagagatccgcgtcgacaaggagaccatggagatgctcgctgccctcggcatggccgacctgcccggcgttgagcgccaggctgaggtctccaacgcccccgcctacggccgcccgcagtacggtggtccccgccgtgaccgcgtttagacttcgcggtggttgcctcttgatcgcactgctattcgtagttgttgtcctactatgctaaacttcttttagatctttggttgcatctgtggcggttaagttttgaacttgcctgttatggtataaattctgaagtgtttggttctgcgtgtgatgaacatgataatttatattcttgcgctttat

SEQ ID NO: 19856 - DNA, 453 bp, Zea mays
  Clone ID: LIB3153-009-E11_FLI
gcccagtcgtcctagccaacaaaattcaattgagggttcttcagttcagccatgaagcttgagatgacagcagcggccatggtcttgctcctgctgacctcgggcgccgaggccaaggtgtgctactcgcgtagcaggaccttcaaggggtggtgctaccacagcatcaactgcatcgccatctgcatcaccgagggcgacaccagcgggttctgccaggccggggcctgcatgtgcacttatgagtgtctcaatggtgtcgtcgccggtggcggcggacagcatccatcggttggctcatcgctgcgtggtggtgctgacgctaaagcagccgtcccatcagtgtagagcttctgattctgggccgggggatggcagatggcgcactactactctcctgtgcacatgccaactcaagatttagagttgatgaataacacaaatggttctttt

SEQ ID NO: 19857 - DNA, 772 bp, Zea mays
  Clone ID: LIB3153-010-D7_FLI
ctggcttctcctccccctcttaccaagtcctcttcgggttagggttacttagggttttgtggaggggcgatggcggcggctgatgtggagtaccgttgcttcgtcggcgggcttgcctgggccaccagcaacgagtcgctggagaatgccttcgcctcctacggcgagatcctcgactccaaggtcatcaccgaccgggagacggggaggtctcgcggcttcggcttcgttaccttctcctccgagaactccatgctcgacgctatcgagaacatgaacggcaaggagctcgacggccgtaacatcaccgttaaccaggcccagtcccgtggcggtggcggtggcggcggtggctacggcggcggtcgcggcggcggcggctatggtggcgggcgccgtgacggcggttatggcggcggtggcggctacggcggtcggcgcgagggtggtggcggcggctacggaggcggtggcggctacggcggtcggcgcgagggtggtggtggcggctacggcggcggcggcggcggctggagggactgatgtgtgggcccatcctggcttcggccgagttatcttatctatctatagtatcgtgttaccgttcgcttctgtcaccgtgttagtgtccgttctacctttggattaggtgttggtacccctgttgttccctttggttgctcccgctatgaaacgagacgagagaagaatgagcaaggtttttgttcgcagctatttttgtccaatgatattgatatgttgttcccctgtc

SEQ ID NO: 19858 - DNA, 710 bp, Zea mays
  Clone ID: LIB3153-010-E12_FLI
tatttttttcccttcactgaataaacgatgtcatgcctcacggtagctgactgtctttggagatgcccttgtgctgaagccaaatcacagaaaggaaacaaaatactcctgcaattgcatctgcggttgcttcaacttataggacttcgttgtagaacgtgaacagatcgtgaatggcagagcagatgtaatatcagggtattcctagatcgacgattcagcaagtcattggttggaatgctgggaaggtctcccaattcaagggccaaggatcacgtctgaatgaatccatgacggtggcgcggcgaactcctatcataaaacctatgcttcctgccaacggagtgactccatggcctgtgctgggacacctgtgagatgtgtgtgaccagcgacgtgatagagctagtagtacaactgccccagcccatgcagagacgctcacgttgccacaggcgggggcatattatgcgatgcccagcagcagatgtactactggctgcttgtaatttggaactacacgcttgtggaagaccttgtggaagacctttgtgtatacccatgcttatatttttatttcctgaatccttatgtcatcgatcttgtgtgctggagttgtaaatgattggatattcagtacccatggtactatggtagtgttatgtatatgactattacccataaatcaatgcacgagtggaagcttgatt

SEQ ID NO: 19859 - DNA, 1058 bp, Zea mays
  Clone ID: LIB3153-011-B10_FLI
caaagctcgccccgctcccagctagggtttcctcttcccatccacagccgccggggcgccgccgacgaggacagcgccgccacgatgttggagttgcgtctggtgcaggggagcctcctcaagaaggtcttggaggcgatccgcgagctggtcacggacgccaacttcgactgctccgggaccgggttctcgctgcaggccatggactcgagccacgtcgcgctcgtcgcgctgctccttcgcgccgagggcttcgagcactaccgctgcgaccgcaacctctccatgggcatgaacctcaacaacatggccaagatgctccgctgcgctggcaacgaggacatcatcaccatcaaggctgacgacggctccgacaccgtcactttcatgttcgagtcgcccaagcaagataagatcgcggatttcgagatgaaactgatggacattgatagcgagcacctcggaatcccggattccgagtaccaggccatcgtccgcatgccttctgctgagtttatgaggatctgcaaagatcttagcagcatcggagacacagtcgtcatctcggtgactaaggagggcgtgaaattctccacatctggagaaattgggagtgcaaacattgtctgcaggcagaaccaaactattgacaagccagaagaggctaccattatagagatgcaggagccggtttccctgacctttgccctgcggtacatgaactccttcaccaaggcgtcttcactgtctgagcaagtcactatcagcctgtcgtccgagcttccagtggtggtcgagtacaagatcgctgagatgggttacattagattttacctggcccccaagatcgacgatgacgaggagatgaagccctgatggcctgtgacgacataatgctcgtgttgcctgctcttccttccagccgttgtttgcttagctactctttgcaagcgaagaagggatgtgatgtgtatctcttaggctagactgcttcagctagttttctgtgactgctccatgaatccatggattactgatttactgggtttgtgctgtgt

SEQ ID NO: 19860 - DNA, 1582 bp, Zea mays
  Clone ID: LIB3153-011-D6_FLI
ctagttgctacctagcctcgaccaggtggagcaatgggctccacggcggcggcgccctgccacatcgtggccgtgccgtacccgggccgtggtcacgtcaacgcgatgctgaacctatgccgcctcctggcagctcgagacggcgtcaccatcaccatcatcgtgaccgaggagtggctcagcctcctcggcgccccggcggcgctgccggacctcggcctgcgcgttcgctttgaggccattccaaacgtgatcccctccgagcacggccgcgccaacgacatggtcggcttcatggaggccgtgtacaccaagatggcgtcgccgttcgagcagcttctcgacaggctcgcgccgccggcgcccgcggctattgtggccgacatgttcgtgccgtggaccgtaggcgtcggcgagcggaggggcgtgcctgtgtgcatcatgtgcccgattagcgccaccatgttcgcggtgcagtacaacttccacctgctaccacccgcggcggccggcggcggcgcgtctccgggtactagcaatatcactggttcttgttttgttgaaaactacattcctggcacgaaatcaatcaggttcgccgatcttgcgcctacacacaccgatgcgttacttctagacaaaatccttgaagcccactcctctgtaaagaaagcacaatgtatcgtcttcaccaccttccaagagctcgagagcgacgccatcggcgctatgaggcaaaactgcccagtgtacgcagttgggccctgcgtccccttcatggcactgcaagagcacaaggccagcccagacggtgacgactacatggcgtggctggacgcacagcccgcgggctcggtgatctacgtctcgctcggcagcttcctctcggtgtccgccgcccagttcgacgagatcgccgctggcctggccgagagcaaggccaggtttctgtgggtgctccgcgacgccgacgcatgctcccgcgtgcgaggcctgatccgcgatcccgacgccggcctcatcgtgccatggacgaaccagctgagggtgctgtgccacccttcggtcggggggttcttcacccactgcggcatgaactcgacgctcgaggcggtgtacgccggcgtgcccatgctcaccctgcccatcgcgttcgaccagccgaccaatagccggctcgtcaccgaggtgtggaagaatggcattggcctcagggacatggcccgcgccgacggcgtcatcgggagaggtgagatagcctcggccgtggacaggctgatgcgccctgacgcggcggagttccaggacatgaggaagcgagtgacactgtggaaggacgcggctcggactgcgtctgaagagggtggatcctcgtggaaagatgttacgtctttcatcaacttcgtttcacgttgagatctccgaatgtttacggagtcagctgtagtgaattgtgatcgattctcacggagttagtgtgatatctgaatgttagcagaatctttcggcaacaataaacatgctgctgcatccaattgaaagtagctcttttaattgttcatatcaaaacgcagaagattcg

SEQ ID NO: 19861 - DNA, 1455 bp, Zea mays
  Clone ID: LIB3153-011-E5_FLI
cgctcctaaaaccccgccagccagcggtgccgccgccggtgacatggacgacggcgacactcccagacgcaaatccgtcccagattggctgaacagcccgatctggtctgcgcctccgccgtctccacgccacagctcccttccccccacggcaccgtccccccctcagccgccaccatctcctctgccctctccccagccacggcgggatccgactcccatccctcctcccaacgccccacgcgacgccgatgtttcagacgacgaaggcaagggcgcgggcgccccgtcgtgcgcccacctcgtcgctgagttcaaagtcgcgctggataggaaggtggtggatctggcagagctccggaggctcgcatgccagggcgtgcccgacgccgctggtattcggcccatcgtctggaagcttctcttgggatatgtgccaactgatcgtgctctatggccgtatgaactggagaaaaagaggtcccaatactgtgatttcaaagatgaacttctggttaatccttcagaagttactcgaagaatggaggaaatgacagcttctgaaagagaggaacataatgctgaaggcaccggtgtgctaccaagggcggaaatcgttcgtgatgagcatcccctaagccttgggaaaactagtgtttggaaccaatacttccaggagtctgagattgtagagcagattgatagagatgttaagcgcactcatccggagatggaatttttcaatggggactcttcagattcgctgtctaatcaggagtcactaaagcgtatacttacaatatttgcaaaattgaatccgggtataagatatgtacaaggaatgaatgaggttttggcacctctctattatgttttcaagaatgaccctgaccaaagtcaagctgctttagcagagccagatgccttcttctgttttgtcgagctgcttagcgggttccgagacaacttttgcaagcaacttgacaacagcgtggttggcatacgctccacaattactacactgtcacagcttctgagaagacacgacgaggaactctggcggcatttagaagttgtaaccaaggtcaatccacagttctacgcattcagatggatcaccttgctgctaacgcaggagttccagttccgtgactgcctcagcctgtgggacacactgttgggcgacccagaggggcctcaggctacgttgttgcgggtctgctgcgcgatgctaattcttgtccggagaaggctcttggctggcgatttcactgcgaatctcaagcttctccagaactacccacccacaaacatcgaccacatcctacacattgctaacaagctgcgagggccgcttcctttctgaccagttggatcccttgcgtactttgttaccgtatacggttttgtgctagactatgtttatccagggaaagaaagctgcgttaagaactc

SEQ ID NO: 19862 - DNA, 734 bp, Zea mays
  Clone ID: LIB3153-011-G1_FLI
ctcctcgttcggttcggacttttgcttcggcgactttacgcggtaggccaccgtaaaccctagccccagaccgcgggtcatagccaacgagatgcagatcttcgtcttgacgctgacggggaagaccatcacgctcgacgtcgagagcagcgacaccatcgataatgtcaaggccaagatccaggacaaggagggcatttcgcctgaccagcagaggctgatttttgctggcaagcaattggaggatgggaggacattagctgattacaacattcagaaggagtcaacactccctttggtcttgaggctcaagggtggaactatgatcaaggtgaagacactaactgggaaggaaatcgagattaacatcgagcccaatgacacaattgataggatcaaggagcatgttgaggagagagaaggcatcccacctgttcagcagaggctcatttatgctgggaagcaacttgctgatgacaaaactgccaaggattacaacattgaaggtggttcagtgctccatcttgttcttgctctgaggggtggttgctagattaaaaagttcttgtactttctgcttatgctatctgttacatggagttgttttagaattgaagccttgcattgggtggttgattgtaccatgtgattagcacactactagagtcaggtgtcatctgtactgtttaagaaatgcttgaactagttcattcagttgtcatctcattcttatt

SEQ ID NO: 19863 - DNA, 1065 bp, Zea mays
  Clone ID: LIB3153-011-G8_FLI
cttcgcctcgccaaactttaccctcggcctccgcccgcacttccaccaccgcaccgcacctcgcagatgccccagtaggctccaaaaatccaaagccatccctccccaggcctcccatccatctccgggagatggcggccggcaccgtgacggcccgatccaacggcgagggccacggccacggcggcgcggggtcctggtacccgcagcgccgcccgcactacgggtacggcggggggtccgcctccttccgcggctgctgctgctgcctcttcctgctgctcaccttcctggcgctcctcgccctggccatcgcgctcgtcgtcgtgctcgtggtgaagccccgcaagccgcagttcgacctcgaccaggtgtccgtgcagtacctcctcgtggcctcgccgacgtccccggccggcctgccccccgcgaccccgggcgccgcctacatctccctcaacatcacgctgctcttcaccgcccagaaccccaacaaggtgggcatccggtacggcgccaccaagttcgacgtcatgtaccacggggtgccgctcggggtggcggcggtgcccgggttcgagcagcccgcgcacagcacccgcctgctccagacccgcgtcattgtcgaccgcttcaacgtgctccaggccgacgcgcaggacctcatccgcgacgccgcgatcaacgaccgcgtcgagctccgcatcaccggcgacgtcggcgcgaagatcctcgtgctcggcttctcctccccaaaagtgcaggtgtcggtggattgcgcaatcgccatcagcccgaggagccagtcgctgaaatacaagcagtgtggcgtggacgggataagcgtgtagtgtaggaaccccaagccgccgccgccgcagaagctgtattgcagtggagaagtgggtggatctgtgcgtcgattctaatttccctaatttgtggggtttgatttccttcttgtgcttaggtggtaaattttgagcacttttttggaggaggccactgattctgtgaattattgctgcttgcaatcagtaggtatcagtatgatcatggttatac

SEQ ID NO: 19864 - DNA, 563 bp, Zea mays
  Clone ID: LIB3153-011-H5_FLI
cagcgcatcggggacagcccccagtcggcggcgattcggggcggtgacggtgagggcgtccgcggagacgatggcgacggagaagctgggtatcaaggtggaacgcaacccgccagagtcccgcctctccgagctcggcgtccgccagtggcccacgtgggggtgcgagaagagcaagttcccgtggacctactccgccaaggagacctgctacctgctgcaggggaaggtgaaggtgtaccccgacggtcacggcgaggagttcgtggagatcgccgcgggggaccttgtcgtcttccccaagggcatgagctgcacctgggacgtcgccgaggccgtcgacaagcactacaacttcgagtagccgccgccgccgccatgtttggattgcttcctctagcttcctaccatgtgcttgtagacttgctgtgctcttatacacctatgctccattccagagttaaacagcgtaaaataaagctccggattagcggactacacaattcacaccaacgttctgtcaggcgtttttcctgttatgacaagtggaacttgtacatgtt

SEQ ID NO: 19865 - DNA, 626 bp, Zea mays
  Clone ID: LIB3153-012-E8_FLI
ctttcccacacactgcgtcctacgctgaagtcctgtcaaagccaatggagggtggcggcgcgaaccgagaaaacggcgacggcttcggcaaaaggcaggaacaaggtcctcatgatggacgtctaggtgcttagccgcagcagggcaagcgaacttcgtcaatcgtggagggttccgtagaccaaacttcggcaacagcttccaccaaaatgggtcgtacgatcaacctggtcgaggtaggcaggacttcaatcaaggcagctctggtcgccatactggtcgtggtcgctttggttattcagtgggtgatcagttcagttacaggacggtggagagcaatccagtcttggcaacaccaggtttggcacctgctgatgcagtggcacaagcggtagcgctgctgacacaagttatatccattccacagcctgtggtggatcatggcaaggctgagagctccggtcaagcagaaaaggggcctgttgggtagtgtggtgataagttggccatgcagcaatagatggtcctctgtagccggtgataaaggaaggaaaaaaatccttattgttatagatgtctcaccaagggtcattctatgcaagcatgcacgacacgactcttctgtg

SEQ ID NO: 19866 - DNA, 371 bp, Zea mays
  Clone ID: LIB3153-013-B2_FLI
caaggtcactgtccaccacttccatggaaacaatgttgaccttggaactgcctgtggtaaatactttcgggtctgctgcctcagcattattgatcctggtgattctgatatcatcaagactacaccgggtgagcagtaaagaagaagcccctgcactgcagtagggggatcttactgcatttgttcttttgtcttgttaaacagcatttacctgctaggaaaccgagttattcggaacatgtcttgaattgaatttttgctccggtgttttgacacttaaatagagctttagcttataccgttgttcaggtcgcagctgtatgttttgtcactatcaaacgaatgctccaccagtggaggtatcctataat

SEQ ID NO: 19867 - DNA, 533 bp, Zea mays
  Clone ID: LIB3153-013-B3_FLI
ctcgctcgcgcgcacggacagggccggaacccagggatcgagactgaacagcagtccgagacgccatgaacgtggaggaggaggtcgggaggctcaaggaggagatccataggctcggccagcagcagcccgatggctcttacaaggtcaagtttggcgtcctcttcaacgacgaccggtgtgcaaatatctttgaagcactagttggcaccttgagggccgccaagaagaggaagatcttgacctacgaaggcgagctgcttctgcaaggtgtccatgacaacgtggagataaccctgttgcccccacctgcagttgctgccgcttgaagcgaagagcaccaccaagttctcgattccatacaactcgtatgcttgtattctgccgtgcctatattagattctctcgaaccatttggtgttccttgaaaactgctatcgtgtgatatatgaaattgtggtgctcaagaaattgccttgcttgcatatggttgtgttgcttaataaattcaatgctggtatagcattcgtgtc

SEQ ID NO: 19868 - DNA, 602 bp, Zea mays
  Clone ID: LIB3153-013-C12_FLI
gcccgaagatggtgaagtttctcaagcccggcaaggccgtaatcctcctccagggcaggttcgccggccggaaggcggtgatcgtgcgcgtgttcgaggagggcacccgcgaccgtccctatgggcactgcctcgtcgccggcctggccaagtaccccaagaaggtgatccgcaaggactccgccaagaagacggccaagaagtcccgcgtcaagtgtttcatcaagctcgtcaatttcactcacctcatgcccacccgctacaccctcgacgtcgatttcaaagacgtcgcctcgggcgggcccgacgcgctctccacccgggacaagaaggtcgaagcctgcaaggccgccaaggcgcgcctcgaggagaggttcaagaccggcaagaacaggtggttctttaccaagctccgcttctaggcgccgggcaccccgcatagtgactactttagttgtcaatttgttgtatcggaaaccatttaagctatttctgttttggtattgcgcttgttatggatctcggagaagattttgttaaaaacatgtcgatgatgtgttaaatgatgcccaaaggaaacgtctcgttgaacttttgctgag

SEQ ID NO: 19869 - DNA, 1234 bp, Zea mays
  Clone ID: LIB3153-013-D5_FLI
ccaggcccgccaccgccctccctccccccgcgaccgcgactctgcgagcacgacgagacccacggacccacctcgatccagatccagccaactgcgcgcgtcggcgttaccccttcctcctcgacgccactgccgtggagcggggatcatccgcctgaaccgggtcgaccgcttcgttccttggtggtgggtagctgattgggggagctcagaaccttacacttacaactatgttctccttgttctatggtctatggaagcacgtcttcagcaaggcagagttccatgtgcttatcctcggagttcataaggctggcaagacgaccttgctagaaaagttgaagtcgatctacttgaagggagaagggcttccgcatgatcgtattgttccaacagttggccttaatattgggcgtattgaagatgcaaatgtaaagcttgttttctgggatctgggaggccagcctggcctacgaacaatatgggagaaatattatgaggaagcccatgctgtaatatatgttatcgactctgcttctgcatcatcatttgaggatgctaaatctgctctcgagaaagttctccgtcatgaagatctgcatggagcgccaatacttatatttgcaaacaagcaggattcaccagcagctgtcacggaggaagaattggctagacatctgcatcttaaggagttagacgagaggccatgcatgttccaggctggatctgccttcaatgggacggggatcaaacatggcgttgactggttggtggaagaaatggagaggagtaaacgcaccgaggcactaagggcgcgtacagaagcagctgggaagatttaacacctcaattcagggctatcacctgtgattttccaaatgcaaagcatctgaggaggatggcttctgttaactccatgaatagagacgcttgtccgggtggagccttgtcctttcagtcacgggatccccagaaaagatttcttggttgtgctgctcttgcagttttgtagtagggtgtccattgtagcaatggcaggggtgaccgttgcttgggtttgttgacctgcgtagcacttaagattgtgtatctaaagttgtagggattcatgttcatgcgattatgcttggatatacggagtgacatcgtggagcataaagatgacttgtacattcgtcttgttcatcgagagtcatgtgacttttatcaaaagaaacaaatacattgtgatatc

SEQ ID NO: 19870 - DNA, 1175 bp, Zea mays
  Clone ID: LIB3153-013-E3_FLI
ccgaacctcaggaactagccgttgcccgcacctctccacgtcgcgcttcccatggactccgccaccgtggcgctcgccagccccgcctccgacgaccgacggttctgggaccgcctccgcacccgcgtcgacaccatcctcgaggaccgccgtggcctcccgccagccgccgccgccggtgcccccatgcgcggggtggaatctgagcgggggaagcggctccgggaggactccctgatgctcgtccgtggcctcgactctgtggcggagtctctggcacagctctccgacaccctcaccgccgcgcagaagggagtgagtgctctcgcgacctgctcttcgcaggcgaggggatgcgaaggcggcgcctgcccctgccccgaggaggtgaaggcagaggaggaggagcccagggcgaagcggatgtgtggcggctccacggaagattctccacggaacggcctggacagcaattctccggccgctggagaggaaacggcggctggtcctgatggtctggggaaggggaatgtccaggcctctgctgagatcgcacagagcactaacctgaagcgggccagaagtctggcggtgtcaatggcaagcagagccgctgcactcgctagggagctcaagaacatcaagtcagagctgcacttcatgcaggagaggtgcggtttgctagaggaggagaacaagaggctcagagaggggtgtgacaatggagttgcccctgaagaagatgacttggtgaggctgcaactggaggctctgcttgcagagaagtcgcgtctggcgcaagagaacgccaacctgacgagagagaaccagggcctgatgcagctggttgagtatcaccagttggcatcccaggatctggatgagtcctatgaggatgttatgcaggggatacggcttgacttctcgtcaccgctggggaagatcagcgacgatgaagaaggcgagcgcgacgatgaagttccggtcaccccagctgaggtgccatgctcccccgacgagtaggcaggcgaacgggaggaataagatgggttttccatcgatggaattcctttgtaccaggtgccaacagtaggcagttttttttcctatgtgatcactaccggtggccagtttttgatgtttctatgatttatataaaaacttctatgtgtagc

SEQ ID NO: 19871 - DNA, 861 bp, Zea mays
  Clone ID: LIB3154-006-E5_FLI
ttgagaccaacaagcaacatagaaagtggaatacagtagcaacaatagagcaacaatggcggccaagatattttccatccttatgctccttgctctttctgcatgtgttgctaacgcgaccatttttcctcaatactcacaagctcctatagctgcccttcttcccccataccttccatcaatgaccgcttcagtatgtgaaaacccagcccttcaaccctacaggctccaacaagcaatcgcaacaagcaacttacctttatcacccctgttctttcaacaatcgccagccctatctttggtgcagtcattggtacaaaccatcagggcacaacagctgcagcaactcgtgctaccagtgatcagccaagtagctctggcaaacctttctccctactctcagcaacaacaatttcttccattcaaccaactgtctacactgaaccctgctgcttatttgcagcaacaacaactactaccattcagccagctagctactgcctactctcagcagcaacaatttcttccatttaaccaattcgccgcactgaacccctctgcttatttccagcagcaaatactactaccatttggccagctagctacaacaagccccgcttccttcttgacacaacaacaattgcttccgttctaccagcagtttgtggctaaccccgcaacccttttacaactgcaacagttgctgccctttgtccaacttgctttgacaaacccagcagccttctaccaacaacacatcattggcggtgccctcttttagattgcttattagttgtcattcaataatgaagttttttggctgatgtatgtggcctcctagaaataagaagttatatttcc

SEQ ID NO: 19872 - DNA, 1440 bp, Zea mays
  Clone ID: LIB3154-008-D11_FLI
cccaacaccacctcgcctgcgatctccgtagcctccgtcgcgtcgagcatcgatcatgtcggcctactgcggaaagtacaaggatgagctcatcaagaatgctgcctacattggcacccctggcaagggtatccttgctgctgatgagtccactggcaccattggcaagcgcctttccagcatcaatgtcgagaacgttgaggagaaccgccgtgccctccgtgagctcctattctgctgccctggtgctctccagtacatcagcggtgtgatcctcttcgaggagaccctgtaccagaagaccaaggatggcaagccttttgttgatgtcctcaaggagggaggcgtcctccctggcatcaaggttgacaagggcaccattgaggttgttggcactgataaggagaccaccacccaaggccatgacgaccttggcaagcgctgcgccaagtactacgaggccggtgcccgctttgccaagtggcgcgctgttctcaagattggccccaatgagccatcacagcttgccatcgacctgaacgctcagggtctggctcgctatgccatcatctgccaggagaatggtctggtgccaattgttgagcctgagatccttgttgatggccctcatgacattgatcgctgcgcttacgtcactgagaccgtccttgctgcctgctacaaggcgctcaacgagcaccatgtcctcctggagggtaccctcctgaagcccaacatggtgactccaggctccgactccaagaaggtgactcctgaggtgattgctgagtacaccgtccgtaccctccagaggaccgtccctgctgctgtgcctgctgttgtcttcctctctggtggacagagcgaggaggaggccacccgcaacctcaatgccatgaacaagctcagcaccaagaagccgtggtccctgtctttctccttcggccgtgccctccaggcgagcaccctcaaggcctgggctggcaaggtggagaacttggagaaggctagagctgccttcctcgccaggtgcaaggccaactctgaggctaccctcggcacctacaagggtgatgctgccgccgacaccgagagcctccacgtcaaggactacaagtactgagttgcttctctttgcgtgcccgttttggaactcctgcctacgagctaggttgcggagtgtggtttgctcgttagagcttattttcggacatccaaaaaacatgcttcctatgtgggatgatggttatctttatatttgtatgttaattagtctctttgctgttaaatttcgtgtaagttggtcctgccgatggagaatcgagcagccccctttttttgttctatcaactatgctgtaatgctggctatgtatcggcaaaaacaattctatatgctgagttggagtcggcaaaaattcatatatgctgagttggagac

SEQ ID NO: 19873 - DNA, 956 bp, Zea mays
  Clone ID: LIB3154-010-C3_FLI
ttttgagcattcagaaacacaccaagcgaagcacattagcaacaacctaacaacaatggctaccaagatattatccctccttgcgcttcttgcgctttttgcgagcgcaacaaatgcgttcattattccacaatgctcacttgctccaagttccattattacacagttcctcccaccagttacttcaatgggcttcgaacacccagctgtgcaagcctataggctacaacaagcaattgcggcgagcgtcttacaacaaccaatttcccagttgcaacaacaatccttggcacatctaacaatacaaaccatcgcaacgcaacagcaacaacaattcctaccagcactgagccacctagccatggtgaaccctgccgcctacttgcaacagcagttgcttgcatcaaacccacttgctctggcaaacgtagttgcaaaccagccacaacaacagctgcaacagtttctgccagcgctcagtcaactagccatggtgaaccctgccgcctacctacaacagcaacaactgctttcatctagcccgctcgctgtggccaatgcacctacatacctgcaacaacaattgttgcaacagattgtaccagctctgactcagctagttgtggcaaaccctgctgcctacttgcaacagctgcttccattcaaccaactgactatgtcgaactctgctgcgtacctacaacagcgacaacagttacttaatccactagcagtggctaacccattggtcgctgccttcctacagcagcaacaattgctgccatacaaccagttctctttgataaaccctgtcttgtcgaggcagcaacccatcgttggaggtgccatcttttagattacatatgagatgtactcgataatggtgccctcattccggcatgtgtttcctagaaataatcaatatattgattgagatttatctcaatatatttctg

SEQ ID NO: 19874 - DNA, 610 bp, Zea mays
  Clone ID: LIB3154-010-E1_FLI
gcgacctcaccagctggcaggagcggcacgccgtgctcgtgctatccaaagctaaggaactcgccaagattcggtatgatctgtgccctcggcacctgaaggataagcagttctggaggatatacttcctgctcgccaagagttacatctcaccgtatgaactacgtgccatacagaaggaaaaactcagacggatggagacagaaaactgcaagccaaaacaagtgatctctgttgaggtggagatgcaagaatcgaagcgcactagtctctcacaagcatcagaagtagatctagaatctcaggtttagttttgcagttatagcttctaacagatctagcttaggtaacgcaatcagtagcccttttatgattcctccacacaccaaatagctccacgagttcttcagatcttggatcgactctcgctagactaccagtccgctgtgtgcttttgtgtactgaaaccaagtaggtcctttcctgcattacgcagcatatgtgcttgttggctgtgctccgatccactgacatgtaaatctagggtatcttgcgcgtgaacaaaaacgactgcgtttcatgtagctatagattatgtcaacttcgattc

SEQ ID NO: 19875 - DNA, 786 bp, Zea mays
  Clone ID: LIB3154-013-A1_FLI
gtcagcctagcaattagctcatcgactccagattggagaactcgacaccatgaaggtgctgatcgttgcccttgctctcctggcgctcgctgcgagcgccgcctccagtacaagcggcggctgtggctgccagacaccaccgtttcatctaccgcctccgttctatatgccgcctccgttctatctgccgccgcagcagcagccgcagccatggcaataccccactcaaccaccgcagctaagcccgtgccagcagttcggatcctgcggcgtcggcagcgtcggcagcccgttcctgggccagtgcgtcgagttcctgaggcaccagtgcagcccggcggcgacgccctacggctcgccacagtgccaggcgctgcagcagcagtgctgccaccagatcaggcaggtggagccgctgcaccggtaccaggcgacatacggtgtggtcctgcagtccttcctgcagcagcagccgcagggcgagctcgcggcgctgatggcggcccaggtagcgcagcagctgacggcgatgtgcggcctgcagctgcagcagccaggtccctgcccttgcaacgcagctgccggcggtgtctactactgaggaaactatgtactgtagtaataatgtaatggagccgctgactagctacctagctcgctagtttactcatttagcggcgatgagtaacgtagtgtcacccatcaccatgggtggcagtgtgagcaatgacctgaatgaaccattgaaatggaaaggaataatatataaggaaaaaagatgattgg

SEQ ID NO: 19876 - DNA, 1136 bp, Zea mays; identical to SEQ ID NO: 19576
  Clone ID: LIB3154-013-E5_FLI

SEQ ID NO: 19877 - DNA, 872 bp, Zea mays
  Clone ID: LIB3154-014-A7_FLI
cttcagaccattagctttatctactccagagcgcagaagaacccgatcgacaccatgagggtgttgctcgttgccctcgctctcctggctctcgctgcgagcgccacctccacgcatacaagcggcggctgcggctgccagccaccgccgccggttcatctaccgccgccggtgcatctgccacctccggttcacctgccacctccggtgcatctcccaccgccggtccacctgccgccgccggtccacctgccaccgccggtccatgtgccgccgccggttcatctgccgccgccaccatgccactaccctactcaaccgccccggcctcagcctcatccccagccacacccatgcccgtgccaacagccgcatccaagcccgtgccagctgcagggaacctgcggcgttggcagcaccccgatcctgggccagtgcgtcgagtttctgaggcatcagtgcagcccgacggcgacgccctactgctcgcctcagtgccagtcgttgcggcagcagtgttgccagcagctcaggcaggtggagccgcagcaccggtaccaggcgatcttcggcttggtcctccagtccatcctgcagcagcagccgcaaagcggccaggtcgcggggctgttggcggcgcagatagcgcagcaactgacggcgatgtgcggcctgcagcagccgactccatgcccctacgctgctgccggcggtgtcccccactgaagaaactatgtgctgtagtatagccgctggctagctagctagttgagtcatttagcggcgatgattgagtaataatgtgtcacgcatcaccatgggtggcagtgtcagtgtgagcaatgacctgaatgaacaattgaaatgaaaag

SEQ ID NO: 19878 - DNA, 633 bp, Zea mays
  Clone ID: LIB3156-001-A6_FLI
gccgcatcaagggcgccgtcgaacggatggatgacgagctggtgcggtccgcgattgactactacgagatggccgagacgaacaagagacggactgggacaggcatcttaccacggacggacctgaatattaccagctggttgggtaggccacagcacgacgcagattttggctggggaaagccgcaatccatgtcgcgggcggagtctgtccgcggcggctctatgcacttgatgaacgacgacggtggtaccggcaacgtccgcgtgctcgtgtgcttggaggctgaaaatataaaggagctaggacggctgctttatgcaaagctctagcaagctgctagtgctatgctctaaaaataataatattaataataaggtttgttactatgcttaaggggaaccatactttttccctcgcgatttattattactatggcagtttcaataatgaaaaccatttgtaattcctgtgacaattaatttatgcctccacgctagaaataaaacttgtttgtaataaactacatatttgtttttgttatggcagtttcaataatgaaatccgtatgtaattcctgtgactattactttatgtgtccgcactacaaataaaaacttgtttgtgataaac

SEQ ID NO: 19879 - DNA, 199 bp, Zea mays
  Clone ID: LIB3156-001-A9_FLI
taatccgtgagctcgtgcatgtacttggcgtattgcatgcagtgaataatttagcttgggtttgtttgttgggggcagtgttggggacggatttggattggggtttatgcttggcatcgcgtcgtatcgaaactcagctgctgtttcgctgagtaatgtacatttccctggtaatggtacttgtggactctgatgcttt

SEQ ID NO: 19880 - DNA, 524 bp, Zea mays
  Clone ID: LIB3156-001-D9_FLI
cacagcgacaaggccgcggatatcctggtcaacttctttgacaaatgcaaggcagatccgagctactgggacaagatctcacagggtggcctgcagagaatttatgagaagtacacctggaagctctactccgagaggctgatgaccctgaccggcgtgtacgggttctggaagtacgtgagcaacctggagaggcgcgagacccgccgctacatcgaaatgttctacgccctgaagtaccgtagcctggcaagccaggttccgctgtccttcgattagtacggggaaagaagaagcccaggccggagaaccatcgcctgcatttcgatctgtttcaccgcaattcgcattgttagtcgtgtgttggagttatgtgtacttggtttccaagagctttggttccttcttgtttttttttcctttcttgtttgagcgtttttgggcagcgctggcctggttcctagtatggtgggaattggctgcaccttttgcttcgaataaaaatgcctgctcgttcacctgtc

SEQ ID NO: 19881 - DNA, 963 bp, Zea mays
  Clone ID: LIB3156-001-F6_FLI
gccgcgctgcgcgggaggctcgccgtggagctgggccccgacgacgtgccgccgttcgtggcggcgcccgagtggtacccggcgttcaccgagtccgcgctgagccagttcgacgggctggagcacgccgacgacgtgctcgtcaactcgttccgtgacctggagccaatggaagcggattacctggagtcgacgtggcgcgcgaagaccgtcggcccgacactgccgtcgttctacctcgacgacggccgcttgccatgcgacaagacatacggcgtggacctcttctcgagcaccgactccgaggcggcgccgtgcatgacgtggcttgacaagcaggagccctgctccgtcgtcctcgcgtcgtacgggaccgtcgccaacctcaacaaggagcagctggacgagctcggcaacggactgtgcgattccgtcaagcctttcgtttgggtgctgaggtccaacgaggcagagaagctgtctcgacagctcggtggcaggtgcaaggagaggggcctcattgtccccttctgtcctcagctcgaggtgctggcacacaaggccacaggttgcttcctgacgcactgcgggtggaactcgacgattgaatccatcgctagtggtgttccaatggtggcgatgccgcagtgggcggaccagccgacgacggccaagtatgtggagagcgcgtgggggattggggtgcgcatgcggaagggttccttggtgaggaaggaggtggagaggtgcataagggaggtgatgggcggggagaggaagcatgtgtacgggaggaatgccgctcgttggatgcacaaggccaaggaggccatgcaggaaggaggaagctctgacaagaacattgcagaattcgcagccaagtatttaccaaagtagatttccgattatgttctcctcggataatgagttttttgggcaataaagtttcttgtctttagggct

SEQ ID NO: 19882 - DNA, 706 bp, Zea mays
  Clone ID: LIB3156-001-G4_FLI
aggaatccccatgaatcaagttactccatcacagggcagcgacgaggcaaagccattagaagctacagtggttgatgcagctcccaccacttcagaaggcactgcagctcccgcagctgcagaaggcacagcagctcccagcagtgaggaagctaaagcagcacctggcagtgagggaggcacatcgcatccaatcaacgaggaagccacagcagttgcagtttcagatgcaccaggcagccctgatgctgcggctgcggctgctcttgctcctgcagctgataccagtagctcggatgcacctgctgttactcccagtgaagtaaccgtctctcccccttcaaccgacgcacccgagttgaccgataagccatcaccaacagaggcatcgttgccgcctccacctagtgtttctggtgtatagaacatttcagattatttttgcagtgtgccatttttttttgtatgctgccgcgttcgttccactgtaatttttaacccatacatactggtataggcatttgctgccccatggttcaggtatcgcagacgccaggcagtatgtgagtagccctgtacatctgctgtctgcgtctcgcgagaacttgctgccattgtgtcagttgtgtgggcatagcttatgttgtttgtgatcaatccgtaggaccacagtttaattttttgcttgatcagctgcatcaccgat

SEQ ID NO: 19883 - DNA, 362 bp, Zea mays
  Clone ID: LIB3156-001-H9_FLI
agaaggtgaagctctccgtgctgcagttctataaggtggacgacaccactagcaaggtgacccgcctccgcaaggagtgccccaactcagagtgcggcgcgggcgtcttcatggccaaccacttcgaccgccactactgcggcaagtgcggcctcacctatgtctacaaccagaaggcgtaattgcttgccccgatttgctttatccgcctaccctatcgagcatccagctgttggttactcgaactgtatctcatgtagatctgtctgaggttgaaacttaaatggagcagtagtatctgacatattggtacccctgttactgaattgacgtgatgctgagtttaattttgttttcgtatc

SEQ ID NO: 19884 - DNA, 612 bp, Zea mays
  Clone ID: LIB3156-002-A12_FLI
ccgaaagctgcaagaactcgttccaaatatggacaagcaaaccaacacatctgacatgctggatttggctgtcgactacatcaaggatctccagaagcaggttaaggtgctaaaggagagccaagataattgcacctgctcagcaagcaagaaccagcagcactcctgctgaaaccgtaatgctcactgtacatgacctcgaaagcatgtccactcgggaaagaaaaagatgtaagacagctctcatgcatgttgtttcatgaggttttgaactgcagcagttgagaggctttatctaccaggcactgtagcttttgtatgagcgaagagggatggagcaatggcatcaccaagcattcaagtgattgggagaagggtaaaaaaaagtggggagagatatatatataggagaaacaactgtatagtttggctgtagcttttctatatatacacacacgcactaccctttcagtagaaagtggttaatttacctatgttagagcatctccaagagaggctctaaacatggtcctattttaaatatagggctcaaaaccataaaacatccttccaacagcggccctattttataaaatttcatcaaatggttat

SEQ ID NO: 19885 - DNA, 1079 bp, Zea mays
  Clone ID: LIB3156-002-B7_FLI
cttgagactgttggaagcatcaaacaccggaatcttgtaagccttcaggggtactccctgtctccatctgggaatctccttttctatgattacatggaaaatggcagcctctgggacattttacatgcagcttcatcgaagaaaaagaaactcgattgggaggctcgcctcaagattgccctcggtgctgctcaaggcctggcttatcttcaccatgagtgcagtccacgaataatccacagggatgtgaagtcaaagaatatcctcctagacaaagactacgaggctcatcttgctgactttggtattgccaagagcttgtgtgtgtcgaagacgcacacatcaacgtacgtgatgggcaccattggctacattgaccctgagtatgcacggacatcccggatcaacgagaaatcggatgtatacagctacggcattgtcttgctggagttgcttaccggcaaaaaacctgtcgacgacgagtgcaaccttcaccacttgatcctatccaaagccgcagagaacacggtcatggagacggtcgaccaggacatcaccgacacgtgcaaggacctcggcgaggtcaagaaggtgttccagctggcgctcctttgcagcaagaggcagccgtcggatcgaccgaccatgcacgaggtcgcgcgcgtcctggacagcctcgtctgcccagcaggcccgccgccgaagcaggcgcaggcacaggcacaggcacaggcgtcggagaagccgtccaccacggcgccgagctatgtcagcgagtacgtcggcctacgaggcggcggcggcggcagcgccctctcctgcaccaactcgtcgagcgcgtccgacgccgagctcttcatgaagtttggcgaggtgatctcgcggagcacggaatagtccaatagatggatcattttgtgttacagtttacaataggtgtctgccgccctgtgatgtgatgtgactcgctgtaaatatcctgctgccttctcgttgggactccactagggactagtagctatttttctccgttatgcacgtctctctcttttttttgctgggaaaatcgaactgtaact

SEQ ID NO: 19886 - DNA, 1058 bp, Zea mays
  Clone ID: LIB3156-002-F2_FLI
cttgggagtgtgtactggggacaagtctgggatggttctcagattgctgtcaagaggttaaataacgcaaagaacggcacagaagcggaatttgcttcagaagtcgagatgctgggaaggataagacacaaaaacctcctgagcttccgtggatactgtgcggacggacccgagcgcgttctggtgtatgacttcatggcaaactcaagcctgtatgcacatctccatggaccgcattccgcggagtgtctcctcgactggcggaggcgagcatctatcgccatcggcaccgctcgggctctcttgtaccttcatcgccacgcaacgcctaagataatccacggaagcgtcaaggccaccaacgtgctgctggattcagacttccgggcgcacgctggcgatttcggtctggcaaggcttattcccgacgacggaacggaccacgaaaagatagccagcagcgagagccagcgaggctaccttgctcccgagtacgccgccatgtccggcaaaccaactgcaggctgcgatgtatacagcttcgggatcatactgctggagcttgcgagcggcagaaggccagtcgagagatcgggttctggcaaggcttgtggaatccgaagctgggtgctcccgctcgcaaggcagggcaggtacgacgagattgcggactcgaagctgggcgacaagttctctggacctgagctgagaaggatggtgttggtcggtctagcgtgtacacgttcagaacctgaaaagagacccacgatgcttcaagtcgtgccgttgctgaaaggcgagtcgaaagaaacgcttgttaagcttgaaagggaggagttgttgttcagcccagactcgacgacggtgagttcgcagggaacaccgaccccagatgggagcacggactctgcgccgccgaagaaagatcaagaactggttggggcgtgagttgcgatatattgctgttctaggagattgtagagtgcgtatttgtggtattgatgattggtctgtgcggtttgacgtgaatgggaattgtataggcattgttttttttc

SEQ ID NO: 19887 - DNA, 1236 bp, Zea mays
  Clone ID: LIB3156-003-C1_FLI
gcagttaccaaacgggacagttcaaactccaacatctggtgctggtggtacagcgacagataaatcaaataaaaataagcggaaggcttccctcaagggatcaaaaggaagcttaggtagtctggatgttgttgcagtaaaaaataacaagtcaccggcaaagccttcaacttcttcctccaatgaaggttcttcacaaagtgagagtggaagcgggagttcttctgaaggaagcagtacaaattcaaaaagtggttcaagggtgaaggataattctgagcaaggacagggtaatgatgctaggagtaaatgtactcaaagctctgtcgttgagcccacacaaccatcttcagggtctgttgtgcttaaccctatgatgccattttggcctgtgccccctcccatggctggcccagcaactactctgaatatgggagtggattactggggtactcctgcttctgtacccatgcatggtaaagttattgcagcaccgacatcagctccttcgtcaaattcacgtgatattgttctcagtgatccgactatacaggatgggagagaactgaagagacaaaaacggaagcaatcaaatagggaatcagctcgacgctcaagattgcgcaagcaggctgaatgggaggaagtagccaatcgtgcagttttgctaaagcaggaaaatagttcacttaaagaagaattgaaacaacttcaggagaagtgtgatggcttgacctcagaaaatacatctttacatgagaagcttaaagcgctcgaggatgagaaatcaaatggaaattggtacaaggattaaaggctgaaacttctctctctttctgactgctgatataatttggtggtaacctgataggacgacaactaaagaggtattcatatacggtattagacttttgtccgagggggtaaaattgtatcataggatttgacatggttgacggctacagattcttcttccagttgtgctgctgtgctgtgttgtctttcttccctcttcgtgctagatcctacagaagtacaactatgtagaaacccccaggtggtgtttgaagcctggggggattagcgtgtggtattggtatagctgttgtagagctgctcattgagcttcttgacagaaactgaagcgtgctaaagcagtcgtgtgatttacgattcagacggactaattttacggatagtactgtaactgcactaatgaatacaaatagccttttt

SEQ ID NO: 19888 - DNA, 907 bp, Zea mays
  Clone ID: LIB3156-003-F7_FLI
ggtctcgtcaccagggagcagtatgtcgagaagagggttaacattcgaaccaagattgaggaggaagagaaagagaaacttcaaaagctgcaacaagaagaagaagaattgcaaatgcagaaaaggaaaaagaggagagtgaagagtgatccacgcttatctttctgtgatgacattgagaatggaagtgacgaagatgattttgagaatcaagaaaccaagaaaaatggccctgccaaacttgggaaggatccaactgtggagacaagttttctacctgatagagaaagggaggcagaggaacaagcagaacgagaacgactgaagaagcagtggtcgcatgagcaggaattgattaaaaatgaacctctttcaattacttacagttactgggatgggactgggcacagaagagcaatccaggtccgtaaaggtgacaccattggagaatttctaagggctgttcaacagcagcttgcccctgaattccgtgaagtacggacaacttcagttgagaatctactttatgtgaaggaagatcttatcatccctcatcaacacagcttttatgaattaattatcaacaaagcaaggggcaagagtggaccacttttccattttgacgttcatgaggatgttcgtaccattgccgacgcaacaaaagaaaaggatgagtcccacgcggggaaagttgtagagaggcattggtatgagaaaaataagcatatattcccagcctcaagatgggagatctatgacccaacgaagaagtgggaacgctacacaatccatggggattagcatggaacatcatacatagagagttaaattattttgtactttggatgtccgaaattaccagcactcaagaatatgagaatggcacaagtgacgatttgaatagcat

SEQ ID NO: 19889 - DNA, 454 bp, Zea mays
  Clone ID: LIB3156-004-E9_FLI
ggccgcttcacgggcgaccgccctttcttcagcgccgtccagaccaccgtcgtcggcgcgctcgcctccgccgccgcctacgccatggccagggccgtgcagtccatatgacgatgatgattaatgaggcagctcgtagtgaaaagtccgctcgccggccggtcgccgcaggtcgtatcattcttcaccggccggctaggatggcgaagaaaaataagggcagctactagcctactacgcatacgtggtagccaaactgtactgtacaacgtgtagtgtgcttgtactatcacagtactagtactagtgtgtgtactttgtttgatggctgcctgcgtgtcgcacatgtcgtgtttggatgatttaggtgaagccaaactgtggcccgctgggcttttcttgtgtaatttggcaagcggaggcccaaattgggtgccctttgggctctgtctct

SEQ ID NO: 19890 - DNA, 1086 bp, Zea mays
  Clone ID: LIB3156-004-F4_FLI
ctggctgccatctcctccacgaggtgtcttctccgtcgccgctccctgcgtgattaccttggccagcgccctcgactactcagccatggaggtcgctgccccttcttttcctgatctccctccatcggttcaaagctcggcgtccctgctcctgtccctcccatggacgccgcccctccctcagctcactccctctagccgccatggagctcgcccctgtccaaattcggttgcctctgtttccccctctctctgttggtggctggcatcccatctcccctgcgttggacggctgccgcttcgttctcgtcgctggcgttcgtccctgctccagctagttctcatggccatgcctctgttccctaggtccgagctcgcccaactccctagccatctctgctcgcccctctctgtctctgtgcgagcagcagcacgacggggcagacctatgtcctcgacgcgcaccagatgtttgatgggaggtttgaactggagttcattattttccatacgtgacccgcaagtctttgcacagcgatgagagaaaccctcgggaccgatgatgaagaagtgaggcccgttcgacgtttgctaaatgttcggtagaaggttcgaaccaaaaatcatcgtcgatctcgtgatttcgagtttggtttagttatggttcgttacacgtgatgcggaggacaagagccgagttgatctcaaaatgatgctggtgaacgaaccagcggaatggatgatctgatcaagtgctaggacggaagatgctcaccaagtggtcgtcatctaaccacactaacctagtgttatcccaggttataagtttgttccgttgtggatggtgctaagtgccggtgggctcggccttcttatataagtatatcccatctttagcttctttattgaggattgtcacttaagctagcatgtatttgaaaacctataaatgttttatacattttaaattgtaatttttttgaatcactttcttttgtaatcactccgatgatatatattgtaatcttgttataacttgtaaatgttgtaacttgtaaccattttgtaataaagattttccgctgc

SEQ ID NO: 19891 - DNA, 453 bp, Zea mays
  Clone ID: LIB3156-007-H3_FLI
gcgagttcatggcgcctcccacatccgactactatgacggcgtgaggcggcgcgccggggacgtgctcacggaagcacagattaaggagtgccaggagctaggggtgctggtggatagggatgaccagggcgtgctgctccaaatcttcaccaagccagtgggggacaggccaacgctgttcttggagatcatccaaaggatcgggtgcatggagaaggatgagaaggggcaagaataccagaagggtggctgcggcgggttcggcaagggaaacttctcgcagctgttcaaatccatcgaggattatgagaagtcccttgaagccaagcaagctgctgcagcagctgcagctcagggatcctaggacagagcttggagacgagcaattgctgtggcactttgtatcatggaacagaaataatgaagcgtgttctttgtgacacttgacatgc

SEQ ID NO: 19892 - DNA, 476 bp, Zea mays
  Clone ID: LIB3156-008-C8_FLI
cttatctggcggtttcgaccttgggatgaacatgctgttgggaggagacaaggaagatgatggcggttcaagcaagtcgcatggcaagagcggaaaccgaaagaagcacctgaagagcagcaagaagaggaagaggcattagccctggacccacactgctgtagcacttcaacatactgatacagcctagagacggttcaagcaatccacacggaaagttgaagctggagaaaataccaagaaaccaagtagagaaaaaaagctttggtacctgtaggaaagttgaagctggagaaaatacaagaaaccaagtagagaaaaaaagctttggttcctgtaggcgtattatttctgaaacagaaaacttgatctgagcgactgatcctgagccaatggaacagtatgaattatatggcttgaacatggtaggtgtaccaagttttgttcatcgtagagtatcccagatgtgatcggct

SEQ ID NO: 19893 - DNA, 556 bp, Zea mays
  Clone ID: LIB3156-010-F1_FLI
cgccaaggtcatgcgccgcgtcgcctacaagacgggcaagcgggtggagccctggccctacgtgccctacgagatggtgcagcacccctacgcgccgggcgcctacgacaagaaggcccccgccggctacgtccgcaacgtcgtcgccgaccccaccgccgcgccgctcgccagggcctcctccaccgaggtccgctacaccgccgccttcagcgacgagaaccccaacgcctgctccgtcatgtagacccacccaccgaccccttgttttctttctggacttctggatctcgacctcaagaggtggcagctccatcgttcttcttgtctctagctattagttagtactagtatagtaggtgcttgcttgggagagttgctcttggagggaggttttgctcttcctgttttttttttcttttttttttcgttttccggtttcatgtagatgtagtgtgcgttttgatttttttgtgaaaaaaataaaccagtttgtaacggtagaccacttgtgcaaactatgatcagaaaaaaaaatcagttcgtccttgcaaac

SEQ ID NO: 19894 - DNA, 1688 bp, Zea mays
  Clone ID: LIB3156-011-A2_FLI
gctacgagaggagagagggaggtcgagggagacagcagaggctgcagcagaggccagaagcattagaagcggcagtagtaaccaagtggcatcagaagatagagccagccatccgtctatccatctatctagctctacaggtataaatcctcgcgcatcggtaaggggggcgaggggaggaccgggaaccggaggagatttctcgggggtggagtggcggccaggacctctgattgggctccagtgcccgatctttgaacgcagatttggtgcccgcaatctgccatggatttggtttaagatttggggagatcggtcgggttcgcgctgcaagattcggtctctgtgcctgttttattcacgagatcgcaacaacgatattgctaagcaagataagatttcaacttttttcctggatcgatctcagattaggaggagcaaataaagcaagaatagaaagatttttgggggagaaggcatgatgctggaagggaagtcctaccttgtgtcgcgctccgtgccgagctcctgcgagccggagacggagtgggagtacctcgcccacgcggtcctcagcggcaagcgcccggcgccggaagatgacgtcgaggtcgaagacccggacgaaactggcagcggcggcaagcgcagcaaaccggcgtctccgcagccgcacacgccggacatctgcgagggccacggctccaaccgccacgccaccggttccggagagcagcggatcaccgggagcaaccccatgacttcaatcggtcgtgacctgaccctcaattgcctcctccggctatctcggtccgactacggctcggtggcctccctcagccgggacttccgctccatggtccgcagcggggagatctaccgcctgcggcgccagaacggggtggccgagcattgggtctacttctcctgcaacgttctcgaatgggatgcctacgacccataccgggagcgctggatccaagtgcccaagatgccgcctgatgaatgcttcaagtgctccgacaaggaatcgcttgcggtgggcactgagctgcttgtgttcgggatggcgcgcattgtcttccgatacagcatcctgaccaactcatggagcagggctgatccgatgaactctccgcggtgcttgttcgggtcaacgagtgtcggtgggaaggccttcgtcgccggaggcactgattgtgtcggcaacatactgagctctgcagagatgtatgactctgagacacatacctggacgcccctcccgagcatgaacacggcgaggaagatgtgttctggggtgttcatggatggcaagttctacgtgataggtggtgtggccaacagcaacagagtgctgacctgcggggaggagtacgacttgaagaggggttcttggaggacaatcgagaacatgtctggaggcctcaatggagtgaccggtgctcctccccttattgcggttgtcagcaacgagctctacgccgccgattacggcgagaaggatctcaagaagtatgacaagaagaacaacaggtggatcaccctcggaaaactgcctgagcggtccgtgtcaatgaatgggtgggggcttgccttccgagcgtgcggtgaccgcttgattgtcatcggaggtccgaggacctataccggtggtaccattgagctcaactcgtggatcccagatg

SEQ ID NO: 19895 - DNA, 326 bp, Zea mays
  Clone ID: LIB3156-011-A9_FLI
agaaataccacgatgcgaaatatcagatattcagatccctgtatgagcaacaactctctcatcgcgcaaccatggcacaggcattgcagtagggctctatggccactttggctcttcactcttggttattgatacccttggtttcattgccatgttttattggcttatttacatgtaatcaatatcgccttgagtgatttgatagaatagaaaccatgataagatgcatgtatacacatataagaaaactggtaagatgatctttctcacagggacgtgaaatccccaaagcctgtgcaatgttaataaaagaaaaggaggttctt

SEQ ID NO: 19896 - DNA, 910 bp, Zea mays
  Clone ID: LIB3156-012-G6_FLI
atgattcggtctctcaagacgaggcagtactgggattttccagtgcaatgatttggctgggagtcatgaccctgatgacagcactcctatcagagtttgttgtgagcacaattgaggcagcatcggaatcttgggagctatctgtcagtttcattagcgtcatcttgattccaatagttggtaatgcagcagagcatgctggtgcagtgatatttgcgtttaaaaacaatctggacatcaccctcggagtatctttggggtccgctacgcagatttccatgtttgtggtgccattgagtgtccttgtagcatggatcatgggagtcccgatggatcttgatttcaacttgcttgagactggttgtttgtttcttgcaatattagtaacggccttcacgctccaggatggatcatcacattatctgaagggactgctgcttgtgttttgctacattgtcatctccttatgctttttcgttttgagacagcatggaaatggaagcaacgatgatcagctgggtgtagcaagcaagccatggaggatttagggcgcctgagctggcagtagtttctcaacaagtagcgtggactttggtttgcacgattttgcatggaacactggaggggagacccgtgaagtttgactaaagtatgtagactgcgggaagatgctgttcagctgatgtgtgaatgtaagtacatacaaagactatagatgaaaactgatgttgcgtgagagactatttgtgtgtgtttttcttgttctttccaccaagcaatggctagaattcggttgagctgttgaaattgtctcctgtataaatcagtgacatgtcatactattttccaactggacttaacagagcctttatccttctaattggttacccgcatggtcataatctggatc

SEQ ID NO: 19897 - DNA, 804 bp, Zea mays
  Clone ID: LIB3156-013-H7_FLI
gaagtccaagcagctggagcgcgagtactcggcgctgcgcgacgactaccacgcgctcctctgcagctacgagtccctcaaggacgacaagcgcgcgctcctcaagcagctggagaagctggccgagatgctgcacgagccgccgcagggcaagtactacggcggcaatgcggacgacgtgcgctcgggcggcgtcggcggcacgaaggaggaggaggagtccacagacgcctgcgccggggccgcgctctactcgtccgagtgcgctggcggtggcaggttcatcgcgcacttcttggcggacgacgacgtgggagcagccctcttccggccgccgtcgtctccgcagccgaccgctggcttactcacgtcgtcggggccgccggagcaccagccgttccagttccactccggctgctgctggccgtcgtcgtcggcggagcagacctgcagcggctcgcaatggtgggagttggagtccctcagcgagtgacgtacgatgatcacaagcggccgggggtcactcggttccaagcacacgtaactggccgggccaatacgagttcgttcgtagcggtctcgtcactcgtcagctagccctgcagagcaacggtgtacatagcttcagtagatcgaagtccaggtccaggtctgcccatcaagcagtttcttcttctcgccatcgatcatcgatcatgcatgcaaaagattttttttctctctcccttgctaccagatcatgtaatccagcaggaacatgtagagaaagatcaaacgaggttatagatcgagaaggtcgcctgc

SEQ ID NO: 19898 - DNA, 668 bp, Zea mays
  Clone ID: LIB3156-014-A4_FLI
gctggtgcaggtccagggccaggtggtcgtgtcgccgcctccgctcccgcccctcgccgctccgcgtgtcactcgccgcttctcttccattccaccccgcccccattctccctcctcgcgcgtcgcgatgaaagaggcgcaggcttgagcgagaggaccgcgctggacaccaccgcatgctagggtggcagggaggggagagaggggagccgagccgaggacgatggcgctgggcgtgttgttccacggcgcgcagctagcgctggatctggcggtggccgggatgtcgctggcggtggcgctcgggttcttcgccctcatcactaccttgctctgctccgcggcgttcctccaccactccaagcccgccgcgtagtcatagcctccacagcgaccaacgcgcctcaacctctggggatcgtaatactgttgctggtctaattcctccacatcaattgcagaggtgctttaatcaactgctttatagcacttacagatgcaaagagtagttgattgcacacatcaggtgatagctataggctcttgtaccacgtgtatctttctttatgctggtttgtaaacgtgatgtttgtactttgtactatagtttttgtaatcagtctctctttcaagatttatgtctcatataaatagtatgtgcattgttt

SEQ ID NO: 19899 - DNA, 843 bp, Zea mays
  Clone ID: LIB3156-014-A7_FLI
gtgcaagcctataagggcaagcatgattgcttcatctattcagcaactgctcaaagtagagatgcctgaaagaagagataatcagaatcggccatcatttcttcgcagcctgctggttgggaagaatatattggtagtagatgataataaagtcaatcttagagtcgctgcagctgcactcaaaaagtacggtgctaatgttagctgtgttgagagtggcaaagatgctatcagtctacttcaacccccacattgctttgacgcatgttttatggatgttcagatgccagagatggatgggtttgaggcaacaagacaaataagacaaacagagatgagagttaacgaggaaaggaagaataagttggtgttgattgaaggctcaacatttgttgagtaccatttgcctgttttggcgatgacagccgatgttatccaggcaacttacgagaagtgtataaaatcgggaatggatggatacgtgtctaaacccttcgacgaggagcagctataccaagcagtctccagattagtagtgggaacgacagattcgactgtttaatatttagatggctatgaatctgatttctcattcatcgaattgaagcacaccaccatgttgcttctgtccaagcttgactctaacccttgacaatggtctgacctggcctctcgcagcactagatgaaaaggatgaaagtgccacgagttggctatgtatcagcaccacagatgaagttgcctcaccccagagtgtaggttggtagatcactctcttctttgatgtttataggttgttgtatatcttctgataattcattggaaaccacatctcgttgcgac

SEQ ID NO: 19900 - DNA, 1115 bp, Zea mays
  Clone ID: LIB3156-014-B6_FLI
aacggggagtgccttccaaggcgaccgccccctctcgcgctccatacgtccatccgtcggcccagagccacaagataacgcagccaagaacaagagacaccgccgagcgagcgaggcggggagaagcaggtccaggaccaggagaaaggaaaaggaagcccagctctctctagcctggagccgagaagccgagggagcgagggagcagcaaggcatggaggagcccgttccggctgatccccccaggattttctggaagtcaaggagatcagccaatggccggagcctgcaacaagagcctgacaaagacgctaccgaggaaactaacgagcaggctcaagaggaacccatgaagaccgacgacgcaacggatacagcagcagcagctgagccgtacccgaaagctaacctgtccgagaagcggaaggctctcttcgagcctctcgagccgatcaacggcaagcgcggcgctgctgagacgctgctcccaccgccggactttgagcccgcgtcgtaccccaaggggtggctggtgggcaagaaacgcaagctcgtcaacgtagacgtcgtggagagcatgcggaggattgcgatccaggaaatgaacagaaaggaccgtgagatcaatgggctgaacgagcagctagaggaagactcccgcgtgctggagcttctgcagaagcagctggctgacgagcgcaggaagcggacagagatcgagaaggagaactccatgctccatgagcaggtcaccatgctgatgaacatgctcgacgagaacgagggtttcgacgaggacggagaggccccgccgcccgattccttcgattaagcgttgttacagtactatatccgttttctttttccgtcagtgtgaaatcatacgtctctaggtgctggtttcagagtatccgagagatatgtgctagctgtgtagtaggatttcattggtgatcgtattccattacattacatggctttggcttctgtagataaagggtgcattgcatgtctgttgtaccgtactgtacctactccttttctaggcttcaaaagtgtatgtgagaaactagcaacatgttatatttgaatcgaagtgtatgtacatgttacgt

SEQ ID NO: 19901 - DNA, 531 bp, Zea mays
  Clone ID: LIB3156-014-D3_FLI
gtcaagaatgccggtggtgcatggctgcaaattcagcctagcaagttcatctatacgcggtaacgatgacactactagcttggtatggattcagtcgattggattgtaggactccaaagcactgcattggtgatggtccctgcaaggtactgccggagttatagggaggctctgctcattttgcctgtgggccggaagcaagccctcccttttgtgctggtccagcactgccaactttttctgtcgtggtggtcgcctggtctggtcggtcggtcgtaggaatcattagcccttccaaagctgcacaaagctgaatcacggtgacagcttctgcagcatgcacggggcaaaagaaaaaagatagccccagtggagatgtggatgtttttttttcttgtctgatttaatcttttgattaactttggatttgtttgtgcgctgaggtagggagtcctcgtgtattttttttttggtgaggatgtagcttgaacggttggtatgtgcagtttgtgctttctcaatatccaggtt

SEQ ID NO: 19902 - DNA, 649 bp, Zea mays
  Clone ID: LIB3156-014-D4_FLI
gcgttccgtgacaccatcgacgtcttcgttgagcggtacaaggaccaagggatcaccgtagttgctggtgtggaagctagagggttcatttttggtcctcctatcgctctagccatcagtgcgaaatttgtacctttgaggaagcctaagaagttgccaggcgaggtgatctccgaagaatattctctggaatacggaactgacaagatagagatgcatgttggagctgtacaggccaacgatcgggctcttgtagtcgatgatcttattgccaccggtggaacactctgtgcagctgtcaaacttattgaacgtgttggagcaaaggttgttgagtgtgcttgcgtcattgaattggcagaactgaagggccgagacaaacttggggacaggccagtttttgttcttgtcgaagcagatgcttgagcggaacttgggacttctcttctcagtgagttagagttggtgctgttgatgctacctctctgtcaacaacaaagtttcccatgttggctatattcttgctgacacgtaataaagtttcattccaaattgtgatcccctgaatgatttgtcaatgtagacatgattgctggtccttgtatactgtggcttattattcacatcaattaaggataatcctgattgg

SEQ ID NO: 19903 - DNA, 422 bp, Zea mays
  Clone ID: LIB3156-015-G5_FLI
gatgacagtaattttcccataagttattttcatgacggcacattgttacaagttaggaatctgtttttacctgttcatttgaacatagtttgatgtaagttgtgctttgtcttattctgattccatacattgtgtgcagatctaggattgcagtttggcagataggcctaacattacaatatggtgttcttgacagaatggacagcatagcgtctgtatttcttcaatgttatggaatatgaatggtgtctggcaaagatcatattatttgcggtagcctgtgctttgttacgtgtgcaggccaccgctgcggcgtctggtggaacctctttactgaactcgtagtgctagttcctaaatgtcaaaatgtcatttctgactatgtaaagttgctttctatttgagtgccagattgtactctt

SEQ ID NO: 19904 - DNA, 560 bp, Zea mays
  Clone ID: LIB3156-016-B6_FLI
atggagagcatctggggaaaagactgctctgagttccggcctgagcggtggctctcggctgacgggacccggttcgagccggccaaggacgcgtaccgcttcgtggcgttcaacggagggccgcggacgtgcctgggcaaggacctggcgtacttgcagatgaagtctatcgcttccgctgtgctactgcgccactcggtggagctcgtccctggacacaaggtggagcagaagatgtcgctcactctgttcatgaagaacggcctccgagtgcacgtcaagccgcgggacctcgccggctacgtcgtggcaccggaggaagccccgcagctgggagcctttgtgatctcgaccacaactgcagcagctgcataagcctgcatgtgcccgcgcacattggcactcgtttcttcgtgctgaagttcttctatatgcctctgcctgtcaaagtcatatcgtttcttcgtttctccctcttcattagactgttaggtttgtgggtacctggcgtcatattggttgtacctgtgtagtttttgtgtggatggatcggtttgtgt

SEQ ID NO: 19905 - DNA, 562 bp, Zea mays
  Clone ID: LIB3156-016-D4_FLI
gaagcttactgggaataccgacttaagccatgggatatggctgctggcgtcctgatagtagaggaagctggtggggtggtaactcgcatggacggtggagagtttacggtcttcgatcgctctgttcttgtttccaacggacttgttcatggacagcttttggatcggatcggccctcctactgaagaccttaagaagaaagggatcgacttctcgttgtggttcaagcctgacaagtacccgaccgacttttgagctgcatcaagggcaccaccagcagccatgggccaccataataaagcagccatcattttttttggtgggggggttctgatagaaaatgtgttttacaccctgtgtacgtggctggcttagggcgtaaggttcggcatgcagtgactgtgtctcgttctgttaaggacgtggtcacggtgaccgagtattcaggcgtcactagtgcacgctccccgcgatcttatcacgatctgttgtactctgatgtaaacttgattgagctataaatagaacacgatcccatcgaggatcagtgcaccttttcatc

SEQ ID NO: 19906 - DNA, 479 bp, Zea mays
  Clone ID: LIB3156-017-G1_FLI
gagagccaattcaacatagaagggatatgtgcttcttggttccagaatcagcagccacagcaacagctgcaggtagcaccagacatgtatgacaaggacttgcaaagaatgcaactatcttttgagaatatctaggcattatgttccaccacatggaagagagcagatcagaagaagcagaaactcgtaattttcagagattcgtgggcagaattatgctgaattgctcacatagatacgttaagttgatacagaaatcatcctccacagctgttcctcagttgaagagctggcaatatcaaggaatggacagccctggcattggaagttgcagcaggatgcataggaaagtatgttctagagtctcctttcctttctcttgaaaattgatgttttccttctgtacacgactgaacttttgcatatttgagtttttgttctctctggtggaaattaaataaatatagatagccataggc

SEQ ID NO: 19907 - DNA, 656 bp, Zea mays
  Clone ID: LIB3156-019-D5_FLI
ctcaactcccaaggtcccttttttttctcgatctggaagcgccgcagtagcagccatggacgtgagcggagcaggcgggaaggcgaaaaagggcgcggccgggcgcaaggccggcgggccgacgaagaagtcggtgtcgcggtcctccagggccgggctgcagttccccgtcagccgcgtcgggcggtacctcaaaaagggccggtacgcgcagcgtgtaggcacgggtgcccccgtctacctcgccgccgtcctggagtacctcgcggccgaggtgctcgagctcgccggcaacgcggcaagggacaacaagaagacgcgcatcatcccgcgccacgtgctcctcgccatccgcaacgacgaggagctcggcaagctgctggccggcgtcaccatcgcccacggcggcgtcctccccaacatccacactgtgctcctccccaagaaggtggccgagaaggcggccaaggagcccaagaaggccgccaagtcccccaagaaggcgtagagtgatctcctgtcttagaacaatattaccattagcggccgtgcagttagactagatcatgtttagtgtagatccgcaatgttcttgtcccctgctgccatctggaacggtttatctagtacacccatgcttttcccttgctaattgc

SEQ ID NO: 19908 - DNA, 786 bp, Zea mays
  Clone ID: LIB3156-021-C5_FLI
agaattcaaaggaggaatgtgctgtcgacaatgctctccgcttggacgatcctgctcttgagtccgggtcaggtcagcttagcagagacaaccggtggcgcattcagggagtatatcgacacgtttgacggctacaccttcctgtacccgaagaattggatccaggtccgtggagctggcgcggacatattcttcagagaccccatggtcctcgacgagaacatgtcagtggagatatcgtcgccttcgtcgtccaggtacacgagcgtcgaggacctcggcccaccggagaaggctgcagagaaggtcctcggtcagtacctgacggagttcatgtccaccaggctgggcgttcggcgtgaatccaacgtcttatcggcgtcatccaaggtcgctgacgatggcaagctctactacgaggttgaggtgaacataaaatcctatgcgagcaacaacgagctggcggtgatgccacaggacagggtgcagagcttggagtgggaccgccgatacctgtcagtgctcggcgtcgagaacaaacggctctacgagctccggctgcagacgcccgagcaggtgttcatgcaggaagaggaggacctcagaagagtcatggactccttcagggtcatcaaggcggcgtagtttgtcgatagtagagtgcacatgttttgtttttgtttgcttgtttgtttcttttgtacccgcagaaatgttcatatcacttgtttcttctgcagagcgcacatgtttccattcatgtctccaaagggatgtttacacttt

SEQ ID NO: 19909 - DNA, 371 bp, Zea mays
  Clone ID: LIB3156-021-F6_FLI
ctcccattggccaaaaatgcactaaccttttgataattccatctgaatgcagtgcaagatctgcatgcagaccttcatctgcaccacctccgaggccaagtgcaaagaacatgcggaggcgaggcatcccaagaacgacctctaccagtgcttcccccacctcaagaactagtaagcagcagaagcatatgctctgctcagctaaaagacaagtactacatatatatatatacgctgtgtgtcaattaatgggttctaggctgctgctgatgcggctgcttcgttcgtgttgccccgtctgattatgtactgtaacccttggctgtcagcctgctgtgctaaaaaccattggttctgtgtggattcatgct

SEQ ID NO: 19910 - DNA, 661 bp, Zea mays
  Clone ID: LIB3157-002-D9_FLI
tgattagtctgcaaaatggatgtcctgtggaaacatggtacataatatgacaccatttgataacactgaggcattacagaagaaccctatttccgttcagtttttgcttcgtgctggcaatatcagaatccaggcctcatctttcagtgatggttctgtctgcaatatggactatgtatccaaatccaagtccccgcttcagggaaaacctccttggagaaacatcatctaatatgatatgaattctgatagacagatacagatatatctatgcattattgtatcattttttctagtttcaaggaatcataattattttctatttagaaatctttggtttgcatttgcccaatttaagctcaaattctggtttgtgcacttaataagttgcttctgaatcttgcagaagcatatctacagagaggagtcaccaagcctattggacttccgatacgcagctttttctaatagaatgggaaacgaattgtactgtaattgtttgtgtactttactttggctcaatcgtccgaccgtatctttgtaatcagtgagaatggcaagcaaatgtccttgacatctattgttattgtaaaaacatgtgttataacgctgattctcagattacatttgattattcgagctgacaatttcttcaggtttt

SEQ ID NO: 19911 - DNA, 383 bp, Zea mays
  Clone ID: LIB3157-003-H2_FLI
ctcgcgcgctgcgccgtgaacgccatagcctgcgagggagccggccgtgcgcaccatactcggagctacaagcagtggcaggccaggagccggcgggcagggctgcggcagctgcctctggacggtgacgttgtccggacgctcagggacaaggtgagcagggaataccacgagggtttcgtgatcaccgaggatcagcagtggcttctccagggatggaaagggagggtgctctacgccatttccacgtggacggcagacgatggattggcagggaattgacgatctttgtttgtgcattgcgcttgtcatagaatattaatttatgttcctgatgtactcactctgttcaaaattttaaactgttctggatttttaagtac

SEQ ID NO: 19912 - DNA, 504 bp, Zea mays
  Clone ID: LIB3157-006-A5_FLI
tcaagggctcattctctttccggcgctgtgtgcctgcgggctggggcattttactcatttctggtctgaccactgttttctctgagagggttttcttgaacaaaacgaggttcaagcagactgttcccattcacatagcgattggcatcatgtgcttgagcatcgcgttacttgagatataccgtggcgaaaagcagttcttgatgcaaataatcagaactttgaagcataatgacaaaagccagtgatttgaagacacagcgcatttcatagcgtattctctctggaacgcctgatgaaagagagctggtagtatagtgggtgggtaatttggtgtgtatgcaggagatcgggagttaacataagaggggggattaatcggtcagatagataaatcggttgcgtatgggaattgctggatttcttgttgacccaatatttatattacaggtttattgagctagtgattcaataatttataattaaatgaagaagtttaggttc

SEQ ID NO: 19913 - DNA, 145 bp, Zea mays
  Clone ID: LIB3157-006-E12_FLI
gagagcccgcggacggcagaccggcccgagctcgccggttccgacaggcccagccaccgcgccaccaccgagtgcacgccgtcacacccgatcaagacctgataacgtgtacaaggaaaactaagaaccatgcctccttttcttg

SEQ ID NO: 19914 - DNA, 185 bp, Zea mays
  Clone ID: LIB3157-006-F9_FLI
gtcgttgtttatctgtctactgtgctttagattgttaaaggacatgtgtttcagaacggatgtgttgttgcctcgtactatggtgaaacattgtctcagtttttgtggtcgctgccaggattttgcattatgcctaaagatgtttactttggatatttttgtgttaaaatggtactgtattggat

SEQ ID NO: 19915 - DNA, 806 bp, Zea mays
  Clone ID: LIB3157-007-B8_FLI
ggagctggatttacacctcatgttatcacagttcaagctggggaggacgtgtcatcaaagatcatgtcgttttctcagcacggaccgcgtgcagtctgtgttctctcagcaaacggtgccatatcaaatgtgacgcttcgtcagactgctacatcaggcggaactgtaacatatgagggtcggttcgagatactgtcactgtcggggtcattcctcttggtggaggatggtggtcaacgcagtcgaactggagggctcagtgtgtcgttggctggtcccgacggtcgtgtgctgggcggtggagttgcagggctcctcgtagcagcttcgccagttcagatagtactgggaagtttcaattctggaggcaaaaaagaggcaaaaaagcatgctccttcagcacccacaccagcgccactgaaggtcgctcctccgacaacaaccaggatgggacccaacagcagcagccccccttcaagaggaggtacattgagcgagtcatccggtggcgccggaagcccaccgccgccgccgctgcatcaaggcatggctgctagcagtagcaacgaccagccgccgttcctgtccagcatcatgccatggaaatgatcctcttatgtagtagtataagtcagaagctttgagtagggaggtaaatttgtagctctactgtaggtttaaacctgaattcctgtgctacgtaggtgtattgagcagtaacggatgtgatcatttgagagctacctagtgttgtttagttaaatgttttaccaaggcatgtcgatctgagccagaagattcttgct

SEQ ID NO: 19916 - DNA, 446 bp, Zea mays
  Clone ID: LIB3157-007-H9_FLI
actgtcaagattgttcctgcacgcacgccctggtacccctgctcgctgttgggccgaccgtcagcagcttcgtcagcagcttcccggcctccgtcgtgctcagcagcgagtaatttatgtcggagcagttactgagacgccctcctttgcgtcgtgctcgccagatcaagcctcgcgtcgtcgatttgcgcagttcatgttcggcaatcggtttagtctccgtcgaacttctatttaccgtgacgccgagctccttcaacactgccccactccgttgtcgttattccgtcgcctcacttcgatgtcagttccttcatgacatctcctacttgtgttcgcgccgacaaaaggatcctaagagaatgtggaaaaacaagccccaagttgatgcctcaaatactcgacgaaaagcctgaactataaattatcgtggttcttgcagagtt

SEQ ID NO: 19917 - DNA, 251 bp, Zea mays
  Clone ID: LIB3157-009-F5_FLI
tcgttggtgctgaaagggattgaattgaatgtgacggggtggtctgctgggtctcttcggagcgttttaggcttgggattggtggttaaaattggctgtgaataaagaagagtttgagagggacagcagaggaggggattgtattgtaggtgcagggatatatcatatatctgggtgtatagagaagtttcagctcagttgagttcagtcagacatcaaagtttagaccaataaatttccagtgcccgttt

SEQ ID NO: 19918 - DNA, 451 bp, Zea mays
  Clone ID: LIB3157-009-H6_FLI
cgtgaagcgcctacctaagaggccggcgccaccccggtttggacggaagctgactgattcacaaaaggagagagcaacgcacgtctgccttgattgtgggtacatatacttcctacccaagccttttgacgaacagcccgacgactacggttgcccacagtgcaacgcgccgaagaagcggtttgcgaggtacgacgctgccaccgggaaggccatcggcggcgctctgccgcctatcgccgtgatcgtaagtttggtgatcggcatcgctggggtaggagctctgctcgtgtacggcctgcagtagcctgctcgttcttgttcagaacctttttttttttttgctgtgctcaagaagctcagctgactgctgctgtactctgtctcacaagacattccgagtgatatacatacataaaagggaagaaggaaatacacagtatttgaggct

SEQ ID NO: 19919 - DNA, 595 bp, Zea mays
  Clone ID: LIB3157-012-D1_FLI
ggaaacattattcatccattgatatgctatgcaaacgggtggcttcaagctgattatcctccagagagcctttttggaaatcagaatttgttgtttacaagctcaaggagatggggaagattactgaaaaagatatcatgatgatatgtgatcaattccagaggctggacacagggagctgcgggaagatcacactttcagatcttctggagagccatcacttggtttcagaacccagggataagaaaaaggggaagaaatcttaaacatgtgtcatagtatgcacaagaattgaagggcagtgctaaaattttgggactagaaagcacgccaaatgagcaagggtgcgacaggaggcattctcctacacggaatggaaaagacggaatccgctgaaggtaggatagctccgtagaagttgtaggtgcgctccagatatgattctaccctagaaatggtggaaggataataactgttttaggaggcggctgtaaatatgaacataattatacaggatggtctattcagattctttatgtggatcattcctactcatttttaagaatatatttttctggccacacagttgacgcgc

SEQ ID NO: 19920 - DNA, 276 bp, Zea mays
  Clone ID: LIB3157-016-D12_FLI
atgaaccccgcgcgctccttcggccccgcgctcgtggctggggtgtgggccgaccactgggtctactgggtcgggcctcttatcggtgggccgctcgctgggctggtctatgacggcctcttcatggcccagggcggacacgaaccgcttcccagggatgacaccgacttctaggcagtaggtgtgtgttctcctgaataatttgaattgaaaacacatgtattgaagcctctaatgtttcggtttcgattcgaatggaatggaagcagcagtatc

SEQ ID NO: 19921 - DNA, 779 bp, Zea mays
  Clone ID: LIB3157-019-A10_FLI
gcgcacgctcacctccgacctcctcttcaagggcgccgtgccggggctggcgcacatcgagcccaacaagctccggctctgcctcgagctcgtgcagtcggcggccatggtcatgtcccgcgaggacgcgcacacggcggtcaacgccgcgcccatgtacggcgagccttccggcggcggcgtgtacagtgcgagcggcaccagcagcacgagcttggtgaacctcaacctggacaacaggatggtgtacttgaacctagggatggacgcgcagttcggcaagatgggcgacggcgatgacggcgggggcagggggccgtcttctttgttctccccgcatggctaccattgacaagatggagcggccggttgctgctctactatctccttgtaagcttagaactaattaattacatgttgttaatcatatccacattacaggagatgaagaagatgatgattggaaagatggcgagacgatcctttaattttttgcactctatctatatatcatcatgtgactcttttagcagctagagacgattagagagagagagagagagagagagagagagagagagagagagagagagagagagagagagagagagagagagagagagagagagagagagagagagagatcatgcatgcaaagtgatgcatcacaagagcttgggtcgatctttattggtgagttgtctagtctattggtggaggtgttgtttttggaaattgtaagaggtgttaagaggtaaaaaaatgtttttttggttggt

SEQ ID NO: 19922 - DNA, 274 bp, Zea mays
  Clone ID: LIB3157-021-B10_FLI
cgaggttccctactacgccaagatcttccagggagtcgagcacgggttcgcctgcaggtacaacaccaccgaccctttcgccgtcaagaccgcagagacggccctcgcctacatggtcagctggttcaacaagcacctcaactgaatgaagcctgcactgcacccaccagactgaattcaataaaccacagcactgctgtgatattttgtttcgattcatggctccccagattgatttgtcatggctaagacctctactactgtaatttccctc

SEQ ID NO: 19923 - DNA, 432 bp, Zea mays
  Clone ID: LIB3158-001-E2_FLI
ctgacaatggggtggcaaacgtgtggcttctgcgggacggtggtatcaaatctcagatttcttggactggagctctggaagcagcagtacttaagatccttggtgtgcggcgaaggttgtctggcactcaagaaaccaagataatctggtctaatgacttgactaccaatagtatccctcctgctaatttcaattgcttcaatggaagcgacgtgtgctgctagtgactctagactatcaggcagttcttaacttcactgctctgcctgtacgtgctattccttgaatgtgttatcattatcggtacattgccccatcacaggcatagaagtgttgtcagatgtaccatgagcaattgtcggcttgtaatatattggtagagctatgcttcccctaacatttatatgtatatatatgtgatcttgattcttg

SEQ ID NO: 19924 - DNA, 1027 bp, Zea mays
  Clone ID: LIB3158-004-D4_FLI
gcggctgcaggccatggaggcgtcgacggcgcggcattggctgaaaacatcaaagcgggcagggcggcggccgagcctgaactgcgctcgcctggcgacgcagctgggccgggtcacgccgtgccgtgcacagatagaatggtacaaggcgctgttcgacgcagagatggggtactacgacgcgttcaagcagcggcggtcgcccaggaagtacaccaaggtgaacttaaaccgcatcaagctgggccagttctgggaccgagtgctgagcatgctcgacgccggccagctcccccacgatttccaccgccgcgccaagtgggtcaacgcctcccgcttctaccagctcctcgtcgagcctcttgacattgccgactaccaccgccacggccaccacctgacgagcgggagctacatgactcacggccgggagaggaggtacgagctgttcgacaggtggtggcaggagaaaggatgcactggcgctggcggtggcatcacgtcctccatgtcggcagcgtcggcgagcagccggagacgcagcaaatacgccgggctaacgcaggacccgtgcttctgggcgagagtggaggaggcgagggagcagacggagagcgcacgccgcgagcgcgacgcggccgaactggcgatgaagctggaggagctgcaagagttcgagcgctacgcccgtgagctggtggcgaccaaggaggtgtccgtcgacgtgctcgcgccgcagtcgagctacacgctgtgggtggaggattggaaccagctcaagctcagggatgatgtgaggacaatgttgcttcggttttgagctgggctgcaaaaagctgatgagttcgtaggtagctggtgggcgttctacaaatagttcaggtatacatgaatcattggatcacggtgctagtatatgtgattgtaaatatatccaaacctagaagcgcagcagtggattacagtattgttgtggttcccgtcgaaattctgaaaaaacgataatatgacaataccaattagtttt

SEQ ID NO: 19925 - DNA, 163 bp, Zea mays
  Clone ID: LIB3158-005-A5_FLI
taatatcttgtttggagttgtaatatcttatcttgcttgtgaaatcgaataggcctatatatgttatgctgtacgagtatgtggctccaaatttgtgagccttctgtctgttatgaatccaatttgtgagcacacatgaatcaatttcgagattcgacatgtc

SEQ ID NO: 19926 - DNA, 846 bp, Zea mays
  Clone ID: LIB3158-005-B9_FLI
cgcaagcctcaggcccctgcgggcgggcggcaagcccgtcggactcctccccttcccgcgccgcctcgcctgcgccaccgccgccggggaggcgccgcccgtggagcagcgggacgaggcagagccggcccccgccgcggcctccaacggggccgccgtcaagtccgaggccccgccgccgcccgcgccagcgccggtcccggccttccgggacgccaggtgggtcaacggcacctgggacctcgccaagttcgacaagggcagcggcgtcgactgggacgccgtcatcgacgccgaggccaggagaaggagatggctcgaagactatccggaggcgactaacacagacgaggctgtcgtcttcgacacttccattattccatggtgggcttggatgaaacgcttccaccttcccgaagccgagaagctaaatggtcgcgccgccatggtcggcttcttcatggcctacttcgtggacagcttgacaggcgcgggcctcgtcgaccagatgggcaacttcttctgcaagacgctgctgttcgccgccgtcgcaggcgtgctgctggtcaggaaaaacgaggacgtcgagtcgctgaagaagctcgtcgacgagaccacgttctatgacaggcagtggcaggcgacctggcaagatgactccgctgggggaccaaacaactagttcagcgttgtggtacaaaaaaaatgcaaaacgctttcttgttacgtagcttatctatttcctcggccttcttgttttccctgtgtagtgagatctttttttttgtttttgacaaacgcaatgatctacgtcatgttgtaaaattgtatggaaaataattctgc

SEQ ID NO: 19927 - DNA, 1544 bp, Zea mays
  Clone ID: LIB3158-005-F8_FLI
gcatctcgcaagagatcgacaggttcaaggccaccgatgccaataggcttcgtgctgaatacaacagactggtggatggactggcacagcgaggaaatctaccaatatcggatgcttggctcgcgaatccgtctttgcctgatgacatcttgaaggaagctgttcctggaaacataaggagggctgaacattttcttgctgtcttgcggaggcttgtgagattccttgatggccggcttgaaacagaaaatgttgagaatgaaatgccagtttcctttgttgcctcaatccattcccaggctggaatcgaccaaaaaatgctgaggttttgttatgaccggctacactccctaatgatgacattagagataactgatacagatgagttcatgcacatacagaccatatgtgactttgccacactgattggaacttatacacggggcttttctattataatagagccgtatgatgatagaatgcctgatattcgtgatcctgttattcagctgagttgccatgatgcttcactcgcaataagacctgtttttgatcgtttcgaaacggttgtgatcacttctggaactctcagcccaatagatctttaccctcgtctcttgaattttaatcctgtcataagcagaagcttcaccatgtccttaacaagagattgtatttgtcccatggtcttgacccgaggaagtgatcagctacctgtgagtacaaagttcgatatgcgtagtgatcctggtgttgtgaggaattatggccgcctcttgctggaaatggcttctgctgttccagatggcatagtttgcttttttgtcagttattcctatatggatggcattgtcaacagctggcacgaaatgggaattctgcaggacatcatgcaacataaattagtgtttatcgaaacaccagatgtcgttgagacaacattggctcttgataactacagaaaggcatgtgattgtggaagaggtgccattttcttctctgttgccaggggcaaagttgctgaaggtattgattttgatcggcactatggcagattagttatcatgtttggtgttcctttccagtacacattgagtcggatattgcttgctaggttggagtacctgcgggaaacttttcagataaaggagggtgacttcctaacatttgatgctttgaggcaagcggcccaatgtgtcggtcgtgttattcgctccaaagctgattatgggatgatgatatttgctgacaagagatacagtcggcatgataaacggtccaagttgcctgggtggatactctcgcatttgcatgatgcgcacctaaatctgagcactgatatggctctccatatagctcgtgagtttctccggaggatggcacagccatatgacaaggcgggaagcggtggcaagaaaacgctgttaaccgaggaggatctggagaatttggcgcaggatggcatggcgatgtaaaaaaatgagggtactgttgtacatttctttttgtagccattttatggcggtagataacttgtttgaagc

SEQ ID NO: 19928 - DNA, 277 bp, Zea mays
  Clone ID: LIB3158-006-D7_FLI
gtcatattccagcagaagaagactgcctctggctgagatgatgcctctcgctgcctgcatatggagacttgttttgagcgacatttttttgaagttaaaagcttggacttcatcctatcttggttgttgcctgatactgcattttcttaccataagttgtaacctcgtttcttgcggtttggtgtaggacacgacttttctgttaataatgttgtggcttgaactttccaggctgtggagattggtgaaaactcagcgctgatatcatttgttactt

SEQ ID NO: 19929 - DNA, 526 bp, Zea mays
  Clone ID: LIB3158-006-F1_FLI
gctcgaagcttgcgttcttgtagtagaggtcggcagcaagcggtggtagagcgagaggtcgagaagatgaagagcagcactctgttggcgatcctagttctccaggcccttctggtctctgcggccgtggccaaaggacctgcagggccgacgacgaagaagcagtgctggtgcggcgagtgcaccagctggtcgggcgtgtggacctgcgacgacctcctcaccaagtgcgccgccacctgcaagaactgcgtccccgtgtccacggacaagggggccatcaagtacaggtgccgcgacttcctccccgaaaactgcggctgcaagatccactagagactcatccaattccaccatggccgcgcgccacagcggcacagccgatggatccttccatgttcctccgtccgtccgccttgctacaagcaggcagccacaccaataagctagctcttgttgttgttttgtatgtttgattgggtgtcccttcccagtcgagatggaataaaataaatcatcaggcgcc

SEQ ID NO: 19930 - DNA, 850 bp, Zea mays
  Clone ID: LIB3158-008-F4_FLI
gcgccggcgtggccagggcctcgtccactgcgccacgcttcgggagcgcaacctcctcgccgacgtgtgcgcgcacctggagcggcatcgcgaggcgggggcgcggcggcgcgacctcctccgcctggtagcctcgtcgctgcgcggcgcggggcacgacgcctccgtctgcgtctcccgctgggacaagtccccgtcccacccggtcggcgagcacgcttacatcgacgtgctcctcccggcggcctcggaccgcggcgcgcgcgagcgcgtcctggtggacgtggacttccggtcggcgttcgaggtcgcgcgacccaccaaggcgtaccgcgccctgctgcagcggctgccggcggtgttcgtgggcaaggacgacaggctccgcctcctcgttgccgccgccgccgacgccgcgcgcgccagcctcaagaagcgcggcctccacctcccgccctggcgtaagcccgagtacatgcgcgccaagtggctctccccctaccaccgcgaggcgccggtggccgaagaggcggcctccgcctccgcggacgaggacgacggggacggacccggaaccggaaccgccgcgtgacaactggacacttgcaatttttgtcttggaagaggttgtagctgcaaaagcttgagattctcttgaaattactctttgttcgggggttgtacctagagtaactatgtactacgacgtgtgtgtgagagagagaggtatgcatcactcatcactgtgctgagtaccgcgcgagaaatgaaggcgaggggtatatcatgggtagtgctagttttaggaagagaaataaagcaaaatatcggattaatatccacttttggt

SEQ ID NO: 19931 - DNA, 438 bp, Zea mays
  Clone ID: LIB3158-008-H11_FLI
gctgtttaagattttcagaattttgggcactccaactaaagaaacatggccaggcgttgcttcgttgcccgattacaagtcaactttcccaaagtggccacctgtggatcttgcaacggtggtcccgacactcgaaccggcgggaatcgatctcctatctaagatgctgcgtctagatcccagcaagaggatcaccgcccgcgccgccctcgagcacgactacttcagggacctcgagcacgcctagcaggatatggatggatggatgaaccatttcccctcccctgctccctctgtaaattacggtagcagccgcgatgcttggggccggcgagtacccccgtttgggcggccgttgagttatgtgtgttactctatagtatgagtatgactaagctggagtgcctcatgcccaccatgcagtgcagcttttttctc

SEQ ID NO: 19932 - DNA, 610 bp, Zea mays
  Clone ID: LIB3158-010-A9_FLI
cggttgcaatcgcttacatgttttggtttgagaacatggatcttaacacggcttatcagaagctaacctccataaggccctgtggacccagcaagagagccatccgcgccgcaacctatgatctagctaagaacgatccatccaaagagccttttgagaaccttccggagcacgcttttgagggcgttgcagactgggagaggaagttgattcatgaccgggtgcgtgctcttcacgaagcatgagcagaagaaactttctccacgcgtcaagaaggggggaactaagcttcctaatgaggcaatggctgtgcttcggcaccagatcattagatgtcgaaacgataaagtttgttctcaataaagcttatacgacgccatatttgttgctgggtagtttgtaatagtcactaataggaaggaaataaagagggccttgcatgagattccagctggtgtcttcacctttgtggtgactgcaaatgagatgcccatccattaatggcatggcgcattgtaggtatattgtgtaaataaacctgtggatcttcatttgaggaacatcacttctgtaaaagtttatttgaagatacggccagctttgcaaatct

SEQ ID NO: 19933 - DNA, 994 bp, Zea mays
  Clone ID: LIB3158-010-B11_FLI
agaaaagaagtgtcgtggttccaaagtctccaatgactattgaagaagcacttccattcactcgacagtggtggccatcatgggatacaagaaaacatatcagtgttattactacagaggctgcagggattgagcagacatgtgaaagattggggggcatggttagagagtcaagaggagtgctttcacaagcaagacaaatgcagattatacaccagtgcagggtttcaaaccttatttgggtcggtcgggacaggttaggccctttggagcctcgtcaagtggaaaagatactaggttacccttataaccacacaaatttgtttgaattaaaccaacctgatcgacttgctgccatgaaatatgcattccagactgatacattgtcatatcttttatcagtcctgaaaggtaagtatcaagatggaataagagtgttatccatctacagtggcattggaggtgcagaagtagcacttcatcgtctaggcatccctttgaaatgtgtgatatctgttgaggaatctgaggtgaatagaaaaattctaagaaggtggtggttgaaaactgaacaaactggagtactaaggcaacatgcaggaatttggaagctcaaaacacatgtgattgaagacttggtgaaagagtttggtggttttgatctgattatcggtgggaattatacttcttgcaaaggtggtactacagtaaatacgacaatgggcatggattcgaaccgcttctatgagtataaccgtgttgtcaaaagggtaaggactgcagttggactcagttgaagagtccatctttaatgaagatcgcacgtcttcataaaactagcctgtaggaggatatagaatcatctgatccgtaaatgtaggatgctacaagtaaactttacaagtcttgggacttgattattgcaagcaattgacttgtcctttattttggtttgtgtttgttggtcacttctaatgtttgataatcattctgc

SEQ ID NO: 19934 - DNA, 734 bp, Zea mays
  Clone ID: LIB3158-010-D7_FLI
aatgaactctaggtgttatgtattttggaactggaatttagctgattccttagtcttgtggttcaacaaattgaaaatattttcatattgtggttcatattgtattaaagacttaccgtcaatgaaacccattaatttttttttggtgaaaacagatccttgccccactgccaattgggttcgcggtgttcctggtccaccttgccaccatccccatcaccggcaccggcatcaacccggctaggagccttggcgccgccatcatctacaaccgggatcatgcctggagcgaccattggatcttctgggtcggccccttcatcggcgccgccctggctgccatctaccaccaggtgatcatcagggccatcccgttcaagagcaggtcttaagctgccgcggcagtgccgagacatgcctgccagtccggaaggacgagcgtcttcctgtgggggggaatgccttgtctgcccacgcctagtttctctgctgaatcttccatctctcttcccttcaagactgctcactgctgcactgctctgttatctgaacccagaactttgtgtactcctgtaccgagctgtgtgtatgttttttttttcttccatcgtgtttgttgcaagggttcccgtctccttttatgcgttgggatcgtggcaagaaagggcagatatcatgtgaaaacgtgggtttataactatcagctggatttcatccaagtggaatcgattcag

SEQ ID NO: 19935 - DNA, 345 bp, Zea mays
  Clone ID: LIB3158-010-E2_FLI
atgccttcaactacacagaccactacctggggtctgtgctggggcggtacgatgggaatgtgtacccagcgctgtacgaggaggcgtggaaggaccctctgaacgagacggtggtgcccgaggggtaccacgagtacctccgccccttgctcaagcagcagctcaagctctccaggctctagtctgatcggctaccccccctggaattctccatggcggctgccttctcagaaaatctcacgcgacctccgaatgaaagtgatgtaagctactaacgattcttgttagagccaggaaagaggctctccagccaattataaatttattcctcaagctctgaggatc

SEQ ID NO: 19936 - DNA, 938 bp, Zea mays
  Clone ID: LIB3158-010-G11_FLI
gcagtaggaagggctgtagacctgacaaagcttagtggctacagcgatctttgccagaagctggaggagatgtttgacatccagggggagctgggttccacactaaagaaatggcgggtcattttcactgatgatgaggatgacatgatgcttgttggagatgatccttgggagtaagaaccctttgtctctgtattaacgagtgcatgttttccattattggaagtcctaatccctgtgcaatgcatcttccttcagtgagttttgcaggatggtgaaaaggatttacatttacacatacgaggaggcaaagaagctgacatccaagtcaaagttaccggttagcagtgacagcagcaagctgagcgctgcgaactcactgtctgaatgactatgaacaaaaactgcagagtgctaacgtccctctaattttgttatttccatcatttgattatgggggtgaatgctcacggttgctccgtgggctgaagttgtggttggcattcaactgccttgagttttggaggcttttggactgccttgccagcatgagcctcctggaagaggcaccctggcatctgcgtgccatttcccatttgttcgtgccgtttggtaggagtatccattggcttatttagcaggtccctggtttgaagaaagaagcggtcagctgcaagatggacggtgccttgcctcttcttcgactacttagctagtaattaggactatgtatgtaatgaatgtatatagtgccattaagacgcccatgccctggtattgaggtcccggcatttgtatgaatcaattgttcggaaattgttacctttagcagcaacgaacctgagggtgtagggtggccaggtgggagaagttgtatgtttctttcagtaacaatctttgtgcaagtgatctgtatatagtctactgttttaataagc

SEQ ID NO: 19937 - DNA, 685 bp, Zea mays
  Clone ID: LIB3158-011-F6_FLI
ggagcgggcgcccactcagactacggcctgataactctcctggcaaccgatgatgtagttgggctccaaatatgcaaggacaagaacgctcagcctcaactgtgggaatacgtagctccgttgaaaggcggatttatcgtcaaccttggcgacatgctcgaaaggtggagtaacggcgttttcaggtcaaccttacatcgagtggtcctagatgggcgagaacgctactcgatagcctacttcgtggaaccaagccacgactgcgtggtggagtgcctgccgacctgcaagtccgaatcaaatcctccaaagttccctccgatcacctgctccgcgtacctgtcccagcgctacaaggacactcacgcggatctgaaatcctacgacgacagcaaggcctgatcagaggactgccctctcctctctctgtctcagcgatcattacgtacgacgtgtatcctgcaataacactgggtggagggcggcagtaccagtgtaccacagtatcagtataggtatagagagttctgttggtgccaccgtgccaccgtccatgtgttcatgtaagatgacgagaagaatcaagaacgggggccggcgttgaggtccccggccttaatctaggccttgttgttgctgtcgtgttgtgaggttcaatccccgagcttatcctttggtgctgttg

SEQ ID NO: 19938 - DNA, 811 bp, Zea mays
  Clone ID: LIB3158-012-H11_FLI
tgagactgtcggagaactcgctggagggaccaatcccgccggagctcgggcagctctcggagctgcaggtgatacttgacctgtgccggaacaggctctccggcaagatcccggcgtctctcggcggactcgtgaagctggagcggctgaacctgtcatccaaccggctggatgggcagataccgtcctcgctgctgcagctgacgagcctgcatcgcctgaacctatccgacaaccacctctcaggcgcggtgcccgcggggctatcgggcttcccggcggcgtcgttcgtcggcaacgaactctgcgccgcgcctctgcagccgtgcgggccgcggtcgcctgctactgctaggcggctgtcgggcacggaggtggtcatgatcgttgcgggcatcgccctggtctcggcggtggtgtgcgtggcgctgctgtacaccatgctgagggtgtggagcaactggcgggcggtgtcggtgtccaattccgatggcgaggagtcggcacatggtggcggcggggggaagtgggtggacggcaagtacaggaaagtggggtcatcggtgtcttggtcgtcggaacagaagcacaactcggggtccgagaccaccagcgtgctccatggcaagtccacggaggccgccggcgccgggaagagctagctgctcgcggcgtggcagcagtgaacgtcactttttcttcctagcgagctcaaaagccaaaatgtatgtgtatcgatgatcgtctcttgatctcctcttgtttccgtgtgtgtttttctttgattaattgttactgcttccgccacttc

SEQ ID NO: 19939 - DNA, 932 bp, Zea mays
  Clone ID: LIB3158-014-E2_FLI
ctccggcgtctcgatccgcgggttgttactgtcgtcgaggaggaggctgatctcgtggcttttgaccccggcgcgcccgatgaaagcggcgacacggaggcagcgttcctgaaggtgttcggcgagggcttgcggttcttctcggcttacatggactcgctggaagagagcttccccaagactagcaacgagaggctggcgctggagaggggagccggacgtgccattgtagacttggtctcgtgcccggcgtcggagtccatggagcggcgggagacggcggcttcatgggcccgccgcatgcggtcttccggcttctctccggtggcgttcagcgaggacgttgccgacgacgtgcggtcgttgctccgtcggtatcgggaaggctggtcgatgcgggacgccggtttagacgactcggaagccggagcaggcgtcttcctggcgtggaaggaacagcctctcgtgtgggcgagcgcgtggaggccatgatagagatccccgtcgacgcaagatgcaagctcggtgagtacgcctacgtggaacagcatgaaccacaggagaagcaagggcgccatccgccatacctagccggcgcgtggatgcaatgatccatgcagtggatcgggcgcacgtgcatgtgtgtatggcgagctgaatggctcacgcatctagggttttggagcagtagtagggattgctagttcacgcacacatggttgtatgcagcaaggtgatccaggaggaggtatggtcgatggttttaggttttagagttgcatctatttcaaatttggatcatcgatcgccacaagctcttggcgtgatgattccgattttcttgcttctttgtttttttgtcacatttctctgtgtttcttcatgtaattcaaggttaacaactttctgctccctctggagggatttacgtg

SEQ ID NO: 19940 - DNA, 1215 bp, Zea mays
  Clone ID: LIB3158-014-G9_FLI
cgggagacccccgagggcaggaaagccgtccaggctctcaaggatgtgtatgctcactgggttcccgaggacaggatcctcaccaccaacctgtggtccgctgagctctccaagctcgccgccaatgcgttcttggcacagaggatctcctctgtcaatgccatctccgctctctgcgaggcaaccggagccaatgtctctgaggtggcttacgccgtgggcaaggacacgagaattggccccaagttcctgaacgccagtgttgggttcggtggctcatgcttccagaaggacatcctgaacctggtgtacatctgcgagtgcaacggcctgcccgaggtggccaactactggaagcaggtgatcaagatcaacgactaccagaagagccggttcgtgaaccgcgtcgtggcctccatgttcaacaccgtcgccggcaagaagatcgccgtcctcggcttcgccttcaagaaagacaccggtgacaccagggagaccccggccattgacgtctgcaagggcctgctgggcgacaaggcccagatcagcatctacgaccctcaggtgacggaggaccagatccagcgggacctggccatgaacaagttcgactgggaccacccgatgcacctgcagccgacgagccccacggccattaagcaggtgagctgcgtgtgggacgcgtacgaggccaccaagggcgcccacggggtgtgcatcctgaccgaatgggacgagttcaagaccctggactaccagaagatcttcgacaacatgcagaagcccgccttcgtcttcgacggccgcaacatcgtcgacccggagaagctgagggagatcggcttcatcgtctactccatcggcaagccgctcgacgcctggcttaaggacatgcccgcggtcgcttaattcgtctgaggtgctccattggattggatccggggaaggaagaggaactggttgaccgttcttcattacagtttgtttttttgcaggattcttaaaagttggacggcgctgctagtattccatgtttcgtgttttcatattggaggacgtctgtagatgtaaaaaatcctcgggcgcttgtgctcggcttgaggaaatatccttgtacggttgtaccctggacccgctatagctggttggttcttcaaattgtgttcctatagaagccaaagttactacacgatcgatatgttctttttgcagaat

SEQ ID NO: 19941 - DNA, 467 bp, Zea mays
  Clone ID: LIB3158-015-A4_FLI
gggttgcaaactctcaccaacaacttgtgttacacgtatgccaggtgcacacgctcagtatcaatcgttcctcctgcatactatgctcatctggcagccttccgagctcggttttacatggagccagatacaagtgacagcggatctgtggcgagcggtgctacgacaagccgtggccctccaccgggggcacgcaacaccagggctggtgctgcgaatgttgctgtgaggccattacctgccctcaaggaaaacgtgaagcgcgtcatgttctactgctaagattgacgctgcgctgatgttgtgagcaagcaattaacgttatggtggtgctgctgacacaccgttatgcaccggtaactttaataccttttgtactgtaactacttgtatggtattggaaactgtttgcgatatactcctattaagatgggcttgtcgtggattagattgcactattggaagcc

SEQ ID NO: 19942 - DNA, 471 bp, Zea mays
  Clone ID: LIB3158-016-A7_FLI
gttgatgagaaggttgctgctctccacttgggcaagcttggtgccaagctgaccaagctcaccaagtctcaggccgactacatcagcgtgccgatcgagggtccctacaagcctgcccactaccggtactaggcagccagcacacggcttgcagctcactcgggccgttgtgtgctatgaagttcgctacactggcctgtcagttatcttttgcatgcatatgcattatcatatacgcagtcgcgtagcaggtttccttatggttatcgcttgagctgagggggagggaaggagctgtttgcttttgctgaagaataatggtgtagtcggctggggtgaggcgatgtgcgttgccagatacagttttgtcttgttgactctacttatctgattatcatttgtaagcgatttgctcaagttatttgtcgtttatgaataacttgctttcctcaagagcatacttaaagacgg

SEQ ID NO: 19943 - DNA, 1116 bp, Zea mays
  Clone ID: LIB3158-016-G3_FLI
tttcttcatttcattgacgagaatctaacatttgtgtgtgctcatgttgaaggttaccgttttactccgaagcaaagctgatgttctttgtatacttgtggtaccctaagacaaagggaactacgtatgtttatggaactttctttaaaccatatatttctcagcatgagaatgaaatagaccggaatctccttgagctgagagctcgagccaccgacacggttgtcctttattttcagaaggctgcttcggcaggacaaagtactttctttgacgttttaaaatatgttgctgcccagtcaccttctcagaaatcaaggcaacgccttcatcaggaatcacagcagccgccacaacaacagcaaccacaagtgcaagtgcagcaggcgcaaccacaaaaacaagcagcacctgttatgcgcagagcatcatctattgctgctcggcaagcagcaatggcacatcaatctcaggagactaaacccgtttcatcttcgcccaagatcaagcgtcaaacatcagcgagatctggttcagtggcatccacaaagcctccggtagctgcatccgcaccaaaacctggtggtagcccaaagaaaggcgaggtcaaacctgctgccgacccagttcaaactccaaccacaggtgtcgattcaccaaaacccgagcctagcgctccatcactccctggagccgaaggggtggacaagatggccatcgatgaggccagcggtgacgccccagagggcgcagaagagcttgaccctgcgatcgaagaggagacgccgatggaggagacgatccgtgtgacgcgcgccaagctaaggaggcgcacggccaccgaagatcctgctgggaattagctgcaggccatcgtttttcctttccctgcacattgtgttgatcttttattttttttttgggggtgggggggttaggctgtcatgttgtttggtggaatggagatgtgatgttgaattggttctttgtgacagttgattatcttgtttctgtgctttcttggtgcccttttcttgttatttaagttgtaagtaacactttccctccgcatgtgaatacatgttagcggcacgagaaaagaacgcctgcaattgc

SEQ ID NO: 19944 - DNA, 767 bp, Zea mays
  Clone ID: LIB3158-017-B4_FLI
ggataaatacagcaatcatacttcgccttgttttaagtttggagcaactgaccaaagtaccaacctaagtacatgacttgtcaaaccaatcgccaggtcacactgacgtggtaatgccttaggctatctccaacacatcctcatattcaaactccactccgtgaacaatgcatgcagtgaactgctggtgtcttggttgtgcaacctgtattttcagacagtatgacggcctaagaacactggaaccctgaaacaatcctgaatccttagatgaccaagtttctgctgcaattccgcacgccacacatgcctttttccttcttccccgcaatctgcacccattgtgtttctgaatttatggtggagaggatgatggaatggcggcctctgagtggtcagttcaggaaaagctttcacagacattagactgtctttcccagggttaactatctctgtatcgttcattggcgtttcgtcttttgattgctaataagttcttcttgtgtttcagctgtgtgcgatggagcttgggaaacacaagataagggttaacgccgcctgccgcggcctgcatctgcaagacaagttccccgtgtccgtgggcaaggagaaggcggagaaggcaacggcggaggtgatgcccctgcggagatggctggatccggagaaggacctggcgtcgacggtgctgtaccttgtcggcgacgagtcccggtacatgacgggcacaacaatatacgtggacggtgctcagtcccggacgctgg

SEQ ID NO: 19945 - DNA, 431 bp, Zea mays
  Clone ID: LIB3158-018-D11_FLI
gaggaaagtaacaagctggaaagcaagaaccaagatacattgttggatgcatagatcctgcatggatctgcaatagaatctacagcacaccacattatatgcgaaggtaaaattgagaagtgaacaatgctcttaggttaaggtggaaaatggaacatcttgagggaaatactcagtgcaagcttcagttctgaacacgtccttgattcttttagtcaagcttggtgtgttcagaagtctgtggtgttttttttgtatatatagaaaattgttagcaggcaagagcatttcagttgattttgttggtcccagacttatcatttgattgcggtcctagtacttgaatttttgctgcgtgcctaaagtcgtatgcctatttcatctgtactatcagagaaatgctagttcttttaatcaacaacagttttttt

SEQ ID NO: 19946 - DNA, 358 bp, Zea mays
  Clone ID: LIB3158-018-E4_FLI
acttgaagatggctatcgcgtcgtcatcaatgacggcccaagtggatgtcaatctgtttaccacatccacgttcatctcctcggaggcaggcaaatgaactggcccccaggctaagaatatcttgtgattgatcagtgctaatgccaaggactgctactccatttctctagaataatccctgtaatttccataaaagctagtgcgcagtgcgctgaccttgtgctatatttgtggaattaccggaagcatgctgctgtgatctatgattggacacaagaaacttgtaactggtactcctatcatcgattgacttgtccttattgatcagctgatgggggttgcccactggccttgctg

SEQ ID NO: 19947 - DNA, 1134 bp, Zea mays
  Clone ID: LIB3158-018-F1_FLI
catacttcttgcagaaacttttaaatctgaagggcgacgatggctttcgaatgaatgatgttcttgtttctctatggtacattatgggcctctggccactagtctacagtatgttgctccttcctactggtagaagttccaaaagcaagattcctgtgtggccattcctggttctttcatgcatcggaggagcatatgctttgattccttactttgtcttatggaagcctcctccacctcccattgacgaagatgaaattggacaatggccattaaaatttctcgagtcaaagttaactgcaggactagtgtttgccctgggcattggactgatcatatatgctggcaaagctggtggcgacgattggaaggaattcattcgatacttcagggagagcaagtttatccatgccacctgccttgattttactttgctatcagccttctcaccattttgggtctataacgacatgacagcaaggcgatggaaaaatggttcatggcttctgccgcttgcactgataccttttgtggggccctcactgtatcttctactgcgcccatcactttcttccttgctggaagcatctgcttcagcatctgatgagttcaaaaaataattggtatctaactcagaactgatggagaatttggttgtgagcacatgacatgggtagagaaatggttatctggcaactgcatttgttagcccaaatgctatgtcaattgctgatttggaggaaatccacaattttgcatgccacctccctgttcaaaatgaaaggacccaatgagatcctgacaatgaagatattgtcagtattatcatcacctgggtgcctcacaaattttgtcagtgttatatttatgtgtaatccacaattttttaatcactgatgaagcagtgtaagtatgcaacaaactactaggatattatacttgtatacataggtggttcagagtatagaatattttgctcctgttacagtggaacgtaataagccaaagtagtatcactacacctttgaagcacgaatttcttcgtgtgtcgccctccctcccgtgctaataatgcagtgtatgtatgcaacaaactactaggatattatatttgtataaatggagatgaaatcc

SEQ ID NO: 19948 - DNA, 1114 bp, Zea mays
  Clone ID: LIB3159-002-E7_FLI
aagttgaaaacattattcaaacaaaagaaattgcatgcaaggctcttctttaaatactactcccttcatccaaaaatataattcaagaatctcggtgatatttatctaatactacgcattgtgcaagggtagtaggtgggcttggagagagatatcgatgtagtagatgtgttttctattatagatgtagacacatgtggtgtagtggtagctattggtagtatttgtttgagaggtcgtgggttcaaatccctttggggtcatgtttatttttttaatttagctaggcgttggctgtacgagggaataagaatgggaacatgagaatggcctgtgtggaatggccgactactattgcagccttataagtagtagagatttctaaatggttttgtgaaagcacgaacgccattgcagtgcaggcgatgcaagccaggaacgggccacggacacgccagtacgcgcactttggtcgtcgtctccgatcctcgcattggagggtccttctagaagaccaccatgcctgtggattttttccaacctcaccatccctgcttcccgcctaccttcccaatgcaagaccccgacactgctgcgctgcattcccctacgttacatatatggacaatggggatgcgagggccacgccaccatcgtccccgacaccgttctcactctgctagctgtctgcctgcctgcatccgatggacgcgggccggggcagcagcgccaccatcttcccggtgccgcaggtcccggcgctagctctgctcttccccccgccgccgccggcggcggcggcattgccatcttcttccctctccctttcctcctcctcctcctcgcgccacgcgccatccatcaccagcttcccgatcctcgtgctcacggtgctgggcatcctcgccgcctgcgtcctcatccttgcctactacgtcttcgtcatccgctgctgcctcacctggcaccgcgaccgtagcgcgtccgacgccgtctcccgccgcccccagcgcgcccgcgcccgcgtccgcaccagcactggcggcaccccggcctccagcgccgagccgcgcggcctcgaggacgccgtcatccgggcgctgccggcgttcac

SEQ ID NO: 19949 - DNA, 1147 bp, Zea mays
  Clone ID: LIB3159-002-H1_FLI
gcgaccgaatccaacaggagaggaaaggggcgcttgctttatattccttctcggctgcaatctgcgtccatccatccagccgtctcggggcagccaagaggtcgtgtgcgcgtggatctctccgtagaagggatgaagatcacggcgctccttgtgctgaagccgtcgacctccggagccggtagctcctcgtccggcggccagtcgggcccggaggcggtcgtgctcgcgaacgcgacggacgtcagccacttcggctacttccagcgcagcgccgcccgcgagttcatcgtcttcgttgcccgcaccgtcgctcagcgcacccagccaggccagcggcagtccgtccagcacgaagaatataaggttcactcccacaacagaaatgggctttgtgcggtggcatttatggatgatcactatcctgtacgaagtgcattttctcttctgaatcaggttcttgatgagtaccagaaggcttttggggaatcctggaaatctgctactgcagatggaactcaacagtgggctttcctgacagacgccttggcaagatttcaggaccctgcggaagctgacaaactaatgaaaattcagagggacttggatgaaacaaaaattattcttcataaaactattgatagtgtcctggccagaggagagagattggatagcttggttgagaaaagttctgatctaagtgctgcttctcagatgttctacaagcaggcaaagaagacaaaccaatgttgcacaatactttaaactttggtgcttcaatcatgtttgcaagaaacaaaaacggtcgatattgtgctaatttactgtaagttaagtcgcccatgaagcgtggacacgcggttgcaaggctcgagctcagtgctgttggtctcagtttgcaaggctatagttttctccaagacctgccgattggactgttttcttgtgagaattcctgctctccaaacagcacatggagtatcattctttagtggttatgaaactgcgtagtgcctgctaacaccatttattgtactatataaggcttgcctcaaactgcagaaattaccaaatattgttaaattctcaaagcttactggcagtggtggaccagtggcgaagacagcacaagctgatagtctcttct

SEQ ID NO: 19950 - DNA, 733 bp, Zea mays
  Clone ID: LIB3159-004-D3_FLI
cgccgcagacccctccccttcgcttccttccctagcgccgacgcccaccagacgagatggccccgaagaaggacaaggccccgccgccgtcgtcgaagccggccaagtccggtggtggcaagcaaaagaagaagaagtggagcaagggaaagctaaaggagaaggtaaacaacgcggtgctgttcgaccaggctacctacgacaagctgctctcggaggtgcccaagtacaagcaaatcaccccttccatcctctccgagcgtctgaggatcaacggctcccttgctcggagggccatcaaggacttgatggcgcgtggcctcattcggatggtctcggtccactcaagccagcagatctacaccagggcaaccaatacataaggatggggaagaggtctaaaatgcattgtctgccctctctgcaggaggagctcgtctttagaacagttgccatctttgtcaagagttgccaatgttatgttactggtgatgagttccaggtgacggcaacattttagagattttgagtatttctattagttggtactatggtttgccaattataagttacttggcctaaatggtttttgttttatggatctatggtattttacatgatttaaatcaattctagggcgtagaggcaaagtaagattagccaagagattagtcagctttcgctcgataatgtcgaacttctattaaacacattaacaaaaagattgagtggt

SEQ ID NO: 19951 - DNA, 932 bp, Zea mays
  Clone ID: LIB3159-004-D4_FLI
gaagatgccacttggaatcgtagccctgagaagaatcaccaccagagtgttgatgatgatcagaacaagttgctcactgaaaaggatcatgcacatataaataaagaagtgagaaaattcactcctcaaacaaaggcccatgctaagattagaaagcctgatgggtctactatcaaggaaaaggtggctccaaatcctaaacctgtaaccaaccttgtgaaggatttttccatgagcccacgagcatcaagtgacagcacagagggcatgccacaaagtgctaaccgatatagagttgcagtccggaaagtaccaagtaaaaggtatgaagagaccagtggaaactccaataaggcgagtaggaaagtaggctctggtgcaatattcaatgactctatcagcgaaggttctggtgatgaattggacaccaagactgtcatggaaagatcacctaataagtcatctacatctgctgattcaggtatttcatctgcagcctctggtgaaagcgaggttcctgatgatgatggcaccgtatcactatctcagaagagtttcaaaggtctgcacattagctccatcctccgtggctcccgtagctacaagaaggcactaaagaggcaaatggagctgctagacgacgacaccattgtgcctgatagccagcccgcggatggcctttggggctgaacatggttatcgtcaagagaagcgccgaccctgcttcatccttttttgccattgtccacctgatacgctggtgggctttataagttgtctaaaacacatgcccgaatgcgtgatgtcgctgatggcattgccatacgccacacgcagttcccttattttgtcgggcttaagctgtgatctgcctgaggatgaatcgatgatgttcatgatacagcttaccagctatatatatgtgttaatgt

SEQ ID NO: 19952 - DNA, 1005 bp, Zea mays
  Clone ID: LIB3159-007-A7_FLI
tgctcctgtactcccagctcctttgccgagcaagggcccgccgccgttagatcccgtgccggagctccaaggtagcaacgagactgacgtgactgatgctggagcaggagaagaaaccgaggagggtatgcacgagaacagggacgagatcaacgcgctcctggacaccgacaggcagtctggtggcgcagccttgagcgtggagtcggtggccagcgctggcgctggcgctggcgctgcgccgccgccggcagccaagaagagaaggctcagctcctgcaccgacaagtccgtcgttgacacggccagttcagcagcaaggcctcctgagcgttccatggagcaggagcagagggttgaacttgcgaacgaccgcgacgcgcagtcgtgctgcgttggggaggtggaaagcgggcgcaggtttgctctgggggaggcggaagcggaagcggcagagggcgacagccccgacgagcagaggcggaggagggagaggatccaggagactgttgccgcgctcaggaacatggtccccgggggcatcgcgaaagacgccgcggctgttctggacgaagcgatctgctacttgcagtacctgaagctgaaagtgaagacgctgggagctgtctccctctagctaagcctatctagccctctctcctcgtcgtggtggctttgttgtcgaaggccgaagccactggcttctggtgagaggagagctagcctatatcacccatctgttcagttcagtcccagaggagctcggatcttctcctacctgactcactgtcggtggctgcatcacccatcttcctcatcgtgggttggtatgcaaaagctagaaacatctttccgctgagcgtgatccaaagcgaagcccccattccatgcaaagcgctgggtcgtgccgtgcgtggggtggctcctgctttatatacgcgttgtgctcctgctttggctgatgtttgctttggtagttatatatagttctgtgtactacaaagt

SEQ ID NO: 19953 - DNA, 510 bp, Zea mays
  Clone ID: LIB3159-007-B5_FLI
cacgagtcggcggtgagtttccatggatcgcccgagtcctcagtcagggcacacagcagtctgatctccatcaggttctacaagaagaaccattccaatgtgagaccacccagcgagaccaccgcagcccctgataacgtagagacagtttcaaggctcctggaaccgtaaccaagcgagaagaaggctagctcggtgaccgaacgctgcgggccgcggccaccaccacaggtacctgaacggaaaagctcgccacattctgaagcctctcaccttgacgaccggggctgtgtaaatcttccgagaccgccactggcgcttcctcctcgagcccctgctgtaaaaatgaacggactcctagcgttttgtgcgcctgggtcgcacgctgactagtgaatctgttggcagttgtgcgccgcagcccgcaggccatggctctagtgacgagagcgacgcgagcaagctgtttgtatgtgtctgattacaataataaaaggtttcgcgctgttt

SEQ ID NO: 19954 - DNA, 1024 bp, Zea mays
  Clone ID: LIB3159-007-F1_FLI
gcatccttgcgcaggatcagtatggcaactatgttacacagcatgttctagaaagaggaaaagctcatgagaggagccaaattattactaaattggccgggcaggttgttaccatgagccaaaataaatatgcatcaaatgtgatagagaagtgttttcaacatggtgatattgcggagcgggatcttctgatcagacggattgtggagcagacagagggcaacaacaatttattggtctgtttggtagtgtagtaaaagtgttccctccattatcccttcctctctttgccaaacgggtcggggttctggaaggtagggctaggacatggggacctgatctcagttcggtacagccaatcagataacaccatgagtatctcagttctgctattccagctttctgggagctgcgaatcctatggattaccaagacatgggatctctgtaaacttatttcttcctgtgttgatgttagtttatatttcctaatcaccttttatattcaatcaggcaatgatgaaggaccagtatgctaattacgtggtccagaagatacttgaaacttgcaacgaggatcagcgggagcttctgctcagccgcgtaaaggatcatatgcaagcattgaggaagtacacatacggcaagcacatcgtaagccgagtcgagcagctctgtggcgacgttgtcaccctttcaggaactgccgagtcaggttcttgaaacgaaccgccgcctaattcttcataggctggagggtgtcctgctcttttgctcattccgtcagtgacgaagaaagcaaaacggatcaagtctaactctggcgcttcagaacagactaacaaagctgtcgtcgaagattgtataggtgtgactctgttcagggatagtcttcaggttctagaacagaagggtagtggtgtgcatcagtgtatctgtttactggataatagtggttggttaggtgtgtgcagaaaaagtttagtgctatgctttgtatgtgatacatattaactatgccttgg

SEQ ID NO: 19955 - DNA, 768 bp, Zea mays
  Clone ID: LIB3159-007-F12_FLI
ggccccgcttcgtgttcgcgggcggcgcggggtgccacggcgggctggacgaggccgccatcgcggcgctgccgagggaggaggcggcggcggcgggcggggactgcgccgtgtgcatcggcgagctggccgcgggggaggccgcgcgggtgctgccccgctgcggccacgcgttccacgtggagtgcgtcgacatgtggctgcgctcccactccacctgcccgctgtgccgccgccgcgcggtcgccggcgacgacgccgcgccgcgggcgcccgaggcggacccggactcgcccaacttccccaccaacgtcctcttcttcggctcccaggacggcgccgtcagcacccggggcgccggcgccgcgccgtcgcagccggttgcagcagcagggcccatcgccggagtcgcggcggtcgtggaggcggccagtgttgccgccctacggcgactgcttggctgcggcggcgccacggccgcgcccccgccggcgcagcagcagcagcagcagcagccgcagaatgaagacggcgacttggagtctggtctcggcggcggcggcggcgagaccagcgggtcgcctccggcgaaaccgcagtgaaggatcctcaaatcatggttccgttcctccatacctctcgtcttgctctcctcctcgttgtcgttgaggcatttgatttgaggcagcacccaaggatgggagtaaaagaggcaagcaagtgtacagtgatctgtaatgaacgaatgaacgaactcttattactcgt

SEQ ID NO: 19956 - DNA, 1478 bp, Zea mays
  Clone ID: LIB3159-008-F1_FLI
cgtggacacggggtcctcgctcacctggctccagtgctccccctgcgtcgtgtcgtgccaccgccagtccggcccggtgttcaaccccaaggcgtccagctcctacgcctccgtgtcctgctccgcgcagcagtgcagcgacctcaccaccgccacgctcaaccccgcctcctgctccacctccaacgtctgcatctaccaggccagctacggcgacagctccttctcggtcgggtatctgagcaaggacaccgtgtcgttcggctccaccagcgtgcccaacttctactacggctgcggacaagacaacgagggcctcttcgggcagtcggcggggctcatcggcctggcgcgtaacaagctgtcgctgctgtaccagctggcgccgagcatgggctactccttctcctactgcctcccgacgtcgtcgtcgtcgtcctcggggtacctgtccatcggctcctacaacccggggcagtactcgtacacgcccatggcgtcgagctcgctggacgactcgctctacttcatcaagatgaccgggatcaaggtcgcgggcaagccgctgtccgtgtcgtcgtcggcctactccagcctgccgacgatcatcgactccggcacggtgatcacgcgcctgcctacgggcgtgtactcggcgctcagcaaggcggtggcgggcgccatgaaggggacgccccgcgcgtcggcgttctccatcctggacacgtgcttccagggccaggcggcgcggctgcgcgtgcccgaggtcaccatggccttcgccggcggcgcggcgctcaagctggccgccaggaacctgctggtggacgtggacagcgccaccacgtgcctggccttcgcgcccgcccggagcgccgccatcatcgggaacacgcagcagcagacgttcagcgtcgtctacgacgtcaagaacagcaagatcgggttcgccgccggcggctgcagctgagaagcgacacctacatacacgcgcatgcacagaccgactcggtaactaaaactaaaacgagcagcgcatgcatgcatctaccgtccggtttcgtctgaaaccatcattaatttcgatcgtccactccacgcacagcaagttctttacggaccttgccgcatatgatatgtacatggtgacaagataaggtacaggagaattgatgaaagaagcgttgccggccagtcgtcgttgcacaagaacaaacacataaattaaaacattattacaggagtagggtatttattgtattgttcaggccagaaaaatatgtggaaagtgggtctttaacttaattcggaagaagcatatagcactccaaaaaaaaagattcatattcatcacatagccaacagatagcatgtagtagctgttcatgcatgtaattctttggcaagtcctggtcaggaagtaccatttactgtgtgtaggacgaataaactgaagtgatgtgtatgtttctgatttc

SEQ ID NO: 19957 - DNA, 1357 bp, Zea mays
  Clone ID: LIB3159-008-G10_FLI
caccagcaaggaccaagacagagcacagcgcagctcgtcggcctctcgacgccggttgctgcaaccaccgcctttattgcccacgcgggccgtgcggaagaagcaagaagacacgccaatggaggtcgccgcagcatcggcagcgggctacggattcaaggccgacgacgacgttgacagcctcagggcgacggagctcaggcttggcctgccgggcacggaggaggaggaggccgaggagtcccagaacaaggcgccgccgccgccgccgtcgacgcccagaggcaagaagcgcgacgtcgtcgccagcagcgggcccgaggatgcgcccaagaagcgcgactgcgagaccgacaccgatgccgcgccgccgccggccgccaaggctcagctggtgggatggccgccggtgaggtcgtacaggaagagctgcttccagcagcaggcggcggccaagaacaagccggcggcagcgctggcggaggaggccccggccgccggcgggctgttcgtgaaggtgagcatggacggcgccccctacctcaggaaggtggacctaaagatgtacaagggctaccgcgagctgcgggaggcgctggaggccatgttcctctgcttctccggcgccggcgccgccgacgcgcccgccgtcaacccctccgacttcgccgtcacctacgaggacaaggacggcgacctcatgctcgtcggcgacgtgcccttcggcatgttcatcagcacctgcaagaggctgaggatcatgaaagggtctgaagcgagagggctcggctcggccaagaacaactgatgatgaggcgtctatcgcatgcttgtgctgtgcgtgcgtgcatgcgccagcaaattcttttgttcttttggggtcttatttcttctccaaggcgtccctgcatgggtgtgggcgtgtggtgttgagtattatgtaccttctcccctagcattgtctgtgccaacaatggagcagcagctagcagcaaaccagagacatggcgaggcgaaagatgaagctgcttgcttggaaggagagagagagagagagagagagagagagagagagagggaagctttgtgcatgcgtggaatgatgtgtggtcgctttgttctttttcttttgtgccccttgtaggggtgtgtgtgtgtgtgtttagcaagacatgcaaaaggagtggagagtcgagttgaatctccatgatgcgtggttgtacaaagccaaagatcactcttctttcttgtctatcagtctattgtctatctatcgatcagcagcctggtcgttgcttctgtaattgcgagtgttgaaattgcaggggaggaattgttttcctctctgtccctggtg

SEQ ID NO: 19958 - DNA, 1579 bp, Zea mays
  Clone ID: LIB3159-011-A5_FLI
ctcggccgctggaacgcacctgcgccctacgcctctatccgccctccatcgcctccaccgcaggccatagagcccgtcgtccgccgcacctagcgccttcggctccggtcacaggccccgccggaccgcccgcaggctgcagcgccgcgccgccggccgccgcagcagtcccgcgcggtcgcgcagttctggtcgtctggtctggcctgatgcccgtagcgctgcgtgcccgcctgagaccctgagtaggactgtaggagactaggaggtagtagcaagcagcagcgtgctccgcggctccgcactccgctggtctgcttgagatttgaagagttatttcggtcaaggttctagtggaagtggaccaagcactcgtgctagtggagtttgcaatgaacccgaaatacaagttcaagttcaagagaataatagtgaagaaattccaattgttcaagaagagaatgcacatattccagatgccaatggtgaagacgttgatggaatgaagaggtgagaagagctttagatgagttgtgtcccaaaaatgccaagatgacttcggggacgattcaaaaagaacttacaaactgttgtgcagaagaagtcacacatgcaattaaagaagaaatggaggattgatattccatgttcttgttgatgaatctcgtgatatatcaattaaagaacaaaataagaaaacttgatggtgcgctacattgaaagaggaatttttaaagaactcgatctttagaaaattaagaaggcatttcaaaataagaaaactagacaaatacaattgtctaggtcttctagaacttgactcaactagagattttattcgatatatgacatttggttgtaaatggattatgatcacgatgacttttaaataagaagcgagatcatgctttttttatggctgcaatcgagttctgcctctttactgtggcatgcttatgcatgcactcgttcatgcacacatacatgcatttcaaatctcaagtcgagttagagacgagtaccaagtacgacatggagtacctcctggctgggcagcctttcctggatgacgcaattgggcaggaagtagatgatcatggtgaggatgcccacgtccttggcctccgacgccatctctccttcaactccgcatagtcgccagatgcggttgcctgcgtcgtcgatggccagttctttgtactccctcgagaggttgcaccaagccaccaaggcttcgtttgcgacttgcgagcatgccgcacggacggacaacgacaagcgcgcgggcggcaatggcggaggaggactcaacaacccaggtctacgtccccgtccctgccccgacgctgtttcgtggggtcggctcactctgcgacgccgctcgcggagtaggatgcctaccacgcgccgcgcattggcgctgccaccactccagccacctgggctgagtacgacgacatagtcttcaccgcggacgcaggctgccgtatgttggttgtgaccgtcaaaaaagctatatgcggacctaatcaaacatacttcactaactccattaaatcttttgaagctgtagctgttc

SEQ ID NO: 19959 - DNA, 809 bp, Zea mays
  Clone ID: LIB3159-011-D3_FLI
gcagcagctagctagctagcatggccgggaaagagcttacgctgctggggttatgggcgagcccgttcgtgctccgggcgcgcatcgcgctcagcctcaaaggcctcacctacgcatactccgaggagaacctcgacgacaagagcgagcttctcctcagctccaaccccgtgctcaagaaggtgcccgtgctcatccaccacggcaagcccgtctgcgagtcccagatcatcgtgcagtacgtcgacgaggctttccccgccgccgcacctaatttccttccatccgacccctacgaccgcgccattgctcgcttctgggcctcctacgtcgacgacaagttctacagcgcgtggatacccgtgttcaggggcaggacggcggaggagatggcggaggcggcgaggcaggccgtcgcggcgctggagacgctggagcaggcgttcagggagtgctccaaggggaaggccttcttcggaggggacagcgtggggctcgtcgacgtcgtgctcggcggccttgttgggtggctgtacgccaccgaggccatctgcggggtgaaggccctcgacgccggcaggacgccgctgctggcggcgtgggcggagcggttctgcgcgctggagggtgtcaaggggctgatcccggacgtggacaggcttctggagtataccaaggccaggcgggccgtatttggcctgccgccgctccgtccttaggcatagtggacatgtttcttttctttttttttcttttttaaaaaattatatgttctatgtttgtttgaaataaagtactgttatggtgtt

SEQ ID NO: 19960 - DNA, 804 bp, Zea mays
  Clone ID: LIB3159-012-F4_FLI
attttgcaaataaatctttctgatagtagaagttctggtgagcaaaaggatattgatagtgtcatgtctacaaggttagctaatgagaatgactctagcaggcgtctgaaatctgaatttcttatccagtttgatggggtgtcctcaaacccagatgatctagtaattgttataggggctactaataaacctcaagaattggatgatgctgttcttcgaaggctggtaaaaagaatatatgtgccactacctgatccaaatgtacgaaggttacttctgaaaaatcagctcaaaggacaatcattcaaactgtcgaaccatgattttgaaagacttgctgtggagaccgaagggtattctggaagtgacctgagagccttgtgtgaagaagctgcaatgatgccaataagagagctcggtccacaaaatattcttactatcaaagcaaatcagctgcgacctttgaggtacgaggacttcaagaacgcgatgacggtgatcaggccaagcttgcagaagagcaaatgggacgagctggagaactggaacgaggaattcggttcgagctgacggagacgcgcgctgcctgatgatgatgatcaagcggccctatttccagatgtacatgatttatgtctcacacacacatggtggcttacacacacacacgcgcccatcggccatcgatgcgtcctcagtctggacagcgcgtcttcaacagaagcagaaggtacaatataatgctgggaacagccctatatgtatacccattgaaatgccgctgcccaagttatttaaaaaaac

SEQ ID NO: 19961 - DNA, 803 bp, Zea mays
  Clone ID: LIB3159-012-F8_FLI
agtctcccaacctcggagaattgatgggaaggaaacaggtgatcaggttggttcatcatcccataaatctcaagacgcacaagtaggttctctagtcaacctgctgagaaatgccagcccgctgcgaaatcctagcaattcatcacagatatcaagggccgagtccagcgaagtagcctcagcaagctcggtcacgtcccgcaggacatctgacgcccttgaggagctccagtccttcaaggagataagggagcgactgctgttccggagcagcgcaaaacatcaagagccaccaggaaaaccataaggccattctttgttttgtttctcttaacgtgatcgctgatagactcccaaccgggaaaccatatgcacagcgaactatagttgctgtgttcatgtatatacgagtgctaaagttgatgcttttgattgaagagaaggcaccggcttccatttatttcagcggaacaatcactcgtcgttctcaagagtgatggagtgatgccgctgttgatactcttttgtatatgggaagcgaaaccgatacacgtaggtgggagcgagggagcctgtgaattgtgatggatgaaagcaggtctcattgtgtgcgtgtgtttgtaaattatgtaactgctggaaatcaaatgttcattagacgtcaacctttgaagagttgctcgcacttcgcaagactagttttatttgctcttgctatttgatctggtaatttgtggattggcgacctgcaggctgcagttgtaaaaataactgtcagttttaaattataagatgttttgact

SEQ ID NO: 19962 - DNA, 252 bp, Zea mays
  Clone ID: LIB3159-012-H3_FLI
gagacgagaggactaatagtctcggaccccatccatggcttaaattccctaaacaatggccatcgccaggcaggaagtaatatgattccatgcacaggtcgagagctattgatgtcatatcacaataaacatgatgttcataaaactgatatctttgctgattagagtacttgctcagttgctgctgtcttgcgggccttcggccttgctataatgtgcaaatgggggcacagaggccttggtgctctagtc

SEQ ID NO: 19963 - DNA, 1774 bp, Zea mays
  Clone ID: LIB3159-013-H12_FLI
caggcaagctgtaccctgcgttgtcggtggccgcctcccgcccgcgcacatgggtgtcatggggcgtagaccgtggcggcctcagctccggtctccgggattaaagaatccaggtcatggcttcctcgcgccgtgggcgtccatgtcctgctgctgccgccgcgggacctgagaggagaaggacgaggacgaggtggtggttggcggcgtcgcgccgacggcggacatgggttggaggcggggaggaggcgcggatggcgtggccaggagatgggtgctgctgctatgcgtcgggagcttctgcctcggcctgctcttcaccgacaggatgtggagcttgccagaagcagatgaggtagcagtactcccaaatttaagaagagaggaagaggctgagcgcaagactggagactgtaatgtaggcaaagttcaaggaaaacacgattacaatgacatgttacgtgtctcagatgctcaccataattcacagactttggataaggcaatagcgaacttggagacagagctctctgcggcaagaactctacaagattctttcctcaatggatctccagtgcaagaagattacaaggcttcagagtctaccggtaggcgcaagtaccttatggtaataggtatcaacactgcttttagcagtcgcaagagaagggattctatccgcaacacctggatgcctacaggggaaataaggaaaaagctggaggaagaaagagggatcatagttcgttttgtaattggtcacagtgctatttcaggtggaattgtcgatagagcaattcaggcagaggataagaaacatggagacttcatgaggctggatcatgttgaaggataccttgagctgtcagggaaaaccaggacatactttgcaacagctgttgctttatgggatgctaacttctatgtgaaggttgacgacgatgtacatgttaatatagcaacacttggaaatatcttatccaaacatatttcaaagcccagggtatacattggatgcatgaagtctggccctgtcctctctgacaaggatgtgaggtactatgaaccagagcactggaaatttggggaagtgggtaataaatattttcggcatgccaccggtcaactgtacgctatttcaaaagatttggcagcctacatatcgctaaacaagcatgttttgcacaaatatatcaacgaggacgtgtctttgggagcttggttgatagggttagatgttgagcatattgatgaccgcagactatgctgcggcactccaccagattgcgaatggaaagctcaggctggtaacacctgcgctgcctcgttcgattggaaatgcagcggtatctgcaactctgtgcagaacatctggggggttcataagaagtgttcagaagatgaaaaggcgctgctgactgtttctttctaatcaaagtgcagtgctgtgtatctgtacattgtgcaaagaatgtgtccggttcataggtggctaaatggcttacaattagacaacaccactggagcaggccgcaattttactcagcgtccgctggtggcactctgaggatttaaggggtgtagagctgaccgattcttttagcaagttggccagttgggtggtcatacatgtattgacctgataaaacaaacactatccgacgagttcagccaggctgtctgagctaagacaggatgaataacggctggttgagctcatgcaagacatttatttggttgattgtacaaattaatgcagaccggtgtagatgct

SEQ ID NO: 19964 - DNA, 640 bp, Zea mays
  Clone ID: LIB3159-016-F1_FLI
gcaccatccaactggctcatccgcaagcgaacccgatggatccaatcacaaggccggcagctccatcgttccatcggccagcagtcgcgaccgcgaagcatctccatcaggccgccgccaccttggctcggaggaatggagtcagcaggaggtgccttctgacgctgctgatgtccactgcggccatacctggcggcagcgaatcgaggaaggctctactgcaagagtatctgaagaaatcgaaggagaacaaggaaaagaacgacaaggagaggctggatgactacaacaagaggaactacagggactacttcgggctcatcgagggccaggtcagagagaagacggaagaggagcgcacggagtcggagaaacggatcctcgagtggctcgacaagaacaggtagtctaatgagcaggatcgaatggtcgatcatggagggccggccggtcgcacggggtgaaaattctcgcaggattcttcgtgttcccgctctagctatggcacgctttgtgtaaacaagtactccgtatatgattgactgagcgtactacgtcgtgtttgttttcctgttacagcgagagcgagcgaggaaacatgttatctcgttcgcaacataaacaaagattagaaaatttc

SEQ ID NO: 19965 - DNA, 757 bp, Zea mays
  Clone ID: LIB3159-017-C4_FLI
caagtatctgatggaggcagatatcaatgcaaacaacctgagggagttctgcttaagtcttctggatggcacgctcccgccataccacaaatcagaaccattgcctcaagagaagggacttattgaaaaggttgttggtcgtacatttgattcttctgtgctggaaagtcatcaaaacgtcttccttgaggttcatacaccttggtgtgttgactgtgaagcgataagtaaaaatgttgagaagttggcgaagcatttcagtggttcggacaatcttaaatttgcacgcatagatgcttctgtgaatgaacatcccaaattgaaggtgaataattacccgacgctattcctttatcttgctgaagacaaaaacaacccgatcaagctttcaaagaaatcgagtgtcaaggacatggccaaactgatcaaggagaagctgcaaataccagacgtggagacagtagcggcccctgacaacgtcaaggatgagctataacctgtagtagacaaactaaggtccagtgaaggaaaaattgcagcatgtttgcgtgttttgcgccaacctgatcacagagctcagctttattcgcgtgccgtgttaagttgactaaagacaatggtatataatataggtacctaaatcaaagaggcttcggaccctagcattggtatcgattgagttattgacaagtattctgctgtaaaattcggagcattggacatgcatgtgtgagactatagcatgctttggggtccc

SEQ ID NO: 19966 - DNA, 941 bp, Zea mays
  Clone ID: LIB3159-017-D1_FLI
gcggcgtcggggagacttaacgcaaagtaagttgttgcttcaactgtcaccgctgcacccagatgccatgccagcagcataatggtgaactgcacaggattgcagaagtcagaatcctgtgggcagccatggatcctgaaggacggttgtttcagtttgctgcatgacttgaaacagatcataccgtgatcgccagcgaccggcaccatgtggcgcattgatctgcggtgtaggagcacctggtgtagcctgcacccccactcaagccctcccgagattccaaagattgcatgtcctcgtgttcactacacgatcagctgacaaaatttagataatggttgccgatttgaccgcccggccccccgtgttagaaagggtacaagctcacttggatgcctttttaattttgcatctttgcaagctttctggaacttttgcaggttaatggtttcatttttaaaaaagaatggatggttagctaacattctcaaattcaaattttggtctggattttctcgacaaaagttccaagtccccgttgccactagcaactaggtttccggtaacaggagacctttgacagaaatgcaacgagttaatgtcatgtattgtgatcggggacaccaagtggccggagcattagctggaggcgctaggtggatgtgcattgacaatgtggctgtgatttagttttggggacacgcttttgacagacaggaccacccctttgaggccataccgttgagtgcagctgtctcttgtgttcattgaggcatgaggtagctgggtaggacttgggcctacctgtctgaccctttgaaatgtttaattgtggcattgacaatgtatgttgttcgaaaacaatgtgctaccttgtgatctgtatgtttcattcccgttgaaaggccggaggacatggacatacatgttctttttttatc

SEQ ID NO: 19967 - DNA, 1096 bp, Zea mays
  Clone ID: LIB3159-017-E7_FLI
cccctcccttgccgtccacttcttcctccaccacagtcatcagtggcgttatcctcttcgttctcgcctccctggttgttgttggctgggtgttggcgagctgggagtagagaccgagaagtggagcggccatgaagatccagtgcgacgcgtgcgagggcgcggctgccacggtggtgtgctgcgccgacgaggccgcgctgtgcgcgcgctgcgacgtcgagatccacgccgccaacaagctcgcgagcaagcaccagcgcctcccgctcgaggcgctctccgccaagctcccgcgctgcgacgtctgccaggagaaagcggcgttcatcttctgcgtggaggaccgggcgctcttctgccaggactgcgacgagcccatccacgtcccgggcacgctctccgggaaccaccagcgctacctggccaccggcatccgcgtcggcctcgcctcggcttccgcctgcagcgacgcctgcgacgcccacgactccgaccaccacgccccgcccaaggccaccatcgagccaccgcacgccgccgtctccgccgcggtgcagcaggtgccctcgccgccgcagttcctgccgcagggctgggccgtcgacgagctcctgcagttctccgactacgagtccagcgacaagctgcacaaggagccgacgctcgggttcaaggagctggagtggttcgccgacatcgacctcttccacgagcaggcgcccaaagccagcaggacgttggcggaggtgccggagcttttcggataccaggcggcgaacgacgcggcgtactacaggccggccaaagccgccgccggcggcggcgctggggttcgccagagcaagaaggcccggatcgaggtcaccgacgacgaggattacctcatagtccctgatcttggttaaataagagagcgcaggagttttgtttcgtctcctgatgtgtacggtgtaccagagaagaattttactgtgtacaagctagtgtcaagtgttgtgcatctttgactgtagtgtcgctcaattctgaacatctattaagccacttttgttgctatgctaataccagtctgagacactgatgtttttaacag

SEQ ID NO: 19968 - DNA, 381 bp, Zea mays
  Clone ID: LIB3159-017-H1_FLI
cgatggtggaggcaaaacgcggtgaggaggtcctgaaggccgaggagatggctgccaagtaccgggccaccggccacgctcctaagaagctcatcggttgcttcggagcctaagaaaccttccaagtcagaccgagcagaaagtgaaaaacgtcagccagtgattgcttggtcctctcgctctatcaagtgtgtagtgtgtcttcgaaagtttgtaaagcctactgctgctgctgtatatactgatatcgcttccaaggcaggcgtttggtggtgtacatgttgaatgcttgacgagaaacattcttgtgtgtagttaagaggtcacgctgttgttgttgttgttgacattcaagcagacattttgttttcttctggtgtt

SEQ ID NO: 19969 - DNA, 1542 bp, Zea mays
  Clone ID: LIB3159-018-F2_FLI
gttcacagatgaagagattgaacaaagctatgaagaattttatgaagatgtacatacagaatttctgaaatttggtgaacttgtgaatttcaaggtatgtagaaatgggtctttccatcttcgagggaatgtttatgtgcactataaatcgttggattcagctcttcttgcctacagcagcatgaatggacgctattttgctggaaaacagatggaaggcggccatatgcggtgagtacatgaggtcaagatacaagacatgttcacatggagttgcttgtaattttattcactgcttccgcaatcctggaggagattatgagtgggctgattgggacaatcatcctcctagatactggattaggaagatggttgctctttttggtccctcagttgatgagatgaatgaaaaggcgagtcataccccagattttagaagttcagtgggctctgataggaagaaacttaaaatttccagcaacagatatgtttcaagaggatctaggaacgaagatgtgcatacacgacactctcctcaagattattcacattctaagcaagaacgaagtagccacaacatgaattatgagtacagacgacataaaagagattcttcagcagcagataagcaccgaagacaagatgttggagatacaaatgacagacaattttcaacaatgggaaatgacagcaagtcccataggcataagcatgaagaacggcatagaagtgatcatggtaatggagaaaaagaagatgacagcaaaactaggcctaggaagcactgttctgttaggcgtggaagtttggaggttggatattctgactggtctccagacttcactggtacagacaacagcaagggtccttcaggtgagaagtccactagcaggtatgatgatgccaaagggagcaggaggggatcatcagagtattacaatcttgaaagacaccactctacagctcaaaaacaatcaagaaatgagcacagcactacaagacgcaggagacatgacattgaagattatcatgatgaaaaaaatgacggaagaggggaatcccgaaagcataaccgccatgaatcaaacgaccggtgggtagccacaaatagtgatgttgattcggatgtagatagatatcagagttcaagctgtaaaggcactaggttgggaaggaaggatgatgatccaggcattgaagttcggcatcagaggtcaggtagaagtacgaaggatgacaagagaaggaaacatcacagtggaaacaggtggcacagcggcactgaagagggtacctcagattcaagcggtggagatttgagctctgattcgtggagtggtagatcgagaaacagtgagaacttttcagcacacaggtcaaagaggaagcgaagtcggagcaaggagtctggttattagttgtaaatagttagcctctttttggagcacatgaattcgtaggaatcgtgcagaaattttacaggaatcggtttaacttcgcacgaaaaatttcccgcactccaaacatgcggtagtggcttcc

SEQ ID NO: 19970 - DNA, 692 bp, Zea mays
  Clone ID: LIB3159-019-C10_FLI
gtcgaagaggatcctgaaggagttgaaggacctgcagaaggacccgcccacctcctgcagcgcaggtcctgttggtgaggacatgttccattggcaagcgaccatcatggggccttcggacagcccatttgcaggtggggtattcttggtgaacattcacttcccaccggattaccctttcaagccaccaaaggtgtctttccgcaccaaggttttccacccgaacatcaacagcaacggcagcatttgccttgacattcttaaggaacagtggagccctgctttaactatctcaaaggttctcctgtcaatctgctcactgctcacggacccaaaccctgatgatcctcttgtccctgagattgctcacatgtacaagaccgacagggccaagtatgagtccaccgcacgctcctggacacagaagtatgccatgggctagaagcaaggctaaaagctggccaaactggtgaatgtgccggaccccaaatcgttatcacctaaataaccagtcaagtcacaagtatgaatggacttttgaggaccattgtgccctgttgaactcatgtattaccttgtgaagtccgttgtgtctggtttctacctgaccgtttcgttatctgatgctgtttctttaatatctgatgctgcttcattaaccatacttctatatggtttgtggtgttgctgtt

SEQ ID NO: 19971 - DNA, 592 bp, Zea mays
  Clone ID: LIB3159-019-C2_FLI
tgacgacaagcatagccggagtctcgcggagatcacagacgacttctgcccagtgctgagcatgcagcaactgtaccggatcagcacgatgtactgcgacgacaagtttgggaccctgggcattccatcagaagtcgtctccagcatgcggaccaagatgatcgagggctcgtcgagcagcccgtcggcgcacgacgacatcaactcgttcctgctagacgatgacttcagcataccgttctccgtggatgacttcacgaagctgatagtgcacgtcgacgtagcggacatggatttgccaccgctcattcaggagagcagcggcggcggctccaaaatgggacattgaggagtgacaatatgcacgccttttttgtgtgtgttgcggtgatgtgcatagtgcgtgacatattgctctgagaccagggttttgtttttttcttcgtcgactggtcttccatttttctcccatatgactactacctgagtgagtagtgcctgtttgggtttgcgcgtgtgtatgattgtacagaactgagctgtggcatataaggtaaggaaagaaagcctgtgtgattcaattttttttatc

SEQ ID NO: 19972 - DNA, 442 bp, Zea mays
  Clone ID: LIB3159-019-E3_FLI
tctgtcgatccatgcatcgatcgagatgtatatatatcctggttctagatcccatagagatcatagaactagagccagctccttgttgcccatggccatgacgagagcactggccatggtggccatgttagccactgctgccttgttcttcatgtccgctcgcgcacagcagtgcggtacgcaggccggcggcgcgctctgccccgactgcctctgctgcagccagtggggctattgcggctccactcccgactactgtaccgacggctgccagagccagtgcttcggcagcggctgcggcggcggcggcggtacccctgctactcccccgagcgggccggtgtcagaaatcatctccgaatccctgttcaacgagatgctgctgcaccgcaacgacgtggcgtgcccggccatcggcttctacacctacgacgcgttcatc

SEQ ID NO: 19973 - DNA, 745 bp, Zea mays
  Clone ID: LIB3159-021-C8_FLI
caaggagtcagaggtgtaccactgccgctgggccatgcttgccgtccccgggatcctggtgccggaagctctgggcctgggcaactgggtgaaggcgcaggagtgggcggccgtccccggcgggcaggccacgtacctgggcgccccggtgccgtggggcacgctgccgaccatcctggtgatcgagttcgtggccatcgccttcgccgagcaccagcgcaccatggagaaggaccccgagaagaagaagtaccccggcggcgccttcgacccgctcggcttctccaaggaccccgccaagttcgaggagtacaagctcaaggagatcaagaacggccgcctcgccatgctggccttcgtcggcttctgcgtccagcagtcggcgtaccccggcaccggcccgctggagaacctcgcctcccacctcgccgacccgtggcacaacaacatcggcgacatcatcatccccagatcaatctccccttgagctcagctcagctgctggttgctgtttcctgtgtacgactaggccctgcctgtacaacgagcgacgacggtgacttcccgcccggaaattaaaccctcgtaatgtaaagcttatgttattaagtagcggctactcttgtagtcttgtctgtatcaaatataaactggtttgttagctgaatcccaaggttatttctgagcctaaccaggggaaatttagctcaaaacggagaaaatacatacgagacctttgataact

SEQ ID NO: 19974 - DNA, 561 bp, Zea mays
  Clone ID: LIB3159-021-D3_FLI
cgctctgccaaacgtcatcggcttcagcttcggcgtggtccagatgggtctctacgcgctctaccgcaacgcgacgcccagggtgcctgccaaggacgtggccgacgacgccagcaaggacaaggcgcccggcgaacatgtggtggtcaccattgccaagctgaccgcggcgacgacggcacctgcagctgccgtggcggaggatcttgtcaaggtccacgacggccacccggaggaagcagccaagggcgccgccaagccggcggagaacggcgcgggacgcagcgacgccgagcaagtctagattcctcgctcgatcagatcagaattcatgaagaagaacatgcgtatgtatgtgtatccggtaggtcgtaacataacataaattaagtgcgcatgcagtttggcaactcatgttgtttcatttcgttctcgcgcaatatgcgcatgtattaattttagattgtcattgttgtagttcttgcctccgattattattagtgtgtccgtcaccttccatgtaataacaaaaaaaatatatataaatggtcctattaaagc

SEQ ID NO: 19975 - DNA, 1372 bp, Zea mays
  Clone ID: LIB3159-021-E10_FLI
cccaatccacttcgcaagccccgccgcacacttcttccccctgcctccaaaaactcagaaaaccctgaccgccggcggcggccatgcttctccaccaccgcctcctccctcgcctacttcttgttccttccacacatacctccacactcctctgcccctcccgtttgccgcgccgcctctccctctcgccacgcttctacgcgctgccccacctcgcggcaccccagaccgtcgaccactccgacgatgagggggcaccccagggggaggggcagatcaagctcccgctcgaccatctcttcgtgccgcccggggcaacaatggatgcgggggaccaggaggccgtgagcgcacgggtgcttaagggctccaacatcgtgctgggcccatacgcgcgcggcgacgcacaggtggtcaacgcagattttgtaaagagcagcgtgcgtcccgatgactgccctcgggacggccttccggagtttgcactcgttggccggtccaacgtcggcaaatcgtcgctgctcaactcgcttgtccgccgcaagcgccttgcccttacctccaagaagcctgggaagacccaatgtatcaatcatttcaaagtaaatgacagctggtatcttgttgacttgcctggttatggatatgcttctgcaccacaggaagctcgtaccaattgggatgaatttactagaaattactttctcagtcgggagaatttggtatctgtttttcttcttatagatgcaagtatacctgccaagaagattgatcttgactatgctagttggcttggccaaaacaaggttcccatgacccttgtgttcacaaaatgtgacaagcgcaagaagaagaagaacggcggcaggaaacctgaagaaaacgtggaaactttccagggcctaatccgcgaatacttcgaggccgcgcctccttggatcatgacgagcagcgtgaccaaccagggccgcgacgagatactcctgcacatgtctcagcttaggaattattggctcaagcattgagatgcaatgataaccaaaccagggcgaagcaactagaacagcatgcaaagcactgtcgtccattgatgcatggacattcagcagtcggcgcctccgcaatcaggcgttcgcaccaactaatccagccttttgagctgttgactgtccaatatggccccctgtacatgattacccaatcaacactctggggatgcggacaaggtgctaaaatcagctgatcatggtttttttctttatttctattgtgtacacgtacaatcccaaccaacgttttccccttgttcccatctgattataggcttgtgtatactgtggggttaaatgattaataaattctggtgttagct

SEQ ID NO: 19976 - DNA, 570 bp, Zea mays
  Clone ID: LIB3159-021-E5_FLI
tgcctatctatctagcgagagagagagaggaaagctagctagctagcatggagtgcggcagcaagaaggcagcaggcggtgtgttggcgctgctgcttctccagctggtgttagctccgacgacggcgacggcccgcctcctgcaggcggatacctccaccgtggttggcctggacatcatcgcgagggagtttggccatccagtgagaggcatcctctgtggtgaaacctgtgtcttcctaccatgctatacggcagccatgggttgccaatgcattggccaaatctgcatgatgtgatatctggactagcgctatttgtaatttgtgttgggagaaacacaaggacggtacggtggtgttcaacttattgcatgtgtatggtgatctaataagtaaagtataataaaaagggatatgttggatgtgtacccatcgcctgctccttacatcatttttgacatatatatactcccttcgttccagtaatgtaagacgttctctctctagttatacgtacattgatgcagttgtatatagagaattaaatacatttttcgatcttcaaacc

SEQ ID NO: 19977 - DNA, 881 bp, Gossypium hirsutum
  Clone ID: LIB3165-001-C10_FLI
gaagaattttgttggattatccgttgttgatggttttatagcatgtggctcagaaacaaatgaggtttatgcatactataggtcactgcctatgccaataacttctcataaatttgggtccattgatcccatttctgggaaagacacagatgatgacaacgggctgtttgtatcaagtgtttgctggagagggaaatcagacatggttgttgctgcaaattctagtggatgtattaaagtattgcagatggtttaaggagaaggttaattgcttagagtcatcaattactggcgtcatttggttgccaagttttattctcgaggcttattcttaagcattgaagccatcttgggttcaggcaaatatgtcatacatggatgacttggtctgctcggtggctcattataataggcttggctttgattcatagaaaattatatacagagtagagtcgagccaaactggagttatggttccaggttatcaagattatccagagctaggttccagttattcttttacatgcttaagaatccagaatatcatgacacttcctgagtcttgagaaagaggatcaaaccgtaaatacgggaatgcaaaatcaagattgaggtaacttctgctaagaggctttccatctcggttgtgggagcgagagtgtatgctatattagtacgtgtctttacttctgctggtgatccttgaaactaaggtgcagtccttttaagcgttgtaatatatatatatatagagagagagagagagaggtataattcgtaatttactcaaatgtagggtattctttattgagatgtaagtaagcattctatgattctatgtaactgatgttttaccagtgtaaatctataaattttgatgt

SEQ ID NO: 19978 - DNA, 1891 bp, Gossypium hirsutum
  Clone ID: LIB3165-020-G4_FLI
ccactttttatttctccaaagcctagcctggtgtgatttcctttttgttttgagttaaaagggagttccttttcacagttatcatggctttgaatttggtttctcctcctgaaatccattctatctccttcttgggttcaactaagtccagctccttctccaagctatttccagggggttttgttttgaagaaggactgtggcaccacgtttgggaggaaagttcaatgttcagctcaggctcctcaaccaccacctgcatggcctggacgagcttttccagatcccggacgcaaaacttgggatggccccaagcctatctccatcgttggttcaactggttccattggaactcagacgttggacatagttgcagagaatccagataaattcagagttgtggcgcttgctgctggttcaaatgtgacccttcttgttgatcaggttaagacattcaaacctcaattggttgctgttagaaacgagtctttggtaaatgaactaaaagaggctttggctgatatggagcaaaagcctgaggttattcctggggaatcaggtgttatagaggttgctcgccatccagatgctgtcagtgtagttacagggatagtaggctgtgcgggattgaagcctacagttgctgcaatagaagcaggcaaagatattgctttggccaataaagagaccctgatcgctggtggcccctttgtccttcctcttgctcacaaacataaagtaaaaattcttcctgctgattctgaacattctgccatatttcagtgtattcagggattaccagagggtgcacttcggcgtattattttgactgcatctggtggggctttcagggattggcctgttgataaattaaaagaagtcaaagtagccgatgctttgaagcatcctaactggaatatggggaaaaagattactgtggactctgctacccttttcaataagggtctagaagtcattgaagctcattacctatttggagctgagtatgatgatattgagatagtaattcatccgcaatctattatacattcaatggttgaaacacaggattcatcagtgctggctcagttgggatggccagatatgcgcttgccaatcctctacactatgtcatagccagaaagaatttattgctctgaaataacttggcctcgccttgatctttgcaagcttggttcactaacttttaaggctcctgacaacgtgaaatacccctccatgagtcttgcctatgctgctgggagggctggaggcacgatgacaggagttcttagtgcagctaatgagaaagctgtggaattgttcatagacgaaaagatcagctatttggatatttttaaggtggtggaattaacatgtgagaagcaccaggaagaatttgtggccactccttccctagaggagattatacattatgacctttgggctcgagactatgctgctagcatacaacaatcatctggtctgagtcccgttcttgcttaactgatggcttgcacatgttacaagaccaaaccaggctctatcttgaagactcggaagttctcagtttatgccgaaggctagcattctttcaaagatgcctagtatcatgtgtctcgatatgaagatatcgatatcattcccccgtttagttgtataatgtccaatttagaagtggcaaattaaagaatatagagcatggcatgttgcggttgggtgtaaacataggacaaatgcgagcaatcaatagcagcctccgctaaacagggttgtttttattacatctaattgatgtcatgtttatgtttatgttttttttttttatgatatcattgtactgaaactgttaaatatttatataaaactttgacaggttaatagtgcttggc

SEQ ID NO: 19979 - DNA, 944 bp, Gossypium hirsutum
  Clone ID: LIB3165-024-B12_FLI
tttttcaaaaatatgtgcaattttttttaaaaaaaaactcatgaacaattttattcgtggcggttgggaaaatgttatatgaaaactctctggtgtccgacttgttcgccgccgtggtttgctgcggcgttatattcgcgtttctcttactctggcaagtaaccgccaaatgcggcgtagatcagaaactgaataggaagcttgtgcatataagtatagggctagttttcatgctttgctggccattattcagtgcagggtatcgcggagcaattttagcagctataactcctggtgtcaatattatacgaatgcttcttatcggttctggaatttggaaagatgaagccactgtgaagtcaatgagcagatatggaaactacagggaacttctcaaaggaccactctattatgctataacggttactttggcttgtgtggtctattggaggacttcacctattggaattgctgccttatgcaacctttgtgctggagatggtttggccgatgttgtgggaaggcgattaggtagaaagaaacttccttacaataggaacaagtccgtagctggtagtgttgcaatggcaacagctggttttttgtcctctgttgggtacatgtattacttttcttacttcggttatattcaagagggttgggggatgatcttgcgtttcttggttgtgtctcttgcctcggcgctggtagagtctcttccgattagcaccgagcttgatgacaacctcaccgtttcattaacctcaatatttatcggcagtctcattttctgattcaagaatcagtgtaaaacttgttgtaagttatatggaagcattgttttttagctgccaatttactaataaaaatttgttgtaacttagcacaacttaaaaataaggcatgaaatgatgattccattgatggcattgaagttcaagtcc

SEQ ID NO: 19980 - DNA, 948 bp, Gossypium hirsutum
  Clone ID: LIB3165-026-A4_FLI
gtttttcaaaaatatatgcaatttaaaaaaaaacacacacacacataaacaattttattcgtggcggttgggaaaatgttatatgaaaactctctggtgtccgacttgttcgccgccgtggtttgctgcggcgttatattcgcgtttctcttactctggcaagtaaccgccaaatgcggcgtagatcagaaactgaataggaagcttgtgcatataagtattgggctagttttcatgctttgctggccattattcagtgcagggtatcgcggagcaattttagcagctatcactcctggtgtcaatattatacgaatgcttcttatcggttctggaatttggaaagatgaagccactgtgaagtcaatgagcagatacggaaactacagggaacttctcaaaggaccactctattatgctataacggttactttggcttgtgtggtctattggaggacttcacctattggaattgctgccttatgcaacctttgtgctggagatggtttggccgatgtggtgggaaggcgattaggtagaaagaaacttccttacaataggaacaagtccatagctggtagtgttgcaatggcaacagctggttttttgtcctctgttgggtacatgtattacttttcttacttcggttatattcaagatggttgggggatgatcttgcgtttcttggttgtgtctcttgcctcggcgctggtagagtctcttccgattagcaccgagcttgatgacaacctcaccgtttcattaacctcaatatttatcggcagtctcattttctgattcaagaatcagtgtaaaacttgttgtaagttatatggaagcattgttttttagctgccaatttactaataaaaatttgttgtaacttagcacaacttaaaagtaaggcatgaaatgatgattccattgatggcattgaagttcaagtcc

SEQ ID NO: 19981 - DNA, 1230 bp, Gossypium hirsutum
  Clone ID: LIB3165-036-G11_FLI
cctaaatctgccgttcttttttatatataatagatagaaaattgaagacaccagcgataccagattcttacctcttttttttttatttcccaatttaagccaatgacggaaacgccgttctcgaagctccctgaggacgtcgttttaaatatattttcgaagctcgaagaggatctcgctagctgggcaagtcttgcttgtgtctgcaccagattctcttctctgattcgtaatacctgcttgaagcttaaatgttccaaaaccatacccgccgtttccgccgaccttctctcctcttcctccgccccacccggcggttgggcttctcttcataagctgtctgtctgctgtccaggcctccttcacgccggtgtccttcttgacaactctgatttcggcctcgaacgcgagctcggccctgacgagaattatcagaggccagctcattcgcatctctcgacgccgtccgctgaccctaattcaagcaaaacggaatgtaattccaatccgaacatggaaacggacgttcccggctccgattgtccctggtcacttttcgatgatctgtatttcgacaccgtttataacgcgtccgattcgatggacagctacccgtcggaaactatggacaccgcgacgatcaaaacggggcgtgaatttcccgtttgtaaaagaaggaagatttcaagatccctaaggtcccatttagcaaccggggttcggaacttaagccgagaacaagggaacaagctattggcgagccggttccgaggtgattgcttatacatttgcgattggcctgggtgcgtccacacggaggagaagcgaaactacatgctgttcagaggggttttcaagaatttcaagaaatcccgtgtgtggaggactataaacgacgggaaccgaagcaagatcgatctggactgcgcgttttgctcgtgcaaggagacgtgggatttgcactctgccttctgtctgaggcgggttttcgggtaccatgacgatggggagccagttgttcgagctttcgtctgtgagaatggacatgtttctggtgcttggactgatttgcctttgtacacttgaataccaattatttgcagttcatcgaaactaaaagtaagctatttttgtttattgtaataagaggaattgggtttgagatatatttagtattattgggtttgagatatggatttatatatatatgattccttaactacttgtttt

SEQ ID NO: 19982 - DNA, 751 bp, Gossypium hirsutum
  Clone ID: LIB3165-041-B2_FLI
gccgaccagaaggcctacgctgcggcgaagtagggggaagtgtggctaaggtgcagcccacgaagtcacgcagctcggtttgttgcgtggagttcaaccccttcggagatgcattgatagctgccggatgcgccgaccagaaggcctacgcctatgatgtacggaaaatggtggaacctgtacacattttcgatggacatacgaaaaccataacatacgttagatttctgaatgcccaaacactggtttccgctggaaccgacgggtgtttaaaactatggaatatcgttgattctcgtttacttagaacatacaaagggcacgtaaacagtcggagttttgtggggttgtcagtgtggaggcatggagggttgcttggatgcggatcagaaaataaccaggtgttcgtttatgataccaggtggggtgagcccatttgggtgcatggcttcgagcctatgggtagagatagctccgatcatcaccatgctttcgtcagcagtgtgtgctggaggcaagtcaatgaagaccagtgcacacttgttgcaggtggttccaatggagttttacacgttttcgtgggcaagaggaaatctgattcagagtagcccatgtttggaaacatgaccttcctttcctcctcaacaatgtaatattcaaggttgaatctgcattctccatatcttactgttgtagctaatacttttcggttgaattataaggtttgacaatattaattaattaatttatt

SEQ ID NO: 19983 - DNA, 1369 bp, Gossypium hirsutum
  Clone ID: LIB3165-057-D1_FLI
ataaaccctaaaagctcttcccaaatttggttgagaagaaatggagaattcaactcaagaatcccacctgagatccgataattcggtaacctacgaatcagcttacacagtttatgccatggccttatcttccacgccttcctccaccaatatcaaccatcaacgcatcgctctcggcagcttcctcgaagattacactaacagagtcgacataatctcatttgatccagaaaccctctccttcaagacccacccaaagcttgccttcgaccacccttatccacccaccaagctcatgttccaacccaatcgaaaatccgcttcatcctcttcttcttgttccgatcttctcgcttcaaccggcgatttcctgcgtctctgggaagttcgagaatcttccattgaacctgtcactgttctaaacaatagcaaaaccagcgagttttgtgccccgttaacttccttcgattggaacgatgttgaacccaagagaattgggacttccagcatcgacacaacttgcaccatttgggacatcgagaaatgcgtcgttgaaacccaattgatcgctcatgataaagaggtttacgacattgcttggggtgaagctagagtttttgcttccgtttccgctgatgggtccgttaggattttcgatttgagagacaaagaacattccaccatcatttatgaaagtccccaacccgacacccctttattaagattggcttggaacaagcaagatttgaagtatatggctaccattcaaatggatagcaataaagttgtgattttggatataaggtcacccacaacccccgttgctgagttggagcggcatcacgctagtgtcaatgccattgcctgggctcctcagagttgtaagcatatttgttccgctggggatgatacccaggctcttatttgggagttgcctacggtggcgggacctaatggtatcgatcctctgtgtgtttactctgctggctacgaaattaatcaattacagtggtctgctgcgcaacctgattggattgccattgccttttccaacaaattgcagcttctcaaagtttgaggttttcacactgtattttcctgcttgaagtctggtcttctgtttcatagactgcttaagcttgtattcccctttgacttgatttgtggaatcagttttagttaagcctgtcaattctgacttgatttgtggaatcagttttagtttagctgtcaattctgccattactttgcaccattgatgaagtaaatgttcttccaaaaatctgtattgaaattcctttagttaagtttatcatcatatggtaaacattacattcaagaatttttaagtttcgtttgtttgatgctt

SEQ ID NO: 19984 - DNA, 825 bp, Gossypium hirsutum
  Clone ID: LIB3166-014-B6_FLI
ggatcgtactcttcgaacgtcaaccttgctgttgagaactcctcatggaatgatgagaaacagctccaagatatgtacctgagccggaaatcatttgcttttgactgtgatgccccaggtgcaggtatgactgagaaaaggaaagtctttgagatggctctaagcacagcagatgccactttccaaaatcttgattcctcagaaatttcactgactgatgtgagtcactactttgactcggatccaacaaacttagtacaaaacctccgcaaggatggaaagaagccaagtgcatacattgcagataccaccactgcaaacgcccaggttcgaactctggctgaaactgtgcgactagatgcacgaaccaagttgttgaaccccaaatggtatgaaggaatgatgtccagtggatatgaaggggttcgtgaaattgagaagcgccttacaaatactgtagggtggagtgcaacttcggggcaagtggataactgggtgtacgaagaggctaattcgactttcattcaagatgagaacatgttgaataggctgatgaacaccaatcccaactcgttcaggaagttgattcaaacattcttggaggctaacggacgtggctattgggaaacttcggaggagaatattgagaagttgaggcagttgtattcagaagtcgaagataagattgaaggtattgatcgatgaaccataaaccaaatagcttctaaaatggcaaatatttgatgacttacttgagctcctccctttaggatgagctgaaacactctcgtgaacttatggaatgtaattttgttcataaaaaat

SEQ ID NO: 19985 - DNA, 1146 bp, Gossypium hirsutum
  Clone ID: LIB3166-014-B7_FLI
ctcaatctttatctccttcaattgtttgtttttgggttagaaagctctgtttttttattacccttttcatcaaaaagcttcaatctttcaaccatgttgcttaaagcttcccctgctttttctttgttgaagaatccccaagttgaaactcgggttcctctgttttcaagaaacggttctggggttgggtctggggctgttgttgtttgtgctaccaaaggagccaataataagccattaacaggtgtgatttttgagccttttgaggaagttaagaaggaacttaatcttgtcccaactgtgcctcaaatgtccttggctcgtcaaaagtttgctgatgagtgtgaagctgccatcaacgaacaaatcaatgtggagtacaatgtttcatatgtctaccatgctatgtttgcctattttgatagggacaacgttgctctcaagggtcttgccaagttcttcaaggaatcaagcttagaagagagagagcatgctgagaaattgatggaataccagaacaaaagaggtggacaagtgaagctgcaatccataataatgcccctctctgagtttgatcatgcagagaaaggggatgctttatatgcaatggagcttgccttgtctctcgagaaactaacaaacgaaaagctcttgaacttgcacaacgtggctgagcgaaaccatgattcgcagttgaccgatttcatcgaaggcgagttcttagctgagcaggtcgaatccatcaagaaaatatcggaatacgtggctcagctgagaagagttggcaaaggacatggggtgtggcactttgatcaaatgcttctccacgagggagctgttgcatgaaaacttgaccagagaaaccgccgcttgcttctgataccagcgatccttcttttaagttcccgtgttagtagttgttgagagattaagttttgcaagttgtatggctagtttagaaaactttgtgttgatgatataagaagattgagagactcaaaagggataatttgtaagtcctcttgatcatagctatagattttcatggtttttgacttttcgtatcgacatttttcgactgttttttcttcggttaaatgctctgcatagttagcagataaaataatacaagtagggatcattttg

SEQ ID NO: 19986 - DNA, 712 bp, Gossypium hirsutum
  Clone ID: LIB3166-021-A3_FLI
caactccttaattatctctttaatttagtaaagcaaattaaaagatggctaaacttgcctcccttttcatcttaaccctcctcctcgtttccactctatccttgagttttgccgcccggtctggcccagctttcgctaacgactcccctgcaaaaacccaatctcaggttacttaaattaatttgactggcttcaatctccctttcattttctctttcgtgattttacatttgatgatttggggtttttgttgatatattataggccaccactacttctactacaactgatgggatagagcagagtgaagataggtgtgaaggagttggagaagatgagtgtttgatgagaagaactcttgctgctcatcttgactatatctatactcagaaacaaaagccttgactttttcttattcttgtttcttagttataagcctttatgcttcggttacgtttttctacttttgtctgtgtttgattcttccttgattatagtggggctttgtcatcacaaccacatttcttccattttctctttaagttttggaatctgggttgtaatgctatatgtataaaaaatcatttcaccttatttatttataaaaagtaaggagtattcctttccagtaaataaagaaaaagcatccatccccttgtatgaagccttgctcttcatgagctttaattgaagcttccttgttccttcttgc

SEQ ID NO: 19987 - DNA, 757 bp, Gossypium hirsutum
  Clone ID: LIB3166-026-A9_FLI
gcaaatgcaggctttatgttcttgtgaagaagcgattgatatcggaacgatgatggaaaacaaacggaaccctttttctgttgatcatactgggtttacgtctttggcatcgaaacggcagaaggccacaaaggagaaaaaagatcaggtcagtgaacggattgcggctctgcagcaacttgtttcgccatacggaaagacggatacagcttccgtcctactcgaggcaatgggatacatacgatttcttcacgaacaagttaaggtgttgagtgctccatatctccaaaccataccagcaaatagtttacaggatgatgatcagtatagcttgagaaaccgaggtttatgccttgcaccggtctcgtgtaccgtaggacttgctcgcagcaatggagccgatatttgggctccggtaaagaccacatctccaaaatttgacgaggttatctcacaattcaattgaagctttcattttcacagccaaactttgtgacatagataggacgatgatggtaggtggaaccagtagtctatgatatttgagaattgtgtattcggaaatggtattgcaccgccgtgacggagttatgaacttttataaaagttaggaattttggggtgattggttcagatatccttgattgccttatagctccgtcgaacacatctgtattatttgaaacttgttggtttcacatgtatattgatgaaacataattagtagttcaattttatgcacttttattgtttcact

SEQ ID NO: 19988 - DNA, 994 bp, Gossypium hirsutum
  Clone ID: LIB3166-026-C6_FLI
ctaaaaatctctccacaatgcttttgagaccagtttcatctttgtgtgtgcaagccaagcaaggggataatctaatttgttcccttaagggctcccctgtaacatcatcatcatcatctgctttgagttttctgcccagaaaacatggaagggctttgggtgtttatgcatccataggaaccgacaatcatgcacttacaggggtagtgttccagccttttgaagaggtgaaaaaggaggaacttgacatcccaatcgctcctcatctttcgctggctcgccagaaatatgctgatgcctgtgaagccgccatcaatgagcaaatcaatgtggagtacaacgtttcctatgtgtaccactcgttgtatgcttacttcgacagagacaacgttgcgctcaaaggctttgccaaattcttcaaggaatcaagtgaagaagaaagagagcatgcagagaagctgatggaatatcagaacaaacgaggtggaagagtaaaactacactctattctgatgcccccttcagagtttgatcatgctgagaagggagatgcactatacgctatggaattagcattgtccttggagaagctgacaaacgagaagcttttgtgcctgcacgatgtcacggtgcaaaacaatgatgctcagatggccgatttcatcgaaagcgaatttttagctgagcaggttgaagccattaagaagatatcagattatgtttctcaattaaggcgggttggaaaaggacatggcgtatggcacttcgatcaaatgctactccacgaaggggcgtgatgctgcccataatcaccatctaaatgctgcatctttctgttgttttagtgcttcacagatgttctactatatatacatatatgatgagggataggtagtggagaagaataaattgttgtagaatatctatatctatatgtcattgtagtagccccttaacattgccatgtaagagacaataaacagcttggtttttg

SEQ ID NO: 19989 - DNA, 1044 bp, Glycine max
  Clone ID: LIB3167-002-D9_FLI
catgcgcaataatattaatgcacgcagaggtggctaagctcaatgcgaatgagtggtacttcttcagtttccgggaccgcaaatatgctactgggtttcggaccaaccgggcaactacatcagggtattggaaagctacggggaaggatcgtaaggtggaggatccagccacgcaagaggttgtagggatgaggaaaacactggtgttctacaggaacagagctccaaatggcatcaaaacgggatggatcatgcatgagttccgcttggagaccccacatatgcctccaaaggaggactgggtgttgtgtagagtcttccacaaaagcaaagaagatgacaacagttccaaactcctacagtatgagacgacaccatcatccctaactttgttggcttcgtcatctcccaccaaccaagccatgcctcatggtgttgggtataataaccgacttgccacctctttctctaattcattcatgccaacccaccaatatcatcatcacttcaaccctacccaaaacgctaattctttgatggatctccttcacttctctcgcgaaaccaacaccaacaatactggctttcttactcaaattggtgccaaaggtgatgacgaatatggtttcttatgggacatggatctagaagaaaatagcctagatgatggcgtggcttcaaacttggacgcaataagattcgaggttgataataataatactaataacaacaatatggtattgctataattaaatgtgtaagatgtgttatgtgtgtacatatatacacatatatgttattcatagctcgtaaattgtcgtaagattcgtttatttgtggtgtatttatggtgcttcgctatgaggggcatgtcacatgatagattgggtttagttgttacaagtttgtgtggtatattgttcaagtagtagggtaatactattgtggtccattaggcttttcgtaatcaattactattatttacccattattattgggaactattcctttgtatacagtttgtgtatgtaattagtattggct

SEQ ID NO: 19990 - DNA, 906 bp, Glycine max
  Clone ID: LIB3167-004-A2_FLI
tccgagctctccaacatctgcgacggtattctcaagctcctcgactctcgcctcattccctccgcttcctccggcgattccaaggtcttctacctcaagatgaagggagattaccacaggtacctcgccgagttcaagaccggcgccgagcgtaaggaggctgccgagagcactctctctgcatacaaagccgctcaggacattgcaaatgccgaactgcctccaactcatccaattaggcttggccttgcacttaacttctctgtattttactacgaaatccttaactctcccgatcgtgcctgcaaccttgcaaaacaggcttttgatgaagctattgctgaattggatacactgggagaggagtcatacaaggatagcactctgatcatgcaactccttcgtgataacctcaccctttggacctctgacatgcaggatgatggagcagatgaaattaaagaagcagcaccgaaacaggatgaccagtaaaaatattttactgctaattagaattgaacttctcctccatatctttttgaagggagaaggtgtttgttgctaatatctctttggtactgagattttaggcattcatgtttgttatgattgtggatgtactgggccgtttttagtttgtccttccattttcaagtgttttgccaaattgcctattttattaaggacgctgaagtttttattatatggaattggaattttaagattcttctcttctatctagtaaacttgatgtcacccgcttatattgtgaggattagatatatttgtattctttttgaagcctcgatatttaaatttagtttgattggaattgggtttgttctcgttgaactattttgagcattgtacacttcattctgatagaagtttctgctgttcgagatc

SEQ ID NO: 19991 - DNA, 768 bp, Glycine max
  Clone ID: LIB3167-004-D1_FLI
catttaggctctcttaaaacaaaggtccctcaaaccactttccccacactctttagtgtgtcatttttttttttgctctttccccacaaagaggtcttggacccttcttctgtgtagtgcaatggccatggctaaggttttctgtgttctgcttctggcactccttggcatttccatgatcacaactcaggttatggcaacagattctgcttatcacttggatggaaggaattatggacctgggagtctcaagagctcacagtgcccttctgaatgcacaagaagatgtagccagacacagtaccacaagccctgcatggtcttctgcaaacaatgctgcaaaaggtgcctttgtgttcctcctggctactatgggaacaagtctgtgtgcccctgctacaataactggaagaccaagcgtggaggacccaaatgcccctgaaaattgaaaatataagcataatttcacctacaatttcatatatactactcaaagtggaactataaactatatatatatatatatatatatggccatttctatgttttgggcagcacctactacagttgggttgtcactagactaataccatcttgttctctaccatgaaattagttcaattattaattttcatgaagaaacctatatgttactccctttcctaaacaggtatgagaggggtgttctactaattagtcaattatctttgtcattgtactttttttagttttatatataatgaagttattttataatttttgtctgat

SEQ ID NO: 19992 - DNA, 736 bp, Glycine max
  Clone ID: LIB3167-006-F3_FLI
tctatctctgcttcttcgcaatctcagaacagaacacaacagagcccttcaactctctctgtcgttgatggcgtcacaagcgagcctccttcttcagaagcagctcaaagatctttgcaaaaaccccgtcgatggcttttctgccggtttggtcgacgaaaccaacatttttgaatggagtgtaactataattggacctcccgatactctttatgaggggggatttttcaatgccattatgagctttccacccaactacccaaatagtccgccatcagtgaaatttacctcagagttatggcatcccaatgtgtaccccgatgggcgagtttgcatatcaattcttcatccacccggtgatgacccaaatggttatgagcttgcaagtgagcgctggacgcctgttcatacagtagagagtatagtattaagtatcatatcgatgctttctagtcctaatgatgaatctccagcaaatgttgaagctgcgaaggagtggagggataggagagatgaattcaagaagaaggttagccgatgtgtgcggaagtcacaagaaatgttgtgatttacagcttggattctcatcttccttttgtgaactgaaggatatacaacttaatgtatggattggttcacctgttactgttgatcctagtagactgccatttgtcttggaaaaacaaattgtattgtaagtgcttggtgactagtttattggaattttagtttgttc

SEQ ID NO: 19993 - DNA, 1422 bp, Glycine max
  Clone ID: LIB3167-015-A9_FLI
aaaactcggaagctgcatggctgcgttcgttccttggtgttggtggaatctctctctctgactatgctgtgtctctttcccaggaccgcgcgaaacacgtaaatccccttcaaacacaacacaaaaacgcagtgtttccaccatctctatctctatctctatatataccctcacaaccaaacatccccattccctctctaaccctatctaatctgtcttctcttacattccattctccaccacacattcaattttaaacctctgggcgtggctagcttcaacctttaacattaacatggccattccctacccccatttcatcgccaccgagaaagccgccatggacgccggcctcctccacccctcctccccctccgtcatcctcacccaagacgatttgaagaaaatcgccgcctacaaggccgtcgagtacgtggagtccggcatgatcctcggcctcggcaccggctccaccgccaagcatgccgtcgaccgcatcggcgagctcctccgccagggcaagctcaaggacatcgtcggaatccccacctccacaaaaacccacgaacaagccctctccctcgggatccccctctccgatctcgacgcccaccccgccatcgatctcgccatcgacggcgccgacgaggtcgaccccttcctcaacctcgtcaagggccgtggcggctccctcctccgagaaaaaatggtcgaaggcgcatgcaagaagttcatcgtcatcgttgatgagtccaagctcgtaaactatttggggggtagtgggttggccatgcccgttgaggttattaagttctgttggaggttcaccgcggcgaggttgcagaagctttttgaggaggctgggtgcgttgccaggctcagaacttttggggagaaggagaaggaggagccttatgtgacggataatgggaactttattgtggatttgtatttcgagaggagtattggggatttgaaggctgctagtgatgctattttgcagcttgctggggttgtggagcatggcatgtttcttgatatggctaccactgttattgttgcaggggagctcgggttgacggtcaagaacaagtagttgttgttggtggttaggagaatgaaggtaggttaattggccaaggttgacatggggtttctaagttctatctaacccatttgtatggtgtagtagtaaaaaaggttttaatccaggggtaaagggggattttgattaaatccttttgttattcaatacagttgttggagaaagtttataagttctccggtagttttgttttgttttttttaggggcggggggatttagtttgagcaagcagaaagcaaaatggagagatgagtattaatctcatgcaatgactgttgtgtggcgttgaatcggttgtccgcacaatttgttgttc

SEQ ID NO: 19994 - DNA, 1592 bp, Glycine max
  Clone ID: LIB3167-026-F9_FLI
ctcattctgtccgtgtctgcatccgaaaccaaaacagatgtggcgcaccactttagacagcagcaccatgagagccctgcgccttcgttccttcctcttctcttcatcttcttcctcttcctcttcttgttgttcactcatcaacattttctgcccatcctcctcctcctcttcgtttacgactttgactacaatcatctctcactcttttcttccttttcccccaacgacgcgcgtcttgttcaccgactcgcgccgcttcggctcccccgttccgcgccgcttcggctcccccgttccgcgctgcgtttcgtccctccccaccctcgactggaacgacgccgtttcctgctctgaggtcgaggttgacgccaatgccgccgacggcggcgatgacggagccgtcgaccaagacacaaagccttctattgccgtcagagccttcttcttctctactagtgttgatttaaaaagcttggtggaacagaacaaagcaaactttgtcccgccatcatcacgcatgactaattatgtagttctcaagtttggagatatttgtgtttccaagggtccaggtactttcttgagtggacgcaatggctgttacatggtggtttttcagtatggttccattgtattgtttaatgtccctgagcatgaggttgatgcttatttgaaaattgttaagaagcatgcatctggtctgcttcctgaaatgagaaaggatgagtatgaagttagagaaaaaccagctttaagcacatggatgcaaggtggactagattacataatgttacaatacttgaacatcgacggcattcgaactattggtagtgttctaggtcaaagtattgctcttgattactatggtcggcaggttgatggaatggttgcagaatttacagacataaaccgagagatggaagcaactggaaaattcaaaatgcaaaggaagaaacttttccagttggtgggcaaggcaaattcaaatcttgctgatgtgattctaaagcttggactatttgagagatcagatattgcttggaaagatgccaaatatgctcagatatgggaatatctcagggatgaatttgaattaactcagagatttgctagtcttgatttcaagttgaaatttgtggagcataacatccgttttctacaagaaattcttcaaaataggaaatctgatttcctagagtggctcattattgcattgattggtgctgaaattcttctgtctctctatgacattgttcatcggtctgccatgaaattttagcagcattttttctggtggcatgtaaggttagcatgccattgaagagctgtagcatactagtagttggctttactcatttagtttttagatattggtttctcatgcaataattcattgtgtctcttgtaaataacaattttaaagccttaaacccagttctttactagtcaatagtataactttacatgtgtaggatagtatcactcactgaaaacctgcacctgtatgctttgttgtattataattgtctattgcatcgatttattattctgttgaattttgtgaatgcaggaagttgccaattttcatg

SEQ ID NO: 19995 - DNA, 1436 bp, Glycine max
  Clone ID: LIB3167-027-B5_FLI
cccatcaaaacaatcattcccctgttaccaaaaccacactgtaacccccctttttttggtattggcttcaaatgagttcggctactaagaacgcggcaaacgcggttggggccaaaacggcaagagcatgtgacagctgcataaccaaacgtgcacgttggtactgtgctgccgatgatgcttttctctgccaggcctgcgactcttctgttcactcggcgaatcctttggctcgaagacacgaacgagtccgcttgaaaacggcgtcctacaagtccactgatgaacaacaacaacaacaacaacaacaacctcccacgtggcacactaagaaacctcgaacgccgaggcaatggaaacattctcgtaacaacaaccctttccatttggtccctgaagagggttcggaggaggcgaattcccatgatgagaacgaggagcagcttctttatagggtccccatattcgacccttttgttgctgagctatgtgggactaatagttctccttctcctgttacttcaactgatcaaggagtagttgctgctgctgaggttgaatacaaagggtttcaaagcaatggtttttgtagcaatagcagtgagatggaaaacttgcatgggatgcttccttctgatgcagaacttgctgagttcgctgctgatgtggagagcttgttgggtagggggcttgaaaacgagtgcgtggggatggaagaattgggactggttgatgcgaaagaggaggagtgttcggtaggtagtgggaaggtgaagatggaagatcaggaagagagccctctggtggagatggagatggatatggtcgtgggcagagatgatcaatcgtttgagttgagctttgattatgaaacgtgtgaagaggtgaaggtttgtgatttgggattggggaatgaattaggagcgaagaaagagaatgatgatgaggtgaaaaagaacaagatttcgttgcagctagactatgaggcggtaatcatcgcctgggctagccaaaaatctccgtggaccaccgctgacaaaccaaacttggaccctgatgagtgctggaaacaatgcatgggaagttgcgaaacggcatatcatcatccttgcggtgaaatgggtggatttgggattcatccagtgataatagacgggggcagagaggcgagggtgtcaagatacagagagaagcgccgaacgaggttgttctcgaagaaaataaggtacgaagttaggaaattgaatgctgagaagagacccagaatgaaggggaggtttgtcaagagggcttcctttgcaccaccaacatttcctttgctaaataaataagagctacatttgttgttctgccactaaagttttgttagtatttgctaagtatagttttgcgacgtgatatcgcttttcatttcattttcttatttctttgtatat

SEQ ID NO: 19996 - DNA, 828 bp, Glycine max
  Clone ID: LIB3167-027-C1_FLI
ctcttctctctccacccaaaccctaactcccgaccctgttcccctctcgtatccgtcatgaaaggaggaaagtccaagaccgaatctaagagagccgatcccaaacttgctgtgaataagaagggagccgccaccaaggctaggaaacccgccggcaaggggaaggcagcgaaagaccctaacaagccaaagaggcctccaagtgctttcttcgttttcatggaggagttcaggaaggtattcaacaaagaacatcctgaaaacaaagcagtgtctgctgtgggcaaagctgctggagcaaaatggaagaccatgtctgatgctgaaaaagcaccttatgtggcaaagtctgagaaaaggaaagtggagtacgagaagaacatgagagcctataacaagaaacaggcggaaggtcctactggtggggatgaagaagaatctgagaagtctgtatctgaggtgaatgatgaagatgatgatgaggaaggcagtggcgaggaagaggatgacgattagagaatggactgataattgcatttatgtaggttctgatgattttgatcatctgttgtaggtggtctggtcatttcctgataaacatatttcttgcttccaaaaaatatttccctgctccctccgtaaattggttgtctttccaaaacgtgaatagtttaaagaagggagttctttatttgtacttctaaatccaactgtttagttaaggggtgtttatctcttgtagagcttttagtttgatttagagttttcttgttgaaatctggttaagtttgtatcaatataattggcttatcattcgctttctgctgt

SEQ ID NO: 19997 - DNA, 715 bp, Glycine max
  Clone ID: LIB3167-051-C7_FLI
ggggcacggaggatcgcagtgttcagtgcaccaccacttgggtgtttgccatctcagagaacgctggcaggaggtttagaaagaaaaattgtagtcaatattaacaacgcagtacagatatataacagcaaattgtcgaaggagctggattctctcaatcacaaccttcaagatagcaggatagtttacattgatgtttacaaccctctctttgacatcattgtaaactacaataaatatggctataaagtcggagacaagggatgctgtggcacgggcacaatagaggttgtgttattatgcaaccgtttcactccattgtgccccaacgatttggagtatgtgttttgggacagttttcatcctactgaaagcgtttataaaaggctcatagcttctcttattggaaaatatttggataaattcttgtgagcttgctacgtacacccatcaaattcattctttacaaatttagtagtaattgatatttgtaattcttaagaactacgtagagatttttatattcttaaaaatcacgtgttgtcaacacttttagaatgatttttctattttctttttaaataaaacctcagacttagccaatttctgagggatggttaatttgccactttgctatcaggatcaaataacgacgaatcatgtgtgtacaaaataaagcatgtaataaatttaaaatgttgcatacagtttatat

SEQ ID NO: 19998 - DNA, 1226 bp, Glycine max
  Clone ID: LIB3167-077-G10_FLI
ggctgttccaagaaagcttggggaccaggtggactccacaggagaacaagctctttgagaatgctttggctgtgtttgacaaggacactccggaccggtggctgaaggtggcggccttgattcccggcaagacggtcggcgatgtgatcaaacagtatagggaacttgaagaagatgtgagtgtcattgaatcagggtttattccacttccagggtacactgctgctgattcctttacattggagtgggtcaacaatcaaggatttgatgggctcaggcagttttatggtgttactggcaaaaggggtgcttccactagaccatctgagcaggagaggaagaaaggtgtgccatggactaaagaggagcacaggcaatttctgatgggtctgaagaagtatggtaaaggagactggagaaacatctctcgcaattttgtgaccacaagaacaccaactcaggttgcaagtcatgctcagaagtatttcatcaggcaactaagtggaggaaaggacaagaagagatccagtatccatgacatcacaatggtgaatctcccagaagcaaaatctccttcatcagagagtaacaacagaccctattcaccagatcactcagtgaaggatgtgaatccaccatcccagaatcaaagattgtctactactatggtaattaaacaggaacatgattggaaattgccatgtgaaactgtgcctatgcttttcaattccacaaatggaaacatgttcatgacaccactttgtgggatttcttcatatggatctaaaccacttcaggagcagtatttcctcagtggatgccagtttggaccttatgatacaattatgcaaatgccgtccatgcaaaatcaatgaactatatagaatgcagggattaaagttaaggtactaaaatgctaaaccttattcattgatgttggattgatttttagatgcttaagggtggttttatgtaaatatttcaaggattcacgagtttccttatcactcaatctttgaagagccttcatattgtattctgatattaaatgtgctggcaccaaagatgcaatatcagagtttggcagtgatatgcatcttccacctaggcagaaaggattatctgtaaaacgtataggacgagaggagttaccttgagtttgtgattattcacttttttttaaatgcttgatgcttcaaataaatataggcctttgcagctttgct

SEQ ID NO: 19999 - DNA, 483 bp, Arabidopsis thaliana
  Clone ID: LIB3168-010-D12_FLI
aatcaaactaccctttatcacttcttctctcttacagatatatgatattgttcgttataaactgcaccggctcaagaaaaagttcaaagatgaactagaagacagaaatactgttcaggagtatggctgtcctaactgcaaaagaaagtaaagtccactattctttatgtttttaaatctttacatggtgagttgtattattttcactaaacctgtatagattctcatttctggtatagatataatgcactggatgccctgagattaatttctatggaagacgattcttttcattgtgaaaattgcaatggtgaacttgttatggaatgtaacaagctaatttccgaagaagtagtagatagaggtgacaatgcaaggagacggcagcgggagaaagtaaaagtttggcttcaggatttggaggtctgtgtttactgttttagcggctatttcaatgaaagtatgagaaaaacacaaattgat

SEQ ID NO: 20000 - DNA, 1801 bp, Arabidopsis thaliana
  Clone ID: LIB3168-010-G9_FLI
ttcttctgaatcatatttgatttttatcttctctctcattttttaaaattattttttctttatggatctttgtagctttagcaaaaaccgaccagctgagaagatgtcttcatcgtacaacacaattgctttgtcctccactccgaccttcctcctctcaagtgccgctgccggacccggaccaaacaactttaaccgtcaagaggctgcgatgaccatggttcaacaacaacccacttcctccgttgctccaccacccaagaagcgaaggaaccaacccggaaacccaaatccagatgctgaagtgatagcgttatcgccaaagacgataatggcgacgaacaggttcctatgtgaagtgtgcaacaaagggttccagagggaacagaatctgcagctccacaggaggggacacaaccttccatggaagctgaaacaaaagtccaacaaagaggtgaggaggaaggtgtacctttgtccggagccctcgtgcgtccaccatgaccccgcacgtgctctcggagacctcaccggaatcaagaagcattactatcggaagcacggtgagaaaaagtggaagtgcgataagtgctctaagcgttacgctgttcaatctgattggaaagctcactctaagacctgtggtaccaaagagtatcgatgtgactgtggtaccatcttctctaggagagacagttacatcacccacagggcattctgtgatgcactcatacaggagtcagcaagaaaccccaccgtgagcttcacggcaatggcagctggtggtggtggtggcgccagacatggcttttacggcggagcttcttccgctctctctcacaaccatttcggtaacaatccaaattccggtttcacccctctagctgctgcaggctacaatctgaaccgttcatcttccgacaagttcgaagactttgttcctcaggccaccaaccctaatcccggtccgaccaacttcctcatgcaatgctctccgaaccaaggactgttagcccagaacaatcagagtctcatgaaccatcatggtctgatcagcctcggtgataacaacaacaacaaccacaactttttcaacctcgcatactttcaagacaccaagaattctgatcagacaggtgttccttctctgttcaccaatggtgctgataacaacggcccatctgctttgcttagagggctaacttcttcatcttcgtcaagtgtggtcgttaatgactttggagattgtgatcatggaaaccttcaaggactcatgaactctctagctgcgacaacagatcaacaaggccggtcccctagccttttcgaccttcatttcgcaaacaatcttagcatgggtggctcggataggttgactttggactttcttggtgttaatggaggaattgtgagcaccgtcaatggccgtggtggtcgtagtggtggacctcctctggatgctgagatgaagttttcacacccaaatcatccatatggcaaagcttgagatgatcgttatctatctacaaatcatccaaatcatcatcatctagatatgctattaagttccttggagattttattctagataaagctagatatccaaatttaagctttctttcttttgctgttttcgactattaagggtaaggattgagctttgggatttttcattataaatttcttaagctcttatttttttcttaatgtcatggtgggaggctctagagtttttccttaataatatattgtaatcttgaatcataaatatatttcatgaaaagtaatttgttcactaatt

SEQ ID NO: 20001 - DNA, 3312 bp, Arabidopsis thaliana
  Clone ID: LIB3168-018-G10_FLI
tctctctgaaaatctcttctccttcctcaaaaaccgatactctcttcttcaatctccctctcttatctctccaagctaattctccaaaccggcttttctcaaaccctaacgtacggattagggtttttgttcggtgattccaaaggttacgactttcaatttctccaccaaattctctgtaaaggtgacgatgaatgagaaaggagaaaagacttgtcctctatgtactgaggagatggacttgactgatcaacatcttaaaccttgcaaatgtggttatcagatatgtgtttggtgttggcatcatattatagagatggctgagaaagataagacagagggtcgttgtcctgcatgtcgtacccgttatgataaggaaaagattgtagggatgacagtcagctgtgaaaggttggttgctgaattttacattgaccggaaaaagtcacagaaggcgaagcctaaacctgcggagggaaggaaagatctaactggtgtgagagttattcagagaaacttggtttacgttatgagcttgccttttgacctggcagatgaagatatgtttcagcgaagagaatactttggtcaatatgggaaagtcgtcaaagtagcaatgtctcggactgcagctggggctgtccaacaatttccaaacaatacttgcagtgtatatattacttactccaaagaggaggaagcgattcgatgtatccgatcagtacatggatttatattggatggtagaaatttgaaggcatgttttggaaccatgaaatattgtcatgcgtggttgagaaacatgccttgctccaatgctgaatgcctttatttgcatgagattggtgcccaagaggatagtttctcaaaagatgagaccatatcagcgcacatgaggaaaatggttcaagatattactggttggagggatcattatgtgcggcgttcagggagcatgttacctccaccagttgatgattatgttgataatgagtctagcacaagaattattccaaaagttgttttgaataatgtacatagtgccgcgaaaaattctcctccaaatgacagcaacagtcactctgttactcttcctgctggagccatgtggggaatgcattcttcggtaccgaatacaccgtcttctagggaacccttaagagacaaatctgctacagtttcatctgcggttgcaataaatcctacacagatctcttctcgtagtgatgaattaaggaagccagcattagaggctgcaggtggaaatgttttgaaaccacaaagcctattggatgggaaaactgattttcctgagctttcctcatctaataagacccagatcagtaatagtaggaacgtagtctctgccagtgtggataatagtagagctattagtgagccatcagattgcacagaccttccagaacatacttctctgtctaatggaaacaaaatgattaacagaagaatacagaatggatgcagcaatgttgtgtcagtggatgcagatagtgttgtggatggctatcatggaataacaagatctgacaaatcacatattgatcatgcttccataaagccaactcttacagaggtgtcccaagactatttacagcgttgtgtcgatgaacctagagaagttcagccattacaaaagtctggtagaactaacgcaaatgaggttggtgtctcgagagaagaagttaatagaggtacttctttgatgtcaccattgggaacaggtcattatcttgaagctgaggatgatatatctttgttctatagacaaagactcaaggatccggaagttcttagctgtcagtccaatggtttcctacgcccgtcaaattgtatgcagccttgttcatcccagtataaggctgagcatgatgaaaccaggactgtgtttggatcttcctattctgacagcaggggaagtaatatagcacccatctcaaatggatataccgagatgccacttagtgagcccaatcagttaaacggcagtcttaaccattctattttggttccagacaaagcaagggacacacagccaattgaaaattgtttcgttgactcccatgaaagcccaagtgaaatagatgacaggataattgcaaatataatgtctttagatcttgatgaatacttaacttcacctcataactatgcaaatccatttggggaaagtgacgaagaggccaggtctcttaagctagccagttccagtaaagttgaggataatcaatcccggttttcttttgccaggcaagaggaaccaaaggatcaagcttttgattcttacaacgcctctaaccagatgtcacgtggcaatgacttctaccagaattcttcagaacgacagagtcctaatatgggtatgtttgggacctataatggtctttcatcttgttatcgcaggggactagactacgtcacggaaagctccactttgccctcatcctataaacctacttctgttccaagatgtccggtttcagcaccacctggcttttcagttccaactccaagtcgacctcctcctccaggcttctcctcaaatgggagagaccatcagatgattgatggcttttcaggaaactctcgtttttctgattcaattgcgtacggtaatcactatcagcagtcacttccgattgaaaatgtgagggatgttcaatacatggatcctgccattttggccgttggtcaaggctttgagaatgcaagcctagatttcagatcaaactttcaaggaaacacaaacatgtatggaagcgcggcaaagctccaacaacaacaacaacaagcggtaatgcagaaccctttgtctatgcagaaccctttgtcttcgcatcaaaactgtagattcactgattctttgggaatggcaccaaggtttatagatcaatctcaaggcaataacttactgactagaaatatggccttgcctaatggtcactggaatgggttgatgagtaacgagatccaaactcgaaacagacttcaaaatgagagacttgttggttcgactaattggatccctggttacaatgggacgttcaggatgtaaacaccgtctgcggaatctgtgagcttggtttgcctttggactgactgataggaaccatcatcggtttggtccaggagccgtgcttaaatcacctcggccttaaatcttttcttctggttacttagtagtaaagttggtgtaaaaaaagctttaggaaggttttttattcgtttatgcaattctataacatttactcttggttttgaagtatgtcaaatatggattttcgaggttaacat

SEQ ID NO: 20002 - DNA, 294 bp, Arabidopsis thaliana
  Clone ID: LIB3168-026-H8_FLI
attaatggttttgatcttccaaccagatcttcttctctatctcttcgacaaacccttttttctgggttcttcggagaggtgatttatcaccaaaaaaaagattttaaaagtctaaatccttttttctttctttccttcaacatgcctttaccttggaagaaatctaaatctagtcggatctctagattcgtatcagactttcaacaatctcctaaacatggtggatctctcgttgttgaaactggtttcccaacttctttaatcgatctctttgttaagaatcgcgatcgtctc

SEQ ID NO: 20003 - DNA, 1272 bp, Arabidopsis thaliana
  Clone ID: LIB3168-028-B4_FLI
aataaaaaaatggttttaagtaaatagaaagaaaaaaaaaaaggaaaaaagagtaatcgaaggagctgtaatcttcacaaagagcacttgattataacattgaatcttttgcaaaaaagataaaaatcttttcaagaaactgatccatccaaaatactatcttgtcttcactcttcaaaattcctgtcattaccctctcgaaccctttctcttttcgaatctccacttttttttctatcttctgcttcttcttcttctctcttcaatgattccactctcacaaaatctccatgactacaaaacgcatagacagagatttcccatcttccgacgatccttcctccgctaaacgccgtatcgaattccccgaagaaacactcgaaaacgacggtgctgccgcaatcaaactccttagcttactcctccaatgcgccgaatacgtagctactgatcatctccgtgaagcttcaacacttttatccgaaatctccgagatatgttctccgttcggttcctcgccggagcgagtcgtcgcttacttcgctcaagcgctacaaacgcgcgtgatcagctcttacctctccggcgcgtgttctcccctctccgagaaaccactcactgttgttcagtctcagaaaatcttctccgccttgcagacttataactccgttagtcctctgatcaaattctcacatttcacggcgaatcaagccatttttcaggcgcttgacggagaagattccgttcatatcatcgatctcgatgttatgcaaggtcttcaatggccggctctatttcacatcctcgcttcacgtcctcgaaaactccgatcaattcgaatcaccggatttggttcctcctccgatctactcgcttcaactggccggagactcgccgatttcgcatcatcgttaaacctccctttcgaatttcatccaattgaaggcataatcggaaacctaatcgatccgagccaactcgcaacgagacaaggagaagctgtggtggttcattggatgcaacaccggttatatgatgttacagggaacaatctcgagacgttggagattctacggaggctgaaaccgaatctgatcacggtggtggagcaagaattgagctacgacgatggaggaagctttttaggaagattcgtggaggctttgcattattatagcgcgttgtttgacgcgctaggagatggattgggtgaagagagtggtgagagattcacggtggagcagattgttttggggacggagataagaaaca

SEQ ID NO: 20004 - DNA, 1175 bp, Arabidopsis thaliana
  Clone ID: LIB3168-029-D4_FLI
tccaagtgccccaccaaatgcttcaatcctcttccactacacaaaaaaacaacttaatccctttatacccttttagccaaaaccctcgctaaaagccaatccctcaatataaaataacaagtagaattgatctgcctatatataagattttgagacgaaataagatctaaaccacaagaaagaaagtaaacataaaagtatgggaaggtcaccgtgctgtgagaaagctcacacaaacaaaggagcatggacgaaagaagaggacgagaggctcatcgcttacattaaagctcatggagaaggctgctggagatctctccccaaagccgccggacttcttcgctgtggcaagagctgccgtctccggtggatcaactatctccggcctgaccttaagcgtggaaacttcaccgaggaagaagacgagctcatcatcaagctccatagccttcttggcaacaaatggtcgcttattgccgggagattaccgggaagaacagataacgagataaagaactattggaacacacatatacgaagaaagcttataaacagagggattgatccaacgagtcacagaccaatccaagaatcatcagcttctcaagattctaaacctacacaactagaaccagttacgagtaacaccattaatatctcattcacttctgctccaaaggtcgaaacgttccatgaaagtataagctttccgggaaaatcagaaaaaatctcaatgcttacgttcaaagaagaaaaagatgagtgtccagttcaagaaaagttcccagatttgaatcttgagctcagaatcagtcttcctgatgatgttgatcgtcttcaaggacatggaaagtcaacaacgccacgttgtttcaagtgcagcttagggatgataaacggcatggagtgcagatgcggaagaatgagatgcgatgtagtcggaggtagcagcaaggggagtgacatgagcaatggatttgattttttagggttggcaaagaaagagaccacttctcttttgggttttcgaagcttggagatgaaataatattgtcaaattttaggcgtaactgtacaaaacttttgccttgataatttgaaaagtaaatcttcaacttgtatgagaaatttaactgctgaattataatatatagaatttgttttttttttctttt

SEQ ID NO: 20005 - DNA, 1073 bp, Arabidopsis thaliana
  Clone ID: LIB3168-030-D11_FLI
ctgcgttatagatacttacgcatattccatgccaggagcgttaacatggataggaacatttgtatccaaccactctatttgtagaccactttgctgcgtgtgcaactctcgatgcaagctccctttcgttcgtacgcttcccgaggacggagctgatctatacttttgttctttagaatgtgagaagaaaattgatcaggaacgtttcgaattttaaaattatgttctttactatgtttagaaaactatttatttatagatgataatgtttgctagcttgaatgactcgcaaatttggtaaaatttgtgaggaatctgggtctgttaaattattacaagtccctacaataacatttggttgtgtacttgtgttagtgtaatatatatatatatctcattgaaccctagggtgcattagtgtttgccaaataaaaaccagaaaaaatatcaacttatttatggatgtaagattggaaaaggttggatcaatcttgccagtcaatccactaaatgtttaagttcctacaagtcgaaatgtcaatgacaaaaacagagacgtggaagtgagaacagagcagagcaaaacagaacatagcagagtaagtcagtcagagcaggttgtgttgtagaatcacattagttctctgatagagaagccaaaaaactcagtttgtgttgttgaacttggaacagaatgagaacaagttaatcactaaaaaatgtttgtgtcaccgtcatgttgcgaccttaaaacagagccccctaataattttttgttacactggttctattgaatctattttatggaaaaactattacacaatttggtttaccaatacattgatccctatcaaggaagctatggtttcaggcactgagcacactgaagagtaatagagattaacaatgcaaacatcatcaagccatgtaattctgcatttttcaacttaaaaagtcaaaaaaattatgatttttcattcaaccaaagaaaactgatgctccattattacaacaaaactgtttccgtgtaattccacagaccattacaattgattcttcagactatctaggag

SEQ ID NO: 20006 - DNA, 1404 bp, Arabidopsis thaliana
  Clone ID: LIB3168-030-D12_FLI
cagaaagtgaaaaagagagcgagcgatgaacagtatcttctccattgacgatttctccgatcctttctgggaaactcctccgattcctctcaatcctgactcttctaagcctgttacggcggatgaagttagccagagtcaaccggaatggactttcgagatgtttctcgaagagatttcttcgtcggcggtgagctctgagccacttggtaacaacaacaacgcgatcgtcggtgtttcttcggcgcaatctcttccttctgtttccggacagaatgatttcgaggatgatagtcgatttcgtgatcgcgatttgggaaatttggattgtgctgctcccatgacgacgaagacggtgattgttgattccgatgattatcgtcgtgttcttaagaacaagcttgagactgagtgcgctactgttgtttctcttcgggttgggtctgtgaagcctgaagattcgactagttctccagaaactcaacttcaaccagttcaatccagtcctcttactcaaggagaacttggtgttacttcttccttaccagctgaggtgaaaaaaactggtgtatcaatgaagcaggttactagtggatcgtcgagagaatattctgatgacgaggaccttgatgaagagaatgaaaccaccggttccttgaagccagaggacgttaaaaaatctagaaggatgctgtcaaatcgtgagtcagctaggcgatctagaaggagaaagcaggagcaaacaagtgacctcgaaacacaggttaatgatctaaaaggtgagcattcatcacttcttaaacaactgagcaacatgaatcacaagtatgacgaggctgctgttggcaatagaatactaaaggctgacattgagacattaagagctaaggtgaaaatggcggaagaaaccgtgaagagagtaacaggaatgaatccgatgcttctcggaagatcaagtggacataacaacaacaacagaatgccaataactggtaacaacaggatggattcttctagcattattccagcttatcaaccacactcaaacctaaaccatatgtcaaaccaaaacatcgggatcccaaccattctacctccaagactcggaaacaatttcgctgctcctccatcccaaaccagctctcccttgcagagaattagaaatgggcaaaatcaccatgttactccaagcgccaacccgtatggctggaataccgaacctcagaacgattcagcatggccgaaaaaatgcgtggactgatcaaacaagaagcgggtttcgcactatattaatgtctatgcatctgtaatttgtaagtgttattaagttacgaatcatgagaaaacatcttgtgaaaatacagtctcatggcttatatatatatataagctctgtcttataac

SEQ ID NO: 20007 - DNA, 718 bp, Arabidopsis thaliana
  Clone ID: LIB3168-033-C1_FLI
ttatcgtctcctttgattgaaaagcctttaactaagttctctggtctcattgtatcttcgttttggaaacagaaaccttctgatggacaggaacacttggttgatgatgttggagctggttttatacctggacatggtagtcagcagccatcttcttcagaacataatgtggatcgaacaattgactcgccaggccaggaagaaaccggaatgactggtgtttctaaagtaatcagagctgaccagaaacggttcttctttgatcttgggaacaataacaggggccatttcttaaggatatctgaggtaatcttggaagaacaatcttttgctggcttatctcttgagagcttgtatttaccatggttttaacattaaagcatttctcaatataggtggcaggttctgacaggtcttccatcattctaccgttatcgggtcttaagcagtttcacgaagtaattggtcactttgtggagatcaccaaagataaaattgaaggtatgactggtgcaaatgtcaggacagttgatcctcctcagagataagtattgattctcttagaggatggaaattttcaatcctctaaccatttgaatctggcaacttcaagtcgactgcctgatcgcggtgtgcaatagtttcacgtaatatctctcgccccttcacatcttctaaaaataattcagcaggatcatcatttgccttaatagtagat

SEQ ID NO: 20008 - DNA, 2131 bp, Arabidopsis thaliana
  Clone ID: LIB3168-035-H3_FLI
atatatatagatacctacatatatatatctctatgtctttgttcatcatcagttatataggtgatgtagatagatggacaaaaaaacagcgtaagacctagtttctgacttacatatgttttaaattctttgtctgaatcattacaggatccgagagagagagctctggaacgatattaacatatatcatgaagaaaaagattgaagtattgatatgggaataactaaaacttctcctaatactacaattctcttgaagacttttcacaataattctatgtcccaagattatcatcatcatcatcatcataatcaacaccaaggaggtatcttcaacttctctaatggattcgaccgatcagattctcccaatttaacaactcagcagaagcaagagcatcaaagggtagagatggacgaggaatcttcagtcgccggaggtaggattccggtctacgaatcagccggtatgttatccgaaatgtttaatttccccggaagcagcggtggaggaagagatctcgacctcggccaatctttccggtcaaataggcagttgcttgaggagcaacatcagaatattccggctatgaatgctacggattcagccaccgccaccgcagccgccatgcagttattcttgatgaatccaccgccaccgcaacaaccaccgtctccgtcatccacaacttccccaaggagccaccacaattcttcaactcttcacatgttacttccaagtccatccaccaacacaactcaccatcagaactacactaatcatatgtctatgcatcagcttccacatcagcatcaccagcagatatcgacgtggcagtcttctcccgatcatcatcatcatcatcacaacagccaaacggagattgggaccgtccacgtggaaaacagcggaggacacggaggacaaggcttgtccttatctctctcatcgtctttagaggctgcagcaaaagcggaagagtatagaaacatttactacggagccaattcttctaacgcatcacctcatcatcaatacaatcaattcaagactcttcttgctaattcttctcaacatcaccatcaagtattaaaccaattccgatcatctccagctgcttcttcctcttccatggcagcggtcaatatcttaagaaactcgaggtacacaacggccgcgcaagagttgttggaagagttttgtagtgttggaagaggatttttgaagaagaacaaacttgggaacagctcaaaccctaatacttgcggtggtgatggtggtggcagctctccttcgtcggccggagcaaacaaggagcatcctcctttatcggcgtctgatcggattgagcatcaaagaaggaaagtgaaactactcaccatgcttgaagaggtggaccgacggtacaaccattactgcgagcaaatgcagatggttgtgaactctttcgacatagtaatgggccacggtgcggcattaccgtacaccgcattggctcaaaaagctatgtcaagacattttagatgccttaaagatgcagttgcggctcagcttaagcagagttgcgaacttcttggggacaaagatgcagcgggaatctcttcttccgggttaacaaaaggtgaaactccgcgtttgcgtttgctagagcaaagtttgcgtcagcaacgtgcgtttcatcaaatgggtatgatggaacaagaagcttggcggccacaacgcggtttgcctgaacgctccgtcaatatacttagagcttggctcttcgaacatttccttcacccgtatccaagtgatgcagataaacacctattggctcgacagactggtttatccagaaatcagaggaacaccatgtgttttgccttccactcaccattagcttttcttgggattcgtctttaaattattatagcatatttatatatacaaaaacataggagagagagaaagagatcgacattaaagacgcaaaagggtccatttttcctcaagtacatcaaagtttgcagctttcaattgtcccaaagaaaccctcaatttcttgtatccctacattaaataaccaaatgacaaataaacaaaaagagccctcaattttatttcgatattataatgattcaactagtg

SEQ ID NO: 20009 - DNA, 916 bp, Arabidopsis thaliana
  Clone ID: LIB3168-044-C2_FLI
cgaaagctctcttcctttccctttttggcgctcaatacaatcatgacgttagagagttacgccggcgatgttcacacggtaccacaatcggagaactcgatggaggagagaggcggcggtgagcttttcgtgccacctcttaacttcgctatggtcgataatggaattttccgttctggttttcctgaacccgtcagtttcagctttctccagtctttgcgtctcaaatccatcatatatttgtgtcctgaggcatatccagaggtgaatagagagtttgcaaaatcaaatgggatccaagtttttcaatttggaattgaaagatgcaaggaaccatttgttaatatccctgacgaggtaatccgagaagccttacaagtacttctagatacagagaatcatcctgtcttgattcattgcaaaagtggaaagcatcggacgggatgtcttgtaggttgtgtgaggaagattcaaagatggtgtttgtcttctatcttcgacgagtaccaaagattcgcagctgcgaaagctagaatctcagaccagagattcatggagctctttgacatctccaatctaaagcatacaccactttccttctcatgctccaagaggtatactaatactattgattactgaagaaaaaatgtataactttgtgttgaatgcaacttgtagttttgaagctagatgaaaatgggagattttgatctttcaataaaagtccgtttattccaaatcaaataaataaaaattggatcggatggttgtagaaaaataagagacactcctttaatccttttaaatgctatcatgtagaacaagtttgtcataaatgttggtactatattgttattttttgtattcaagtgtatccaacttggtaatgttcaatctaaaaacgaattaccaaatt

SEQ ID NO: 20010 - DNA, 1391 bp, Arabidopsis thaliana
  Clone ID: LIB3168-044-E11_FLI
ataaaagccattttgatttgtcgttttaatgccttccatttttaaaaagaaagattactaacgccgactctctaaaactctctcaaaccataaaaaatattctccgatcatcattttaatggagagtacagattcttccggtggtcctccgccgccgcaaccaaacctccctccaggattccggtttcatccaacagacgaagaacttgtaattcattacctcaaacgcaaagcagattctgttcctttaccagtcgcgatcatcgccgacgttgatctttacaaatttgatccatgggaacttcccgcgaaagcttcgtttggagaacaagaatggtattttttcagtccaagagatcggaaatatcccaacggagctagacctaaccgagctgcgacttccggttattggaaagcgactggtacagataaaccggtgatttcaaccggcggtggtggtagtaaaaaagtgggagttaaaaaggctctagtgttttacagtggtaaaccaccaaaaggagttaaatcagattggattatgcatgaatatcggttaactgataataaacctactcatatttgtgacttcggcaacaagaaaaactctctcaggcttgatgattgggtgttgtgtcgtatctacaagaaaaacaatagtacagcatctagacatcatcatcatcttcatcatattcatctagataatgatcatcatcgtcatgatatgatgattgatgatgatcgattccgtcatgttcctcctggtcttcacttcccggcgattttttctgacaataatgatccgacggctatatatgatggtggcggcggcggatacggaggtggaagttactcgatgaatcattgtttcgcatctggatcaaagcaggagcagttgtttccaccggtgatgatgatgactagtctaaatcaagattccggtattggatcgtcgtcgtcacctagcaagagatttaacggcggcggcgttggagattgttcgacttctatggcggcgacgccgttaatgcagaaccaaggtgggatttaccaattgcctggtttgaattggtattcttgaaaacaatttacgatgaagaatttttaaaatttgtgtatatatatacggtttgagtgattaggggcattgggggatttatttacggttgattattattgtagtgttatagaactaaggagattaaattaaatagattggaggagaggtataaggtaacatatagaaattatacaacaatagtttaaatattcttttcttttctttttcatgttattatttttactatgtataggtgatgattatacttagatgtttgtagcttgtataaattaatgcatgcatatatataaaaatatattaacagttatag

SEQ ID NO: 20011 - DNA, 678 bp, Arabidopsis thaliana
  Clone ID: LIB3168-045-F9_FLI
agcgatatgtgtcttatccgcaagtggtgctgtctctactgcaactcttcttcagccagcaccttctcatggaactattatatacgagggtctattcgagctcatatctctctcaacttcttatctgaacacaactgacaatgactacccaaaccgcactggaagtctagcggtctcacttgctagccctgatggtcgtgtcattggtggtggaattggaggtcctctaatagcagcaagccaagtccaggtcattgttggcagcttcatttgggcaattccgaaagggaagattaaaaaacgtgaagaaacttctgaagatgtccaagatactgatgctttggaaaacaacaacgataacacagcagcaacgtcacctcctgttcctcagcaaagtcagaacattgttcagactcctgtaggcatttggtcaactggttcaaggtcaatggatatgcatcacccccatatggacattgatctaatgcgtggatgattcatgtatatataagcattgaatctaggagaagaagaagaaacttgagctaacctccctgaaacaaagtagtctattggtattgtttaggaaagaaaaagacaattagtaagtttaggaatttctgcgtgttttcgagctttcagttagttgatttggtctcttgacttgttatgaatggg

SEQ ID NO: 20012 - DNA, 1015 bp, Arabidopsis thaliana
  Clone ID: LIB3168-047-F3_FLI
cttcatcttcatgaccggataaactcttagagaaagattcaaagtgattatctttgtggatccctccattgctatgtggaatttagcttcaaaatcgatcagagaaggttttatatcgaagggagaagaagctgctacaaaaccaagaagagctactttagatagatcaggagatggaagaaagacaacaaaggaagaaaaattggagtgtcccatttgctgggaatcattcaacgttgttgagaatgtaccttatgtcttatggtgtggtcatacaatctgcaagtactgtctcttagggcttcaacgtgccattgtcatcaaatcctctgctttaccattccagcttcccttcttcgttgcttgcccttggtgcaatattctctctttaaggctggtttgcaatggaaccatcagatttccttccaagaacttttaccttctgtggatggtagaaagcatgaatggctccagatcggaggcacccagcgacaacaaaagggttgcttcagggcagagagacttgagaaataggtgtgatggagtgagtaataccgccttgggtgatgaagggttgctggacaatcgcagctggtggaatggtgtgaccagaggattcttcagaactgggaggctccatgactcggtacgtaagtcaatggctcttgttgctcatttgttggctaagtttcctctggtagtcatattcctgttgatggctttatatgcaatccctgtgagtgctgcagttctcggggtttatttctttgttacgtttgctttggctgtcccgtcgtttctcgtcctttattttgccttcccgagcttaaactggctgatcagagagattgcaacctgactcattgtactgtttctttcttcctgtatgtttcctgacttgtaagaaacacgagatagagccaacgttgtttacactcaatatagacaagaagaagagaagatctttattttcagattgtgtctctgtacattgcgaacaaaactacctttctct

SEQ ID NO: 20013 - DNA, 1101 bp, Arabidopsis thaliana
  Clone ID: LIB3168-051-B10_FLI
agaaatcttctgagcgaaattctgacaaaagagatgatggaatgggataatcagctacaacccaataaccatcactcttctaatcttcaagggatcgacgttaatggcggctccggcgccggaggaggaatgtacgtgaaggtgatgaccgatgagcagtatgaaactctcaggaaacagattgctatttacggcaccatttgtgagcgtcttgttgagatgcataaaactctcactgctcaacaagatcttgcaggagggagaatgggaggactatatgcagacccaatgatgtcatctttaggtcataagatgacagctagacaaaggtggactcctacgccagtccagcttcagattctggaacgtatattcgatcaaggcacgggaacaccgagcaagcagaagatcaaagacataacagaagagctgagccaacacggccagattgctgaacaaaatgtctataactggttccagaaccgacgtgctcgatccaagaggaagcagcatggtggaggttcttctggaaataataatggtgagtctgaggtagagactgaagttgaagcattgaatgagaagagagtagtgaggccagagagtcttcttggtcttccagatggaaatagcaacaataatgggttagggacaacaacagcaacaactactgctcctaggcctgaagatctttgctttcagagccctgagattagctcagaccttcacttgctagatgttctatcaaacccaagggatgagcatcttgttggaaagatgggactggcggaaagttacaacctttatgatcatgttgaagattatggcatgtcaggctgattgaatacaagctgaggaaacttctaattatcagagagatcaatgaaatggatttggtagtcagtcataagcagtattagacttttgtttttcttaaattgtttctttcagggcttattaaagaaacaagtagtttatcttattaatcattttcagagaaacatttacatggattgttgaatcgtcttgtgatgcttgctttgataatttctgcattcagaacgatttttacatccttaaatgaattatactgtaagaaat

SEQ ID NO: 20014 - DNA, 1899 bp, Arabidopsis thaliana
  Clone ID: LIB3168-057-F8_FLI
ctaaaacgttaacgcagtctgacgctaataacggcggtggtttctccgttccacgttattgcgccgagacgattttcccgcggcttgattactcggcggagccaccggttcaaaccgtgattgctaaagacatccacggcgagacttggaaattccggcatatttacagaggaacacctcgccgtcatctcctaaccaccggttggagcactttcgttaaccagaagaaactaatcgccggagactcaatcgtcttcctccgttctgaatccggtgacctctgcgtcggaatccgccgcgctaaacgcggcggtctcggatctaacgtaggatccgacaatccttaccctggattctccggtttcctccgtgacgacgagtcaacaacaacaacatcgaagctaatgatgatgaaacgcaacggaaacaacgacggaaacgccgcggctacagggagggttagagtagaagcagtagcggaagcggtggcgcgtgcagcgtgtggacaagcgtttgaggttgtttattatccacgcgctagtacaccggagttttgcgtaaaagcagctgatgttagatcagcaatgaggataagatggtgtagtggtatgcgttttaaaatggcgtttgaaacagaggattcttctagaatcagttggtttatgggtactgtctccgccgttcaagtcgctgatccaattcgttggcctaattcaccatggcgtctccttcaggtagcttgggacgaaccggatttgttacaaaacgttaagcgggttagtccgtggttagtcgaattggtatcgaacatgcctacaatacatttatctccattctctccgaggaagaagattaggattccgcagccatttgagtttccattcgacggtactaaattcccgattttctccccgggattcgccaacaatggcggtggcgagtccatgtgttatctgtcaaacgacaacaataatgctcctgcaggaatacagggagccaggcaagctcaacaactcttcggatcaccatctccgtctttgttgtctgatctcaatcttagtagttacaccagtaacaacaagttacattctccggcgatgtttctatcgagtttcaacccgaggcatcatcattatcaggctagggatagtgagaatagtaataacatttcgtgttctttaactatggggaatcctgctatggttcaggataagaagaagtctgttggttcggttaagactcatcagttcgtgttgttcggtcaaccgattttaaccgaacagcaagttatgaaccgaaaacggtttttggaagaagaggcggaagcggaggaggagaaaggtttagtggctcgtgggttaacatggaattatagtttgcaaggacttgagacgggtcattgtaaagttttcatggaatctgaggatgttggacgcacactcgatctctcggttattggctcgtaccaagaattgtaccggaaattggctgagatgtttcatatagaagagaggtcggatttgttgactcatgttgtgtaccgggatgcaaatggtgttatcaaacgtattggagacgaacctttcagtgatttcatgaaagcaactaaacggctaacaatcaagatggatattggtggcgacaacgtgagaaagacgtggataaccggaatcaggactggtgaaaatggtatagacgcttctacgaagactggtccgctcagcatcttcgcttgaacttgaagcatattgaggaataagcagtggcctttgttttgaacctaattttatttctgtctttaattctcttttttccctattttaaatcctttttttgctggtcttttgtgtgtaacaaaccattcccaagtgttaccaaaagtactctaattggtatttg

SEQ ID NO: 20015 - DNA, 2253 bp, Arabidopsis thaliana
  Clone ID: LIB3168-066-E8_FLI
ccttccctaagacgtggtgcctgggtcccaatggaccgcctaggatactccgaaccggaagcaggaagtagaactccttgtcaccaatctgcaaaaggtcctgtgaatcgagcttgacgttggggttcccagggagatggaggacaccttcaacgaagcagccatttttgccaagtacctcgagagagaagcgtcgtctagtgaagtcatagaagatccgagcgtggttgcgagaaatgttcatcccaccgccgagagatgagaggtcgacgtcgacggtcgatttcttagaattccggccgagaataatggagtaagactgcatatagtactcgaaatcctcaccttggagcttcgcaaatccaacctctacatcgctcccgcttccaacggctgtagccatgccgtgaaatttctccgattttgaagtcggagatcaaatttggggttacatagtaatagaatgtgtttggaaaccggtttagatatgttgtggttaaaccgtacaatgaaaaatataaaggcttctcaagtaaatgactattatacccatcatgttttcagcctctccactgtcaatgttacgggccttacggcgatcaaatcaaaacgggcagtttgtttccacggctaacaaaagaaacagctttagttgggccttatctaaaaagcatcagcccattaacgtgaaccggatcttatgtacataaacccagtagtatgtaatattcggggataagcatgacattgacatgaatatggatcatgtgataaccgtaaggcttgaaattatgatgataaaatatgatgaaaagttcataagaatatcgtcacatttttgtcaaagaaatagcaaagtcaagaatggttttctttttctagaatctttgctttacattttgttaaacatttaatcaacccgaaaaaatcacaacgagaaaagaacatttgctatattccacagtgtattcgcagaatcttcctttgtttttcttgtcaacaattcaaatagtctcaatcctctttccactttccaggtgcaattcatgcaagagtaaggctggaacttgtgatagccaagctataataaagcaacttcaacaagctattccactatttgaataaagacacgagtcatctatctactcaacataattctttacagccatttgtcatctagcacgtgcccatgaagccagccaaacatgaaccacgtcgacacacatcagatgagaataaccgttacggcgtcatttgctgacctggactgtctaacctattgcactgtctctcgaagatggtcgccacatgtcgatcccggggtcgtgtttatgctcgagattcgcggagtcagatacgaacacaagaattcaaaacacccaacgtgtcctcgtcaaagccagcaggatctcagtgtacacgtgttaactgtttccatgcacgtgttacacgtggcgtctcggtacttttcgtcaaaattttacttgatttttacaaccaatggaaatagaaaccaacaaaataaatggaaagcgtttatcgataatccgaaattgtagcgctaataaagtttcttaacctttctcttagtgaattttgaaaccgcccatgtccactatccttatcggacatgtgtcatgttccgaagcctttaccattctctttttaattatctccgcccctctaatattcctttctcatcaacaaagttggcgaagcttcaaaacccttcaagaggaaaattttgcggaagacaagagaccatctttttgacattatatgtttgttgaatctttatcaatggcagaaaagtttgtagaagatgagaatgtggaggtcgagctcgagctcgagctatgtctttccctgggaggtcctttcaagaaaacggagaaatctaaaacatttggacaatctaacgccgtcggattcgagaaggataacggcgttaatcttgacggcagaacgacgaatgtgacgaggataaaggaaacacggaagaagcgggaggcgaagcagcagcagagaagcggagaagaaggagagtgcaagaggatcagaacagaatataacggagttagtaacggcgatgatatggatttgagctctagcaacatgtgtaacggttacgggtcgggtcgactcaaggaaagcagtaaagacgttacgattgggtcacccatttgcacctcctccgacgtatccgatcctagcagctcttctcgccaagaaggtatataacaaccttctttt

SEQ ID NO: 20016 - DNA, 1924 bp, Arabidopsis thaliana
  Clone ID: LIB3168-075-A12_FLI
aaaaattcagattttgaaatgaggatatcaagatgccgcttgttttcgacgccaggttcttggatatccaaaattttgaaacggaatgttatgactctagagattttgtttacctctctagcaatagttggttatatatgcttacctctctaggagttatttatcttgtttcaaaatattagttggttatatatgctttcgagatctttctgatatttattctgccaactcatttttcttcctctttcctttaacctttaaatcgatttaagtagattcctatgcatgcctctctttcactctcctcttctatgcaagtaaacacaaatcctcagttttctacttgtttacgggatctggatattgactaggagcagaactttatgtaatactatggtataatggtttagcataaagagctattcactttgtgcccaaagacagcttctgcatagatgttgcagaccaaataataaagactacatgctgtgtttcgacatgctccctgatgtaataaaatgatttgagaagcttacaatgatttgatatcagtaaaagaagatttggtacagaggaaaactgaaaaagctcctttgatcaaaagcatcagcaagaggaaggaagagcaactgcttctgctgatcgaactgcagagctgtggaaaactgatggaacactccaacaaagttttaaaggttatttgaattgtgttgcacgtgttgctttccacccatatgggaaatacctcgggttaacaagctttgacaaagcatggagattgtggagtagaagctgcttttgcaagtagtttacagtcacaatgtctatggaattgcaattcaacaagatggagtattagcagcttcttatgcgtgtgattcacgcccacgggtttgagatctccccccttgtaggagtattctcgtcgtcaaggacacatgaaacccataagactcaagttttgttcccttggtcctcttcctcaggtaaaaacctgaccatttattaacccttgatagttaatctcctttctgctatatgcttccctaaggaagctgcagtgccgaattgaaagaaagaaaaaaaaatcaccaatattacgaatgggcccaaagcccattaatgttgtcccttttttgttattaaaagcccatttataaccatgagtcgttgtttctctctttcaaattgtcctgtgagatcatagcgccaaagaagcaagaagctgaagatcattctcttttttcaccgagttttcttctctcttatcaccgagactcaaggtacacgtctctgaatcgctcttcttgttgtgtattccatctgaaatcgatctttgggtttcttgataaaaaattgtttttcccgatgaatcgactgaagaaataatgaaggatacttttataatgatccttatgaatcttggtttcagtgaatgagatcttcgtctgtttagtaaatgataatcgctcaatgtatttgttgaatcgattttagatgttcctctgttaatagttcttaatctgcgaactaattgatgctctgataatcatctagctgtattcctagatatgataacttctgatgaatctctatctcacagtgctttggaatcaaatgtgttttctatttaacttcctcaataaacgcaaagtgttatgatctatctttgcttgtctagagtcagtgttgggtttgcttgatgaagtatagtattacttatgaataatcgtatagtttcatttgatatcaatgggcaactaatagggaaattcatttcgttagcgatccttcagaaaaatactttttgatttggttttatatttacactaaaccccactaataagaacctgaaatgatcacatctgacatgacaggagaaatcaaaagtctttaatgaaatatttaaagacagaagaaggcc

SEQ ID NO: 20017 - DNA, 1694 bp, Arabidopsis thaliana
  Clone ID: LIB3168-076-A1_FLI
ccgccttcaaaaattcccaattttttttttcaaacaaacttgctcagatcctcttcttcttagggatcaatcttcaaatcaattgttgttaaaataaatgggattaaagcgaccttatgatgctgaagagatgcaaaagtgcaatgctaagcatgcaagacagcttagttacaaaaaccataaccaatttgacgaagctattccatatcatcatgcttctatggagaagaagacaaatgttttagtagaggatctgattggtctctgtgagaatcctacgtggactaatgatgcaaatcacgttgacaagggttttgaaacaaccggtttgtgtcaggaagattctcagtctggagtgacgactcagtcagatctttctcatcaatcttctggttcagatttcacctggaagccagtggaagatgtttatacttgtttgatgaatcaacctcctaggaatcaagttcttgttgggtctaatcatcaagcggatattcccgagtttgtcaaggaagagattcttgatcagtcagaggctcgaactaaggaggacttagaagggaagctgatgggaaagtgtgtgataccaatgtctgactctgacctttgtggaaccggtcaaggaagaaaggaatgtctttgcctagataaaggctctattagatgtgtgcggcgacatatcattgaagccagagagagtttggttgaaactattggatatgaaaggtttatggagctagggttatgtgagatgggggaggaagttgcgagtttatggacagaggaagaagaagatctctttcacaaggttgtatactccaatcctttctcagcgggttgtgacttctggaagcaattaaagggaacgtttccttcaagaaccatgaaggagtttgttagctactacttcaatgtcttcatcttgcggagacggggtattcagaatcggttcaaagccctagatgttgacagtgatgatgacgagtggcaagttgaatacaacatttttaacagcaccaaatctttagatgaggaagacaacaatggaaatcgctcctcatatgaagataacgaggaagaagaagaaaccagcagcaatgatgatgatgaagaagaagaagaggaagacgactcatcaagtaacgatgctcattgtgtagatacggataaggcttcaagagacggttttggtgaagaagtaaatgtggaagacgactcatgtatgtccttcgagttacaagactccaacttgatcttcagtcacaacccaatcaaaaacagagagtgccacagatctggtgaagattcatattcatttgatgatcagagattcacatcagattgttggaacaagaacaacgatctactaccaacttcaaacattattgaggagatatttggtcaagacgattgggaagataaagatgataataacttgaaggagaagtaaataaaaagttttcttctcctctttcatggattctgcagattttttttttcttaagtgaattagataaagatgcagaagtttgaaagtttcatctttaggagttttgtgttggttaaggttgaagaagaaaggacttcctgattgatttgactctgtaaaaaatgctattcaaatccatgaacctttttttctctagttgttttagtcctcaagatctcaatgtacattattatggtataaaaag

SEQ ID NO: 20018 - DNA, 1492 bp, Arabidopsis thaliana
  Clone ID: LIB3168-076-H9_FLI
cttcctctgacccttctcctcaaaatttcgaacctctctatcagatctccaacaatccttctcctccacaacagcaacagcagcaccaacaacaacaacaacaacaacagcataagcctcctcctcctccgattcagcagcaagaaagagaaaattcttccaccgatgcaccaccgcaaccagagacagtgacggccactgttcccgccgtccaaacaaatacggcggaggctttaagagagaggaaggaagagattaagaggcagaagcaagacgaagaaggattacaccttctcacattgctgctacagtgtgctgaagctgtctctgctgataatctcgaagaagcaaacaagcttcttcttgagatctctcagttatcaactccttacgggacctcagcgcagagagtagctgcttacttctcggaagctatgtcagcgagattactcaactcgtgtctcggaatttacgcggctttgccttcacggtggatgcctcaaacgcatagcttgaaaatggtctctgcgtttcaggtctttaatgggataagccctttagtgaaattctcacactttacagcgaatcaggcgattcaagaagcatttgagaaagaagacagtgtacacatcattgacttggacatcatgcagggacttcaatggcctggtttattccacattcttgcttctagacctggaggacctccacacgtgcgactcacgggacttggtacttccatggaagctcttcaggctacagggaaacgtctttcggatttcgcagataagcttggcctgccttttgagttctgccctttagctgagaaagttggaaacttggacactgagagactcaatgtgaggaaaagggaagctgtggctgttcactggcttcaacattctctttatgatgtcactggctctgatgcacacactctctggttactccaaagattagctcctaaagttgtgacagtagtggagcaagatttgagccacgctggttctttcttaggaagatttgtagaggcaatacattactactctgcactctttgactcactgggagcaagctacggcgaagagagtgaagagagacatgtcgtggaacagcagctattatcgaaagagatacggaatgtattagcggttggaggaccatcgagaagcggtgaagtgaagtttgagagctggagggagaaaatgcaacaatgtgggtttaaaggtatatctttagctggaaatgcagctacacaagcgactctactgttgggaatgtttccttcggatggttacactttggttgatgataatggtacacttaagcttggatggaaagatctttcgttactcactgcttcagcttggacgcctcgttcttagttttcttctcctttttcacaaacaatgtgcccataaatagatttacctgttttttttttgttatgtatcaaaaagagaggattttttgaagtcaaattgttctcact

SEQ ID NO: 20019 - DNA, 2862 bp, Arabidopsis thaliana
  Clone ID: LIB3168-079-G7_FLI
ctcatcaacagtgaatataattattctttagctttttccagggttttgccttttctggtagatgcattgaatagctacatgtcaaattcatattagtcttactaggcaacaaaatgcctcatctgttacttttcagatttgtagtcgtaacttcttcttatactcgtatttatctaatggcttgtaatggttgcaggtaaaagttaatcttcatgaattttttactggatacacggatggccgatatgatcgaatgggttggccactagttctgaaactgaaagattggcctccagctaaagtcttcaaagataacttgccacgtcatgctgaggagttcttatgtagtttgcctttgaagcattacactcatccggttaatggacctttgaatctcgctgtcaagcttccccaaaattgcttgaagccagacatgggaccaaagacgtacgttgcttctggatttgctcaagaattaggccgtggagattctgttactaagctccactgcgacatgtctgatgcggttagtacccatatgatttgtcttttctcgttttcatatccatttctttcttctaagtctgtccattcttattgtttttctttgcacatctataatgatttcagaacctatgaaaacattaaaatcagataccatttcctaatcggtcacttagattttttattacatttaggattcgtctcctcttcttttccagatcagttccttaagttattctgtttttcttttggctgagttttgtggactctttcgttgaactcctctttttcgcattttattcgggctacactcctccttcgaagcaaaggaactctccttagatttgttgcatcctcatattctgctttagggccgaaaatcaaagtctctggcctaatgttcttgaacattctaagattgcaatgtccatttgaaagttcttacgctgttcataggacctatggaccaagctttatccattcaatgtgagtccatcaatagctttcttagtccttcataggcctggcattcggtttttggttttgttaagttcgttttttccgggtttggaaattgcccctaaaaagaatcggatgttatttcggtttggtatataataaatgaaataataaaaaatattaatcttaggtaaatgttttgacaaaaaacaaaataaaaacttgtacaggttaatgtatttttaggtaaatgtattttttgtgcgcaccccaaagccttcatccattctgcttagtagagcacttcgcttaggtggattgtatctcagactttcataggatgatcgtctaaatagtatacggaaaagatgcgacattatggtcagctccgtggatatctgctgttcaagacgcaagaaattgttcgttttgctggcgcgggcgaggactattaaatcaagtttgtttagttgctgccagttgagcttcccaagtcggcaatgaccgatcttaaatttgaaaatgctggtttttcagcattttataaatgtttgattgcgggactaatttggctaacattgaacttggtagcacaaaatcgtcgaatagttgaaaaatgagattattattgaatgcaaagattacgcatttcatttgtggtaatagttccaaaagaaaaataaagtgtttgtgattgttcgagaagatatgaaacaacagatacagtagagctaatcgtcgatacaactggtgtagccaatacagtagagctaatcatcgatacaactggtgtagccaattatagtcgtctgtcgtatcaataatgacaattaaactgaaatgcctagattttacatgttgctgctgccactagttgccagaactggaaccgaaattaatgaccaacatcaatttcgcagaattgtcagtactagaaccgaaatcctgattgaacatcccgaactgttgttacttcttgatattgttcggaatgatgttattctctcacatcctacacttttcataaccttgtaagcgacaaaacacattgaaatcgattgtgagatgatgcagttgattttttttcaaatcatcagtaaacatgaacttgttgatctctaccccaatgactctttccaattaggtcaaaaaaaagttatcattatagaaaataaataattatttttctctttggttttttgccaaaaaaagaatttggtcaataaaacaaaaaaaattaggtcaagcatttttttgttttttttggtcaatagttaatttagtagattttggttttgtgttattacatcattaccttccgtttttttctcaatacttcttttatgaccatttaatctcttagaaacgaaaataaacataatctctctcctcgctttctaattaaaataatagtttgaaataaaggtcaactgttgctgtaaaataaaataaaaaataacggtccagggtgttatttttatattataattagttttactcacttttatcttaacttttcttctttagtatcttaatatctgtaccctttggttatttcaggtgaatattttgacgcacatatctgaagtgcccaatatgcaacctggaattggaaatctgaaaaagaagcatgccgaacaagatctcaaggagctgtatagctcagtagctaacaaggaggaaatgatggagattcttgaaaattccagacaacaagtccaaaatgttgaaactgatgatggagctctttgggacattttccgtagagaagatattcctaaattagaaagttacattgagaaacatcacaaggagttcagacatctctactgctgtcctgtgtctcaggtacaaactatctttgcatgcttatacatttttccttctcatgttcaaaag

SEQ ID NO: 20020 - DNA, 1137 bp, Arabidopsis thaliana
  Clone ID: LIB3168-086-G10_FLI
ggtggacttgcgtgcttttttagagagccttgtcattactaaacgttagtctgagtactgaatacttaaaagtttcttatggattggttatggtgcattataagaatgtattggatggtttttggttatatgcacaatgctaatgatttcaattgaaagattaatgtgttgccttgtttaacagtggatctgatagagtttcgggagtgattttggtttgattgattgggagtatatggtggatcattgatttgatctatcttgtgatggttttttccttttatgtgtcttctggtcttagtattttaagtccttgaagtgttctgcaccttgtcaagggtactctcggttatccttggaaaacgagtttgatcttctgttggaattcttgtattcctttcgatttatcaatgcaaccatttaaatgaacgattgtggatatatgttcagtcgtctaatcagttcctcgtgcaattctgatctggatacactattctgctgtttgtctaggtagaaaattgcttttagagaatggaagaatctgtagcatctgaaggcttagaatttaagtggggtaaaaagaaaggtgttggtgggaaaaagaaagatgtccagttctatgaatctttcacctatgatggcgatgaataccgtctttatgactgtgtcttagttggcaatgccagtgaaccagactctactgaacccttcattggcatgatcataaaaatttgggaacacgctaataagcatatcccaaagaaagtcaagcttctctggttctttaaaccttctgagattgcgccatatcttgaaggagtcccgaatgtacttgccaatgaagtgtttttagcatcgggtgaaggtcttggccttgctaataccaaccaattggtaactaattattcttctgcatactatgttgaattttcattctccatagtacttattgagcatgtcatggcattttcttattgatatgtatctcatattatgctgcgtactaaattatattgtccatccacttttgttttgttgaatattatattctttgcggtaggataacttgttctctgttcaccaacatatgtgctccaagtagcttttttgtcctcttttgtaaccatggcatagatc

SEQ ID NO: 20021 - DNA, 1513 bp, Brassica napus
  Clone ID: LIB3169-093-B6_FLI
gcgtcgctgaagaagccatgggagagaagcttgcagatttacagtaccaaccaggcttcggcaaccacttctcctccgaagccatccccggagctctgccgcgagatcagaacagtccacttgtttgtcctctcggtctctacgccgagcagatctccggaacctctttcacttcccctcgcaagcttaatcagcgaagttggttgtatcggatcaaaccatcagtgacgcacgagcccttcaagcctcgagttcctgctcatacgaggttggtgagcgagttcgatgcgtcgaacagccgcacgaacccgactcagcttcggtggaggcctgaggatgttcctgactcgcctactgatttcgttgatgggctgtacactgtttgtggagctgggagctccttcctccgccatgggtttgctattcacatgtacactgctaacaaagggatgaaagactctgccttttgtaacgctgatggtgacttcttgtttgttccccaagctggaagggtgtggattgaaactgagtgtgggaggcttttggtgtctcctggtgaaattgctgttataccacaaggattcagattttcaatagatttgccagatgggaagtctcgtggttatgttgctgagatctatggtgctcattttcagcttcctgatcttggacctataggtgccaatggtcttgctgcaccaagagattttcttgcaccaacggcatggtttgaggaagggctacggcctgactacactattgttcagaagtttggcggtgaactctttactgctaaacaagatttctctccgttcaatgtggttgcctggcatggcaattacgtgccttataagtatgacctgcacaagttctgtccatacaacactgtccttgtagaccatggagatccatctgtaaatacagttctgacagcaccaacggataaacctggtgtggccttgcttgattttgtcatattccctcctcgttggttggttgctgagcatacctttcgacctccttactaccatcgtaactgcatgagtgaatttatgggcctaatctatggtgcttacgaggccaaagctgatggatttctacctggtggcgcaagtcttcacagttgtatgacacctcatggtccagatacaaccacatacgaggcgacgattgctcgtgtaaatgcaatggctccttataagctcacaggtacaatggctttcatgttcgaatcagcattgatccctagagtctgccactgggctctggagtctcctttcctcgaccacgattactaccaatgttggattggcctcaagtcccatttctcacgcatagccttggacgagacaaacgttgagtcaacagataaataaagacaggagcttcagagtaattaaaacattaactaatgtgtaatgttaatactcattatgtacagacctttaccatatgtaaaatgtatatgcaataagcaggaaatgtttcctaatatcacattagttacattaag

SEQ ID NO: 20022 - DNA, 562 bp, Glycine max
  Clone ID: LIB3170-002-G8_FLI
gacaacgcaactattgacaatctctctttattctattcactccctccatttcttcaaactaaatttcctgagaatggcgaaggctgcggagaaaaagcctgcggccgagaaggctccggcggagaaaaagccaaaggcggagaagaaggttccaaaggaaggcagcggcggagagaagaagaagaagaggtcgaagaagagcgtggaaacgtacaagatctacatattcaaggtgctgaagcaggtacatcctgacatcggcatttcgagcaaggccatggggatcatgaacagcttcatcaacgatatattcgagaagcttgcgcaggaagcagcgcgtctcgcgaggtataacaagaagccgaccattacatccagggagatccagaccgctgtcaggttggtgctgcccggggaacttgccaagcacgctgtttcggaaggaaccaaggctgttacaaagttcactagctcttagggttaggggttttttcgtttaggtattttttttgtaaagcttagtcgtagttagtggcttcatttggtattctatatgctaatg

SEQ ID NO: 20023 - DNA, 749 bp, Glycine max
  Clone ID: LIB3170-004-E7_FLI
ggcagccatcatttcccttctcttagtaatcctctttgtccttcttcttcacctctacgccaagtggttcctcgctcaagcacaggctcaggccaacgcccgccgccggaggcggcgccgtcgcacgacggtgaccgtctccgacgtcctaggcccggcaaggttccaccacttccacagcttcaccatagaagacagttcacccctctcaacaaaagggttagattcttcaaccattagaacaattccactgttcatctatgaacacaacaacaacaacaacaaaaaggtcgaagaagaagaagaagaacttgaatgtgtgatttgtttgagtgcatttaagaatggtgaagtgggaaggtgtttgccaaagtgtggccatggcttccatgtggagtgcattgacatgtggttgagttcacactccaattgtcctatttgtagaacctcaattgtagcaagtattgtggaaaataattctagtgatgatcatcatggtggagatcatgatttggttgagattgtgactgaaggtggttctgctgctccaagttttgagactagagagggtgaacatgggaatagtaataatggaaatggaggagcaagaacaagtgtttctgttgtgtcagaaaattcttcttctgagttctttggatgctctttggagagaatgcttggcaagggtttcccaatatcaagtaatgttaattaattaatgaaatcacatgcttgagatgtatatgacc

SEQ ID NO: 20024 - DNA, 643 bp, Glycine max
  Clone ID: LIB3170-005-H6_FLI
ggtgaatattattgaccatggtttatgtttctttctaatgtatgggacgtgatcatttatatagggcgcatctgttgtgaagagtccagagaacaactctgatggagacgctaaattagtaggcagtgggaagggattgaaatcaatactggggggattggaggagctatgggaccaatcacagtatacagaggagtacaatctgagtctctttttagcaaggcttaatggctaatgttccagattcatttcagagtcagagtgtacatatccatgagtacaaattttggcattgtaacatcttattttttttcccaccatgcccttcagtcatttttggtcgtcactttttttgtataccccaatgctggctggaatctgctcgtgtgcatgcagaccaggtaaatcagtgtctgtattttacagggcatttgagtgactggtggaagccctcggtggtgatatgtagagaaatgaatcggtgacggcttcaggagggatggagtaatattttttggattttgtacatatacagtcaatcctaattatagttataattgttgctaacataaaaaatgccctgcattttgcaatgttatttggaaagctactaataccaaaatacccaagacctcaatcctga

SEQ ID NO: 20025 - DNA, 778 bp, Glycine max
  Clone ID: LIB3170-006-F2_FLI
gaacatttgtctctcatctttcaatttcaatcaacggttatacccttttctatttgagcatcatcatgtccaccgcagcgcagcccaaggccaagaaaacggcgtcgtccaagaagcccctctcccatcctaccttcgccgcgatgatagcggaggcgatagcgagtctgaaggagagaaccggttcgagccaatacgcgataaccaaattcatcgaaggcaagcacaaggagttgcctccaacctacaagaagcttgttctcgttcatctcaagaagtctgttgctgctggcaagctcgttaaggtcaaaaactctttcaagctcgcaccgactaagtctgctcctgttaaagccgctgctgctcccaagaagcccaccaaagctgcggctaagcccgccgccaagcccgcttccaagcccaaagctgctgcacctaagaagaaggctgttgccaaacccaaggccaaagctgcggccaccaagcccaaggccaagcccgctaaggccgcgccgaagaaggtcgccgctaagcctgcgaagaagactcccgtaaaggccgtgaagaagcccaagagcgtcgtgaagaaacctaaaagcgtgaaatctccagcgaaaaaggccaaggctaagaagtgagggattggagtgggttttagtttggcgttatagtgtttatgtatttcgggttgaatcgtagtataggtggatatatttttagaagagtattgatgtaaattcctttgctagaaattttaacaagtgttcttcttttgcac

SEQ ID NO: 20026 - DNA, 1207 bp, Glycine max
  Clone ID: LIB3170-007-D12_FLI
ggaacttggcatttttcggggcacccacataaaaatattttgcatgtgtttgcctgagggagagagaggcatggcactagaagcagtagtgtatccccaaccacaggacccgtttggccatggaatcaaagacccttcttacaactacaacaacttgttagaaggtggtggaggcaattggggctatgcagatttcaaccttgaaaaagaagaccgaacttgtgtcccttttcttgcgaaccaaacagagaattatccttatggagaatggaactgttctccttctccaccatccatgttgcctcaattgaatattgcatcaaatcctcaatcttcagaaaccagcaacacacagaacaacttagatagttcagtttccacccctgctcgtcccaaaaggcgcaggaccaaaagcagaaagaataaggaagagattgagaaccagagaatgactcacattgctgtagagcgcaacagaaggaagcaaatgaacgagtatctctctgttcttcgctctctaatgcctgaatcttacgtccaaaggggtgatcaagcatctataattggtggtgctatcaactttgttaaggagcttgagcagaggctgcaatttcttggtgctcagaaagagaaagaagcgaaatctgatgtcctcttttctgagttcttctcctttccacagtactcaacaagtgccagtggtggctgtgacaattctacagccatgagtgagcaaaagagtgaggctcagtcgggcattgctgacatagaagtgacaatggttgagagccatgcaaatctcaaaataagatccaagaaacggccaaagcagctcttgaaaattgcctccagtttgcatggcatgcgtctcacaatcttgcacctaaatgttaccacaacaggggaaattgtcctctattctcttagcgttaaggtggaagaagattgcaagctaggatcagtggatgaaatagctgcagcggtgtaccaaattctggataggattcaacaagagacaatctcgaattaagatctgaagttgagctaatttggcccaatttttttaacctgatcaagaagaccttattatatttctttctctttttttcaagttgtacctaattattgaaacggctgtggatcctgttgttatattctactgaagcgccttgatcgatgtgggggtccttggaggcagtttttggcc

SEQ ID NO: 20027 - DNA, 602 bp, Glycine max
  Clone ID: LIB3170-011-G12_FLI
gaacttgtgacaggaagtgctaagcaatcaaaggatcaaccagctgctcacaacaatggtagcaaatgcaaatcaagtggaaagtcccatcagtctgagtctcaggccaaggggatgaagatgtctgcaccacccaaagaagaggatgagagtggagaagaagaagaagaagatgatgaacagggtgcaacatgtggtgcttgcggtgataattatggcactgatgaattctggatctgttgtgatatgtgtgaaagatggttccatggtaaatgtgttaaaattactcctgctaaggctgagcacatcaagcaatacaagtgccctagctgcagtaacaagagggttagagtttgaaagctctaaacctttggatcaatcaccaattaaacagacaagatttagaatgtttgataacatttttacaagtgaaaattgcttcctgttccagtgaatggttcactttaatgactatgcagatggaatttcaagttttgctactgttcattactactgtctaatcttcttgggaattgtgttaagtagtcattgacaacaaatatattatataaatatattctgcagtttctggttttgatttg

SEQ ID NO: 20028 - DNA, 564 bp, Glycine max
  Clone ID: LIB3170-011-H7_FLI
tgtcaaatccaatgtctcaggtgggaattgcagacactatctatccccagcgacctggacagattgaatgtgatttttatatgaaaactggcgagtgtaaatttggggaaagatgcaagtatcatcacccaattgaccgctcagcaccatcactgtcaaagcaggctacagtgaaactcactcctgcaggattaccaagaagagagggtgctgttatctgcccatattatttgaaaactggaacatgcaagtttggtgcaacctgcaagtttgaccacccaccacctggagaagttatggagatggcaaaatcacaaggaacatcggccaatggaggggaagcagaaggcgatgaaatcgagacttctgctcaactttgagatctttcatgaaaactagactctatttgatgatcccttttagtttttccttatatttcttttctaatcatgatatgaacagttgtggctgaagacctgctttgtttactttagtgactagtttatctctggactggtatgaatgctttttttaatggttagttgaattacaagatttctatac

SEQ ID NO: 20029 - DNA, 407 bp, Glycine max
  Clone ID: LIB3170-013-D8_FLI
ggactaaccctagttcattgcactgcaacttagccacttgaacccccttcaatacgaaaccagagggaattcacaaaagaggttaccatgtcggacgatgagagagaggagaaggagttggatctcacttctccggaagttgtcaccaagtacaagagcgccgcggagattgttaacagggctttgcagttagttatttcagaatgtaaaccgaaggcaaagattgttgacctttgcgagaaaggggattcgtatattagagagcaaactggtagcatgtacaagaatgtgaagaggaagatagagagaggtgttgccttccctacatgtgtgtctgtgaacaacactgtctgtcacttctctcctcttgccagtgatgaaacagtgttggaagatggtgatatagc

SEQ ID NO: 20030 - DNA, 716 bp, Glycine max
  Clone ID: LIB3170-013-E11_FLI
gagtacagaaaacgcagttctcaccatttccctctcggtaatttccaattactactaattttgccatgctttcttcatcttactcttaatcctctttggtttagtttaattgttgtgtgtttgaatttacggtgcagattgtgagacttgttgttgttaactgaacttttctgagcaagaatgtctgggcgtggaaagggaggcaagggtttgggaaagggaggagcgaaacgacaccgtaaggtgctgcgcgataacattcagggaatcaccaagcccgcgattcggcgtttggctcgtaggggtggcgtgaagcgtatcagtggtctcatctacgaagagacacgtggcgtgctcaagatctttttggagaacgtgattcgtgacgccgttacctacactgagcatgctaggagaaagaccgttacggcaatggacgtggtttatgctctcaagagacagggaaggaccctctacggatttgggggctaggtttttttattttattgttaggttcttttgttttggaggctaatctggatttgagaaacccttgctgttatggatatagtaaaaagaaatggcaaggattgggtgtgggaagttgccggtggtgttgcagtaacttgtaatgcagtctttagctgttattgctggcaagtttgtaattgaatcactatatgttgctaatgttagaatcttggtattagtattat

SEQ ID NO: 20031 - DNA, 399 bp, Glycine max
  Clone ID: LIB3170-016-C5_FLI
gaggatcgttccgaggcacattcaactggcggttaggaacgacgaggagttgagcaagctgatgggatctgtgaccattgccaacggtggtgttctgcctaacattcaccagaatttgttgcccaagaaggtcgctggcaaggggaagaccgagattggatctgctagtcaggagttttagatttaaggctcttgttttcgtatgtagttggttgccttatatagtaagattaggattgacattggatgatgtatagtcccttaacatttgaaaataattagttgttttctaacatggttcctgcatagttttcatttatttgagtttctcgtgaatcgagatatctattctctttttatttgtgtgtttgggcataattttagtgtggtgtttatgtc

SEQ ID NO: 20032 - DNA, 1972 bp, Glycine max
  Clone ID: LIB3170-017-H11_FLI
gaatgtagtaacttcttttgtttggagaaaccctaaagtgaagaaaggaggaggaaaaaggtaaagttgtggagaaatggaaggtgtgaaggaaggcgcgtgagacagggacgtagtggggtccagcacccacgtgccctcctcctgtctccaccagctacttccttccttccttcaactctcaatttctctcaattccatcacatgtcgaactccgacggcaccactaacggcgcaatcactgaggcgcagagacagcagcaacagcaaggggggaaggcgttagccgttaagaagccgccgtcaaaggaccgtcacagcaaggtggacggtcgcgggcgccgcataaggatgccaatcatatgcgccgcacgtgtgttccagctcacgcgcgagcttggccacaggtccgacggtcaaaccatcgagtggctcctccgtcaggccgagccctccgtcatcgccgccaccggcaccggcaccatccccgccagcttctcctccgtctccctctcctccccttcctccacctccgactacaagccccagttactcgctcccactcccttcatcctcggcaagcgcatacgcaccgacgaagactcttccaaagacgaagctgtttccgtgggcccctctctcgtggggccgtatgcccctcccggaccaggggtcgtcccggcctggcccgatttcggacaaatttggagttttgtcgccgccgctgctgctcccgaaatggtgtcggtgccgcagcagcagcagcagcaggcttcgttgttcgctcatcaccaccgtcagcagcagcagctggccatcggagaagctttggcggcgagggtgggaaattaccttccgggacatctgaatttgctcgcttcattgtcaggtggacctgggaattctggtcggagagacgatgagcctcgttgattgtgacatctcttcaacggtggcggtgaggatggttgtggacggtggtggtggtggtggtgtttttttttcttccgtatatatacatattctcgtgttgtggttgctgttttgttgtgtgtggcaagcaggagattcttagggttaggttttcccttagattttgagtggagaagtccatcaattaagaagacattcaattagggttttttgttttacttcctgctggtttggaaaacttaactaggtttttagatgttggataatcgttttagattctggtgctttgttggaggagaggaggaagaaaaagggagaatgtaatgaactgatgatttaatttgtgaaattgtgatggtgagaaattggtaccgattgagtctggaattgggtttcagaagcttggtccgtgtgctagtacagttgaatttgtaatgtaatgttgcacttcttcaaattgaagagcatggattggattgcattgttgattctgtttcactttcatagtgggttttgggctttgactgactgggtctacacgtttggtggtggctgtggttgctgttgaggtaattagtgattgcaagcttgtttctgaggcgagtgaattgtgtttccaaagttcaactgtcacttccagaatgttggagaaccctaatactttccaacttgggttgagaattcatgtctcttggatgctgttgggggcatgttttgagggattgaggttcatgtaaggtggtcatgttgtgaatttggtgcagctgcgggggacttatgctctctgaccctatctcctccactttcacactccttgatggtctttgttgttttcagaaatgagactggtgagtggaagatgaaaaaaagaagaagaaagctctggttgtactccgtatgactgacttctgttttgagatttttatcttcaatccttagccatttattagattgatcagcgtgagaataatgttttcttgtatgtaagtggattgttttggggtgccagtgatttgaataaaaaactcatcttttctgt

SEQ ID NO: 20033 - DNA, 1148 bp, Glycine max
  Clone ID: LIB3170-019-F4_FLI
ggtagtttgtaaaattcaataataatttgtgaagccttcctccttctcaagtcttcaactagggtttcatatcaggctctgagtgtgcccttcattcctatcaattatcaaacagcttcggtgatcatcgtaactacctctacatttgtttgtttatcatttctttgctcgtatcaatgtctaacaccagcaacaatgtcgctggggtcgacaacacgttcagaagaaaatttgatcgagaagagtatctagaacgagcacgggagcgcgagagacaggaggaggagggtcgagcgaaacctaaagccaaaggtcctcccgtgcagaggaagcccttgaaacatagagattatgaagtggaccttgaatcccgcttgggcaagactcaggttgttacgccggttgcaccactaagtcagcaggctggatactactgctcagtttgtgagtgtgtggtgaaggactctgcaaactacttggatcatattaatggaaagaaacatcaaagagccttgggcatgtccatgcgagtagaacgtgcttctctccaacaggttcaggaacgatttgaagttcttaagaagcgtaaagatgttggcagcttcacagagcaagatcttgacgagcggattttaaaacagcagcaagaggaggaagaaagaaagcgactgcgtcgagaaaagaaaaaagaaaagaaggagaaggcagttgaagaacctgaaattgatcctgatgttgctgccatgatggggtttggaggtttccggtcatccaacaagaaatgatagcattctgcatgcggaatgaactgcgtatgaaattttggaacaattattctgcaatgataagctgaaagattattctgtggagaatcgttaaatagttgggctgcggtatcttccagcctgattttgggtgtggcttaaagatttttctgtggagaatagttaaatagttgggctgctcaaacagtagtatgggtgctggtgcattgcgttatattcaatcatttgattcggttgattcatgtacatttcttctgatagctaacctgatgtattattatacaagcttgatatttgtagtctctactatgtttcaagtaggaagtgacaacttgccgtacctaatggaaaccaattatgcgc

SEQ ID NO: 20034 - DNA, 1144 bp, Glycine max
  Clone ID: LIB3170-019-G2_FLI
ggtgcccctcttctaattcttctctcaaaaggactgaacgaaaaaaccttagggttcctctgttcttcttcgccccccaaaaaattttctggctcagagaaattcaaccgttctcgccattgccgaagctccaactcctcgcatttccaactcttcacccaaaaccctttttgttggaacagagtttcagagagagacccttcacaacatggcaaaaacgaggccaggcagaaaagacttggattcctacaccatcagaggcaccgacaagatcgtaagagctggggactgtgtgctgatgcgcccctctgatacgagcaagccaccgtacgtggcgcgcgtggagaagatcgaacaggatagtaggaacaacgtgaaggtgcgtgtgaggtggtattataggcctgaagagtctattggaggacgcaggcagttccatggagcaaaggaactgtttttgtctgaccattatgatgttcagagtgctcacacaattgaagggaagtgtattgtgcactctttcaagaattataccaagcttgagaatgtaggtgctgaggattactattgtaggtttgagtacaaagctgccactggggctttcacgcctgaccgtgttgctgtgtattgcaagtgcgagatgccttataacccagatgacctcatggtgcagtgtgagggatgcaaggattggtaccatcctgcttgcgtgggcatgactattgaagaagcaaagaaattggaacattttgtttgttcagaatgttcatctgatgatgacatgaagaaaccccatgctacattttctgtatcaccaggatctgatgtcaaggttgagccaaagcggcggaagagatgaccatcacgaagaattaactcatcttgcgaatgcaactcttgctgaatttcgcgggctatgtggtagctgttgtgtgtgtattgtacagcttctaccagaggctataaaaacatcattttatgtatttgactcaggctatgtatgtattggtcttagatttatgacagacattgatctgtttcccttgtgtccagaaagagtaactcctgtcagtgttaatgtttgagaaaacatcaggccttgaatactggagtaaaaagaaatgatcaattttctgaaatttgc

SEQ ID NO: 20035 - DNA, 646 bp, Glycine max
  Clone ID: LIB3170-020-C12_FLI
ccttcactttcccgagaaaaaaataacacttttcactttcttcactacgttctcacttcgatatggctcgtacgaagcaaaccgctcgcaagtccaccggtggcaaggcgccacgtaagcagctcgccaccaaggccgctcggaagtccgctccggcgaccggaggagtgaagaagccccaccgcttcaggccgggaaccgtggcgctgagggaaatcagaaagtaccagaagagcaccgagcttctcatcaggaagcttccatttcagaggctcgtgagagaaatcgcgcaggatttcaagaccgatttgcgtttccagagcagcgctgtttccgcgcttcaggaggctgctgaggcttacctcgttgggttgttcgaggacactaacctctgcgcgattcatgctaagagggttaccattatgcccaaggatatccagcttgcacgcaggatcagaggcgagagggcttagaaacaaggttgagaggtttgggtgttaggtgcttagggttagggttctggtcttgaaggatgtgtttgggagtttggttgtaggaatcctctccatctgtgtgtttatgtggaatgtgaaatgtgaatctctttgcttttgtaattatattgtgttactatgaggagttaatg

SEQ ID NO: 20036 - DNA, 1422 bp, Glycine max
  Clone ID: LIB3170-021-C10_FLI
gagagggagagaggatccaaatccaagtacggttgggttggagagaaaatgcgtccctgctgaaaacaccaaaccctaaaacgcgaaaagggttctaagaatttgcgaaggaaagagctagcggagatggagattcactacagtaacagctatttcgagaggcgccccatcctcaagtccaaggctgccgctgtcaaatgggtcaaagaatgggttccccaagatcttgtgacaacaggagggaagtgcatgatcttaaaatgggtaacagaggataccttgaagaccttgaaagaaaaggtaaaagagccttcagtgccagagccagaacctgagccaactactgaagtactttttctttgcagctatgatggctgtggaaagacattcatagatgctggtgcactgaggaaacattctcacatccatggagagaggcagtatgtttgtcactacgatggatgtggaaagaaatttctggatagctcaaagttgaaaagacattttctcattcatacaggggagagggattttgtgtgtcctcatgaaggctgtggtaaggccttctccctggatttcaacttaaggtctcacatgaaaacacattcccaagagaactatcatatctgcccatatccagattgtggaaagagatatgctcatgaatacaagctaaagaatcacattgcatctcatcatgaaaagaatgcatccgtggatgtgacaaagtacactactcccccttcagagaagcaaacaaaaacttctaaaccatctggaggggcatatggttctgcatcatctgaccgtccctatgcatgtccctatgatgggtgcgaaaaggcatacatccatgaatacaagcttagactccatttgaagagggagcatccggggcttatggctgatgaaaatgcagagcatgctcaggctaatgttgacaatgaaatggatgaagcaagtgaccatgatgcctatgttgcgaaacgatcaaatggtaaaattcagaagcagagtaagcctaaaccaaacctcaagttgcctccttccaaaattgcaaaacgcaaactgtccactccctctttaactgtaaataaaaattcttggcccgtgaaagatgaacctttcgatgaagaagatagcgaagaaacagaagaggatcgtgacaatgttgaagatggttggagatatgcaggaggaaacaatgaagatgatgatgaggaaacagaatatgaagactgaatcagttatggcatcctctatgaaacttaccttttccaagaaatgtattttctcttctacaaaaaaatttcagttgtctcttttttatttggctgaggaaatgacatcttgtcaaactgtgtgttgctgttacaagcattaggaagaatttatataaataaaatgcgatttaaagtgccc

SEQ ID NO: 20037 - DNA, 612 bp, Glycine max
  Clone ID: LIB3170-022-B9_FLI
gatatcaccctttttgtttctctctttgtcattgaaaccttttcacccccttcatatatccttaattcagcaatggcgagccacgacaaagcccaaggatctagcacaaccaaaaagggcatctcgcgaagcaacaaagctggtctccaattccctgttggtcgtgttgctcgataccttaagactggcaagtatgctgagcgtatcagttctgctgctcccgtgtatctcgcctctgttcttgaatatcttgctgctgaggttttagagttggccggaaatgctgtaatggacaacaagaagactcgaattatgcctcgccatatccaattggcagttaggaatgatgaagagttaaacaagcttctcggagatgtgaccatcgctaatggtggtgtgatgcctaacattcacagcatgttgcttcctaagaaggttgggacctcgacctcaacctttatgggtgctagtgtcaatgacaatgatgcttaaatgttttttttttttgccttaagtttgacccatgttccccttttgtaatatgggttctttatgattgaataattcataatgtcaagattggcataatatgataacaaattgggttgatgc

SEQ ID NO: 20038 - DNA, 1309 bp, Glycine max
  Clone ID: LIB3170-025-C9_FLI
gaagcagtgagaagtcgcaaggaggtgcagaatggctgatgcaggtgcagaaggagcatcttcttccacggtaggccaaattgacgttttctggcacgaagggatgctgaagcatgacacgggcaatggcgtgtttgacacggggatggatccaggcttcttagaggtgttggagaagcaccctgaaaactcagacagagtgaaaaacctagtgtctattctcaaaaggggtcctatctccccttacatttcttggcaccttggtacacctgcaaaaatccctgagcttttttcttttcacactcctgaatacataaatgaactggtagaagttgataaagaaggggggaagcagctttgtggtgggacatttttgaaccctggatcatgggatgctgcacttcttgctgctgggactacactatctgcgatgaagcatttactgaatggggatggaaaagtttcctatgcattggttaggccccctggtcaccatgctcagccttctcaggccgatggctactgtttccttaacaatgcaggtctagctgtgcaattggctttagattccggctgcaagaaggttgcggtcatagatattgatgtgcattatggaaatggaacggcagaggggttttatcgatctaataaggttcttaccatctctcttcatatgaaccatggatcatggggtccatctcatccgcaaagtggctctgttgatgagctaggtgaaggagaaggttatggctttaacttgaacatacctctaccaaatggaactggggacaagggatatgtacatgccttcaatgagttggttgttccatccatccaaaagtttgggcctgatatgatagttttggttcttggacaagactctaatgcatttgatcccaatggaaggcaatgcttaacaatggagggttatagagaaatagggcgaattgtccatcttcttgcgaaaaggcacagtgcaggacgccttctaattgtccaggaaggtggatatcatgtcacatattctgcatattgtttacatgcaacacttgagggggttctcaacctaccaatgcctctactagcggatcctattgctttttacctagacgacgagacattttctgtccaagttatagaagccattaagaattatcaaaaagataaagtgcgctagtggagaaactcactagacacttcctctctgtgcgtgtgaaataaatgttgatacttttcaagaagggttaatatttatcgtgtaactattgagggattttcaaggttattttaaataaatttaatcttgtcc

SEQ ID NO: 20039 - DNA, 1117 bp, Glycine max
  Clone ID: LIB3170-025-D12_FLI
gatacagaatacagattgacagagtccaacgttgcattgcagaggtttggtgtttgtcatgtcataaggcatgggcgatagggtggaaacgcttgccagattagcccagtggaaaatcgacaacttcggactttgttcctacaaaaaatctgaccccttcaaggtcggaatctggaactggtacttttcaatagtgaggaataggtacctctacatacatctttttccagaaccttcgcaggttttgaaggataacccaccctttgctcgattcattcttcgagtctccaatgccggatcatcccgcagctttcatatttcccctgttcaagaaaagctgcttaggacacatgacgactttgtctggcctgtggatacaacttttgttggtcgcttcatcattgatgttgagtttctagacctaaagatatgccctcctaatggtggagaaactagtcctgtatggccatctgatggaaattctcaatccattgcatttcaaagtagcattcttcgttgcctctctcgtatgcttgatgaggctatacatgctgacctaactatcatgacagccgatggaagcacgttgagagctcataaggcagttctctcagcaagttccccagtgttccagagcatgtttcatcacaacctgaaggaaaaagagtcctccacgatccatatagaagacatgccactcgagtcctgcacggctcttctaagttacttgtatggagcaatcaagcaagaagatttctggaaacaccggcttgcattgcttggagctgctaataaatatgacattggaagtctcaaagacatctgtgaggagagcctcctggaagatctcagcgcaggaaatgttcttgagatgctaaatgaggcttggctttatcaattgcacaagttaaagaaaggatgtttggtgttcttatttcaatttggtaagatacatgatattaaagatgaaataaataattttttccagcatgcagatagggagctaatgctggagatgtttcaggaggtgctttcaatttcgaacccgatataggttaactcatggatcctgtatatgatatatcgatgtgtataataaagtttgttgtttctaccg

SEQ ID NO: 20040 - DNA, 1005 bp, Glycine max
  Clone ID: LIB3170-031-E3_FLI
ggaccttggcgcatgcttcaggttaattgggatgaacctgaagtcttgcagaatgcaaagcgagtcagtccttggcaggttgaacttgtttcccttccatttgcacttcatacagtatactcccctaacaaaaggcttagatctgaccagggttctgggctgttaagtaatagggagggagaccccttctttcctatgacagggttccctaactcgacaatggaacacatgacagggttccctaactcgacagtgggacacatggataaatcattgttgagttatgatacttttcctgctggcatgcagggagccaggcatgatctattttctccatcaagtttttccaactttttaaatgataagtcctatctgtatatgggtagtggttcatttgggaacaatccagtgcaaagtttgggaactgtgacaacagagctaaacatgagcagttctcaatcggatgacttgtcaccacatagccagagtagttttcattcctttgccagagagtttgctgggacccggaactgtgacaccaaagttgcttctggttcaattctgctatttggtaagatcatacagcctgctgaaagtgatttgcatgatggtgattgcatggaacgtgatggcagcaggggcagcaataaacttaagacagttgaggcatgctatttttcaaagtagttatgcagcagaatgcagttaaatacttgtacaggaaatcaaggctggcaggtaaaacaggaagctgtctagggcttgtagtggtaaagtgatgtttccgggtcatcatatgttggtcttactacaaacttgaatgatgaactaacatcatgatatttgatcagttgtatgatattaatatctgacatattattgtgtatattttcaaatacattcttaaaaggcaattgtacttgccttttaaaaaaaatgcccatgcttgcgcaggtaacaacctccgtactcgtatatctttatttgatgaggtaattgtagccc

SEQ ID NO: 20041 - DNA, 939 bp, Glycine max
  Clone ID: LIB3170-032-G11_FLI
gatagcgcagtttcatttctttggattagaaatttttcccaaagctgatcgagaagccagccaggccagagttgaagaagaatgggaagggggaagatcgaaatcaaaaggattgagaacacaacaaatcggcaagtgaccttctgcaagagaagaaatgggcttctgaagaaagcttatgagctgtcagtgctgtgtgatgcagaagttgccctcatcgtcttctccagccgtggccgtctctatgagtattccaacaacaacataagatcaacaatagagaggtacaaaaaggcatgttctgatcactcaagcgcgagcactaccacagaaatcaatgctcagtattatcaacaagaatctgcaaagctgcgacagcaaatacagatgctgcaaaattctaacaggcacctgatgggtgatgccttaagcacactgactgtgaaggaacttaagcagttggagaatagacttgaaagaggaatcactagaatcagatctaagaaacatgagatgctactggctgaaattgaatacttccagaaaagggagattgaactggaaaatgaaaatctttgcctccgaactaagataactgacgtggagaggattcagcaagtaaacatggtttctgggccagaactgaatgccattcaggcattagcttcccgtagcttcttcaatccaaatatgttggaaggtggaactgtttaccctcactcagataagaagattcttcatcttgggtgatcaataatatatgatcttggctagcctatggcatgtctatccaattagccggtggctaaatgcattattattactactcttttggttgctcattaactagaccatgtgatctatatactacttatggattatggatacttatgtatgatgattgtatgatatcataacaatcagttagaaataataatt

SEQ ID NO: 20042 - DNA, 661 bp, Glycine max
  Clone ID: LIB3170-035-E3_FLI
caaacaaccaaacacaaaccattccccacactctcccctcttctttttcattgtcattcttcaccattattctgcaatatgttgctactcatcactcactctcatcaccaacattttttaacagtcatttggaattatatcaccttacctctgatgttttaaaaatcttcatcatttgctccctctccacccttaaactggacatgctcgattctgtgcttctggcgcttttcttgccgtgcctcggcatgagcgccgttttcatcgtctacatgtgccttctctggtacgccaccaaccaccactccgaccccgcgctaccggccaagcctgtctccgacaccggaatctccccttcccagctcgacaagctccccagaatcaccggaaaggaccttctcatgggaaacgaatgcgccgtctgcctggacgagatcggaacagagcaaccggttcgggtggttcccggttgcaaccacgccttccatttggaatgcgccgacacctggctctccaagcaccctctctgccctctctgcagagccaaactcgacccttcgcttttctcttcttcccaaaatccatgctgaccaacaagctctagcgcaaagttggtagatgcatgacccagtttcttaaatatttcttgactgtatatacg

SEQ ID NO: 20043 - DNA, 1016 bp, Glycine max
  Clone ID: LIB3170-035-E9_FLI
gaagctcaagaagggtcttctcagaagaaaatgggaagagggaagattgaaatcaaacggatcgagaacaccatctttatgcaagtcaccttctgcaagcgccgcaacggtttgctgaagaaagcttatgaattatcagttctgtgtgatgcggaagttgcccttgttgtcttctcaacccgtggccgtttgtatgagtatgccaacaacagtgttagggccaccattgaaaggtacaagaaggcaaatgctgctgcttcaaacgcagaatccgtatctgaagctaacacacagttttaccagcaagagtcatccaaattgagaagacaaattcgagatattcagaatctaaacaggcacatccttggtgaagcacttggttctctgagtctcaaggaactaaagaacctcgagggtagattggagaaaggattaagcagagttagatctagaaagcatgaaacattgtttgctgatgtcgagttcatgcaaaagcgggaaattgagctgcaaaaccacaataattatctgcgagctaagatagctgaacatgagagagctcaacaacagcaatcaaatatgatgtcaggaacactgtgcgagtcccttccttcacaatcatacgacaggaattttttccctgtaaatctcatagcttctgatgatcaacaacaatattctagtcaagaccacactgctctccaacttgtctgatgatatgctggaaattagagctactggaagttctgccacagtcattatatatatatatatatcggttgatgtagctctagctatttgaatagttacgtgtagcacctatatagtgcagagcaaataatgccacacatgcatgcctgcgtttcctgaatcagtttgtgcctttagaattgacgttaatttgctaaaggtcattattagactgcgaacttataaatgatccattttggactcatatttcatacgatatatataatgttaatgtatcttttaataagagctagtttctaaaccat

SEQ ID NO: 20044 - DNA, 1158 bp, Glycine max
  Clone ID: LIB3170-036-F5_FLI
gacacacaacaaagttctcattttttctcattcctttccgaccatggcatcaccggcatccaacccccaaagcgccgagactaagaaaagccgtggccgccaaagggttgacattaagaaaatgagcaacgaggccaacctccaagtcacgttctctaagcgccgcagcgggcttttcaagaaagccagtgagctttgcactctctgcggcgctgaagtggctctggtggtgttctcgccggggcagaaggtgttctccttcggccaccccagcgtggatggcgtgattgagcgctatctcactggggtcgcaccgccggaggcggacaacatgaattacatcgatgtgcaccgcatggccaaagtggttgaccttaacgcccagctgactcatatcaaagatcagctcgaggcggagaggaagcgcgccaaggagctgggcggcattcagaaggaggccgaaacccatctgtggtgggcccggcccgtggccgacattaccgatattaacaacctgctgaagctgaaaaaagctttccagcagctgaaacaagatgtgtccggtcttgctggtatggctttgttccagtctgttgcaaatggaaacccggggcatcagttttttgctggggcttcttcctcagccgttcccaatgttgtgcttcagtcacaaccactgccagtggcccaggtgttccctcctgctgttccacagatgatgtttccaccacccatatttgagaactacatggtgaaccccaatgggtttgatgacatgggaatgggaggaggaggatttggaggagcaggaccttctagtgctggtggtggtggtggtggtttcttttgatcctgccagctggattttgatgcccttttgtttttaattaagagttcatgttgttttaatttctgtactgttccgggttagctagtttcatatgtacgtgacaacatgcttaattagcactgattagctagggttcggaattcggatatccttgtcttgaaccatcatcagcattgtcatgtaatgctagcagctggaatgttttccctttcgtatcgtttctctgttatgttgctcggactggagtgatgtactttcatttgagttgtttaaattgaataaagggcatcttttttatttgtttctcc

SEQ ID NO: 20045 - DNA, 1564 bp, Glycine max
  Clone ID: LIB3170-036-H3_FLI
gacgaatttttatttattcaacgatagagtggaagcagaagtgaatgggaaattgaatttccatgagcggtggggttgtggttagaagagaagagaacttgagaagataacattctcgggttttgttttgttgagaattctgagcgtttgatttgatgatcataacacaatgagggatatttgtaggaacttccagcgaggcagctgtcaatatggagaaaggtgtagatatttacatgttcagcaacagcggaaacctaatgttaatgggtttggaggacagagcagttctcatcaacagcaaaatacaaatccctttggatttgggtctggctctggctcacaacaacagcagaagggtaatccttttggttttggcaagcataacagctcccagttgaatggggggcctcattctgagaacaaacccaaccaatacaagccttttgaaaacaaatggaatcgacagtcatccaaaccccagcagaacggcgtgaaatctgaaaacaaccccaaacaatcagaacatcatatatgcacagatcctgagaactgcaagcgccagattgcagtagattttgagcaagagaaaccactttggatacttacatgctacagtcattgcaaaggtgctccttgtgacattgttggtgatattagctatgaagaattgcgggcatcagcttacgaggatgctaatcgtggtatgagcttgcaatcaatagttgagaaagagagaaatatactaaaatccaagttggttgagtttgacaaactactttctgaaccttacaaaataccaataagttcttctcttggcagtcaaacaccccaatctattggagccaatgcaaatccgttttcaacatctcaaagtaatggtccattgtcagtctcaagctttagccaattgagtactccattgaacatgggttttgaaaggccatctgcaccactaacaaacactccgacgaagcctggtttctttggaagtggaggaaactctttggcatccaacacagcaaacctaaacagcaatggtgtcttcggtgttcaaagcggcccatattctacaccattggatttgaaaatgtttccaggttcaactcaggaaacatcgactgctttcagtaactctggtcccacttcaatgtttcaaacaacaccagatgtccagttgttaagtcagtcccaagtggagaaagtgtcggtagatccgagtatttggttaaaagagaaatggaatccgggagagattccagaagaagctcctcctgatacatttgtacggtagacatttgtgtattggcatctgaaacacggcactcaatactagtagtgttagcaagattttgggcccttcgtggttgaattatgatcaatagcatattttagatcacttcagtgcttatctggatagttttatatcaattactgaaacgcatgagctaaggaggcaaaagtaaatccatgttgtagttctttcatttgggcgaaatattgtaatgccttcttggagctattttgacaaaatagtcccatttccaaaattatttgactgctc

SEQ ID NO: 20046 - DNA, 1750 bp, Glycine max
  Clone ID: LIB3170-039-D8_FLI
cggatcaaaatatcccttctgataaattgcagcagagagtgagtcttgatagtgatactacattgtcacaaggtcatgatactaaaaatgatctgtccaaaccagaggaagcaagtattctttctattgtagttaaaaatgaagaagggaaggattctgatgctattgcttgtgccttggaatcagatcaagaaggaagcacatgctctttaccacttgagaaacctttgcagaaccctgatactctttcgcatgagttgcctcgattgcagtccagtcaggaatttccctctataatacgcgaaaaggtatcaaaagatggctataactggcgaaaatatggtcagaaacatgttaaggggaatgaatttataaggagctattacaagtgcacacatccaaactgcctggcaaaaaagcaattgcagcagtcaaataatgggcatatcacagattccatttgtatcggtcagcataatcatcctagacctcaattgaactccacagtatcagttgagtgtgttctgcctgttgttgaacaagcaccacacaaatcctctttagccactgtggaagacaaagcatccgttgagcatggatgtatgcctcaacagatccagcctttacaatcctttccgcctgcaaaagtttccccagttaataagttgaatgcttcacatttatcattgactaaggcaaagaaccaggttcatgacaacgaggaacccgagtcaaagcggctgaagaaagacaatactaatcctgatgtcactagagttgacatgtcaactcgtgaatctcgtgttgttgttcaaacttcaagtgaggttgatttggtaaatgatgggtatcgctggaggaaatatgggcagaagctagttaaagggaatacaaacccaagaagttattatcgatgctcgaatcctggatgccctgtcaaaaagcatgtggaaagggcctctcatgattcaaaagttgtaataactacctatgagggacagcatgatcatgaaatcccccctggaaggaccgtcactcagaatgcagctacaaatgctcgcacaacggccagtaatggcaaggctggaaccaaatctgagggtaatattactgatgatacaggggaacgaagcggcttgggctcagcaagcagattaacagagcaactaaatggcgagtcaattactaagtcaaaggctggtgatatggttgagttttgtgtgatcagcctttctaatgagggtcctgaaattaaattaagtgagcaacaacaacaaaaagataattcagctactaaagacgattctgtcagcaatgatgttataagccattcaagttctggagttctgtgtagatcaaatgaacagctgaaaggtgaggtaaaacctatatcagaaggaagtaaggattgccttaatgtggttgccgtgcatgatactcgtagtacagaaagtgaatttaacaagcaatcaacagctgatgcagaacccgtccaaagctaaatttgcaatatttttcaaaggtgctgctagttacagaagagtataaatatttgacaatgacacaggctttacagatatactgtgtgattataattcctatttctactctaaccgtcactttactcttctagctctctccttgtctttgagcaggttgactaaatatgcaaattacaattaatactacattggatatcataacttgtataccattattatttgagttaaataagatttacattttcgta

SEQ ID NO: 20047 - DNA, 1679 bp, Glycine max
  Clone ID: LIB3170-040-G1_FLI
gttgcaagtatatatatggagatgaagggttttatgttctaccaacaacagcaacagcaacaaatagtggaggagaacatgtcaaatttgacttctgcatctggtgaagctagtgcttcctcaggtaacagaactgaaattggaaccagctacatggctccaccaccaactcagattcaaccaccaaagaaaaaaagaaacctccctggcaatccagaccctgatgctgaggttatagccttgtcccccaagagtcttcttgccacaaacaggttcatttgtgagatctgcaacaaaggatttcaaagagaccagaaccttcagcttcacagaagagggcacaatttgccatggaagctgaagcagagaacaagcaaagaggtgaggaagaaggtgtatgtgtgtccagagccaagttgtgtgcatcatgacccatcaagggccctgggggacctaactgggatcaagagcacttctgcagaaagcacggtgagaaagagtggaatgtgacagtgctcaagagtatgcagttcaatcagattggaaagctcactccaaaacctgtggcactagggagtacagatgtgactgtggaaccctcttctcaaggagggacagtttcataacccacagagctttctgtgatgcattggcagaggagagtgcaagagccatcgcaaacccacttcttcccccacaacaacaacaatcttcttcctctcacatgagtactctccaaacccaattcaaccctcaaaacctccatgccttcccattgaaaaaagaaatgcccccttggcttggcccaccagcaacagtagttgttgatcatcatctgtcttcatcctcatccataatgttctctcctccacaccaagaaaaccctaaccctagtcttggtcccactcttgctgcctaccaaacagtccctaatccacacatgtcagccactgcattgctgcagaaagcagctcagatgggtgcaaccatgagcagaagtggttccacaccagccatgactgggccccaccatcatgctcacgtgtctcattttggcttgaacttgtcctcacgtgaagacaccaccaccaccacctctttaaaacaactactaatgctaacactgctaaagtgttcagccatggcttattatcatcatcaccattggggaataaagctgctgctgctgctgctgtgtcttcttccgcaccatcccttcttcacgatgttatcaactctttctcttctccttctgcctttgaaggagccccttttgaggatgcattcattcagagctcaaagaaactagatgatgatcataacttgtatttgcatgacacattctcaaaaacaagtggtgcagctgggaataatattaatgaagggttgaccagagatttcttgggtcttaggcccctctctcatgctgatattctcaccatcgctggcattggaaattgcatccatgatcagcagaaccagtctcaaaagccatggcaaggttagctatagctatgtagctccatatatatatgtggatcttctttttcatcctttaattaatcatctatatatataaattttttcccttttaaattagtgtaacttttgtttatgatcttttcgatcttcccaaagggaaggacctttctgaatcgatcccaatgtttttattcctt

SEQ ID NO: 20048 - DNA, 1502 bp, Glycine max
  Clone ID: LIB3170-041-F10_FLI
cttcctctctctctctgtctctctgtctcctccatggccatctccttcagtcccaaacaccctccttacgatgagatgatatacacagcaatcggagctctgaaggagagggatggttcgagcaagcgagccataggaaagtacatagaacaagtctacaaggaccttccacccactcaccctgctttgttgactcaccatctcaaccgattgaaatcctctgccctcctcgtcctcgtcaagaaatcctacaagcttcctggatctcatcatctgcctgcgctccagccccaaaagacccgtggtcgtcctcccaagcccaagccccaccccgtctggcctgctgcagccctcaccgacagccctgctcttctatccgccaaaagaggccccggtcgtcctaaaaagattggtgtcagcccgccaggcccaaggggtcgtccacccgggactgggagatctaagctgcccaagaggcctggccgtccccccaagcccaaatccgtctcggcgatctccagtggtctcaaacgacgtcctggacgcccacccaaagcccaatccaacgtaaacgtcatccccttcgcagccccagttgctcccggcctgcctactgtgcagcccatccttcctactgcttccgtgcccaatggatctcccaggccccgaggaaggcctaaaaagagttttactgctgcgggggctccggcgctatctgccgttgccggtgcagcgcgtggtcgtggccgcggacgtccacgtggggtcttcccggtggttaggcccggccggcctcagaagctcgccgtaggaaggtccaagaatcctgtaagaaggcccgtgggccgccccaagggatcgacagctgctgcaatcacagcacataaggctgctaatgaagatctaaggaagaagcttgaacactttcaatcaaaagtgaaggagtcccttggcacgcttaagccttattttaaccatgaaagcccagtcactgcaattgcggcaattcaagagttggaagtactgtcaactttggaccttaaagcgccattgagggatgagacccagcaacagccaccgccactgccacagacacagacacaggtgtatgaacagcaatatccccagccacagtcacagcagctgccgcaattttttcaaccacatacatcagccccgagctaggcctgaacatgatgaaggacaacttgtacaagtgttattaacaaggcacaagaggtaaaagatctgtaaagcggttaggaagtagtggtactgatttttctgagggtgaaatgactctgtctattttagtttgttgttgtgcaacatttagtttgacccctgaagtgattagcgggtactcatgattctgttgttctttaagtaatatttatttgacttttacagtttactttagtcacattaatgtgtatgtttgtatcagcctcttttgttgtttaatatttttaattaatggttactgcttgctatttctcatt

SEQ ID NO: 20049 - DNA, 1210 bp, Glycine max
  Clone ID: LIB3170-041-G10_FLI
cccagatagttttctcaccatttccgtattttacttcacctttagtgggtagtggttacatgatatcagcacactttcactcactgtgctttcccgtgacacgcatctatacttgtccagaagaagtaagatccatgaactaacattcccacacgctcgcttcaccatatttgccacccttttaacctcacttcttagggttattttgctcccttttccttgtttgggaattgggtttggtttggtttttcttggttgtaaaaggaaacaaagaaagaactaagatgggaagaggtagggtacagctgaagaggatagagaacaagatcaatcgccaggtaactttctccaaaaggagaggtgggttgctcaagaaagctcatgaaatatctgtactctgtgatgctgaggtagctttgattatcttctctcacaaaggaaagctctttgagtatgctactgattcatgcatggagaagatactggaacgccatgaaaggtatgcctatgcagagaggcagctagtagcaaatgattctgagacacaggaaaactggaccattgaatacactagactgaaggcaaaaattgaccttttacagagaaaccacaggcactatatgggagaagatttggcttcaatgagcctcaaagagcttcagagtttggagcagcagttggttactggtatcaaaaacatccgcacaaggaggaatgatctcatgtccgagtccatttctgagcttcagaaaaaggagaaaaggatacaagaggagaataacacccttgcaaagaagatcaaggagaaagagcaggctgtagcacagcaagctgcacaatgggagcagccaaactacagggttgatacatctttcatgccacagcagcaaccccttcccaccagtttgaacatatgtggcaataattactgccaggaagctgcaccagaactaggaaggaacggtctagacctgaccctggaaccactctattcttgcaaccttggatgcttctgaaaagttgtttcttctgagttggattatattatataagtgctggcatatatgaactactataagtagtctgtttgaatgttttatatgtattttggtctatggcttttccctctactttgaagacattattttgaattgcttctgttgtaaacaaattgaatttgaaatctaattgtgtatttttgaaatatgtt

SEQ ID NO: 20050 - DNA, 902 bp, Glycine max
  Clone ID: LIB3170-043-C11_FLI
gaagtagaggtcttaagagtttgagaactgagaagagatgggtggtgttgcatggacagaagaagaagatcacttgctcaagaaatgcatacaacaatatggagaaggaaagtggcatcgtgttcctttactggctggtttaaacaggtgccggaagagttgtaggctaagatggctgaactatctccgtcctaacatcaagagaggaaattttgcggaggaagaagtggaaatgataatcaaactccataaattactaggcaacagatggtcgttgattgcaggaaggctaccaggaaggactgccaatgatgtgaaaaactattggaactgtcatctgagcaaaaaactaaatgtaatagaagctgaagatagaccaataacaagagatgttcaagtcattaggccccagcctaggaacattgttggttcaagctcagtgaaaagaaggggtcaaaatgagtctccaactgacaaaggagttcaacaagagagtagcatgtcctcactgacgtttgatactgctgatggacagaaccatatgcttgattcacaacaagacaacaacatatatgcatgcctggaccaacagggcattgttagtgagttgtcaatggattttcagttcgaaggatttggagcaatgatgaatggggagggtagtagcagccaatgggattggggtgatttgctcttagacatggacttgtacaagtgaattaattttcttcttagttattgctcctgttgatgtggggatggcaatgttggtctcataccttggctacgtatcaatatcgaagttaagtgtttcgatggaaatggtagctaagttggttgtgtatcatgggtatgtcataatcataattaagatctagtgggtttcatcttttgccccctgt

SEQ ID NO: 20051 - DNA, 1167 bp, Glycine max
  Clone ID: LIB3170-045-C12_FLI
aatattaactgtttccaacaagttgtattgtaaggaaatgtttctgaaaacaggtactctaaaactgagagaaaaaagaaactggtgagaattcacgtctttctttgtagttcaacttgtcacaaaaattctggtttggattcctcaaatttagtacatatacctagtttattttaaaaaaattcaatatggattgtggttatatttaggtagctgatgaacttgtggccgaatttgctgatccaatcaatggtgtttcaactcctgatcagcaacaatatgatgagaaaaacattcgtcgaagggtgtatgatgctttgaatgttctcatggcaatggatattatttctaaggataaaaaggaaattcaatggaagggtctccctcgtactagtctaagcgatattgaagagctaaagtcggagcgtcttgggctaaggaatagaattgaaaagaaagcagcctatttgcaagagctggaggagcaatacataggtcttcagaaacttatacaacgaaatgagcaactatatagctcaggaaatgctcccaatggaggtgtatctttgcccttcattctggtgcagacacggccccatgcaactgttgaagtggaaatatcagaagatatgcagcttgtgcattttgatttcaatagcactccctttgagctgcatgatgataactatgttctcaaggcaatgaaattttgtgagagatctcagaatgataatacaacagataattctacagatggcggtgaaggttctagcatatatgcacaggttcctacttcagtttcaaaccctccaaataggcctccttcatctccaccactccctggaatattaaaggcaagagttaagaacgagcattgatatgcaattttgtactgcatcgccttatttaagcatgtttgtatatttttgtaaagtaatttgtcagtaattaattgtccttcataatagttaatcagtacagccaattcactcagtaggttagaagcgaaccagtgtgcttgagtctatattcttctgggttgattttggcaaattctttgctaaccatatccattatttactaccttaagaccttaactgatttttttccccacattttctgtgtatttgcccttttgtacttataatagagaaattggtttgcacc

SEQ ID NO: 20052 - DNA, 1486 bp, Glycine max
  Clone ID: LIB3170-045-G3_FLI
gataatgtgtccgattttattagggtaggtggaattcagagactgcaggatggagagtttattgttcaggcaactaaagattgtgttgcaaagacattgaaaagattagaagagaagattcatggccgagtgctgaaccatttgttatatctcatgcgagtttcagaaaaggcttttcaaagacgagttgctttaactcttgctcacctttgttctgcagatgatcaaagaaaaatatttattgattataatggtttggagttgcttatggggcttcttggctcttataaccccaagcaacagcttgatggagctgtggctttatgcaagttggccaataaagctatgactctgtctcctgtagatgccgcacccccatctccaacaccccaggtctatttgggagagcagtatgtaaacaatgttaccttgtccgacgttacatttttggttgaaggcaaacgattttatgctcacagaatctgcctccttgcatcttcagatgcatttcgtgcaatgtttgatggtggttatagggagaaggaggcacgagacatagagattccaaacattagatgggaggtttttgagccgatgatgagatttatatacactggatcagttgatatcactcttgatattgcccaagatctcctccgagcagctgatcaatatcttttagaaggacttaagagactctgtgagtacacaattgcacaggatatatcactggagaatgtgtcaagtatgtatgaactttcagaggcctttaacgctatatcattgaggcacacatgcatcctttttatcttggagcactatgataaattgagtggaaagccaggacactctcatctgattcagcgtataatacccgagatccagaattactttgttaaagcccttacaaaggccaattccaacatcctgccgtaatgcgctgtaatattattgacatctaaccagttgcgatgtacataatgtggttgatgttctttttgttgagcctgcgaagtaaatctcctggatcaagtacagcatggcttaaaaaatatatctaacatcaggtcatgtacgttcatttctgatgctgtgctagtcccgtctagctgtaacgtcattgtcttagatatagcaaaaatgaccttcacgaacattgtttttttctcctgcaatattgtgatggttctggcttgatagttctctttctcaattgatttggcattacaattgttgagtttatgagtagtataggtttcccaagcatctaatgtatatatgacaattagatagttgtttgtgattgctgatgaatgtattgtaaattaaatgcaaatgcatttaaagaattcgtcatttaagccatgctgaattcagttgctgcttataaaaattggctctttgtctatgcagtcaagcggcaacggaatcgaggtttcacgtacaagaattgctatgggtccctaccaacttttagaattcatgg

SEQ ID NO: 20053 - DNA, 1259 bp, Glycine max
  Clone ID: LIB3170-045-G6_FLI
tgtaggtgtgtgtgttgttgcacactctccacacttacacagagagaaaagagagagaaagaaaaggatcaaatagttaaaacctttggttctttccctccatagttccatttttccattcaacaacacaacacctcagacagacatcatggaggcaggttacaatcctcgtaccgtcgaagaggtctttagggatttcaagggtcgcagagctgctttgattaaagccctcaccaccgatgttgaagagttctaccagcagtgcgatcccgagaaggaaaatctttgcctttatggatttccaagtgagcagtgggaagtcaatctgccagctgaggaggtgccccctgagcttccagagccagcattgggcattaactttgccagagacgggatgcaagaaaaggactggctgtctttggttgctgtacacagtgatgcttggttgcttgctgtggctttttattttggtgctaggtttggatttgacaaggctgataggaagcgactatttaatatgataaatgatcttccgacaatatttgaggttgttacagggatggccaagaaacaaggaaaggaaaagtcatcagtttcaaatcatagcagtaccaaatctaagtcaaactctaagcgaggttctgaatcaaagtatacaaaagcaatgcaatcaaaggacgaggatgatgagggtggtgcgggtttgggtttgggtttggaagacgaagacgaagaggaacatggagataccttgtgtggggcatgtggagagagctatgctgctgatgagttctggatttgctgcgacatctgcgagaaatggttccatggaaagtgcgtgaagattacccctgcaagggctgagcatatcaagcagtacaaatgtccttcttgcagcaacaagcgagctcgaccttgacaaacatggctaggatggtggtgactataatcttggcaattttatgactactaatttgtttagtaggtcaagtttattagtcttgctgtgaatttcaggtatattgtttcagatgttacattaggtatattatgagctgctgtcgattcatctaccattaggatgtttatttcataagtggacttgaatgttgttctgttatgtgtttctttaaattttatgtagctgtgtaactgtgttgtgtccatagcttattatctgccgtggtgtaattctgctctattttttttttttttgggatacatatatatattttttaattcaagttctaactcatgtt

SEQ ID NO: 20054 - DNA, 1118 bp, Glycine max
  Clone ID: LIB3170-048-D4_FLI
atttcattccccatcaaatctcttccttctctctcctcatttccaaagttcccaactttcctaacccgagatctggtgaattgaattgaaattgaaattgttgtcgtggttgctgctgctgcagctgcaaggaatgccgctgatattagcgaaaagcgattcgatccagattcgcgaggtgtggaacgataacctggaagaggagttcgcgttgattcgcgaaattgtggacaactacccttacatcgccatggacacggagtttccggggatcgttctccgaccagtggggaatttcaaaaacagctacgattaccattaccaaaccctaaaggacaacgtcgacatgctcaaactcatccaattgggcctcaccttctccgacgagcacggcaaccttcccatgtgcggcggcgacgacgaagaatccgacacgtgctgctgcatctggcaattcaacttccgcgaattcaacgtcaacgaggacgtctttgccaacgactccatcgagctcttgcgccaaagcggcatcgatttcaagaggaacaacgaaaacggcatcgacgcccaccgttttggggagcttctcatgtcctccgggatcgtcttaaacgacaacattcattgggttactttccacagtggttacgatttcgggtacttgttgaagcttttaacgtgtcaggatttgcccgatacgcaagttgggttctttaatttgataaacatgtatttccccactgtgtatgacataaagcacctcatgaagttctgcaacagcctccatggaggcttgaacaagctcgctgagttgttggaggtcgagagggttgggattagccatcaggccggctccgatagcttgctcacttcctgtacattcaggaaattgaaggataatttctttagtggctccttggagaagtatgcaggtgtcttgtatgggttaggtgttgagaatggacaaggttctcattgaggaaaaaaaaaaatgataaaacttgttagatctctctttgtttgagctgcttctgtatatctgttgaaataccaatttctattaatgtaaacctttggcattaagtgtctttattaatactctctctttgttgctactt

SEQ ID NO: 20055 - DNA, 531 bp, Glycine max
  Clone ID: LIB3170-048-H6_FLI
gccctctatgtatgattatcaccgcagcattgggttcccttgtcttagccgaacaagttcatctaggaagtatatttggggccattctcattgtgtgcggactttacactgtggtgtggggcaaaagcaaagaccgtaagagcacaacagaaatagagaaaggcgaaagccaagaattgccaataaagaacggtacaaaatcagcgtcagacatatttgatggcattgaaatcaatgttccttctgaggtgttgaagaaaggaggagggaaaaatgtcccaccagcaacaacaacaacaacaacatcatgaaggtccttttataggactagcactataaattttcctattagcttaagctagattgaggtcaagaaagattttgtgcaatgtgaaaatctttatctacctcactagcttcattttcattgcgcctttcttgttttcctttaactttattccgtgtttgagaaagtataatgtcactcaatcaaataatgcaataattaatgccattgtctctgttttttgt

SEQ ID NO: 20056 - DNA, 1189 bp, Glycine max
  Clone ID: LIB3170-050-G9_FLI
ggcgtttccgtttcaagtgtttgcgagagaatggagttcctggacgaggacgcaaggccaaggttcgtgttccagtccggtgcagctgcgaggagcagcgagccaccgcacccgatccacaaacctaccaagccattcctcttcgccaccgtttccctctcctcactcttcctcactctctccctcttcttcctcgaagcggagcccttcaaatcgctcctcttctggctcgcactctctctcctcgttggccccttcgcccctccctccatcactggcggcgacgtccgcgtcggccgcggcgaggtcgtcaacttccccgatccggagcccgagcccgacgaggacgccagtaggaagtcctcacaacggcgatccagacagcggagggccgaggaagcctccgccgccgtaggcccggtggtttccgtcagcgcggcggagaagagaaaagaatcttctggaatcgagaagcgtgcgacggtggtggaggaggagaaggggtggagcgaggaggatgtggaggtgctgaagaagcagatggtgaagaatccggtggggaagccagggaggtgggaggcgatagcggcggcgttcggggggaggcacggagtggacagtgtgataaagaaagcgaaggaattgggggagaagagagtggatgattcggagtcgtatgcgttgtttttgaagaagaggaaagcgttggataagagggttgtggaggagaatgcggatgagggtgagaaagttgttgataatggttggagttctgctgaggatatcgcgttgctgaatgctttgaaagcgtttcctaaggaagtttccatgaggtgggaaaaggttgctgctgcggttcccgggagatccaaggctgcttgcatgaaaagattcgccgaattgaagaaagggtttcggactgcaaaagctgcagccgagtgagcactgaacactctcaaagggatcatttttttgtttgattttgatatgttaaggtaaatggattcgtcgacttgtaacttaaacataattttttgtttctagctattttgagttatgatttatgttggcctccttctaggtgacactcaaattgtggttgtgtaactttataaaatgcaatgaaccgatcgagattgtgtattcgggatctcttatagtgcgaataaatatttaatatttcgacttg

SEQ ID NO: 20057 - DNA, 1399 bp, Glycine max
  Clone ID: LIB3170-051-C4_FLI
caattccatttgctctctggaccgagtcaggcggcggcgaatcggcatgactcggcgctgctcccactgcaccaacaacggccacaactcccggacatgcccgtcgcggggagggggcggcgtcaagctgttcggggtgaggctgacggatggatcaatcataaagaagagcgctagcatggggaaccttaacctctcctcctcctcctcctccgccgccgccgcacatctgcaattccgttcatctccttcttcttccaacctccccgcggcctcatcgcccaatccaagctccccgtgctccgacccgccccaaggctacttgtccgatgaccccgcccacgtctccaccttcgctaaccgccgcggtgatagaaaaaaaggtgtgccatggactgaagaagaacatcggctgttcttaattggtctccagaagctgggcaaaggagactggcgtgggatagcacgtaattttgttgtatcaagaacccctactcaagtagcaagtcatgcccaaaagtattttatccggcagagtcatgctaccaggagaaagagacgttccagcctttttgacatggttccagatatgtcttcagatcaaccttctgtgccagaagaacaagtgctgcttccacctcccgagaactcacaaccttgcaatggaaaatcacagccttcattaaatctctccctcaaatcagaatttgaacctatggagactacttctcaagaaaatgtgcaacagaccaatgaacctatgatgggatcaaacagattgacaccaatggctcctcatggatgctttcccgcatatttacctgttccttttcccgtgtggccatcaacttgggttcacccctttgaagaagttaagggaggagagacatgccaccatcagatccacaagccaatcccagtcattccaaaggaacctgttaatgttgacgaacttgtgggaatgtctcatctaagcattggggaagcacaggtacgtgatagagagccttcccctctttccataaagttgttaggagagccctcaaggcagtcagcattccatgcaaatgtcccggttggtagttcggatttaaacaatggcaaggacaacgcaattcaagctgtctgagcttgtaaggtctggtgaagacagcagcagtaattaagccttcttttgctcatcttttcatttgtaccattatatatcattttttttattcctgatccctagcatttaatcttccaattagtagcaagttatatggtggtatgtagatcaggttagatcaattcttggaaaatatttattctttctaactgtaaacaaatgaagcttaaataatcaaatagcaccaagaggttctgttctgttcctcttggtttggctatttttagagtc

SEQ ID NO: 20058 - DNA, 1524 bp, Glycine max
  Clone ID: LIB3170-051-F9_FLI
ttagttagaaaaagagagagaaaaaggaaagaaaataaaataaactgacagtaacagatagcgaaacaaccaaacctacaaccgccatgaccgaagaagaccgctccgcccaggaaaccgtccacaatggcgtcgcctcgacggagctaggcggcgaggagatggacatcgctgaggtgacggccgccggaagagtgaagggaccgtggtctccagaggaggacgcgctgctgagccgattggtggcgcagttcggtgcaaggaactggagcatgatcgcgcggggagtgccgggacgctccggcaagtcgtgccggctccggtggtgtaatcagctggacccttgcgtgaaacgcaagcccttcactgaggaagaggatagcatcatagtttcagcccatgcaatccatggaaacaaatgggcagcaattgctaggcttcttccaggaagaacagataatgcaatcaagaatcactggaattctacactgaagcgcaggtgtatggaaatgggaagatatgtcccagcacatgctgatgtgatggaagatggtactggcagctttgataaaacaaaagcatcctctgaagaaaccatgtcaattggggatatcaattcaaagaatcctgctgaagtcagaaatgtcatgatggataatgaaaataaacctccaacaaaagatgatgctaaagtggaggaacatcctactcttcatcgaccagtagcacgtgttagtgcatttagtgtttataacactccaggaaggtcaacaatgggatcatgttcaaagatgttcccaaggcagagccctttgatccaatcccccaaaccagacgtaggatcctgcaagttatttgatgatattgattgtgagcccatggttccatcacaatgtggtcatggctgctgcacaggagactcgagggaaagccattcgcatggttcacttctaggtcctgagtttgttgactatttggagtcaccttcctctagtcatgcatttatttctatagctacagacttgaacaatatagcttggatcaagagtggccttgagaattgtagtactggagtaactgagaatactgcaaacttgacagcatctcgaggagttgccagtgctttgcaaacaaacttcttaggacaagatctaaagaatggctacgggcaatttgaggagggacatggcatgtttttgggtgcgatgcaagaagtgttgtcaacaaagatggctaggcaacattatgcaatgcctgcggaagtttaactctaacttaaggttcctcaattggattttttattttttattttgatgtgcaagtggatttcaatcttagtttgtggcattttgtggtgggtggatagatagatcatagatggtataagtttgtttcactacaatcaagcgcaccgtgtagagtgagtagctcttttcggttttcattgacttgcagagttcttgaattgcatcttggtaactataatctgaaaatatatataccaaattaccaatttgatcttgt

SEQ ID NO: 20059 - DNA, 952 bp, Glycine max
  Clone ID: LIB3170-051-G3_FLI
tgataatccatcttcaagatcttttaggaaacagatgggctgcaatagcttcataccttccacagagaacagacaatgacataaagaactattggaacacccatttgagaaagaagctgaagaagatgcaagtaggttgtgaaggtggtagctttggagaagggttttcagcctcaaggcaaatccctagaggccagtgggaaagaaggctccaaactgatatccaaatggcaaagagagccctcagtgaagctctttcaccagagaagccatcttgtaatttatctgcctcaaactcaaacccttcagatagtagcagctccttctcttccacaaaaccaacaacaacacaaactgtgtgctatgcctcaagtgctgacaacatagctagaatgctaaagggttggatgaaaaacccaccaaagtcctcaagaacaaactcatcatctgtgactcagaactccttcaacaactttgctgcagcaggtgctgatactgcttctagtattggagcaaagggaccaccaagcagtgctgaattgtctgaaaacaattttgaatcattgtttgattttgatcagtctttggagtcttcaaactctgatgaattctctcggtcattgtctcctgaggccactgttttgcaagatgaaagcaagcctgatgttattggtgcagaaattatgccattctctttgcttgagaaatggcttcttgatgaggctggttgccaagagaaattagttggttgtggtgatgatgccaagtttttctaagttgggttcattttgtgacatatatgagactgtggaattttttattttatttcataagttataggtagggcctcatcaattaatcttcgctttggccttagagagagaagtttttcaagcctttggtgctagacgtgtatatgttaataactattgaaattatgattattgttatc

SEQ ID NO: 20060 - DNA, 1386 bp, Glycine max
  Clone ID: LIB3170-052-C9_FLI
attagaaccctatcaagtaaagagggttagagaaataaaaagagaaagccgacagcacatagatagagagaggaaaacgacttaatattctttttccttgagacctgaaggggctaaggaaaattagaaggacacacaagtataaaggcggtgaaataaaagagaaagacaagaagaagacatgggaagaccaccttgttgtgacaaagaaggggtcaagaaagggccttggactcctgaagaagacatcatattggtgtcttatattcaggaacatggtcctggaaattggagggcagttcctgccaaaacagggttgtcaagatgcagcaagagttgcagacttagatggactaattacctgaggccaggaatcaaacggggcaacttcacagaacaagaggagaagatgataatccatcttcaagatcttttaggaaacagatgggctgcaatagcttcataccttccacagagaacagacaatgacataaagaactattggaacacccatttgagaaagaagctgaagaagatgcaagtaggttgtgaaggtggtagctttggagaagggttttcagcctcaaggcaaatccctagaggccagtgggaaagaaggctccaaactgatatccaaatggcaaagagagccctcagtgaagctctttcaccagagaagccatcttgtaatttatctgcctcaaactcaaacccttcagatagtagcagctccttctcttccacaaaaccaacaacaacacaaactgtgtgctatgcctcaagtgctgacaacatagctagaatgctaaagggttggatgaaaaacccaccaaagtcctcaagaacaaactcatcatctgtgactcagaactccttcaacaactttgctgcagcaggtgctgatactgcttctagtattggagcaaagggaccaccaagcagtgctgaattgtctgaaaacaattttgaatcattgtttgattttgatcagtctttggagtcttcaaactctgatgaattctctcggtcattgtctcctgaggccactgttttgcaagatgaaagcaagcctgatgttattggtgcagaaattatgccattctctttgcttgagaaatggcttcttgatgaggctggttgccaagagaaattagttggttgtggtgatgatgccaagtttttctaagttgggttcattttgtgacatatatgagactgtggaattttttattttatttcataagttataggtagggcctcatcaattaatcttcgctttggccttagagagagaagtttttcaagcctttggtgctagacgtgtatatgttaataactattgaaattatgattattgttatcatactgtgttagatgccacactgg

SEQ ID NO: 20061 - DNA, 522 bp, Glycine max
  Clone ID: LIB3170-052-H2_FLI
attcataaaataaattaatgacaataatttagaacacatggcttaaggcaaaacagaatggaggggcagaacataattgatggagtaaaactcgatgtacctcctttcaagggcaggagtgatccagatgcctaccttgactgggagatgaaaattgagcatgtattctcctgcaatgattatactgaaaagtagaaggtgaagttagccgcagctgaattctcagactatgcccttgtttggtggaataaaaatcaaaaagagatgataagagaggataggtgggagataggtacatggactgagatgagaagggttatgcgaaataggtatgttccaactagctacaacagaaccatgcgatagaaacttcagaggttgacccagggaagtttgaccgtggaggagtactacaaggagatggagatgacactagtgagggccaacattgaagaggaaattgaggacacaatgactcgttttctgagtggcctaaatcctgacattagagatgttgttcaa

SEQ ID NO: 20062 - DNA, 1240 bp, Glycine max
  Clone ID: LIB3170-053-D9_FLI
ttgcctgaacagcctcaagcatatatgatttggaaatccattcaacaatggactgagaaatctgcttcaagagctggggttatattgcctgatcttacttctggggctgaaaatgtacctgtttgtcttgtgaatgatgttgataacgagaagggccctgcatatttcacttacatcccaactctcaagaatttgaggccaactgctcctgtggaatcttctactggatgcccttgtgttggtggatgtcaatctaaaaattttaactgcccttgcattcaaaagaatggaggctatcttccatattcttcagctttgctacttgcggacctaaaatctgtgatatatgagtgtggcccttcttgtcaatgtccttctaattgccgaaatcgggtttctcaaagtggcttgaaatttcgtttggaggttttcagaaccaagaataaaggttggggtcttagatcatgggattctattcgtgcaggaactttcatatgtgagtatgcaggggaagtcatagatagtgctagagtggaggagcttggtggtgacaatgaagatgattacatttttgattctactcgcatttatcagcaactggaagtttttcctggtgatactgaagctccgaaaatcccatcccccctttatatatcagcaaaaaatgaaggaaatgtttctcggtttatgaaccacagctgctctccaaatgtattatggcgtccagtcatacgtgaaaataagaacgagtcagatctccacattgctttctatgcaattagacatatccctcctatgatggagttgacttatgattatgggactgttcttcctctcaaagtaggtcagaggaaaaagaaatgcttatgtggatctgtgaaatgcaaaggttacttttgttaattaattgtctgtgatgaattttggagaaggaggcctctgaatgaatatacttaaggataagctctagctatgtaagtcagacggcaggatggaaccatgtagaaagatgatagcagaccaacttttcttttttggcaaacctagtaaattggcacatgaaagagcaagttgtctattttgctaatgtgggtaatttaaggtgtaaaagttaactgtaagacacattttgtgtagattgtttctttttctgccgttagaagatacccttttattttttgggtatggattttgagtagggatttttgaagtccacatgataaaattaaacttgacctgt

SEQ ID NO: 20063 - DNA, 1299 bp, Glycine max
  Clone ID: LIB3170-053-F12_FLI
ctgttctgagattcgagagatgggtttggaagaagcttccagaaactgtatataagtcatcatgctgttgtgacagttaaaggtagtgtggtgtggggaaggagcctagtgattagttgtttgagaccactaaggaagtgaacaagaggatgtcaaacagtaggaacactcattggtgttatagttgcaggaggccagtttggctgggacggcgagatgcggtttgtcctagctgtaacgagggatttgttcatgaacttaatgatatggtgcatgttaatccttttgacttatttgaaatggacaacaatgaagaacgagatcaaaggcttggactcatggaaacattctctgcctttatgaggcatcaaatggcagataggggcagaagccatgacatcagggcgcaaacagattcaaatcctgaacacagtgcagggtttgctcctctgttgatctttggtggccaaataccttttagattgtctggacatggtggctttgaagctctctttaacggggcaccaggaattggtctaacacgaggtaacacaggcgattattttattggtcctggactagaagactgtttgaacagctttcagctaataacaggcaaggtcccccgccagcatcaagatcatcaatcgatgcaatgcctaccattaagatcacgcagaggcatcttcgatcagattcacattgtccagtgtgcaaagataaatttgaagtggggtctgaagcaagacaaatgccatgcaaccatttatatcactcggattgtattgttccatggttggtccagcataactcctgccccgtttgtcgtcaggaactgctgccacaaggattgagtagtagtaaccgcagcacaaatggtagaagtagaagtgcaagtttaagtagtagtggtagggagagccatggaaggagaaatccattttcctttttgtggccttttcgttcttctcattctagcagtaatgatgaagcaacaggaagcagctcaccgacaccaactatccctgagaacagccatcatcatcatgcagggtattctgggtggccatttgaatgacttagtgtgagtagaacattttcttttgtttattaaatctgctcctgttgattgaaaaatcttatggactgatgctgcttgcttggggtgaaaacggtttgagacctgagtctaccagtctggatttgctttctaaagttgtgaactattttgtataaatggttatttatgcataattgtttgaatctaatattcaatataacaagttttctttgtttaat

SEQ ID NO: 20064 - DNA, 1216 bp, Glycine max
  Clone ID: LIB3170-053-G12_FLI
gccttccctttctgctccaacaacacaagcaacgcttcgttctctgaacacttcaacaatgccaatggaggaggaggcaacaacaacaacaacaacaacaacgagggcactaactacttcgcaacttcaagtgcaccttctctcttcagcaacagtgtcaatgccagtgccttatctcacatgtccgcaactgcactgcttcagaaagcagcacaaatgggtgcaactacgagcaacggcggcaccgcttcgctgttgaaaagcttcggaagcgcgtcctccagcagcggcggcggcggctcgaaactggtgaatgctgcaaactacgtcagtggcatgttcggagggaataatcacgtgaacgaacagagtaacagtaacctccaagacctgatgaactcgttcgctgttggtggaaactcttccattttcgaagatgggtttgaagcatatgaacatagtaacaataacagtaatagggacccaaaagtgcacgcaatgagtggaagtagcagcagcattggagggtctgataggctcacccgcgattttctgggtgttggtcagatagtgaggggaatgagtgggagtggaggagttgcgcagagagaacaacagcagcaacatggcttcaacttgagttctttggaggcagaaagatataataataatagcaataatgctgcgccgtcatcagggcaagcttttggaggtggtggagggaattttcagtgatgagaaaacttattctccatcatgccaacaaggtacaaagggatttcaacttgttccattgaaacttgactgtccagctcatctaattaaggcatttttaagtgcagcattagggaagcatatgtgaagtttctgcagtttactaatagcgcaagcaaattaggcttcaaaattagggttcttcaactccgttacaactttcagttttttctttccctacctttctataagtttattcggtttataaacaaactagcttcaagattttcatggtttaatttaatagattttgttattggacaatgcataacttatatttaaatttgactgccagagatgactttgttcatatatactttggcattttgtgcataaatgtgtttggacatcttcagagcgggatggccccgttatgtcacaactcacatgctttgcgagcaatgtttctaaagttaagtagatgattattgaattgtggacc

SEQ ID NO: 20065 - DNA, 760 bp, Glycine max
  Clone ID: LIB3170-055-F10_FLI
tttctataaaggtagagagaagagaggacccttctcttgcatagttcaagtgagtgagagtgccaaaaaatgggaagggctccttgttgttccaaagtggggttgcacaaaggtccatggactcctaaagaagatgcattgcttaccaagtatatccaagctcatggagaaggccaatggaaatcactacccaaaaaagcaggtaattaaggttttagatgctcaactttcccaattcatttctcaatttgatgtctcatgttctggtttcgatcacaaattattatgtgtaacttttataataattatattaatattgatatatgattgaatgacagtatataattatatgtgtataatcattaaattcataatataaaattacatgtatcttttatccgaaaaattatgctggagtcggatagaataaattctgattcataactctgaatatacagggcttcttagatgtggaaaaagttgtagattgagatggatgaactatctgagaccagacataaagagagggaacatagcaccagaagaagatgatcttataatcagaatgcattcacttttgggaaacagatggtccctcatagcaggaaggttaccagggagaacagacaatgaaataaagaactactggaacacccatctaagcaaaaagctgaaaattcaaggaacagaagacacagacacacacaaaatgttagagaatcctcaagaagaggctgcaagtgatggtggcaacaacaac

SEQ ID NO: 20066 - DNA, 2951 bp, Glycine max
  Clone ID: LIB3170-056-G4_FLI
gggaggagaaaagtggaaagaagacaaagatgaccgcgagtacttcgagccgggctgtttgtcaggtggaagattgtagggctgatcttagtaatgcgaaggattaccatcgccgccacaaagtttgtgatatgcattctaaggctacccaggcactagttggaaatgttatgcagagattctgtcaacagtgtagcaggtttcatgttcttcaagaatttgatgaagggaagagaagctgtcgtaggcgtctggcaggccacaataaaaggaggaggaaaacacttcctgatgcaactgtagttaatggaggctctctgaatgaagaaaagggcagtagctatctgttaatgagtttgctaaggatactgtccaatatgcattcaaatggctcggataatatgaggaaccaggatgttctatcacatcttttgaggaacctggcaagtctggctggtacaattaatggaagaaatatagtgtctttattagagggatctcaaggtttggtaaaagctgggacatctggagctgcgcagaatgttcctaacacaaattctgatggccctgaaccatccagacctttcgattcttctatcaaaatggatgatggtctaatccatcgggaccctccagagtctatggtacaacgtgagacgactcctgctaatgatatggctaaaaaatgtatagcttcaggcagtgatggagtaggaagtttaaaatctccttcagtaccgcagtcctcaaatgtacttctgtcaagggatggccttccaccccaatcagttgcagcacagactacagttggaagaattgggttaagtaatattgacctgaataatgtatatgatgatgtacaggattatgttgagaacacgaggaattcttgtcctcctctgccttcagggaatgggtctcttgatcatccttaactggttatcccacagtcccacagagatagagagctatataaggccaggctgtatcatattaactatatatctccgtctagaaaattccgcttgggaagagctatgctacaatctagaatccagcttgagaaagcttgctgcgccaaatgattctttctggagaacaggatggatatatacaagagtgcagcactctgtagcttttctgtataatggtcaggtggtcttagatgcaccattgcgcctcaaaagtccgcaaaattgtcaaattttatgcgttaaaccacttgctgtttctgcaagttcaagtgctcaatttgttgtgaaaggattcaattttttgctgtctaacacgaggttgctctgtgcacttgaagggaagtatctggtacaagatagttgttatgatttgattgacagtgctgatgcagtcaatggacatcaagagcttcagcatctcagtttctcttgtcatgtaccgaatgtgactggaagagggtttattgaggtggaagacaatggtcttagcagctgttcctttccattcatagtggcagagcaagaaatttgtttagagatctgtacgctagacaatgtcattgaggcagcagagatggctgatgacaaccagataaaaactaacctaatggaagaaaagactcaagcattgtatttcatacaagaaatgggttggctccttcatagaagtcgtgtgaaagttaggctaggtcccatggcacctgtccaagatcgcttccattttaatcggttcatatggcttgttggcttctctatggaccatgactggtgtgctgtgatgaaaaagctcttgaacattatctttgagggcactgttgatactggagatcatgcctctgttgagttagctttgttagagatgggtcttctacacaaagctgtaaaaagaaattgtcggcctatggtggaaatactattaaaatttgtgccagttaaagcttcagatggtggagacagtaatgagaagcaagtcaacaagtcccctgacagattcatattcagacctgatactgttgggcctgttgggttgactccccttcatgttgcagcaagtatgcatggttcggagaatgtattggatgcattaactgatgatccaggaatggtgggaactgaggcatggaaaagtgctcaggatgctacaggtttgaccccctatgactatgcatccatgcggggctactactcttacattcaacttgtccagagtaaaacaagcaacacatgcaaaagccaacacgtgcttgatatcccaggcacccttgtagatagtaacacaaagcagaagcaatcagataggcacagatcatcaaaagtttcaagtttgcagactgagaagattgaaacaacagcaatgccacgtcgttgtgggctatgccagcaaaagctggcgtacggtggcatgagaagggcactggtttataggccagcaatgctgtcaatggtggccattgcagccgtgtgtgtctgtgtggctttgctcttcaaaagttcacccaaagtttactatgtattccagccattcagctgggaatcattggagtatgggtcaatctaatgttgtatatcaggtattctttgcagtaggcatgcacttttgttttttggagtgtgaaagtcttagttctgagtatatacatctgtgatagtagctgtcatcaaaatatgtagggaaggtttgtttaccttcacttcagatgttcagcataaaatgctcactgtgctatctatcaaatattaggtagatggtgctattagttcacgtatatgcaaagataataggagcttgccggtatttagaagggtactttgtatcaatcaataattatataagatttactacaggtgagtatgctttgatgttatcttatttattgatgttattatgaaaattatataagcaactaaatgtagttgactagtaacaagagaattatgtaacttgcaggggacttcatattgaatttgggtttcatt

SEQ ID NO: 20067 - DNA, 2180 bp, Glycine max
  Clone ID: LIB3170-056-H12_FLI
gaaggcatcgcctctctctttggagcaattcatctccattaccgctcctcttcttgacttggaaaaggaagctgagatttcaagctcgatcgccactggtgcgtccaggaatttggatactgctcaaaagaggggttctacaatcctcaacttgaagtgcgtcgatgtccagacagggcttatggggaagtctctgatcgagttccagtcaacaaaaggagatgttcttcctgcacacaagtttggtactcatgatgttgttgttttaaaactcaacaaggctgatttaggttctcctgctcttggacaaggtgttgtttacaggttaaaggactcatcaataaccattgcttttgatgatataccggaagacggtttaaacagtcccctaagactggaaaaagtagcaaatgaggtgacttatcgcaggatgaaagacgcgttgatacagttgagtaaaggagtgcacaagggtcctgcctctgatctgattcctgtcttgtttggggagaggccaccaacagtgtccaagaaggatgtatcttccactccctttaataaaaatcttgatcactcccagaaagaagcagtttcaaaagctctatcatcgaagaatgtgttcttgttgcatggaccacctggaacgggaaaaactacaacagttgtagaaattatattacaagaagtgaaacgtggatctaagattcttgcttgtgctgcctcaaatattgctgtggacaacattgttgagcggctagttccacatagagttaagctggtgagagtgggtcatcctgcacgtttattgcctcaagtattggacagtgcgctggatgctcaggtactacgaggagataatagtggtcttgcaaatgacattcggaaagaaatgaaggcattgaatggaaagctgctgaaaaccaaagacagaaatactagaaaggacatacaaagggaacttaggactctatccaaagaagaacgtaaaaggcagcagcttgctgtaacagatgtacttaaaagtgcagatgtaatattaactactttgattggggctttctctaaaaaactagacagcacttcatttgatttggtgattattgatgaagctgctcaagcacttgagatagcatgctggatacctatactgaagggttcaagatgtatacttgcaggggaccatcttcaacttcctccaaccattcaaagtgttgaagccgagaagaaaggcttaggaagaacgctctttgaacgacttgcagaaatgtatggagatgaaatcacatcaatgcttacaatccagtatcgtatgcatgaacttatcatggattggtcttctaaagagctttacaacagtaagatcaaggctcatccaagtgttactgcgcatatgttatatgatcttgagggtgtgaagcggacaaattctactgaaccaaccctccttctcatagacacagctggatgtgacatggaagaaaagaaagatgaagaagatagcacctttaatgaaggtgaagctgaggttaccgtgactcacgcaaagagactagtgcaaagtggggtgcttccttctgatattggaattattactccgtatgctgcacaggttgttttactcaagatgttgaaaaacaaggaggaccagctgaaggatgttgaaatctcaacagttgatggattccagggaagggagaaggaagccattattatatcaatggttcgatcaaattcaaaaaaagaggttggctttctgagtgatcgccggcgaatgaatgtggctgtgacacggtccagaaggcaatgctgtcttgtctgtgacacagagacagtcagtggtgacggatttctaaagcgattgattgagtattttgaggagcatggtgaatatctaagtgcatctgagtaccagaatgagtaggccagattcacagggttaagatttctattgtcgcactctcatgtgatcaatttgttgattttggtgatgttgctagtagatctgtgtaggtttctcaaatctttcctgagctatttggaatggaaaaaggttgatagtttttatagaaccattttatgtagaagaaaaaaattcttggtatctactaatgttattactttgattttgttaagaaacaatattactttcagaataatgtggacttggagtagtcccttct

SEQ ID NO: 20068 - DNA, 675 bp, Glycine max
  Clone ID: LIB3170-057-E2_FLI
ctatatgctaatgagcctgctaatgcggaaaatccagttagcatgcctgttggtacagctgagccagaacgaacaagagatgctggtagtggtggcaatactaatcatgccagacctgctagcaatattgtaaacattgtaaagccagtaggctattcagcttcagtagccagtggaatgcaggatgttttagtaacctttgtggcttcaaagtctgatggaacagaagtgatggttgacaacaagtatctaaaagcatttaatccacttcttctgatcaatttctatgagcagcatcttcgctacagccctacattgtgaccaaacagagaatagaaggtgcttttgagtttgtagttaggttcacacgattgtgcttagttagtagttttgttgaagaatgtcttacttttatagatgcagaagatagtaaagggtaagaaatgcattgtttgttagttacacgtaggtatgattttaacaagtggttgtcagtgtggctatatactgactgatgcatgctgatggcataaataactatatatttgaatgcctcaaacacacgaggatagacaatagtttcttaggagttagtcaagaatgaaaaactattttggattattgtaaatttttatggaagttcttggctatttctgagcgatttgtttgcctatt

SEQ ID NO: 20069 - DNA, 1401 bp, Glycine max
  Clone ID: LIB3170-058-E12_FLI
tatatatctaatcttgattattccatgtgttagctagcttctactacttaagtaacattttaatattttctctaatgtatttggtaggttaacatgggattaccctccacacaaaccagtactggctcaaagagacagccagagacatccatggccaagcccaaaccacacaccgaagccgccgctgcacctgagccacccaaagctgtaaagcgagagggcaatctcaagggaacaacatcaagttctgagcaggaagcacccaaaacaccagatcctaagacactgagaagacttgctcagaatagagaagcagcaaggaaaagcaggctcaggaaaaaggcgtacgttcagcaactagagtcgagtaggattaagcttaatcagatagaacaagagttacaacgtgctagagctcaaggcatattaatgggtggtggaaatgcacttctgggaggggagcaaggctttcatatggcaatgagtggcattagctcagaggctgcaatatttgacgtggaatatgcgagatggttagaggagcaccaccgcatagtgtgcgagctaagagctgtactccaagaacaccttcacgaaaacgagcttcgtttatatgtggacaattgcttggctcactatgaccaagtaatgaacctgaagagcatggtggccaaaaccgacgtattccaccttgtttttggcgtgtggaagaccccagccgaacgttgctttatgtggattggtggcttcaggccatctgaactcatcaagataattctgggtcaaattgagcctcttacggagcaacaaatacttgggatatgtgggttgcaacaatctacacaagaggcagaagaggctctttcccaagggcttgatgctcttaatcaatctctctcagagactataacatcagactctctgtggtgtcctccaaatatgactaactacatgggacaaatggctgtggcaatcaacaaactctccacccttgaaagctttgtgagacaggctgataatctgaggcaccagacaattcaccgtctccaccaacttctaacaacacgccaagccgcgaggtgtttggtggcaatttctgagtacttccatcgtctcagagccctgagttctctgtggtcaactcgtcctcgccaagatcagtagtgagtggtggcggccggcggtaatagtgacattccataactctcaagctatggctagatagctatatattagatatatatgaccttgtagcttcttaatttctcttaacttataaatttaatattttctcaattttattttggtaccaccctcttgatttctctccctctggactttcccatctatatgtatatagatatacattaacaaattaaaaatagaagtaattgtaatgtt

SEQ ID NO: 20070 - DNA, 415 bp, Glycine max
  Clone ID: LIB3170-067-C6_FLI
cagagaatacctgctgtgcctttgagatcatatggtggggtaacctcttcaatgatctcaaaggcagagaatacctgctgtgcaatatgtttgcaggatattgaagtaggggaaattgcaagaagcttacctcgctgtcaccatacatttcacttgatatgtgtggacaaatggcttgtcaagaatgattcttgtcctgtctgcagacagaatgtataacttgttccttgggcaatttgagattatctttatgggcggatgtatatgttttattatttgtttctttacatacaaactgagattaccattaagttttgtatagttgacattggcattttgtactattctgcgatgtaattgttaaataatactatttggtatgaaagccaatgcccaataacaaatgttttgggag

SEQ ID NO: 20071 - DNA, 819 bp, Glycine max
  Clone ID: LIB3170-067-E8_FLI
gtttccgttaacgctctccaatacaaaataaccactcactgaatattcggtcgaagatgtccgccgccgaagaagctaaagttcccgccgtcgaaaagccggtggaggaggtgaaggcgccgaagcttgccaaggagaagaaacctaaggctccgaaggaaaagaagccgaaacaggccaaaactgcttctcatcctccatatctccagatgattaaggacgctttgattgctctgaacgagaaaggaggatcgagtccatatgcgatagcgaagtacatggaggagaagcacaaggcggtgcttcctgcgaatttcaagaagatactaggtctgcaactgaagaaccaagctgcgagagggaaactcgtcaagatcaaggcttcgtacaagttagccgaagccgcgaagaaggtgaaggagagcaccgccaaagcgacgaaggaatcgcgtccgaaacgaaacaaaatcgcaaccgccgttgctccgaagaaaaccgaggcggttaaaaagcccgcgaagaaggtcgggccgaagaaaacgaagaaagtgtcgacgcctgcgaagcccaagcagcccaggtccattaggtctccgaccaagagggcccgtaaagctgccgtcgctgcggcttgatgtttgatgtttttcttgtttagttaaaactctggcatataatatatgtagatatgaaaaggtgtgtgttaaccttgttgcacaatcttgaatatagttgtgtggtttaggatcgtagatagtttagtgttctgcaatgttcgctctaagaagtgatcaattggagatgaattttactgttatc

SEQ ID NO: 20072 - DNA, 2323 bp, Glycine max
  Clone ID: LIB3170-071-E9_FLI
atgccaagaaccaccttattaaggcccacgaaattagccaccgcccaacccttaaatcttgccaattttccatcaaggtttaatcctagacaatcctaagtcaacctttgtgcaatgaatgttcatatcatgaatggtaagttgagcttagcgcagaaactaaaaggtgcttttaagaatgacgtagttctaagaggttcaagttgttcacaactttgtgggcatcaacactctcatgtattacagcctaaccattgttcagtttgctggaattgcctccaactccacaggtcttgcactctctcttattacatctggtctaaatgcgcttggcactatcttgagtatggttttcattgatagatatggaaggagaagactcatactggtttccatggttgggatcattgttttcctcgttgtttcaagtgctatatttttacctggcagtgcaaaatgctccttggaatagtaaccatgacaccttggcttttggtcgaaactctacttgcgaggcttacccaactgcccttattctctcttcatggaacttcatgcaatgcttacaggaagattgtgccttctatgccaacagtgataatcaagtatataataagttaacttcttccaacctcctcttatcatttccttaacccgctctcatcatcactaattaacttacataaatatgtcctcatgcatgtaccagaaattattatatggttcacaagtaccatgatatgactaatttccatataatatataattgagtttttttttaaaaacgaaaactagaattgagaaactcactatatattatatagagattagtcgcgaccataaacacgtaatgatttgagactatctaatatagtaatttctcttactaagaatttgtatagattatgtatttctcctaccatctaccatgcttacagcaaagtatccatgaaggaatatatcaaaaacattacatatttcttttatttgctcttcctgtccagttttttgtatcatgcactttctagtttttagatgtttgctaccagttcttttattgcttttcttgttactaattaatggcttatactttattgcaatttcccctaaggcatttaaacataaacatttggcaggttcgtcggttccattttctccattagagaagcaaacccctcgttcttggtcaataattgagccaagtcccttcagagtcagaggcaaaaactactttaggtaggcaccaacttcgtattttgtactaaacatttatgggtcgatgattgaacctgttgttagggatgtccctcatatacaagtcattcgttatgttaacaatgaagcactgttccatttttgatgattccataatttatttgttgcatggttgtcagggataagaagaaagattttgcaccgggcaatgctgctttttatcctcttggtgctgacctatttttgtctttgcaagaaattgatcatattgctagctttgtacaaattcagtaggaagccaacatagctatgccacatagctatatataaaattaagatatatactccctgcaatgattttgatgtaaaattaacatacttatttttttctttcaatcttgacaacaaatagttcaattaaaatcagcttggtttctggaaatcatgcaactacagaatatgatgcacgagtcatttcagttttatatatgattactttccttcgtatttatgtaaaattaaacacacaagcacatctttgcagtgttggtgcaatattatttgatcttcttacaagaacaaccccaacaaatggaaataatcaaatacatgtatagaatttatattagtgcctttttctttgtagtgtattgagtattctttcaatggtaacaaagtagttctttcaaccaaaatgaagggtcatgtgttgtttcttttacttgttatgctttgattttattgaagattgaaatttcacacataaatgaagggtcaatctataagccaatttaacatattcaacaccatcatgaaagagtgtgtaccctggaataggccaatctttagctaattgtggggtattctgaatcaaagtaggtttactcatttgtaattgctagctattatttcaattcaaaataaaatggggtaattgtgggggtattcttccataagctctcataagtcataaacaactttttattattaagtattacctcaatgaaccagtatcttgagcctgcagccttgtttggcctcaatccatttggatttttcctgtctcttgggctaaagaaataccattgagccttaatgacttatttgc

SEQ ID NO: 20073 - DNA, 2600 bp, Glycine max
  Clone ID: LIB3170-072-D10_FLI
gagaatgccgtggagaaagagccaccaccacctccgccaccacggtttcatgttcattctttctgtaagactctgacggcgtccgatacgagtacccatggtgggttttctgtgctgagacgacatgctgatgaatgtcttcctcctctggatatgtcgaagcagccacccacacaggaattggtggctaaggatcttcatgcaaatgaatggcgatttaaacatatctttcgaggtcaaccgcgtagacacttgcttcagagtggttggagtgtttttgtcagctccaaaaggcttgttactggggatgcatttatatttcttagaaggtgaaaatggggaacttcgtgttggtgtccgacgtgcaatgagacagcagggtaatgttccatcctcagttatctcaagccacagcatgcatctcggtgtccttgcaactgcttggcatgccatcttgaccgggaccatcttcactgtttattacaaacctaggaccagtcccgccgaatttattgttccgtatgatcaatatatggagtctttaaaaaatagttatagcatcgggatgcggttcaaaatgaggtttgaaggtgaagaggctccagagcagaggtttactggtaccgttgttggaatagaagattctgatcccaaaaggtggagagattccaaatggagatgcctcaaggtgagatgggatgaaacatccaacacccctcggccagagagagtttccccttggaaaatagagccggctcttgctcccccggctctaaatcctctttcaatgcccaggcctaaaaggcctcggtctaatgcagttccttcatccccagattcttctgttcttactcgagaagcatcatctaaagtaagcatagacccttcaccggcaaatgggtttccaagggtcttgcaaggtcaagaattctcgaccttgagaggcaattttacagaaagtaacgagtttgatactgccgagaagtctgttgtttggccacctactgcagtagatgatgaaaagatggatgtttctacttcaaggaagtatggttcagagagctggatgtcaatggggaggaatgagcctacatattcggatcttctttcaggctttgggaccagtggggatccttctcattcatccctgaaggatcaaatgagccctgcttattctgctagaaagcaatcattggatcatgaaggcaaacttcacatgcctcatccgtggcctgtaatgccctctagtctgtcactgaacatcttggactctaatgcaaaaggtcctacacatggtggtgatacatctttccaagctcgagggaatttgaggttcagtgcatttggtgaataccctgcactgcatggtcataaagttgaggattcacatggaaacttgatgccacccccacctgcaccccaaactcaatatcagagtccttgttcaagagagcttatgtcaaaacatgtatcagcaaaaacttgtgaggctgtgaaaccaaaagatggtgactgtaagctatttggcttctcacttatcagtggccctatcgtaccagagccttctttatcacaaagaaatgtgagtgagcctgctggtcagatgcatcttacagcacaccaacaaagaacatctgaaaatgatgagaagtcagatcactcaaagggatcaagacctgtagatgatctagttgttgatgaccatgacagaccattacagacttctcagtcgcatactaaagacgttcaagccaaacctctcagtggttctgctaggagttgcactaaagttcacaagaagggcattgcacttggtagatcagtggaccttacaaagtacagtggctatgatgaattagttgccgaattggatcagctgtttgaatttgggggtgaattattgtcaactaaaaaagattggcttatcgtctatactgataatgagggtgatatgatgcttgtaggcgatgatccatggcaggaattctgtgccatggtttgcaaaatttatatctaccctaaagaggagatccagaaaatgagcccaggtacactgagctcgaaaaatgaagagaaccagtcggtgatggctagtgatggtgcagatgcaaaagttgttaaatgtcagccacatcaaaagttcaattcagaaaatggccttgacgcctaatgattagtagattgatttccatagctttcagattctgggatggaaagtaaggaactgtcatgaagccatccatccagttggaaaacataacttgaagatgaaatcgaggctgactgctgcttatcagtgactgcttcaaatcaaatatataagatggcattaaaagagtagtatccgtccaattttggaaatcccggaattagtagtatatgcctgcccagttatacaatccctagtatttaatcaattgtgtttttgagtgaggtgatatagggtgatatcgaccttgcttttttttttttttaaaacaatcccaccttgtagttgttgctgtacatagttgtttctctcccaccctatgaacaacaacccattaatgtaatgaaagtttcgtataccaggtcgcggccttatggttggtatccagttc

SEQ ID NO: 20074 - DNA, 1417 bp, Glycine max
  Clone ID: LIB3170-074-E8_FLI
tatcactggttttatgctgttttatcatcatttatggttgggtaaaaaataaaaaacatcagggtacaataaaaaagttctacagcagtattttaattatttaatttaatgtgatatagtaatgggctgatactaacccaatagtttcactgggccgggttgggttgcaatgcaccaattgtttaccttctccaaactaaaaccctcattctaccctatgtaccactttcttttgtgtgagtcggggtctgcaacaaaaccttcgctcgcgtttttcagggtgagtctctccgtcgcatgcattgcaatagcttgttaatttctcaggattgggcttcggatcccaactttatgtggctccatgtatttaatttatcttgtgttttatttatgattcattccagattcgcaatacctagtcatggcgtatttaaaagagattgtataataggcttgatttggaatgaaaggaaaaaaaatgcaggtgaaatatcgaaaaatgagagcattgattttattggaaatttgtattcctttaggtggatatggcaccctggaagaactacttgaagtgatcacctgggctcaactaggaatccacgataaacccgtaagatattgaaaatcaaatcctttcatgtgttttcttttaaatatattaaatattactaatatttaaggaagtgctagaaaacataaattccttagttatgaacatattaacatatcttaatacatacttttggttatgaacatttttttattaacattaaagaacaagctggaaattaagttttattctggagtgaatatggaaatatttcttggaaattcagaaacatctaaagcctatataatttatatatatagtttataaatctaaacaccttccataaaataaaataaaatctaaacaccttttgttattaaagaaactattcgtgtaagtttaatgaatgctatataatatcacattttgaagatgattttgtaggtttataaatgtctaaataaaatggaagaagcaaaaccaacaatgaaaccaagagaaaatatttggataacccaagaactaccaatgttcattgcctatcaaaatcaaccatttaaggcatcgtaacatgcagtgtctagattagattagattgaaagattatagtacctattggtttggtgttgcaatgttaaattatgattgaaaaaagtggtgtgcagtgatttgttgtgaagaaagtgagataaatgattcaataatgaagttgaacaatttcttttctacacaagggatgcttgcttaagggtgatttcgattcaatctcacaggataattaaggctgttgacagttctaaaagctgagttgagaaaatatttttcattttcatgcataattaagaaaaggccagtttacttggatgg

SEQ ID NO: 20075 - DNA, 1588 bp, Glycine max
  Clone ID: LIB3170-074-F12_FLI
agcagagagagaggtggacagatgaagaacataagaagttccttgaagccttaaagctatatggcagggcctggcgacggattgaagaacatgttggcacaaagactgctgttcagattcgaagtcatgctcagaagtttttttctaagattcttcgagagtctagtgggaacagtacaaccttggaggagtcaattgaaattccacctccgcgaccaaaacggaagccaattcatccttaccctcgtaagctagttgagtttccaaagacaggaatttccaactcagaacacccactgaggtctaattctctgaagtcatcagattttggtcaagaaaacaattctcccaagtcagttttatctacagttgtttcagaaactgttggttcctccgattcagatacatctagtcgatgtttgtcaccagcctcatccattagtggtgtccccacaaacagatttccacttgctgagcccaaaacatcatttaaggaagaagggtctgcaccaagttcagctcatgatgagcaacctcctgtgaaactggagttttttcacaaagaaagtgtttctaccagagatgatgcaacagaagaatcatctggtcgtactctcaaactttttgggaccactctactggtaacagacacatgcaaaccttcttctccaacaacggagccgtgcaaaccaacacctgcggctgcaatgtatcttatgcaacttcagaatgtttgttcagatgttacagaaggtcatgcttctattgttccttggtggactcttccccacaatactccatttatgccactgcacaaggagccaaaagggaagcatctatattctaatcttggagagtttgaacataaagaagttcaaaaggaaggatcatggactggttcaaacactagttcaattgatgatggagataacactgaaaaatcagatgatcaagccaaaagtcatgtacatggttttagcaaaagtgaaactttaactatatctgagctaagggtgaggcctaaaacatgtggaaaagggtttgtaccatataaaaggtgcatggcagagagggaaaaccagtgctcatcagtatattatgaggaaagggaagagcaacgtattaagctttccttatagtaccctcttattggcttttcttcaaagcagtttcccttttacaggtataatgtacctgtttctgttgctggatgaccttgcatgagaagaaagataagggagctgaaatttttgatatttctactgcattgttaattctccacaagcctgtgtgttaacctatatgagcttcaagactttgggagaaacactatccagtgaattatcccacctttttatatttcttcatgcctaggccttttgtatttcttcaaattctttctcccaccctccactcggatatatctagtgctttttttctttttaattctaattgtctttcaagtgtaagttacatacttatgtatcgcttattagtgtagttgttcatatttctcaaatgaagcaaattattatactcaaatcagctgaagttgaataaaattgtacttagtactccttccttttgc

SEQ ID NO: 20076 - DNA, 1419 bp, Glycine max
  Clone ID: LIB3170-078-F10_FLI
gacagaattcaaatccttgtcatgcgatcatcctttcctcctctcaactttatttcgattgaaatgattcaatcatagtgcctaatcttcatccacccataataaaaagaaagatagagcaaagaaacaagagaatctacagaaaaaagccaggcacaaaaagttgtacataatattgtatgcatgagaattgaaggagggggttgaagactctttatcatcatcgatcgtgtacagcatggattcatcatcttcaggatctcagttatctcagcacccacaactcccaccgggttttcgattctaccccacagatgaggaactagtggttcactacctcaagagaaaagcagactctgttcctcttcctgtttccatcatcgccgaggttgatctctacaagttcgacccatgggaactcccaagtaaagcaacttttggtgatcaagagtggtactttttcagcccaagggataggaaatacccaaatgggtcaaggcctaacagagctgcttcttctgggtattggaaagcaaccggaactgacaagcccatacttgcatctcatggccaccaccacaaagttggagtcaagaaatcacttgttttctatggtggaaagcctccaaaaggggttaaaaccaattggatcatgcacgagtacaggcttgcagatagcaactcaaattctagctcaaaaccaccttctatggcttcagatcatgcacagagttgcaagaaaaattccttgaggcttgatgattgggttttgtgccgaatatacaagaaaagcaacagtaccaacctgccaaggttacctttggtggagcagaataaggagctttctatgctaccaatgaggtccactttgtcaatggctaataataacacctctcaggattccaaacccacgtcttctattagcacaagttatgggccccttggagtagaaaatgatgataacttatttgatggaatcttaggagttgatcatcagagcatgtagcatgatgtttctgattcccaacaagtgtcttcaaagggaaacttccctatgaaaagagaactttcgtcacagtacttttggaatgacacagggtcatcctcttcaagcaggagattccactgtgatcttaattatgctggaagcagcactgttgaggaagacaattccttcgtttctctgcttagccacctttcacagaacacaacatcgtttcacccaaatgcgcttcttggccctattggtaatggagtattgaggcaacagtttcaacttccaagcatgaattggaatacttagggtggttaatttggcttagggtatatactgggttggataataatgtagcggctattgtaggtttatattataagttaatttaacttgagttttatgagccatataaaacaaactag

SEQ ID NO: 20077 - DNA, 1317 bp, Glycine max
  Clone ID: LIB3170-081-C11_FLI
gacaaaaccgaacccaggcacaaaatccatttcactcttcataaatagagaaagagaaagaaaggggaaaacactgttttcactgaccaattatcttcgtctctctctcgattcttccaaacggtgcttcgatcggaaaccctaactttcacttacgtccgtcaatggagcttcgttctcgtcgacgcctctccaatccttcagtttccgggaaggagcaaccacctggggatgatgctgttggggaagatgaaactactactggcaagggcagtaacaataaagataaaggtgttgctgttatatcatcaaattcagatatagtttctggtcctgattcagattctgattacgaagatgaagaatttggtgttggctccttacctgacttgaatcaagatccttcaagcattagtttttctagtggagaagattatgcttccgattcatctgatggtggcaagtctttgtacaaaagaggaaaggcgctgctgtccagagggaaaagaaaaagtttcaacactgaatatggagaaccgagtgacgtggttagagtagcggagtacaaagatgatgatgctcaatttgcaatctttcaggaactatcagttccgtctgtttctaagggtactaagaggaggaaatattcaagaaaaggaagaaaaggagattcaaagtctgtgttgttgtggaatgcgtgggaagaggagcaagagaaatggattgataggcatatgttagaagatgttgacttggataatcatagtgaggtaatgaatgaaactgctgacataccctctgatctgacaatgcctttacttagatatcaaaaggaatggttagcctgggctttgaaacaggaaagttctgcaagtaaaggtggaatacttgcagatgaaatgggaatggggaagactgttcaagcaattgctcttgtcctcgccaaacgtgaatttgaactaggttgtgaaccagatcaatccataccatgttcatccagcctgaagcctgcgatcaaaggaacgcttgtcatatgtcctgtggttgctgtcactcagtgggttagtgaggttgatcgctttactttaaaaggaagcaccaaggtgctgatttatcatggggcaaatagagggaggagtgggaatcggtttgcagattatgattttgtgataactacgtactctgttgttgagagtgagtacaggaagcatatgttgcctccaaaagagagatgcccatattgtggaaaattatttttgccgaataagttgatgtatcatcagatttatttttgtggtcctgatgctgttagaacag

SEQ ID NO: 20078 - DNA, 1034 bp, Glycine max
  Clone ID: LIB3170-083-A3_FLI
tgcatatgtgggggcatggatcagaatttaggaaaggaccagactcactcaaaggaacacaaccagctgcaatgttaaggttaccatgctattgctgtgctcaaggatgcaagaacaacatcaatcatccaagggccaagccattgaaggacttcagaaccctccaaacccattacaaaagaaaacatgggacaaagccattcatgtgcagaaaatgtgggaaaacatttgcagtcaaaggggattggaggactcatgagaagaactgtggcaagttgtggtattgcacttgtggctcagacttcaagcacaagagatccctaaaggatcatattaggtcttttggaaagggacataaccctcatcctccctttgaagcttttgaggatgagaaggaatgcattactggctctgatgaagatgaagttaatgctcatcatacatgatctaacaacattctatagcttatttcctttattatgaagatatggtagtagcaaggttttaaattgcgatcgcagttacaatttcgtcgtgatttttggtgttaccggaaattacagacaaatgcggttgatgcaattaataccttgagtagaagtggtaattaatgtactagagggtttggtcactacgcttgtgctcagtaacaaaaaattctcaacaactgctgaggcatgaagactcagggaaaggtttgctaccgagcacttgcagggtggtgataaacttagttatatcaatagaggtttggagtagtttgcttttggtttaattaataagatggttgcctcaagtgatgaagcagatgaattttcttctcatagcaacagagattagtgttatgtcaagtttagtttttttgtaacctcttcaatatggaggaaatttatccgcttcattactaaatggtaaccctcactcattctaggactttattgtatgtaaggtcttgttaaaatatctttgtgacgctttgatgtgaattaatttgctgctataaatggatagccaatgtgtgtgtttttttcaag

SEQ ID NO: 20079 - DNA, 1787 bp, Glycine max
  Clone ID: LIB3170-083-G12_FLI
ggttgaacaaaaaacaatggagaacataatttccatatgtgatcacatgcctgtaggattcagattccgtcccacagatgaagagcttgtcgactattacctcaaacacaagcttctggctgatgatttccctgtccacatcatccctgaaatcgacctttgcaaggtggaaccttgggacgtaccaggaagatcagtgatcaaatccgatgacccagaatggtttttcttcagtcctgtggattacaagtacttgaagagtaaaaggtttaacaggacaaccaagcgtggcttctggaaagccactgggaatgaccggaaaataaggataccgggcaccagcaatgtcattgggactaagaagactcttgttttccaccaaggccgtgttccccgtggtgccaagaccaactgggttattcatgaataccatgctgttacctcccatgaaagccagagggcttttgttttgtgccgcttgatgaagaaagctgagaaaaaaaatgaagggggaattgaggcaccgtcttttgatgaaggggagcccagtatacacatggtttctgactatggaaatccggcaagagcagaaggcattgcatctgtagatattattcctggagtagatatggatgaaatctttcgggcagtggatcaagctgagaaattctcccccccagtacaacagtctccaactggcattgggctggaagattttttcccaaactctccattgttcaatgcccgttttggaagtgaaaacatcaatatgcaaacttcacttgaagttacggatgacgaagatgagttggtaaattcatttttggtttatgatgaagaatttgttatcaatgaagaaagaagacactgttttgtcaatagttccacccaaccaaagtcattgagaagggtatacaatgaaagcagtggaaattggttcagacttcaggaaagagtttatttttattgttttccctctctttttctagaactaaactgaatttggtttataaaatactgtcattgttgaaattaatggatcgaggattggatgaccagaaagacatgagagagaaacacgttagagagagagagaaagagagacagggagagagacaggcactctgtagaggaagagcgcctgagagagggagagcacgccttttagagagacagagaggttccctgagaaatcgagagcctacaagagactgttcttatgacaacaacagaatatacagacgcagcagggagagggggagagatagagataggcgacacgaggaatatctcccacgttgtcggagcatctctagaaagacgcgacaagacgaaacatacggaagctcgaagggggggaaccaggaacataatagacaggatgctgaacctgatcaggaagtatggaccaaggtgataagaaggagggaagcaaaggcagcaaagaagaactatacccagaacagatcactacataacctctcggcaaaccaccccaactggagagacaaggaggatattacatccttttacttcactaatttcacagacaacgttaatgaagtgaggctctgggggaagtttaagatttggggagatgtgcgtgaagttttcattgccaaacgtcgtaacaaggagggaagaaggttcggcttcgtgaggttcaaggacgtttcggacgtaaagcttttggagacgcacctggacaatatcttcattgatgaccataagctgttcgttaaccttcccaggttcacaaggctagcgtcgaatgttcatacgcatac

SEQ ID NO: 20080 - DNA, 1826 bp, Glycine max
  Clone ID: LIB3170-086-G7_FLI
aaacggacctcggccgtgaacaagagggctttaagagaagacggcggcggtggtggcggcggcggagcgatgaggtaccgcggcgtgaggcgcaggccgtgggggcgttacgcggcggagataagggaccctcaatcgaaggagcggcgatggctgggaaccttcgacacggcggaggaagccgcttgcgcctacgactgcgctgctagagccatgaggggtctcaaagctcgcaccaacttcgtttacccaacttctccgcaaccttcttccgccaccaccgaacacttgttccctaacttcaacaacaacaacaactttcacaaacactcactcttcaatcaccaccgtaaccgccacataaccggttccaacacttgttttgaccaccctcactccgttgacttttcagcccctcgaaacccttcttctctcaacatgcttctctttcgtgaccttattcactctaacccttctttgctttcttcttcttccactcagaacttccacgaccagttttacaacaagagtacttctactttttcatcgttacctgtttctccttctcttgctccccctagttattcgatgaataattcttgtggaggctctttgtctgttaagatgaacacgtttcccacttgtggaactaattttgctgaaaaaggtgatgatggtgatggttttttctctcgtgagtcttcggattcggggttgttggaggagatagttaacaagttcttgcctagaacgaagcctagtaaatgcgagactacttttgcaaatcctcaggaggagtcgcttcttctccctccgcttgtttctgaatcaacgcttgtttccaccgggcaacaatactatgatgatgacatgaaaaaagggtttccaaagaacgagggtctaggtgttttttattctgatcaaggttttcccatgcagcaattcgacacctctaatgggtttaatagcatggctatggagaatgatcaaaacattattaataatgcagagaactgtgtcgttgaagatgtttttcagtaccaagagcttcttaatgctttcgcaatcagaatgcaaaatgcttaattagttaacatttccagtgtctgcatctcaatgctagttgtgtatgtagtcatgttgaatctgtcacttctcaatgttggtctggcctttcaattagaaacttattaatcattagggcctttgttcctaggtttaattaaccaggttattttgttcgtgcttactatgtagtattatgcccctctggcttccttccagtagtattatgtatggaactatggataatttgaaagcaatatatttttagtattggtattttgggtaacctttgaaattgtcatgtttataattgtttttggttaagcacgcctttgcccttttcactatatgttttctttatgatatatggacattcattttttaaacacctaataactattttttattttttatacgtgaaatcatattatctataacatttatgttttttttttatttctgagtgttaggtattcattaacatattgggtatttatcgataatttttgttttgtttttctactctgaaaaagggattaatgagaaccacgcactcagagtgaatttgtttttgctagatgacgatagcttctgcgttgactttggaaatagaaaattagtcttgcgttgcacaataccttttttctgctttgtatggatctatatattcttccttctgtttggagaacgtattggtctggtttcaatagtgcctggttggtgttgtccttttcttcttagtattttgttgtggtattgtg

SEQ ID NO: 20081 - DNA, 2608 bp, Glycine max
  Clone ID: LIB3170-086-H2_FLI
gacaacacaactgtctccattcccgcactaaccgacgcgcgccgccgccgccgccgccgccgtaacctcaatctccgaacaactcacttgcttcaaatttcaattcctgtctctccgcgcttatcttctactacattccaactgttagtaaaatagggtttgcttcggttagggtttcttcctcagatggataacgcccgatcagcgaacggcgaggagaatgcggcgggaatcccggacgatttgcggtgcaagaggtccgacgggaagcagtggcggtgcacggcgatgtcgatgccggacaagaccgtctgcgagaagcactacatccaggcaaagaagcgcgccgcgaattccgctatgagagcgaatctcaagaaagcgaagaggaagtcgcagtcgctgtcgctgaacgagtccgataatgtttatatggagagcaagagcgacgatttcgatgttcctctctcctccattggcctctctcagaagaagctctccaagaaccagttccgctacgagccggagcgcgacgcgccgcgaagaggctcgtccgcgagacgctcttcgaacctcaacgacgatgatgatgatgacgatgacgacgacgtggatggggatgcggatgctgatgtggcgctctatgaggaagagaattgggtctcctgtgactcgccgccggattcttcgcgcaagaggtcgcggaggagcttggaagctaatgctaccactgaatattcggacggaacctccgccggttcttccgacgaggacaccggcgggcagacttgtcaccagtgccggaggaatgaccgcgaccgagttacttggtgtcaacggtgtgataggaggggatattgtgatagctgtttatcaacatggtactcggacatttcattggatgaaattcagaggatatgtcctgcttgccggggtatatgtaattgcaagacttgtttgcgaagtgataattcaattaaggttcggatacgcgagatacctgttctagataagttacagtatctccatgtgctgctgtcgtctgtgctacctgtggtaaagcagatccactgtgaacagagttttgaagttgaacttgaaaagaagttgcgtggtgctgaaatagatcttccaaggataaaattgaactcagatgagcagatgtgctgcaatttctgtaggatacctattactgattatcatcgacgctgtccaagttgttcatatgatttgtgccttagttgctgtcgagatcttcgagaagcaactgcagatcacaataaagaaccccaaacagagcaagcaaaaacttctgatcgaaatatattaagtaaatttcctcattggagatccaatgacaatggaagtattccatgtccccctaaggagtgtggtggctgtggttattcttcactaaatttaagccggattttcaagatgaactgggttgcaaagttggtgaaaaatgtagaggaaatggttagtggctgcagaattagtaatgccgatggtccaccggaaaccgggctgaatgatctgaagctttgccaatattctcacagagaagccagtgatgataattatctttattgcccagcatccgacgatatcaaaactgatgggattgacaattttagaaagcattggaaaactggtgagcccattattgttaagcaagtatttgatgggtcatccatttcaagccgggatccaatggtcatatggagagggattctagagacaatagatgagaaagcgaaagatgaaaaccggatggttaaggccatagattgcttagatgggtctgagattgatattgagcttgctcagttcatgaaaggatactttgaagggcttattcttgaaaatggttggccacagttattgaaattgaaagattggccttcacctagtgcttctgaagaatttctgttgtaccaaagacctgagtttatcagcaaactacctttacttcagtatattcactccaagtggggccttctcaatgttgcagctaaattgcctcattactccttgcagaatgatgtaggacccaagatatatatatcttatgggattagtgatgaacttggtagaggtgattcagtgacaaatctccacttcaatatgtgtgacatggcgtaccttttggttcatacaaatgaagtaaagctgaaggactggcagagaactaaaattgaaatgatgcaaaaagctaaagctaataaggaatttgaggcaaaagaatcacatggggatcctcaaatatcttcaagggggagttcacctgattcctcacttggtacaaaaagtagtggactggaaatagactcaaaccagaataagtcaattatggatcaagggtttgaaatttattctagtgctgaaggtaatacggccaattgtaaacttccattcaatcaaaatggagacgtctctgagaaaacacatcctggagttctttgggatgtttttcgtcggcaggatgttccaatattgactaaatatttgaaaatacattggaaggaatttgggaagtcagatgatcttggaaatgaatttgttgaatggcctctttatgatggagctatttttcttgacaaacacc

SEQ ID NO: 20082 - DNA, 833 bp, Glycine max
  Clone ID: LIB3170-087-A3_FLI
gagacgcttcatccctctctctttctctctcccaaaacgagtctttggatttggattagattcagattgtggccgtggcagccagcagcaatatctctaaactcgaaaaatggatcagcgaaagctacgagactcgtccaattcgaaacccgcttcagatgcagcaccccaacacgtcactctcacctctaaccgcttccgcaactctcaagctgctgtgagggagagagagaaagagaagggtgaaggggaaaacgaggatccaagtgcggcacgaaaggttctaaaggcagaccgcgagaagctcagaagggatcgactcaacgaacacttccaagagttgggaaacgcgttagatcctgatagaccaaagaatgacaaggcaactatcctcactgagaccgtccaaatgctaaaggacttaaccgctgaagttaataggcttaaaacagagcataaaacactttctgaagagtcacgcgaactaatgcaagaaaagaatgaactcagagaagagaagacatctcttaaatctgatatagaaaatcttaatgtgcagtatcagcagagagtcagaatcatgttcccatggagtgcaattgacccttcggctgtcattagtcaaccttactcatatccagttcccatacatatcccttctgctccaatctccatccacccatctcttcaaccttttcctttctttggaaatcaaaaccctggccacattcctaatccttgttcaatgtatgtcccatatactactccaactagccaccccccagttgagccgccatcaatgatgtatgcttccacgtcccacgcatcgaacc

SEQ ID NO: 20083 - DNA, 1385 bp, Glycine max
  Clone ID: LIB3170-088-C1_FLI
caattatttaaggcctgatttaaaaagaggaacattctcacaagaagaagaaaaccttatcattgaacttcatgcagtattagggaacaggtaattgtaattgtaattttaattcagtctctctcatgattgaattaatgaattctctccctttttcttttctactgtggttaacatttatttttctttttcatttgcttgacatgcatattattatcctgtgctgtctcaggtggtctcaaattgcggcacagttgccggggagaacagacaatgaaataaagaatctgtggaactcttgcttgaagaagaaactgaggcaaaagggaatagaccctgtcacacataaaccactgtctgaggttgagaatggagagaaagcagcagaagtgtctaatgaactgaacctcctgaaatcagagagctccaagtctgattcagcatcctatgagcagagaacatcaatttctccaaaagcctatgcacctgagatggatggttcctgcagctccaagattgaaatcaattttgtaaccaacaacaactgttacaacaaagacttgttcctagacaggtttatgagtagtagccgccaagagagttacaccactagttgccagccctcagatttgatggggaattttccaattcagatgagttatgcaaccaatgatcagtgtctccctaatgattcaaactctagtcattggttcagccaaactggaaggtcttttgatatgaacactgagtttcctttcaatgccgctgtcacttctatcaatcctacacctacaaccaacttgtttcttcctaataattctttttgctacaagccttcacttgctgttccctctgacaatgtttccataccctatggatcccattactgggaagccagtgcctccaacaacagcaatagtagcacagaattgagaagtagcagccccttgaacatcttttcttcttggggattggcagattgtggcacctctactactaaagaggcacaaattcatatgatggagaatcataatacagaagaagctaagtgggatgagtaccttcataaccctatctcaatgctggcttcttctgtacaaaaccaagctcctgagtctctatgcaatgatataaaaacatccatgcatttggtacctgatactttaggggctatgttacctcataaccataccaagcagcaagaacagtctcaaacttctagtttcttttccaaggacatccagaagctcagggcagcctttggacacatgtaaaaggattttagaaagggttccaattcaagggattgctattcttagtacaggtgtgtgaaaccacagattttttgctcttgtatgtaggtctaatacaaaacatttatttac

SEQ ID NO: 20084 - DNA, 1108 bp, Arabidopsis thaliana columbia
  Clone ID: LIB3175-004-E9_FLI
gttttagctgttgctctctcggaagccagagagaagagggaagaggaagtctaattcctctgcgttttttgcaattagggttttctcaattggaatcgaaaatggtgacagacaagagcaagaaggcgaaaaccgaagaagaaaacgtcgagcaaatcgatgcagagcttgtcctctcaatcgaaaagcttcaagagatccaagacgacctcgagaagataaatgaaaaggctagtgatgaagtgttggaagtggagcagaaatataatgtgataaggaaacctgtttatgacaagcgtaacgagatcatcaaaaccatccctgatttctggttaactgctttcttgagtcaccctgctttaggtgaacttttgactgaagaagaccaaaagattttcaaatatcttagctctcttgatgttgaggatgccaaagatgtgaaatctggatactctatcactttttccttcaatcccaatccattttttgaagatggaaaactgacaaagacttttacctttctcgaagaagggacaaccaaaatcacagccacgcctatcaaatggaaagagggcaaaggcctggcgaatggagtgaatcatgagaagaatggaaacaaacgtgcactacctgaagagagcttctttacctggtttagtgatgctcaacacaaggaggatgttgaggatgagatgcaagacgaggttgcagatatcatcaaggaagatttgtggcccaaccctctcacctacttcaacaatgacgctgatgaagaggactttgatggagacgatgatggagatgaagaggagaaagaaggtgactctgatgaagatgatgacgaagaagacgaagttggtgaggaatgatggcagggatacccagaaaccacatttgcttacatgtcttctctataacagagtgtgtaaagttttgtgtgttgaaaggtttttaattttaagcaaaagtggattatgacgacaacagacaagcttttaattttattttaccgtaatagttatatcttgttgtaagaaaccattttcagccttttgttggaaaatcctgcttaaatggtttttgagtcttacataatagcttcttcatc

SEQ ID NO: 20085 - DNA, 784 bp, Arabidopsis thaliana columbia
  Clone ID: LIB3175-016-G5_FLI
tccggattatcgacccggttgaagctttacaggacccgacgtttctgcacaaaaggagagaataaactcgagaagacggaatctagcgttgcgcatcacagcgacactgaatctagtgtttctcgctacgatgagacctataagaaactcgataagctcgatttcgttaccgctgcgaagatcttgttcactgaaccacccaagaagaacaaatttgggtttgattggcatgtggtgcaattcatcatcgtctgcttgccatctgtagctgtgtatctggttgctcaatatgctcgccggaaaatgaagatcatggatgctgaacttggagagaagaaaaggaaagaagaagaaaagaaagagaaagaagaagctgaacaaaaggcattacaagtagaggcagcaaccaagtctcacgaagagctaatggagatgagacagagactgggaaaaatcgaagagacaataaaagaaattgttttggaaaccaagaaaccttcagggaatgctccaaccaaaacccaagaagatcaatctactaaactctccccaaaagaagtatcacagccagaaaaagaacacaagggcaatgtacagaaaccaggtgatggacctcactgagatgattagaagggaaacttaggtggtagatgacgaagaatgtacccttctgtgggttattattcttttggaactgatacactagttgatgcagttctctcattttacttttgtttgttgaatcacctttataattaatatagattacaaggatttgcaagct

SEQ ID NO: 20086 - DNA, 655 bp, Arabidopsis thaliana columbia
  Clone ID: LIB3175-017-E3_FLI
caaaaccatcacagcaaaaaaactcactccctagaaaagtttgaaaatggcgaaggcagataagaaaccagcggagaagaaaccggcagagaaaactccggcagccgaaccagcagcagcggcagagaagaaaccaaaagccggaaagaaactcccgaaggaaccagccggcgccggagacaagaagaagaagagatcaaagaagaacgttgagacatacaagatctacatcttcaaggtgttgaagcaagttcatccagatatcggaatctccagcaaagccatgggaatcatgaacagtttcatcaatgatatctttgagaaacttgctggtgagtcttcgaagcttgcgaggtacaacaagaagccgacgattacttctagggagattcagactgcggtgagacttgtgttgcctggagagttggcgaaacatgctgtttctgaagggactaaggcggttacgaagtttacgagttcttagatttggaatgtggttttgtaatggaggagaagtagtagtagtagttggaatgtgaaatagggtttatgcttttgggtatctttgagggttatgtaatatgggaattagggttttaatttatggcacggctatgaaatctacttaattttcccaatgttcgattgcaatttc

SEQ ID NO: 20087 - DNA, 977 bp, Arabidopsis thaliana columbia
  Clone ID: LIB3175-018-E5_FLI
ctgttcgagttgtcaggtctcacaaggagaagcgttctgcatacgcccctgaggaaggagtgagatatgatggggtttacaggattgagaagtgctggcgcaaagttggagtacagggttcttttaaggtctgtcgttacctgttcgttagatgtgacaatgagccagctccatggaccagtgatgagaatggagatcgtccaagacctatccctaatattccagagcttaatatggccaccgacctgtttgagagaaaagaaactccatcatgggattttgatgaaggtgagggttgttggaaatggatgaagccgccacctgcaagtaaaaagtcagtgaatgttttggctcctgaggagaggaaaaatttgaggaaagccataaaggcggcacactcgaataccatgagggcaagacttctgaaagaatttaagtgccagatctgtcagcaagtgttgactcttcctgtgacaacaccctgtgctcataacttctgcaaggcttgcttagaagcgaaatttgctgggaaaactcttgtgagagagagaagcacaggtggacggacactacgctcaaggaagaatgtcctgaactgcccttgttgcccaacagacatatctgattttctgcagaaccctcaggtcaacagagaagtagcggaggtgatagagaagctaaagacccaggaagaggacaccgcagagcttgaagatgaagatgaaggtgaatgctcaggcaccacccctgaagaagattctgagcaaccgaagaaaaggatcaagttggacactgacgcaacagtttctgcgaccatcaggtgaagttggtaccaaagaactctttagtaaaaaaaaactctagtgccttattttgtacgcaatatttgtggaacgtacctattgcgatgtgttattttggatcttacaacaactaagttattaatatggaacgtaaactatggttctcaggttttc

SEQ ID NO: 20088 - DNA, 2192 bp, Arabidopsis thaliana columbia
  Clone ID: LIB3175-019-D10_FLI
cttcttcatcttccaatttccacaaccatttctcacttcgtcttcctcgtcggtgatttctagggttttgttcttcatctttcaatctcaaccgagaagaacaaatccttcttctgagaaattaacgcttgcaaatggcgaggaagatgtctcttgaagcttttgtgtcaacaatggctccacttatagacatggagaaagaagctgagatctcaatgtctttaacctccggtgcttcaaggaacattgaaactgctcagaagaaaggcacaacgattctcaatttgaaatgtgttgatgttcaaacaggtctaatgggtaaatctcttattgagtttcaatccaacaaaggagatgtgcttcctgctcacaagtttggtaaccatgatgttgttgttttgaaactcaacaaatctgatcttggttcgtctcctcttgcgcaaggagttgtttaccggttaaaggattcttcgattactgttgtgtttgatgaggtacctgaagaagggttaaacacgtctcttaggttggagaaacttgcgaatgaggtgacgtatcgtaggatgaaagatacgttgatacagctgagtaaaggtgtgttaagaggacctgcttctgatttagtgcctgtcttgtttggtgagagacaaccatcagtgtctaagaaggatgttaagtcctttacgccttttaacaagaaccttgatcaatcgcagaaagatgcgattacaaaggctttatcctcaaaggatgtgtttttgctacatggtcctcctggtactgggaagacaacaacggtggtggaaatagtcttgcaagaagttaaacgtggttcaaagattcttgcttgtgcagcttcgaatattgcagttgataatattgttgagagacttgttccacataaagttaagctggtgagggtgggacatcctgcacggcttttacctcaagtgctggatagtgctctagatgctcaggtcctaaagggagataacagcggtctagcgaatgatattagaaaggaaatgaaggccttaaacgggaagttgttgaaagcgaaagataaaaacacaaggagactaatccagaaggagcttcgaactctgggcaaggaagagcgtaaaaggcagcaattagctgtatcagacgtgatcaagaatgctgatgtaattctcacaactttgactggtgcattaacacgaaagctcgataatagaacttttgacttggtgatcattgatgaaggagcacaggctcttgaggtagcatgttggatagctttgctaaagggttcaagatgtatacttgcaggagaccatctccaactcccacctacaatccaaagtgctgaagctgaaaggaaaggattagggagaacactctttgaacgactagcggatctttatggagatgagatcaagtccatgcttactgtccagtatcgtatgcatgagcttataatgaactggtcatccaaagagctttacgacaacaagataacagcgcattcaagtgttgcctcacacatgctttttgacttggagaatgtaacaaaatcttcttcaacagaggcgactctactcttagtggataccgctgggtgtgacatggaagagaagaaagatgaggaagagagcacctataatgaaggtgaagcagaggttgcaatggcacatgccaaaagactaatggagagtggagttcaaccttctgatattggaattattacgccttacgctgctcaggttatgctgcttaggattctgaggggcaaagaggaaaagctaaaggacatggagatctctacagtggatggtttccaaggtcgagaaaaagaagctatcatcatttccatggtccgatcaaactcgaagaaagaagttggattcttaaaggaccaaagacgaatgaatgtggctgttactcgctctagaagacagtgttgtatcgtctgcgatacagagacagtgagcagtgatgcgtttctcaaacgtatgatcgaatactttgaggagcatggcgagtatctcagtgcctcggagtacaccaactagtagccgcaagtttcttaaaatctcaggccagttgatagatacaagtttcccggtttggttagctagcaaatcatcttcttgaaaaccatgtgataatgtaactaaacctgattttattatcataccaattcttggtac

SEQ ID NO: 20089 - DNA, 719 bp, Arabidopsis thaliana columbia
  Clone ID: LIB3175-019-H10_FLI
atctgtgcttcttcttcttcacccagaaaagtaaaacaaaagtcaaaacaatggcgccgagagcagagaagaagcccgcggagaagaaaccagccgccgagaaaccagtagaggagaaatcaaaagccgagaaagctccggcggagaagaaaccaaaagccggcaagaaactcccgaaggaagccggggccggcggcgataagaagaagaagatgaagaagaagagtgtggaaacttacaagatctacatcttcaaggttctgaaacaagttcatccagatattggtatttcaagcaaggctatgggtattatgaacagtttcatcaacgacatcttcgagaaattggcatcggaatcttcaaagctcgctaggtataacaagaagccgacgattacttctcgggagattcagactgctgttagactcgttcttcctggtgagctcgctaaacacgctgtttctgaaggaaccaaggctgttaccaaattcacaagctcttgaattagtaaattagggtttgtatactctgaatttgattctgatgttgtcataacttgtgttaggatttctctttcgttttattaagctttaattatcattctccgttgtaaagtaatcttatgaatctgtcttcgaatcaaaagttctggttgttaatggctcaatgttgttctcttgtttaatcaatgtagaatcatgagaatcattagattaagc

SEQ ID NO: 20090 - DNA, 1934 bp, Arabidopsis thaliana columbia
  Clone ID: LIB3175-020-B8_FLI
gagaaaagagagttcgcgtgctgtttgagtatcatatctaatcccagattctttcttccttctctgtatatttccacgacggttgacctaattttcgtcaccatccaattggatttgagaagagagaaaagtattctcatcatctgaagaagaagaaagatagattgatagatagagagagaaatgggtaattcatttgggtgttctgcctccggcgagagattagtgtcggcggcgagagatggggatttcgtggaagccaagatgcttctcgattgcaatccatgtctcgccaagtattcaactttcggtggtcttaattctcctttgcatttcgctgcagctaaaggccataacgagatcgtcggattgttgctcgagaacggagctgatgtgaattccagaaattattgcggccagacagcattgatgcaagcttgtagatacggacattgggaagttgtgcaaactcttctgcttttccgatgcaatgttacaagagctgattatttagctggaagaacagcgcttcatttcgctgctgtgaatggtcacgccaggtgtattagacttgtcttggctgattttttacctagtgataaacttaactctcttcctgaaactggtgttgtcactgcaaagaacaaatctgagcaaagcgcattgtctaaatttgtgaataaggcggctgatggtggaataacagctcttcacatggctgccttgaatggattatttgattgtgtgcagcttttgcttgatcttgaggccaatgtttccgctgtgacatttcattatggaacatcaatggatatgattggagctggaagcacgcctttacactatgctgcttgtggtgggaatctgaaatgttgtcagattcttcttgcaagaggtgcaagaaagatgacattgaactgcaacgggtggctacctattgacatagcacggatgtggagtcgtcattggttagaaccgttgctttcaccaaattctgatgttgtcattccagcctttcctcattccaactacttatcattgccccttttgagtatcctcaacattgcaagagagttcgggttgcagtctgcaaccattggagatgaagtcgatatctgtgccgtttgcctggaaagaacatgcacagttgctgctgaaggttgtgagcatcagctatgtgtgagatgtgcgttatacctttgctcttcaagcaatgttccctcggtgacagttggcccgcccggatcaattccttgccctctttgtcgacatggaattacagcgtttaaacgactcccaagctccctgacaagagaaatgaagttacccatgtcactcgggttctgtgcaccatgtatgcttcacacgggagacacaacagatcaatcatcaccgacatgcccaccaacagaacaacgcagcagcaagacccgtgcagcctcggtttcatctgatatattctgtccggtaacatgcagcccattcccttcagtaaacattccaatgtgcacctgcaacgaagggacatgtccaaactttgagacacatggaacagagagacatagcgaagaacacgtcgaatcttctccttctcgaacaacaactgaacaggagaagatagaagaagggcaaagacttgggaaaacaacaacttgttcaagtatgttctggggaagaagaagctgtagcagagagaaccaatgcaactccgagatcaatgcttgatcataaacatattatttgtatgtacagagaaagaaagaggagaatctatatgtctcccatcatttcttacttttaaaatggggatgagccacaacacagagagtcttcttgttaggtttgtaacgtttgtttttgactttggagaggctcaagttattaattatggatgatgatttgtaattgtcaacataatgatggggtcattttgc

SEQ ID NO: 20091 - DNA, 943 bp, Arabidopsis thaliana columbia
  Clone ID: LIB3175-020-G2_FLI
tcagacacttcgtcaaaccgaaccaccaaagatccatggaggattacatgtttcagttattccaccagctgatgatgtgaaaactgatatttcacaatcaagtaggataacgggggacaacactcacaaggattataatagtcctaccgcaaagcgaaggaagaaaggagggaacattgagctgagtccagtggagaggtcaaccaatgattcacgcattgtggttcacactcagactctgtttgatattgtgaatgatgggtaccgatggcgtaaatatggtcagaaatcagtaaaaggcagcccatatccaaggagctactatagatgttcaagccctggatgccccgtcaagaaacacgtagagaggtcatctcatgacacaaagttgcttataacaacttacgagggaaaacacgaccacgatatgcctccaggaagagttgttactcataataacatgctggactcggaagttgatgataaagaaggagatgccaacaagactccacagagctcaactcttcaatccattacaaaagaccagcatgtcgaagatcacttaagaaagaaaacgaagactaatggctttgagaaaagtcttgatcaaggtccagttttggatgagaagctgaaggaggaaataaaagagagatcagatgcaaacaaagatcacgcagccaatcacgccaagccggaagcaaagtcagatgataaaaccactgtttgtcaagagaaggcagtaggaaccctggagagcgaggaacaaaaacccaagacagagcctgcccaaagctaagcattcagtgttgtaccgagtggtaatttatatggctgttttaacatagattagtacaggcgatatggttatagactgtacagttgttgttcaggcgggaccagatttagattagtgtttaatggaatagtatgctttaatacc

SEQ ID NO: 20092 - DNA, 1289 bp, Arabidopsis thaliana columbia
  Clone ID: LIB3175-022-A2_FLI
gttctttcgaaaaacgaaaattttcgttggttccctccgatttggcctgctggtgaagatatggccggagctaaagattcgggttgcgatgatgatctccgaattgctggtggatgtgaccctggaaaacgcgggaacccggaggattcctcgtctcctgtcgaagtctcgtgctcgatttgcctcgaatcggtgctcgatgatggtaccagatccaaggctaagctccaatgtggtcaccagttccatttggattgcattggatcagcatttaacatgaaaggagccatgcaatgccctaactgtcgcaatgtcgaaaagggtcagtggttgtatgcaaacggttctactcgcccctttccagagttttccatggaagattggatccctgaagaagacttgtacggtttaagctatccggaaatgcaatatcgggtccattggtgcccgtttggtgaactctctcaagcagcagcttctttcgaggaactggaacctgcaaccactacatatcatactgagttccatggacatcacgccgctgctgtgaatcattcgtatcttgcatatgttggacctggcccagccgctaccccgagaactagcgacaataacagcacagatgatcatccctggaacagccactctaacgatcactttcaccagcttcctgttgccccccagtatcatcaccattccccatcgttttcactacccgctgctcatgtggttgatggtgaagttgactcttcagcagcacgaggcctaccttatgcgcatccatttctttttagtcaccggtctaatcaaaggtcctcaccagcaattaacagttaccaaggaagcagcacccaaatgcgtgaacagcatcatgcttataatcatcagaggcaacaacatcatgccaatggtcccactctcgcatcacctctcatctccatgacaagaaggggattaccgccgccgccacctcccccaccaatgccagatcagaacgttggattcttcatttatccaggtggacaccatgaaccagaaaccgatcaaattcatgcatgggagagagattggttcccacatttccctgtcccatcgaatcatcgcacgatccctagcttgtggcatagacacttctgagagaagttgtgtcagaactctacagtcgcctgggagaattctatcaggcttaatgatcaatgtataaaagaaaactggggacttgtttgatcgatcaaaacttgtttatgatgtaactataactggtttccaatgtacattgtgagctttcc

SEQ ID NO: 20093 - DNA, 1682 bp, Arabidopsis thaliana columbia
  Clone ID: LIB3175-024-F6_FLI
aagagagaagctttgagaaagaaagaaagaaagacacagtgtgtatcaatctctgtactttcacaagcttccaagctctcttatcattcactgatttttggttctcgagaaaaaagtgaagatttttgagattctctttcgatggattacgaacgaatcggaaagacccaggttactagtagcggcggcggattttctccggggaagttaaggagtatgcttcttctaggtgttgatagaaagaagaatgaagaagaagaatcaactcctacaatgagatctgggtctaatcaaattgatgaccctagggtttatgttgctagtggattagatgattgcaaagatgttgatgttgtgagtgagattactgattgttctacttcagggatagctagatcgattagtttgggtcttcaagagtattctgattatgataatgtgaatgagatcaagagtgtttctgcatcatctgtctttgagtttcaaaagactgagaaggaaaaagttaatcaaagaatgcctattagatcattctctaaaccagctccatctaaatgggatgatgctcagaaatggattgctagtcctacggctaaccgaccgaagactggacaggttcaggttccgggttcgaagaaagggcctagctttggtcgtcagtcttctatgaagattgttgaagttgctgaacatagagtggttgaagagcctgatacaaagagaatagatgtaagccaagtgaaaaaggatatgggaaacaagtttggtagctgggaagttgattcgtacactaccgtggattcatatgtcaaaccggttcttatggttgagaactctattgtagaatcagcaactgaagttaatctcagccgtcatgactcgtcagtcgcaactgcgtttgctcaaccgccttcaacggcaaggtctgtgtcaatgagagacatgggaactgaaatgactcctatagcgagccaagaaccttctagaaacgggacaccgattagggcaacaacgccaatacgaagtcctatatcttctgaaccttcaagtccaggcagacaagcatcagcttctcctatgagtaacaaggaactgtcagagaaagagcttcaaatgaaaactaggagagagataatggtgttgggtactcaacttggtaaatttaacattgctgcttgggctagcaaggaggatgaagataaagacgcatccacatcattaaagaccaaagcttctctacaaacttctaaaagtgtttctgaagctcgtgctacagcgtgggaggaagcggaaaaagctaagcacatggctaggttcagacgcgaagagatgaagattcaagcatgggagaatcatcagaaggcgaaatctgaagccgagatgaagaaaaccgaggttaaagttgagaggattaagggacgagcacaagaccggttgatgaagaaactcgctacaatcgagcgcaaagcagaggaaaagcgagcagcggctgaagcaaagaaggatcatcaggcagctaaaacagagaaacaagctgaacaaatccgaagaacaggcaaagtaccttcattgttgttctcttgctttagcttttgttcttaaatccaatcctattgtgaatgtgatgttgttaattctcaagaacacatctttctatcatcatttgtataataaaagctttg

SEQ ID NO: 20094 - DNA, 2065 bp, Arabidopsis thaliana columbia
  Clone ID: LIB3175-025-F10_FLI
atttgctagcttctcttgctggaaagttgttggaagaaagtgaaagttcctcaacgtctacctatgcatctgaagctgataatcttgatcatttgggtggactgattaagcaagaacttgaagatggctatactactaagccttgtaaatccgagtttttcgatccaggaaaccctgcttcaaagtctactagtgaaaatactagcgtgacttgtttgccattttcgtctttcgaaaatgattgcattttggagcaaacaccggtttctgattgtaagagggcatctggtttgaagtccctggtagggagcatcactgaggagacatgtgttgttaatgaggatgccggatctgaacaaggtgctaatactttcagcttaaaggatccaagtcaattacattcgcagtctccagaatcggtccttctggatggcgatgtgaaattagcaccatgcacggatcaagtccctaatgattcttttaaaggatataggaatcattctaagttagtttgcagagatgatgacgaaaactattgtaagtattataaatttagtgacaaatgtaagtcatataggcctctctcccgggttggcaatagaagaataatgcagtcggtgagagcaatctccaagttgaagtgttttgaagacactagaacagatggtcgtttgaaggctctctaccgcaagagaaaattatgttatggttacaacccatggaagcgtgagaccattcataggaagagaagattgtctgacaaaggtttggtcgtaaattatgatggtgggctcagtagtgaaagtgtttccaattcacctgaaaagggagaatcagaaaatggtgatttctctgctgcaaaaataggtcttctttcgaaagactcccgtgtaaagttcagcatcaagtcccttaggattccggagcttgtaattgaagttccagaaacagcaacagtaggcttactgaagaggacggtgaaggaggcggttactgctttactcggtggtggaatacgtattggggtgttagtccaagggaaaaaagttagagatgacaacaacactctatcacagactggtctttcgtgtagagaaaatcttggcaaccttggcttcaccttagagcctggtttggaaacactgcctgtacctctttgttctgaaactcctgtcctttctctgccaactgactctacaaagttgtcagaaaggtccgcagcttctccagcgttagagactggaattcctctccctccccaagatgaagattacttgattaatttgggaaatagtgtggagaacaatgatgaattagtcccacatctgagtgacataccagctgatgaacaaccttcatcagattcaagagcgctggttccagttttggccttggaatccgacgctcttgcacttgttccagttaacgagaaacctaagcgtacagagctttcacaacgcagaaccaggagaccattctctgttacagaggtagaagctctagtaagcgcagttgaagaagttgggactggaagatggcgtgatgtgaagttgcgttcttttgagaatgcaagtcatcgaacctatgtggacttgaaggacaaatggaaaacgttggttcacacagcaagtatatcaccacagcaacgaagaggagaaccagtgcctcaagaactgctagacagagtcttaggagcacataggtactggacacagcaccaaatgaaacagaacgggaaacatcaggtggctacaacaatggtggttgaagcaggttcgtccatgtaaagaaggagaatggtaataacaataactttcacttgacgactaaggaaccaaagtgggcaactgtacaaagggaaacaacaaaatacagaaacatacttaatttctgaaaagaagagtctatatttttattttttttaaatcatagctggtagaaacaagacgttccttgacacttttggttacttttatggtaagtctgttcattccaaatttctaattgatttgattatgtaatttggtggtaggaccatggaaaaaggggaaatgtaattttagac

SEQ ID NO: 20095 - DNA, 1359 bp, Arabidopsis thaliana columbia
  Clone ID: LIB3175-027-B12_FLI
ggtttgtggattcgtttgttgcagctaaagcatcgtttggagaacaagaatggtacttctttagtccacgagatcggaagtatccaaacggagcaagaccaaacagagcggcgacttcaggttattgtaaagcgaccggtacagataaaccggtacttgcttccgacggtaaccaaaaggtgggcgtgaagaaggcactagtcttctacagtggtaaaccaccaaaaggcgttaaaagtgattggatcatgcatgagtatcgtctcatcgaaaacaaaccaaacaatcgacctcctggctgtgatttcggcaacaaaaaaaactcactcagagtatgattcatcgaaattttcaaatattcttgattcttgaattcttgatcttgattttgggaatatttttttattgtgtgtgtagcttgatgattgggtgttatgtagaatctacaagaagaacaacgcaagtcgacatgttgataacgataaggatcatgatatgatcgattacattttcaggaagattcctccgtctttatcaatggcggctgcttctacaggacttcaccaacatcatcataatgtctcaagatcaatgaatttcttccctggcaaattctccggtggtggttacgggattttctctgacggtggtaacacgagtatatacgacggcggtggcatgatcaacaatattggtactgactcagtagatcacgacaataacgctgacgtcgttggtttaaatcatgcttcgtcgtcaggtcctatgatgatggcgaatttgaaacgaactctcccggtgccgtattggcctgtagcagatgaggagcaagatgcatctccgagcaaacggtttcacggtgtaggaggaggaggaggagattgttcgaacatgtcttcctccatgatggaagagactccaccattgatgcaacaacaaggtggtgtgttaggagatggattattcagaacgacatcgtaccaattacccggtttaaattggtactcttcttaatcaaatgtgtttcgccgccggtgtgaagaattttccggtgacagtgaagatttttttccgattggtggggtcatttgcatgcattatataatttgagatttgtgtatatgttttgggttaattaattggtcacaggggttagaggaagaagattatttagagagcggagaagaagtgaggcaacatatagaaaacataggtttaaaaaatattactgtttgttaagtttaatgattaaatgtataaatcttatacttagatgtttatatatagtttgtatagatgcatatagtttctctcaatgctattttgagattgtattttcttgtaaaggaaatgtttttt

SEQ ID NO: 20096 - DNA, 699 bp, Arabidopsis thaliana columbia
  Clone ID: LIB3175-027-F7_FLI
ccatgagattcttagaaggttggcggagagacgacggagaaaacgacttaacgatcgtctttctatgctccgatccatcgtcccaaaaatcagtaagaggacaggacatcgatattagggagtatgccatagattacatgaaagagcttttagacaaaatcaacaaattacaagatgaggaacaagcaacttggaaatagcaacaattcacatcactctaagctcttcggtgatctcaaggatcttaatgcgaacgaacctctggtcagaaactcaccaaagtttgaaatagatcgtagagacgaggatactcgagttgatatatgctgctcgccaaaaccgggattgctactatctactgtgaatacattaggagactctaggcttggagattgaacaatgtgttataagctgctttagtgatttctctttgcaggcttcttgttctgagggagctgagcagagagatttcataacatcagaagatataaaacaagcattattcagaaacgcaggttatggtggaagctgcttgtaatgagtcatgattgaaactaataaaccaaaactattgtttatttctaataatactagcgcttataaactttagatgttgttttaattcccttgtgagtttggtttttttttcctaggggaaaacattatgagttcagttgtataaacaaaagaaggaaattt

SEQ ID NO: 20097 - DNA, 756 bp, Arabidopsis thaliana columbia
  Clone ID: LIB3175-033-A2_FLI
ttagatcaggggtttaggtctttccattactttttaatgttttttctgttactgtctccgcgatctgattttacgacaatagagtttcgggttttgtcccattccagtttgaaaataaagatggctcgtaccaagcaaaccgctcgtaagtccaccggaggtaaagctccaaggaagcaacttgctactaaggctgctcgtaaatctgcaccaactactggtggagtcaagaaaccacatcgttaccgtcctggaactgttgctctccgtgaaatccgtaagtaccagaagagtactgagttgcttatcaggaaactgccatttcagaggctagtccgtgagattgctcaagatttcaagactgatttgcgtttccagagccatgctgtcttagctctccaggaagctgcagaagcatatcttgttggtctctttgaagacactaacctttgtgccattcatgccaagcgtgtgaccataatgcccaaagacattcagctcgctcgtcgtatcagaggtgaacgcgcttaagccaaccaagaatccgagatttggttcaagtagtttttgttttttatgaaagcaagatcttaattgctgtgttttttaaatctctgggtatgtagtagtaagagtagtaagaagtctgcaatctaagaatgttgtgttctttaagcttattattatgtgtgttgcgaactctttttaactcttttgttaaaggcttatgttttcttaactcgaaagaacgacacc

SEQ ID NO: 20098 - DNA, 1213 bp, Arabidopsis thaliana columbia
  Clone ID: LIB3175-033-C6_FLI
caaagtgagacagaactctctaattagtcccgaaggtttcaaaagggtattttggtaaaatcgaaagagaatcatggacgcttttgatgcgattccagatcctgtggtcatcgacattttgaacagagtcggtgacgtcaaaacgttaatacgatgtcgttccgtttctaaacgattcaactcgttagccactcagtctgagtcgctccttctccaactcgatcagatcctcggagccaccgaatctgactccgagatcgattctcctatcgctagcttcttccgatctctcttcaaatccattcacggtctccttcctcctatcttctccaaaccagctaactctgacgaaatcctaacccgatctccgaaaactccggctcagattctctccggatttgaacggatccggaatctggaggtggaattatacggtggtgatgtcaagcttgagaaaggcgccgccgttaagtggaaggctgagttcgggaaaactctcaagagctgcgtcatcgtcgctttccgttccgcgacggttaatacttcagcagctacggaagctgccgccgtcgtcgacggtgttgttgagtcagattcggagtttgtttgtggattgaagacgcgcgtggtgtggacgatcagcgcgttgatggcggcttccacgcgtcattacttgatgagagatttggtgaaagatcacaaggagatggagaaattgattgtgcgtgacagtgatggtgaaggtacggtggtgatggacgcggcggggatgaaagaatacagagagacggaggtgcgtggggataataaagaatcagagcgcgtgggggaacgaactgtggtacctagcgtgaggatgagtatgagacacgcgccgtcgctgatgctgaagagcgggatttgtctcgaagcagcgacgctggtggtcgtaaggccgactggtgtggcttccgatgataacgatgttgagctggtgacggaggcgttcgccggagatggcgacgattgtatgtacggagaagctgttacggcgttgcttaagcgtaggagaaatgtgttagagatgaattctttctaaggcctagtgggctttttttgggcttccgtttgtttggccctttttaatgtatatacatacgcatcgtacaaagccaactgtactattggcgtacgacttttgggtcaaatgacatcaaatccgaattattcctct

SEQ ID NO: 20099 - DNA, 654 bp, Arabidopsis thaliana columbia
  Clone ID: LIB3175-033-E1_FLI
aaatcgaagatggcaacaaaatccaccggaggtaccgagaaaaccaagtcgatagaagtgaagaagaaactaatcaacgtgttgatcgtcgatgatgatccattaaaccgtagactccacgagatgatcatcaaaacgatcggaggaatttctcagactgcaaagaatggcgaggaggcagtgatcctccaccgtgacggcgaagcatctttcgaccttattctaatggataaggaaatgcctgagagggatggagtttcgacaactaagaagctaagagaaatgaaagtgacgtcaatgatcgttggggtaacgtcagtagctgaccaagaagaagagcgtaaggcttttatggaagctgggctcaaccattgcttggaaaaacccttaaccaaggccaagatcttcccgctcattagccacctcttcgatgcttgatggatgaaggctcattaatgtatctatattttcaatcatgaaatcacctacacgtgtatttgacacaaaaatctgcatttgttgtgatatagggtttctcatatctatgtttgatttattttcttatcgtccgaggtaaaatcatgcaagtcatttcttttggctaataaaatattaaaataaggttttctcttgttgaatgagctaatttacttc

SEQ ID NO: 20100 - DNA, 1343 bp, Arabidopsis thaliana columbia
  Clone ID: LIB3175-033-G6_FLI
gaagcaggggcaccacaggatcaagaggcgtttattaaagaagtggaggccttcaacaaggagaatttcctggaatttaaagccccaaagttttacggacagcccttaaattgtctcaagctttggagagccgttatcaagttaggtggctacgatgtggtcaccacatctaagctatggcggcaagttggagaatcgttccatcctccaaaaacatgcactacagtctcctggacattccgcattttctatgaaaaggcacttttggagtatgagaagcatttaaggcaaaatggtgagcttaaccttcctggttcagcttctcttccgtcttcaggcattgaaaaggaggcaagtagccatcaagcttcagggtcaggcagaacaagaagagatgctgcagctcgtgctatgcaaggttggcattctcagcgccttcttggatctggggaggttactgagcctattgttaaggagaaaggcttgaattcaaccccaaagcaaaagaacctcaaaaacattggtgtgcagaaacaaaaaacaacaaccggcatggaccttgttttttcacacgaatcagaaaaacagtcaactgccgaggttatagatgttggaccccctgcagactgggtgaagatcaatgtcagagaaactaaagactgctttgagatatttgccctggtacctggacttcttcgcgaagaggtccgtgttcagtcagaccctgcagggcggctagttatagcaggccaacctgagcaacttgacaatccttggggaatcacacccttcaaaaaggttgtgaactttcccgcaagaatcgatccgctgcacacgtcagcggttgtgagcctgcatggtcgactgtttgtgcgagtcccatttgagcagtgaccggtctcatcccaatttcaggtttcacataaagaaaacttacaatttatagttcaatcaagttaaatggctcctattgtaggagagtactgaagttttatgggctggaagcttttgggttgagttaaatggcctgaaaattaggccttagatgtgtcgtgttgctttcgtgatccacaattgcattcatatatatatatatatatatgatgaggaaagtcaagaaaattttttttgaagaaaaaaactaaacatattattgcaacttccaatttgcattagacccaatattatatatttacatctaacacgttttgtgatttttagatattcatgcttatctattttctgttgacatcagacaaaaattagcaaaacattctattgtaatagttaataatatgtgactatactactatagtatacaatttttgtttaagttctctctt

SEQ ID NO: 20101 - DNA, 465 bp, Arabidopsis thaliana columbia
  Clone ID: LIB3175-034-A12_FLI
aagaagaagcaggatcttataacatgaacgtcgacgatactaacaacaacaacaactatatctgcactgataatgattacatcgaagaagatgaagataatagcaacactaagaagagccaaacacaagcatggggcacgtgggaagagctgttattagcatgcgccgttaaacgacacggatttggtgattgggattccgtcgctacggaggttcgatcccggagctctctctctcacctcctcgcttccgctaatgattgtaggcacaagtatcgagatctcaagcgtcgatttcacgaacaagaaaaaacagatgtgacggcgacggtggaagaagaagaagaagaagaagagagagttggtaataatatcccgtggcttgaacagctacgtaaccttcgtgtagctgagctccgtcgtgaagttgagcgttatgattgttcgatactgtacggaatcaatg

SEQ ID NO: 20102 - DNA, 1333 bp, Arabidopsis thaliana columbia
  Clone ID: LIB3175-048-B6_FLI
aacaacagaagaagaaccagtcagaacaatggagccaaaccgagactcgtccaaacaatcaagctgtatcttacaatggaagagagcaaaggaaaggagaggatggttacaattggagaaagtacggacaaaaacaggtgaaaggaagtgagaatcctcggagttactataagtgtactttccctaattgtccaacgaagaagaaagtggagagatctttggaaggtcagatcacagagattgtgtataaaggaagccacaaccatcctaaacctcagtctactagaagatcttcttcgtcttcttcgacttttcattcagctgtgtacaatgccagtttggatcataatcgtcaagcttcttctgatcagcctaattccaataatagctttcatcagtctgattcctttgggatgcaacaagaggataatactacttctgattctgttggtgacgatgagttcgaacaaggctcatcgattgtcagcagagacgaagaagattgtgggagtgaacctgaagcaaagagatggaaaggggacaatgaaacaaatggtgggaatggtggtggaagcaagacagtgagagagccgagaatcgtagtgcagacaacgagtgatattgacattcttgacgacggttacagatggagaaaatacggccagaaagtcgttaagggaaacccaaatccaagaagctactacaagtgcacaaccatcggttgtccagtgaggaaacatgtggagagagcatcacacgacatgagagcagtaatcacaacctacgaagggaaacacaaccacgatgttcctgcagctcgtggtagcggttacgccacaaacagagcaccacaggattcgtcttcagtcccgattagaccagctgctattgctggtcactccaactacactacttcttctcaagcaccatatacacttcagatgctgcacaacaacaacactaataccgggccttttggttacgccatgaacaacaataacaacaacagcaaccttcaaacgcaacaaaactttgttggtggtggattctctagagcaaaggaagaaccaaacgaggagacctcatttttcgattcgtttatgccctgaagaaaaaaggaaccagttgttccttttttatgttccttttgtacatttctgccaccaaaggattttactacttactagttatcctgcaggatagtaagtcagacttctatagtccatagagaaattttttcatttgttttttcacacgcctgtaatatgtttaatgtttgtactttgtaccatataactagaacacggaataaaaccaatcaattttcagtttt

SEQ ID NO: 20103 - DNA, 1368 bp, Arabidopsis thaliana columbia
  Clone ID: LIB3175-052-H2_FLI
atttcagattgtgagagaggttaaagctggagacattataggggagataggggtgttatgctacagaccacaactgtttactgtgaggaccaaacgtttgtgccaactgttgcgtatgaaccgtacaactttcttgaatattattcaggccaatgttggtgatggtaccataatcatgaataatctacttcagcatttgaaagaaatgaatgatccggtgatgacgaatgttctgctggagatagaaaacatgcttgcacggggtaaaatggatcttcctctcaatttatgctttgctgcaataagagaagacgatttacttttacatcagttactaaagagaggacttgatccaaatgaatcggataacaatggcagaacacctctgcatatagcagcatcaaaaggaactctaaattgtgttcttcttctgttggagtaccacgcagaccccaattgcagagacgcggaagggagtgtaccactgtgggaagcaatggtggaagggcatgagaaagttgtaaaggtactgttagaacatggcagtaccatagacgcaggggatgtgggtcattttgcttgcacggcggctgagcaaggaaacttgaaactactaaaagaaattgttcttcatggtggagacgttactcgtcctagagccacaggcacctctgcgctccataccgctgtatgcgaagagaacattgagatggtaaagtatcttctggagcaaggtgcggatgttaacaagcaggatatgcatggttggacgccgagggatcttgctgagcaacaagggcatgaggatattaaagccttattccgagaaaagttacatgagaggagagtgcatatcgagacaagttcttcggtacctatactcaaaaccgggatccggttcctcggaagattcactagtgaacccaacatccgtcctgcatcaagagaagtgtctttcaggattcgagaaacaagagcaagacgtaaaactaacaacttcgataactcgttgtttggtatattagcaaatcaaagcgtacccaagaacgggctagctacggtagatgaaggcagaactggaaacccggtgagagtgacgattagttgtgcagagaaagatgacatagccgggaagctggtactgcttcctgggagtttcaaggagttgctagaattgggttccaacaagtttggtattgttgctaccaaagttatgaacaaagacaacaatgcagagattgatgatgtagatgttataagagatggagatcatctcatctttgcaactgattcttaacaaccatagaaactctctgccacattctatcacctattgttattaatgacaagttgataactcttgttttt

SEQ ID NO: 20104 - DNA, 1082 bp, Arabidopsis thaliana columbia
  Clone ID: LIB3175-053-F8_FLI
cagagaaggaagaagaagaagaagaagaagaaaaaactatggagaatgagagggaaaagcaggtttacttggctaagctctccgagcaaaccgaaagatacgatgaaatggtggaggcgatgaagaaagttgctcagcttgatgtggagctaactgtggaagagaggaatcttgtatctgtagggtacaagaatgtgattggtgcaaggagagcatcatggagaatactatcttccattgagcagaaggaagagtccaagggaaatgatgaaaatgtcaagaggcttaagaattatcgtaagagagttgaagatgagcttgctaaagtttgtaatgacatcttgtctgtcattgataagcatctcattccatcgtctaacgctgtggagtcaactgtctttttctacaaaatgaaaggagattactatcgctatcttgcggagttcagttctggtgctgaacgcaaggaagctgcagatcagtctcttgaagcatataaggctgctgttgctgctgcagagaatggtttggcacccacacatccagttagacttggcttggcgttgaacttttcagttttctactatgagatcttgaactctcccgaaagcgcatgccaattggctaagcaagcattcgatgatgcaattgctgaacttgacagcctcaacgaggaatcatacaaagacagcactcttattatgcagctacttagagacaatctcaccttgtggacttcagaccttaatgaggaaggagatgagagaaccaaaggtgctgatgagcctcaagatgagaactaaatcctctgtgagaagagaaacgactcttgctgcatcctgaatcttgaagtgaagacagtaagtgtcgttgtttgttactcgaatgtgtaatttttaatctatgtctttcttgatggtgttttccagattcttgaacttttcacaacacaacactgcgttgcgtatcttcaaccctcttatgatgtggttgaattctgttttacgcttagtttgcttcttttgttgttgaattgagccagcaggcatgatttgggtttttgtttatcagaatattaggcg

SEQ ID NO: 20105 - DNA, 1191 bp, Arabidopsis thaliana columbia
  Clone ID: LIB3175-057-E3_FLI
cctacacaaaaatcaatcacagtctctgtctcactcgccggagtttcggtcactgcgccatctccggggtcgagttcgtcgtacttcatcgaactatgaactctcatgatatcgatgatcagttagaagcagatgtatacagtaacttgccttctcgaaatgattcttcaacagggaggagaaatcgaaactcgtgtagatcgaaacactcagagactgagcaacgaagaagaagcaaaatcaatgaaagatttcagagtttaatggatattatacctcagaatcagaatgatcagaaacgagataaagcttctttcttgttggaggttatagagtatattcactttcttcaagaaaaagttcacatgtatgaagattctcaccaaatgtggtatcaatccccaaccaaattgattccttggagaaatagtcatgggtctgttgcggaggaaaatgaccatcctcaaatcgttaaaagcttttcaagtaatgataaagttgctgcttcttcgggttttctcttggatacgtacaattcagtaaatcctgatattgactcagcagttagcaccaagattcctgaacacagtcctgtttcagcagtttcatcgtatctacgtaccgagccttcgctgcagtttgttcagcatgacttttggcaaccaaaaacaagttgtggaacaattaactgttttacaaatgaattgttaacatctgacgaaaaaacatcagccagcttgtccactgtctgctcacaaagggtacttaacactctaactgaagcacttaagtcatcgggtgttaacatgtcagagaccatgatatctgtgcagttaagccttcggaaaagagaagatcgcgagtattctgttgctgcgtttgcttctgaggataatggtaatagcatcgctgatgaagaaggggactctcctactgaaactagaagcttctgcaatgatattgatcattcccagaagagaataagacgataagatctggttttctattttctatgttatgacaactgtttgataattttgttactttcggtgagtcaggatcagtaggtgtagatactacttttatcgtgctgcaactattttaaatgatatagtaaaaactaagtagaatgatgtaacaagtttcgcaaatctataacaagagtttgctccatttaatggtactttaagt

SEQ ID NO: 20106 - DNA, 1027 bp, Arabidopsis thaliana columbia
  Clone ID: LIB3175-059-E4_FLI
tttaaacatcttccaatctctgaaagcccctctcttttctccatttcgtgcttcatcatattcgtcgtcgcttcgggtcttacctctcatggaagggaacttcttcatcaggtctgatgctcaacgagcacatgacaatggcttcatagccaaacaaaaacctaatctcaccacggctccaacagcaggtcaagctaatgaaagtggctgttttgactgcaacatctgtttagacacagcccatgatccggtggtcactctctgcgggcaccttttctgctggccttgcatttacaagtggttacatgttcagttatcttctgtctccgttgatcagcaccagaacaattgccctgtttgtaaatccaacattactatcacctctttggttcctctctatggaagaggcatgtcttcgccttcttccacgtttggctccaagaaacaagacgcactgtccactgacataccccgcagacctgctccatcagccttacgcaatccgattacctcagcatcatctctgaacccaagcttgcaacatcaaactctgtctccttcatttcataatcatcagtattcccctcgtggcttcaccacaaccgaatcaaccgaccttgccaatgctgtaatgatgagtttcctctaccctgtgattggaatgtttggagacctggtctacaccaggatattcgggaccttcacaaacacaatagctcagccttaccaaagccagaggatgatgcagcgtgagaagtctcttaatcgggtatcgatattcttcctttgttgcatcatcctttgcctccttctcttctagctctctctctctctctctctctctctctctctctctctctctctctctctctctctctctctctctctctctctcttcgtgtatagtacgtgatgtacataggctgtaaaactcgaatttactgtggtataaccactactgcagacaccgttgttccgagttaggtcccaaattcccggccaatacctttttttgttttccaaaaat

SEQ ID NO: 20107 - DNA, 737 bp, Arabidopsis thaliana columbia
  Clone ID: LIB3175-061-B4_FLI
ccgatcttctcgttccattcttcttcctaattacaccatgcccaacatcaccatgggtttgaaacccgacccggttgctccaacgaacccgactcatcatgagagtaatgctgccaaagagattcgttacagaggcgttaggaaacgtccatggggaagatacgccgctgagatccgagatccggttaagaaaactcgagtctggctcggtacgttcgacaccgctcagcaggcggcgcgtgcttacgacgcagccgcgcgtgactttcgtggtgttaaggctaagaccaatttcggtgttatcgttggtagtagtcctactcagagtagcaccgtcgtcgactctcccacggcggcacggtttataacacctccgcacctcgagctcagcttaggcggcggcggcgcgtgtcgtcgtaagatcccgcttgtgcatccggtttactactataacatggcgacgtatccaaagatgacgacgtgtggtgtccagagcgagtctgaaacgtcgtcggtcgttgatttcgaaggtggagctgggaagatatctccgccgttagatctggatcttaacttagctcctccggcggaataggccgtgagttttttttttcttatgtcgtttctttagacaaaaaaaaataacgtttcctttttttttctgcctaagaaaaaaatattatccgttttttagaagaaagtgtagaaaagctccaatataatttttagctgccgtg

SEQ ID NO: 20108 - DNA, 758 bp, Arabidopsis thaliana columbia
  Clone ID: LIB3175-061-D9_FLI
ctctctcagaacgccgattgatgataaccggaaaagggttttaacttcacctgacgagcggttgattgactcagtggcttggacgggtaaccaaagcatgccacgtaaatccatgtctacaggttggaaactagctgaattgtacagcccggctagttcaccgggccaaccggaggagaatctcgactggtatacgctgaggttccacaagagatacatgaccagcttgtgaactccagcctgggaaagcaagggtcaaaaggccaactggccttacctcaagaaaggagctcggttagagggttcagaaccggaagcctagggactgaaaagaactatttctactttgaacggtttgatcaagacggtcggttggaccggagaccattttctataactcctccataccatacccggtcgatacagtctccggatgagattatcaacgctagtggtaattatcaggatcgtgctggtgcacctaaaggtttgcttctagcaataaggtcaccgtttgatcggttatttactgggaagaaaaatgccggtgagcgttcgtaccttcaatccggcgatgcgagccctgtctaggcgaattactactattggggttattaagaatattctgaaataaagaaaatctgtatatgtattttctttcttctagtttctttatgttatatgagaaattcaattccttcaccaatataatgcatctgttactgaaatagtaataaaggaaaggaccatttcgtttt

SEQ ID NO: 20109 - DNA, 2272 bp, Arabidopsis thaliana columbia
  Clone ID: LIB3175-077-F11_FLI
cgagtctctctctggaccacttcttcgttcttgtaaaaaaaaactcatttggtacttttttcttagaaagctgtcctaaaagcttaaacactaaaacacatctgtaataataacccaaagatcataacttttaaacctcgtacatcatcagattcattcaaactgagctttttctatgtgggcagagcaactagggttttgatcatggatccaaacttctctgaatctctaaacggctttgagtattttgatggtaaccctaatttgcttactgatccaatggaagatcagtatccaccaccatctgatactctgttgaaatacgtgagtgagattcttatggaagagagtaatggagattataagcaatctatgttctatgattcattggctttacgaaaaactgaagaaatgttgcagcaagtcattactgattctcaaaatcagtcctttagtcctgctgattcattgattactaattcttgggatgcaagcggaagcatcgatgaatcggcttattcggctgatccgcaacctgtgaatgaaattatggttaagagtatgtttagtgatgcagaatcagctttacagtttaagaaaggggttgaagaagctagtaaattccttcccaatagtgatcaatgggttatcaatctggatatcgagagatccgaaaggcgcgattcggttaaagaagagatgggattggatcagttgagagttaagaagaatcatgaaagggattttgaggaagttaggagtagtaagcaatttgctagtaatgtagaagatagtaaggttacagatatgtttgataaggttttgcttcttgacggtgaatgcgatccgcaaacattgttagacagcgagattcaagcgattcggagtagtaagaacataggagagaaagggaagaagaagaagaagaagaagagtcaagtggttgattttcgtacacttctcactcattgtgcacaagccatttccacaggagataaaaccacggctcttgagtttctgttacagataaggcaacagtcttcgcctctcggtgacgcggggcaaagactagctcattgtttcgctaacgcgcttgaagctcgtctacagggaagtaccggtcctatgatccagacttattacaatgctttaacctcgtcgttgaaggatactgctgcggatacaattagagcgtatcgagtttatctttcttcgtctccgtttgttaccttgatgtatttcttctccatctggatgattcttgatgtggctaaagatgctcctgttcttcatatagttgattttgggattctatacgggtttcaatggccgatgtttattcagtctatatcagatcgaaaagatgtaccgcggaagctgcggattactggtatcgagcttcctcagtgcgggtttcggcccgcggagcgaatagaggagacaggacggagattggctgagtattgtaaacggtttaatgttccgtttgagtacaaagccattgcgtctcagaactgggaaacaatccggatagaagatctcgatatacgaccaaacgaagtcttagcggttaatgctggacttagactcaagaaccttcaagatgaaacaggaagcgaagagaattgcccgagagatgctgtcttgaagctaataagaaacatgaacccggacgttttcatccacgcgattgtcaacggttcattcaacgcacccttctttatctcgcggtttaaagaagcggtttaccattactccgctctcttcgacatgtttgattcgacgttgcctcgggataacaaagagaggattaggttcgagagggagttttacgggagagaggctatgaacgtgatagcgtgcgaggaagctgatcgagtggagaggcctgagacttacaggcaatggcaggttagaatggttagagccgggtttaagcagaaaacgattaagcctgagctggtagagttgtttagaggaaagctgaagaaatggcgttaccataaagactttgtggttgatgaaaatagtaaatggttgttacaaggctggaaaggtcgaactctctatgcttcttcttgttgggttcctgcctagtgattttagtgttgttttgttacaaaaatcatgtaattttaggattacgtctgataggtttagaagaaatcttagctcaatttctctcatatatttctataaaaatgtttggccattataaatgaacttgtgattataagtttataaccaccaccaaagttagcttattggcccc

SEQ ID NO: 20110 - DNA, 749 bp, Arabidopsis thaliana columbia
  Clone ID: LIB3175-078-C11_FLI
ctctctctctcttttatctctgagattgcttcttcgctattgctcaattctctctctcacctaaccctaattattcattattcctgagattcatcggcgatgagttcggaggaagccaaggtcgttgttccgaggaactttagattgttggaagagcttgaaagaggtgagaaaggtattggagatggtactgttagctatggaatggatgatgctgatgatatttatatgcaatcttggactggcaccattcttggtcctcctaatactgcatatgaagggaaaatctttcagctgaagcttttctgtggtaaggagtaccctgaaagtccaccgactgtgaggttccagacccggataaacatggcttgtgttaacccagaaactggagtggttgaaccgagtctcttccctatgctcactaactggcggcgagaatatacaatggaggacatactggttaagctgaaaaaagaaatgatgacttcgcataaccggaagttagctcaacccccggaaggtaacgaggaagctagggcagatccaaaaggaccagctaaatgttgtgtgatgtgaagagaggttggtgggaatcagctatttgtattaatagaaggaacagtgtatataaaacatcatttgaagctttgaaattccctacaacttcctaatgttatagtcttgtttgagaatatatatatgtccgccaaaaacagttgatgattattttaataaacctcatctctact

SEQ ID NO: 20111 - DNA, 646 bp, Arabidopsis thaliana columbia
  Clone ID: LIB3175-082-B12_FLI
ttctcaccgaatcaaatccaaaagagcaaatttacaatcttgcgaactcctaaaatggctcgtaccaagcaaacagctcgtaaatccaccggaggaaaggcaccaaggaagcaactcgcgaccaaagctgcgaggaaatcagctccagccaccggaggagtgaagaagccacacagattccgtccaggaacggtggcgttgagagaaatcaggaagtatcagaagagtactgagcttttgatccgtaagcttccgttccagagattggttcgtgagattgctcaagatttcaagacggatctgaggttccagagcagtgccgtcgcagctcttcaggaagcagctgaggcttatcttgttgggctctttgaagatactaatctctgtgcgattcatgctaagagggttacgattatgcctaaggatatccagcttgcgaggagaatcagaggagagagggcttaagtgaacgaagatgatgaagattaagaagactagtcgtttagttatggattagcttgtttggtttcaatggatatgtaaagctgtctcttttcgttttcgagtgttattagttttttacttagatgtgtcttccagatgttcgatgaaatgcctaaaggaaattttaatctactgttgtcta

SEQ ID NO: 20112 - DNA, 1150 bp, Arabidopsis thaliana columbia
  Clone ID: LIB3175-082-B8_FLI
cctagcctgaacaactcgccgtcttctcgagaaacatctttcttacttcgcttcattacaagatctgatgaaaccagatcggatcttgctctagatccagatgctccttaacttatttactcgaattcatcatcatcgttatcatcaccatgtcactgtttctaaaagacgattcgattcaaatccgtgaagtatggaacgacaatctcgaatcagagatggctctgattcgagaagtcgtagacgatttcccattcgtagcgatggacacagagttcccaggaatcgtgtgtagaccagtgggaacattcaaaaccaacacagagtaccactacgaaactctcaaaacaaacgtcaacatactcaagatgattcagcttggactcactttctctgatgagaaaggtaacctcccaacttgtggaacagacaacaagtattgcatctggcagttcaatttccgcgaattcgacctcgaatccgatatctacgctaccgattcgatcgagcttcttcgtcaatcaggcatcgatttcgtgaaaaacaacgaattcggtatcgattcgaagcggttcgctgagcttttgatgtcttcagggattgtgttgaatgaaaacgttcattgggttacattccacagcggatacgatttcggttacttgttgaagctattgacttgtcagaatcttcccgagacgcaaacagggttcttcgagatgatcagtgtgtatttcccgagggtttatgatatcaaacacttgatgaagttctgtaatagtcttcatggaggtctgaataaattggcggagctgcttgatgttgagagagttgggatttgtcaccaggccggatcggatagcttgttaacgtcgtgtacattcaggaagctgcaggagaatttcttcattggttcaatggagaagtattctggtgttttgtatggtttaggtgttgagaatggtcagattgttcattgataaaagcttaaagttttaaacaggttatgttatttattttagattattacatcataggttgttttaagaagtgtatgatcacaagaactaaactctgattttggtttggtattgtgctctcttacttgtttaaagatagcatctcacttaatttatgaaaaaaaaagtttgat

SEQ ID NO: 20113 - DNA, 796 bp, Arabidopsis thaliana columbia
  Clone ID: LIB3176-002-B9_FLI
caaattggttcttgcaacgcgttccccggttttcaacgcacagctttttggccctttaggagaccgaaataccaaatgcataacgatagaagacatggaagcacccattttcaaggattgtctattcacggatgtaccatccgggatcttctcctggggcgctactcctattctcgagtttactcacccgggataaggtattgctccattttatctactgggacgaattgcctgatatgcaagagttaataggaacagactctacattggcgtctactcttgtggctcagcatctactagcagcggcagaccgttatgctcttgagcggcttaaagcaatctgtgagtcaaaactctgtgaaggggttgccataaacacggttgcaactactttggccctagcagagcagcatcattgtttgcagctaaaagcagtgtgtctcaaattcgtggcactgccagagaacctgaaagctgtgatgcaaacagatgggtttgattatctgaaagagagttgcccatctttactaacggagctattgcagtatgtggcgaggctaagtgaacactctgttatagtatctggacatcgaaaagaaatatttgccgatggttgtgacgcgagtggaagacgagtgaagccccggttgcactgaatgggagagaaagaagaaagatttgtgcattgtataatctctgttatggataatggctgatctaatcggatctagcaagtacaatgaatcgttttcaacgcgttttctcataaatcaaagatccaatgaaatttggggtt

SEQ ID NO: 20114 - DNA, 587 bp, Arabidopsis thaliana columbia
  Clone ID: LIB3176-007-D7_FLI
caaaactctctctctctctctctctctgtctcttgtcttatcatttatctctctaacggcgaggcaatgggttttccggtgggatattctgagctacttctcccaaaaatctttttctacttgttatctttcttaggtttgatacgtaaactcatctccacaatgttcaagatcattggtctaccagatttcttagaacctgaaccggtttcaacctcatggcccgacccaccacccacgttgaccaaacctgactcagcagcaatactagccggagagatgttaccggttgttcgattctcggatataaaccgaccggaatccgagtgttgcgcagtgtgtctctacgatttcgagaacgacgacgagatccgacggctgacgaattgtcgacatatatttcatcggggatgtttggaccgttggatgatgggttataatcagatgacgtgtccactttgtcgtacacagtttatacctgatcatcttcaactggagtttaatcaaaggctctggtctcaatcttctgctgtttcttctcaacttcttgatgaatcatcatcttaggacgtattaaatctttgtcc

SEQ ID NO: 20115 - DNA, 1126 bp, Arabidopsis thaliana columbia
  Clone ID: LIB3176-007-F5_FLI
gatgatttcgacgtcggtgatgttttcgccgatgtgaaaccattcgttttcacttcgactccaaaacccgccgtctccgccgctgcggaaggttcagtttttggtaagaaagttactggcttggatggggacgctgagaaatctgcaaataggaagaggaagaatcagtaccgagggattaggcaacgtccttggggaaaatgggctgctgagatacgtgatccaagggaaggtgctagaatctggcttggaacgttcaagacagctgaggaagctgctagagcttacgatgctgcagcgcggagaatccgtggatctaaagctaaggtgaatttccctgaagaaaacatgaaggctaattctcagaaacgctctgtgaaggctaatcttcagaaaccagtggctaaacctaaccctaacccaagtccagctttggttcagaactcgaacatctcctttgaaaatatgtgtttcatggaggagaaacaccaagtgagcaacaacaacaacaaccagtttgggatgacaaactccgttgatgctggatgtaatgggtatcagtatttcagctctgaccagggtagtaattctttcgattgttcggagtttggttggagcgatcaagctccgataactcccgacatctcttctgcggttatcaacaacaacaactcagctctgttctttgaggaagccaatccagctaagaagctcaagtctatggatttcgagacaccttacaacaacactgaatgggacgcttcactggatttcctcaacgaagatgctgtaacgactcaggacaatggtgcaaaccctatggacctatggagtattgatgaaattcattccatgattggaggagtcttctgaagagatccagtttcatgtaaataaggctgcatgtttgtgagtttcccgcatcgttcgtttatcaacctccaaaactttctaatgtctgttacttgcatcttcttctgctgtctctgtctgtctctctcaggagttcctgtttgcattgcgagaagccatgagcctctatcttgagggtagttgtgatgaagttaagtagaggcttatttttaggggttgtggtagtttttgttttagtgaatcttttgaattc

SEQ ID NO: 20116 - DNA, 1237 bp, Arabidopsis thaliana columbia
  Clone ID: LIB3176-008-F5_FLI
ctctcttcctctgtttcttcgccattctctcagcttttctccttcttcttcgtctttgtcaggtaaagagatacgatgagcatatcccacatacctctctcctcttctcatctttttagtttctcgaaagtttgcatgcgccgactttgttataggttataaactttagttttaagcctattttcgtatgtttatggttgttgtaatagttgagaattcagagtatgtcaagtgaaacttaaaaagaattctatatgtatgtgtgtatgtgttaaagagtgaatggagctgtggacagaagctagagccttaaaggcaagtctaagaggagaatctactatatctctcaaacatcaccaagtgattgtgtcggaagatttaagccgaacttcttccttgccggaagatttctccgttgagtgtttcctcgatttctcagaaggtcaaaaagaagaagaagaagaagttgtctctgtttcttcttcacaagagcaagaagaacaagaacatgattgtgtctttagttcacaaccttgcatctttgatcaacttccttctttgccggatgaagatgtggaagagcttgaatgggtatctcgtgttgtggatgattgttcatcaccagaagtttcacttctcttaacacaaacacataaaaccaaaccaagcttctcaagaattccggttaaaccaagaaccaaacggtctcggaacagtttaaccggtagtcgtgtttggccactcgtttcaaccaatcatcaacatgcagcaacagagcagttgaggaagaagaaacaagaaactgtccttgtgtttcaacgaagatgcagccattgtggcacaaacaacacaccacagtggagaaccggtccggtcggtccaaaaaccttatgtaatgcatgtggagtccggtttaagtctggtaggctctgcccggaatacagaccggcggatagtccgacgttctcgaatgagattcactcaaatcttcataggaaggttctggaattaagaaagagtaaagagttgggtgaagaaacaggtgaagctagtactaaatcagacccagtcaaatttggcagcaagtggtagataagacttaggtaaaacctactttttgtaacattatctgtagtgttgtaatttaacaacttgcttcttaacattttgaaactgtttcaggaactagtcttaagtaaacaatggttttctataaacaaaattaatgtgtgttttt

SEQ ID NO: 20117 - DNA, 1251 bp, Arabidopsis thaliana columbia
  Clone ID: LIB3176-009-E12_FLI
cttctgttttgtctatttttgtttggtgcattagctccaattgtgaacgttaattatggaggaattagtggtgctttttatgggaactatagatctaattatattactgaccagatttacagtcagcatagggatagagttttggatacatctcgtagtggtgctggtactggggtttctaatagtaatgggatgcatcgtgggagagattctgatcgaggagctaggaaaaatatatctgcaacagagagttctgtcactcctggaaatggtagtgagcctctagttgcatcactctttgttccgaggaatgacaagcttgtgaagatagatgggaatttgattatcaattctatattggcgagtgagaaagccgtggcttcgagaaaggcttctgaatcaaaggagaggaaagctgacttgatgatctctaaagattatacccctgcactgcctctacctgacgtgggaaggacagaggaattggctaagcatctctatagatctaaggctgaaaaacagaaagctctatcctctggctctgctgatactctgaaagaccaagtcaaaacaaaagcagccaacggtgaaatgcagcaatggttccgtgaaggtgttgcaggtcccatgtttagttcagggatgtgcactgaagtgtttcagtttgatgtatcctcaacctctggagccatcattcctgcagctaccaacgtctctgctgaacacggtaagaacaccacagacacacacaagcaacagaacagaagaatccttcgtggtcttcccattccactcccaggatcagattttaacctcacgaaagagcaccaaagaaacagcagtagcaaagaaatcaagcctgcttcatcaatggttgtatctgtgcttgttgatcccagagaaggaggtgatggagatatagatgggatgattgggggaccaaaatcactgtctcgagtttttgtagtcgtgcttctggacagtgcaaagtatgtaacatactcctgtgtcctacctcgatcaggagctcctcatcttgtgaccacttgaagacatatgaggattgaaacatatatcagcaggtcttctctcatataggctttgtatgtaaaagaataaatacctgctctctggtatcacgtaatatccttagctaataccgttgtccggtttttgtttccagatgtagaatccgaatgctgtaacttttttttttttaccttttataaactcatagccttagaaagtttt

SEQ ID NO: 20118 - DNA, 1093 bp, Arabidopsis thaliana columbia
  Clone ID: LIB3176-010-H6_FLI
acttcttcttcctcgcaactctttcactctgtttcacacacacattctcacatatatataacacaaactaactctaatcaccaaatcataaaccaaagcttctaaattcagtttcaatggcgatcattaaaccaaaccgagatctcaaaccggacggtgtcacagtcgtgactcgtgaagtctgggcggagaatctcgaatcagaatttgaactaatcagcgaaatcatcgacgattatccatttatctcaatggacacagaatttcccggcgtgattttcaaatccgatctccggtttacgaatcccgacgatctttatactcttcttaaagctaacgtcgacgctctcagcttaatccaagtcggtctcactctctctgatgttaacggtaacctcccagacctcggtgacgatcttcaccgaggattcatctgggagtttaatttccgtgacttcgacgtggcgcgtgacgcacacgcgcctgattcgatcgagttgcttcgtcggcaaggtatcgattttgagcggaattgtcgcgacggtgttgagtcggagaggtttgcggagctgatgatgtcgtcggggcttgtttgtaatgaggaagtgagctgggtgacgtttcatagcgcgtatgatttcggttacttgatgaagattctcacgcgccgagaattgcccggcgcgttgggggagtttaagcgcgtgatgagagtgttgtttggggagcgtgtgtatgatgtgaagcatatgatgaagttttgtgaaaggagattgtttggtggtttggaccgggttgcaaggacgcttgaggttaaccgggcggttgggaaatgtcatcaagctggttcggatagtttgcttacgtggcatgcgtttcagaggatgagggatttgtattttgttcaagatgggccggagaaacatgctggggttttgtatgggcttgaggttttttaaggggtttctttttttttataattcaaattcaattaattaactcatttttttttttattttttttttggtagtgtcaattaattaactcaattgatccttgtagttaaacgttctttggaaagaagaaattttag

SEQ ID NO: 20119 - DNA, 597 bp, Arabidopsis thaliana columbia
  Clone ID: LIB3176-018-F4_FLI
ctctcagtacacttcttttcatacctcaagagactaaaactagtttgaggagatttagaggagtgtttggttctttggataacaatatcccaaactgaaaatggctaagtcatatggagctatcttcctcttgaccctcattgtcctcttcatgcttcaaaccatggttatggcctcaagtggatctaatgtgaagtggagccagaaacgttatggaccaggaagcctgaaacgtacccaatgcccatcggaatgtgataggaggtgtaaaaagacacagtaccacaaggcttgcattacgttctgcaacaaatgctgcaggaagtgtctctgtgtgcctccgggttactatgggaacaaacaagtttgctcctgctacaacaactggaaaactcaagagggtggaccaaaatgcccttgaaaaaatctcccttcgttccctttttataataaaaattttcaactataactaaatttcctttgatcaatgttttatctactttattcctaatgttgtaatgttatgtcactccttttcggattttgttttaaatcctaaaaaaaatgagagtggccctatgaatgatatttttcatg

SEQ ID NO: 20120 - DNA, 955 bp, Arabidopsis thaliana columbia
  Clone ID: LIB3176-019-F12_FLI
aacctcaacaaatctgatgtgacatttgtcaatgtctgtggtttataacatgtttctcaatgtcaggatcacacacaccacttctcatgtataaatacacataaaagcaattggatttggtaagagggaatctcaaaagtgtgtgtctgtgagagaggagagagagaatatgggcaaaggaagagcaccatgttgtgacaaaaccaaagtgaagagaggaccatggagccatgatgaagacttgaaactcatctctttcattcacaagaatggtcatgagaattggagatctctcccaaagcaagctggtatgtctatgatctttaaaagcctctttctttagcttttctagtcttctggttctgattctatctatgcatgcaatgaaggattgttgaggtgtggcaagagttgtcgtctgcgatggattaattacctcagacctgatgtgaaacgtggcaatttcagtgcagaggaagaagacaccatcatcaaacttcaccagagctttggtaacaagtatgtgttatcttgttaatgtcttgttgtgggctcaaagttttgattttgacaatagcttttctgcattttggattcaggtggtcgaagattgcttctaagctgccttaatgccgatgaagcgggttcaaaaggttctttgaatgaagaagagaactctcaagagtcatctccaaatgcttcaatgtcttttgcagagctgctggagatgccttttgatttagatcctgacatttggagtttcatagatggttcagactcattccaacaaccagagaacagagctcttcaagagtctgaagaagatgaagttgataaatggtttaagcacccgaaaaaatccgatcaattttccaatctttcttcgtccatttgtcgttgcgagacctagaaacactgtgagacttgcagagggttcaaatggtgtaggagaaaa

SEQ ID NO: 20121 - DNA, 533 bp, Arabidopsis thaliana columbia
  Clone ID: LIB3176-019-H12_FLI
cactgacctccgtgaccttctaccgaattccaccgttgtcgaggctggatcttccgatagttgcgattcaagcgccgttcttaacgacgaaacaagttctgataacggaagattgacgccgcctgtgacggttactggcgggagtttcttacagtttgtgaaaacagagcaaacagaggatcacgaggattttctaagcggtgaagaagcttgtggtttcttctccgatgaacagccgccgtcacttcattggtactctgcttcagatcattggacttgagaattgtttatcaaattggtgctctgtttagtctcaatgggaaaacagagaagagggcaaaggtggaataattgataaataaggattaaggatgaaggggattattaaattaaatccgcgggagaagttaattttgggtttaagattgtaatggctcttcatgtaattaacgatgtcgagaggggctttcacagaaataggaatcaatggggacactctgatatgaaagcaataaaactacgtttgacccctt

SEQ ID NO: 20122 - DNA, 1365 bp, Arabidopsis thaliana columbia
  Clone ID: LIB3176-021-A3_FLI
cattttcttattttccttcctaatttccaacctctgttcttagcaatatattttttctccaaaaataattctcagtttgattttcttcttctagctcttaagtatatttctttgttgttatttatcttttaatcctttaatctcatctttgtttatctttaatcaaaacccaaaatttacatgggttcttgaaaatctagaagaaataaaggaaacataacaaaaatagaaagaaaaagaagctaatggtcttaaatatggagtctaccggagaagctgttagatcaaccaccggtaacgacggtggtattacggtggttagatccgacgcgccgtcagatttccacgtagctcaaagatcagaaagctcaaaccaatctcccacctctgtcactcctcctccaccacagccatcgtctcatcacacagctcctccgccgctgcaaatttcgacggtgacgactacgactacgacggccgcgatggaaggtatctccggtggactgatgaagaagaagcgtggacggccaaggaagtatggaccggacgggactgttgtagcgttatctcctaaaccgatttcatcagcgccggcgccgtcgcatcttccgccgccgagttcacacgtcatcgatttctccgcttctgagaaacgtagcaaagtgaaaccaacgaactcgtttaacagaacaaagtatcatcaccaagttgagaatttgggtgaatgggctccttgctccgtcggtggtaatttcacacctcatataatcacagtcaacaccggcgaggatgtaacaatgaagataatctcgttttcgcaacaaggacctcgctctatttgtgttctgtcagcaaacggtgttatttcaagcgttacacttcgtcagccagattcctctggcggcacattgacatacgaaggtcggtttgagatattatcattatccgggtcattcatgcctaatgattcaggcggaacacgaagtagaacgggaggaatgagtgtatcgttagcaagtcccgatggacgtgtagtaggcggtggcctcgccggtttactagtagccgcgagtccggttcaggtggttgtaggaagttttttagcgggcactgaccatcaagatcagaaaccgaaaaagaacaaacatgatttcatgttgtcgagtcctaccgctgcaattcctatctctagtgcagctgatcaccggacaatccattcggtctcgtctcttccggtcaataataatacatggcagacttctttagcttccgatccaagaaacaagcataccgatattaatgtcaatgtaacttgaaatccaatctttctctgtattttctgttaacaagtttgatttggttgtt

SEQ ID NO: 20123 - DNA, 833 bp, Arabidopsis thaliana columbia
  Clone ID: LIB3176-021-F5_FLI
gaaatttcgcaggttcctccgttgtctgaggatcttggagaaggaaggaaacaacaacaaccaaaaaaaaaccaaaaaaaaaaaagataaaacaaaaaaaatgtctttcacaggaactctcgacaaatgcaatgtttgtgataagacagtctatgtggtggacatgttgtccattgaaggaatgccttaccacaagtcttgcttcaggtgtacccattgcaaaggaacccttcagatgagcaactattcctccatggacggagttttgtactgcaagactcattttgagcaactcttcaaggaatctggcaatttcagcaaaaactttcaaccaggaaaaactgagaagccagagctgactaggactcccagcaagatatcttccatcttctgtggaacacaagacaagtgtgccgcttgcgaaaaaactgtttaccctcttgaaaagatacaaatggaaggagaatgcttccacaagacatgtttccggtgcgctcacggtgggtgtacgctgactcactcctcctacgcctccttagatagcgttctctattgccgacatcactttaaccaactcttcatggagaaaggaaactacgctcacgtcctccaagccgccaatcaccgtcgcacagcctcaggcaacactcttccaccggaacctaccgaagacgtcgccgtggaggccaaggaagagaatggcgtttcagagtcttgaatatctcttacatgagtgtttttgagtgaatgattgaatgaatgttgttgcgggggaaagatttgatttcatttgtaatgagttgtttccatatgaagacatgattttttttgtt

SEQ ID NO: 20124 - DNA, 1257 bp, Arabidopsis thaliana columbia
  Clone ID: LIB3176-021-G10_FLI
taaattcctcgaccgagaaagataacatggaagatcatcaagacatcggtgaatctaaatcagtcgacactacaaaccgcaaattagatgacgacaaagtggttgtcaaagaagagagaggagacagtgaaaaagaagaagaaggtgaaaccggagatctcataagcgagaagacagattcagttgatattcataagaaagaagatgagactaaaccgattaataaatcatccgggatcaagaacgtgtctggtaacaaaactagtcgaaagaaggtggattggacaccagagctgcacaagaagtttgtgcaagcagttgagcaactcggcgttgatcaagcgataccctcgcggattcttgagttgatgaaagtaggcaccttaacaagacacaatgtagctagtcaccttcagaaatttcggcagcataggaagaatattcttccaaaggatgatcataaccatagatggatacaatctagagagaaccatagaccaaatcaacgtaattataacgtttttcaacagcaacaccgtcccgtgatggcttatcccgtttggggtcttcccggtgtttatccgccaggagcgattccacctttgtggccaccgccgctgcagtccattggtcaaccacctccgtggcattggaaaccaccttatccaacggtgagcggtaatgcatggggttgtccggttggaccgcctgtgaccggatcatatattactccttcgaatactaccgccggcggatttcaatatcccaacggagctgaaaccggcttcaaaataatgccggcgagtcagccggacgaggaaatgttagatcaagtggttaaagaagcgataagcaaaccgtggctgccgctaccgctcgggctaaaaccgccgtccgcggagagcgttttggctgagctaacgcgtcaaggcatctcagccgtcccttcttcttcttgtctaatcaacggctctcatcgtctccgctgacgtgtccatgatgaaacagaacccgcagatatgatgacgtcatgcgtggcgtacttgtccgtgtctgacgatccgaagcgggaactgattcggatcctgagagttgttttttaattgttgtttttaattttttgttgtcataaaaacatttgtctctattggtattattaaagaagatcggacggtggagatagaggcaacgatgttagtctgaggaccacaagtggactctgcggctgtaagtagatctcggacacgggattttgac

SEQ ID NO: 20125 - DNA, 1449 bp, Arabidopsis thaliana columbia
  Clone ID: LIB3176-027-C11_FLI
ctctaatggattccagagacatcccaccgtcacataaccagcttcaaccaccaccgggaatgttaatgtctcattaccgtaaccctaacgccgccgcttcaccattaatggttcccacttccacatctcaaccgattcaacaccctcgtcttccttttggcaatcaacaacaatctcaaacgtttcatcagcagcaacaacaacaaatggatcagaagactcttgaatctcttggatttggtgatggatcaccttcttctcaaccgatgcgattcgggatcgatgatcagaatcagcaactgcaagtgaagaagaagcgaggaaggccgagaaagtatactcctgatggtagcattgctttaggtttagctcctacgtctcctcttctctctgcagcttctaattcttacggtgagggtggtgttggagatagtggtggaaatggaaactctgttgatccacctgttaaacgtaacagaggaaggcctcctggttctagtaagaaacagcttgatgctttaggaggaacttcaggagttgggtttacacctcatgtcattgaagtgaacacaggagaggacatagcgtcaaaggtgatggctttttcggatcaagggtcaagaacaatttgtattctctctgcaagtggtgcagtttctagagtgatgcttcgtcaagcttctcattctagtggaatcgttacttatgagggacgatttgagatcattactctctcaggctcagtcttgaattatgaggtaaatggttccaccaacagaagtggtaacttgagtgtggctttggctggacctgatggcggcatcgtaggtggcagtgtagttggtaatctagtagctgcaacacaagtccaggtgatagtgggaagctttgttgcagaagcaaagaaaccgaaacaaagtagtgttaacattgctcgggggcagaatcctgaaccggcttcagcgccggctaacatgttgaactttggatcagtctctcaaggaccatcgagcgagtcatcagaagagaatgagagcggttctcctgcaatgcaccgtgacaataataatgggatatatggagctcaacaacaacaacaacaacaacctcttcatcctcatcagatgcaaatgtaccaacatctttggtctaatcatggtcaataaaatgaagcggaaattaatttgtttccgttttggttacggttatggtttgatttcttgttgttgtttaggcaaatcttaagaagattcaagcttcatggttttttgtagcttttttttttttttgttgggggtttattagataacatatagagagatctagatattagggtcattttaattttttttttttttttttgggggttaattctctgtgagttgatttgaattagagataaagtctgagattccttactagaacaatatatatattccacattaaaat

SEQ ID NO: 20126 - DNA, 594 bp, Arabidopsis thaliana columbia
  Clone ID: LIB3176-027-F11_FLI
gcgaactcctaaaatggctcgtaccaagcaaacagctcgtaaatccaccggaggaaaggcaccaaggaagcaactcgcgaccaaagctgcgaggaaatcagctccagccaccggaggagtgaagaagccacacagattccgtccaggaacggtggcgttgagagaaatcaggaagtatcagaagagtactgagcttttgatccgtaagcttccgttccagagattggttcgtgagattgctcaagatttcaagacggatctgaggttccagagcagtgccgtcgcagctcttcaggaagcagctgaggcttatcttgttgggctctttgaagatactaatctctgtgcgattcatgctaagagggttacgattatgcctaaggatatccagcttgcgaggagaatcagaggagagagggcttaagtgaacgaagatgatgaagattaagaagactagtcgtttagttatggattagcttgtttggtttcaatggatatgtaaagctgtctcttttcgttttcgagtgttattagttttttacttagatgtgtcttccagatgttcgatgaaatgcctaaaggaaattttaatct

SEQ ID NO: 20127 - DNA, 1575 bp, Arabidopsis thaliana columbia
  Clone ID: LIB3176-028-F1_FLI
tttcaattaatgacatcttcttcttctcctttcactgcaaaaccgaaagcttgagactttgagattatgtctatgtcatcttcttcttcttccatcgatcacttcatcacctttcgtcatcttgatcttattctccactgtataaaatcagcgagattttaagggattgtgaaggtaccatcttaaacacaaaatgggtacttctactacagagagtgtggtggcgtgtgaattttgcggcgagagaacggcggttctgttttgtagagccgatacggcgaagctttgtttgccttgtgaccagcacgtgcactcggcgaaccttctctcgaggaagcatgttcgttctcagatctgtgataactgtagcaaagagccggtgtccgtacgttgcttcacagataatctcgtattgtgtcaggagtgtgattgggatgttcacggaagctgttcctcctccgcgacgcatgaacgctccgccgtggaagggttttcaggttgtccttcggttttggagcttgctgctgtgtggggaatcgatttaaagggtaagaagaaagaagatgacgaagacgaattgactaagaattttgggatggggttggattcgtggggttctggatctaacatcgttcaagaactgattgttccttatgatgtgtcttgcaaaaagcaaagctttagctttgggaggtctaagcaggtagtgtttgaacagcttgagttactgaagagaggcttcgttgaaggcgaaggagagattatggttccggagggaatcaatggcggaggaagcatttctcagccatctccgacgacgtcgtttacttctttgcttatgtctcaaagtctttgtggtaatggtatgcaatggaatgctactaatcatagcactggccagaacactcagatatgggattttaacttgggacagtcgaggaaccctgatgaacctagtccagtcgaaactaaaggctctactttcacattcaacaacgttactcatctcaagaacgatacccgaaccaccaatatgaatgctttcaaagagagttaccaggaggattccgtccactcaacttctaccaagggacaggaaacatctaagagcaacaatattcctgctgccattcactcgcataaaagttctaacgactcctgtggcttgcattgcacggaacatattgctattactagtaatagagccacaagattggtggcggtaacgaatgctgatctagagcagatggcacagaacagagataatgctatgcagcggtacaaggaaaagaagaaaacgcggagatatgataagaccataagatatgaaacgaggaaggcgagagccgagaccaggttgcgtgttaagggcagatttgtgaaagctacagatccttagatgtctctccacgttaggttttacatttgagatcctaagttaggaactttttttgttttttctactttcaactaccttgtaaatgtaaatgatcgatcttcagctgcataatgtgtggccagatttttgtaatttttacgtttaaccttctagaagcaaagtttcttaacccaatc

SEQ ID NO: 20128 - DNA, 1636 bp, Arabidopsis thaliana columbia
  Clone ID: LIB3176-028-H11_FLI
tgataacccaactccttaagaaagctcacttctttttcccctgattccctttgtgtcatcatctttcatcatcttcttcttctaagaatcaacaacaatgcagagcagcttcaaaaccgttcctttcactcctgatttctactctcagtcttcttacttcttcagaggagatagttgtcttgaggagtttcatcaaccagtcaatggttttcaccatgaagaagctatcgatttaagtccaaatgtcactattgcttcagctaacttacactacacgacgtttgatacggttatggattgtggtggtggtggtggtggtggcttgagggagagacttgaaggaggagaagaggagtgtttggacacagggcaactagtgtaccagaaagggacaagattagtaggaggaggagtaggagaagtgaacagcagttggtgtgattcggtttcagctatggctgataacagtcaacatactgacacttccacagatattgatactgatgacaagactcagttgaatggaggtcatcaagggatgctattggctacaaattgttcagatcaatccaatgtgaaatctagtgatcaaaggacacttcgtcgacttgctcagaaccgggaggctgctaggaaaagtcggttgaggaaaaaggcatatgttcagcaacttgagaatagtcgaatcaggcttgcacagctagaggaagagctcaaaagagctcgccaacagggatctttggttgaaagaggagtttcagcggatcacacgcatttggcagccggaaatggtgtcttttcatttgaattggaatatacacgttggaaggaagaacatcaaagaatgatcaacgacttaagatcgggtgtgaattcgcagttaggtgacaacgatctacgcgttctagtggatgctgtgatgagtcactatgatgaaatattcaggctaaagggaattggtactaaagttgacgtctttcatatgctctcaggcatgtggaagacacctgccgagagatttttcatgtggttaggtggatttagatcatcagagttacttaagatattggggaaccatgtggatccattgacggaccagcagttgataggcatttgcaaccttcagcaatcgtctcaacaagcagaggatgcattgtcacaaggcatggaagctctacaacaatcacttctcgagacgctttcttctgcttcaatgggtccaaactcttcagcaaatgttgcagattatatgggtcatatggctatggctatgggcaaacttggcactcttgaaaacttccttcgccaggctgatttattgaggcaacaaactctgcaacagcttcacagaattctcaccacacgacaagctgctcgcgcctttttggtcatccacgattatatttctcggcttagagcacttagctctctatggttagccagacctagagactaaataaaaagcctgcatgagtcatgatgaccaaaggaaaagcatagttctggtcttaggttttcatatttacatatttttaactaaaagacccataacgctcttctctttagtgtattagatcatctgtttatttagttggtagtgaacgttaccattcagaatcagtcatcgttttttttt

SEQ ID NO: 20129 - DNA, 571 bp, Arabidopsis thaliana columbia
  Clone ID: LIB3176-029-C6_FLI
aacagaagctagctttggctaagaagctgaacttgacggcaagacaagtggaagtgtggttccaaaacagaagagctagaaccaagttaaagcaaacggaggtagattgcgaatacttgaaacggtgcgtagagaagctaacggaagagaaccggagacttcagaaagaggctatggagcttcgaactctcaagctgtctccacaattctacggtcagatgactccaccaactacactcatcatgtgtccttcgtgcgagcgtgtgggtggcccatcatcatcgaaccatcaccacaatcacaggcccgtttctatcaatccgtgggttgcttgtgctggtcaggtggctcatgggctgaattttgaagccttgcgtccacgatcgtgattttttattttagtggtgggaaaagggtgttttggtatttttcgttatcgttatatagtctatctgtgtggggtcattgtaattttggatgattggccttctcatgaactagtcctatgtatgatgcaaccttaaaaagatttaaattagcaaaaattagttacaaacttgctatattaacc

SEQ ID NO: 20130 - DNA, 934 bp, Arabidopsis thaliana columbia
  Clone ID: LIB3176-030-B12_FLI
caacgacctccaaagaagagttttgttagcaagacaaacacaagtggaaggtcttcatcataaacaacatgaggatgtacctcaagctggttcctcacaagctctagagaacagaagaccaaaggatatgaaccatgaaactccggccaccaccttgaaacgacggtctccagacgacgtggatggtcgtgatatgcaccgaggatcaccaaaaactcctcgaatagaccaaaacaagagtactaatcatgaagaacaacaaaaccctcatgatcaattaccctatagaaaagctagggtttccgttagagctagatctgatgccactacggtaaatgacggatgtcaatggagaaaatacggtcagaaaatggcgaaagggaatccatgtcctcgcgcttattatcgttgcaccatggccgttggatgtcctgtccgtaaacaggtccaacgatgcgcggaggatacaactatcttgacaacaacgtacgaaggaaaccataaccatcctcttcccccgtcagccacagccatggctgcaaccacctccgccgcagcagccatgctcttatcaggctcctcctccagcaacctccaccaaacactctctagcccctccgccacgtcatcatcatccttctaccataacttcccatacacctccacaatcgcaacactctctgcctcagctcctttccccaccataaccttagacctcaccaacccacctcgaccgctacaaccgccaccgcagtttctaagccagtatggtcccgccgcgtttttaccaaacgctaatcaaattaggtctatgaataataataaccagcagttattaatacctaatttgtttggcccacaagccccaccacgtgaaatggtcgattcagttagggctgcgattgcgatggatccgaacttcacggcggcactt

SEQ ID NO: 20131 - DNA, 754 bp, Arabidopsis thaliana columbia
  Clone ID: LIB3176-030-G9_FLI
ctctctctctctctctcacacacacacacaaacgcacatacttgagcaaagtcatcacaatgagcttcttcatcgaagattctggtctcatagtcactcagcttctctacaaaatggctgttctcatcaccgtcttgagatggatcctcgcttggatcttacgctaccgatccagatccagatccacctcttcttccacttccgcctgtccttcgatttcctcacaggcgatcaaagaaagcctctccgtgacgacgttccgtgacgcagctgagagatctccggcgatgatcaacgacacctgcgctgtgtgtctcggagatctggaagatggagatgaggttagagaactcaggaactgtagccatatgtttcaccgtgagtgtattgaccggtggttggattatgaatgttgcggtggtgatgagaataacgaaggtgaggaggataatcaccgtacgtgtcctctttgtagaactccgctacttgctgctaatacgacgtcgtgtggtgattggccgacgaagaacgaacctagctgggccgttgaacggcttctctacctcttcggagatgatcttcacgtctgatttcatttttttttgtcttttccgatttttatttgattttttatttagtgggatcgattttgatcaattagaaatttaagtagtgagagtggttaatttttgtaaattgggggatttaatgtgttagattaggaaatataataataatatcatcgattaatttc

SEQ ID NO: 20132 - DNA, 1202 bp, Arabidopsis thaliana columbia
  Clone ID: LIB3176-033-A2_FLI
agaaaaatggcgtcaaagctctgcgattcgtgcaaatcagcgacggcggcgttatactgccgaccagacgcagcgtttctatgcttaagctgcgattcaaaagtccacgcggcgaacaaactcgcgtcacgacacgcgcgcgtgtggatgtgtgaagtgtgcgagcaagcaccggcacacgtcacgtgcaaagcagacgcggccgcgttatgcgtcacgtgcgaccgtgatatccactcggctaatccgttagctcgccgtcacgaacgcgttcccgttactccgttttacgattccgtctctagtgacggttccgttaaacacaccgccgttaatttccttgacgactgttacttctccgatatagatggtaacggaagccgtgaagaagaggaggaagaagctgcttcgtggctgttacttcccaatccaaagactacaacgacggcgacggcggggatcgttgctgttacttcagctgaggaagttccgggagatagtccggagatgaacactggtcaacagtatttgttctcggatccggatccgtatctggatctggattatggaaatgttgatccgaaggtggaatcgttagagcagaatagctccggtactgatggtgttgttccggtggagaatcggacggttaggattccgacggtgaacgagaattgctttgaaatggattttaccggaggatctaaaggctttacttatggtggtggttacaattgcatcagtcacagcgtgtcatcatcgtcgatggaagtgggagtggtgccagatggtggttcggtggctgatgtatcgtatccttacggtggtcctgcaaccagtggagctgatccggggacacagcgggctgttccgctgacttcagctgagagagaagcgagggtaatgaggtacagagagaagaggaagaacaggaagtttgagaagactataaggtatgcttcaaggaaagcgtatgcggaaatgagaccgagaatcaagggacggtttgcgaagcggacggatacaaatgagagcaatgatgtggttggtcatggtggtatctttagtgggttcggacttgtacctacattttagatattgagagagggagagactctaaaatggaagatggtgggtggtttggtgtttgttttagtaataaggtttttaacgaacgtttaatttaaacgagtttgtttgtt

SEQ ID NO: 20133 - DNA, 680 bp, Arabidopsis thaliana columbia
  Clone ID: LIB3176-036-A6_FLI
ggatccaaaaacacaaagccgatcactaagactgaggactgtgagagtttcttcaactttttcagtccacctcaagttcctgacgatgatgaggatcttgatgatgacatggctgatgaactccaaggacaaatggagcatgattatgatatcggttcaacaatcaaagagaaaatcatctcgcatgctgtgtcatggttcactggtgaagctgttgaggcagatgaccttgatattgaggacgacgatgatgagattgatgaagatgatgatgaagaggacgaggaagatgatgaggatgacgaggaggaggatgatgaggatgatgacgaggaggaagaagcagatcaaggaaagaagagcaaaaagaagtcatcagctgggcacaagaaggctggaagaagtcaacttgcggaaggtcaagcaggtgagaggccaccggaatgtaagcagcagtgaagaagtgaagaatcttggcttagttatgatgaagaagaagagtgaagagtgtctttgagccgaggttgtgtttctttaatttgcagagtcatggtccggtttattatatatcagttttgggtgattggtttgctatttaaaaaaaaaaaatgggttctttggtttggtttgtgtctcttgatttttccttttgtaatgatcttatgaatttgtttcgagtt

SEQ ID NO: 20134 - DNA, 868 bp, Arabidopsis thaliana columbia
  Clone ID: LIB3176-036-E4_FLI
gaaggaaggaaacaacaacaaccaaaaaaaaaccaaaaaaaaaaaagataaaacaaaaaaaatgtctttcacaggaactctcgacaaatgcaatgtttgtgataagacagtctatgtggtggacatgttgtccattgaaggaatgccttaccacaagtcttgcttcaggtgtacccattgcaaaggaacccttcagatgagcaactattcctccatggacggagttttgtactgcaagactcattttgagcaactcttcaaggaatctggcaatttcagcaaaaactttcaaccaggaaaaactgagaagccagagctgactaggactcccagcaagatatcttccatcttctgtggaacacaagacaagtgtgccgcttgcgaaaaaactgtttaccctcttgaaaagatacaaatggaaggagaatgcttccacaagacatgtttccggtgcgctcacggtgggtgtacgctgactcactcctcctacgcctccttagatagcgttctctattgccgacatcactttaaccaactcttcatggagaaaggaaactacgctcacgtcctccaagccgccaatcaccgtcgcacagcctcaggcaacactcttccaccggaacctaccgaagacgtcgccgtggaggccaaggaagagaatggcgtttcagagtcttgaatatctcttacatgagtgtttttgagtgaatgattgaatgaatgttgttgcgggggaaagatttgatttcatttgtaatgagttgtttccatatgaagacatgattttttttgttatttttttaattcattcgttatacatttattattacacacgaaaaaaaggcaagaattgatgttttttcactct

SEQ ID NO: 20135 - DNA, 1080 bp, Arabidopsis thaliana columbia
  Clone ID: LIB3176-036-H7_FLI
ttacattttcttccgatcaatacagagagatcagtttctgagagagaagaagatgtctatagaggaagaaaacgttccaacgactgttgactcaggagctgccgatacaacggtgaaatctccggagaagaaaccggcggcgaaaggtggtaaatctaagaagacgacgacggctaaagcaacgaagaagcctgtgaaagctgctgctccaacgaagaagaaaacaacttcctctcaccctacctatgaagagatgattaaagatgcgattgtaacgttgaaggagagaactggatctagtcaatacgcgattcagaaattcatagaggagaaacataaatcactgcctcctacttttaggaagcttttgcttgtgaatctcaagagacttgttgcttctgagaaattggttaaagtcaaagcttcttttaagattccttctgctagatccgcagcaacacctaaaccggctgctccggttaagaagaaggcaactgtagtagctaaacctaagggtaaggttgctgctgctgttgctcctgctaaagctaaagcggcggctaaaggaactaagaagcctgcggctaaagttgttgctaaggctaaggttactgctaaacctaaggctaaggttactgctgctaaacctaagtctaagtctgttgctgctgtttccaagactaaagctgttgctgctaagcctaaggctaaggagagaccagctaaagcttctaggacttcgactagaacatctccagggaaaaaagttgctgctcctgctaagaaagtggctgtgactaagaaggctccggctaagagtgtgaaggtgaagtctccggcgaagagagcttcgactaggaaggctaagaagtgaagaagattggtttaggataggttttggggggagattgaatacatggtggtggttagcttctatagggtagtcttgtataattgaatcatccttgaaggagcttgctttccaaagttttttacttgtttctttggtttcttcttgaaacttttttttttcttctttgtaagttttggtttgtttgaattttaagctttttgatcaat

SEQ ID NO: 20136 - DNA, 1322 bp, Arabidopsis thaliana columbia
  Clone ID: LIB3176-037-A1_FLI
ctaaactcaatatataatgataacacgttcacgtgttcatcgtcaaaagagtgtctcagtgagtacaatcttcaggtgtcttctagttttgatcagacgctctattcaattctcttaattagtcatatctttctttcttttttcctcgtttcgtgttaattttattttaaaacaaaggattaaagagtcgttctttcttttggtaacatggagccttaatgatcctttgttagctctagctaggattttacgtactacttagggtattcaaactaaaataaaatcaagaagaagagcagagagatggtgaggacaccatgttgcaaagaagaaggaataaagaaaggagcttggactcctgaggaagatcaaaagcttattgcttatcttcacctacatggtgaaggtggatggcgtactctccctgaaaaagctggattgaagagatgtggaaagagttgtagattgagatgggctaattacttaagacccgacattaagagaggagagtttagtcctgaagaagacgacactatcatcaagcttcatgctcttaagggtaacaagtgggccgcaatcgccactagcttggcgggacgaactgacaacgaaataaaaaactattggaacacaaatctcaagaagcggttgaagcaaaaaggcatcgatgcaatcactcacaaaccgatcaattcaaccggtcaaaccggtttcgaaccaaaagtaaataaaccggtatattcatccggttccgctaggcttcttaaccgcgtcgcaagcaaatacgcggttgaattaaaccgggacttactgaccgggatcatcagtggaaactccaccgtcgccgaagattcacaaaactccggcgacgttgattctccgacctccacattgctcaacaaaatggcggcaacatcagttttgatcaacactacgactacatattccggcttctccgacaactgttctttcactgatgaattcaacgaattctttaacaatgaagagatctccgatatttacacgactgtcgataattttgggtttatggaagagttaaagagtattttaagctacggcgatgccagcgccggagttattgaaaattcgccggaggtcaatgtagctgatgcaatggagttcattgattcctggaacgaagatgacaatatggttggagtctttgtctgacgagtcagactaaaatcaatcttacgttggttttttctttaataagctgtgatagattcgtgtaatcgtcacgtagtcaaaataatgtgctgttgtaaaaattaataataataaatatttctacttacatg

SEQ ID NO: 20137 - DNA, 732 bp, Arabidopsis thaliana columbia
  Clone ID: LIB3176-037-G5_FLI
gtcagtttccgaggttaaacctaaaaacctcggggttcgacctggggaagctctagccgtaaactttgcctttgtgcttcatcatatgccagacgaaagcgtgagcaccgagaatcaccgcgaccggttattgagaatggtgaagagcttatctcccaaggtggtgactcttgtggaacaagagtcaaacacaaacacagccgctttcttcccgaggttcatggagacaatgaactactatgccgcgatgtttgagtcaattgatgtgactctaccaagagatcacaaacagaggattaatgtggagcaacattgtctagcaagagatgtcgtgaacatcatcgcatgtgaaggagctgatcgggtggagcgacacgagctcctaggaaaatggaggtcacggtttgggatggcgggtttcactccttacccgttgagtcccttggtgaattcaaccattaaaagtctgcttaggaactactcagacaagtacaggctagaagaaagagatggagctttgtatcttggttggatgcatcgagatttggttgcctcgtgtgcttggaaatgagacagtgacatttctctagtgtgatggcaattaatgtgtttctacttgtatgcaatttagtcgctcatttgaatcttcaaaacatttgaagaatcttatgtttactactagagaccaagagtgtgcacaattgctcaaatgtcaaagtcaactctttcctc

SEQ ID NO: 20138 - DNA, 855 bp, Arabidopsis thaliana columbia
  Clone ID: LIB3176-038-A3_FLI
gcgacaagaagaaaaagatgaagaagaagagtgtcgagacttacaagatctacatcttcaaggtgcttaagcaagttcatcccgatatcggaatctccagcaaagcgatggggatcatgaacagtttcattaacgatatcttcgagaagcttgctcaagaggcgtcgaagcttgcgaggtacaataagaaacctacgatcacttctcgggagattcagactgctgtgagattggtgcttcctggagagttggcgaagcatgccgtttctgaggggactaaagccgtcacgaaattcaccagctcttgaataattgagttagggttcttatcatatggatgttgctctgctttagggttaatggaatttggaagatctgagttagggttttagaatgtcctttaagtatctctgtttcgtttggaatttctacgttttgtaagtactgctgctattgataatgtttggagtctatatttgctctttgtgtcccaatcctgtcgtattgagagttgctcgttgttttactcgtattcaatctttgccttgcagaaattacactgtgatctagtaaccacatttcagtaagtgccccatgaattgggttcgtaatatgaattgtaagtggcattctgatcgttgtggattatggattccaacttttgcttcgaatttgatttttagctgagagttggtcttagacttgctagattattctaaagcattaatactcgtttagtttcatgttgcgaactatgattacattgctagtctcatgcttgatttgttcttagttttggtttagtttttgtaattagttttgtgatgtgaaatggagtaaatctgacaatgcaag

SEQ ID NO: 20139 - DNA, 846 bp, Arabidopsis thaliana columbia
  Clone ID: LIB3176-049-C7_FLI
caagtccccgtttcttcgttctcatcatcttcatcgccgattttgcaacgaccacctctgctactcccgtcgatcaatctacgaagaagaagaagagatgagtaacacaccagcagcggcggcgtcatcatcgtctaaatcgaaagctgcgggaacttctcagccacaggaaaagcgcaaaactctctttcaaaaagaattgcagcatatgatgtatggatttggcgacgagcaaaaccctcttccagagtctgtggcgcttgtagaagacattgttgtggaatacgtcacagatttgacacataaagctcaagaaattggttcaaagcgaggaagacttctagttgatgatttcttgtatcttatccgcaaggatttgccaaaactgaaccgctgtagagaactgttggcgatgcaggaagagctgaaacaagcacgcaaagcttttgatgtcgacgaaaaggaactcgttgattgatcttgcttttcctcaacgggaggaacaaatgctaggtaagaggaacctcatggatgccggactagggacagcgttttaggttgtaatcagaattcgaagcacagtagcaaaaaaaaagtgtgttgacttaaaaaaggtgaaaaaaaatcttgcacaaggccgactcatattaaatgtaggcccattagaagaaagcccattatctagcatcccgtatatatctacggacgacctttaatttttcttgagtcaggaatttcgaaaccctaaaaatttagaataaccacccgatttttgtttctttcattaaattaattaccgcaataattataaaattagtcatcattataagacttttgtttttctct

SEQ ID NO: 20140 - DNA, 596 bp, Arabidopsis thaliana columbia
  Clone ID: LIB3176-057-D11_FLI
catctctaatcacattttacaatcgcctcttcaaatttcccgataaacaaaaaatgagttccggcgccggcagtggaacaactaaaggtggcagaggaaagccaaaagctacaaagtccgtctctcgatcttctaaagctggtcttcaatttcccgttggaagaatcgctagattccttaaagccggtaaatacgccgaacgtgttggtgccggtgctcccgtttatctctccgccgttctcgaatacctcgccgctgaggtattggagctagctggaaatgcagcaagagataacaagaagacacgtatcgtaccacggcacattcagcttgcagtgaggaacgatgaagagcttagtaaacttcttggaagtgtaacaattgctaatggaggagttttgcccaacattcatcagactcttctcccatcaaaggttggaaagaacaaaggcgatatcggatctgcttctcaagagttttaattttattttttagcttgtaacatagacatggctctctgttccacaatagttttggtattttcatgttactcaaaaactgtgtttgcaaatccagtaatgaattcggtttgaagg

SEQ ID NO: 20141 - DNA, 199 bp, Arabidopsis thaliana columbia
  Clone ID: LIB3176-064-E6_FLI
agtggtgggaaaagggtgttttggtatttttcgttatcgttatatagtctatctgtgtggggtcattgtaattttggatgattggccttctcatgaactagtcctatgtatgatgcaaccttaaaaagatttaaattagcaaaaattagttacaaacttgctatattaaccaaaaattatgaaactatctttttttgat

SEQ ID NO: 20142 - DNA, 589 bp, Arabidopsis thaliana columbia
  Clone ID: LIB3176-067-A10_FLI
ctgatctgactccaaagagcgccctggatgcatctttgtcccctgttccttacatgtttgggcgagtgagaaaaacaggtgcagttctggagaaagtgattgagagaaggcaaaaaaggatgataaagaatagggaatcagctgcaagatcccgcgctcgcaagcaagcttatacgatggaactggaagcagaaattgcgcaactcaaagaattgaatgaagagttgcagaagaaacaagttgaaatcatggaaaagcagaaaaatcagcttctggagcctctgcgccagccatggggaatgggatgcaaaaggcaatgcttgcgaaggacattgacgggtccctggtagagcttataatggcgtctaaggaacccaacaaagcgccgaagttatagaacaactcagaagatagaaagctagctttgtacgtagtttaggcaggttctgtgggtgattgtaaatcttgaagtgtggcggatttgacagagatagataaacacatatctgttctattttcctaaatcttttggttttatcttcctgatgtaatggatctttatcatttgtcttgaacatctttgtgactt

SEQ ID NO: 20143 - DNA, 514 bp, Arabidopsis thaliana columbia
  Clone ID: LIB3176-071-F4_FLI
tgccttgtaagcataagtttcatgttcggtgtattgttccctggcttgagcttcatagttcttgtcctgtgtgtcgttttgagcttccttctagtgctgatgatgatgatgagactaagactgattccgagagagtgctgagaacaagaaatgttcgggaaacgagtaacggaaacgttgttgagaatgtgggaaatgcggatagaggaagagaggatgaggtgaggagtggaaatgggagacggttttcgtttccatggccgtttagtggattgttctcgtcttcttcttcttcgtcttcttcaacctctggatctcaatctggtgagaacaatttcttctcaagatcttctggttcttctcgctgagagcaaaacaatcaaaaactaaaacatcttggattttgttattgttcttcatcttttgttgttctctcatttttctagctattgaacttgttatttcctctgcatttcattctctgctttactgtacatagaaatgatgttctttc

SEQ ID NO: 20144 - DNA, 1397 bp, Arabidopsis thaliana columbia
  Clone ID: LIB3176-073-A8_FLI
aaaccacaattctggcaaaaaagaaaaatccccaaaatctagggttttcttctcgcccaatttcacttttcttctacgaaattctccattcctgccggctgtcgggttttctgaatcgattctccttcaccaacttcttctctggttctgttcgattctgattttttttcaaggtcaattttttcttctctttaaactctgcaaaatcgtgatcgattaaattcacctcagggttttttgatttctgaaagaagttaatcttcttcgaaggcgattgcaaaagagtgctctgctgtgaatttccactgagatgcaatcaaaaccgggaagagaaaacgaagaggaagtcaataatcaccatgctgttcagcagccgatgatgtatgcagagccctggtggaaaaacaactcctttggtgttgtacctcaagcgagaccttctggaattccatcaaattcctcttctttggattgccccaatggttccgagtcaaacgatgttcattcagcatctgaagacggtgcgttgaatggtgaaaacgatggcacttggaaggattcacaagctgcaacttcctctcgttcagataatcacggaatggaaggaaatgacccagcgctctctatccgtaacatgcatgatcagccacttgtacaaccaccagagcttgttggacactatatcgcttgtgtcccaaacccatatcaggatccatattatgggggattgatgggagcatatggtcatcagcaattgggttttcgtccatatcttggaatgcctcgtgaaagaacagctctgccacttgacatggcacaagagcccgtttatgtgaatgcaaagcagtacgagggaattctaaggcgaagaaaagcacgtgccaaggcagagctagagaggaaagtcatccgggacagaaagccatatcttcacgagtcaagacacaagcatgcaatgagaagggcacgagcgagtggaggccggtttgcgaagaaaagtgaggtagaagcgggagaggatgcaggagggagagacagagaaaggggttcagcaaccaactcatcaggctctgaacaagttgagacagactctaatgagaccctgaattcttctggtgcaccataataaaaaaagccaaagctctgagaggagagagagacacacactttggctaatataatcattgcctcaaaccggcaaatcattcttggctttttcgtttttgtgtttgctagttgttcttgtcagagtctcatattgtgtgggtttaacagttatgatgaatgtacaaagagcgagttatgttaggtgttagattttggagacaagagactaaggaatagcaagtaggtcttgtttttattctttgaccttttttttctcttttgcaaaattg

SEQ ID NO: 20145 - DNA, 795 bp, Arabidopsis thaliana columbia
  Clone ID: LIB3176-073-H2_FLI
cccaaattgctctcgactttttattctcggattagcgtttgtgctttcgcatcagagaatctctcagttcttctcaatttaggtcatcagatctcacaatcaatcgactcgaactcaaatctcacttcatcaatcaaatcatgactcttggctcaggatcgagtgttgtcgttccgaggaatttccggttgctggaggagcttgaacgtggagagaaaggtattggagatggaactgtgagctatggaatggatgatggagatgacatttatatgcgctcttggactggcactatcatcggtcctcacaacgtaactgtacatgagggtcggatttatcagttgaagctcttctgtgacaaagattaccctgagaaacctccgactgttcggttccattcgcgtatcaacatgacttgtgtcaaccatgataccggcgtggtggattcaaagaagtttggggttcttgcaaactggcaaagacagtacacaatggaggacatactgactcaattgaagaaggagatggctgcatcgcataaccggaagcttgttcaacctcccgaaggaactttcttctaatactctcaaagcctacctttgaggggcttctccattgttggtcttcaagcttttctttcgtaccttaaagtaaaaacaatggtgtctgtcgatgaatgatgatgttcgattgatcatctggagtttaaatccttgtgtgcaaatatatctagacaacgctgtctcacgacttcatcttctcagtttagatataatatgggaaacaaccttctag

SEQ ID NO: 20146 - DNA, 823 bp, Arabidopsis thaliana columbia
  Clone ID: LIB3176-084-H5_FLI
gagagatgggtgattctgacgtcggtgatcgtcttccccctccatcttcttccgacgaactctcgagctttctccgacagattctttcccgtactcctacagctcaaccttcttcaccaccgaagagtactaatgtttcctccgctgagaccttcttcccttccgtttccggcggagctgtttcttccgtcggttatggagtctctgaaactggccaagacaaatatgctttcgaacacaagagaagtggagctaaacagagaaattcgttgaagagaaacattgatgctcaattccacaacttgtctgaaaagaagaggaggagcaagatcaacgagaaaatgaaagctttgcagaaactcattcccaattccaacaagactgataaagcctcaatgcttgatgaagctatagaatatctgaagcagcttcaacttcaagtccagactttagccgttatgaatggtttaggcttaaaccctatgcgattaccacaggttccacctccaactcatacaaggatcaatgagaccttagagcaagacctgaacctagagactcttctcgctgctcctcactcgctggaaccagctaaaacaagtcaaggaatgtgcttttccacagccactctgctttgaagataacattcagacaatgatgatgatcggaattcctctagtacctgccagacaggagtgaacaatgttttgagttttagcattggccagatttctatgttcagttatagttatgctaataagctttaggagtgaacaaaatctgagtagtttgattataatgatgtctgaagcagattatatat

SEQ ID NO: 20147 - DNA, 1459 bp, Arabidopsis thaliana columbia
  Clone ID: LIB3176-085-E10_FLI
catagttcttcctcaaattgctcatacctttgcttctctttctttctttattcaacctcttatttcttcttcagcaccaacgtgtatctgcagtaaacacatatccatcgatcgatctcctcaaaaagttattgttttcttgaaggatttttcttgttcttgatcaagcatacatatatatagatggtggaagaaggcggcgtagttgtgaatcaaggaggagatcaggaggtggtggatttgcctccggggtttcggtttcaccctactgatgaagagataataactcactacctcaaagagaaggtcttcaacatccgatttaccgcggcagcgattggtcaagccgacctcaacaagaacgagccatgggatctaccaaagattgcaaagatgggggagaaggagttttactttttctgccagagggatcggaagtatccgaccgggatgaggacgaaccgtgcgaccgtgtctggttattggaaggcgaccgggaaggacaaggagatctttagaggcaaaggttgtcttgttgggatgaagaaaacacttgttttctatacaggaagagctcctaaaggtgaaaagaccaattgggttatgcatgaatatcgtcttgatggaaaatattcttatcataacctccccaaaaccgcaagggatgaatgggtggtgtgtagggtttttcacaagaacgctcctagtactacaatcactactacaaaacaactctcaaggattgattctcttgataacattgatcatctcttagacttctcatctctccctcctctcatagatccgggtttcttgggtcaacccggcccaagcttctccggtgcccgtcaacaacacgatctcaaacctgttctccaccatcctacaaccgcaccagtcgacaacacttaccttcctacccaagctctcaatttcccttaccactcggtccataattccggatctgatttcggctacggggcaggttcaggcaataataacaaaggtatgatcaagttggagcattctcttgtgagtgtgtctcaagaaaccggtttgagttccgatgtgaacacaaccgcaacgccagagatatcttcttatccaatgatgatgaatccggcaatgatggatggtagcaagtcagcgtgtgatggtcttgatgacttgatcttctgggaagatttatatactagctaaatttgggaaaaggttatttgttaattgtgattgaagagtggcatattgattactcgtctagtgtttttaatcgtgtaattagttcgtatataatatacatgtacataagatcattaggtttattaggcattggactttagttcggtgattgcttacctagtttttagcttgagaaaaaaggctgtcattggggttatgtttctttgtgattaacttgtacatatatacatttaaattattcgtatggtttatttcgttt

SEQ ID NO: 20148 - DNA, 550 bp, Arabidopsis thaliana columbia
  Clone ID: LIB3176-086-F8_FLI
gagcttttctccctccgcaatgaaaccacgcagcttccgtgtctacatctataccatgctcattgtatcgtaccttggctgagtgcccgtaactcctgcccactctgccgttatgagctcccgacagatgataaagattacgaggagggaaagcggaatgtgctggatgtgagcgaggatagctcctcctctgatgatggtacagaatcgggggaagaggaatatgtagagagaggtgagagcgagtctggtgtgagcagagtcagcagaggaagatggctgtttctggctgctgcaccagttgtgagtctggtgggcgttgtgttggcaatgtggctaagcagcccacacaggaggggtatagcaatctctcatagccaaagggagaacagaaccagaagatggctgccgtttttctgactgatgcccagatccgtaggtgcctccagaatctgtatttttttaagacccttaaaagatacttgagtttcgtctgctgtttatcgacttggtactgtttccacacattagttttaattgacgtttaact

SEQ ID NO: 20149 - DNA, 1274 bp, Arabidopsis thaliana columbia
  Clone ID: LIB3176-087-A11_FLI
actctcttgtcaaaagagaaaaagagttcttgtaatggatgattcaagctttatggatttgatgatcgacactgacgagtatctgatcgatgactgggaatccgatttcccgatatgcggggaaactaacaccaaccccggttccgagtctggatctggaaccgggtttgagttgctagcagaaagaccaacgaagcaaatgaaaaccaacaacaacatgaattcaacatcttcttctccgtcgtcttcttcttcttctggttctcgcacgtcacaagtgatctcatttgggtctccagacacgaaaaccaacccggtcgagacatctttgaacttctccaaccaagtaagcatggatcagaaagtggggtcgaaaagaaaagattgtgttaacaatggaggaagaagagaaccacatctattgaaagaacatgttttggctgaacgaaaacgtcgacaaaagctcaacgagcgtttgattgctctctctgctcttcttcctggcctcaaaaagacggacaaggcaacagttcttgaagatgccatcaaacatttgaaacaacttcaagagcgggtaaagaagctggaggaggagcgagtggtgaccaagaaaatggatcaatcaattatattggtgaagagatctcaagtgtatttagatgatgattcttcatcttattcttctacttgctctgctgcgtctcctctgtcttcttcttcggacgaagtttcgatcttcaaacaaacaatgcctatgatcgaagcccgagtttcagacagagatttgttgattagagtccattgtgagaagaacaaagggtgtatgattaagatcttaagttccttggagaagtttcgtcttgaagtagtcaatagcttcactttaccatttggaaattcaactctcgttataaccattctcactaagatggacaacaaattttctcgaccagttgaagaagtggtgaagaacataagagttgcgttagctgaataatattttaaaaaacgtttatgtgaatttcgcagtggttaaacgtgttagatttggtctccaattttgaccagatcactcggtttagttgaataatgagtagttggataataaaaccagatatatgcacgaaatatgggattttgtcgtttgttgagtgcaaaagctggattggtgtgtgtacctaattatggctgtatcattggttttgatactttgatatatatttttccccaatatcattgggttggttcaataatgaagtacctaagtgttcatt

SEQ ID NO: 20150 - DNA, 792 bp, Arabidopsis thaliana columbia
  Clone ID: LIB3176-087-A8_FLI
caaacacctctctgtttcactcccgccctttttcgaattcttctgttagggtttttttttctttctgagatggcggagtcgcaggccaagagtcccggaggctgtggaagccatgagagtggtggagatcaaagtcccaggtcgttacatgttcgtgagcaagataggtttcttccgattgctaacataagccgtatcatgaaaagaggtcttcctgctaatgggaaaatcgctaaagatgctaaggagattgtgcaggaatgtgtctctgaattcatcagtttcgtcaccagcgaagcgagtgataaatgtcaaagagagaaaaggaagactattaatggagatgatttgctttgggcaatggctactttaggatttgaagactacatggaacctctcaaggtttacctgatgagatatagagagatggagggtgacacaaagggatcagcaaaaggtggggatccaaatgcaaagaaagatgggcaatcaagccaaaatggccagttctcgcagcttgctcaccaaggtccttatgggaactctcaagctcagcagcatatgatggttccaatgccgggaacagactagtatgagaggagtattcaactttggttatgttccaccaaaagaggttatcttatctgtatattatttgtgttgtaagagttttgctatgcagaacttgtgactataatcatctcattgttttgttttgtttttgtttccttggatttgttctgaatatgtcatcaagtcagtcagtctatttatatatttggtttgttgatt

SEQ ID NO: 20151 - DNA, 1372 bp, Arabidopsis thaliana columbia
  Clone ID: LIB3176-092-C11_FLI
cacaaagagaaaacaaaaaaaaagtaaagaaaaagaaaattgtgaagcggtgaaaacaagagttccaaaaaggtggctcctttttgtttctggagatgcgttattgtgacccttctttgaaatttagggttcattttctcagatttcgagttcgttgtgtttgaatctctattgggtttactttcttattcgatttgggggaaatggctgattggtatcagcttgcacagtctataatctttggtttgatcttcgcttaccttctcgctaagctaatctctatcctcctcgcttttaaagacgagaatctctcactcactcgtaaccacacgactcaatcggagtatgagaacttgcgaaaggtcgaaactttaactgggattagcggcgagactgattctcttatagctgagcaaggtagcttgagaggtgatgaagatgaatcagatgatgatgattgggaaggtgtcgaaagtacagaacttgatgaggcatttagtgctgctacggcttttgttgctgctgctgcatcggataggctttcgcagaaagtttctaatgagttgcaacttcagctttatggattgtataaaattgctactgaaggaccttgtactgctcctcaaccatcagctcttaaaatgactgctcgtgccaagtggcaagcatggcagaaattgggtgctatgcctcctgaggaagcgatggagaagtatatcgaccttgttactcagctttacccagcttgggttgaaggtggctcgaaacgaagaaatcggagtggtgaggctgcaggccccatgggaccggtttttagctcattggtgtacgaagaggaatctgacaatgagttgaagattgacgccatacacgcctttgctagagaaggagaagtcgagaatctattgaaatgcatagaaaatggcatacccgtaaatgcaagagatagtgaaggtcgaacaccactgcattgggctatagaccgtggccatcttaacgttgctgaagctctggttgataagaacgcagatgtgaatgctaaagacaatgaaggccaaacctctctacactatgctgttgtgtgcgaaagagaagcactcgccgagtttctggtgaagcagaaagctgatacaaccattaaagacgaagacggaaactcgcctcttgatctctgtgaatcagaatggtcttggatgcgagagaagaaggattccaattagtgttttttaagtctttaaaattgtgtgtcaaagctagatgcttgtgtttttcttacatttcctctgagcctctttgcttcctcttaagcttatgttttaacatacaacaacacaagttacatatgatatagtacctctagtttttattggtt

SEQ ID NO: 20152 - DNA, 402 bp, Arabidopsis thaliana columbia
  Clone ID: LIB3176-094-G3_FLI
gataaagtgtatgggagaagcggtgatcccaacgctgacgctttacaatttagtggatctatggctccagaaaagttcaaaccaccaacggtttgctgcattggtaggttcttctgcaaaggattttacgatggttcttgtctatgctcggaagctaccagagtgcaacatgtaaaggactttaaagactcatgttgttgcagaagaagattctgtggagacagggtaatcttttcttttcggtttatggaatctctcaaagcattacaagagagaacattactagaactacaggagcagtcgaatgtgttgtgaaattagtattaatatttttttctatagacgaaatatacactcatgagtcgcttttctgtgcaagaaaatacaaaatttgtttccctt

SEQ ID NO: 20153 - DNA, 1049 bp, Arabidopsis thaliana columbia
  Clone ID: LIB3176-101-H5_FLI
ccatctgtcttctaactcctttttattaagtttcttaaagaaggttaaagaaaaaccctataaaataaatatcccaacgaaggcgataaaacccagattttccagatcttaaattctctcctcccccaattccatcttcgcaaattctccagattcttccgtcaatctttgagtttggtagagaaatggatcaacaaggacaatcatcagctatgaactatggttcaaacccatatcaaaccaacgccatgaccactacaccaaccggttcagaccatccagcttaccatcagatccaccagcaacaacaacaacagctcactcaacagcttcaatctttctgggagactcaattcaaagagattgagaaaaccactgatttcaagaaccatagccttccattggcaagaatcaagaaaatcatgaaagctgatgaagatgtgcgtatgatctcggccgaggcgcctgttgtgttcgccagggcctgcgagatgtttattctggagcttacgttaaggtcttggaaccatactgaggagaacaagagaaggacgttgcagaagaatgatatcgcggctgcggtgactagaactgatatttttgattttcttgtggatattgttcctcgggaggatcttcgtgatgaagtcttgggtggtgttggtgctgaagctgctacagctgcgggttatccgtatggatacttgcctcctggaacagctccaattgggaacccgggaatggttatgggtaacccgggcgcgtatccgccgaacccgtatatgggtcagccaatgtggcaacaaccaggacctgagcagcaggatcctgacaattagcttggcctaataaactagccgtctaattcgaagctctccccggtggatctactcaagaagaagaatgttaatagaaaactattgcgacataaaaagtttggtgtagtagaataatttctgttttatgatccatggatttatctattgttattcagtttggtttatcttgtcatcaaactgttttcggtcaatgtaacaaattcataaact

SEQ ID NO: 20154 - DNA, 1621 bp, Arabidopsis thaliana columbia
  Clone ID: LIB3176-102-B7_FLI
agaaaactctcgtctgttaaagctttcctctgtttaccttcggagtcaatcttgattccgatgggactcgaatcgggttttggagcgtttgggtgaagacatggagaaactaatgactgaatcaggtttgaaaccagttgttattgattcgaatcaagatttatctcgtgtatattgtgggatctgctctaatattggtgatgacgattatgatggtgatgctgttgttgttgatggtgatttgatctccacgcctttttgttctcacaagttctgcaaagcttgttggagcaagtatcttaagaaaaatttcttctctgtggagaaaaaccacactgcaatctcttgtcctgatcgagattgtcgagctgctgttggaccggagacggttgagaagctaaccgtacgtgatcaagcgatgtacgagttgtatattctgaaatcttaccgtgagaaatacctgggatggaagctcaaactgtgtcctgcacggggttgcaattacgtgattgagtttcatctggcaagtgaagatgaagagcatagcttaaacattgtgtgtctctgtggtcatatcttctgttggagatgcatgcttgagtcacacagaccagtgacctgcaacaacgcttctgattggttgtctagagacttggagaaattgatagaagaagtagacaagccatcgaccgtctcctggattgatgccaataccaagccttgccctcattgctttattcctgtggagattgatggtgaacgaccatgggcccagttcttgacttgtgtctgcagcggtcgtttctgttggaagtgttttcggtcaccggaaactcacggaacctcaggatcctgtttggcaccggcgcgttcgagcaatgttggtttcaatcattggaacagagcaaaaccggggatttcgtgtttggatctctggaatgcgagtcaagtgaatctggtgaacgctaaatacgagctagaagctttcgaggaatccataatcaagaaacctagtgacttgaaggagcaagacgttaaggtactaagggaaggactgatgctcattgttcagtgcagacagttcctcaaatggagctgtgcgtacgactatatccacacagagtatgatatggcgaagagagagtacctgcgattcctccaacaaaacgcgtctggcattgtccatagtttctcacagagtataaaggaggaaacagaagccaaagagcttacttgcggtaagctattgagcgagacaaccaacattgggaacttcttttatcatttcatcaagactttacgagaaggtttgcccgaggtacaggcggagtcgtacgacaactatggtggtccttactggttgtgcgatcgctgcacatatggaaactcttggttccagagggcctgtaagatgtgctgtgatcctactgcgtctaagatggacgagctaagtgattgatcgcttaactaggtttcttaaagataaaacaaaaggttctaggagacagagtaaccttgcaactctttaagttctgtttttttttttgctttctttctttctttctttctgcagttttatattggactaccaactttcaatgtcgaattgactttttctttc

SEQ ID NO: 20155 - DNA, 1982 bp, Arabidopsis thaliana columbia
  Clone ID: LIB3176-111-C8_FLI
tcgtctttcgctccactagcgatccacgcgccttctcgttcgcttgatcttgaagttggaaactttgggaaccagacaggctttgtaggagaaatgtatggaacaggggacattttgaggtcagtttcgattccttctgagactgataagcctataatcgtggagctagcggttgcagctatggaggaactcgtgagaatggctcaaactggagatcctttatggctttcaaccgataattcagtcgagattctcaacgaagaagagtatttcagaacgtttccgagaggaattggaccaaagccattaggattaagatcagaggcgtcaagacaatctgcagttgttataatgaatcacatcaatctcgttgagattctcatggatgtgaatcaatggtcttgtgttttctctgggattgtgtcaagagccttgacacttgaagttctttcaactggagttgctgggaactacaacggtgctttacaagtgatgacagctgagtttcaagttccatcacccctagtcccaacgcgtgagaactactttgtgagatactgcaaacaacacagtgacggctcttgggctgtggttgatgtctctttggacagccttagaccaagtactccaatcttaagaactagaagaaggccttcaggttgtctgattcaagaattgcctaatggttattctaaggttacatggatagagcatatggaggtagatgatagatcagttcacaacatgtataaaccgttggttcagtccggtttagctttcggtgcgaaacgttgggtggctacactcgaacgacaatgcgagcggcttgctagctccatggccagcaacattcctggtgatctttccgtgataacgagtcctgaaggaaggaagagtatgttgaagctagctgagagaatggttatgagtttctgcagtggtgttggcgcgtcgactgcacacgcttggacaacaatgtcgacaacaggatccgatgatgttcgggtcatgacccgcaagagtatggatgatccaggaagacctccgggtattgttcttagtgcagctacttcattctggatcccagttgctcccaaacgtgtttttgatttcctccgtgacgaaaattcaagaaaagagtgggatattctgtcaaatggaggtatggttcaggaaatggctcatatagccaatggtcatgaacctggaaactgtgtctccttgctccgagtcaatagtggaaactcgagccagagcaacatgttgattctacaagagagctgtacagatgcatcaggatcgtatgtgatttacgcgccagtggatatagtggcgatgaatgtggttctaagcggtggagatcctgattacgtggcgttgttgccgtctggttttgctattttaccggatggttcggttggaggaggagatgggaatcagcatcaggaaatggtttctactacttcttctgggagttgtggtggttcgcttttaaccgttgcgtttcagattcttgttgactctgttcctacagctaaactctcacttggctcggtggctacggttaatagtctgatcaaatgtacggtggagaggattaaagctgctgtttcttgtgatgttggaggaggagcgtagttttttttcagaagaagtaagaataagagaaaaggaaggattaagagcggttatggtttctcattttgtgttttttgaaatccaaaggaagtcaagaacgcaccttttgcgtttaatttcatctcaagctgatgaaaaaaggtaaagtggttcgggtattgacttctgctggaaaccacggttttaaattgtctattttgcgtttcgttgacagttttttgaacaccttttgggtttcccctttttgcgttctccgacccaagttgtcagtttctttgttgttttgtattgtaagcccttttgttgcacttgacagatatggagttaaaatctttgttattagt

SEQ ID NO: 20156 - DNA, 932 bp, Arabidopsis thaliana columbia
  Clone ID: LIB3176-112-G6_FLI
gtcgagacatctttgaacttctccaaccaagtaagcatggatcagaaagtggggtcgaaaagaaaagattgtgttaacaatggaggaagaagagaaccacatctattgaaagaacatgttttggctgaacgaaaacgtcgacaaaagctcaacgagcgtttgattgctctctctgctcttcttcctggcctcaaaaagacggacaaggcaacagttcttgaagatgccatcaaacatttgaaacaacttcaagagcgggtaaagaagctggaggaggagcgagtggtgaccaagaaaatggatcaatcaattatattggtgaagagatctcaagtgtatttagatgatgattcttcatcttattcttctacttgctctgctgcgtctcctctgtcttcttcttcggacgaagtttcgatcttcaaacaaacaatgcctatgatcgaagcccgagtttcagacagagatttgttgattagagtccattgtgagaagaacaaagggtgtatgattaagatcttaagttccttggagaagtttcgtcttgaagtagtcaatagcttcactttaccatttggaaattcaactctcgttataaccattctcactaagatggacaacaaattttctcgaccagttgaagaagtggtgaagaacataagagttgcgttagctgaataatattttaaaaaacgtttatgtgaatttcgcagtggttaaacgtgttagatttggtctccaattttgaccagatcactcggtttagttgaataatgagtagttggataataaaaccagatatatgcacgaaatatgggattttgtcgtttgttgagtgcaaaagctggattggtgtgtgtacctaattatggctgtatcattggttttgatactttgatatatatttttccccaatatcattgggttggttc

SEQ ID NO: 20157 - DNA, 1030 bp, Arabidopsis thaliana columbia
  Clone ID: LIB3176-113-E7_FLI
ctctttaatacccctgtggacgtcgtcaagctcaacattcctgattatttcaccattatcaaacatcctatggatttaggaactgttaaaagcaagttaacttccggcacgtattcaagcccttcagagttttctgctgatgtccgtcttactttccgcaatgctatgacttataacccgtcagataataatgtgtatcgcttcgctgatactctcagcaagttttttgaagtgagatggaaaactatcgagaagaagtcatccggaaccaaatctgaaccaagtaacttggctactcttgctcacaaagatattgcgatacctgagcctgtggctaagaagagaaagatgaatgctgtgaaacgtaacagcctcttagagcctgctaagcgggttatgacagatgaggatagagtaaagcttggcagagatttggggtccttgacagaattccctgtacagataataaatttcctgagagatcacagctccaaggaagagagatctggagatgatgagatagagattgacatcaatgatctcagtcatgatgccttgttccagttgcgggatctctttgatgagtttctgcgagaaaatcaaaagaaagattcaaacggtgaaccctgtgtgttagagcttttacatgggtcagggccaggaaattcattgacgcaacactgtgatgggagtgaattggaggacgaggatgttgacattggtaattatgagcaccctatatctcacatctcaactgtcagaacagaaaaagcagattccgtcggtggattgaatcagatggaagatgcatccagagggaagctaagtcttattgagggggcagatggtcatcaagatggaaatagtgctccaaaagagaaggaactacctccagaaaagcgttacagggctgctctattgaaaaatcgatttgcggatataatcttgaaggctcaagagataactcttaatcagaatgagaaacgagacccagagacactgcaacgtgagaaggaagaactggaattgc

SEQ ID NO: 20158 - DNA, 655 bp, Arabidopsis thaliana columbia
  Clone ID: LIB3176-118-B11_FLI
tctcgttaaacctagaaacctcgagaaaaaccgtatcaatggcgccgaaagcagagaagaagcccgctgagaagaaaccagcttccgagaagccggtggaggagaaatcaaaagccgagaaagctccggcggagaagaaaccaaaggccggaaagaagctcccgaaggaagctggtgccggaggcgacaagaagaaaaagatgaagaagaagagtgtcgagacttacaagatctacatcttcaaggtgcttaagcaagttcatcccgatatcggaatctccagcaaagcgatggggatcatgaacagtttcattaacgatatcttcgagaagcttgctcaagaggcgtcgaagcttgcgaggtacaataagaaacctacgatcacttctcgggagattcagactgctgtgagattggtgcttcctggagagttggcgaagcatgccgtttctgaggggactaaagccgtcacgaaattcaccagctcttgaataattgagttagggttcttatcatatggatgttgctctgctttagggttaatggaatttggaagatctgagttagggttttagaatgtcctttaagtatctctgtttcgtttggaatttctacgttttgtaagtactgctgctattgataatgtttggagtct

SEQ ID NO: 20159 - DNA, 1066 bp, Arabidopsis thaliana columbia
  Clone ID: LIB3176-118-F10_FLI
ggcttggggctcgctcttgggaatgcagctagcagaaagagatatcattgtagcatgccttgactacaggaactttcctcagggaacaattagtgatatggtgactgatgcttctcaaggaatctcatttgtctgcaataacatctctgcatttggaggtgaccccaacaggatctacctgatggggcaatcagctggtgcccatatagccgcttgtgctctattggaacaagctactaaagaattaaaaggagagagcatctcctggacagtgtcccagataaaagcttattttggattatctggagggtatcttctaagcttttggattcccgttggcttctatgtgctttttggtctacagcaattgatctgcttatcattttgaacttcaataggtacaatctatacaagttggttgatcacttccataatcggggtctgtatcgctcgattttcctaagcataatggaaggagaagagtcctttgagaaattctctccggaagtaagactgaaagacccagttgttggaaaagctgcttctcttttacctcctattatacttttccacggatcctcagattattccataccatgcgatgaaagcaaaacttttacagacgctctgcaagctgttggagcaaaagccgagcttgttttatacagcggaaagacacatactgacttatttcttcaggatcccttacgaggaggtaaagacgaactctttgatgacatagtctctgtgatacatgcggaggacaatgatgggctgaccaaagactcgttggctcctcccagaaagcgtcttgtaccagagttgttactgaaactggctcgtgagattagccctttctgactgccaagaaaggaaaacaagctttgtttgttgatcctcagtttttacctttgttagttgctgtgtttttaattgcatcagtagaacatcatgtaaataaaaacaaactttgttgctccaccaaatttatttgacccatgtagatttgaacacatgaatatgattacttccacaagtttgaaatctaataaaagctagtaaagat

SEQ ID NO: 20160 - DNA, 1066 bp, Arabidopsis thaliana columbia
  Clone ID: LIB3177-009-E10_FLI
agaaggaagaagaagaagaagaagaagaaaaaactatggagaatgagagggaaaagcaggtttacttggctaagctctccgagcaaaccgaaagatacgatgaaatggtggaggcgatgaagaaagttgctcagcttgatgtggagctaactgtggaagagaggaatcttgtatctgtagggtacaagaatgtgattggtgcaaggagagcatcatggagaatactatcttccattgagcagaaggaagagtccaagggaaatgatgaaaatgtcaagaggcttaagaattatcgtaagagagttgaagatgagcttgctaaagtttgtaatgacatcttgtctgtcattgataagcatctcattccatcgtctaacgctgtggagtcaactgtctttttctacaaaatgaaaggagattactatcgctatcttgcggagttcagttctggtgctgaacgcaaggaagctgcagatcagtctcttgaagcatataaggctgctgttgctgctgcagagaatggtttggcacccacacatccagttagacttggcttggcgttgaacttttcagttttctactatgagatcttgaactctcccgaaagcgcatgccaattggctaagcaagcattcgatgatgcaattgctgaacttgacagcctcaacgaggaatcatacaaagacagcactcttattatgcagctacttagagacaatctcaccttgtggacttcagaccttaatgaggaaggagatgagagaaccaaaggtgctgatgagcctcaagatgagaactaaatcctctgtgagaagagaaacgactcttgctgcatcctgaatcttgaagtgaagacagtaagtgtcgttgtttgttactcgaatgtgtaatttttaatctatgtctttcttgatggtgttttccagattcttgaacttttcacaacacaacactgcgttgcgtatcttcaaccctcttatgatgtggttgaattctgttttacgcttagtttgcttcttttgttgttgaattgagccagcaggcatgatttgggtttttgtttatc

SEQ ID NO: 20161 - DNA, 592 bp, Arabidopsis thaliana columbia
  Clone ID: LIB3177-019-B4_FLI
cccatcaaaggttcaccatatccaagaggatactacagatgtagtacatcaaaaggttgtttagcccgtaaacaagtggagcgaaatagatccgacccgaagatgtttatcgtcacttacacggcggagcataatcatccagctccgacacaccgtaattctctcgccggaagcacacgtcagaaaccatccgatcaacagacgagtaaatctccgacgaccactattgctacttattcatcgtctccggtgacttcagccgacgaatttgttttgcctgttgaggatcatctagcggtgggagatcttgacggagaagaagatctgttatctttgtcggatacggtggttagcgatgatttcttcgatgggttagaggaattcgcagccggagatagcttttccgggaactcggctccggcgagttttgatctctcttgggttgtgaacagtgccgccactaccaccggaggaatatgattagattacgacggcttagaatactcttattaggacagatttataggattaaggaattattctcggagcatatgtaaaaataggataaaagaaaatgttctttgttactttt

SEQ ID NO: 20162 - DNA, 520 bp, Arabidopsis thaliana columbia
  Clone ID: LIB3177-022-G12_FLI
cgggtactgtcgggttaaccagtcagttcactaaaccgttgaggcttttagatggatcgtctgagtttgtacttacttatgaagataaggaaggagattggatgcttgttggtgatgttccatggagaatgttcatcaactcggtgaaaaggctacgtgtgatgaaaacctctgaagctaatggactcgctgcacgaaatcaagaaccaaacgagagacagcgaaagcagccggtttagatctcttttcgacgttacggtgttacaggttttatattttggggttttgcaagtctgagatacttctgaagcaagcataagctagattgatcttatatccagtttgtgtattttcttggttcttataatggtttttactggttttctttagtttttttttttgctgtcttttaattttcggttgcgatttcactatatactatggatggaagagaatgctctttatatcttttactacactgtaaatatttgaagcttatctaatatcgtttttaagggtt

SEQ ID NO: 20163 - DNA, 931 bp, Arabidopsis thaliana columbia
  Clone ID: LIB3177-060-E1_FLI
atagagtcaaagacaatgtgtgcggtggtgactcgcgcctcatcattagaataccgaaacagtttctctctgatcacaacaagatgatcaacaagaagaagaagaagaaggccaagattacttcttcctcttcttcgtccgggattgatcttgaagtcaatggaaacaacgtcgattcgtattcttcagagcaatatccgcttaggaaatgtatgcactgtgaggtcaccaagactccacagtggaggcttggtccaatgggtccaaagacactttgcaatgcgtgcggtgtacgttacaaatcagggaggcttttcccggagtaccgtccagctgctagtccaacatttactccagctcttcactcaaactcacacaagaaagtggctgaaatgagaaacaagagatgcagtgatggtagctacataaccgaagaaatgatctgcaagggctgattccgaacaatgcctacattggcgtagactaaaacatagagaagatgattcgatttccatgcgttgaagtgattagatatgccaggagtaggaaagagtcagtgagaagaaaagtttttagctttagaagagatgaaggaagagagcaatcaattggagggattaaaagttagatgagaattgattgtgtttgtattattttgtatttgtagtgtgaatgggcaaaaaactcttgaaacagaggaaaagtaagttgaggaagagcagaagattttgaagacattagagaatcattaggtgttgagtattacattaaatcttcctcttcttcttttgttctttcaattctttgtatttttattgtgaggattctctttttttttcttttttttttttttttgtagttgatttgtttagctaaaggattctttttttttgtttttgttaaaatccaatgttataaattgttaattatt

SEQ ID NO: 20164 - DNA, 1107 bp, Arabidopsis thaliana columbia
  Clone ID: LIB3177-062-C5_FLI
gacaaatcccacccgtcgtgtcttcttgttcatcctttgtttccctttttctttctcactgtttctgccttacttaaagtctcaatctttgcttcaaattcaacccatctctttttcctcccttccctcacaatcaaaatcttaattctcagcttctggttttgtcgaaaatggaaggcggttccgctagtggatcggcttcggctttgtcaaacgatgaaaatctcgtcgtttcttgtgaggattcttcttctcctatagggaatgagcttgagcttggtcttacgttgagccttggtcgcaaagggtatcgagattgtagggtttacgctgatgattcttcttcttcttcatcatcttcttctctgagcagagctagcgtaattgctgggatcaagaggacagctgattccatggctgcaactagtgggcaagttgtgggatggccaccaataaggacttacagaatgaacagtatggttaaccaagctaaggcttcagccactgaagatccgaacttggagataagtcaagccgtaaacaagaatagaagtgattcaacaaagatgagaaattccatgtttgttaaggtgactatggatggcattcctattggaaggaaaatcgatctgaatgctcataaatgctatgaatcattgtcaaacactctagaggaaatgtttctgaaacctaaattaggttcacgcacactagaaaccgatggtcacatggaaacaccggtcaagatactaccagatgggtcttccggattagtactaacgtatgaagacaaggaaggagattggatgcttgttggcgatgttccgtgggggatgtttattggttcagtgagaaggctccggataatgaaaacatcggaggctactggtaaagctcagatgatattatgaagcaaataataatctacgaagaaccctttatgtttgaagcagtaataagacagatcacagatcaaagagaagacaaaaacattgtaagaagcttcttcttcttctctcccctttacagtttcttttttggctctgccatttttcttttagttagttatatgttctctttgtaaatcacactttaaaaatctataag

SEQ ID NO: 20165 - DNA, 525 bp, Arabidopsis thaliana columbia
  Clone ID: LIB3177-067-F10_FLI
gtgaaatggtcaggaggcaggtcacttgacattatatagcatggtagtttccttaaagagtcacccgataagcctctagcttccagttcaccataaacatcctcccgctcttcataacttacatcggaaatccttaactgccatgctatataatgtcaagtgaaatggtcaggaggcaggtcactcactgcacaatttgtctgcaggacatcaaaacaggggaaatcacacgaagcttaccgaaatgtgatcatacgtttcatctggtatgtgttgataaatggctcatcagacacgggtcatgccccatttgcagacaggcagttaaagattaaaacacgactgttgccgagctgtgtacatagcaaaaacacattatccttatatgttgttgtaacttgtaagtctaaaacccctttcttctgtatttttcctcatttcatttagagcaatctcagcttgagccataggtttcgacttttgaatgtatattgttgtagacatgaataagaatcctacagatgt

SEQ ID NO: 20166 - DNA, 975 bp, Arabidopsis thaliana columbia
  Clone ID: LIB3177-073-A11_FLI
gcaaattcatctatccatcatatttctctgctgctctctgctttcttcttcttcttcttcttcttcttcttcttcttcttcttcttcttagtttgattcaaaaaatctccttcctcttcttactttatctcgtattatccattaatcctaaaccctttagtctctccatcttccgcttcaacaatcagaatttgggtttggcgaaagatgctaactttgaaagtgagactaatcgtttgagtaaaaaacatgcgaattttgtgtgatgcttgtgagagcgccgccgctatcgtcttttgcgccgccgacgaagctgccctctgttgctcctgcgacgaaaaagttcataagtgcaacaagctggctagtcggcatcttcgtgtaggcttagctgatccgagtaatgcaccaagctgtgacatatgcgaaaatgcacccgcattcttttactgtgagatagatggtagttccctttgtctacaatgtgatatggtggtacatgttggtgggaagagaacacataggcggtttctattactgagacagagaattgagtttccaggcgataagcctaatcatgctgaccaactgggactacggtgtcaaaaggcttcctctggtcgtggtcaagaatcaaatgggaatggtgatcatgatcataatatgatcgatcttaactccaatcctcaaagagtacacgagcctggatcacataaccaagaggagggtattgatgtaaataacgcaaacaatcacgagcatgaatagtgatcgcagatacacaagatcaagtaagaacctatgcaagaacagtatctttacagggaaatgtcttattttgttttgaagaaattagcttagaggaaacaaatatgttgttttctgaatttcttctcttttcctttcttttgtgaaatgatcaattagtggataacgattcttcagagttatatctcaaatatatgattttctctc

SEQ ID NO: 20167 - DNA, 2475 bp, Arabidopsis thaliana columbia
  Clone ID: LIB3177-078-F4_FLI
attgggtcttttctctctctgaggcatgtcacctgttgctaaagtctctgagtttcacagagaagggaacgattggttttgcaagacaggactgtcaagtgatatcactgttgttgttgatgatgtgaagttccatcttcataagtttccattggtttcaaaatgtggaaagctagcaaggatgtatgaagattctaaaagcactgataagcaatctctctggacaacagtccttgaagagttccctggtggtgcagacaatttcttgatagttgcgagattctgttacggggctcgagtagatatcacctcgaaaaacttagtttccatacactgtgcagctgagtaccttgaaatgacaaatgaatatggggaagataacttgatttcccaagttgaaacttttttgcacaagcacgtgcttcgcaattggaaagactgtatcttggcgttacaaagctctagtccggtgttgaagagtgcagaaaagcttcagatgataccaaaactcatgaacgctgtgtccacaatggtgtgtactgacccgagtttatttggatggccaatgatgatgtatggtacattgcagagtccaggtggaagcattttatggaatggaataaacacgggggcgcgaatgagaagctcaggttcggattggtggtatgaagatatctcttatcttagtgtagatttgtttaaaagactcatcaagacaatggaaacaaaaggtatacgtgctgaaagtttagccggcgctatgatgtactatgcgagaaagtacttaccgggtttaggacggtggcagagtggaacaagtgacagtagcaaaagcagaagaagagtagtgagttttaatttggcaaaagcttcttcaccatcctctatgcctcctcttgatcagattgctttgcttgagaccattttaagtcttttacctgaaaagagaggaagatctttttgtaagttcttgttaggtctccttcgtgttgctttcattttaggagttgatgggaactgtgtaaagaagttggagaaaagaataggaatgcagttggagctagcaacgctcgataatcttctgattttgaactattctgattcagagacgttgtacaatgtagattgtgtagaacgaatagtccgccattttgtatcatcattgtcatcatcatcctcacagttacctgagttctctcctccatctttggatccagtgacatctccttctccagcaccgttaaaaaaagtggcgaagctagtagatagctacatggcagaagtcgcttctgatgtgaatctgaaaccggataaaatgcggtctcttgcagcagctcttccagaatcttcaagaccgttgtatgatggtttatacagagcgtttgatatttatttcaaggagcatccatggctatcagatagagacaaggaacaactatgcaacatcatggactatcaaagactctctatagacgcttgcgctcatgcttcccataacgataggttaccgcttagagttgttctccaagtactcttctttgaacaaatgcatctcagaaccgctcttgcaggtggtctaaatgttgcaaacaccgaaacagctcatgcagtgacgatccctggtggaagaacaggacaggagatagttcagagagatggttgggtgactgttgtgcgccaaaaccaggttttgaaagttgatatgcagaaaatgaggtcaagggttggagaactagaagaggagtttcagagtattaagcaggagatgaagaagagagttagtaagtcctctagctcaatgagctcgcctcgtctggtcaagctcggctgtaagtttcttcttccacgagcttctgatgctaagaatgatacagtccagaactcagtgtccagcactcctagatcagctaccgctgaccatacactccctcgttcctcccgccattccaaacaccgtaaaagcttctctttcttcggataatcttcattcaaaaacatttatcttcctctcttctcttaaagcccaacacagagaaagttctttcctgaggcattccctcgaagaagtttctctcttttcccgggaaaaccaacaacagaaacatgttgctttgtatgaacaggaaaagggcccaagaatagaagctggccatttgaagaagaagatgatctcctgcttcggtttcgagtatttgccgcggtttttctcccaaggtacataccatcaaagttgatagaatttcggaaaagactggccttatcgtggtggttttttggggtatttatatacacgatcaaagtaaataacaagatctagtatctagagataaagaaaaaagagtataattcttgtctgatttgatatgtttgtgtttgaatatttgtagatgtcttgtaagtactatctgtgtgtaaatcttttttcgttttgtggaggttactgctttgtcaatatatagaatctgttttgcttag

SEQ ID NO: 20168 - DNA, 2895 bp, Arabidopsis thaliana columbia
  Clone ID: LIB3177-078-F8_FLI
ataacacaataattgacctggttgaaaaatatgggccaaagaaatggtctactatatctcagcatttacctgggcgcataggaaagcaatgtagggaaaggtggcataaccatcttaaccctgggattaataaaaatgcatggactcaggaagaggaactgactcttattcgtgcgcatcaaatttatgggaataaatgggcagagcttatgaaatttttgccaggaaggtcagataattcgataaaaaatcattggaacagctcagttaagaagaagttggattcctactatgcatcaggtcttttagatcagtgtcaaagctcgccattaattgcccttcagaacaaatctatcgcttcatcttcctcgtggatgcacagcaatggagatgaaggtagttcaaggccaggggttgatgctgaggaatcagaatgcagccaagcttcaactgttttctcacaatcaaccaacgatttacaagatgaagttcaacgtggaaatgaggaatattacatgcctgaatttcattcaggaacggagcagcaaatctcaaacgctgcatctcatgcagaaccgtactacccttcctttaaagatgtcaaaattgttgtccccgaaatttcttgtgaaacagaatgttcgaagaagtttcagaatcttaattgttctcacgagctaagaactaccacagctacggaggatcaattgccgggtgtatctaatgatgctaaacaggaccgtggtctagagttattgacccataacatggacaacggtggaaaaaaccaagcacttcaacaagattttcaaagttcagtaagattaagtgatcaaccttttttgtcaaactcggacacagatccagaagctcaaactttgatcacggatgaggagtgttgtagggttctttttccagataacatgaaagatagcagtacatcttctggtgagcaaggtcggaatatggttgaccctcaaaacggcaaaggatctctttgttctcaggctgcagaaacccatgctcatgaaactggaaaagttccaactttaccgtggcatccttcaagttctgagggcctggcgggtcataattgtgtccctttgttggattcagacttgaaggactcacttttaccccgtaatgattccaacgctcctatacaaggttgtcgcctttttggagctaccgaattagaatgtaagactgatacaaatgacggtttcatcgatacttacggacatgtaacttcccatggcaatgatgataatggtggtttcccagaacaacaggggctgtcatatattcccaaggattctttgaagctagtacctttgaatagtttttcttctccttctagagtgaacaagatttattttcctattgacgataagccggctgaaaaagacaaaggagctctttgttatgaacctccacgttttccaagtgcagatattcctttcttcagctgtgatcttgtaccatcaaatagtgacttacggcaagagtacagtccctttggtatccgtcagttgatgatttcttcaatgaattgtacaactccgttaaggttatgggattcaccgtgtcacgataggagccctgatgtcatgcttaatgatactgccaaaagttttagtggtgcaccatccatcttaaagaagcggcatcgagacttgctttcacctgtgcttgatagaagaaaagacaaaaagcttaaaagggctgcgacttcctccttggctaatgatttttcgcgcttagatgtaatgcttgatgaaggagatgattgcatgacctctcgtccgtcagagtctcctgaagataaaaatatatgtgcctccccttccatagccagagataacagaaattgtgcatcagctcggttatatcaagaaatgattccgatagatgaggaaccaaaggaaaccttagaatcaggtggagtgacttctatgcaaaatgaaaatggatgtaatgacggtggtgcttcagctaaaaatgaccaagaaacttctggaagtttttttgagttacgactgtgttctcctggtatgactcgagctagaccagataacaaagttaatgcaagtgcgaaagatctatcaaaccagcacaaaatatcattaggtgattttccaacagaagaaatgtcatcagaacctctatgcacagtggactctattcctttatctgcaatcgataaaactaacactgcagagaccagctttgatattgaaaacttcaacatatttgatggaactccgttcagaaaactccttgataccccatcaccttggaaatctcctttactctttggttctttcttgcaaagtccaaagttgcctccagaaatcacatttgaggatattgggtgttttatgagtcccggcgagagaagttatgatgccataggactgatgaagcatttgagtgaacactcagctacggcatatgcagatgccttggaagttctgggtaatgacacacctgaatcgatactcaagaagagacagctgaacaagtccattcaagggaaagaaaatcagcaccagcctcatgatcagcttgggaaccgatcccaggtggagtgtcgcgccttagacttcagcgattgtgggacaccagggaaagctaaggtaccttcggcttctccgggaggctactcaagcccatcatcttaccttttgaagagttgcagatagagaagggtggttttgttcatagagttctgaagggagtctcgccttcaattttttgatcccatatgtgtatgtcttttttatttcctccttgtccaattttcttgtttctaatttttttaaatgtgtagatctctcaactctggacatcataccattgattaaatagcgaaaaagtaacttgttctcaagt

SEQ ID NO: 20169 - DNA, 1021 bp, Arabidopsis thaliana columbia
  Clone ID: LIB3177-079-A9_FLI
ctaaaatggggctacggctactttgatcatgatcaaactgataattatcttcagattgttccagagattcataaagaagtagaaaatgcgaaggaggatttattggttgttgtccctgatgaacattctgaaactgatgatcatcatcatattaaagatttttcagagagatcagatcatcgattttatctgagaaacaaacatgagaaccccaaaaaacgtcgtatccaggtcttaagtagtgatgatgaatcggaggagtttacaagagaagttccttcagttactcgaaaaggttccaagagaagaagaagagacgagaagatgagtaataagatgcgtaagctacagcaactcgtacctaattgtcacaagacggacaaggtttcggttctcgacaagaccatagagtatatgaaaaaccttcaacttcaacttcagatgatgtcaacagtgggggtgaatccttattttcttccggcgacattaggatttggaatgcacaaccacatgctgacggcaatggcttcggctcacggcctaaatccggcgaatcacatgatgccatcgccgctaattccggcgttaaattggccattaccaccgtttactaatatttcattcccacattcatctagtcaatctctatttcttacaacatcatcaccagcttcttctcctcagtctcttcacggtttggttccttatttcccaagtttcttggatttttcttcccatgcgatgagaagactatgataagtaagtagctcgataaaagtttatgtgaaatgatcgttgactaattaagagagaaaagagttccaaattaggacagtttgtgtgaaccatttgtgtcatatacttttttttccgggtggttttgtatattaataataatcaataagttaaaactttttgtataaattcttgcatgtaacaattttttcatttatctgatattttgtaaaatatattgagacatgcttataagagcattgaacgtaggaacaagatttccctg

SEQ ID NO: 20170 - DNA, 604 bp, Arabidopsis thaliana columbia
  Clone ID: LIB3177-086-C5_FLI
ccaattcaaaaaaagaaataacctaaacgtgttcacacagagatctcgagatgaaagataaccaaacggaagttgaatcgaggagcactgatgatagattgaaagttagagggaacaaagttggaaagaaaacaaaggatccaaacaggcctaagaaaccaccaagtcctttcttcgtcttcctggacgatttccgaaaggagtttaatctggctaaccctgacaacaaatccgtcggtaatgttggtagagcagctggaaagaaatggaaaaccatgactgaagaagaaagagcaccttttgtagcaaaatcacagagcaaaaagactgagtatgctgtgactatgcaacagtataacatggaactggctaatggaaacaagacaactggagatgatgagaaacaagagaaagctgctgatgattaggaagttggatcagtgatttgtgtatcaactatatctgttgttttatgtcaacttttagctagcttttagggagaacaattgttacattcctgttttatcctttctgtcaactgtgggattattcagatgtaactttggatttagctttgagcttcaattccaccttttatgagatc

SEQ ID NO: 20171 - DNA, 1127 bp, Arabidopsis thaliana columbia
  Clone ID: LIB3177-087-A8_FLI
aacaaaagaaaacagatgtgagctcttcttcttcgtcttcttctctctattttattctcatcctctcctcacagttactataagctcgtctatggccagagacggtggtgtttcttgtttacgaaggtcggagatgatgagcgtcggtggtatcggaggaattgaatctgcgccgttggatttagatgaagttcatgtcttagccgttgatgacagtctcgttgatcgtattgtcatcgagagattgcttcgtattacttcctgcaaagttacggcggtagatagtggatggcgtgctctggaatttctagggttagataatgagaaagcttctgctgaattcgatagattgaaagttgatttgatcatcactgattactgtatgcctggaatgactggttatgagcttctcaagaagattaaggtctgcattttcccgccattttcctgtttcagattacggttgttttagtaacaatgttgaattttccggtcatctgaaacaggaatcgtccaatttcagagaagttccggttgtaatcatgtcgtcggagaatgtattgaccagaatcgacagatgccttgaggaaggtgctcaagatttcttattgaaaccggtgaaactcgccgacgtgaaacgtctgagaagtcatttaactaaagacgttaaactttccaacggaaacaaacggaagcttccggaagattctagttccgttaactcttcgcttcctccaccgtcacctccgttgactatctcgcctgaatcgtcgccgccgttgactgtttcgactgaatcgtcggattcgtctccgccgttatctccggtggagatcttttccacctcgccactttcatctccgatagacgatgaagatgatgacgtgttgacgtcgtcgtcggaggaatcgccgattcgacggcagaagatgaggagtcccggattagattagtggaactattctgggatgccgtgtaatattatctatctccgttaacttcgtttttacctctgacggtgtttttaattgcacgttgacttgacgccgtcaaattttatagatgtccctttaatctctcgcgcctccacgtgggccttttttccttttccttaaagcttttcgaat

SEQ ID NO: 20172 - DNA, 972 bp, Arabidopsis thaliana columbia
  Clone ID: LIB3177-087-E9_FLI
gtccgagtcaacaatggacgtctacggcatgtcttcaccggacttgcttcgtatcgacgaccttctcgatttctccaacgacgaaatcttctcttcctcttccaccgtcacttcctccgccgcttcctccgccgcttcttccgaaaaccctttcagctttccttcttccacctacacttctcctactctcctcaccgacttcactcacgatctctgcgttcccagtgacgacgcagctcatctcgaatggttatcgcgattcgttgacgattcattctccgatttcccagcaaatcctttaaccatgaccgttagacccgagatttcattcaccggaaaacctagaagtcgccgatcaagagcaccagcaccttccgtagctggaacttgggctccgatgtctgaatcagagctttgtcactccgtcgctaaacctaaaccgaagaaagtctacaacgctgaatcggttacggcggatggagcgaggcggtgcacgcactgtgcctcggagaaaacgccacagtggagaactggaccgcttggacctaaaacactttgtaacgcttgtggagttcgttacaaatcagggaggcttgtaccggaatacagaccggcgtcgagtccgacgtttgtattgactcagcattcgaactctcatcggaaagttatggagctccggcgacagaaggaacaacaagaatcttgcgttcgaattccgccgtttcagccgcagtaaatttgggggttttcttttcaagggtttttgtgatttggtgacgtgtcgtaatcttaacggtgatgatcacgtgaccgacgggaggggttaaggacttaattatcagtattagtttaaagtttgcaaatctctgctaattaatttgttggtaatttctattgatttttttcttgcttttgtttattggtctcacggctctccttaaagttatatcattaaatgatttcattggcggc

SEQ ID NO: 20173 - DNA, 661 bp, Arabidopsis thaliana columbia
  Clone ID: LIB3177-088-C2_FLI
ttggatccagctggcacaggctcattatacaatgaaggagaagcagatattgtggttaatcacgtcatttctttgatatacgcaggtgttagtccaatggctattgctgttcaatccccatatgttgctcaggttcaacttctcagagaaaggctggatgattttccagtggctgatggagttgaggtcgcaaccattgacagctttcaagggcgggaggctgatgcagtgatcatctcaatggtacggtcaaacaacctaggtgcagtgggattcctaggggatagcagacggatgaatgtagccattacaagagcccggaagcacgtggcagtggtatgtgacagctccacaatctgccacaacacgttcctagcaagactgttgcgccacatacgctatttcgggagagttaagcatgcagaccctggtagcttgggagggtcaggactaggcttggacccaatgttgccctaccttggttaaaaccgttgtaagtactacaaaaaccagaaccttctgcttactctctccctctctctctatctctcccgctgaaagaaacagtttccatagcaaattgtcgttgtacagaacaattgttaccacagaaaatagtctctgtatatgatgacaatatataattcatgtatatttttac

SEQ ID NO: 20174 - DNA, 635 bp, Arabidopsis thaliana columbia
  Clone ID: LIB3177-089-A2_FLI
acgaaaaggagatcgtcgatatttatagctcagatgaggaatacgacgaagacgatgatgatgatgatgataccgatggcgagagtagcgacgaagacgatgaagaagaagatcggaatctgagtggagatgatagcgaatcaagcgaagatgattacactgattcgaattcggattctgatgacgacgatgaagaagatgatgatgatgaggaggaggaagaagaagaagactcccttgttgataaagtcactcgtctactcaaagggaaacaagattgactcgtacacatttcttagctgagaagctttttttaaggataaaaggtaggagcatgaaagaagcagtttatcaaagatcatctattgctaaggtaaatcatatactatttctatacatgctcttaataccagagatgtcgaaaacatttgttaatgcaatggagattattgttctcttcacacttatataagtttcttcagagggtttaacgattttagaatggctagccccaaagactatttgtaaacttgtgttcgaatcactcataagttcgcttgtcatatatgatcgtcttatgattgtactaagcctactcttagcgaactaccggtattcatgatttttggggtggc

SEQ ID NO: 20175 - DNA, 756 bp, Arabidopsis thaliana columbia
  Clone ID: LIB3177-091-E5_FLI
aataggtttgacagggattcaaccccagtccctgattttagtaaccgagaggcatcagaaagagtcaatgatcgagccaattcgatccttaaccggttgatgacatctaggggagttagatcagagcagaaccaggctagtgctgcagcagcagccattgtcgcagcatcagaggatattgatctaaatccaaacattgctcctgatcttgaaggagaaagcaacacgagattccatcctctcttgatcaggagacagttacagtcgcaccgagttgcaaggatctcgactttcacttctgcgttgagttcagctgagaggcttgtggatgcgtattttaggactcatccgttggggaggaaccaccaagagcaaaaccatcatgctcctgttgtggttgatgatagagactcattctcaagcattgcagctgttataaactctgagagtcaagtggatactgcagttgagatcgattctatggctctttcgacatcgtcctcgaggagaaggaatgagaatggttcgagggtttctgatgtagacagtgcagattctcgtccgcctaggagaaggagatttacttgagaaacataaataagaaaagctttcaacctggaagctgacgatgatgatgattaagaagaagataagaagaagattgtgtaactttatttttcttgtgttgctttgttgtaatttgtttttgtatttttctcgatagggatggttttttttaatcgaaaattttctttc

SEQ ID NO: 20176 - DNA, 877 bp, Arabidopsis thaliana columbia
  Clone ID: LIB3177-092-F10_FLI
aaaaacattgtgggtctccggtgattaggatcaaattagggcaccagccttatcggaggaagaagccatgggtagaaaaaaagtcgagatcaagcgaatcgagaacaaagtagtcgacaagtcactttctccaaacgacgcaatggtctcatcgagaaagctcgacaactttcaattctctgtgaatcttccatcgctgttctcgtcgtctccggctccggaaaactctacaagtctgcctccggtgacaacatgtcaaagatcattgatcgttacgaaatacatcatgctgatgaacttgaagccttagatcttgcagaaaaaactcggaattatctgccactcaaagagttactagaaatagtccaaagcaagcttgaagaatcaaatgtcgataatgcaagtgtggatactttaatttctctggaggaacagctcgagactgctctgtccgtaactagagctaggaagacagaactaatgatgggggaagtgaagtcccttcaaaaaacggagaacttgctgagagaagagaaccagactttggctagccaggtggggaagaagacgtttctggttatagaaggtgacagaggaatgtcatgggaaaatggctccggcaacaaagtacgggagactcttccgctgctcaagtaatcaccatcatcaacggctgagctttcaccttaaacttacagcctgattcagaagtttttacaaatttgtaaattataaaaagcttcataataatctcaacctttttatcttcctcgcgccaatgtggaaattaaggttaaaaataaaataaaacagaagctcatgcgaaagaattgtaaaactaagataaagctatagtagatctttattgtaccttcgt

SEQ ID NO: 20177 - DNA, 1588 bp, Arabidopsis thaliana columbia
  Clone ID: LIB3177-094-C10_FLI
cacgatctaaaaatcccttctctctttctttctttctttttttctctccctctcttctcaggcgagtatgcaaagcaagaacatgatcgtggcttcatctcatcagcagcaacaacaacagcaaccgcagcagccacaaccgcaacttaaatgccctcgttgcgattcttccaacacaaagttctgctactacaacaactacagcctctctcaaccacggcacttttgcaaggcttgcaagaggtactggacgagaggtgggactctcaggaacgttcccgtagggggtagctaccggaagaacaaacgtgtaaagcggccatcaaccgcaaccacaaccactgcctccaccgtctcgacgactaattcttcatcccctaataaccctcatcagatctctcatttctcttccatgaatcatcatcctttgttctatggtttatcagatcatatgagcagttgtaataataatcttccaatgatcccaagccgtttcagtgattcttcaaagacttgttcatcaagtggtttagagagtgagtttctctcatctggttttagcagtcttagtgctcttggattagggcttccgcatcagatgagtcatgaccacaccattaatggtagcttcatcaacaactccacaacaaacaaaccctttcttctatcgggtctattcggatcctcgatgtcttcttcttctactcttctccagcacccacataaacccatgaacaatggtggtgacatgttgggacaatcccatctccaaaccctagcatcacttcaagatttgcatgttggaggtaacaatgaagatatgaagtacaaagaaggaaagcttgatcagatctctgggaacatcaatgggttcatgtcatcatcatcatctttggatccttcaaactacaacaacatgtggaataatgcaagtgttgtcaatggagcatggcttgatccaacaaataataacgttggatcctccctcacctctttgatataaaccaaaactttggttatatgatctataactaggtagggtttatctttctttttttcctttttgttatgagatgagagaagaagcttggatcagagagatctaatcaggggaaatgttgatcttggcactataaagctccctcggatcctcttcatctcaccatctcaatcatcttccttcgcgtagttcaacaaaaaacaaaaagggttcaagattggttcaaggtttactatggtctcttgttaagtttactcgaggtaaatgatatgtgtatgtacataatatggtcctgactttgatctttttccttttctctttcccatctgtgtaattctaaggtccaccacatgggttggtgtttcttttcattgggattaggagggtatatttggattaatttgggtttctcatggggtcagagaactcaatagtttaatttcaagttttatatctgttttttagtttcacatttctttttttggtgtggctttcattgggtatacaaacagagggaggggtgtggttttgtgttgttataacttttgttattcatgtatgagttatgttcttacggtgcttttggat

SEQ ID NO: 20178 - DNA, 730 bp, Arabidopsis thaliana columbia
  Clone ID: LIB3177-096-A8_FLI
cctactcaatctcagatctcgttaaacctagaaacctcgagaaaaaccgtatcaatggcgccgaaagcagagaagaagcccgctgagaagaaaccagcttccgagaagccggtggaggagaaatcaaaagccgagaaagctccggcggagaagaaaccaaaggccggaaagaagctcccgaaggaagctggtgccggaggcgacaagaagaaaaagatgaagaagaagagtgtcgagacttacaagatctacatcttcaaggtgcttaagcaagttcatcccgatatcggaatctccagcaaagcgatggggatcatgaacagtttcattaacgatatcttcgagaagcttgctcaagaggcgtcgaagcttgcgaggtacaataagaaacctacgatcacttctcgggagattcagactgctgtgagattggtgcttcctggagagttggcgaagcatgccgtttctgaggggactaaagccgtcacgaaattcaccagctcttgaataattgagttagggttcttatcatatggatgttgctctgctttagggttaatggaatttggaagatctgagttagggttttagaatgtcctttaagtatctctgtttcgtttggaatttctacgttttgtaagtactgctgctattgataatgtttggagtctatatttgctctttgtgtcccaatcctgtcgtattgagagttgctcgttgttttactcgt

SEQ ID NO: 20179 - DNA, 778 bp, Arabidopsis thaliana columbia
  Clone ID: LIB3177-096-H2_FLI
gaatatcctttgtctatagttcttgttggtgttggagatggtccctgggacaccatgagacagtttgatgacaacatccccgctcgtgcctttgacaatttccagtttgtgaatttcacggatataatgtcaaagaacattgatccagcaagaaaagaggcagaattcgcgctttctgccttgatggagatcccgtctcagtataaagccaccctcgaactaggcttacttggacaaagaaccggacattgtccagacaggattgcgcttccaccaccaacttatgctactcaatctatgcgcaacagcccaagaacttcccgatcaaccagttttcaaaacaaaccatatgataatggtgtttcctctacaccaccttcaactactcataacgagagccagcaacagttttgccccgtatgtctagtgagtgcaaagaacatggctttcaattgtggtcatcagacttgcgctggatgtggggaagacctccatgtgtgtcccatttgccggagctcaatctcggttcgtatcaagctttattaagataagtctctcaagaactgaaggaacccgaggtggtctgagatctttcacagccaacaccatcccaacttagatctcatttaccagtgtcctaacatttgtttttactttgaggggaataaccggttcctctcaaaggttttgtagataatctgttgtcaattttgcattctcattgcacatgaaaaaaccccagcagactctctcgtgaataaaggatcctttctctgcg

SEQ ID NO: 20180 - DNA, 755 bp, Arabidopsis thaliana columbia
  Clone ID: LIB3177-099-H12_FLI
cttcaatcatcccctattactgcttttgttacgaaagacaaaaaaacaaaacaaaacaaagtcagctcaggcgaagaacagatggctcgtaccaagcaaaccgctcgtaagtccaccggaggtaaagctccaaggaagcaacttgctactaaggctgctcgtaaatctgcaccaactactggtggagtcaagaaaccacatcgttaccgtcctgggaactgttgctctccgtgaaatccgtaagtaccagaagagtactgagttgcttatcaggaaactgccatttcagaggctagtccgtgagattgctcaagatttcaagactgatttgcgtttccagagccatgctgtcttagctctccaggaagctgcagaagcatatcttgttggtctctttgaagacactaacctttgtgccattcatgccaagcgtgtgaccataatgcccaaagacattcagctcgctcgtcgtatcagaggtgaacgcgcttaagccaaccaagaatccgagatttggttcaagtagtttttgttttttatgaaagcaagatcttaattgctgtgttttttaaatctctgggtatgtagtagtaagagtagtaagaagtctgcaatctaagaatgttgtgttctttaagcttattattatgtgtgttgcgaactctttttaactcttttgttaaattcttatgttttcttaactcgtttgttcgtcaccattgctttctcttcaaataatggctgattttttctat

SEQ ID NO: 20181 - DNA, 1464 bp, Zea mays
  Clone ID: LIB3180-001-C3_FLI
aaaaaaactaggtcttccactcttcctccactagtctactcggcagatttcactgactctcaccggcggtctttgtgcctccaccggccgccgccatgccgtacctcgtccgcgagcggctctacttcggcggcatcaaagacgccattgccgccctcacggagtcttcctccacgccggacttcacccacgtcctctccgtggtcagttccgcctccatctccttcatcaccgattgccgcccgggcctcgagatccccaccgaggaggtcctccgcgtagtcgccggcgaggagggcgcggcaccgactgccgcggttcccccggggacgctgatgcgggtggtggagcgcgccgggcacgggctgcgggtcacgcgcatggccgtgccgctgcgggacaccgaggaggaggacctgctcgaccgcctcgagccctgccttgagttcatcgatgagggcaggaaggtcgggaatgtcctcgtccattgctttgctggggtgtcgaggagcgcttccatcattgttgcttatcttatgagagcagaacagaaatctcttgaagaagcattagaagctctgaaggagatttctgagtcggcgtgcccaaacgatggttttcttgaccagctgaaattatttgaagaaatgggcttcaaagttgatacttcaagtcctttgtacaagagattccgcttgaaattattaggccaatcctacatatctggggagaaaataagcagctatatgtttgaagatgaccctggcctttctctagagtctggctcttgtcaagattcttcaaaggttgagcaacgtaaaacagcttaccgctgcaggaaatgcaggagagttattgctgtagagggcaatgttataagtcatgttcctggtgagggtgaatcttgctttgattggaaccgaagaaagagtggtcatccatacaacaacaaagaacatggttgctcatctttgtttgtcgaacctctgaaatggatgactccagtagaagacggcgctttggagggaaagctatcatgcatccactgtggagctcggttgggatacttcaactggtcaggaatacagtgcaactgtggtagctgggttactcctgccttccaaattgttaagagcaaagttgatatcagcaccatctagacctgtgagcaaacgactggcaagtttgagggacgaggagcgcgacagcagtgacgcctgacggtttaatgttttgtgtaccatatgaacgctacgtatacaggtgaagcaatagcgtattttatgtttttccattgccgatcagaagctgtgtgtggcaaataccgtataaaatttcgcatttgctgatgtaacaagtagccgtgatgtcggccatctgcccatctgtttagctggaacgggagcgaatgcagattgtgcagagaaatgaacacggttgtgtttctattctttctgtggattc

SEQ ID NO: 20182 - DNA, 1881 bp, Zea mays
  Clone ID: LIB3180-007-H6_FLI
gctcgccaagagttcttcttgttaggcaaggcaaaagcagaagcaaaaaaagaaaggtcttgttgccgatggggagctcagggttctcgtggacgcttccggaccaccccaagctccccaaggggaaaccggtggctgtcgtcgtgctggacggatggggcgaggccaaccccgaccagtacaactgcatccatgtcgctcagactcctgtcatggactcgctaaagaatggcgctcctgagaaatggagactagtgaaggctcatggaacagctgtgggcctcccatctgatgatgacatgggcaacagtgaagttggtcacaatgcacttggtgctggtcgaattttcgcccaaggtgctaagcttgtcgatcaagctcttgcctccggaaagatttatgatggagatgggttcaactacatcaaagaatcttttgaaagtggtactcttcaccttattgggttgttgagtgatggtggtgtccactcccgtcttgatcaactgcagttacttctgaaaggtgtcagtgagagaggggcgaaaaaaatccgtgtgcacatccttactgatggacgtgatgttttggatggaagcagtattggtttcgtggagaccctagagaatgatcttttggagcttagagcgaagggtgttgatgcacaaattgcatctggtggtggaaggatgtatgttacgatggaccgttatgagaatgactgggatgtggttaaacgtggttgggatgcccaagtgcttggagaagcaccctacaaattcaaaagtgcacttgaggctgtgaaaacactgagagcacagcccaaagccaatgatcagtacttgcccccatttgtgatagttgatgacagtggcaatgctgttgggcctgtattagatggtgatgcagttgtcactatcaacttccgagctgatcgcatggttatgcttgcgaaagcactagagtatgcagattttgacaactttgaccgtgttcgtgtccccaaaatccgatatgctgggatgcttcagtatgatggtgagttgaagcttccaagccgttaccttgtttccccaccagagatagatagaacatctggggagtacttggtgaagaatggcatccgcacctttgcttgcagtgagacagttaaatttggccatgtcacatttttctggaacggtaaccgttcgggatactttgatgcaactaaggaggagtatgtagaagtacctagtgacagtggtattacattcaatgttgcacccaatatgaaggcgcttgaaattgctgagaaagccagggatgctctcctaagtggaaagtttgaccaggtacgtgtcaacctgccaaatggtgacatggttggtcacactggtgatattgaggccaccgtagttgcttgcaaggcagctgatgaagctgttaagattattttggatgctgtcgagcaagttggtggtatttaccttgttaccgccgatcatggcaatgctgaggatatggtgaaaaggaacaagtctggcaagccgttgctcgacaagaatgaccgtatccagattcttacctcgcatacccttcagccggtcccggttgccattggaggccctggccttcaccctggagtgaaattccggaacgacatccaaacccctgggctcgccaacgtagccgcaaccgtgatgaacctccacggatttgaggctcctgctgactacgagcaaaccctcattgaagtggctgacaactaaacactggccacctgtgtccaattttggttatatgtagttctgagaatggacattcaataatttatgtttgcaagcacgttgctcaaactcaccaaaacatcgagggatgccttttgactttggcatttacagc

SEQ ID NO: 20183 - DNA, 681 bp, Zea mays
  Clone ID: LIB3180-008-A11_FLI
caactctttcccaaatccaccgccggctcggctcgcccatcttcgcgccaagcaccgaatctccgatggcccgcacgaagcagacggcgcgcaagtcgacgggcggcaaggcgccccgcaagcagctggccaccaaggcggcgcgcaagtcggcgccggcaaccggtggcgtgaagaagcctcaccgcttccgccccggcaccgtcgcgctccgggagattcgcaagtaccagaagagcacggagctgctcatccgcaagctgcccttccagcgcctcgtccgtgagatcgcgcaggatttcaagaccgacctccgcttccagtcctccgctgtcgccgcgctgcaggaggccgccgaggcctacctcgtggggctcttcgaggacaccaacctctgcgccatccacgccaagcgcgtcaccatcatgcccaaggacatccagctcgcgcgccgcatcaggggcgagagggcttgatctcccgttgttgtcgtccacgttgttgggcctttcctctgtgtctctgcttgtagaatccttgcttctgttcggttccttctgttcgcatgatggtgttcgtagtgttaggagttgcattttctaatctgcttgttcttgcaccggtgcctctgaagtggcgtttccccctatcttaatggaaatggaatgtgctttaaaaaag

SEQ ID NO: 20184 - DNA, 1231 bp, Zea mays
  Clone ID: LIB3180-008-D3_FLI
cgcaaatcacaacctcgcatcctcttctgtcccgtccccagctcttcgttcgttcccctctcgccgcccgtctcccccgcggccgaggagccgccaatagcaaggagagggtttcctcctccctccacggctccaccgagctccccgatccctccgccccaaatcccacacacccggttggccaccgcctcgctatggatttggatctgtggatctccaaggtcaaggagggtcagcacctcgcggagcacgagcttcagtccctctgcgaatatgtgaaggagatcctcatcgaagagtcgaacgtgcaaccagtgaacagccccgtgacggtttgcggtgatatccatgggcagttccatgacctaatgaagctcttcgcgacggggggccacgtcccagagacgaactatattttcatgggtgattttgtggaccgtggcttcaatagtctagaggttttcaccatcctattgctactaaaagcgaggtatcctgcacacattacccttctgcgtggaaatcatgaaagtaggcagttgacacaggtgtatggtttctatgatgagtgtcagagaaagtatggcaacgccaatgcatggaggtactgcactgatgtttttgattaccttacgctatcagcaatcattaatggccaagtcctctgtgttcatggtggtctttctcctgatgtacgcactattgaccagatacgaacgattgatcgcaattgtgaaattccccatgaaggccctttctgcgatcttatgtggagtgaccctgaggagatagagacatgggctgttagtccccgtggagcaggttggctgtttggatcgcgagtaacagcagagttcaactttgttaatggtatcgagctagtttgccgggctcaccagctggtccaggaaggcttaaagtacatgttccaggagaagggccttgtaactgtgtggtctgcacccaattattgctacagatgtggcaatgtagcttctatattaagcttcgatgagaagatggaaagagatgtcaagttcttcacagagacagaggaaaacaaccagatgcgaggcccaaggactgcagtcccatatttcctctgacttcaattgtacattttagaagtcaacatttaaatctgtaagggctaaagatcagtcagatgtgtttatcattgtaggttcagatcatagtgcaatcttatgcatttgatttctctttttctttt

SEQ ID NO: 20185 - DNA, 1024 bp, Zea mays
  Clone ID: LIB3180-010-B8_FLI
gtggcggcggcgggccggcggcgtgtataggcgtgttcccgagcagaggcccccccaaacgcgcagcgcacacaaacacacaccagcccagctccgagagatcatccggcggccggcgagatgagccgcggcacgggcgcgggttatgaccgccacatcaccattttctcccctgagggacgcctgtaccaagtcgagtacgcgttcaaggcggtgaagtcggcgggtgtcacgtcgatcggcgtccgcggcgcggactccgtctgcgtcgtcacccagaagaaagtcccggacaagttgctggatcagacgagcgtgacacacttgttcccgatcaccaagtacgtcggattgcttgccactggcctcacagctgatgcaaggtcattggtttcccaagcaaggaacgaagcagctgagtttcgtttcaaatggggctatgagatgccagttgatgtgttagcaaaatggattgctgacaaagctcaagtttacacgcaacatgcatacatgagaccccttggagtagttgctatggtcttgggctacgacgaagagaaaaatgcacaactattcaaatgcgaccctgcgggtcacttctttggacataaggcaactagtgccgggctcaaggagcaggaagcaataaattttttggagaagaaaatgaaggatgacccgaaattcacctatgatgaaactgttcagattgcaatatctgcattgcaatcagttctccaggaagatttcaaggccactgagatcgaagttggtgttgtgagaaaagaagaacgtcttttcagagttctcacaacagaggagattgaccagcacctgacggcaattagtgaacgggactgagctgccatatgttggacatttgatccctccacactgcgccgtgccattgtgcttcagcactgccatttagtttgacatcaaatgaactgagtgtaccatttcatgtctaacactgaaaacaagctcgttgattgaatttggcacagtttggttttgcattgct

SEQ ID NO: 20186 - DNA, 990 bp, Zea mays
  Clone ID: LIB3180-013-B12_FLI
gtccgaatccccgacgcaacccttgcgtggtggcgtcaccacccaaatcccaccatccggatctgccgatccgccgccgccatgtcccgctcggagcgccgcctcgcctcggccgtggtgcgccttcccggccgctccagggtctccgcctcgccatccccgcgccgccgctcccagtccccatccccgcgccgcgaccgccgccgccgcgaccgctccccgatcccttaccgcgatcgctccccaagtccatatcgagcccgtcgccgtgaccgctccccgagcccttaccgcgatcgccgcgaccgctccccgagcccttatcgcgatcgccgccgccagtggtcaccctaccacaacgaccgcggccgggaccgtgaccgggtcctgcccgtccgtagcggcgggggcgcctggtccgatgacgacgacgacgacaaggaactccagggcctcagctacttcgagtaccgccgcctcaagcgccagaagcttcgcaagagcaagaaaaggtgcatctggaacatcacgcccagcccgccccgtgttgaaggcgacgaggagaactacggctacagcgacgtggaagaggagaaggtatctccgaaggcctcgccggaggctagcgaggaggagagcaaggatgcgtcggagtcagaatccggtgagtctgatagcctctccgagtccagcggatcggaagcttctatgaggaagaagaaagggaggaataaaagtcgccgtagtagcaagcgcagccggcagcgccaccgccaccgctcatacagttcggagattgaggacgaaagcaagagcgacgatgattctgtgggctcttatgattcggaggagtctagggataggagcaaaaagaggtcgcgcaggcataatagatctaagaagaggagcaggagctccaggaggaagaagaggaggagccaggatacagcatcggagcaaagctctgaggaggaagaggaggaggatagt

SEQ ID NO: 20187 - DNA, 2526 bp, Zea mays
  Clone ID: LIB3180-013-D11_FLI
tatctctttactatgagatgactgacgagtcactgaagaactacaagggtgagagagatggtaaccaatacttgatcaaccttattgactcgcctggacacgttgatttttcttcggaagtcacagctgctcttcgcatcaccgatggtgctctggttgtggttgactgtattgaaggtgtctgtgtgcaaactgaaactgtgcttcgccaagcccttggtgagaggattaggccagttctcacggtgaacaagatggacaggtgcttccttgagcttcaggttgagggtgaggaagcttatcagactttctcccgtgtcattgagaatgccaatgtcatcatggcaacatatgaagataagctccttggtgatgtccaagtatacccagagaaggggacagttgctttttctgctggtctgcacggatgggccttcaccctcactaactttgcaaagatgtatgcatctaagtttggagttgatgaaactaagatgatggagaggctatggggtgagaacttctttgaccctgccacaaagaagtggaccaccaagaacacaggttctcctacctgcaagagaggatttgttcagttctgctatgagccaatcaagcaaatcatcaagacctgcatgaatgaccagaaggagaaattatggcccatgctgcaaaagctcaatgttaccatgaaggctgatgagaaggagttgattggcaaagctttgatgaagcgtgttatgcaaacgtggcttccagctagcactgctctgcttgagatgatgatattccaccttccttccccagcaaaggctcaaaagtatcgtgtggagaacttgtacgagggaccccttgatgatgtgtatgcaactgctatcagaaactgtgatccagagggtcctcttatgctgtatgtttcaaagatgattcctgcatctgacaagggcaggttctttgccttcggtcgtgtcttctcagggaaggttgctactggtatgaaggttcggatcatgggtcccaactatgtccccgggcagaagaaggatctgtatgtcaagagtgtccagcgtactgttatctggatgggaaagaagcaagagtcggttgaggatgttccgtgtggtaacactgttgctatggttggtctggatcagttcatcacgaagaatgctacactcactaatgagaaggagactgacgcttgcccaatcagagcaatgaagttctccgtctctcctgttgtgcgtgttgctgttcagtgcaaggttgcctctgaccttcccaagctagtcgaaggtttgaagcgtctagcaaagtccgatcctatggttctctgtacaatggaagaatctggtgagcatatcattgctggagctggtgagcttcatcttgagatttgcctgaaggatctgcaggaggacttcatgggtggtgctgaaattattgtttccccacccgtcgtctccttccgtgaaacggttcttgagaagtcctgccgtactgtcatgagcaagtctcccaacaagcacaaccgtctgtacatggaagcgcgccccttggaggagggtctcgctgaggccatcgatgacggccgtattggcccacgtgatgatccgaaggtgcgctcccagatcctctctcaggagtttgggtgggacaaggacctggccaagaagatttggtgttttggacctgagaccactggcccgaacatggttgtagatatgtgcaagggagtgcagtatctcaatgaaatcaaggattctgttgtggctggtttccagtgggcatcaaaggagggtgcactggctgaggagaacatgcgtggaatttgctttgaggtctgtgatgtcgttcttcatgctgatgctatccacaggggtggtggtcaggtcattcccactgccaggagggtcatctatgcctctcagctcacggccaagccaaggctgctggagccagtctacctggtggagatccaggccccagaaaatgcacttggtggtatctacggtgttctgaaccagaagagaggtcatgtctttgaggagatgcagaggccgggtaccccgctctacaacatcaaggctttcctccctgtcatcgagtcctttggtttctccagccaactgagggccgcaacctctggtcaggcgttcccccagtgtgtctttgaccattgggacatgatgggctcagatcctttggaggccggctcccaggctgctcagctggtgctggatatccgcaagaggaagggtctcaaggaacagatgacccctctttctgagtttgaggacaagctctaaaatttttggctgttggtgatactgtttcatctgccggtttaatcatcaattcgtctactgtaatagcagcgacttcaatattttattttgttttagttgtcaaatgcacctgtttttgaacaatatttgtgatgtagtgccctgccgcgcttagagtctgagactattttgttatctgctgtgatgtttcagatgaaacagagttgatgtctggttt

SEQ ID NO: 20188 - DNA, 1648 bp, Zea mays
  Clone ID: LIB3180-031-C5_FLI
cgggagtagtcgacgcgccgtcactgaatcctcagatcacggctagccgtaatcacgccactctgctgactcccggcgagcagtgtaacattttccttcagccatgggcaaggagaagactcacatcaacattgtggtcattggacatgtcgactctggcaagtcgaccaccactggccacctgatctacaagctcggcggtattgacaagcgtgtgattgagaggttcgagaaagaggccgcggagatgaacaagcggtcattcaagtatgcctgggtgcttgacaagctcaaggccgagcgtgagagaggtatcacaattgatattgctttgtggaagttcgagaccaccaagtactactgcactgtcattgatgcccctggacaccgtgacttcatcaagaatatgattactggcacttcccaagctgactgcgctgttcttatcattgactccactactggtggttttgaggctggtatctccaaggatggacagacccgcgagcatgctctccttgctttcacgcttggagtgaagcagatgatttgctgttgcaacaagatggatgccaccacacccaagtactccaaggcccgttatgatgagattgtgaaggaagtctcttcctacctgaagaaggttggatacaaccctgacaagatccactttgttcccatctctggtttcgaaggtgacaacatgattgagaggtccaccaaccttgactggtacaagggcccaaccctacttgaggctttggacttgatcaatgagccgaagaggccttcagacaagcccctgcgtctccccctacaggatgtgtacaagattggtggtattggaactgttcctgttgggcgtgttgagactggtatcatcaagcctggtatggttgttacctttggtcctagtggccttactactgaggtgaagtctgttgaaatgcaccatgaggctctccaggaggcccttcctggtgacaatgttggcttcaatgttaagaatgttgctgtgaaggatctgaagcgtgggtatgtggcctccaactccaaggatgaccctgccaaggaggctgctagcttcacgtcccaggtcatcatcatgaaccaccctgggcagattggcaacggctatgccccagtgctggactgccacacctcgcacattgctgtcaagtttgcggagctcattaccaagattgataggcggtctggcaaagagcttgagaaggagcccaaattcctcaagaatggtgatgctggtatggtgaagatggttcccactaagcccatggtagtggagaccttttctgaatatcctcctcttggtcgctttgctgtccgtgacatgaggcaaacggtggctgtcggagtcatcaagagtgtggagaagaaggatccaactggagccaaggtgaccaaggctgccgcaaagaagaaatgatgtgtctggctggttctgtgtttgcttgagggaaacctagtggaaacataaaatatctcgtcttgttcacgtcattgtctgaactatgctcgcaacgtttgcctggtcgatttagaatggttattttcgttaaaaccagagtgttatttaagacttatccgaacatctggtgagccatatatggttactagttttgttact

SEQ ID NO: 20189 - DNA, 1352 bp, Zea mays
  Clone ID: LIB3180-031-D1_FLI
gctttccccctgctcaccacctgctggctgctgctacagtgctactgccattacgccaccacacgagcttgcgcggcgactcggcggcggtggacgaagcgggacgccatggactcccgccagggccagcagcccaactacaagatttatattaggatgatgaaaacagttctgcttgacgtgaagtccactgataccatagatcagattaagtctaagattggtgctttagaggggattgacaatagccagcaagagctcttttttgctggaagtcatttggagaaggacaacagacttgctgattacaacatcatgacaaactcttgtgtcgacctttatgtaactgatgggatgcagatctctgtcagtatcccctctgtttggaagaccatcaagctcaatgtgatgaaatcccagagtgttgctgatgtcaaggcgatgatcgaacagatggggggaattcctctggatgaacaaatcctgatgcatggatgccaaaagcttgaggacaacaagttgttgagtcagtgtggcttgagcaatggccacaccctgcatgttttggtccgccccaccgacaggctgcatatctccgtggatgttgatggtgaagaaactctgaatctggatgtcaaaagctggtatactgttgctgatgtcaagttgatgatcgacaccttggagggtttacctgcaagaacacagatactcatgcacactcaacctggtggcgctaacacagtactcaaagacattgaaacactgcagaatcaaggcatcaagaacaacgacattgtcgctctgtatcataaagtcaacttcttcgtcaagacatatgaggggaggaatctagtgttatcaatgaggacttgtgacactgcagaggaaatcatgaaggtgattgaagaaaagcttaaggtcaacacaggtgtttactacctgcactacagggggcgtgttctggctcttggggatactcttcggaagcacaagatcgagaacaattgcacggtcgatgtccgccttcggaattcacatgtaacgaagtgaaacaaaagggggtgccttgggtcttctgggtgctagaccatggggcaaaacttaaaaagttgcttagcctcagagagaactatagcttttgccattttgcggtcgtggttagttagtggatgtttgtggctcttgactgggtaaggtcttttgttacctgtctggtggttgcacctgcgtaacctctcaagcatgcattgcctgtctgatggctgtacttgtgtaacctctcaagaacggtgtctgtctggtgactggtggtaaaaatacagttctgttatatggttctagttctaccc

SEQ ID NO: 20190 - DNA, 1386 bp, Zea mays
  Clone ID: LIB3180-031-F3_FLI
ctggatcttgcttctggcctcggagggaagatcaacaaggtggaagtcaagtcggccgtcgatgagtatgagaaatatcatggatactatggagggaaggaggaagcaaggaagtccaactatactgatatggttaataaatactatgatcttgccactagcttctatgagtatggttggggtgaatccttccactttgctcacagatggaatggagaatccttacgtgaaagcatcaagcgacatgagcattttcttgccctgcaacttggtttgaaaccaggaatgaaggttttagatgtgggctgtggaataggtggaccactgagagaaattgcaagatttagctcaacttcagttaccggattgaataacaacgaataccagataaccaggggaaaggagctcaaccgtttagcaggaattagtggaacatgtgattttgtcaaggcggacttcatgaagatgccgttcgatgacaacacttttgatgctgtttacgccattgaggcaacatgtcatgcacctgatccagttggttgctacaaggagatatatcgtgtgttgaagcctggccagtgctttgccgtgtacgagtggtgcattacggatcactatgatcctaacaatgcaacccacaaaaggatcaaggatgaaattgagcttggcaatggcctgccagatatcagaagcactcggcaatgtctccaggcagtaaaagacgccgggtttgaggttgtttgggataaggatcttgctgaagattctcccttgccttggtacttgcccttggatccaagccgattctccctgagtagcttccgtttgacctctgtgggacgcatgattacccgcacaatggtcaaggccctggagtacgttggtcttgctccgcagggcagtgagagggtctctaatttcctggagaaggctgcagaagggctggtagagggcggaaagaaggagatcttcacgccaatgtacttctttcttgttcggaagcctcttctggaatgagctcttggatcaccttttcagagagagaaggcaagtggtcatttcgaagaagccgaggagagggaacctggaatcaagaaaaccttcagctctcctgtgtaggaggaaagttaacgaacagtgtagtaactgttcagctttgtgtttattcagttgttttgctgcttgaggttattcgtttctaggtgggggttggaatccttttcgccataaacctctcagtggcataaataagatggtttgcataagagtacttcatggataccgtaagggctactactgaaagagaaatgtttaagcagcatggtatgtgagcaactagtgataattattccatccttttttttaatataaagcaggagttttgtc

SEQ ID NO: 20191 - DNA, 754 bp, Zea mays
  Clone ID: LIB3180-059-F10_FLI
caccgcgtgcgaaccaagcagaccacaacaagaagaagcgtagtcgtcgccggaaggaaaggcgcggagcaagatgtcgtggcaggcgtacgtcgacgagcacctgatgtgcgagatcgaaggacagcatctcagcgccgccgccatcgtcggtcacgacggcagcgtttgggcgcagtccgagagcttccccgagttaaagcctgaggaggttgctggtatcataaaggactttgatgaacctggtactcttgcaccaactggtcttttcgttggaggtacaaagtacatggtgatccaaggtgaacctggagttgtcatccgaggaaagaagggcactgggggcattactatcaagaaaaccggcatgtccttgattattggtgtctacgacgagccaatgactccagggcaatgcaacatggtggtggagaggctcggcgattacctgatcgagcagggcttctaaaagttcgtcatgttctgttttggtcatttgggcaccaaagtttgcgcctcatttggttctgtaatccgtgagctcgtgcatgtacttggcgtattgcatgcagtgaataatttagcttgggtttgtttgttgggggcagtgttggggacggatttggattggggtttatgcttggcatcgcgtcgtatcgaaactcagctgctgtttcgctgagtaatgtacatttccctggtaatggtacttgtggactctgatgcttttatgggaacgagtgcattttactgc

SEQ ID NO: 20192 - DNA, 1430 bp, Zea mays
  Clone ID: LIB3179-001-C3_FLI
cacagctcgcagcacctgcaccacttgacaaccagccagctagctaaccaaccggcggagccaagaacaagcaagagacaacttgccccgtccaggcagcatgtgcaactccaacgtcaagtccgcgggcgtcgcccagatcgacggccgcccggtgctgcagccggcgggcaaccgcgtggcggcgccggacgccgcccgcccgctcaagaagtccctgcacaagtccttctccatgccgccttcctacgacaacaatgccaccgtgcccgcccgtcccgcccctgccgagaacacccgtgcggcgccggcgccgccttctctgctgcctcctacgacgccggccccggccccggccgccgcgagggcgaccaaggcggcgggcgccgtgcccgcggagaagcccaggtccaaggccaggaagcccggcgccgtgctgccggtggcgacgttcgcggcgccagaggcgttcgagccggcggggagcatcgccgcggcgcggcgggagcatgccgcgcaggcgcaggcgcagcgcaagtcgcggatcgcgcactacggccgcaccgcgtccttctcccgggtggagggccgagtcggcgccaccgccacggccgagccggccgtcccagcctcccccaccaccgggctcgacgagaagcgctgtagcttcatcacgccctactctgaccccttgtatgtggcgtaccacgacgaggagtggggagtgcccgtgcacgacgacgagttgctgttcgagatgctcacactgtctggcgtgcaagtcggggccgattggacttccatcctcaagaaaagacacgtctacagggaggcgttctccggcttcgacgtggatgcggtcgccaagtacaccgagaagcagatggcgtcgctgagcgccgactacgggctggatttgggcaccgtcagaggaaccgtcaacaacgcctgccggattcttgaggtgcggagggacttttgctcgctggacaagtacgtgtgggcgttcgtgaacaacaagccgctgtcgccgagctacaagtacagccggaagatcccggtgaagacgtccaagtcggagtccatcagcaaggacatggtccggcgcggcttccgcttcgtcggccccactgtcatccactccttcatggaggcggtcgggctcaccaacgaccacctcgtctcgtgcccgcgccaccgcgtctgctccgccgccgcccgcgtaaataactgattctgctgacgaccaccaagcaaaacacaagagggaattatctaaggacaaccaagacgagagagagagagagaggtagcagtagtaatatacaaaagagagtgttggcggtttgcatgtgtgtatgatgacccagtgtgcttgtgtagattaattacggcctctgattagcgaatgaatgatcttgcttgctgtg

SEQ ID NO: 20193 - DNA, 1345 bp, Zea mays
  Clone ID: LIB3179-001-D1_FLI
ctccgaaataccacaaacacccccaatcccacccagaatccggcggaagtcaagccaacctccgtcctccatccatgggcgagcaatccctctcccagcccaaggcccagcctctctccccgttcccgtcgcctcccgcctccgccgcgttgccgccccccgcctctgcctctgcctctgcctctgctgcctccacctcccgcaccaccagcgccgcggcctcgcgccccaagaagaaggtgacgaacccatcgcccgaccgtaacccggcaaagaagccccgcctgacgttctcgatcccgggccggcccctgtccgcagtcggcgaggtgggcgtggccatccgctacctgcgcgccgcggaccccgccctcgccgccgtcatcgacgcgcacgagccccccgtgttccagtgcccgcaccgcccgttccactccctcgtccgatccatcctgtaccagcagctcgccttcaaggccgccgcctccgtctactcccgcttcctcgcgcttctcggcggcgagtcctgcgtggcccccgatgccgtcctcgcgctcaccccgcaccagctccgccagatcggggtctccccgcgcaaggcttcctacctccacgacctcgcccgcaagtatgcctccgggatcctctccgacgccgccatcgtcaacatggacgaccgctccctcgccgccatgcttaccatggtcaagggcatcggctcctggagcgtccacatgttcatgatcttctctctcgcgcgccccgacgtgctcccctccgccgacctcggcgtgcgcaagggcgtgcagatgctctacgccctcgaggacgtgcctcgtccgtcgcagatggacaagctgtgcgagcggtggcgcccctatcgctcagttggggcttggtacatgtggcggctcattgaatccaaggtgccccagccagcgccggccatccctgttggatcacttgctttcccttcgccggacggccagagtatgctacagcagcaagaacaacagcaacagcagactgtcatccaaatgatcgacccccttcagatgctcccagggatggggtgaattcggtatcacgtctactaattagttactctactccgtcttagatcaatcaatggttactctgtgcatctgatagtcagctccacacgttgttgttctggaatggaaccgcaggagggtagaattggatatgaaatgaggtttgggcccaacttattaagttgtcaatttggtttgtgttgtttatctgtgtcaagaatctgtgaagatgatggttggctgttgtttacattgtaaaatccacctagcagtattttagaaccttctgg

SEQ ID NO: 20194 - DNA, 1217 bp, Zea mays
  Clone ID: LIB3179-001-F9_FLI
gcaccttttgttctgcacactgactgccctcactactggcgatatcatcttcctggtgagacagaagaagattttgcgactagacttgccaccaatttagagaatctcattctcaaagaaggaccagaaacaattgctgctttcattgctgaacctgtgatgggtgctggtggtgtcatccctcctccaaagacctattttgacaaggtccaagcaatcgtcaagaagtatgacattcttttcatagcagatgaggtgatcactgcatttggaaggctgggaactatgtttggatgcgattactataacatcaagccagatctagtttcactggccaaggctctttcaaacgcctacgtacccatcggggcaactcttgttagcccagagatatcagatgtgatccattcccagagcaataagcttggttcatttgctcatggattcacgtactccggccatccggttgcctgtgctgtggccattgaagctctgaaactttatcgcgaaagggacattcccggccatgtcaagcaaatcgccccaaagttccaggacgggattagggcgctggcagacagtccgattataggggagatacgtggcttggggatgattatggggaccgaattcacaaacaacaagtcaccgactgatctgttccctgccgaatggggggttggtgccatcttcggcgaagagtgccagaagcgcggcatgctggtcagggtcgctggcgacgccatcatgatgtcgccgacgctgatcatgacgcccggcgaagtcgacgagttggtgcgcatctacggggaagccctcaaggccacggaggagagggtggcagccctgcagtccaagaagaactagccaaaagggcggcgacgacgataacgataaacgccgggcgacgacggaccatatttgatgtacaggtgaataaacagccaagttcgtggctgcgagatggcaatagcgcgccggtctctgttcttgctctgtcgccaagcaaatggtggctcaactttttaaacatgtcatagatgtttttttcttcccttcctttcccttaaggaatggcaatacatctcaaatgtttgctgccctgtagttcctgaagataatgggtttcgtgtatatcgtgagtattagtagtgttcggatacatagctttgtaaaggcaaagcaataataaagtgaaggaactgcagtttcgagtc

SEQ ID NO: 20195 - DNA, 1376 bp, Zea mays
  Clone ID: LIB3179-002-A10_FLI
cgaagctaattctaggttgcagcagaatgggatcaccaatgataatgctacagaagatggttctgagcaagatttgcagatgcatcctttactgtttcattatcctcgagatgtggtttcgtcatatagtcatccggttcaaaatcttattaatcagtcaagaaaatatgatcttttcccctttgagaaagttcaagttgagagaagtaacaaccagactacaggttccaccaaaaatggtactgtaaatgctaacactatcgacttccatcctctcttgcaaagaacagaagttgatgtgcataatgatgtaccagaatatgatagtaaccttgattaccatcagtctgataataacatgagcaaagttccagtagatgaccagtcaacggctgggcaagcatccacaggcccttctgagagggagacaagtattgacttgaacattcatttatgttctccaacggtcataaaagattcaaatgacttcagaagtagttttagcagatcaaatgttcaagatgaagtttctaggaaggacaaatctagtgttccagggctcgagattgtaaattcctattttcatcattgcattcaagaacctaatgaagaatcaatgcaaggaattgtaatggagcaagaagaattaagtgattctgaggaagatagccagcatgttgagtttgaatgtgaggaaatggatgattctgaagaggagcaagttcagggtccagaagcctctccaattcaaaataagggtatctcagcatcagttgtttgtggggaatttcatgttagcaatgaccagagtcaaatccagcaaggatctgttcaaaaggataaacagggtgcaagctcgatgcagaaaacgcaagttccttctcggtcagtgagggctaagctgaagccagaaactgcaaagcgcacaggatctaggacgtccacttctcgcacagttgaaactagccggagcaaaaccagaagttctaaagtgccacagggacagtcgagtgctgaatggaagtccaatgattcgagaagaactagaaaaattccggccccaagatgaaggccaatttagcattttattcctgtgctgcatgtgccataggcagagtggctaagttcagtctgttgtcactgcgttgttgggttgattatcatcaacgtctattcagcgcatgctggagaaagcaaccaagcgaacgtctgtggtcatttagctcgaattgtcatgtgaaaatagcagtgggagcaatgtaccaaatatatgaatttctccagttagatagatgagacgaattcataatgttgttggtgactgagtaaagcattcccatgaatagatgagacgaattcctcgggagttttgtacg

SEQ ID NO: 20196 - DNA, 1264 bp, Zea mays
  Clone ID: LIB3179-002-H5_FLI
gccctcgccgcctcctctcccgttcccccaccaaccgcagcagcgagagcgagactgagaatggccgcggcgccgtcgtccctcgtgtcctcccatctctctcgcctcgccgacctccgccgcgcggcggcgccggccactcccaccgtcccacagcagcttcgcgtcggctgctcgcgccgccgcgcccagcgcgtcgtcgccatggctggatccggcaagttcttcgtcggaggcaactggaagtgcaacggaacaaaggactccgttagcaagcttgtctctgaactgaatgctgctaccctcgaaactgatgtagatgttgtggtggctcctccattcatctatatcgatcaggtcaagaattcactaacgggtcgcattgaggtttctgctcagaatgtgtggattggaaaaggaggagcctacaccggagagatcagtgcagaacaactggtggacatcggttgtcaatgggttattcttggacactcagagcgtagacatattattggtgaaaatgacgagtttattgggaagaaagctgcatatgcattgagccaaaatgttaaggttattgcctgcataggagagcttctggaagagagggaagcaggcaaaacttttgaagtatgttttgagcagatgaaggcttttgcagatagtatttccaactgggccgatgttgtgattgcatacgagcctgtttgggctattggaaccggaaaagttgctactcctgagcaggcccaggaagttcatgctgctgtacgcgattggttgacgaccaacatatcacctgatgttgcgtctagcacacgaataatctatggaggttctgtgaatgcagccaactgtgcagagctagcaaagaaagaagatatcgacggttttcttgttggtggtgcctcgttgaagaccccggacttcgccaccattatcaactcagtgaccgccaagaaagttgcagcctgatggaccaccctgtgagaaataagaggccatcagcgtgtcgcctcatctgccacgccttaaagcctgtataggaggtgatccgtgtgatggtgtgcccgtcacctcctgtttttgctgatttgcagcacggggacagaaaataatgttttgctctcgtggacctgcactgcacgtgacgaggagagttcagttgtcgtgagcgatgtacgttggggatattgtgatgtggtccttttctaaagaaaaaaaatgttgacggtcaaggagaaatataagtgtgtttttttac

SEQ ID NO: 20197 - DNA, 1312 bp, Zea mays
  Clone ID: LIB3179-020-C2_FLI
agcctcctcaagtcgtccttcgcgggctcccggctcccttcggccacgcgcaccaccaccccgtcgtccgtggccgtggccaccccgcgcgccggcggcggccccatccgcgcgtccatctcctcctcccccaccccgccctacgacctgacgtccttccggttcagccccatcaaggagtccatcgtgtcccgcgagatgacccggcgctacatgacggacatgatcacccacgccgacaccgacgtggtgatcgtgggcgccgggtccgcgggcctgtcctgcgcgtacgagctgtccaaggaccccaccgtgagcgtcgccatcgtggagcagtccgtgtccccgggcggcggcgcgtggctgggcgggcagctgttctcggccatggtggtgcgcaggccggcgcacctgttcctggacgagctgggcgtgggctacgacgaggccgaggactacgtggtggtcaagcacgcggcgctgttcacgtccaccgtgatgagccggctcctggcgcggcccaacgtgaagctgttcaacgccgtggcggtggaggacctgatcgtgcggcgggggcgcgtcggcggcgtggtcaccaactgggcgctcgtgtccatgaaccacgacacgcagtcgtgcatggaccccaacgtcatggaggccaaggtggtggtcagctcctgcggccacgacgggcccttcggcgccaccggcgtcaagaggctccaggacatcggcatgatcagcgccgtgcccgggatgaaggcgctcgacatgaacgccgccgaggacgagatcgtgcgcctcacgcgcgaggtcgtgcccggcatgatcgtcaccgggatggaggtcgcagagatcgacggcgccccgaggatgggcccgacgttcggcgccatgatgatctccggccagaaggcggcgcacctggcgctgaaggcactgggcaggcccaacgccgtggacgggaccatcccagaggtgtcgccggcgctgcgcgaggagttcgtgattgcgtccaaggacgacgaggtcgtggacgcctgagcgagcatccacgcgccagcatgcaagcagcgtcttatctgggccggcgccatcacggggtttcttcttttaatctgggactttgttgctgttggacgaatgaattcccttcgatcggttagctttaatctgtctcgttagtgtgtcgtgttcgtgtagcaccatgccacacaccagccgtgtgctctgtcacgtgggggccactcgtggggtctcctgctgctgtcagaacgaataagagaagatggaattgtgatgaaacaat

SEQ ID NO: 20198 - DNA, 206 bp, Zea mays
  Clone ID: LIB3179-021-G4_FLI
gaagagcaaaactagtccagttcgttccttctgggagagcacaagaatatttgcattcgttcatggtacagatcacgacagaaacgagtagtgtacaacacaatgtcctggcacgccgcggcccggtagctagcttaagaccctggtgcgaacttggtggcgtagacccaggcgttgttggcgacggggtcgtcgaggtggtcgag

SEQ ID NO: 20199 - DNA, 173 bp, Zea mays
  Clone ID: LIB3179-028-C4_FLI
gtggggctactcgcagagggtcgtcgacctcgctgacatctgcgccaaccagtggaagtgaagcgttgcattgtaatagcactttgtaactcctcaccctccacagggctttgggattcaccccgaaatgactcactttcggtgaaattcacccgtttcggcgaggtcgtccg

SEQ ID NO: 20200 - DNA, 438 bp, Zea mays
  Clone ID: LIB3179-028-G4_FLI
caccgccgctagaagaagagctcggcgattcccaggtcccgcgagaatatgccgaagcagatccatgagattaaggacttcctcctcaccgcgaggaggaaggatgcccgctcagtgaagatcaagaggagtaaggatgttgtcaagttcaaggtgcgctgctccaagtacttgtacacgctctgcgtcttcgatgctgagaaggcaaacaagttgaagcaatctcttcccccaggtttgaccgtcgaggaggtctgattggatacatggcaacgccgagttgaactacccaagcttctttatcagtagcagagcatgctactctatgtacttttggaacctaagctattagacctgtcagtgttggatgtctggatcttgcatttttggagaaataccaatttacctcgttcaaggatgcaagtatatttcttgttt

SEQ ID NO: 20201 - DNA, 1523 bp, Zea mays
  Clone ID: LIB3180-001-C5_FLI
gtccaggccccgctcgctcctaccagtggcccgtgcgtgcggccgccggcgccctgatcgatcgacccgcgcctcggccggatggaggcgtcagcagcagcaggaggtgggggaggcagcgccgccacgcggagcagcccggcggccgtgcaggccaccaacgacgacgccgcggccagcaagctgtcctgtgttaacaaaggatacatgaaggatgattatgtgcggttttttgttaggcgaccaacaagaagggctccaataatcaatcgtgggtattatgcgcgttggtctgttctcaggacgcttctgcatcaattcctcaatgcggggaagaatagtaacaatgacaagcctaaacaaatattatcccttggtgctggctttgacacaacattcttccagttgcaagatgaaggaatggctccacactgttatgtagaattggatttcaaggaggtaaccagcaaaaaagccgccatcattaaccattatagtgaaatgaaggaaaagttaggctcagaagcttcaatttcaatcgaaaaaggtgaagtgataagcacacattacaagctattttccgctgatattcgtgacataccaaaactggattcagttattcgcatggctgaaatggatcctagcttgccgacctttataattgcagagtgtgtgcttatttacctggacccaactgccactggtgctattgtgagttgggcatctcaaaagttctccactgctgtctttttcttatatgagcagattcatcctgatgatgcatttggggagcaaatgattagaaatcttgagagtagaggatgcccccttctcggtataaatgctacaccaaccctgagtcacaaggagaaactttttcttggcaatggatggcagagagccgttgcatgggatatgctgaaaatctataatgacttcattgacagtcaagaaagacgcaggatcgaacggttagaactgtttgatgagtttgaagagtggtatatgatgcaggaacactactgtgtggcctatggaatcaacgacgccgagggcatatttgacagttttggatttggggagacatagcagcactggtgccttttcttctgtgggtaccagctgcacttgttgtaaaccgacaccattaattcaagtattactcgaagtaaactttgcttgataaaagaaggaacgattgcttgataaaagaaggaacggacaggggtaggatacctaaacatctcctgatgttggagcttgctttgataggctgttaaagttcaacggcgttgtgcttggtttaaggtctttggtgccagtcgcagtggtgtttgatgtcaagcatgccaggctgccagttcgtcacaatatgaacagaacagtggtgctttccattttactgtttgcagatttaggttaaatctggtagcacatgtttgcagaataaatccgatgtagtttccttcagcctcttcagatacgaggagatgacatatacgtccggttccaatttgcgcttg

SEQ ID NO: 20202 - DNA, 1016 bp, Zea mays
  Clone ID: LIB3180-001-C8_FLI
ctcgcctcctcccacgacgacgcgcacgggcgtgcgtgcatgcggccagcggtcacggcccctccggcaaggcgaccaccgccgtgcgcgtgagaacaccggctcggctcgtctcgtcggacgactcgctcggcgccgcccgcgtccccatggcgcggccgcggccgcacggccgcatcgtccacgtcgccttcgccttcgcgttcgcgtctgccgtcctcctgccgccggccgcggagggtgtccaggagggcgacgtgctggtcgctttccgggacacgctgcgcggtctggacggcgcgccgccgggcccgctgcggaactggggcacgccgggtccgtgccggggcaactcctcctcctggtacggcgtgtcgtgccacggcaacggctccgtgcagggcctgcagctggagcggctcggcctgtcgggtggcgcgcccgacctgtccgtcctcgccgtgctcccgggcctgcgcgcgctcagcctctccgacaacgcgctcaccggcgccttccccaacgtgtccgcgctcgccgtgctcaagatgctctacctgtcgcggaaccgcctgtccggcgccatccccgagggcacgttcaggcccatgcgtggactccgcaagctgcacctctcctccaacgagttctccggccccgtcccggagtccatcacctcgccgcgcctgctggagctgtcgctcgccaacaaccacttcgagggcccgctgccggacttctcccagccggagctcaggttcgtcgacgtctccaacaacaacctctccgggcccataccggtagggctcagccgcttcaatgcaagcatgttcgcaggcaacaagctcctctgcggcaaaccactagaagtggaatgcgacagctcggggtcgccgcgcaccggcatgtcgaccatgatgaagatcgccatcgcgctcatcatccttggcgtgctgctctgcgtcgcgggcatcaccacgggcgccctcggcagccggaaaaggaagccgaggcgc

SEQ ID NO: 20203 - DNA, 2245 bp, Zea mays
  Clone ID: LIB3180-001-C9_FLI
cgcaccctccagttcgtctccccagctctgtctctaaaatccactcgtccaccacctcctcggcgcttcgcatcctttccccctccgcaagaaagaagcgaagcaactctccgccgtctccgtttttctccacaccacccaaagctctctccgaccacagcctcgcccccagcgcctccttccgcagtcatgtaccgcgcggccgctagcctcgcctccaaggcgcggcaagccgggaacagcctcgccgcccgccaggttggaagcaggcttgcctggagcaggaactatgctgcgaaggacatcaagtttggtgttgaggcccgtgctctgatgttgaggggtgttgaggagttggcagatgccgtcaaagtgacaatgggacctaagggccgcaatgtggttattgagcaaagctttggtgcaccgaaagtcacaaaggatggtgtgactgtagcaaagagcattgaatttaaggatagagtaaagaatgttggtgcaagccttgtgaaacaggttgctaatgcaactaatgacactgctggcgatggtaccacatgtgccactgttttgacaaaagcaatatttactgaggggtgcaaatctgttgcggctggaatgaatgcgatggatttaaggcgcggaatctcaatggctgttgacgctgttgtgaccaatctgaaaggcatggccagaatgatcagcacttcagaagaaattgcacaggtgggtacaatatcagcaaatggggaaagggaaattggtgagcttattgccaaggctatggagaaggttggcaaagagggtgtcatcactattgcggacggtaacaccctttataatgagcttgaagttgtggagggtatgaaattagacagaggttacatctctccgtacttcattaccaactcaaaaacccagaaatgtgaattggaagacccattaatcttaattcatgacaagaaggttacgaacatgcatgctgtggttaaggttttagaaatggctctgaagaaacaaaagcctctactgattgttgcagaagatgtggaaagtgaagcattgggcactttgattattaacaagcttcgtgcaggcatcaaggtctgtgctgtcaaagctcctggttttggggaaaacaggaaggcaaacttacaggaccttgcaatccttactggaggagaggtaataactgaagaactaggaatgaaccttgagaattttgagcctcacatgctgggtacatgcaaaaaggtgaccgtctctaaggatgacactgttattcttgatggagccggagacaagaagtccattgaagagagggcagagcagattagatcagcaattgagaatagcacttcagattatgataaggaaaagctccaggagcggttggcaaagctctctggaggtgttgctgttctgaagattggaggagccagcgaagcagaagttggtgagaagaaggatagagtgacagatgcactgaatgctactaaagctgccgttgaagagggtattgtaccaggtggtggtgttgctcttctctatgcatcgaaggagcttgataaattgcagacagcgaacttcgatcagaagattggtgtgcaaatcattcagaatgctttgaagacacctgtacacacaattgcctccaatgctggggtggagggagcagtagttgtaggaaagcttttggagcaagaaaatactgacctgggttatgatgctgctaaaggtgaatatgttgacatggtgaagaccggtatcattgacccgctaaaggttatcagaactgctttggtggatgctgctagtgtgtcgtccctgatgacaaccacggaatccataattgtagagattcccaaggaagaggcaccggctccagcaatgggtggcggcatgggtggcatggattactaatgcatcacacccacatacacatcaatgcaggttttttttagcggtgaagttcatcttcactgtttagcggtgcaagttcatctctactgtattttgttcgatgatgaggtggttgtcaggcggatacagttttgagtctgcggacgtaggacctcacaatagttccaaacggaatagtgtgagaataataaatatgaacagtagttctttgagatatgatcttgtagatcaagattggcttccggtcattttgtgtcgaaccaactgtattgtgatcgttacatttttttggctggggtaaaatcgggttgccgttccgttt

SEQ ID NO: 20204 - DNA, 678 bp, Zea mays
  Clone ID: LIB3180-001-D8_FLI
gtgtcattctcggaattggtgaagtttacaatggaagcaagcatagacgacagcatcatacctaatgctattccttcacgcagtgttggggggtatttttggagtggaaggaaatgtggttgttgaggtaactccttaaacacatgttttgcaaagacatggattgaagtttctggttcatcagcaaaggatgttgctaagcagctcaaggaacaacaaatggtgatgccaggccatcgtgagtcaaacttgcagaaggaacttaaccgatacatccccactgccgctgcatttggtggtgtatgcattggcgcattgaccgtcctggctgatttcatgggtgcgattggttcaggaactggtatattgctcgctgtgacaatcatataccaatacttcgaaacctttgagaaggaaagggcgactgagcttggtttctttggtttttgattagtagctgtggaaccttaacttggctatagctgaattttcttgtaagtccctgtagtgcttagccagttgtaacttaaagagttctgtttaggttgccttcttgcggccacaatcatgtagcagaatgtgcgtgtgtttcaggttagcgtgggggtatgtgcatctgtccaaagagagtctgcaatttggcaaccggatattttgttatcaatttcagttacttcg

SEQ ID NO: 20205 - DNA, 2189 bp, Zea mays
  Clone ID: LIB3180-001-E6_FLI
gaggagcctcccctgcctctcttcccgctcgctgggccctgcggctcgcagccagcattccgggctccgggtcgccgtgagccgcgggaggtttcgcgcggatctgaggctgcccgggctggggaattcgggttgataccggcgggagtcgggctgagttgatttggcgagtttaggtgtgcggagggaggaattccgggaggaacagttggttggtctgcgagagtttggtggccggtagggtggccgggcgggcgggcgggcgacgtacttgcgccccggaggccgccgtcgctgcttcgggcaagcgatgatcgagcagttcgtcaacttcgtcatccggccgcctcgtgcagagtacaatccagatcagtatttatgggagccagagttcactcttgccggaaggaagtataaaaggctagatttggagcttacgaatgaaagaagtcagaccttaaagtgcagccactatgttcctgctgtcatcccagaaaacacttcccttccatgtgtagtctactgccatgggaatagtggatgcagagcagatgcaaatgaagccgctgtcatacttcttccttcaaatatcaccctttttacacttgactttgcgggatcagggctatcaagtggagattatgtcagccttggttggcatgagaagcaggatctcaaatgtgttgtgtcctttctgcgtaagaataagcaagtttcttgtataggtctttggggacgctcaatgggtgctgttacaagtctgctatatggagcagaagacccctcaattgctggcatggttctggatagtgctttcgctaacttatatgacttaatgatggagcttgtagaagtttacaaaatacgagttcctaagttcacggttaagatggctgttcagtacatgcgatgcgtcattcagagaagagctaaatttgacataatggatcttaatgttgtccagtttgcacccaagacgtttattcctgcactatttggacatgcttcaaatgatatgtttattcagcctcatcacacagaccatattcatcaggcttatgcgggggataaaaatctaatcaaatttgagggtgatcacaattcgccaagaccccagttttattacgactctgtttcaatattcttctacaacgttcttcacccacctcagtttccttcaacctgcacacataaacttgataagtattataaccttggtgcttttaagggtgctgctggtactaatgagagcttattgtatgagatcatcaatggtctacgggcagctggcactgatgcaggaagttcatcagctgctacagctagtttcacgaatgctacaaaatcagtagttgaattgctgacagagagggtaaatcagctatctgttaaaaatgataatgacttggattttcttttggatgaaaaccataaccttactgagatggacggtaacacaggagagtgtcatttagaggataaatcaaacagacaaacagatgaatgctgttcgtataccagctcaaaccgagagagctggggaagatgttcttccttgggtggagctagtgatggattgtcatcaggcgaacagcctgagatacctaatcataagcttaagagcttgacactaagggctctagcaacaccactgagacgggtacgaaggaaacctctcgcgatcccgaaggagaagaatcgatcactgtggaagaggttgaaaaaggagaggcaacagatgggggaaaacatatcccagcgtctgcggttgtgtctccaaggccaggctcgacacaagagaaccaaatcgtcttgacaactgtggatacacatttagctcttggacaaatctgctaggaactcactgatgattcagcaaccgagctgcgccgcaatttggagcttctggcactcagcgccaatcctgcagtgtacattggttgaacattacctagaaatcttagatcatggattgtcccggacccaatgtgtcaactgtcagtctttaatgttcgtttttttttttcccaatgtaatcctgtaaatttgaaggctagaactgcccctgtacttgtggttgggggaggggcaccggttcgttgcttttttcaggatatgtgtagggtttggaggtcgagctgtatcgacagaatctcattttctatgttgctcggtaacgtctctgattt

SEQ ID NO: 20206 - DNA, 2030 bp, Zea mays
  Clone ID: LIB3180-001-F10_FLI
ggctcgctcgccctagacgaactccggcgaggccccgccgccaacgccggccatggcacgacgcgcgagcgccgggatctcgagggcgtcacggccaggcggcggggtgtcacgcgcgcctcataagggcgcgggcgtcttctgcctgtgtgtccaccacccgacctggtggagacggagtgccagaggtggaagagcaaaggcgtgaacataaagtacgaggtcagggggaaccggaaggggtacaaggccggcgcgctcaaggaaggactgaagcacgactacgtcgcagactgcgaatacatcgccatgttcgacgccgacttccagcctgactctgacttcctcctcaggacgatcccgttcctcgtgcacaacccggagatcgccctcgtccaggctcgctggaagtttgttaattctgacgagtgtctgctgacaagattccaagagatgtcgttggactaccatttcaagtatgagcaagaggccggctcctcggtgtattcattctttggcttcaatgggacagctggtgtctggaggatctcagcgatcgatgatgctgggggctggaaggaccggacgacagtggaagatatggacctggctgtccgtgcgatgctgcagggatggaagttcctttacgtcggcgacattaaggtcaagagcgaactgcctagcacattcaaggcgtaccggtttcagcagcacaggtggtcatgtgggccggcaaacctgttcaagaaaatgatggtagagattttagaaaacaagagagtgtcgctgtggagtaaaatccacctatggtacgatttcttcttcgtcgggaaagtcgctgctcatacggtgacattcatctactactgcttcgcgatccctgtgtctgttctgttccctgagatccagatccctctctggggagttgtctatgtcccgacagtcataaccctgttgaaggctcttggcacaccgagttcctttcacctggtgatcctctgggtcctgtttgagaatgtcatgtcgttgcaccggattaaggctgcagtaagtggtcttctggatgctggtgggcgagtcaatgagtgggttgtcactgagaagttgggcgacaccagcaaggcaaagcctggcaccaatggatcagacactgctgtaaaggtgatagatgtgaagctaacagaaccgcttgttccgaagctagtgaagaggcgagcaagattttgggagaggtaccactgctcagaacttttcgttggaacctgcataatcctgtgtggtttctatgacctgctttttgcaaataagggatactacatttttctcttccttcaaggcacggcgttccttgttgttggttttgggtatgtcggcacactacctccttgcactgcataagctgtcatggacaactgatattacctgctcaccagaaactgagcaagcaaagctcctctctcctgcacatatcaaactcttgaattcaatgatagttgagcaatgttcccccatcagtcttggcctgacatgatccaccgccgagaaggttgttcagatatcgccgtcgttctcctgtcagtgttggtcagatttgagccaaaccattctttattgtcagaaggccattcaaatagtgtcaccattgcaaattttataataacggtgtttaccgaagcatcatgaaaagaaaaatgattggtgcagcagcatttcgttcgcattccatagagatgcagttcacatccagtatttttttttggaaatctagtgttattactcagagttcagatccataatggaagattgttggcttcctcagttcataacctgtgtaggcttaaaacttgtagatgtaaattgttattaacactaatattttttattgaatccgggtattattgaaatgcaagtgtagcatgcatttcttttcctgtaagaagccaaagatgacttctgagtaacacgtctaatcagacattttacttgatgtggcacatggaatagtggatctattttaactatgtagcagc

SEQ ID NO: 20207 - DNA, 1481 bp, Zea mays
  Clone ID: LIB3180-001-F5_FLI
cgagccctccgccgcatcacaaacacctccgatccgtccccgatcatcgcaccacctgtagcccacctcgctctcgagtctcgacccagcgacgagatggccgcggtggatctgaccccaaggacgcccaagaaggcctacggcggcgacggcggcgcctactacgagtggagccccgccgacctgcccatgctctccgtcgcctccatcggcgccgccaagctctcgctcgccgccggcggcctctccctccccagctactccgactccgccaaggtcgcctacgtcctacaaggcgcgggcacctgcggcctcgtcctgcccgaggcgacgaaggagaaggtggtggcggtgaaggagggcgacgcgctggcgctgcccttcggcgcggtgacgtggtggcacaacggccccgccgcgcaggccgacctcacggtgctcttcctcggcgacacctccaagggccacaagcgggggcagttcaccaacttccagctcacggggtccgcgggcatcttcacgggcctgtccaccgagttcgtgtcgcgcgcgtgggatctgccggagcccgacgccgcgaggctggtgtcgagccagccggcctcgggcatcgtcaagctgcccgcctccgctgccgcgctcccggcgccctcgccgcaggaccgcgccggggtggcgctcaactgcctggaggcgccgctggacgtggacatccccggcgggggccgcgtcgtggtgctcaacacggccaacctgccgctggtgcgcgaggtcgggctcggcgccgacctggtccgcatcgacgcccactccatgtgctccccgggcttctcgtgcgactcggcgtaccaggtcacgtacatcgtgcgcggcagcggccgggtgcaggtggtcgggcccgacgggaggcgcgtgctggagacccgcatcgagggcgggtccctcttcatcgtgccccgcttccatgtcgtgtccaagatcgccgacgcgtccgggatggagtggttctccatcatcaccaccccgaacccggtgttcagccacctggcggggaagacgtcggtgtggaaggccatctcgccggaggtgctgcaggcgtccttcaacaccactccggagatggagaagctgttccgctccaagaggctcgactcggagatctttttcgcgcctcccagctccaactgaagcaccagctctccaagacgggggagaggagatcgttctcgattgtcgtcaaggtcatggttattaataattaagttagtgtcgtcgtcttaagttagcgtcgcgtcgtcgtcttaagttagcgtcgtcgaagtcagggtagagcgagaggtagaggtcgtctgtcatccgccattgaactggaactgctttttcaagatgaatactacccctctttcttaatcatcgttattactgctgcgaagttgtgtctgggatgttcgattgtttggccctttaggcgcatgatgatt

SEQ ID NO: 20208 - DNA, 2205 bp, Zea mays
  Clone ID: LIB3180-001-G11_FLI
gcggccgccgccggggttcgcacctccaccgttgccgtcgccaccaccgtcgtcgtccccaccagtgccctcccctccggcggcacagccgatggcccagtccccgccggggacgcctattcctccgccgcggccacccgcggcacgtgtcgagatgccggtgtaccatccaccgcttcttcaccgcgacccacggcacgtccatccgatggtgacgcggcacgcggctgggaccctgccgccccgagccctggcgaccacgaccgaagactcccaggtttctctggtaccctcctctgtccgcaccaccctgctggacccccactggcgtcgggcgatggaggagtacgtggcgctcgtcgccaaccagacatgggatctggtgccacgggtgacccagtcgaggaccccaccgggtacaagagtcttgccggtgctcttcagtacctcaccttcactaggccggacatctcctacgccgtgcagcagatctgtctccatatgcacgacccctgagagccccacctagcggctctcaaacgcctcctccgctacctccggggcaccgtcgactacgggctgcttcttcaccggtctacctcctccgagctcgtcgtctacaccgacgctgactgggccgggtgcccagacactcggcgctccacctccggctacgccgtcttcttaggcggcaacctggtgtcctggtcttcgaagcgccagccggttgtctctcgctcgagtgccgaggcggagtaccgtgccgtggccaacggcgtggcggaggctgcctggctccggcagctcctcgccgagcttcacagtcccctctccaggagcacggtggtctacaacgacaacgtcagcgcggtctacctctccaccaaccccgtgcagcaccagcggaccaagcatgtagagatcgaccacttcgtccgcgattatgtcgccgccggtgctgttcgggtcctccacgtccccaccacctcccagtttgctgatatcttcaccaagggccttccgtcctcgaccttcgccgagtttcgctccagcctcaacatcagtagtggctagttgcggctgtggggggatcctatggtgtaatgttcggtgtaatgtactcttccttttttgagtccagtctgtgaactccgctgcgtcggaagttcagactgcggggggtgttagagtatatggtaggcccatgtggcccatgtataacactatatagctacccattagggttagcattaattaacactgtaatacccagactgggaactaccaggccctggccctggccagtggtgcctaggtcaagggtggctaggctagggacggccagaccaagggcagcaagatcaggggcgaccgaacccccactgcagaggaaggtgttgccaatgacgggaggtggagcggggcgggcgagccaagctccaccttaggcagggaggatggtgagcaggcgtcagccaaggcatcagggccgaccgcgacgcctgcagagggcgtggcgacggctacaaacgccaagtgacaagggtcgaggggaggagaggaggggaagaggatagaaggggaggcatgcgtgtcatggtgcctgcaggccagaaggcacggtgactagaaagggagaggctgattctggctaaaaaagcattgcttcctattgtcctccttcaagcgcaccatggcaagactaagatctagaatcacatggctcaaagaaggtgatgctaacacgaagtttttttcatttgcatgccagacaccgtagaagaaaaaaatatcgtagctaaaattgtggatggaggtcggttttatcacaaccttattggtcagtgcaaaggtagggacagggttattgacctagaggcccttgcaattcctagggacatcctgactgattggactttcctttctctgagcaagaagtatgggaaaccattagagatatgccttcagacaaggtcctagggcccgatggtttcacagggcagttttacaaatcttgctggggtattattaaaaatgatgtgatggctgcggtttcagcggtctggagtagaaaattctgtaatttcagcaagctaaacactgcgtacatcaccatgatcccaaagcatgaaggggcggatcaggtaaaggattttcggccaattagtcttgtacaccgctttgctaaattgatcacaaaaattc

SEQ ID NO: 20209 - DNA, 2265 bp, Zea mays
  Clone ID: LIB3180-002-A5_FLI
cccattcccatccgagctgcagcgctcgacgacggggagaatagcgtggcgtgggcggcgccatgaagtacagcaaggaagataagcccgagagggcgggcggcgccggcgcagggtccagggcggtgccggtggcgctcgtcgtcgtcgtgctctgcgccttctccttctacctgggcggcatctacagcacgggacggagcctgctggactccatccagccggcgccgacggctctcctcgccctcggcgccgccacgacgacccgccgtccctccgacgacggccaggctcggccggcactggcgtccacggccgccgtggcgttccccgagtgccccgccgattaccaggactacaccccctgcaccgaccccaagcgctggcggaggtacggcaactaccgcctgagcttcatggagcggcactgcccgccgccgcccgaccggcagcagtgcctggtgccgccgcccaaggggtacaagccgcccatccggtggcccaagagcaaggaccagtgctggtaccggaacgtcccctacgactggatcaacagccagaagtccaaccagcactggctcgtcaaggagggcgaccgcttccggttccccggcggcggcaccatgttccccaacggcgtcggcgcgtacgtggacctgatgcagggcctggtcccgggcatgcgcgacggcaccgtccgcaccgcgctcgacaccggctgcggcgtcgccagctggggcggcgacctgctggggcggggcatcctcaccgtgtcgctggcgcccagggacaaccacgaggcccaggtgcagttcgcgctggagcgcggcatcccggccatcctcggcatcatctccacgcagcgcctgccgttcccgtccgccgccttcgacatggcgcactgctcgcgctgcctcatcccctggaccgagttcggcggcctctacctcctggagatccaccgcgtcctccgcccgggcggcttctgggtgctctccggcccgcccgtcaactacgagaaccgctggcacggctggaacaccaccgcgcaggcgcagaaggccgacctggacaggctcaagaagatgctggccagcatgtgcttcaagctctacagcatgaagggggacatcgccgtgtggcagaagtccgccgacgcctgctacgacaagctcaccccggtcaccacgcccgccaagtgcgacgacagcgtcgaccccgacgccgcctggtacgtgcccatgcgctcctgcgtcacggctcccagccccaagtacaggaagctggggctcaacgccacgcccaagtggccccagaggctcagcgtcgcgccggagcgcatcagcgtcgtcccgggcagcagcgccgccgccttcaagcaggacgacgcccggtggaagctcagggccaagcactacaagacgctgctgccggcgctggggagcgacaagatcaggaacgtcatggacatgaacaccgtgtacggaggattcgcagccagcctcatcaaggaccccgtctgggtcatgaacgtcgtctcctcctacggcccaaactccctcggcgtcgtctacgacagagggctcatcggcgtcaaccacgactggtgtgaggcgttctcgacatatccacgcacctatgacctgttgcatcttgatggcctgttcacagcagagtctcacaggtgcgagatgaagtacgtgctccttgagatggaccgtatccttcgtcccacgggctacgccataatccgggagagcacctacttcctcgattctgtggcacccattgccaaagggatgcgatggagctgcgagaagcacagcagcgagaacaaggccgacaaggacaagatcctcgtctgccagaaaaagctttgggcaggaaagcagtgacgagagaggatcatccttcttccttccgagtataaaaaagtaggcatccagatcggccaacaaggcaagaggcgcttcaatacacatggaagatgagcgagtacttctgatacaaagagtgttcggcagttattatcaaaataaataagccgagtaaaactccatataggatccaacagttaccatttttcattaatcacagtttaattctttttctgtaccgacagtttgtaggcgaggaatgggtcaattcatataccatggtgagcaaatgtaagtttactccacactagatgtgtatagcttggttggtgctactgctatcgatgtaatagcgggccacgtatttacttcacatgttttgtggatc

SEQ ID NO: 20210 - DNA, 1773 bp, Zea mays
  Clone ID: LIB3180-002-B1_FLI
cacaaactcttctccaataaattacgaccccagccaagctttggagtgcggttcccaaccatggcggcctcccccacttcctccctcgccccgccggtggtgcctatggagcttcacgccggcaaccgcgaccgcctcgtcgccgcgctccgcggccacatctccgcctccgcgcgcccgctccacggcctcgtcctccttcagggcggggaggagaagacacggtactgcaccgatcacctcgagctcttcaggcaggagagctacttcgcctatctctttggagtgcaggaaccagggttctacggcgcaattgacatcgcctctggacagtcaattttgttcgctccaagattgccagctgactatgctgtttggatgggtgaaataaaacctttgtcgtacttcagggatacatacaaggttgatatggtcttctatgttgatgagattgcaagggttgtgcaagatcatttcgggaaccatggaaagcctcttctgtttctgctacatgggaggaatactgactctggaaatttctcaaagcctgctagttttgaggggatggagaagtttgatactgatttaattacacttcatccaattttaaccgaatgtcgtgtgattaaatctgatctggagcttgctctcatccggtatgctaatgatgtcagttctgaagctcacattgaggttatgagacgagcaaggccaggcatgaaggaatatcaattagaaagtatcttccttcaccatgtttatatgtatggaggttgccgacattgctcttatacatgtatatgtgctactggagataatagtgctgttctacattatggacatgcggcagctccaaatgaccggactttgaatgatggagacatggcactaatggatatgggagctgaataccatttctatggatctgatatcacatgctcataccctataaatgggaaattcaacagaagtcagacaataatatacaatgctgtgcttaaggctcataatgctgttatatcagacatgcggcctggagttaattggatggatatgcacaaattagcagaacgggcaatacttgaatctctcaggaaggaacaaattgtacaaggggatgttgatgatatgatggctcaaaggttaggggctgttttcatgcctcatggtcttggccacttacttggtattgacacccatgatccaggaggctaccctgagggattggagaggcccaaggatccaggactgagctccttgcggaccacaagagaactgaaagaaggaatggttatcacagtggagccaggctgctatttcattgatgctttgctaactaaaacaagggatgatccaatttcctcaaagttcttcaactggcaagaggttgaaaagtataaaagctttggtggcgttcgcattgaaagtgatgtgtatgtgacggctcaaggatgccggaacctcacaaactgccctcgagaaacctgggagatcgaggctgtaatggctggcgcaccatggcctctgccggcttcaagttctatggtggtagcagcagagaatagcaatgacatatctaaagtgtcgtaattttctctatgctcaatccatatcccgagttgaaacaaattcgatctggattcttatattcaataaatagtgaggctgaggcgcaaaacattgttggattgatgactggaaaacatttcatacgctcacttattttgtaagctctctgttatgtgtttgagatcgatggggaaaagtttagct

SEQ ID NO: 20211 - DNA, 1841 bp, Zea mays
  Clone ID: LIB3180-002-D8_FLI
gtgcttctgtccctctcctgttataatttcgtcttcttccctctcccaccggtgtcctcgcctcgcctatccgatctgccacctcgccgtctcgcacgttcctttccccaactccccagcgcctctccgcgccgcgatccagatccaggttgttcagcatgggtctggtgaaggaaggcgtcgacatggaggagggaaccctagagatcggcatggagtacaggactgtatctggtgtggccgggcctctggttatcttggataaagtaaagggcccaaagtaccaagaaattgtaaacatccgacttggagatggcaccactcgccgtggtcaagtccttgaagttgatggagaaaaagctgttgtacaggtttttgaaggaacttctggaatagacaacaaatacacaaccgtgcagtttacaggcgaggttttgaaaactcctgtctcactcgatatgcttgggcgcatttttaatggttctggaaaacctattgacaatgggcccccgatattacctgaagcctacttggatatctctggaagttctattaatcccagtgagagaacctatccagaggagatgatccaaactgggatatccaccattgatgtgatgaactccattgctcgtgggcaaaaaatccccctattttctgctgctgggctccctcacaatgaaattgctgctcagatctgtcgtcaggctggccttgtgaagacattggagaaaggaaagcatgcagagggtggtgaagatgacaactttgctattgtgtttgctgctatgggagtgaacatggaaacagctcaattcttcaaacgtgattttgaagagaatggttccatggaacgggtcaccctttttctgaatctggctaatgatcccaccattgaacgtattatcacccctcggattgctctaacaacagcagaatatttggcatatgaatgtgggaagcatgtacttgtcatcttgacagatatgagctcttatgcagacgcacttcgtgaggtttctgcagcccgagaagaggtgccaggtaggcgtggttatcctggatatatgtatactgatctggcaacaatatatgagcgtgctgggcgtattgaaggaagaacagggtccattacccaaattcctattctgacaatgcctaatgatgatattacacacccaactccggaccttactggatacattactgagggacagatatacattgataggcagctccataacagacagatttatccacctatcaatgtcctgccatctctatctcgattgatgaagagtgctattggtgagggcatgacacgtagagaccattcggatgtgtctaatcagctttatgccaactacgcaattggaaaggatgttcaggccatgaaggcagtcgttggagaggaggcactctcgtctgaggatctgctttacttagagttccttgacaagtttgagaggaagtttgtgacacaaggagcatacgacacacggaacatcttccagtcactagatcttgcatggacattgcttcggatcttccctcgcgaacttctccaccgtatcccggcgaagaccttggaccagtactatagcagagatgcctcccactgaatcactgatcgttgatcagtgttccaatagtttggcaagtgttgaataaattgaacagattggcttcatggccttttccctgtatttatgtgtagtcaggtccaattcttttctgttgatgagcgcaagtttttcgtagatgactcgcggtcacggcaatatttgtgatattgtgtcatctgtggactatggttaaatttcagttatttgttttctttc

SEQ ID NO: 20212 - DNA, 1682 bp, Zea mays
  Clone ID: LIB3180-002-E11_FLI
caacctgctcctgccccgttgcctcctctccgcccccaccaccatggctcgtgcttccgtctccggttccgctgcggtggccaaagcactgatccccttaaaccccgccagcggcggccgccttccttccctgcttcctgcgcgcctccatgtccccgggagcagccgcgtgctccgcggcgcctcgctccgctgctatgccgccgccgccgccgctgtggccgagcagagccgcatcaaggtgcagaaccccatcgtcgagatggacggggatgagatgacgcgggtcatctggaagatgataaaggataagctcatcttcccatacctggagttggatgtgaagtactacgatcttggaattctcaatcgcgatgccaccaatgatgaggtcaccgtcgagagtgccgaggctacattgaagtataatgttgctgttaagtgtgcaacaattacgcctgacgagactcgagtaaaagagtttaaactcaagtctatgtggcggagtccaaatggcacaataaggaatattctaaatgggactgtttttcgtgagcccatcttgtgtaaaaacatcccaagaatcctttctggttggaagaaacctatttgcataggaaggcacgcctttggtgaccagtatcgagctactgatatgattattaatggtccaggaaagctcaagatggtatttgtgcctgatggagctgaccctatggagctggatgtttatgattttaagggacctggtgtggcattatcaatgtacaatgtcgacgagtctattagggctttcgctgagtcctccatggctatggctctttcaaaaaagtggcctctttatctcagcaccaagaatacaatcctcaagaagtatgacggcaggttcaaagacatcttccaggaggtatatgaagagcaatggaaggagaagtttgaagaaaactcaatatggtatgagcacaggttgattgatgacatggtggcctatgctgtgaaaagtgatggtgggtatgtttgggcttgcaaaaactatgacggagatgtacagagcgattttcttgcccaaggttttggttctctgggtttgatgacttctgtgctgttgtcttctgacgggaaaacattagaggctgaggctgctcatgggactgtcactagacatttcaggctacatcagaaaggacaggagacaagtaccaacagtattgcctccatattcgcttggacccgtggacttgaacacagggcaaagctggataaaaatgatagtctgctggatttcacacacaaacttgaatctgcatgtgttgaaacggtggaatctgggaaaatgactaaggaccttgcgcttcttatccatggccccaaggtaacaagggagttctacctgagcaccgaggagttcatcgatgcagtcgcgcagcaactgcgaggaaagattcaactaccaactactgtgtaatcctgaacctgaagcctgaaaccgaacgaactggttcattgtgcattcggcgcacattttgatagggatggcgagatggatcagatctcaaaacattcttttttttttgcttcagccaaacatttcatggttgggtatataatgacccgttgatcaatgtattcagagcgatattgagttaaattattactagtcggtcgtcgtatttttcattttc

SEQ ID NO: 20213 - DNA, 1646 bp, Zea mays
  Clone ID: LIB3180-003-A1_FLI
ctcgccgtctgccttctgcgcctccatttcggcctctgtcccttgcaagttcagtctcgcctccaaccatgggtaaagagaagtcccacatcaacattgtggttattggccatgtcgactctggcaagtcgaccaccacaggacaccttatctacaagcttggaggcattgacaagcgtgtgatcgagaggtttgagaaggaggctgctgaaatgaacaagcggtccttcaagtacgcctgggtgctcgacaagctcaaggctgagcgtgagagaggtatcaccattgatattgctctgtggaagtttgagaccaccaagtactactgcacggtcattgatgcccctggacaccgtgacttcatcaagaacatgatcactggtacctcccaggctgactgtgctgtccttatcattgactccaccactggtggttttgaggctggtatctccaaggacggccagacccgtgaacatgctctccttgcgttcacccttggagtgaagcagatgatttgctgctgcaacaagatggatgcaaccactcccaaatactccaaggcacgttatgaagagattgtgaaggaagtctcatcctacctcaagaaagttgggtacaaccctgataagattgcctttgttcccatttctggttttgagggcgacaacatgattgagaggtccaccaaccttgactggtacaaaggcccaaccctgcttgaggctcttgaccagatcaccgagcccaagaggccttcagacaagcccctgcgtctgcccctccaggatgtgtacaagattggtggtattggaactgtaccggttggtcgtgtggagactggtgtcatcaagcctggtatggttgtcacctttggtccaactggcctgactaccgaggtgaagtctgttgagatgcaccacgaggcgcttcaggaggctcttccgggtgacaatgttggcttcaacgtgaagaacgttgctgtcaaggatctcaagcgtgggtttgtggcctccaactccaaggatgaccctgccaaggaggctgccagcttcacctcccaggtcatcatcatgaaccaccctgggcagattggcaacggctatgccccagtgctggactgccacacctcccacattgctgtcaagtttgctgagctcattaccaagatcgacaggcggtctggcaaggagcttgagaaggagccaaagttcctgaagaacggtgatgctggtatggtgaagatgataccaaccaagcccatggtggtggagacattctcagcgtatcctcccctcggtaggtttgctgtccgtgacatgaggcagacggttgctgttggagttatcaagagtgtggagaagaaggacccgaccggcgccaaggtgaccaaggcggctgccaagaagaaatgatgcgatcctgcgcctgctttagcaatacctagttttcatcatcacaagttttgtttgtgatcgttgctgttatcgtgtgaactgttgagatctgttagcatgtgcacttttatctatttatttggtaccatcttgctatttcaccttttgcaatacaagaatgctggagtatatgttaaccttttggcattgttaaattgattttaggaagtcgtatagttagttttcttcagt

SEQ ID NO: 20214 - DNA, 1226 bp, Zea mays
  Clone ID: LIB3180-003-B11_FLI
ccaaattccacgccgatccgcccccaccactactccaccgcgcgcctcccctcccgaatcccgatccatctccatccagccgccgccggcatccgcgagaggccatggacgtgagcaggaagaagaagtgggtggcctgggcggtggcggccgccatcttcgtcgtcctcatgctcgtcacgcccgccatcccgcaggacgaagcctaccacgacttcgcggaccagcgcacccttttcttagggattcccaacaccttgaatgtgatctcaaacatccctttcttctttgttggcgtcacggggctcatcctgtgccacttcaacaactatttcaggctaagctcgcagggggagctctggagttggacgctgttctttgctggtgtcacggctgttggatttggttcttcctattatcatctcaacccgaatgacgccaccctagtttgggacagactgccaatgacgattgctttcacttctgtcatggctatattcattattgaaagggttgatgatagagcaggggcaaaatcccttgcaccacttgtgattgcgggtgccttgagcatcatgtattggagacactttgatgatcttcgcccgtacgcagtagttcagtttgttccatgcattgctttacctgtgatggctatagtaattccaccgatgtatacacattcaagctactggttgtgggcagcaggattttacctccttgctaaagtggaagaggctgctgacaaaactatctacaattggactcatcagattgttagtggtcatactcttaagcatctatgtgctgcgatggtaccggttttcctggctctcatgctagctaaaaggactaccgaaccagaaaggataagcttgctccagaagtggaagaccagttgggttgcggtgagagagaggcgtttcaaagatagcagtacagttgatgtggattgcggctacgctgttgtttcaagtatatctgaacagtaaattgtcatgcatctaattaacatgcacgttgtttcaagtattagcatgcatgctgcgcatgtgtatgagagaagatccctgtgaagtattaagaaaccaacctacctagttgagtttgctggtcggagttagctgtgcctgtgggtgacatatcttgtacatagcagaaagcaatacaagtaacggaagcatgtattacaagatttgcgtatatcatttcaatttttttccttg

SEQ ID NO: 20215 - DNA, 1345 bp, Zea mays
  Clone ID: LIB3180-003-D11_FLI
gcgccggctcaaggtacattgcgtgtcctagccaagacacgcagctcatctcagcctcacacgcagagcaagagcgaggcgtgattcgccatgggcggcctcattatggaccaggccttcgtgcaggcccccgagcaccgccccaagcccatcgtcaccgaggccaccggcatccctctcatcgacctctcgcctctgtccgccagcggcggcgccgtggacgcgctggccgccgaggtgggcgcggcgagccgggactggggcttcttcgtggtcgtgggccacggcgtgcccgcagagaccgtggcgcgcgcgacggaggcgcagcgcgcgttcttcgcgctgccggcagagcggaaggcctccgtgcggaggaacgaggcggagccgctcgggtactacgagtcggagcacaccaagaacgtgagggactggaaggaggtgtacgacctcgcgccgcgcgagccgccgccgccggcagccgtggccgacggcgagctcgtgttcgagaacaagtggccccaggatctgccgggcttcagagaggcgctggaggagtacgcgaaagcgatggaagagctggcgttcaagctgctggagctgatcgcccggagcctgaagctgaggcccgaccggctgcacggcttcttcaaggaccagacgaccttcatccggctgaaccactaccctccatgcccgagccccgacctggccctcggcgtgggacggcacaaggacgccggcgccctgaccatcctgtaccaggacgacgtcggcgggctcgacgtccggcggcgctccgacggcgagtgggtccgcgtcaggcccgtgcccgactctttcatcatcaacgtcggcgacctcatccaggtgtggagcaacgacaggtacgagagcgcggagcaccgggtgtcagtgaactcggcgagagagaggttctccatgccctacttcttcaacccggcgacctacaccatggtggagccggtggaggagctggtgagcgaggacgatccgcccaggtacgacgcctacaactggggcgacttcttcagcaccaggaagaacagcaacttcaagaagctcaacgtggagaacattcagatcgcgcatttcaagaagagcctcgtcctcgcctaactacgtactgctagtactggcctactgctaggatccataccattgccatgtcgtcttcagattcagagcacgccatgtcgtcgctagcttcgtggtagaacaaataatgatgtgcgtgctgtgtgtaagcatggatgtgaatatgtgatatgatgagcactcctactttggtagtatgtctgggaataacaagttcacaattatc

SEQ ID NO: 20216 - DNA, 923 bp, Zea mays
  Clone ID: LIB3180-003-D12_FLI
cttggtattcctcatagttatctatttccaaggcttccgtgttgtgcttccagtgagatcaaagaatgctcgtggccagcaaggctcatatccaattaagctgttctacacttcaaacatgcccatcattcttcactctgcgctgattaccaacctctattttatatcccagcttctctacaggaagtacagtggaaacttccttgttaaccttcttgggaagtggaaggagtctgaatactctggccattctattcctgttggtggtcttgcttactatgtaactgccccatcaagtttggctgatgtccttgcaaatccattccatgcactgttttatgtggtcttcatgctgtcagcctgtgctctgttctcaaagacatggattgaagtttctggttcatcagcaaaggatgttgctaagcagctcaaggaacaacaaatggtgatgccaggccatcgtgagtcaaacttgcagaaggaacttaaccgatacatccccactgccgctgcatttggtggtgtatgcattggcgcattgaccgtcctggctgatttcatgggtgcgattggttcaggaactggtatattgctcgctgtgacaatcatataccaatacttcgaaacctttgagaaggaaagggcgactgagcttggtttctttggtttttgattagtagctgtggaaccttaacttggctatagctgaattttcttgtaagtccctgtagtgcttagccagttgtaacttaaagagttctgtttaggttgccttcttgcggccacaatcatgtagcagaatgtgcgtgtgtttcaggttagcgtgggggtatgtgcatctgtccaaagagagtctgcaatttggcaaccggatattttgttatcaatttcagttacttcgaactgaacatgttctcattctt

SEQ ID NO: 20217 - DNA, 1445 bp, Zea mays
  Clone ID: LIB3180-003-F3_FLI
gtaaggagaagtcccacatcaacattgtggtcattggccacgtcgactctggcaagtcgaccaccaccggccacctgatctacaagcttggaggcattgacaagcgtgtaatagagaggtttgagaaggaggctgctgagatgaacaagcggtccttcaagtatgcttgggtgctcgacaagctcaaggctgagcgtgagaggggtatcaccattgatattgctctgtggaagtttgagaccaccaagtattactgcaccgtcattgatgcccctggacaccgtgacttcatcaagaacatgatcactggtacctcccaggctgactgtgctgtccttatcattgactccaccactggtggttttgaggctggtatctccaaggatggccagacccgtgagcatgctctccttgcgttcactcttggagtgaagcagatgatttgctgctgcaacaagatggatgcaacgactcccaaatactccaaggcgcgttatgatgagattgtgaaggaagtctcatcctacctcaagaaagttgggtacaaccctgataagattgcctttgtccccatctctggttttgagggcgacaacatgattgagaggtccaccaaccttgactggtacaaaggcccgaccctgcttgaggctcttgaccagatcaccgagcccaagagaccttcggacaagcccctgcgtctccccctgcaggatgtgtacaagattggtggtattggaactgtaccggttggtcgtgtggagactggtgtcatcaagcctggtatggttgtcaccttcggtccaactggcctgactactgaggtgaagtctgttgagatgcaccacgaggctcttcaggaggcccttcctggtgacaatgttggcttcaacgtgaagaacgttgctgtgaaggatctcaagcgtggttttgtggcctcaaactccaaggatgaccctgccaaggaggctgccagcttcacgtcccaggtcatcatcatgaaccaccctggccagatcggtaacggctatgccccagtgctggactgccatacctcccatattgctgtcaagtttgctgagctgattaccaagatcgacaggcgttctggcaaggagcttgagaaagagcccaagttcttgaagaacggcgatgctggtatggtgaagatgattcccaccaagcccatggtggtggagacattctcgcagtatcctccccttggtaggtttgctgtccgcgacatgaggcagacagttgctgttggagtcatcaagagtgtggagaagaaggacccgaccggcgccaaggttaccaaggcagctgccaaaaagaaatgatgcaacctgtcgttaatcctgtatctgcttttgcaatacctgacttgtcactccatcccgaagttttgtatgcggttgttactgttattgtgtactgttaagctc

SEQ ID NO: 20218 - DNA, 807 bp, Zea mays
  Clone ID: LIB3180-005-A6_FLI
cgagcgagggacccggggcggaagaagagagagaagacgtctctctcctctcggcgtccccgttccccaacctctcgtctgctgcctgcctgcctgcctgcctgcaaaaaggagtttgtcatggcgtctaagcgcatcctcaaggagctgaaggacctgcagaaagacccccccacatcatgcagtgcaggtcctgctggtgaggacatgtttcattggcaagcaacaattatgggaccacctgacagtccctatgctggtggtgttttcttagtgaacattcatttcccgccagattaccccttcaaacctccaaaggtttctttcaagacaaaggtcttccatcctaatatcaacagcaatggaagtatatgccttgacattctcaaagagcagtggagccctgctttgacaatttctaaggtcctgctctccatctgctccctgctgaccgaccccaacccggacgaccctcttgtcccggagattgcccacatgtacaagacggaccggccgaagtacgagtcgacggcccgcagctggacgcagaagtacgcgatgggctgacgaacgctttcctgctcgtctgggcgccattgttcccttggatttgttgttggtcgtatgtatccctgatccatctaggatcatcgtattgtattgtagtgtatgtatgtcgtcggcctaccatcgttgccatccaccatagtgaggtggttggacatgcttcgcctatatgcacctgtgcttgccttccttcgggtcggtgctgtttggttaatgttcatcgaagacgttgatttcgtt

SEQ ID NO: 20219 - DNA, 1288 bp, Zea mays
  Clone ID: LIB3180-005-A9_FLI
gtttctctcccggttcgtcccctctcctgcgacgtcagggttgggtaacgccgctcgccgccgccgccctacgcaggtgctgaggccttcatcgatctcttagccgtcgacaagcacccaagagatgcaggatagaatgagacggcagggccaatatggtgaagcggatattaactccatggttgctgcccagttgcatcactaccaggcacagcaaagggtacagaaacaccctgagaatagctacactggaagagatcctgcacaagcttctgcggagcatcagtacacttcccctaaggcaagacagagtcaatgggatcgaggtggaccaaatgcgccaagccaggttccatcatatgcatataacgaagcccaaggtgctggaggtgcgcaatccttttatgatgggcagagatctgatacaaaggttggtctagaaaagcagcccagcaaggagtctagggagcaacctcgtactgaacgaactgaaacaagatacgagaattataatcttcctcggacattcgaaggtcttgaacaaagtttccatgaagacattattttgctatccaaggaactacaggaggcagaggatgctgaaaattctagacacatggagagattgaaggatataaatacacagtaccaggagaaactattaacacttagagctcggcaagcgaactatagagatgagttcctgcgcaaggaatctctagcacgccagcagcaataccagcacgccagcatgagccattatgccagcaattccacggctggggagcagcatggttataacccaacggcagcaggcacgcctcctgttgctgctggaggtgcttatggtgaggctcatcggggttatgcttctggccagtatgaatcatttagcgatcgtccagattatccagagttccatgatgggggcagaggtcgtggtcgtagttctgagcagcgtgctcaataccctggtggtcgtgcttataattccggtggccggcgattctagatatgctttgaactttgaaggacgatctatcactctgtcaagcgagctcatatcacctgatgtcagtgtgctgcaccgtgctatactcgaccgagaaacctaagcgctcataaaacttgttctacaattcaggtgcatcgaactactttatggttttgctagagttcattctggttataattgtagaggaacgaaacgatgagagaacactgacttttccgtttctctgcaattcatgtaatatgatctcggaagcaataacatttcatcttctat

SEQ ID NO: 20220 - DNA, 555 bp, Zea mays
  Clone ID: LIB3180-005-B2_FLI
cgtgcgcgcgggagacgtagatggcggcttcggaggcggcagcggcggcggcaacaccggtgacgccgacagaggggacggtgatcgcgatccacagcctggaggagtggagcatccagatcgaggaggccaacagcgccaagaagctggtggtgattgacttcactgcaacatggtgtcctccgtgccgcgccatggctccaatttttgctgatatggccaagaagtccccaaatgttgttttcctgaaagttgatgtcgatgaaatgaagaccattgctgagcaattcagcgtagaggccatgccaacattcctgttcatgagggagggcgacgtcaaggacagggtcgttggcgcagcaaaggaagagctagcaaggaagcttgaactacacatggcctcgtagatcagtgatgccgtaatgtagtattcgcctaaataagaggacgcctcgcctcaactctgagaaaactagtgcttctgtgatggtaattcgtatgagagagtgccccctttggtggtacttcttcgtatgtagtattaactcctgtctt

SEQ ID NO: 20221 - DNA, 983 bp, Zea mays
  Clone ID: LIB3180-005-C10_FLI
tgcaaaagggcgtgtttgagactagcggaccgaccttgaagttgaagttgaaaaggccggcctgcgcggcgatggatgtcaagtgccggcgtctggaggggaaggtggccatcgtgacggcgtccacgatggggatcggcctcgccatcgccgagcgcctcggtctggagggcgccgccgtcgtcatctcctcccgcaagcagaagaacgtgaacgaggcggtggaggggctcagggccaagggtatcaccgcggttggtgccgtctgccacgtctccgacgcacagcagcgcaagagcctcatcgagacggccgtcaagagctttgggcacatagatattcttgtctccaatgctgccgcaaatccttctgtagatagcatacttgaaatgaaagagtctgttctcgataagttgtgggatattaacgtcaaggcttctatccttcttatccaggatgctgctcctcacctacggaaggggtcatctgtgattattatttcttcaattgctggttacaatccagaacaaggattgacaatgtatggtgtcacaaagactgctctctttggtctcacgaaggctcttgctggtgagatgggacccgatactcgtgttaactgtatagcccctggttttgttcctacacggtttgctagtttcctcacagaaaatgagaccattaggaaagagcttaacgagaggaccaagcttaagagattgggtactgtggaagacatggctgcggctgcggctttcctggcatctgacgacgcatcatacattacggctgaaaccattgttgttgctggaggggtgcagtctaggctgtaaatctggctgaagtttatatttacttggttaataatgtgtactagtgccctaggcgtggctaataatgtgtactagtgccgctagagcatcaggctaccttctatatatgacaggcaactctaaaagattttctatatcttattcctcttc

SEQ ID NO: 20222 - DNA, 1279 bp, Zea mays
  Clone ID: LIB3180-005-D11_FLI
cttgtttaccattcctccccaaaacacatcctgcgatcctcgaagcctccgccgagcatcgatcatgtcggcctactgcggcaagtacgcggatgagctcatcaagaatgctgcctacatcggcacccctggcaagggtatccttgctgctgatgagtcaactggcaccattggcaagcgcctttccagcatcaatgtcgagaacgtggaggagaaccggcgggctctccgtgagctcctgttctgctgccctggtgccctccagtacatcagcggtgtgatcctcttcgaggagaccctctaccagaagaccaaggatggcaagccttttgtcgatgtcctcaaggagggaggcgtcctccctggcatcaaggtcgacaagggcaccattgaggttgttggcaccgacaaggagaccaccacccagggccacgatgacctcggcaagcgctgcgctaagtactacgaggccggtgcccgctttgccaagtggcgtgctgttctcaagattggccccaacgagccgtcacagcttgccattgacctgaatgctcagggtctggctcgctacgccatcatctgccaggagaacggtctggtgccaattgttgagcctgagatccttgttgatggccctcatgacattgatcgctgcgcttacgtcactgagacagtccttgctgcctgctacaaggctctcaacgagcaccatgtcctcctggagggtaccctcctgaagcccaacatggtgactcctggctccgactctaagaaggtgacacctgaggtgatcgcccagtacaccgtccgtaccctccagaggaccgtccctgctgctgtgcctgctgttgtcttcctctccggtggacagagcgaggaggaggccaccctgaatctcaatgccatgaacaagctcagcaccaagaagccatgggccctgtccttctccttcggccgtgccctccaggcgagcaccctcaaggcctgggctggcaaggtggagaacgtggagaaggctagagcggccttcctcgccaggtgcaaggccaactccgaggctaccctcggcacctacaagggtgatgctgccgccgacaccgagagccttcacgtcaaggactacaagtactgagttgcttctctttgcgatcccgttgttttggaactcctgcctgcgagtaggttgctgagtgttgtttgcttgttagagcttttatattcggacatgaaaaaaacatgcttcctatgtggatgatggttatctttatattcgtatatt

SEQ ID NO: 20223 - DNA, 2292 bp, Zea mays
  Clone ID: LIB3180-005-D6_FLI
cccgcttccgctgttgctttcgtcgccatctcgctccggtccccgccgctgctccaagtgggagccaagtcatctctctggccgaagatccaggttgagtcggcgtcgccggcagaggcaagagactccggcgcgatgtcgttggactcggaggcttcctcgcagggtggggactaccgtagcttccgccagatcacgcgagatcgtttattatttgaaatgctcagatcaactaggaagaattcgaaatcaacatggaaggttcttatcatggataagtttacagtcaagattatgtcatatgcatgtaagatggcagatattacagaagaaggtgtttcattggtcgaagatttatataaacggaggcaaccattgccttcactggatgccatatatttcatccaaccaactaaagagaacattgtcatgttcctatccgacatgtcaggaagaagccctttgtacaagaaggcatatgtgtttttcagttctcccgtacataaagaattagttgctcaaataaaaaaggattcaagtgtactacctcgtattgccgcacttagtgagatgaatttggagtactttgctattgattcccagggtttcataactgaccatgagagggcattggaagaactttttagtgaaaatgcagaaggatctcacaagtataatgcttgtctgaacacaatggctactcgtatatccacagtatttgcatcaatgagggaattccctcgtgtacactaccgtattgccaagacgattgatgcttctacaatgacaacactacgagacttagtccccacaaagcttgctgccagtgtatggaattgtcttgcgaaatataaaacgacaatacctgaatttcctcaaacagaaacttgtgagctacttatagtagaccgttcaatagatcagattgcaccaattattcatgaatggacttatgatgctatgtgtcatgatctgctttgtatggatggcaacaagtatgttcatgaggttccaactaaaaatgggtcggcaactgaaaaaaaggaggtcctgttggaggatcatgaccctgtctggcttgagcttaggcatgcacatatagcagatgcaagtgagaggctacatgataagatgaccaacttcatttcaaagaacaaagctgcacaattgcatcaagcacgaaccgatggagaattatcgacaagagatttacaaaaaatggttcaggctcttccacagtacagtgatcaaattgataagctttccctgcatgttgagattgcaggaaaactcaataacataataagggaacaatgtcttcgggatgttggacagctagagcaagatcttgtgtttggcgatgctggaaccaaagaactaatcaactttttgagaacacaattggttgtaagtcgtgaaaataaattacgcttgctgatgatttatgcagcacttaacccagagaagtttgaaagcgacaagggtgcaaaattaatgcagttggcaggattatctgctgatgacatgattgctgtaaataatatgcgttgcttatgtgggcctgataccaaaaagtcttcagtagggggttttacactgaaatttgatgttcacaagaagaaacacacaaatcgaaaagagcgaacaggggaagaatcaacatgggcactctctcgattttaccctattttggagcaattgattgaaaatcttagcaaaggtgagctgccaaaagatgaatataactgtatgaatgaccctagtcctactgttcatggactgccaaccagtagctctgcccgaacaagccccgctcactcaatgcgatccagacgaacaggtggcacatgggcaagacctcgtggctctgatgatggatattcaagtgattctgtgttgaagcatgcctccagtgacttcaggaaacttggtcagcgtatatttgtttttgtaataggcggtgctactcgatcagagttacgtgctgcacacaagctttcatccaagctgaagcgagacatcatccttggttcatctagccttgatgatcctccccagttcatcacaaaattaaagttgatgtcagtagaagaattgacacttgatgaccttcagctgtaaatggtgtccgcccacacggagtgtaaccttttattttctctgttctgtcagctcttatttgtgggggcctgtcatattcattcggtgaaatgcattcttaataccacttttactggtgaatgtaagaaaaaaaactgttatgcaattaatcttttcatgcaattattgtgc

SEQ ID NO: 20224 - DNA, 972 bp, Zea mays
  Clone ID: LIB3180-005-F6_FLI
gctgctctccgaccccgagctccgaaggccgcagcatcaggcgaggcccccctcgcgtgtgaccgagatggcgctgccgaatcaggggaccgttgattaccccagcttcaagctcgtcatcgtcggcgatggtggaactggtaaaactacatttgtgaagaggcatctcactggagagtttgagaagaaatatgaaccaaccattggtgtggaagttcatccgttggatttcaccactaactgtggtaagatcaggttctactgctgggataccgcagggcaagagaagtttggtggcctcagggatggatactatatccatggccagtgtgcgatcatcatgtttgatgtaacctcaaggcttacttacaagaatgttcctacgtggcatagggatctgtgcagggtctgtgaaaacatccccattgtcctctgcggtaataaggttgatgtgaagaacaggcaggtcaaagccaagcaggttactttccacaggaagaagaatctgcagtactatgaaatttctgccaagagcaactacaactttgagaaacctttcctgtaccttgcaaggaagctggctggtgatccgaaccttcactttgttgaagctgttgctcttaagcctccggaagttaccatcgacatggctatgcagcagcagcatgaagccgagcttgctgcagcagctgcacaacctcttcctgatgacgatgatgatctgattgagtagaaaggatcatgagtcttggacttgagcaggagttgtgccttgcacgatttaagttgttctagggtggactctctcttgagttatcattgtctggatcatctttttctccttggacttgttgcaacttttgagtgtggaaatggattggaatagtcgccatgaatttgctggctactttatacatgtctttgttcataaaccttgttttaagatgaagttgtggcaatcctcttagtgct

SEQ ID NO: 20225 - DNA, 1833 bp, Zea mays
  Clone ID: LIB3180-005-G1_FLI
ccttgccgctgccgccgcagatggaagtctgcgacgaactgcggtcgtttgaagccacaggcgtctaccgcctcgatggcacctgcagcggcgccggagccacttacctcgacccggtccgcctcctcaacgcgtcctaccagcgtttccgcatcgtcccttctgcgtactactcccgaagcttcggcccccagcatcaggaaggcgagccagagatcgagcggcccgagaaaaggaggaaacgcaagcgtaatcagaagccgaagcccagggagctcaatccaatggagcggatcgctgaagcccggcaccaggaagcgaagcctttactattgaacgcacatgaatcactcgttaaggctaaacatctactggagtacatttccaagacaatcaaaggcaatgaacacacacttgatgcgggtagtggttctgagaataatttcgttgagcttgggacctcatggcgggcacctttctatgagatcactctttgcttccagaaaccccatgtcctgggcaatgaggaaggtttctttcatgcccaaaagacatcatttcctctatttaatagcataatcagtgttgaagggactgacgaagctgaaggagaattccgtaataggcgttatattttaccaagaggaagttgcttcttgatggctgacttcaaacgagttagagatctcattccttgtagtccaaatcaagggtataatcttatagttgttgacccgccatgggagaatggatgtgttcggcagaaagaagtgtatcctacactgcccaacaaaaatttcttgtatcttccagtgcaacaactcgcccgtccaactggagcgcttcttgttttgtggattacaaatagggagaaactgcgggcatttgttgagaaaaaactgcttccttcttggggagtggaagattccaccgtgttttattggcttaaggtgaaacctgatggctctctaattggtgatttagacttgttccatcacaggccctatgagtgcttcctccttggctacataaatggtaatgcaaatgctaagcaagggtcaaatttcaagttgttagaaagaagccaagtaatcatgagtgtccccggtgctcactcaaggaaacctccccttgagcaattactttcagaatatattccaggtcctaaaccttcaagatgcatcgagctttttgccagagagttgtttcccagatggacctcttggggaaatgagccgcttcatttccaggataccatgtacttctcggagaaatagttcgatagccaagagcaggatataagtatgtggattctgatgcaactgccacctaaggcaagtggttttgcaatagcattgtaccttgtgtttttcggcctttcttcaggtgatgaaaacgccccatctccagacgagtttgccgtctgctattgctgagtgctgacctactgtgtggcctctcgcttcccagcacttgattggtatcaagtcctttttttggccaaaagctggaggtttggcgaatcctatttatagggtgacctgtggggcagacatctcatattatttcttgcactacgcagttccctgcattgcagtgttcagtgtgcttctgggaatctcagatcaagttgtaacgggcagtcagagagatggaaagaatttgtacacagctagattcgttgggctcatctgcatcctggttactttccctagaacaattcggaacgttcctgtaaagttagaacagaggtttccatttccctgagcggctgagcagaactggttcgaagacaatggatgcaggccgtatccagtgccgattcttttgctg

SEQ ID NO: 20226 - DNA, 1654 bp, Zea mays
  Clone ID: LIB3180-005-G2_FLI
cagagataggcgtcttcgtactcgcctacctccgcggctcaaacctttcccccttctcccaattcccgccgccgctccatcccgtaacgcgacaccatgagggagtgcatttcgatccacatcggccaggccggtatccaggtcggaaacgcgtgctgggagctgtactgccttgagcatggcattcaggctgacggtcagatgcccggtgacaagaccattgggggaggtgatgatgctttcaacaccttcttcagtgagactggtgctgggaagcacgtgccccgtgctgtttttgttgaccttgaacccactgtcatcgatgaggtgagaactggcacctaccgccagctcttccaccctgagcagctcatcagtgggaaggaggatgcagccaacaactttgcccgtggtcactacaccattggcaaggagattgttgacctgtgccttgatcgcatcaggaagcttgccgacaactgcactggtctccagggcttcctcgtcttcaacgctgttggtggaggaacgggctctggccttggttccctcctcctagagcgcctgtctgttgactacggcaagaaatccaagcttgggttcactgtgtacccttccccccaagtttctacttcggtagttgagccatacaacagtgtactgtccacccactccctcctcgagcacactgatgtggctatactgctggacaatgaggccatctacgacatctgccgccgatcccttgacattgagcgcccaacctacaccaacctcaacaggcttgtgtcccaggtcatctcatcccttactgcctccctgaggttcgatggtgctctgaacgtggatgttaacgagttccagaccaacctggtaccctacccgaggatccacttcatgctttcttcgtacgctccagtcatctctgctgagaaggcctaccacgagcagctctctgtggctgagatcaccaacagtgccttcgagccatcttccatgatggccaagtgcgacccacgccatggcaagtacatggcctgctgcctcatgtaccgtggtgatgtggtccccaaggatgtgaatgctgctgtggccaccatcaagaccaaacgcaccatccagttcgtggattggtgcccgactggcttcaagtgcggcatcaactaccagcctcctagcgttgtgcctggtggcgacctggccaaggtgcagcgtgccgtgtgcatgatctccaactccaccagtgttgtggaggtgttctcccgcatcgaccacaagttcgacctcatgtacgccaagcgtgccttcgtgcactggtacgtcggtgagggtatggaggaaggtgagttctctgaggcccgtgaggacctggcggcgctcgagaaggactacgaggaggtcggtgctgagttcgatgagggcgaggatggcgacgagggtgacgagtactagagaagtttgctgatgacgcagcatcaggccagtgtgctgcccttatcccgtgatctgccgagagttgctcctgctatcgtgttatgtgtgtctgttctgaagtattgtgtggtttacaacacctgatgttgtaagagttgttaattcccctgcattgctaccgggttattgagaataattatggctgtttacgttgttgctt

SEQ ID NO: 20227 - DNA, 664 bp, Zea mays
  Clone ID: LIB3180-005-H3_FLI
ttgacaacatcaattctttgatgtcagagttagtagtggagagagaagcgctgctgcgagcactgagaattgagtcatccaactgctccaagctgaaggagttgaataaggacctaacacaaaagctggagattcagacacagaggcttgaactattgacttctcaaaggatggctaacgagaatgccctggcaaaaccaattgacacacgctccatcaatgatgcaacaatgtatgcagatgaaggagatgaggttgttgaacgggtgcttggctggataatgaagctcttcccaggagggccaaagcggcgaaccagcaaacttctgtaatgaaaatagagctcctagtataccagatgtttctttcatttaaggcttgtttaggtgaaaggggttgttctaggagcactaccaagtgtttagttcaaatttgaactaaatgttgaggaatttgttccaaatccccagcatccgaacatgcctttatatatatatatatttttttttctttgcccggttttgctgatagcatggtgagaagctgtatattggagccattcaatgtaaccattatttatttttgacagaagataatgtaatttcctggagtatggtgcgggcggcagcctgttttggcaaggaaaagaatagtcgcaaagaat

SEQ ID NO: 20228 - DNA, 1581 bp, Zea mays
  Clone ID: LIB3180-007-A7_FLI
cgccccttcggggagcagttgttgtctgacagtgatttgagccgggcggacggattgatcccgggacgaggtgtctcagcttttgatcttgatcctgatcctgggaggcgttcctggtttattggtgggagcgaagaagccatgataccttccgtgaggctctctcctggtcctgcagccttctcaggctccagcctacgctcaaaattaccgtcaattccatccatctccagtctcaaaccctccaaatatgtggtctcctcgctgaaaccactctacctagcaccgctagatggtccgcgcactgccgagcttaagtctcggagacagccacttgagttccgttgttctgcttctgctgctgatgacaaggagtcaaagactcaggtggtgccagttcagtcggaaggcgcacagaggttgaagatctccatctatttcgccacctggtgggcgcttaatgtgatatttaacatttacaacaagaaggttctcaatgcattcccttacccctggctcacctccacactctccctcgcctgcggctctgctatgatgcttttctcatgggccaccggtcttgttgaggcccctaagaccgacctggacttctggaaagttcttttcccggttgctgtggcgcatacaattggccatgttgctgctacagtgagcatgtctaaggtggcagtgtcattcacacacataattaaaagcgcagaacctgcattcagtgttttggtgtcaaggttcttccttggggagacgtttccaattccagtatatctttctcttcttccaatcattggtggttgtgctctagctgctgtcacagagctgaactttaatatggttggatttatgggtgccatgatatccaaccttgcatttgttttccgcaacatcttctcgaagaggggcatgaaggggaagtccgtcagtggcatgaattactacgcttgcctgtcaattatgtccctggtcatactgactccatttgctatagctatggaaggccctcaaatgtgggctgctggttggcaaaaggctcttgcagaagttggacccaatgttgtctggtggattgctgcacagagcgtgttctaccacttatataaccaggtgtcctacatgtctctcgatcagatttctccattgacattcagcattggcaatacaatgaagcgtatatcagtgattgtttcatcaatcattatcttccacactcctgtccgcgctgtcaatgcactgggagctgccattgccatccttggcacattcctgtactctcaggcaaaggtgtgaggcgggccatgatgacgaacgtctgcagaatcagtagcaagcactaaatccaattttgcttgttccagtggcatgtagatatcgggttaggtttccgtatgagagtttgtaataatggatgaatggctctgctgtttcgttcttgtttgttggccagactcaaatccataggctatgaactgcggtcgagtgtacctgaataatactgtaatggagaattcgccgatgctgtttctttatgggtatatatatagtccaagccggaatcccgttttc

SEQ ID NO: 20229 - DNA, 1136 bp, Zea mays; identical to SEQ ID NO: 19576
  Clone ID: LIB3180-007-D11_FLI

SEQ ID NO: 20230 - DNA, 1005 bp, Zea mays
  Clone ID: LIB3180-007-H5_FLI
tctagaagcgcccctctccctctctctctctctcttcgccgtccgaagctccgcaccccaatctaatcgacacctcgccgagatgggccgcaagttcttcgtcggtggcaactggaaatgcaatggaaccacagatcaggtcgagaagattgtcaaaaccctgaatgaaggacaggttcccccttcagatgttgtggaggtcgttgtcagccctccttatgtcttccttcctgtggtcaagagccagctgcgccaagagttccatgttgcggctcagaactgctgggttaagaagggaggtgctttcaccggtgaagtcagtgctgagatgctcgtcaaccttggtgttccctgggtcattcttggacactctgaaaggagagctctgctgggagaatcaaatgaatttgttggagacaaggttgcgtatgccctgtctcagggactaaaggtcattgcatgtgttggtgagacacttgagcagagggaggctgggtctaccatggaggttgttgctgcacaaacaaaagcaattgctgagaagatcaaggactggagcaacgtagttgttgcctatgaaccagtttgggctattggaactggtaaagttgccaccccagctcaggctcaggaagtgcacgcctccctgagggattggctaaagaccaacgtcagccctgaggttgctgaatctactaggatcatttacggaggctctgtaactgccgcgaactgcaaagagctagcagcacagcctgatgtcgatgggtttcttgtcggtggagcttctttgaagcctgagttcatcgacatcatcaacgcggccaccgtgaagtccgcttaagatgttacgctgaagacgaacatactttttttttgctcaactgtgctatgtaagctagtagcttttgcgcaggagcagagactgttttgcctgcccccaacttttagcttgagcttgctaataatgtttacctctggacgtatcaataatggtgcttatgt

SEQ ID NO: 20231 - DNA, 2221 bp, Zea mays
  Clone ID: LIB3180-008-G4_FLI
gcaaatcccacttccccaggccccagctccagctcgcctatccccctcaccagcgccgcaggaagatcgcgctgcgcccgccgtctcacgaggaggcatcgatcggcgcggtggcatttaggaggaggaaggggaggctgtaccttgttgacagggtcttagttaggcggggagcggcgagatgagcatgtacgggagggacccctggggcgggccgctggagatatgccacgactcggccacggacgacgaccgcagccggaacctggacatcgaccggggcgcgctgtcgcggacgctcgacgagacgcagcagagctggctgctggcggggcccggggaccagggccgcaagaagaagaagtacgtcgacatcggctgcctcgtcgtcagccgcaagctcttcgtctggacgctcggggtgctcctcgccgccgccgtgttcgcgggggtcgtggccgggatcgccaaggccatccccaggcgccaccgcccgccgccgccgcccgacgactacaccgtcgcgctgcacaaggcgctcatgttcttcaatgcccagagatctgggaagcttccgaagcacaacaatataccatggcgtggtaactcttgcatgaaggacggactttctgatcctgcagttcggcgaagcctggtcggcgggtactatgatgctggcgacgctgtcaaattcaatttcccagctgccttctccatgaccctcctcagctggagcgtcattgagtacagtgctaagtacgatgctgctggggaacttggccatgtccgtgacattatcaagtggggttcagattacttcttgaagacctttaattccacagccgatagcattgatcgtgtcattgcgcaggtgggaagtactgcaacatcgcctggctcaaggcagcccaatgatcgttattgttggatgaggccagaggacattgactacccacgtccagtggttgagtgccatgcttgttcagatcttgctgcagaaatggctgcggcattagctgcagcgtcgattgtattcaaggacaataaggcttactcacagaagcttgtacatggtgcaaccactcttttccagtttgcaagagaacgacgtgggaggtacagtgcaggtggctcagatgctgcaaagttctacaattcaaccagttactgggatgagtttgtgtggggtagttcatggatgtaccttgcaactggcaattcgtcatacttgactctagccacacaccctaaacttgcaaagcatgctggcgctttctggggtggaccagattatggtgtgttcagctgggataataagctcactggtgcacaggttcttctaagccggttgaggcttttcttgagtcctggatatccatatgaagagaccttgagtacattccacaaccaaactagcattatcatgtgttcctaccttccaatatttagatctttcaacagaacaagaggtggtttgattcagttaaatcatgggaagccacagccccttcagtatgtggtcaacgctgcattccttgcttctgtgttcagtgactatcttgaggctgcggatactcctgggtggtattgtggcccacatttctactctatcgaggttctccgcagttttgcaaggactcagatcgagtacatcttagggaaaaatccattgaagatgagctatgtggttgggttcggaaaccattaccccaagcatgttcaccaccggggcgcctcgatccctaagaacggtgttcactatggatgcaaaggagggtggaagtggagggacaccaagaagccaaaccccaatatcatagtaggggccatggttgctggccccgatcgccatgacgggttcaaagatgtccgcaagaattataactacactgaagcaacgctggcgggcaatgctggtctagtcgcagcgttggtagctttgtcgggtgaaggccatggggtggacaagaacaccatgttctctgcagtgccacccatgttcccttcgcctccgccgccaccagccccatggaaaccgtaatgcctgtgggtgtctgattcttctgtatactgcgtatttagattagtgctcctctcgctataactagttaactactaccatcactatcttgcatatttaacaagatgtagcatcgatttttcttgtttctttcattgttgtatatttgccgtgcaatgtaaggattgattatgtttgtgt

SEQ ID NO: 20232 - DNA, 3718 bp, Zea mays
  Clone ID: LIB3180-008-H9_FLI
ctcctcgaaggcgaagcaaagctaccaacgcatacaagagtgagagcagggagcacgagcgctctgagtgagtggaagacgagaggagttcgagtcccccagggctagggtttcattcgccacccgcgccgcccttcccttccccagcatccgtccgccatggtgaggaagaaaagaactggccctggagagagttctggggaggcttctggagcgcctggtcatggctcctcacagcgtcctcaggcaacacaacagggtacccgtggtggagggcaacaccagggccgtggtggatatctgggccctggagtgctgccttcacagcacccaggtggtggcccacctgagtatcatcaaccgcttgactaccagggacgtggtggatatcagggccgtggtggaccaccttcacagcatcctggtggtgggacaccccctgggtctcaactgcgtggctaccaggggcacggtggataccagggccgtggcgggccaccttcacagtatcctggtggtgggacaccccctgggtctcaaccacgtgactaccacggacgtggtggtccacgtcccagagggggaatgccacagtcataccgtggcgggcatgtgggaggtagtgttataccaagtgttccttcaggtccatctaggccagttcccgagctgcaccaagccccagatgtccaacatcaagcccctgtggtggcaacaccatcttcgccaggagctggctcgtcctcgcagcctgggaaggctgaggtgagcactggacaagtccagcaacagttccagcaacttgcgattcgtaaccaaagcttagccagccaagctggtcagatggcaccagcgtcaagcaaatctgttaggttcccattgcgccctggcaagggtacgcatgggtccaggtgcattgtgaaggcaaatcatttctttgctgagctgcctaataaagaccttcaccaatacgatgtatcaataacacccgaggttacttcacgcggcgtcaatcgtgctgtcatggcagagctagtaaaactttacagacactcccatttggatgggcgtctgcctgcatacgatggaaggaagagtctttatacagctggagcgttgccatttgcttcgaagacattcgaaattactctgcaagatgaggaagacagtcttggtggaggccaaaggcgccagagggtatttcgggtgaccatcaaatttgctgctcgcgctgatctccaccatttggctatgtttcttgctgggaggcagccagatgcccctcaagaggctcttcaagtacttgacatcgtgctacgtgaaatgcctactgccaagtattgtcctgttggtagatcattttattctcccaagttagggagacctcagcaacttggtgaaggtttggaaacttggcgtggtttctaccaaagcataaggcccacacagatgggtctttctctgaatattgatatgtcctctactgcattttttgaggccctccctgtaattgattttgtttctcagcttcttaatagagatatctcagttagaccattgtctgattctgatcgcgtgaagattaaaaaagccctacgaggtgtgaaagtggaggtcacacaccgtggaaacatgcgtaggaaatatcggatatctggccttactccacaagcaacaagggagttatcattccctattgatgatcgtggtactgttaagactgtggtgcaatacttcctggagacttatggtttcagtattcagcacaccactttaccttgtttgcaagtgggcaatcagcaaagaccaaattatctgcctatggaggtctgtaagatagttgaggggcagcgctactcaaaacgacttaatgataaacagatcactgctctactgaaggtgacttgccaacgtccccaagcgcgtgagaaggacatcttggagactgtgtatcacaatgcctactccaaggatccttatgcccaggaatttggtataacgattgatgagcgtcttgcatcggttgaagctcgtgttctgcctcccccaaggctgaaataccatgatagtggcagagaaagggatgtattgccaaaagttggccagtggaacatgatgaataagaaaatggtcaatggtggtagagttagcagctgggcatgcattaacttctcacggaatgtgcaagatggtgctgccgggggtttctgtcatgaattggctttgatgtgccaagtatcaggaatggattttgtacttgaacctgtgctgtcaccttgctatgcaaggcctgaacttgttgaaagagcactaaagggacgctatcaagatgcgatgaacatactcgggcctcagggccgagaactcgacttgctgattgttatactgcctgacaataatggttctctttacggggatgtcaaaaggatctgtgagactaatcttggattggtctcccaatgctgtctgactaaacatgttttcaaggtgaacaagcagcagtatcttgcaaatgttgccctgaaaataaatgtgaaggttgggggaaggaatactgtgcttgttgatgctttggcaaggagaatcccccttgtcagtgacatagcgactattatctttggtgctgatgtgacccatccccatcctggggaagattctagtccttccattgcagctgtggttgcttctcaagactggcctgaggttacaaagtatgcaggattggtgagtgctcaagcccatcgtcaagaattgatacaggatcttttcaaggtatggcaagatcccgaaagggggactgtctctggtggcatgatcagggagcttctcatatctttctggagggcaactggacagaaaccaaagaggatcatattctacagggatggcgtcagtgagggacaattctaccaagttctgttgtatgaacttgatgccattagaaaggcctgtgcgtcattggagtctgactaccagcctccagttacttttgtcgtggtccagaagcgtcatcacaccaggttgtttgctaataatcacaatgataatcgtgctgtcgataaaagcgggaacatactgcctggcaccgtggtggactcgaagatctgccatccaactgagtttgatttctacctgtgcagccatgctggcattcagggaacaagccgccctgcccattaccatgttctgtgggatgagaacaactttacggctgatgggttgcaaactctcaccaacaacttgtgttacacgtatgctaggtgcacacgctcagtatcgattgttcctcctgcatactatgctcacctggcagccttccgagctcggttctacatggagccagatacgagtgacagtggatctatggcaagccgtggccctccaccaggggggcgcaacaccaaggctgccggtgttgggaatgttgctgtgaggccattacctgccctcaaggaaaacgtgaagcgggtcatgttctactgctaagactgatgctgttaaggcagagctaccttttattattacagtatatcgtgaagactagagtatttttttccacgtacttgatgatgctgagctaccttttattatgtcgtacgatatatatgcgtggtattgtatactggttacagtaactttagttgtgtgttccatcgtgctggtgggcaggtggtgttacgtgaaaaacattctcctctaaaattcatcaaatttggac

SEQ ID NO: 20233 - DNA, 1005 bp, Zea mays
  Clone ID: LIB3180-009-A4_FLI
cttcgttaccacgcgggtgctatcgaatcttgggtagtttttcttcgcttgcggcctctcgaatctgacccatttccacggttcgcgtgcgccgttgccgcggatctgcgtgcttgtggcatcgggttccgtggatctagttgcgcggagatggggctcacgttcacgaagctgttcaggcggctattcgccaagaaggagatgaggattctcatggtcggtctcgatgcagctggtaagaccactatcctctacaagctcaagctcggcgagatcgtcaccaccatccccaccattggatttaacgttgaaactgtcgagtacaagaacattagtttcactgtttgggatgtcggtggtcaggacaagatccggcccctgtggaggcactacttccagaacacccagggcctcatttttgttgtagacagcaacgacagagagcgtgttgttgaggccagagatgagctccaccggatgctgaatgaggacgagctccgtgatgctgtgcttttggtgtttgcaaacaagcaagatctgcctaatgccatgaacgctgctgaaatcaccgataagcttggcctgcactccctgcgccagcggcactggtacatccagagcacatgtgctacctctggtgagggtttgtatgaggggcttgactggctttcgaacaacatcgctaacaaggctcgaagcatctaggcaaggcttcaatcagtggaagcaaactgcctctaccattacagctatgaagtatatagtcgtgactgtgtcagacgtggtgtgttttgggaggataaaaggctcttttggtcgaggagctaggtatcagatgttttttatggtacctgtaattttccgtgcttctgttttggttttgtgcaaggtataccatgtctgactgtgctcgccactgtctgagtcgttgtactatcccggcctgtccgtttttttttttgtctagagatgctttcagttttgaactgctagaaagtcggtttt

SEQ ID NO: 20234 - DNA, 1463 bp, Zea mays
  Clone ID: LIB3180-009-B4_FLI
cttctcccgccgcccagcttctctcttctctcggcggcgccaccacggcgatcaagcgcgatacgggcgtaaccgaagaatcgacaatgggcggcgagaaggaaacctttgatacgtccgacctcaacgcctccctccccgcggccgctgcagccctcagcgccgaggaccgcgccggcctcgtcaatgcccttaaggataagctgcagagcctggcgggccagcacgccgatgtgttagagacgctgtcgcccaatgttaggaagcgggttgagtttttgagagagatccagagtcaacacgatgaaattgaggccaagttttttgaagaacgagctgcccttgaggcaaagtaccagaagctttatgaacctttatacacaaagaggtatggaattgtaaatggagaagtggaggtagatggtgtttgtgatgaaccggccagtgagaatactgttgagggaaaagaaccagacgctaaaggagttccagacttttggcttactgccatgaaaacaaacgaggttttgtctgaggagatacaagagcgcgatgaagccgctttgaaatatctaaaagatatcaagtggtctagaatcgaggatcctaagggtttcaagctggattttttctttgatacaaacccattcttcaagaattctgtcctgacaaaaacgtaccacatggttgatgaagatgacccaattttggagaaagctattggaactgaaatcgagtggtatcctgggaaaaacctaacacagaagattctaaaaaagaaacctaaaaaaggttcaaagaatacgaagcctatcactaaaaccgaggactgtgagagtttcttcaactttttcaatcccccgcaggtccctgaagatgatgatgacatcgatgaagacactgctgatgagctgcagagtcaaatggagcatgattatgacattgggaccaccataagggataagattatccctcatgcagtttcctggtttactggtgaggctgtgcaaggtgaggattttggtgagttgggcgatgatgatgaagatgatgatgatgaagacgatgacgaagatgatgaggatgaagaagaggatgatgatgaggaagaggatgatgaggaagaaagcaagccagcaaggaagtcaggatctggtcgcagacataaggcgccacagaaggtgtcgcagggaaatgcggaacaaccagcggagtgcaagcagcagtagaatggcctgttgatgttggttgatgcagtattttccattgagctgcctagaggttatgtgtgcgcaggccagatgttggtgttgatatctcaagtgtggtttttattagtaggcggtgagggtgttgtctggagcactttggtgctgcgttggtggatggatattggtttgcaacttgtctgctagtgtcttggggattcagctacgtgcaatcggatgatattatatggttgt

SEQ ID NO: 20235 - DNA, 801 bp, Zea mays
  Clone ID: LIB3180-009-C11_FLI
tcttctcagtgtctttggttttacagaacatgttcgaagcagccatcgagacatcattcctggtgctggagtactccatgagcgagctgatgaacaaccgccacgtcctggccaagctccagaaggaggtgaggacggcgacgcccgacggccgcatggtgatggaggaggacctgagccggatgccatacctgaaggccaccatcaaggagtccatgcgcatccacccgccggcgccgttcctcctgccgcacttctccacccacgactgcgagatcaacggctacaccatccccgccggcacgcgcgtcatcgtcaacgcgtgggcgctcgccagggacccgacgtgctgggacaaggccgaggagttcttcccggagcgcttcctggaacaaggccgcgacgccgaggtcgacatgtacggcaaggacatccggttcgtgccgttcggggcggggcgcaggatctgcgcgggggccacgttcgccatcgccaccgtcgagatcatgctcgcgaacctcatctaccatttcgactgggagatgcccgccgagatggagcgcaccggggccaaggtggacatgtccgatcagttcgggatgacgcttcgccggacgcagaaactttaccttgttcctagaattcccaaatgagtgtcgtcgtcgtcgtacaaatggcatgcatcttattgtaagttttggagtttgttgttgcacacgcaacgatggaccgcctgtgatatctttaataaatgtaaccgcagataataatgaaataaaaagaacgcatggctattgtatt

SEQ ID NO: 20236 - DNA, 1462 bp, Zea mays
  Clone ID: LIB3180-009-E10_FLI
gctgctcttcctggatctctgactgactgactgacctcagttgggggccgggggcaagagagagagagagagagccatggcggcggaccagcagccgcagctgcaggaggagatgaacgacgctgccggcggcggcctcaggctgcctccagggttccgcttccacccgagcgacttcgagattgtcagcttctacctcaccaacaaggtgctcaacacgcgcttcacctgcaccgccatcacggaggccgacctaaacaagattgagccatgggacctcccgagcaaggcgaagatgggcgagaaagagtggtacttcttctaccagaaggaccgcaagtacccgacggggctgagggcgaaccgggccaccgaggccggttactggaaggcgacgggcaaggacaaggaggtctacaacgccgcggaaggggtggcggtactggtcggcatgaagaagacgctcgtcttctacaggggcagggctcccaggggtgacaagacaaactgggtcatgcacgagtacaggctcgaaggcagcggcaggctccccgccggcctcgcgtccgcaaccggctcagccgccgccaacgccgcggcggccttgaaagcttctgcttataaggatgagtgggtggtatgtcgtgtgttccacaagaccactgggatcaagaagaccaccactgctgcaccggcgtaccaggtggccatggccggcgctgagatggatcagaatcagaacaacatccccttccccatgccgatgcaattttccatgctgcccgacttctccttggacccggtgcccccctactacccgtaccccaacgctggcgcggggatgccgatgcttcctatggcagcaggtataggtggtggcgccggtgggctccacctcaacggcgccgccctgttcggcaatccgatggccgcgccccagcccatgagcttctaccaccagatgggcacggggactgcttgcgctggcggcttcgatgtttctgcgccggagagtaggccgtcctcgatggtgtcgcagaaggacgaccaggctaatggcgctgagatctcgtcgatgatgtccgtggccggcccagggcctgcgaccaccaccaccatagagatggatggcgtgtggaagtactgaaaacgtggagggtcgagggcaaagacatgaattcgcataaattaaatatgcatgtaatatctatatctgcattgcattttgtgaaatatgatgcatgcatggtttgtatattccgtaataaccagtagttggtaagctatgtgtgtgtatggatgtactagctagtacatgcaccgtatcattgcatgtgtggtatatgtctcgtttggtgttagtaatctgcttggttgtgctgatgactgatggttgtaagaagcagattcgagtttggtacaatattatcgtgaacctatatattatatatatgttaattat

SEQ ID NO: 20237 - DNA, 1108 bp, Zea mays
  Clone ID: LIB3180-009-E4_FLI
gtttccacgctgcagcgtgcgtcggttaggttcttgggaggtgggggtgtctccgggattcgtcgtggcgtgcaccggcgtctgcccccacccgcgcctagccgcgaaggtgcgcgcttagacgaggagctgcggcggccaagaccaatcgaccatggctacccgtatccagtttgagaacaactgtgaaattggtgttttctccaagctgacaaatgcttactgtctggtagcgattggagggtcagagaacttctacagtgcctttgaggctgagcttgcagatgccatccctgtggtcaagacctctattggtggcactagaataataggccgactttgtgttggaaacaagaatggacttctattgccacatactacaaccgaccaagagcttcagcatctgaggaattgcttgcctgatcaagtggtggttcagcgcattgatgagaggttatctgcccttggcaattgcatagcctgcaatgaccatgttgcacttacgcaccctgaccttgacaaggagactgaggagttcattgcagatgtgcttggggtcgaggtgtttaggcagactattgctggaaatatccttgtggggagttactgcgccttctctaacaggggtggtttggttcatccccatacatccgttgaagaccttgacgagctctccacgctcctccaagttcctcttgtcgcaggaactgtgaacagaggaagcgaggtcattgctgcaggcatgacagtgaacgactggactgccttttgtggctcggacacgacagccaccgagctctcagtcatcgaaagcgtcttcaagctgagagaagggcagcccactgcgattgtggaggacatgaggaagtctctgatagacagttacgtgtaactggggggccagcagatgtgggtcagagtttgcctttgctaaaagatgtattgcaagctatagtcgaattatcagtagcacaacataaccctctgatatgttcgtggtttatccgtggtttctgaattgtagacttctgcgttgaagctcgtgctactgtttgttttccattgtttgttcacaccaacagctatatgcagatacatggcttctcag

SEQ ID NO: 20238 - DNA, 1130 bp, Zea mays
  Clone ID: LIB3180-010-A2_FLI
cgcacgagcacggcgtcatcgacaaccatcgacgattgctccatccccgccagccgccgaccagctgctacatcctgcaacacgaggacaagtgctgcatcctacagtccgttcgagatgccagaaattgattggaaccttgagaatacacagattgtttgtaagttgtttgtcgaacaagttggcaaagggaatcgaccaaacacttacctcaattcagttgggtacgctgaggtggagaaaggattcaaagataggacaggtattgatgttacaaagtcacaactcaagaataaatgggacaaattgaaagaagatttcaaggcatggaggaaacttaagttgcggcaaacaggaacggttggaaccgtgaaaagggcactattgatatggatgatgattggtggaaaagagctagagcggatataccaggatgtggaaagttcaggaagcttggccttcaaaatgaagatgagatggctaggtgctttggagacatcacaaatattggttgtgatcactggtctcctcgtgttgcaaatgattctattgcaactaatgttgagcaaccggacgttgtaccaatgtttgaaacacaggatgaggaattcattcctgcaactcaagataatgaagacaatgctagcactccatctccaggtagtgggaaaaggttggctaggccagttcaaggaaaaggaaagaaagctaagacaggaaatgcactcctcatccaagaagcagtctcaagcatggctagctcggccaatgaatttgttgccaagaaagatggaaaatattctattgatcaagtgatggaaattgttattgcttgtggtgctggctatgagacaaatgagcattacattgcttctgagttgtttgtgaagaaagagcagagggagatgtttatgacattacctactaatgagataaggttcaattggttgaggaggaaatataatgacaagcatgcaaaatagaagtggtcctcaatgactattatcacttgtatcccgtgtttttttattttccagttggtactgccaatgtaattttttgcttaaacttgagtttcggcatgtggaaccaatgtaattttgtcgttaatgcaaaactgaattggaacc

SEQ ID NO: 20239 - DNA, 787 bp, Zea mays
  Clone ID: LIB3180-010-A3_FLI
cgccgccacgtacgcaacagcaggcgctccagcagaacagcactcggagctcgcctgcccgacggcccaccatgatcatccccaagaagaaccgcaatgagatctgcaagtacctcttcaaggagggcgtgctgtatgccaagaaggactacaacctggcgaagcacccacagattgatgtgcccaacctccaggtgatcaagctcatgcagagcttcaagtccaaggagtatgtcagagagaccttctcctggcagtactactactggtacctcaccaacgatggcattgagcacctacgcaactacctgaacctcccgtctgagattgtgcctgccacgctcaagaagtctgccaggccactgggccgtccatttggctctggccctcctggtgaccgcccaaggggccctggtcgttttgaagacagaccaaggtttggagacagggatgagtaccgtggtggtcctcgtggtgcttccggtgactttggtggcgataagagtggagctcctgctgagttccagccatctttcaggagttctggcgcgaggtctggctttggccgtggtggtggcagcggctttggcgctggcccgacctcttcttccatggagtgaacagtgaagctgcccttagtttggacatgatgtttcccctcccgtgaggcgtttaattttgaaggacggttattatgtactagtaatgttttccggatcggctagtgctgacatgcaaaaaaaaatgttccatatttatacattggttccagtatagtagtctttgc

SEQ ID NO: 20240 - DNA, 884 bp, Zea mays
  Clone ID: LIB3180-010-D11_FLI
ggcggtttctttcgcaaacctcaacaccgaggcagggcttaaaaagcttgatgagtaccttctcactcgcagctacatcactggctaccaagcttccaaggatgacttggctgtctacacttcgttttcgtctgctccctcgtccaagtatatcaacgtagcaaggtggtttaatcacattgatgcgctcgtgaggctgagcggaattactgcagagggccaaggtgtgaaggttgaatcctcagcagttccttcagccccaactccagatgttgctgaagcacaggccccagctgctgaggaggaggacgatgatgatgttgacctttttggtgaggagaccgaagatgagaagaaggctgctgaagagcgtgctgcagctgccaaggcttctggcaagaagaaagaatctgggaagtcatcagttttacttgatgtgaagccatgggacgatgagactgacatggccaagcttgaggaagctgttaggagtgtccagatggaagggctgctctggggcgcatccaagcttgtcccagtcggatatggtatcaagaagctgcaaatcatgatgaccatagtcgacgatcttgtctctgtcgacactctcattgaggactatctgtgcgctgagccagttaacgagtacgtccagagctgcgacatcgttgccttcaacaagatctaggcgtgactttcgatcagtccttcccctggggtgctggcgatggtggtggctgggcaatgcaccagcctaatttttccatagctatatgtctgctttgtgtggccagtgatattgccgtgagtatttttggatcctattcgagtcgaatgtaccagtaccagagttaatttgctttaattcgaaacaccgttccggt

SEQ ID NO: 20241 - DNA, 2088 bp, Zea mays
  Clone ID: LIB3180-010-D3_FLI
gcgaagcaactctccgccgtctccgtttttctccacaccacccaaagctctctccgaccacagcctcgcccccagcgcctccttccgcagtcatgtaccgcgcggccgctagcctcgcctccaaggcgcggcaagccgggaacagcctcgccgcccgccaggttggaagcaggcttgcctggagcaggaactatgctgcgaaggacatcaagtttgctgttgaggcccgtgctctgatgttgaggggtgttgaggagttggcagatgccgtcaaagtgacaatgggacctaagggccgcaatgtggttattgagcaaagctttggtgcaccgaaagtcacaaaggatggtgtgactgtagcaaagagcattgaatttaaggatagagtaaagaatgttggtgcaagccttgtgaaacaggttgctaatgcaactaatgacactgctggcgatggtaccacatgtgccactgttttgacaaaagcaatatttactgaggggtgcaaatctgttgcggctggaatgaatgcgatggatttaaggcgcggaatctcaatggctgttgacgctgttgtgaccaatctgaaaggcatggccagaatgatcagcacttcagaagaaattgcacaggtgggtacaatatcagcaaatggggaaagggaaattggtgagcttattgccaaggctatggagaaggttggcaaagagggtgtcatcactattgcggacggtaacaccctttataatgagcttgaagttgtggagggtatgaaattagacagaggttacatctctccgtacttcattaccaactcaaaaacccagaaatgtgaattggaagacccattaatcttaattcatgacaagaaggttacgaacatgcatgctgtggttaaggttttagaaatggctctgaagaaacaaaagcctctactgattgttgcagaagatgtggaaagtgaagcattgggcactttgattattaacaagcttcgtgcaggcatcaaggtctgtgctgtcaaagctcctggttttggggaaaacaggaaggcaaacttacaggaccttgcaatccttactggaggagaggtaataactgaagaactaggaatgaaccttgagaattttgagcctcacatgctgggtacatgcaaaaaggtgaccgtctctaaggatgacactgttattcttgatggagccggagacaagaagtccattgaagagagggcagagcagattagatcagcaattgagaatagcacttcagattatgataaggaaaagctccaggagcggttggcaaagctctctggaggtgttgctgttctgaagattggaggagccagcgaagcagaagttggtgagaagaaggatagagtgacagatgcactgaatgctactaaagctgccgttgaagagggtattgtaccaggtggtggtgttgctcttctctatgcatcgaaggagcttgataaattgcagacagcgaacttcgatcagaagattggtgtgcaaatcattcagaatgctttgaagacacctgtacacacaattgcctccaatgctggggtggagggagcagtagttgtaggaaagcttttggagcaagaaaatactgacctgggttatgatgctgctaaaggtgaatatgttgacatggtgaagaccggtatcattgacccgctaaaggttatcagaactgctttggtggatgctgctagtgtgtcgtccctgatgacaaccacggaatccataattgtagagattcccaaggaagaggcaccggctccagcaatgggtggcggcatgggtggcatggattactaatgcatcacacccacatacacatcaatgcaggttttttttagcggtgaagttcatcttcactgtttagcggtgcaagttcatctctactgtattttgttcgatgatgaggtggttgtcaggcggatacagttttgagtctgcggacgtaggacctcacaatagttccaaacggaatagtgtgagaataataaatatgaacagtagttctttgagatatgatcttgtagatcaagattggcttccggtcattttgtgtcgaacc

SEQ ID NO: 20242 - DNA, 869 bp, Zea mays
  Clone ID: LIB3180-010-D4_FLI
cagaccattagctttatctactccagagcgcagaagaacccgatcgacaccatgagggtgttgctcgttgccctcgctctcctggctctcgctgcgagcgccacctccacgcatacaagcggcggctgcggctgccagccaccgccgccggttcatctaccgccgccggtgcatctgccacctccggttcacctgccacctccggtgcatctcccaccgccggtccacctgccgccgccggtccacctgccaccgccggtccatgtgccgccgccggttcatctgccgccgccaccatgccactaccctactcaaccgccccggcctcagcctcatccccagccacacccatgcccgtgccaacagccgcatccaagcccgtgccagctgcagggaacctgcggcgttggcagcaccccgatcctgggccagtgcgtcgagtttctgaggcatcagtgcagcccgacggcgacgccctactgctcgcctcagtgccagtcgttgcggcagcagtgttgccagcagctcaggcaggtggagccgcagcaccggtaccaggcgatcttcggcttggtcctccagtccatcctgcagcagcagccgcaaagcggccaggtcgcggggctgttggcggcgcagatagcgcagcaactgacggcgatgtgcggcctgcagcagccgactccatgcccctacgctgctgccggcggtgtcccccactgaagaaactatgtgctgtagtatagccgctggctagctagctagttgagtcatttagcggcgatgattgagtaataatgtgtcacgcatcaccatgggtggcagtgtcagtgtgagcaatgacctgaatgaacaattgaaatgaaaag

SEQ ID NO: 20243 - DNA, 782 bp, Zea mays
  Clone ID: LIB3180-010-E5_FLI
ctcctcgacccccgcccaacactcccagccgtcacgccgtcgccgccgcgagtccttcattcaccatgatcatctccaagaagaaccgccgcgagatctgcaagtacatcttccatgagggggttctatatgccaagaaggactacaacctggccaagcaccccaagcttgacgtgcccaacctggaggtgattaagctcatgcagagcttcaagtccaaggagtatgtcagggagaccttctcctggcagtactactactggtacctcaccaacgatggcattgagcacctccgcagcttcctcaacctgccgtcagaggttgtgcccaacaccctcaagaagtcctccaagcccccgtcccgtccctttggctctggcccaccgggtgaccgccccaggggtccccctcgctttggggaagacagacctaggtttggggatagggatggttacagaggaggtccacgaggtgcaatgggtgattttggtggtgagaagggtagtgctcctgcggatttccagccatcttttaggggtagcagacctggcttcggccgtggtggcggcagcgcttttggtgccagtggatcttccatggagtgatctatcaacttaagcgggaaaattgattcaggataggcacatgtttgttgatctttgaacttttgaggacaatgagattttggtttaccgagctgttgccgtggcttgacatggttttgtgatcctcctttttttgttacattaaattattaaagcagcaagtcatcattcgcatcg

SEQ ID NO: 20244 - DNA, 1580 bp, Zea mays
  Clone ID: LIB3180-011-A8_FLI
gccatcatgtcgcgcaggctataccaacacgcagcggtgatgtctgcttgggctccggctgcctatacgctcgtcttgctcctgtatcttctagcaggtgctgtcgtcactgctaagaccaacaatggtgttgatcctggtcctaggcagcaggagccctctatgcccgtggactccagcggtgacgaagccctctctgcgttgacctgcactgaaccttctcgcgctcggcagttggcagtcctgtcctgtggaccgtatgacgtgtttatttatgggcggcgccttcgtctccactccccaccgaaggaagcgagaagcccagaagggatggcaaccggtagtgaggcctcgaaggcagctgaggctgtggttgactggcataaacaggacagcaagaggatgctccatgcggtttaccgtgttggggatctggaccgtacaatcaagtactacacggaatgctttgggatgaaactgctgaggaaaagggatgttcctgatgagaagtacaccaacgccttccttggctttgggccagagaacaccaactttgcagttgaattgacatacaactatggcgttgacaagtatgatattggaacgggctttgggcatttcgcaattgctaatgatgatgtgtacaagttagctgagaatatcaaatccaagggtggcaagatcacccgcgaacctggtcctgtcaagggaggatccactgttattgccttcgcacaggatcctgatggctacatgtttgagcttatccagagggccgacacacctgagcctctttgccaggtcatgcttcgtgttggtgaccttgagcgttctatcaagttttatgagaaggccctagggatgaagctcctaaggaagaaggatgtacctgattacaagtataccattgccatgttgggctatgctgatgaggacaagacaactgttctggagctgacgtacaactatggagtcacagaatacagcaagggcaatgcatatgctcaggttgccattggcaccaatgatgtgtacaagagcgccgaggcggttgatctggccaccaaagaactaggtggcaagattttgcggcagccagggcctctacctgggatcaacactaagatcgcctcttttgttgatccagatggctggaaagtggttctggttgacaacaccgacttcctcaaggaactccactgaaggctcgggatacccaggtgctgtgctaggatgtagtaatgcttgtctgtggtgtaataagatgtgggtggtttgtttccgccctgatgaacttataatactgaatgttgctacagaggttgtgcttctgccaatgaggtttgggatttgctatgtaactgtgcctgcgggctccgattctggcgctgttcatacactgtagaagccagtgaatcccaataaacccagcttcacaggctcctcttatcccgtagaccctagttgtttttgggtggagctggagccactgacctgccgaagagggctcctatggtccttttttttttacccgtttcacctcatgcatccacattcaataggaggtagcagatttaccc

SEQ ID NO: 20245 - DNA, 1273 bp, Zea mays
  Clone ID: LIB3180-011-D7_FLI
cgtgctcatttatctgttgctgaaaggctgcttaaagagtttggttgttctatctgccgggcggtgattaaagagccacttacaacaccatgtgctcacaacttctgcaagacttgtttgcttggtgcatatgatagccagtcctctatgagggaaagaagccgtggtggtcggactctaagggcacagaagattgtgaagacgtgcccttcctgccctactgacatctgcgacttcttagaaaatccccagatcaaccgagaaatgatggagttgattgagtccttgcaacgcaaggctgttgaagaaggcaagatggctgcaggtgatgccgaggaatctggtgatggtgactcggaggaaaatggtggtgctttggtgaagggagaagatgatagcaatttgaacgaggaaggtcaagacggtgtagacgctgatggttctgtgaagattgtggttgaaatggagggtgcaaaagatgataaaaagtcaaagatgggcgcggctgaagtggtggatgtgttagttgaagatgctgctgcgaaacagccgaagaagcgcacggctgatgaagatgctgctgcgaaacagacgaagcacaaggctgatgctgagactggtggcaagagggtgaagagcagtgctgcagtggaagaggttgatgtgtgcgtcactcctatgaaacggaccaggaagagtggtgatatgcatgatgacggcaacggcagccctgctgtgagcagcggccgcagggtgactcggagcagtgtgaatgccacgggagctgatgacagtccagcgaggaggaccagaagccgtggcagagcatgctgaaggtagtgggtgctgggcgccctcttttttgggtgtggaacctttgctgtgcgcagtgttgcagccatttcttttggtttgggggagaccgacctgctacaggtattccccatgcttctttcttccaggatgcaattcctatttaatttcaaggtagctgctgcactcgatctgcgagatgcaattttgttaactggcagccaggtgttggcttacgccatgattttggcacaacaggttcctagagagaaacaagatagctgatgttcttgcaaaaaaaaaagcaagacgggcaactaccccaaatccatgccttttctctaggggcttcattctccaacctgtaatatctagcatgtgttttgaaacttggattgttcggggcaacatgaccccccatctttgtaacatgtttatgatgtaataaatcttgaatttg

SEQ ID NO: 20246 - DNA, 2321 bp, Zea mays
  Clone ID: LIB3180-011-E8_FLI
ttttcgctgcatttgtttagcgggagttcttcgaacaagcagcgctgccgctgcttgcgcgaatcttttgagtgaagctccccgtcacatcagtcctcttcttccccggtcgtcgtcctatgcttgtccctgtctcggcaattctgggatactaaagaggaatcggtgaaggtccggtcttcgattccccgagatttgcatctgaatcttcttcttcttctcttttgcctccatggagtctcttgctgcgtgccactccatcgagcgagtctagcgcgcgcgacacagtagcagcagcaaagtccggtcggagaagcggaagttcgcgttgctttgctgatccaatgggggagaccaacgagctaccgccgccacccgtggccgcgccgccgcccatgatgccgatgcagtccatgatggtcggcgcaggcgccatccacccgccccacgagcagttccaccatctcaactactgcgtccactcaaatccatcctgggttcaggtggcagcacttgcattccttcactatcttgtgatgttgggttctaccgtcatgcttgcaacagctattgttcctgcgatgggtggtaacgctggtgacaaggctcgagttattcaatcgttcctctttatgagtggcataaacacactgctgcaaacacttattggaacgagacttccaacagttatgaatgcctcttttgcatttgttgtcccagtgctgtcaatagcaaaagagattgaatcaaataacttcctgaatgatcatgagagatttaaacacacaatgagaacagcacaaggagctctgattgtggcatccatcctcaacatgattcttgggttcagcacgatatggggggcatatgccaaaaagttcagtccggtgataatgacccctgttgtttgtgttgttggtcttggactattccaacttggctttccccaggttgggaaatgtgtggagattgggcttccaatgctaattcttgcggtggttgtgcaacagtatgtgccaaattacttcagttatatccatcaacgggtcaccttcttgtttgagaggtattcgttgcttctttgtatcggcatcgtgtgggcctttgcagctatccttactgctgcgggtgcatatgaccatgcttcacctaagacacaacagcactgccgcactgataagtctttcctcatgtcatcggcaccatggattaaaattccattaccattcgaatggggtcctccaatcttcactgctggtcattcatttggaatgatgggtgctgtacttgttgcagccttcgagtcaactggagcacactttgctactgctcgtctagcgggtgctacaccacctccagcttatgtccttagtcggagcgttggcttgcagggtattggaatgttcttggaggggatctttagtgttccagcaggttcatctgtatcagttgaaaacattggcctccttgggctgacaaaagttggaagtaggagggtgatccagatatcaactgggtttatgatattcttctccatatttgggaaatttggggccttctttgcatcgatcccactgccgatctttgcagcaatttactgcatcttgttcggcattgtagctgctgtgggagtctcgttcatgcagtttgccaacaagaactcgatgaggaacatctatatcatcggactctcgttgttccttggcatctcggtccctcaatacttcaacggatacacttcttcagctggcggccacggacctgcccggacaaatgctggatggttcaacgacattataaacaccgtgtttgcttccgggccgacggtggcgctaattgtcgcttctgtcctggacaacacgctggagttcaggggctacgaggccgaccgggggctctcgtggttccagccgttcctgcgccgccataagggatactcggaccccagaaacgaggagttctacagcttcccaatcagcgtctatgacgtcatcccagaccgatttcggcgctgactccaaatgaccgctgttaccccgcagctgtgcatgtaaatccccgtgagtcttgttagtcttactcctgtgacttgtagcggctggttctagggggatatgggtaaaagaatgcttagggcaattgcttggtttgactcttttcgggataagaaacgggttacatgataatgtagagctctgtgccggatacattggttttgggaagggttacagaagaatactagcaccttacatgttgatgggcatttagttgaaggcattggctatttgtttttttgcccaatatatggctgttggagcttg

SEQ ID NO: 20247 - DNA, 1176 bp, Zea mays
  Clone ID: LIB3180-011-F4_FLI
ggcaagggcagaaaaagacaagaaccatggggttgttcttattcctgagggtcttgtggagagtattcctgaactatatgctctgcttcaggaaatccatggcctccatggcaaaggtgtttctgttgagaatatctcttctcagctttcaccctgggcatctgcactctttgagtttttgcccccttttatcaggaagcagctacttctccatcctgaatctgatgattcagctcaactttctcagattgagacagagaagcttctagcccagttagttgagactgagatgaacagacgtttgaaggagggcacttacaaaggaaagaagtttaatgcaatctgtcacttctttggctaccaagctaggggagcactgccttccaagtttgactgcgattatgcctatgtcttggggcatgtgtgctaccacatcatagctgccggtttgaacggttacatggccacagtgacaaatgttaagagtccagtgaacaagtggcgatgtggtgcggctcctatttcgtctatgatgactgtgcagcgatggtcgcgtggcccttcagccacccaaatcggaaagcctgctgttcacatggctagcgttgacttgaaaggaaaagcatacgatgtattgaggcagaattcttccaggtttttgttggaagatgtctacaggaacccaggtccgctccagtttgaaggaccaggtgccgattcaaagcctatctcactgtgcgtcgaggatcaagactacatgggcaggataaagaaattgcaggaatacctggagaaggtgaagagcattgtgaagcctgggtgctcgcaggatgtccttaaggcggcgctgagcgccatgtcttctgtgacggagacactgaacatcatgacctcatcgtccaccggccagactgcactgtgactcgtttggtgccgttttgtggtgcggatcagaatccccactttttccatggtgtcgattgacaaagttaggagcagtaatcctggtgccacacgggtcattcttttgtagcttcttgggagagttctgtcagttttgaattcgatagtttattatggagaggcttgttggtgagtttgagctcgaataatttttgaaacagacggattgcggaatcttaataaaccaaaatttgtgactgcattcacatttca

SEQ ID NO: 20248 - DNA, 714 bp, Zea mays
  Clone ID: LIB3180-011-F7_FLI
ggtatcagcaacactggcgctggacgaagtgtgccaaccaccaacagtgcctacaccaccaatttgagtggtccaaggtatggcgagtctgcaaaccagctcgcgcagcaggaaagcacgtacaccggggtgaccactccagtgtcggcggcacggaatgtgcagcagacctgcgtgtcttgcgggtcaagtgggcacaacgtgcagaactgccctgcaggaacgtacaggcagcaggcggctgcaagcgcagcaagctcctacggttcttcgcagcctcgcaatggactgtgcttcaaatgcaatcagcctggacactttgccaactcttgtccactactggcttctgctccccagcagcagcagcagcagtatcggagcggcggggctccctcaggcggttatggtaggcagcagccctatgttggggctaccaactactgaaagtcattatctctgtcgagtcaggcgtgatgttggttttgcttagatgcctgtcctgaatggcatcgctgcgtccatgtgaagtagatgcaaaccattcctttttatgtttgtgtgtgaagttagaactatgtatcagtacttctttatgttttcgtcttataaatcctcgttgctgtgtcagttctgttgaattcgtttcgtggtttgtctccctgaataactcactgtatggtgggtgtaaattaaatggaaatcacttatcaggag

SEQ ID NO: 20249 - DNA, 1725 bp, Zea mays
  Clone ID: LIB3180-011-H6_FLI
ttcactgccaagagagtgagcgagcgagcagaggcagcgcagcaatggcggcggcaatagtactctccggccaggtgcggccgcttccctcgtcgctgcccctgtccctgctgctgctcctcctcctgtgctgctccggcacctcgtggggatggagcacgtcccggggaggagccgccagggagtgcggcttcgatggcaagctggaggccctggagccgcgccacaaggtgcagtctgaggccggctccgtccagtacttcagccggttcaacgaagccgaccgggagctcacctgcgccggcatcttcgccgtccgcgtcgtcgtcgacgccatgggcctcctgctccctcgatactccaacgtccattcgcttgtctacatcgtccaagggagagggatcattgggttctcgtttccgggatgccaagaggagacccagcagcagcagtatggatacggatatggatatggacaccatcaccatcagcatgaccaccacaagatccaccgattcgagcagggcgacgtggtggccatgccggccggcgcccagcactggctgtacaacgacggcgacgcgccgcttgtggcggtctacgtcttcgacgagaacaacaacatcaaccagctcgagccttccatgaggaaattcttgctggctgggggcttcagcaaggggcagccccacttcgccgagaacatcttcaaagggatcgacgcccggttcctgagcgaagccctgggcgtcagcatgcacgtcgccgagaagctgcagagccggcgtgaccagcgaggcgagatcgtccgcgtggagccggagcacggctttcaccagctgaatccgtcgccgtcgtcgtcgtcgttttcgttcccatcgtcacaagtccagtaccaaacgtgccagcgcgacgtcgacaggcacaacgtctgcgccatggaggtgaggcacagcgtcgaacggctggaccaggccgacgtctacagccctggggctgggaggatcacacgcctcaccagccacaagttccccgtcctcaacctcgtacagatgagcgcggtgcgggtagacctgtaccaggacgccatcatgtcgccgttctggaacttcaacgcccacagcgccatgtacggcatcaggggcagtgcaagggtccaggtcgccagcgacaacgggaccacggtgttcgacgacgtgctccgtgcggggcagctgctcatcgtaccccagggctacctcgtcgccaccaaggcgcagggagaaggcttccagtacatcgccttcgagacgaaccctgacaccatggtcagccacgtcgccgggaagaactccgtcctgagcgacttgccggccgccgtcatcgccagctcgtatgccatctccatggaggaagctgcagagctcaagaacggtaggaagcatgagctggctgtgcttactcctgctggcagtggcagctaccaacaaggtcaagctggcagcgcccaacagtaggcacaacctcagagtgatctgcctgaataagtactcgtagactgtaataattaaacaaagcttgctcatggttaaactgcgtgttgattagtctttcaactacatagctctaaagtttttgatacaccgagtgatttgccaggaaaaaaaatgagcagattgttgtaagcaaaacatgtttgttatggctaaactgcatgtctacctggatttgtattttttttcaact

SEQ ID NO: 20250 - DNA, 2351 bp, Zea mays
  Clone ID: LIB3180-011-H7_FLI
cgcagaactccgcgccggcggcgccgccgggggccgtggggcagcaggcggtggcgctgcggctgtccggcgacaagaccatgctgtacaggtgtaggatcctggggacgcaggacacgctgttcgacaacatcggccgccacttcctctacaactgcgacatccagggctccatcgacttcattttcgggaacgcgaggtccctgtaccaggtacgcaaataacgtagcagaaatgaattctataattttcttttcttttttttctttttacaactgacgtgtaagagcatctccgaggagactcctcatttttttctttttatttaactatttatttaacttttcataaaaattacactctattagggtgtttggttcgatgaatgagctagtccatcatcttctcaatcctcattttttttatttagtttatggaatggaatgagttgatacatcaccatctcattcctcatagttagttagttagtattaatatgaggaattggatcattccaccaaatttgaagaatgaactcatgatgcatcacctaattttggatgtagtgatttctcaaaccaaacacaccgtatatgtaccatttcactcgaacagactatatatctagtatggctagtcagatgactagtcaaatttggctagtgagagagctaatttatagtcggataatttggcgagttagataactagtcgagctattttgatgttgagtagataaaatttggtttgacgagccatttggctagtctcttgaagagaagatgctctaagcatttcgattttttttaccgcttacacaatatctctgatattctgaccacaccactgtcctgttttgaccacactgctggttttatggtgaggtcattagcttcccatctccatgccttgcagttatcccaactcccatccctttgatgggtgctgccgggttgctatcagaaaaatcacaattcaggcactcgccaaccgtgtccgtgcctgccatttcatagccgccttgcagcaagaaatgctcataacagcttttcatctctcactttctatgtgtctagcgcacacatgctagcacctaggttacctagccagccagccagctcagtggaaccaggccgttatgcacttagcccctgcacgacgcttgaaagcactcctacacaaatccatgcatgcatgctcgaaacgctatcatatccagtggtcacgtccctttcgtgcccttgcacacgtactactcgacccgaagcaaacttccgttccgtggcaacgagggcgatggatggatcgtcgccgattcgacggcgactgccgccgcgccgctgcccctcgctggttctggcttctgacgaacgttgcaactaacggtgaccgcgcgcgcgcgcgcaggggtgcacgctgcacgcggtggcgacgagctacggcgcgatcgcggcgtcgcagcggagctcggcggaggaggactccgggttctcgttcgtggggtgcaggctcaccggctccggcatgctgtacctgggcagggcgtggggccgctacgcccgggtggtctactcctactgcgacctcggcggcatcgtcgtgccccagggctggagcgactggggcgaccagtcaagaacaaagtgagcaacgctctgccttcttccctgctactgtagctgtagctgtagatgtagatgcaattacagttactgaactggctttttctgttaaccctttgtgctgacgatgacgacgatcatcagatgattcagattgtaggaagtaggtaggcggttgcctagcaggacaggctcaccaaacggtctttacagggaaatgcaacgcaggcagttagttaccacatgtgactcgcctgcttgttacccgtcagagagtgacatttccgggctcttttttttttttttttttggacaggacggtgctgttcggggagtacagctgcaagggcccaggggcgagcacgaggaaccgggtgccttggtcccgctcgctcacctacgacgaggcgcggccgttcctcggcccgagcttcatcaacggcgagcagtggctcaggctgtagatccgatccgtcctcccggctgccgagctgagcttcgtcgacggcgagctatggtccctccgtccgagctgtgtgtaggtcatgcgacttctctggtcttcttcggtgcatatagcgtgacaagcaagcagctagtcagactgtagacatgtacgctgtaccatatactactagtaccatgtacaaacctgatacccatatgtgtagtgagatactgagatggccatgtccatcattcatggcaagatacatagtagtttgcatg

SEQ ID NO: 20251 - DNA, 1706 bp, Zea mays
  Clone ID: LIB3180-012-A11_FLI
caaacatgccctcaagcttatgcccacgcgagtgagaagtgagaatctcctaggaaagagaaacaacgaagactcgaaacgagtacaccaacctttctttctctcctctcgcttctgcggcgaattttcttgtcccgtgccggccgccgtgtctaccctgcgccaccgcccctaccaacgcctgccgtgaagacaaaaggtcttggttaagtttgaagatgtcgtgcttggcatgctgtggcggcgaagatactcaaagaacacctgataatggaggtccataccctggtggctacccaccaagggatgatgcttatcgcacagctgatccaactccgaggggtgctcaacctttgaaaatgcagccaatcactgtccccactattcctgtagaagaaattagggaggtcacagtggcttttggtgatgaagctttgattggtgaggggtcttttggcagagtatattttggtgtactaaaaaatggtaggagtgcagcgataaaaaagttagattcaagcaagcagccagagcaagagtttttggcacaggtatccatggtgtcaaggcttaagcatggcaatgtcgtagagttgcttggttactgtgttgatggaaacacccgcatccttgcatatgaatttgctactatgggttctcttcacgatatgcttcatggacgcaaaggtgtgaaaggagctcagcctggtccagtcctgtcctggacacaacgagtgaagattgctgttggagcagcaaaaggccttgagtatcttcatgagaaagcgcagcctcatattatacacagggacatcaagtccagtaatgttcttctatttgatgacgacgtatctaaaatagctgattttgatttgtcaaaccaagctccggatatggcagctcgacttcattcgaccagagttcttggaacatttggctatcatgcacctgagtatgcaatgactggacaacttagctctaagagtgacgtttacagttttggagttgttcttctggagctcctgactggaagaaagcctgtggatcatacattaccaagaggacagcaaagtcttgtgacatgggcaactccacggctttgtgaagataaagttaggcaatgtgttgattcaagacttggagtagaatatcctcctaaatccgttgcaaagtttgcagctgttgctgcactctgtgtgcaatatgaagctgactttcgacccaacatgagcatcgtggtgaaggcgcttcagcccctgctgaatgcacgtgcatccaacaaccctggatgaatgaatgaatgactgccgttgcttttccctgacgagagtatctgaatcagacaacatgtagcattgaattcagataaatatagtgtttggcttaatacacttggccctagatgttcatcaggagataacctcttgcagtttctggatgttacctagtctttgtatccctaatggcatagactaaagggcctgctcgtttctgtcggaattcactaggaatcgttccagctgatcgaacctagtataaattagacaaataattcggctagtaatctctagtaatcgttctgggtgtctattccctaggaaccgaacaggccctaaactgtaacctattgttcggttgcgttccatctggtgttgtttacatccaccatccatgaagtcaagcagcatcctatttgaggaccccgt

SEQ ID NO: 20252 - DNA, 768 bp, Zea mays
  Clone ID: LIB3180-012-C6_FLI
gcgacacagcctaacctataccatcttaagcaattgatcaattgtcagcgaagggacacgctatatgacgcaatccaagcactggatattgtcttgagtcaccttctctcaattatgtaactcttttttggtccttctccaagaagttttggtgatgaggacattgcggtgggctagagtgctggagaggatattacccgagcttccgtccaactcaaatgggcctctcattgaacattggtttcgtacagtttattggctagagtatctcccgtgacccattcggttgccaactctcttaaacgtgtggtggtcattgtgtcatccgttctcttctttagaactctaatttcacctataaatgccttaggaaccggtgttgctctcgctggagtgttcctgtactcgcagttcaaaaagtcaaaaccaaaggctacggctgcatgaagacaactccctgatgaggtaacagactatagaatgatggagaatttggaactatcagtcgacgtggtgaagcagactggccttcacggtagcaaacacatgtagtttccccatgttgcgtcttaaaataaatgtgttctcttgtcagcttcttttgatgtgaaaagcttgtacgtaagtttcctcgacaaggtgtggtggaacacgtgaacaacgcagatatagcattcttagatttcaagagaatacaaattttggaatatacttccatgtcattgaaactgacagaatgctctcactattatatatattctttacgtt

SEQ ID NO: 20253 - DNA, 1014 bp, Zea mays
  Clone ID: LIB3180-012-D2_FLI
gccactggtggattgggagggcttggttcaccagatttgagtagtttgcttggtggtcttgctggcagtccaagaactggtgcttctggtggtttaggaggtttgggttcaccagatttggggaatatgcttggtggttcttctgatgtttctcttttcagtcagatgttgcaaaaccctgcaatgatgcagatgatgcagagcattatgtctgacccacagaccatgaaccagttgcttagcttcaacccaaatgcacgcaacctgatggaatcaaaccctcagatgagggaaatatttcaaaatccagaatttcttcgccagctgacatcgcctgagactttgcagcaattactcttatttcagcagtctttattaggacagcttggtcaacatcaacctaaccagggtagagacaattcaggcagtgccacaggtacgcctggaaaccctagccttgacaccttgatgagcatgctcagtgggcttggttcgggaggtggcataggtgttccaaatacttccaatgtgccaccggaggagctctatgccacacagcttactcagctccaagaaatgggtttcattgacactgcggagaacattcaagcactgctcgctaccgctgggaatgtacatgctgcggtggagcgtcttctcgggaaccttgggcagtagctaaaacgagcgagccacacaccgccagtaaatcttaaaatgtcgcgcatctgcaggagtgttcggcttaacgttcttcaagcccttgaatttgaagggggtggcgtccataatcccgaaaacaaaataatcaaaaagtcaggcagccattaacttttctcatacatggtggtcatgtctttgttttacagtgttgtatttgcaatttggattggtgtacatacatatcggtcggatattacctcatagaatgtatgtagttttgtgttttgaactgttgattcttgattcccaatcaatcaaatcaaactatctaatccaactgttggctttctc

SEQ ID NO: 20254 - DNA, 1107 bp, Zea mays
  Clone ID: LIB3180-012-D8_FLI
gggccgtatggtgatcacgacggcgggtcgtcctcatccggcccagccggagatgggcacggtggcagcggcggtaacggggagatggtagcccgccggccccgtgggcgcccagcgggctcgaagaataagccgaagcccccggtgatcatcacgcgggagagcgccaacacgctgcgcgcccacatcctggaggtggcgagcggctgcgacgtgttcgagagtgtctccacgtacgcgcgccggcggcagcgcggcgtctgcgtgctgagcggcagcggcgaggtcaccaacgtgacgctgcggcagccgtcggcgcccacgggcgccgttgtgacgctgcacgggaggttcgagatcctgtcgctgtcgggttccttccttccgccgccggctccccccggcgccaccagcctcaccatcttcctcgcgggggggcaggggcaggtggtcggtgggaacgtcgtgggtgcgctctacgccgccggccccgtcatcgtcatcgccgcgtccttcgccaacgtcgcctacgagcgcctccccctggaggaggaagaggcggctcagcaggcagcgccacccggcctccagatgcagccacccagcagtggtgtcgacggcgctggaggcatgggcggtgggccgttccctcccgacccgtcggctgccgggctgccgttcttcaacctgccgctcaacaacatgactggtggcggatcacagatcccgccgggcgccgacggccatggttgggccggtgcacggccaccattctgacaagtccatgatgcgccggtggtgtaattcatcaggtttgggagaacaggaaggtgtcaagaagaaagcataaaaaaagcaatgaacggcacaagggttaagggcagcttgcaaaaggttagcgcacgtatgcttgcaattgcaaggattatcttttctacttctatctcgatctctgtacaacttccgtagtgtttcgtttgctcggtctgtctgatttcgtgcttttagtttcttcttcctcctttttctttttcctcctctcgcgtgtgcctcttgaaacttgatatgtgttgtaaccttgtcttaatttttaatctggtgtttaat

SEQ ID NO: 20255 - DNA, 733 bp, Zea mays
  Clone ID: LIB3180-012-E5_FLI
tccaatccagatcagcaaagcggcagtgcgtagagaggatcgtcgaacagaacagcatgaagatggtcatcgttctcgtcgtgtgcctggctctgtcagctgccagcgcctctgcaatgcagatgccctgcccctgcgcggggctgcagggcttgtacggcgctggcgccggcctgacgacgatgatgggcgccggcgggctgtacccctacgcggagtacctgaggcagccgcagtgcagcccgctggcggcggcgccctactacgccgggtgtgggcagacgagcgccatgtaccagccgctccggcaacagtgctgccagcagcagatgaggatgatggacgtgcagtccgtcgcgcagcagctgcagatgatgatgcagcttgagcgtgccgctgccgccagcagcagcctgtacgagccagctctgatgcagcagcagcagcagctgctggcagcccagggtctcaaccccatggccatgatgatggcgcagaacatgccggccatgggtggactctaccagtaccagtaccagctgcccagctaccgcaccaacccctgtggcgtctccgctgccattccgccctactactgattcatgatatttgggaaatctcctctatccatccctctctatctatatatgtaataatgcagtaagacgacacacattatcatgtgtggtatgaccaataatatatgcatcataataaagttttggttttaaag

SEQ ID NO: 20256 - DNA, 2595 bp, Zea mays
  Clone ID: LIB3180-013-F6_FLI
gaccaaagcagaccagaatccgccctaccaatcgcctccccagatcggcggtccacccggaggcggcgatggcgtcgtcgcaggcgaacctcgacaagatgcagctccgccagagctaccgcaacgtctggcacaccgacatgacgaacgccatccaggccgacttcccctactgctgcctcgcgctgtggtggtgagccatccatcgaccctgcctagcagatctcaccgtcaccgtcttctgcgggctttgagtctcgaacccctagccttccgtagatccgaggacacttaatttgtcgctgtggctagggtttttggggattttggtctccaagggttccgcgttgtgcattgccgctttttcgaggagcatatcctgaactaaattgttgcagtataaaagctcattctacattatattatatacattttagattaggggaggctgtaggggctccatggtatccgaagcggtagggggggctcgagccccctgccccaccgctggatccgtccctgatcctgaatttgttattccatctgcgtttaaagtttattccgcggcagcaagacgactaatgaaagtacaaatgaatggatgatgatagcggaatccgctgggcctgccagattgtctctaggattttgacaagtgcacgtagcccatgtagtagctgccgcaaacccacaagaggatagatgtgagatgtcagtttcatcttcctccctggagccagttaatgtataaaccataaacaggaacatggaaatgatcccccacccctacatccctctgttagatgcaccaggttaattgggctaatgagcattgaaagagtgcatcatttttgtttctgatgggtcctgaccaataatgtcggctccctgccttcaagttcattccagagtatgcatagccaaaccatgtaaggatttcatttctgttccaaaaagaagggaccaagtctaataaaaaagatcactgtatttccattgtttctatgataggtctaatttggttccaccgttaccatgtggcgctagtctatcatgcgtgacaaagcttttaatgtgcttgcattggtagacatcgacataggtcaccatttggaaatgtgaacaattttacccgttcgttaatctgctgcattctcctgtttctgttcagtggaccttgcgtgtcgtacatgcttcgcaaaagggctctctacaatgacatgtcaagatatgtctgttgcgctggctacatgccatgcagtggaaagtgtggcgagagccggtgcccagagttctgtcttgcaactgaggtgttcctttgctttggcaattcagttgcatcaacccgcttcttgctgcaagatgaatttaacatacagaccactcagtgtgacaactgcatcattgtaacaccacttgcctcttaaatttcctgtctgatgcgattcaacgtcctgtggagggttcctgttctttcttccgatgtcacttggactgaatataaccttttatgcagggcttcatgttatgccttcaacaagttgcttgcatcttctctatagttgcagctattgttggtagcgaggagctttcagaggcttcccagatccttaattgtctgtctgatttggtctactggacggtttgtgcatgtatgcaggtatataactcattcttttcttctcgcaaccttactgatcagggctcttgtgaaccaaaccctcacatatccttcttgtggcattgaaataaatgcaaatgcagacgcagcacaaagtcgaaatggacaagagggatggaaagttcagcccacagcctatggcagtgcccccggtgcaacaaatgtcacgcatcgatcagcctatgccgcctcctgctggatatgcaccgcaaccagcatatgggcagccttatggtggctatccatctcctcctggccaaggttatccgcctcctcctggccaaggttatccgccagctggatactcgcagggcggtgcataccctccacccgctcaaggttacccacatggtggtggatatcctccacctggtcaaggttacccccagggtcagggtggtgcatatcctccgcctggttcttaccctccacaaggttcctaccccccagcagagggctcctacccagcacaaggttcctaccacccagcacagggctcctacccagcacaaggttcctattccccagcacagggctcctacccagcacaaggttcatatcccccacccccagcacaaggttcatatcccccagcacagggctcgtacccagcacaaggttcctaccccccacaggcttaccctggcaagtaaagatgacacgacaggtgaaccaaatatcgtgaacatgtaaacagtaggaccgctttagcgctataggttattttgataaaattcttgttactgttcagggtggcattcggtgaacaatatttctattttatacggtcaacatcttgtgttgatcatgtcgtgttgagtctatcctcttttttcttttcctgaataaggaatggcattcaactggaatgtatttgaatttggtgacaactcacgtggatattgttttggttc

SEQ ID NO: 20257 - DNA, 923 bp, Zea mays
  Clone ID: LIB3180-013-F9_FLI
ctcctcctggtggtgatttttcagaccctgttacctccgcaaccctcagtattgttcaggtcttctggggtttagataaaaagctcgctcaaaggaagcatttcccatctgtgaattggctcatttcctattcgaaatactccaaggcccttgagtctttttacgagaaatttgatccagatttcattgatattaggacaaaagcacgtgaggtgttgcagagggaggacgatctgaatgaaattgtgcagcttgttggtaaagatgcgctggcagaatctgacaagattacgctggagacagcaaagcttttgagagaagattatttggcacaaaatgcattcaccccatatgataagttctgcccattctacaaatctgtttggatgatgcgcaacattattcacttcaacacattggcaaatcaggctgtggagcgggcagctggtactgacggccataagataacatacagtgtcataaagcatcggttgggggatctattttatcgcctagtatcccaaaagtttgaggatcctgcagaaggcgaagaagctttggtcggcaagtttaagaaactgtatgacgaccttaccactgggttccgcaacctagaagatgaggcacggtgaactgctgtagattttgtgtaagacaataatggctgccaaatgttttataaggtacggaagttgtagattgagaccatgtatgagaattttccccaccgctactcatctctttgccaccactattttagtcatcagtgctggatgggcaccctatttatttcgacgtaccctttattgctagcattgtaataagcgatgggcatgcttgtagttgaataagtacaatgtccatgtattcaaacatcagcgtcatgtttatttgtttgtggaaaaaatatgttgcctttttgg

SEQ ID NO: 20258 - DNA, 732 bp, Zea mays
  Clone ID: LIB3180-013-H3_FLI
gctcgttcctgtcgcgcagccacgacctccacttccacatcttccccggcggcggcgcggtcagttgaaccatggcggactccaaggccacctcggcggtcaccctccgcacccgcaagttcatgaccaaccgcctcctggcccgcaagcaattcgtgcttgaggtgatccaccccggccgcgccaacgtctccaaggcggagttgaaggagaggcttgccaaggcgtacgaggtgaaggaccccaacaccatctttgtcttcaagttccgcacccacttcggaggaggaaagtccactggtttcggcctcatctacgacaacctcgaggctgccaagaagttcgagccgaaataccgcctcatcaggaatggtcttgctactaaggttgagaagtcccgcaagcaaatgaaggagcggaagaacagggccaagaagatccgtggtgtcaagaagaccaaagctggtgacgccaagaagaagtaaacgttcgtttacatttgtattactgttctgggctctgggtggtctagctgcaatgtcataattatggtcgtgttaggttttgttccacctttggcactgaagtgatttttttgtaattcctcggcactgaagtgaagttttgtcagaatattgcctcgtaacataattgcccggtccctgttctagttgtggcgcagtctggtttgttttgacatttgttttcaaggttcatccttatttgcattgc

SEQ ID NO: 20259 - DNA, 1748 bp, Zea mays
  Clone ID: LIB3180-014-A7_FLI
ccgcagcaacgtcggcaatccgagacgccggaggcctcctcctctcctaatacccgccccccctcgggaccgggagggagtccgccgcggtgcggatcgcggccacggccacggaaacaccggggcgcggctcatggaccgcatcgtcggcggcaagttcaagctcggccggaagatcggatgcggctccttcggcgagatctacctcgccacgcacgtggacacctacgagatcgtcgccgtgaagatcgagagcagcaagacgaagcatccacagctgttctatgaggcgaagctgtacaataccctccaaggaggaagtggcattgctaacgtcaagtggtgcggtgtggatggagaagagaatgttctcgtcattgatttgctgggtccgagtttggaggacctgttttgttattgtggccggaaattcacgctgaagactgtcctgatgttggctgaccagatgattacaagaatagagttcatgcattccaaagggtacttacacagagacatcaaacctgacaactttctgatgggtcttggtcggaaagcaaaccaggtatatataattgattttggccttgcaaaaagataccgtgattccactacgaatcgccatattccttacagagaaaataagagcttgactggtacagcgcgctatgcaagttgcaacacccaccttggaatagaacaaagccgcagagatgatttggtatctctaggctatgtgcttttgtattttctccgaggaagccttccttggcagggactaaaagccgcaacaaaggcacagaagtatgacaagatatgtgagaaaaagatatcgactcctatcgaggtcttatgcaaatcctgtccggtccagttttcatcttacttccattattgccattcattggcatttgatcagcgacctgactatgcatttgtgaagcgacttttccgtgacttgtttatcagccaagattatgagtttgattatgtcttcgactggacagttttgaaatacaaacaaggccacaaacaaaagcaaagtcctggggcacctattgctcgacctattcaagcacatggaccgaaacaagcaggtgtaaatggtgttattaatcataacgaagcccaggagcatgtagagacaagtcgtccaacagggcaagctgcatggtcgcaagacaaacaggcaaccaacaatgatcggaatcctgatgtgcggcataccgtgaaccttagacaagacatggctgctggaaaagcacagctgacaacatctgtggctcttcctagttcccagtggaaaaattatagcgattcaagacataaaggacaatttgatgctgttcaccacaatcagggtattgtaaacataactagctcatctaacagttggcttcctacattccagcacaatgccccaggaaaatgacagatcatatctggtggagcaaagaggaagtgctttgagagttagaggaggcccctgttcatctgagttggttcagagttaagcattgcacaatctgtagacttgatgtctcatgtattgttactgaggtggctcctgaagcactggtgcatttgatgatactattagctgataatatggaaggtttgctcgcggttgtgatgactcttgaatgcttgggcagtttgttggaccgctgcttaaatgcttctttgtagtagttctggatgccttgtaaattgcttacatgttaatatatgtatgggttgaacattgc

SEQ ID NO: 20260 - DNA, 1020 bp, Zea mays
  Clone ID: LIB3180-014-B9_FLI
catttattgagtcgccatggccaacaaatgagataagaactcaaccgttgaagccttcgctcatcatttctgcaagcaaggatgaatctgttaggctatggaatgtccatacagggatctgtatcttgatatttgctggagctggaggtcatcgcaatgaagtattgagtgttgacttccatcctagtgatattgaacgttttgcaagttgtggcatggacaacactgtgaaaatctggtcaatgaaagaattttggctatatgttgacaaatcatattcatggactgaccttccatcaaagtttccaacaaaatatgtccagtttccagtcttgattgctgcagtacactctaactatgttgattgtacaagatggcttggtgacttcatcctatcaaagagtgttgacaatgaaattgtgctttgggaaccgaagacaaaagaacagagtcctggggagggaagcatcgatatccttcagaagtatcctgtcccagaatgtgacatttggtttatcaaattttcatgtgattttcacttcaatcagttggcgataggcaaccgtgaaggcaaaatctacgtgtgggaagtacagtccagccctcctgtcctcattgctcggctgtataatcagcagtgtaaatcgccgataagacaaactgcagtgtccttcgatggaagcacaatccttggagctggtgaagacggcaccatctggcggtgggatgaagtggaccatccgagctccagaaactgaagaagtgttgccgctcaatgctggactgatggttacgctcggttggggttgtgatggttgaatccgttggcggaaagtgccacctggtgtttttttctagtcaaaatggttgatgttaacagaatattgaatgcttcgaatgttgaaagttgggatgcttgtgctggtactctgctccgcggacgagtgaacttagtttgttgcaactttgggaaccgttgtcatctgtttgttctgcatttctaaaaagagagcaaatttc

SEQ ID NO: 20261 - DNA, 1040 bp, Zea mays
  Clone ID: LIB3180-014-E11_FLI
cgcacgcaacgcaaaaacaagcacaaacacgcgcgatccgatctgggccggccaagcagccacccatccatggcgactagggtttggctcaccgccctcctgcttggtttcctcgtcgccgcctcccccttcaccggccgagttgctagagctgaatccgaggaagatgctgctgcagctgaggttgttgaaggggctgatctaggtattgtgggtgatgatacacaggtttccagtgatggacctttaagtcctgctcctggtgtagagacagtagttgtcttcccaaaaaatgctggcaaaattgtactagcaggtgaagaaactgaattactagttggtctgcaaaatgacggtgaatcaattttgaatgttgttgctgttcattcaactctccatcttccttttgaccacaatatgtatggccagaaccttactgttcagaatttcttcaattcatcagttcctgtttctgtgcaagcaaccttcccctacaagttcgttgtgagcaagttcttgcagcctggagcatatgatctggttggttacatagtgtatgagatcgaccagcacccttaccagaatgtattctacaatggcactatcgaggttgttgaggctggaggcttactcagtgttgagtctgtgttcctcatcacccttggatttgcacttcttggtctgtttggattgtgggcatatggccaggttcagcagctctcgaagaaaacaaagaaggcacccaaggtggagctcggaactggaacaactgatgccaacatcgatgagtggctggagggcacttcgtttgtgcagagaagcaaatccaagaagaagcagacctgaggctctccaggctagttaaatccttttgaggatctagaatgagacatttgagggtagcccttcacaagtgacttttgcagaaagatagatgcgtaaggaggtgctgaaaaccgtaaacatcttcgttgacattttcgaccttgtgtactttacatggaacaaaattttgttaaaagaaagtatatgctgttgcc

SEQ ID NO: 20262 - DNA, 809 bp, Zea mays
  Clone ID: LIB3180-015-B7_FLI
cgtcgcggctccactgggcgtgcgcgtcaccggcgggaggcgagggcaggcggtggtcgcgatggcgtccgccgacgctcgcttggcggggattgcctcctccatccgcgtcatccccgactttcccaagccagggatcatgttccaggacatcacgacactgctgctcgaccccaaggcgttccgtgacaccatcgacctcttcgttgagcggtacaaggaccaagggatcaccgtagttgctggtgtggaagctagagggttcatttttggtcctcctatcgctctagccatcggtgctaaatttgtacctttgaggaagccgaagaagttgccaggcgaggtgatctccgaagaatattctctggaatacggaactgacaagatagagatgcatgttggagctgtacaggccaacgatcgggctcttgtagtcgatgatcttattgccaccggtggaacactctgtgcagctgtcaaacttattgaacgtgttggagcaaaggttgttgagtgtgcttgcgtcattgaattggcagaactgaagggccgagacaaacttggggacagggcagtttttgttcttgtggaagcagatgcttgagcggaacttgggacttctcttctcagagagttagagttagcgctgttgatgctacctctctggaaacaacaaagtttcccatgttggctatattctggctgacacgtaataaagtttcattccaaattgtgatcccctgaatgatttgtcaatgtagacatgattgctggtccttgtatactgtggcttattattcacatcaatt

SEQ ID NO: 20263 - DNA, 1545 bp, Zea mays
  Clone ID: LIB3180-015-C1_FLI
ggcagtgacacagtggcattttactgcgcctgcgcctgtgcgcctgcgcctgtgcgcccaccagtcacaaggcccatatcctcctccgctccttcctctccgtctctcccctccagcattgcggtggagagggaagcaagaggtatcggagatagagagagaaagggcgaaaaacagaagggaacagcaacggagcagctgatcaggggctgacgcgcgcgacaatgctgctcaagagggtggcggcggacgacggctccggcgccggcgccggcgccggcgtagggaggccacggctcttcgccatgccaaggctgctggtcgggctcgaggcgcccaggtgcggcgcaccagactgcgcctcgccgatgacggcgcgcagcccgacgtcgccgctcgatctcaggcccttcgcctcgctgctccgctcgccgcgctcacccagaaccaggagctgggattcgcaccgccttggcctcggcggcctcgtcgacgacacgctcgccgaacccgtcgcatgcgccaggagccgcctgctcggcctcgggccccaagcgcggcagccgttcaagctgccgcaacgcctcgccaagcccctggccacccagccgagggactgctcccacgcatcctcggagctcgggaatgtggggaccgctgccggctgcaagccgctgccgtgcagcaggtcctacggggatgtgaagtctggtccagaggtcaccgtgcccggcggcgctccgcccggcgcgagcagccaccctgccgatgttggcaagttccccgcgccggggtccctgccggtgtccatcggcggcccgcgctggtacatcgggtccgtgtccgcgacggaggtggagcagtccgaggactacacctgcatcatcgcgcacggtcctaacccgaagaccactcgcatcttcggggactgcatcttggagccctgcactcctagtgtgtctgacggtgacggcatggatgccatggaagtcaaggaaggagcagagtcctactggttggtcaagtgcttcgatgccagcgagcctggagagttcttagactcctgcatctcttgctagaagaagctggatggcaatgacccctgcgtttatcgtggtgtgagggcattctgccgtgggaactggaggaatcaggaagtccttgctgagcaggaagacaacattccagctgtgtccttcagctcggctggctcatcatcttccttcaacgatgaagtagtcatggctgaaatggttgtggtggctgcaccagttgacgtccactaccctgaatctggcaaaccagggtagctgatcaataatgtcaattgtcgcagttttcatcttcgccgccatcattattttgctggttttgtaagttaagttccagcatttggtagcattgatcattttatgagaattgaggctccatctagaatttgctgagatgtgatctctcagcctttagaacggagagcttccatgccttaagcattgtaattttgaaccgaggctattggcaatgcaggttccccaattttcatcc

SEQ ID NO: 20264 - DNA, 2249 bp, Zea mays
  Clone ID: LIB3180-016-A3_FLI
ctccagctggccaccccatcctcgtcttctccaattccaaagtaagaaagccacacgcgaggccgaccgaggaagtccaatctcatggcgctctcctgcatgaggtgccccgcgggcgccggcgccgcctccgcccgacgcgccgcagcgcagccgttggccgcggaggctgcggtctccttcgccagatgccgcggcttcgggaggtccgccaccgctgcgacttccgcctggttttggcgcaaccatgccgttgcctcacagggagtgaaagctcccatggatgctgatgtcaagaatgctgtcatacctcctacctcaccaaaggtggaaagtggctctccttcagaaatcactctggatgaatttgaagacttgagcgctctatgcaagaatgatgattctactgttagcatcacagtagttggagcatctggtgaccttgccaagaagaagatatttcctgccctttttgctctctactatgaagattgccttcccaagcatttcaccatctttggctatgcacggagcaagatgacagatgctgaactgaggaacatggttagcaaaacactgacttgcagaatagataaaagggaaaattgtagcgagaaaatggaagagttcctcaaaagatgcttctatcattcaggccaatatgattcagaagagcatttcatagatctagacaagaagctaaagcaacatgagggttccagagtttctaaccgccttttctacttgtcaatacctcctaatatatttttggatgttgtaaaatgtgcaagcaaatcagcatcttcggtgaatggttggacacgagtaattgttgagaagcccttcggccgagactcagaatcctctgctgcattaacaagcggtctgaagcagtaccttgtagaggaccaaattttcaggattgaccattatttgggaaaagaactggtggagaatttgtctgtcctgcgcttctcaaatctcgtttttgagcctctctggtcaagacaatatataagaaatgtgcaacttatattctcagaagactttggtactgaaggacgtggaggatactttgatggctacggtattattcgagacataatgcagaatcatctcattcagatactagctttatttgctatggaaactcctattagtttggaagcagaggatataagaaatgagaaggttaaagttcttcgttccatgaagccgttgcagctggaagatgtggtcgtaggacagtataaaagtcacacaaaaggtggtaccacataccctgggtatactgatgataagacagtgcccaaggatagtgtgactccaacgtttgctgctgcggcgcttttcataaataatgccagatgggatggagttccctttcttatgaaagctgggaaagctttgcacacaaaacgagctgagattagggtacagttccgacatgttcctggaaatctctacaaggggagttttggcacagatcttgatagggccactaatgagcttgtgatacgtgtgcaaccggatgaagcaatttacctaaagattaacaacaagattcctggtctcggtatgcgactagataggagtaacttgaatctccattatgccgcaaggtactcaaaggagatacctgatgcttacgagagactcctgcttgatgccatcgaaggagagcgcaggcttttcatccgctcagatgagttggatgctgcatggtcactcttcacacccctcctgaaggagctggaagagaagcggatagctcctgagctctacccatatggaagccgtggacctgtcggggcccactatctcgccgccaagtacaacgtaagatggggtgacttgagtgcggagcactacaaggcatgaaacgaagatggccatatctttgtgatattcttgcttttccatttctataagtttgcacgccctggcagtgagatagatttaagagagaaaaaaagatgagaataaggcgggcagttaactaggttggaaggcatgtatccattactagactgaatagctttgttggcataattgcagctgttagggctagtttgcaaccccgtgtttccaaagaattttcattttcccaaagaaaattagtttattttccctttggaaaatgagaatctcttgggaaaattgagttgccaaacgcccttaaaaatatgtttctaggaatcagtttatttttcacaggaacaataaaggaaacggaaaaaatttgccgc

SEQ ID NO: 20265 - DNA, 1657 bp, Zea mays
  Clone ID: LIB3180-016-C3_FLI
cttcgccaaactcctgctcggcgaggacatgtccggcagcggcaagggcgtctgcaccgcgctcgccatctccaacgccatcaccaacctctccgccaccgtgttcggcgagctgtggaggctggagccgctcgcgaaggcgaggaaggcgatgtggacgcgggagatggagtggttgctctccgtctccgactccatcgtcgagctcaccccctccatccaggagctccccgaaggcggcggccagttcgaggtcatggtcccgcgcccgcgcaccgacctctacatgaacctccccgcgctcaagaaactcgacgccatgctcctcgccatgattgacgggttcaaggggacggagttctggtacgtggacaggggggttatggtcgaagacagcggggggccattcccgtcctcctcctcgtcatcgtcttgtggccggccgtcggtgcggcaggaggagaagtggtggttgccctgcccacgagtgccacccaaggggctgtccgaggattcgaggaggaagctgcagcaaagcagggattgtgcaaaccagatactgaaagcagccatggcgattaacagcgatgtgctcgcagagatggaaatccccgaaatgtacctggagacactgcccaagagtggtaaatcttgcttgggtgagataatttaccgatacataacagctgagcagttctcaccagaatgtctactggattgcttggacctatcatcggaacaccacacactcgaagtggcaaacagaatagaagctgccatccatgtttggaaactgaaaggccaaaaaaattcgacacctcaagccagatcaaagaaatcttggggtggaaaagtgaagggtcttgtcggagataaggaaaagagccacactttgtctgaaagagctaatggtctattgcagagcctaagattgagatatcctggtctgccacaaacctcccttgacatgaacaagatccagtataacaaggatgttgggcagtccatacttgaaagttactcaagggttctggagagcttggcatttaacataattgcaagaattgatgatgtgatttatgttgatgatgctacaaagaaatctgctgctgccgagtctgtttcgatcttcaatcgtggcaccggtgtgccaattcagaagaggatctctctaagcccattctctattcagaatacgccatatgcctctccattcgcaacacccactttctgctcctccaccccagttacatgcagccctggaagagtacagcccccgttaaacaaaaccaatctaggaaggccagaaatcaaggtcgagaagcttttttctggtgatctagagaaggtctggacatatgctggaaacctgagcgctaggaaagacgctggcgatgctcccgagagagactgatgggcgatggaggaaggtagacttgttatggaaacattatcgctatttagcagcgtactcgttcgtgtttatactgcaaggctgggttcatcagcaagtgactgaattcctcctcctcctcctgctgctgctgctgctgctttttgtcgctgaaggtgttggtctgctgcctgttagtttttgtatatgcatgtcaatgaatttgatctggccctctttaatgctcactactattgtactgag

SEQ ID NO: 20266 - DNA, 1898 bp, Zea mays
  Clone ID: LIB3180-016-C8_FLI
gtctgattgtgattgcggcagcaccgccgaccacgagcccgccgaaaggctcctccgcctgccgttccagggtgcactgccgccattgctcatctccccgtggtgcggaggtccacccgggcgccaattggtctcctctttcgttggcagactgagtggcatccaatcctgaatcaatgaggggctggggtttgctcgtgttatcgctacatgttctttcatgcctggttagtggcgttgcttctggtcgaacaagctcttatgtgcgcacagagtttccatctacagatatacctctagaaagtgaatggtttgctattccaaagggatacaatgctccacagcaggttcatatcactcaaggtgattatgatggaaaggcagttatagtatcttgggttactccagaagaacctgggccaagtgaagtattttatggcaaggagaagctatatgaccagaaagcagaaggaacaacaacaaactatacgttttacgattacaaatctggatacatacaccattgccttgtcgatggccttgagtataacactaaatattattacaagattggaagcggaaattcagctcgagaattctggtttgaaacgcctccagcaattgatccagatgcatcatacacatttggcatcataggtgatctggggcaaacatttaattctctctcaactcttcaacattatgagaaaactggaggtcaaactgttctatttgttggggatttgtcgtatgctgatagatatgaacataatgatggcattcgttgggattcctggggtcgattcgttgagcacagtactgcataccagccatggatttggaatactggaaaccatgaaatagagtacaggcctgatctgggagaaacttctgtattcaagccatatttgcataggtacatgactccatatttagcatcaaagagcagttctcctatgtggtatgctgtcaggcgtgcatctgctcacatcatcgtgttgtctagctactctccatttgtaaaatacactcctcaatggctgtggctgaagaacgaattcaagcgcgtggacagggaaaagacaccctggcttatcgttctcatgcattctcccatgtacaacagcaacgaggcacattacatggagggtgagagtatgagggctgctttcgagaaatggtttgtgaagtacaaggttgacttggtgtttgcagggcacgttcatgcttatgagagatcataccgcatttctaatgtcaactacaacataacgtcgggaaatcggtatccagtgccggacaaatctgctcccgtttacataacggtcggtgatggaggcaaccaggaaggacttgcttcaaggttttataacccccagccggattactcagcgttcagggaggccagctatggtcactcagttttacagctgaaaaacaggacccatgctatctaccagtggaatagaaacgatgatgggaatcctgttccagcagacaccgtaatgttccataaccaatattggacgagcagcacgcgccgcaggaggctgaagaagaaccatctccatctcgaggaccttgaggatttgatctccctattatagaaaaccgggttcgcaggacgcatgaactgtgtgtgggggaataatcgcaggttagcactgttgctagtgtgcccgcctctcttggaatggaagcagcagagccagctatcagactggcagtgaccaccacctcctcagctacctggttgcatgccacagatctgaaattctgaaatgctgtgactgtgactgtgaggtatgaaaaaacagtgtaaataacgcggttgcctccgtacatgtgtgacattttatacacgtgcaagaaagcatcggtgtccaccgttgtccgtg

SEQ ID NO: 20267 - DNA, 2296 bp, Zea mays
  Clone ID: LIB3180-016-D2_FLI
caaaatccgaaacggttcgaacgatcagaacgattcagcttcagctcctgaatccagcagcaatggatcgctcccgctccaagcgcggctaccactacgaccaggactccccgccgccccgctccaagcagcgcttcgaccgccgcagcggtggcggccagaatgctaactcgagctatcaccgccgcggccccctcggcggcggcggctccgaccgccgcgggttcctgccccctgcccccgcgccgcccccgcccccgcccccaccgccgcttcctccctcgtcggccacggcgggtggcggcgctggtcccaccaccaccaccacctccttccgcatcctgtgccccgagtgcaaggcctacggcttcccacccggcttcgttgccaaggtccgggacgacagcggcgcgcttgtcactgtgcacccgcccttcgcgggcgactacgtccgggtcatcgagacggtggacggcgcgaggcgcgaggcagacggccgcccgcccatgttctccccggcccaagaggcccttctcatggtgcaccgccggattctcgagaccgacgctgacgacggcgacgaggatggcgagtatgggcccaggggcaaggactccagggacagggggaagaccaccacacgactcatcgtgcccaagatgcacgtcggatgcttgctcggcaaaggtgggaagatcatagagcaaatgaggatggagaccaagacgcacattaggatcctgccgcgtgaccagcacactccgcgctgcgtttccttgtccgaggaggttgtacaggttgttggagatggaaattgtgttaagaaggctgtagcaataatcactgatcgcctaaaggaaagcttacaccgtgaccgtggtcccttccgtgggcgaatgaattcaccagagcctcgaatttctcaggaagatgattatttgggtgtttcgcagatgcctgcatacgaggaatctctgggacgatctgatcagattaggaacaacactagcatggagccaccaggatatgagtttgattcaaatgatggcaaggtgattgaacatccagatatcctgtacgatgacataatttttcgaattctatgcccaaatgacaaggttgacaatttagttgcaacaaatgatggaatactggagatgctacaggctgatgttggtgttgatgttagactatctgatattattgctggttctgatgaaagggtagtaatcatcacatctagagagggaccagaccatgagcttttcccagctcaggaagcagtgctgcacattcaaactcatattgtagacctcggcccagacaaggataacattatcacaacaagactacttgtaccttcaagtgaaattgcttgctttgatggaagggaggggtcattatctgatatacagcgacagactagtgcaaacgtgcagatattaccaaaagaagatcttccattatgcgctttagagtcagatgaactcatacagattgttggagagattagtgctgctcggaatgctctgatacaagtaacaacaaaattaaggagttttctataccgtgagatgtctggtcctattcaagttggcaatattaatgtacatggagccatttctccagtagcaggctcacctggaggacccaacctcggaaatgatatgccaatgagtgcttatcaccaagcatcacaactggcaacttcatggcattcaaaagatagtggaggcagtgcaagtggctcatttgatcaaggcagcaacattattgatgagatcagacaaggtgctacaaaaagatttgccgttcctctagtaactaggagcacactagaagttgtcataccaaatagtgctgttgcaagcctcaccatgagagctggtagcaagcttgctcaaataagcgagatctctggtgctactgtaacgctagctgaggacagacctgacatcttagagaaagttgttcgaatatctggtacccctgagcaggctagcaaagctgagaatttgctgcagggatttattctaagcattccagatgacattccttcaggctagttgaagacactctgcatgtcatagttgttagttcgtaaaattcctgtgtatattcgaggtagaatatgctgatgtcatgtgattatttgtttaattgagcagcatgtattcatgtgtggatacatgctgttttccttgtagccgttaactggcttacgggggtgtaagattagcatgtgaatttacagattgattcaacattcaattctcatgtccatatgtgaccgctg
